United States Patent Application Publication US 2024/0066114 A1 - sequence listing, part 17

SEQ ID NO: 21672 - RNA, 6058 nt, Artificial Sequence
  SARS-CoV-2__MT791943.1__non-structural protein 3 (NSP3) mRNA gc
aggagaaagcuuaccauggcccccaccaaggugaccuucggcgacgacacggucaucgaggugcagggguacaagagcgugaacaucaccuucgagcuggacgagcgcaucgacaagguccucaacgagaagugcuccgccuacaccguggagcugggcaccgaggugaacgaguucgcgugcgucguggccgacgccgugaucaagacgcugcagccggucagcgagcuccugaccccccuggggaucgaccucgacgagugguccauggccaccuacuaccuguucgacgagagcggcgaguucaagcuggccucccacauguacugcagcuucuacccccccgacgaggacgaggaggagggggacugcgaggaggaggaguucgagccguccacccaguacgaguacggcacggaggacgacuaccagggcaagccccucgaguucggggcgaccagcgccgcccugcagcccgaggaggagcaggaggaggacuggcuggacgacgacucccagcagaccgugggccagcaggacgggagcgaggacaaccagaccacgaccauccagaccaucguggagguccagccccagcucgagauggagcugaccccgguggugcagacgaucgaggucaacuccuucagcggcuaccugaagcucaccgacaacguguacaucaagaacgccgacaucguggaggaggcgaagaaggucaagcccaccgugguggucaacgccgccaacguguaccugaagcacgggggcggcguggccggggcccugaacaaggcgaccaacaacgccaugcaggucgaguccgacgacuacaucgccacgaacggcccccucaagguggggggcagcugcguccuguccggccacaaccuggccaagcacugccuccacgugguggggcccaacgucaacaagggcgaggacauccagcugcugaagagcgccuacgagaacuucaaccagcacgaggugcuccuggcgccgcugcucuccgccgggaucuucggcgccgaccccauccacagccugcgggugugcgucgacaccgugcgcaccaacguguaccuggccgucuucgacaagaaccucuacgacaagcugguguccagcuuccuggagaugaagagcgagaagcagguggagcagaagaucgccgagauccccaaggaggaggucaagcccuucaucaccgaguccaagccgagcguggagcagcggaagcaggacgacaagaagaucaaggcgugcguggaggaggucacgaccacccucgaggagaccaaguuccugacggagaaccugcuccuguacaucgacaucaacgggaaccugcaccccgacuccgccacccucgugagcgacaucgacaucaccuuccugaagaaggacgcccccuacaucgugggcgacgucgugcaggagggcgugcugaccgccgucgugauccccacgaagaaggccgggggcaccaccgagaugcucgcgaaggcccugcgcaaggugccgaccgacaacuacaucacgaccuaccccgggcagggccugaacggguacaccgucgaggaggccaagaccgugcucaagaagugcaaguccgccuucuacauccugcccagcaucaucuccaacgagaagcaggagauccugggcaccgugagcuggaaccuccgggagaugcuggcgcacgccgaggagacgcgcaagcugaugcccgucugcguggagaccaaggccaucguguccaccauccagcggaaguacaagggcaucaagauccaggagggggucguggacuacggcgcccgcuucuacuucuacaccagcaagacgaccguggccucccugaucaacacccucaacgaccugaacgagacccuggucacgaugccgcucggguacgugacccacggccugaaccuggaggaggcggcccgguacaugcgcagccucaaggugcccgccaccgucuccgugagcucccccgacgccgugaccgccuacaacggguaccugacgagcuccagcaagacccccgaggagcacuucaucgagaccaucucccuggcgggcagcuacaaggacuggagcuacuccggccagagcacccagcucgggaucgaguuccugaagcggggcgacaaguccgucuacuacacgagcaacccgaccaccuuccaccuggacggggaggugaucaccuucgacaaccucaagacgcugcugucccuccgcgaggugcggaccaucaaggucuucaccaccguggacaacaucaaccugcacacgcagguggucgacaugagcaugaccuacggccagcaguucggccccaccuaccuggacggggccgacgugaccaagaucaagccccacaacucccacgagggcaagacguucuacgugcucccgaacgacgacacccugcgcgucgaggccuucgaguacuaccacaccaccgaccccagcuuccuggggcgguacauguccgcccucaaccacacgaagaaguggaaguacccccaggugaacggccugaccagcaucaagugggccgacaacaacugcuaccuggcgaccgcccuccugacccugcagcagaucgagcucaaguucaaccccccggcccugcaggacgccuacuaccgcgcgcgggccggggaggccgccaacuucugcgcccugauccucgcguacugcaacaagacggugggcgagcugggcgacguccgcgagaccauguccuaccuguuccagcacgccaaccucgacagcugcaagcgggugcugaacgucgugugcaagaccugcgggcagcagcagaccacccugaagggcguggaggccgucauguacauggggacgcucuccuacgagcaguucaagaagggcgugcagauccccugcaccugcgggaagcaggccaccaaguaccuggugcagcaggagagccccuucgucaugauguccgcccccccggcgcaguacgagcugaagcacggcaccuucacgugcgccagcgaguacaccggcaacuaccagugcgggcacuacaagcacaucaccuccaaggagacccucuacugcaucgacggcgcccugcugacgaagagcagcgaguacaaggggcccaucaccgacguguucuacaaggagaacuccuacaccaccacgaucaagcccgugaccuacaagcucgacggcgucgugugcaccgagaucgaccccaagcuggacaacuacuacaagaaggacaacagcuacuucaccgagcagccgaucgaccuggugcccaaccagcccuaccccaacgccuccuucgacaacuucaaguucgucugcgacaacaucaaguucgccgacgaccucaaccagcugacgggguacaagaagccggcgagccgcgagcugaaggugaccuucuuccccgaccucaacggcgacguggucgccaucgacuacaagcacuacacccccuccuucaagaagggcgccaagcugcugcacaagcccaucguguggcacgugaacaacgccaccaacaaggcgacguacaagccgaacaccuggugcauccggugccucuggagcaccaagcccgucgagaccuccaacagcuucgacgugcugaaguccgaggacgcccaggggauggacaaccuggccugcgaggaccucaagcccgugagcgaggaggucguggagaaccccacgauccagaaggacgugcuggagugcaacgucaagaccaccgagguggugggcgacaucauccugaagccggccaacaacucccucaagaucaccgaggaggucgggcacacggaccugauggccgcguacguggacaacagcucccugaccaucaagaagcccaacgagcucagccgcgugcugggccugaagacccucgccacccacgggcuggccgccgucaacuccgugcccugggacacgaucgccaacuacgcgaagccguuccugaacaagguggucagcaccaccaccaacaucgugacgcgcugccucaaccgggugugcaccaacuacaugcccuacuucuucacccugcugcuccagcugugcaccuucacccgcuccacgaacagccggaucaaggccuccaugcccaccaccaucgccaagaacaccgucaagagcgugggcaaguucugccuggaggccagcuucaacuaccucaagucccccaacuucagcaagcugaucaacaucaucaucugguuccugcuccuguccgugugccugggcuuccucaucuacagcacggccgcgcuggggguccugauguccaaccucggcaugccgagcuacugcaccggguaccgcgagggcuaccugaacuccaccaacgugaccaucgccacguacugcaccggcagcauccccugcuccgugugccugagcgggcucgacucccuggacaccuaccccagccuggagaccauccagaucacgaucuccagcuucaagugggaccucaccgccuucggccuggucgccgagugguuccuggccuacauccucuucacccgguucuucuacgugcuggggcuggcggccaucaugcagcucuucuucuccuacuucgccgugcacuucaucagcaacuccuggcugauguggcugaucaucaaccugguccagauggcccccaucagcgcgauggugcgcauguacaucuucuucgccuccuucuacuacguguggaagagcuacguccacgugguggacggcugcaacagcuccaccugcaugaugugcuacaagcggaaccgcgccacgcgggucgagugcaccaccaucgugaacgggguccgccggagcuucuacguguacgccaacggcggcaagggguucugcaagcuccacaacuggaacugcgugaacugcgacaccuucugcgccggcuccacguucaucagcgacgaggucgcgcgcgaccugucccugcaguucaagcggccgaucaaccccaccgaccagagcuccuacaucguggacagcgugaccgucaagaacggguccauccaccucuacuucgacaaggccggccagaagaccuacgagcgccacagccugucccacuucgugaaccuggacaaccuccgggccaacaacacgaaggggagccugcccaucaacgugaucgucuucgacggcaaguccaagugcgaggagagcuccgccaagagcgccuccguguacuacagccagcugaugugccagcccauccuccugcuggaccaggcgcucguguccgacgucggcgacagcgccgagguggccgugaagauguucgacgccuacgucaacaccuucagcuccaccuucaacgugccgauggagaagcugaagacccugguggccacggcggaggccgagcucgccaagaacgucagccuggacaacgugcuguccaccuucaucagcgccgcgcgccagggguucguggacuccgacgucgagaccaaggacgugguggagugccucaagcugagccaccaguccgacaucgaggucaccggcgacagcugcaacaacuacaugcugacguacaacaagguggagaacaugaccccccgggaccucggggccugcaucgacugcuccgcccgccacaucaacgcccagguggccaagagccacaacaucgcgcugaucuggaacgucaaggacuucaugucccugagcgagcagcuccggaagcagauccgcuccgccgccaagaagaacaaccugcccuucaagcugaccugcgccaccacgcgccagguggugaacgucgugaccaccaagaucgcccucaagggcgggugaggacuaguuauaagacugacuagcccgaugggccucccaacgggcccuccuccccuccuugcaccgagauuaauaaaaaaaaaaaaaaaaaaaaaaaaaaaaaaaaaaaaaaaaaaaaaaaaaaaaaaaaaaaaaaaaugcaucccccccccccccccccccccccccccccccaaaggcucuuuucagagccaccagaauu

SEQ ID NO: 21673 - RNA, 6058 nt, Artificial Sequence
  SARS-CoV-2__MT791948.1__non-structural protein 3 (NSP3) mRNA gc
aggagaaagcuuaccauggcccccaccaaggugaccuucggcgacgacacggucaucgaggugcagggguacaagagcgugaacaucaccuucgagcuggacgagcgcaucgacaagguccucaacgagaagugcuccgccuacaccguggagcugggcaccgaggugaacgaguucgcgugcgucguggccgacgccgugaucaagacgcugcagccggucagcgagcuccugaccccccuggggaucgaccucgacgagugguccauggccaccuacuaccuguucgacgagagcggcgaguucaagcuggccucccacauguacugcagcuucuacccccccgacgaggacgaggaggagggggacugcgaggaggaggaguucgagccguccacccaguacgaguacggcacggaggacgacuaccagggcaagccccucgaguucggggcgaccagcgccgcccugcagcccgaggaggagcaggaggaggacuggcuggacgacgacucccagcagaccgugggccagcaggacgggagcgaggacaaccagaccacgaccauccagaccaucguggagguccagccccagcucgagauggagcugaccccgguggugcagacgaucgaggucaacuccuucagcggcuaccugaagcucaccgacaacguguacaucaagaacgccgacaucguggaggaggcgaagaaggucaagcccaccgugguggucaacgccgccaacguguaccugaagcacgggggcggcguggccggggcccugaacaaggcgaccaacaacgccaugcaggucgaguccgacgacuacaucgccacgaacggcccccucaagguggggggcagcugcguccuguccggccacaaccuggccaagcacugccuccacgugguggggcccaacgucaacaagggcgaggacauccagcugcugaagagcgccuacgagaacuucaaccagcacgaggugcuccuggcgccgcugcucuccgccgggaucuucggcgccgaccccauccacagccugcgggugugcgucgacaccgugcgcaccaacguguaccuggccgucuucgacaagaaccucuacgacaagcugguguccagcuuccuggagaugaagagcgagaagcagguggagcagaagaucgccgagauccccaaggaggaggucaagcccuucaucaccgaguccaagccgagcguggagcagcggaagcaggacgacaagaagaucaaggcgugcguggaggaggucacgaccacccucgaggagaccaaguuccugacggagaaccugcuccuguacaucgacaucaacgggaaccugcaccccgacuccgccacccucgugagcgacaucgacaucaccuuccugaagaaggacgcccccuacaucgugggcgacgucgugcaggagggcgugcugaccgccgucgugauccccacgaagaaggccgggggcaccaccgagaugcucgcgaaggcccugcgcaaggugccgaccgacaacuacaucacgaccuaccccgggcagggccugaacggguacaccgucgaggaggccaagaccgugcucaagaagugcaaguccgccuucuacauccugcccagcaucaucuccaacgagaagcaggagauccugggcaccgugagcuggaaccuccgggagaugcuggcgcacgccgaggagacgcgcaagcugaugcccgucugcguggagaccaaggccaucguguccaccauccagcggaaguacaagggcaucaagauccaggagggggucguggacuacggcgcccgcuucuacuucuacaccagcaagacgaccguggccucccugaucaacacccucaacgaccugaacgagacccuggucacgaugccgcucggguacgugacccacggccugaaccuggaggaggcggcccgguacaugcgcagccucaaggugcccgccaccgucuccgugagcucccccgacgccgugaccgccuacaacggguaccugacgagcuccagcaagacccccgaggagcacuucaucgagaccaucucccuggcgggcagcuacaaggacuggagcuacuccggccagagcacccagcucgggaucgaguuccugaagcggggcgacaaguccgucuacuacacgagcaacccgaccaccuuccaccuggacggggaggugaucaccuucgacaaccucaagacgcugcugucccuccgcgaggugcggaccaucaaggucuucaccaccguggacaacaucaaccugcacacgcagguggucgacaugagcaugaccuacggccagcaguucggccccaccuaccuggacggggccgacgugaccaagaucaagccccacaacucccacgagggcaagacguucuacgugcucccgaacgacgacacccugcgcgucgaggccuucgaguacuaccacaccaccgaccccagcuuccuggggcgguacauguccgcccucaaccacacgaagaaguggaaguacccccaggugaacggccugaccagcaucaagugggccgacaacaacugcuaccuggcgaccgcccuccugacccugcagcagaucgagcucaaguucaaccccccggcccugcaggacgccuacuaccgcgcgcgggccggggaggccgccaacuucugcgcccugauccucgcguacugcaacaagacggugggcgagcugggcgacguccgcgagaccauguccuaccuguuccagcacgccaaccucgacagcugcaagcgggugcugaacgucgugugcaagaccugcgggcagcagcagaccacccugaagggcguggaggccgucauguacauggggacgcucuccuacgagcaguucaagaagggcgugcagauccccugcaccugcgggaagcaggccaccaaguaccuggugcagcaggagagccccuucgucaugauguccgcccccccggcgcaguacgagcugaagcacggcaccuucacgugcgccagcgaguacaccggcaacuaccagugcgggcacuacaagcacaucaccuccaaggagacccucuacugcaucgacggcgcccugcugacgaagagcagcgaguacaaggggcccaucaccgacguguucuacaaggagaacuccuacaccaccacgaucaagcccgugaccuacaagcucgacggcgucgugugcaccgagaucgaccccaagcuggacaacuacuacaagaaggacaacagcuacuucaccgagcagccgaucgaccuggugcccaaccagcccuaccccaacgccuccuucgacaacuucaaguucgucugcgacaacaucaaguucgccgacgaccucaaccagcugacgggguacaagaagccggcgagccgcgagcugaaggugaccuucuuccccgaccucaacggcgacguggucgccaucgacuacaagcacuacacccccuccuucaagaagggcgccaagcugcugcacaagcccaucguguggcacgugaacaacgccaccaacaaggcgacguacaagccgaacaccuggugcauccggugccucuggagcaccaagcccgucgagaccuccaacagcuucgacgugcugaaguccgaggacgcccaggggauggacaaccuggccugcgaggaccucaagcccgugagcgaggaggucguggagaaccccacgauccagaaggacgugcuggagugcaacgucaagaccaccgagguggugggcgacaucauccugaagccggccaacaacucccucaagaucaccgaggaggucggguacacggaccugauggccgcguacguggacaacagcucccugaccaucaagaagcccaacgagcucagccgcgugcugggccugaagacccucgccacccacgggcuggccgccgucaacuccgugcccugggacacgaucgccaacuacgcgaagccguuccugaacaagguggucagcaccaccaccaacaucgugacgcgcugccucaaccgggugugcaccaacuacaugcccuacuucuucacccugcugcuccagcugugcaccuucacccgcuccacgaacagccggaucaaggccuccaugcccaccaccaucgccaagaacaccgucaagagcgugggcaaguucugccuggaggccagcuucaacuaccucaagucccccaacuucagcaagcugaucaacaucaucaucugguuccugcuccuguccgugugccugggcagccucaucuacuccacggccgcgcuggggguccugaugagcaaccucggcaugccguccuacugcaccggguaccgcgagggcuaccugaacagcaccaacgugaccaucgccacguacugcaccggcuccauccccugcagcgugugccuguccgggcucgacagccuggacaccuaccccucccuggagaccauccagaucacgaucagcuccuucaagugggaccucaccgccuucggccuggucgccgagugguuccuggccuacauccucuucacccgguucuucuacgugcuggggcuggcggccaucaugcagcucuucuucagcuacuucgccgugcacuucaucuccaacagcuggcugauguggcugaucaucaaccugguccagauggcccccaucuccgcgauggugcgcauguacaucuucuucgccagcuucuacuacguguggaagagcuacguccacgugguggacggcugcaacuccagcaccugcaugaugugcuacaagcggaaccgcgccacgcgggucgagugcaccaccaucgugaacgggguccgccgguccuucuacguguacgccaacggcggcaagggguucugcaagcuccacaacuggaacugcgugaacugcgacaccuucugcgccggcagcacguucaucuccgacgaggucgcgcgcgaccugagccugcaguucaagcggccgaucaaccccaccgaccaguccagcuacaucguggacuccgugaccgucaagaacgggagcauccaccucuacuucgacaaggccggccagaagaccuacgagcgccacucccugagccacuucgugaaccuggacaaccuccgggccaacaacacgaaggggucccugcccaucaacgugaucgucuucgacggcaagagcaagugcgaggaguccagcgccaaguccgccagcguguacuacucccagcugaugugccagcccauccuccugcuggaccaggcgcucgugagcgacgucggcgacagcgccgagguggccgugaagauguucgacgccuacgucaacaccuucuccagcaccuucaacgugccgauggagaagcugaagacccugguggccacggcggaggccgagcucgccaagaacgucucccuggacaacgugcugagcaccuucaucuccgccgcgcgccagggguucguggacagcgacgucgagaccaaggacgugguggagugccucaagcugucccaccagagcgacaucgaggucaccggcgacuccugcaacaacuacaugcugacguacaacaagguggagaacaugaccccccgggaccucggggccugcaucgacugcagcgcccgccacaucaacgcccagguggccaagucccacaacaucgcgcugaucuggaacgucaaggacuucaugagccuguccgagcagcuccggaagcagauccgcagcgccgccaagaagaacaaccugcccuucaagcugaccugcgccaccacgcgccagguggugaacgucgugaccaccaagaucgcccucaagggcgggugaggacuaguuauaagacugacuagcccgaugggccucccaacgggcccuccuccccuccuugcaccgagauuaauaaaaaaaaaaaaaaaaaaaaaaaaaaaaaaaaaaaaaaaaaaaaaaaaaaaaaaaaaaaaaaaaugcaucccccccccccccccccccccccccccccccaaaggcucuuuucagagccaccagaauu

SEQ ID NO: 21674 - RNA, 6058 nt, Artificial Sequence
  SARS-CoV-2__MT791953.1__non-structural protein 3 (NSP3) mRNA gc
aggagaaagcuuaccauggcccccaccaaggugaccuucggcgacgacacggucaucgaggugcagggguacaagagcgugaacaucaccuucgagcuggacgagcgcaucgacaagguccucaacgagaagugcuccgccuacaccguggagcugggcaccgaggugaacgaguucgcgugcgucguggccgacgccgugaucaagacgcugcagccggucagcgagcuccugaccccccuggggaucgaccucgacgagugguccauggccaccuacuaccuguucgacgagagcggcgaguucaagcuggccucccacauguacugcagcuucuacccccccgacgaggacgaggaggagggggacugcgaggaggaggaguucgagccguccacccaguacgaguacggcacggaggacgacuaccagggcaagccccucgaguucggggcgaccagcgccgcccugcagcccgaggaggagcaggaggaggacuggcuggacgacgacucccagcagaccgugggccagcaggacgggagcgaggacaaccagaccacgaccauccagaccaucguggagguccagccccagcucgagauggaguucaccccgguggugcagacgaucgaggucaacuccuucagcggcuaccugaagcugaccgacaacguguacaucaagaacgccgacaucguggaggaggcgaagaaggucaagcccaccgugguggucaacgccgccaacguguaccucaagcacgggggcggcguggccggggcccugaacaaggcgaccaacaacgccaugcaggucgaguccgacgacuacaucgccacgaacggcccccugaagguggggggcagcugcguccucuccggccacaaccuggccaagcacugccugcacgugguggggcccaacgucaacaagggcgaggacauccagcuccugaagagcgccuacgagaacuucaaccagcacgaggugcugcucgcgccgcugcuguccgccgggaucuucggcgccgaccccauccacagccuccgggugugcgucgacaccgugcgcaccaacguguaccuggccgucuucgacaagaaccuguacgacaagcucguguccagcuuccuggagaugaagagcgagaagcagguggagcagaagaucgccgagauccccaaggaggaggucaagcccuucaucaccgaguccaagccgagcguggagcagcggaagcaggacgacaagaagaucaaggcgugcguggaggaggucacgaccacccuggaggagaccaaguuccucacggagaaccugcugcucuacaucgacaucaacgggaaccugcaccccgacuccgccacccuggugagcgacaucgacaucaccuuccucaagaaggacgcccccuacaucguguccgacgucgugcaggagggcgugcugaccgccgucgugauccccacgaagaaggccggcgggaccaccgagaugcuggcgaaggcccuccgcaaggugccgaccgacaacuacaucacgaccuaccccggccaggggcugaacggcuacaccgucgaggaggccaagaccgugcugaagaagugcaagagcgccuucuacauccuccccuccaucaucagcaacgagaagcaggagauccuggggaccguguccuggaaccugcgggagaugcucgcgcacgccgaggagacgcgcaagcugaugcccgucugcguggagaccaaggccaucgugagcaccauccagcggaaguacaagggcaucaagauccaggagggcgucguggacuacggggcccgcuucuacuucuacaccuccaagacgaccguggccagccugaucaacacccugaacgaccucaacgagacccuggucacgaugccgcugggcuacgugacccacgggcucaaccuggaggaggcggcccgguacaugcgcucccugaaggugcccgccaccgucagcguguccagccccgacgccgugaccgccuacaacggcuaccucacguccagcuccaagacccccgaggagcacuucaucgagaccaucagccuggcggggagcuacaaggacugguccuacagcggccaguccacccagcugggcaucgaguuccucaagcggggggacaagagcgucuacuacacguccaacccgaccaccuuccaccuggacggcgaggugaucaccuucgacaaccugaagacgcuccugagccugcgcgaggugcggaccaucaaggucuucaccaccguggacaacaucaaccuccacacgcagguggucgacauguccaugaccuacgggcagcaguucggccccaccuaccuggacggcgccgacgugaccaagaucaagccccacaacagccacgaggggaagacguucuacgugcugccgaacgacgacacccuccgcgucgaggccuucgaguacuaccacaccaccgaccccuccuuccugggccgguacaugagcgcccugaaccacacgaagaaguggaaguacccccaggugaacgggcucaccuccaucaagugggccgacaacaacugcuaccuggcgaccgcccugcucacccugcagcagaucgagcugaaguucaaccccccggcccuccaggacgccuacuaccgcgcgcgggccggcgaggccgccaacuucugcgcccugauccuggcguacugcaacaagacggugggggagcucggcgacguccgcgagaccaugagcuaccuguuccagcacgccaaccuggacuccugcaagcgggugcucaacgucgugugcaagaccugcggccagcagcagaccacccugaaggggguggaggccgucauguacaugggcacgcugagcuacgagcaguucaagaagggggugcagauccccugcaccugcggcaagcaggccaccaaguaccucgugcagcaggagucccccuucgucaugaugagcgcccccccggcgcaguacgagcugaagcacgggaccuucacgugcgccuccgaguacaccggcaacuaccagugcggccacuacaagcacaucaccagcaaggagacccuguacugcaucgacggggcccuccugacgaagagcuccgaguacaagggccccaucaccgacguguucuacaaggagaacagcuacaccaccacgaucaagcccgugaccuacaagcuggacggggucgugugcaccgagaucgaccccaagcucgacaacuacuacaagaaggacaacuccuacuucaccgagcagccgaucgaccuggugcccaaccagcccuaccccaacgccagcuucgacaacuucaaguucgucugcgacaacaucaaguucgccgacgaccugaaccagcucacgggcuacaagaagccggcgucccgcgagcugaaggugaccuucuuccccgaccugaacggggacguggucgccaucgacuacaagcacuacacccccagcuucaagaagggcgccaagcuccugcacaagcccaucguguggcacgugaacaacgccaccaacaaggcgacguacaagccgaacaccuggugcauccggugccugugguccaccaagcccgucgagaccagcaacuccuucgacgugcucaagagcgaggacgcccagggcauggacaaccuggccugcgaggaccugaagcccguguccgaggaggucguggagaaccccacgauccagaaggacgugcucgagugcaacgucaagaccaccgagguggugggggacaucauccugaagccggccaacaacagccugaagaucaccgaggaggucggccacacggaccucauggccgcguacguggacaacuccagccugaccaucaagaagcccaacgagcugucccgcgugcucgggcugaagacccuggccacccacggccucgccgccgucaacagcgugcccugggacacgaucgccaacuacgcgaagccguuccugaacaagguggucuccaccaccaccaacaucgugacgcgcugccugaaccgggugugcaccaacuacaugcccuacuucuucacccuccugcugcagcucugcaccuucacccgcagcacgaacucccggaucaaggccagcaugcccaccaccaucgccaagaacaccgucaagagcguggggaaguucugccuggaggccuccuucaacuaccugaagagccccaacuucuccaagcucaucaacaucaucaucugguuccugcugcucagcgugugccugggcucccugaucuacagcacggccgcgcucggcguccugauguccaaccuggggaugccgagcuacugcaccggcuaccgcgagggguaccucaacuccaccaacgugaccaucgccacguacugcaccggcagcauccccugcuccgugugccugagcggccuggacucccucgacaccuaccccagccuggagaccauccagaucacgaucuccagcuucaagugggaccugaccgccuucgggcucgucgccgagugguuccuggccuacauccuguucacccgguucuucuacgugcucggccuggcggccaucaugcagcuguucuucuccuacuucgccgugcacuucaucagcaacuccuggcucauguggcugaucaucaaccugguccagauggcccccaucagcgcgauggugcgcauguacaucuucuucgccagcuucuacuacguguggaaguccuacguccacgugguggacgggugcaacagcuccaccugcaugaugugcuacaagcggaaccgcgccacgcgggucgagugcaccaccaucgugaacggcguccgccggagcuucuacguguacgccaacgggggcaagggcuucugcaagcugcacaacuggaacugcgugaacugcgacaccuucugcgccggguccacguucaucagcgacgaggucgcgcgcgaccucucccugcaguucaagcggccgaucaaccccaccgaccagagcuccuacaucguggacagcgugaccgucaagaacggcuccauccaccuguacuucgacaaggccgggcagaagaccuacgagcgccacagccucucccacuucgugaaccuggacaaccugcgggccaacaacacgaagggcagccuccccaucaacgugaucgucuucgacgggaaguccaagugcgaggagagcuccgccaagagcgccuccguguacuacagccagcugaugugccagcccauccugcuccuggaccaggcgcuggugagcgacgucggcgacuccgccgagguggccgugaagauguucgacgccuacgucaacaccuucagcuccaccuucaacgugccgauggagaagcucaagacccugguggccacggcggaggccgagcuggccaagaacgucagccucgacaacgugcuguccaccuucaucagcgccgcgcgccagggcuucguggacuccgacgucgagaccaaggacgugguggagugccugaagcucagccaccaguccgacaucgaggucaccggggacagcugcaacaacuacaugcugacguacaacaagguggagaacaugaccccccgggaccugggcgccugcaucgacugcuccgcccgccacaucaacgcccagguggccaagagccacaacaucgcgcucaucuggaacgucaaggacuucaugucccugagcgagcagcugcggaagcagauccgcuccgccgccaagaagaacaaccuccccuucaagcugaccugcgccaccacgcgccagguggugaacgucgugaccaccaagaucgcccugaaggggggcugaggacuaguuauaagacugacuagcccgaugggccucccaacgggcccuccuccccuccuugcaccgagauuaauaaaaaaaaaaaaaaaaaaaaaaaaaaaaaaaaaaaaaaaaaaaaaaaaaaaaaaaaaaaaaaaaugcaucccccccccccccccccccccccccccccccaaaggcucuuuucagagccaccagaauu

SEQ ID NO: 21675 - RNA, 6058 nt, Artificial Sequence
  SARS-CoV-2__MT791956.1__non-structural protein 3 (NSP3) mRNA gc
aggagaaagcuuaccauggcccccaccaaggugaccuucggcgacgacacggucaucgaggugcagggguacaagagcgugaacaucaccuucgagcuggacgagcgcaucgacaagguccucaacgagaagugcuccgccuacaccguggagcugggcaccgaggugaacgaguucgcgugcgucguggccgacgccgugaucaagacgcugcagccggucagcgagcuccugaccccccuggggaucgaccucgacgagugguccauggccaccuacuaccuguucgacgagagcggcgaguucaagcuggccucccacauguacugcagcuucuacccccccgacgaggacgaggaggagggggacugcgaggaggaggaguucgagccguccacccaguacgaguacggcacggaggacgacuaccagggcaagccccucgaguucggggcgaccagcgccgcccugcagcccgaggaggagcaggaggaggacuggcuggacgacgacucccagcagaccgugggccagcaggacgggagcgaggacaaccagaccacgaccauccagaccaucguggagguccagccccagcucgagauggagcugaccccgguggugcagacgaucgaggucaacuccuucagcggcuaccugaagcucaccgacaacguguacaucaagaacgccgacaucguggaggaggcgaagaaggucaagcccaccgugguggucaacgccgccaacguguaccugaagcacgggggcggcguggccggggcccugaacaaggcgaccaacaacgccaugcaggucgaguccgacgacuacaucgccacgaacggcccccucaagguggggggcagcugcguccuguccggccacaaccuggccaagcacugccuccacgugguggggcccaacgucaacaagggcgaggacauccagcugcugaagagcgccuacgagaacuucaaccagcacgaggugcuccuggcgccgcugcucuccgccgggaucuucggcgccgaccccauccacagccugcgggugugcgucgacaccgugcgcaccaacguguaccuggccgucuucgacaagaaccucuacgacaagcugguguccagcuuccuggagaugaagagcgagaagcagguggagcagaagaucgccgagauccccaaggaggaggucaagcccuucaucaccgaguccaagccgagcguggagcagcggaagcaggacgacaagaagaucaaggcgugcguggaggaggucacgaccacccucgaggagaccaaguuccugacggagaaccugcuccuguacaucgacaucaacgggaaccugcaccccgacuccgccacccucgugagcgacaucgacaucaccuuccugaagaaggacgcccccuacaucgugggcgacgucgugcaggagggcgugcugaccgccgucgugauccccacgaagaaggccgggggcaccaccgagaugcucgcgaaggcccugcgcaaggugccgaccgacaacuacaucacgaccuaccccgggcagggccugaacggguacaccgucgaggaggccaagaccgugcucaagaagugcaaguccgccuucuacauccugcccagcaucaucuccaacgagaagcaggagauccugggcaccgugagcuggaaccuccgggagaugcuggcgcacgccgaggagacgcgcaagcugaugcccgucugcguggagaccaaggccaucguguccaccauccagcggaaguacaagggcaucaagauccaggagggggucguggacuacggcgcccgcuucuacuucuacaccagcaagacgaccguggccucccugaucaacacccucaacgaccugaacgagacccuggucacgaugccgcucggguacgugacccacggccugaaccuggaggaggcggcccgguacaugcgcagccucaaggugcccgccaccgucuccgugagcucccccgacgccgugaccgccuacaacggguaccugacgagcuccagcaagacccccgaggagcacuucaucgagaccaucucccuggcgggcagcuacaaggacuggagcuacuccggccagagcacccagcucgggaucgaguuccugaagcggggcgacaaguccgucuacuacacgagcaacccgaccaccuuccaccuggacggggaggugaucaccuucgacaaccucaagacgcugcugucccuccgcgaggugcggaccaucaaggucuucaccaccguggacaacaucaaccugcacacgcagguggucgacaugagcaugaccuacggccagcaguucggccccaccuaccuggacggggccgacgugaccaagaucaagccccacaacucccacgagggcaagacguucuacgugcucccgaacgacgacacccugcgcgucgaggccuucgaguacuaccacaccaccgaccccagcuuccuggggcgguacauguccgcccucaaccacacgaagaaguggaaguacccccaggugaacggccugaccagcaucaagugggccgacaacaacugcuaccuggcgaccgcccuccugacccugcagcagaucgagcucaaguucaaccccccggcccugcaggacgccuacuaccgcgcgcgggccggggaggccgccaacuucugcgcccugauccucgcguacugcaacaagacggugggcgagcugggcgacguccgcgagaccauguccuaccuguuccagcacgccaaccucgacagcugcaagcgggugcugaacgucgugugcaagaccugcgggcagcagcagaccacccugaagggcguggaggccgucauguacauggggacgcucuccuacgagcaguucaagaagggcgugcagauccccugcaccugcgggaagcaggccaccaaguaccuggugcagcaggagagccccuucgucaugauguccgcccccccggcgcaguacgagcugaagcacggcaccuucacgugcgccagcgaguacaccggcaacuaccagugcgggcacuacaagcacaucaccuccaaggagacccucuacugcaucgacggcgcccugcugaucaagagcagcgaguacaaggggcccaucacggacguguucuacaaggagaacuccuacaccaccaccaucaagcccgugacguacaagcucgacggcgucgugugcaccgagaucgaccccaagcuggacaacuacuacaagaaggacaacagcuacuucaccgagcagccgaucgaccuggugcccaaccagcccuaccccaacgccuccuucgacaacuucaaguucgucugcgacaacaucaaguucgccgacgaccucaaccagcugaccggguacaagaagccggcgagccgcgagcugaaggugacguucuuccccgaccucaacggcgacguggucgccaucgacuacaagcacuacacccccuccuucaagaagggcgccaagcugcugcacaagcccaucguguggcacgugaacaacgccaccaacaaggcgaccuacaagccgaacacguggugcauccggugccucuggagcaccaagcccgucgagaccuccaacagcuucgacgugcugaaguccgaggacgcccaggggauggacaaccuggccugcgaggaccucaagcccgugagcgaggaggucguggagaaccccaccauccagaaggacgugcuggagugcaacgucaagacgaccgagguggugggcgacaucauccugaagccggccaacaacucccucaagaucaccgaggaggucgggcacaccgaccugauggccgcguacguggacaacagcucccugacgaucaagaagcccaacgagcucagccgcgugcugggccugaagacccucgccacccacgggcuggccgccgucaacuccgugcccugggacaccaucgccaacuacgcgaagccguuccugaacaagguggucagcacgaccaccaacaucgugacccgcugccucaaccgggugugcacgaacuacaugcccuacuucuucacccugcugcuccagcugugcaccuucacccgcuccaccaacagccggaucaaggccuccaugcccacgaccaucgccaagaacaccgucaagagcgugggcaaguucugccuggaggccagcuucaacuaccucaagucccccaacuucagcaagcugaucaacaucaucaucugguuccugcuccuguccgugugccugggcagccucaucuacuccaccgccgcgcuggggguccugaugagcaaccucggcaugccguccuacugcacgggguaccgcgagggcuaccugaacagcaccaacgugaccaucgccaccuacugcacgggcuccauccccugcagcgugugccuguccgggcucgacagccuggacaccuaccccucccuggagaccauccagaucaccaucagcuccuucaagugggaccucacggccuucggccuggucgccgagugguuccuggccuacauccucuucacccgguucuucuacgugcuggggcuggcggccaucaugcagcucuucuucagcuacuucgccgugcacuucaucuccaacagcuggcugauguggcugaucaucaaccugguccagauggcccccaucuccgcgauggugcgcauguacaucuucuucgccagcuucuacuacguguggaagagcuacguccacgugguggacggcugcaacuccagcaccugcaugaugugcuacaagcggaaccgcgccacccgggucgagugcacgaccaucgugaacgggguccgccgguccuucuacguguacgccaacggcggcaagggguucugcaagcuccacaacuggaacugcgugaacugcgacaccuucugcgccggcagcaccuucaucuccgacgaggucgcgcgcgaccugagccugcaguucaagcggccgaucaaccccacggaccaguccagcuacaucguggacuccgugaccgucaagaacgggagcauccaccucuacuucgacaaggccggccagaagaccuacgagcgccacucccugagccacuucgugaaccuggacaaccuccgggccaacaacaccaaggggucccugcccaucaacgugaucgucuucgacggcaagagcaagugcgaggaguccagcgccaaguccgccagcguguacuacucccagcugaugugccagcccauccuccugcuggaccaggcgcucgugagcgacgucggcgacagcgccgagguggccgugaagauguucgacgccuacgucaacacguucuccagcaccuucaacgugccgauggagaagcugaagacccugguggccaccgcggaggccgagcucgccaagaacgucucccuggacaacgugcugagcacguucaucuccgccgcgcgccagggguucguggacagcgacgucgagaccaaggacgugguggagugccucaagcugucccaccagagcgacaucgaggucaccggcgacuccugcaacaacuacaugcugaccuacaacaagguggagaacaugacgccccgggaccucggggccugcaucgacugcagcgcccgccacaucaacgcccagguggccaagucccacaacaucgcgcugaucuggaacgucaaggacuucaugagccuguccgagcagcuccggaagcagauccgcagcgccgccaagaagaacaaccugcccuucaagcugaccugcgccaccacccgccagguggugaacgucgugacgaccaagaucgcccucaagggcgggugaggacuaguuauaagacugacuagcccgaugggccucccaacgggcccuccuccccuccuugcaccgagauuaauaaaaaaaaaaaaaaaaaaaaaaaaaaaaaaaaaaaaaaaaaaaaaaaaaaaaaaaaaaaaaaaaugcaucccccccccccccccccccccccccccccccaaaggcucuuuucagagccaccagaauu

SEQ ID NO: 21676 - RNA, 6058 nt, Artificial Sequence
  SARS-CoV-2__MT791958.1__non-structural protein 3 (NSP3) mRNA gc
aggagaaagcuuaccauggcccccaccaaggugaccuucggcgacgacacggucaucgaggugcagggguacaagagcgugaacaucaccuucgagcuggacgagcgcaucgacaagguccucaacgagaagugcuccgccuacaccguggagcugggcaccgaggugaacgaguucgcgugcgucguggccgacgccgugaucaagacgcugcagccggucagcgagcuccugaccccccuggggaucgaccucgacgagugguccauggccaccuacuaccuguucgacgagagcggcgaguucaagcuggccucccacauguacugcagcuucuacccccccgacgaggacgaggaggagggggacugcgaggaggaggaguucgagccguccacccaguacgaguacggcacggaggacgacuaccagggcaagccccucgaguucggggcgaccagcgccgcccugcagcccgaggaggagcaggaggaggacuggcuggacgacgacucccagcagaccgugggccagcaggacgggagcgaggacaaccagaccacgaccauccagaccaucguggagguccagccccagcucgagauggagcugaccccgguggugcagacgaucgaggucaacuccuucagcggcuaccugaagcucaccgacaacguguacaucaagaacgccgacaucguggaggaggcgaagaaggucaagcccaccgugguggucaacgccgccaacguguaccugaagcacgggggcggcguggccggggcccugaacaaggcgaccaacaacgccaugcaggucgaguccgacgacuacaucgccacgaacggcccccucaagguggggggcagcugcguccuguccggccacaaccuggccaagcacugccuccacgugguggggcccaacgucaacaagggcgaggacauccagcugcugaagagcgccuacgagaacuucaaccagcacgaggugcuccuggcgccgcugcucuccgccgggaucuucggcgccgaccccauccacagccugcgggugugcgucgacaccgugcgcaccaacguguaccuggccgucuucgacaagaaccucuacgacaagcugguguccagcuuccuggagaugaagagcgagaagcagguggagcagaagaucgccgagauccccaaggaggaggucaagcccuucaucaccgaguccaagccgagcguggagcagcggaagcaggacgacaagaagaucaaggcgugcguggaggaggucacgaccacccucgaggagaccaaguuccugacggagaaccugcuccuguacaucgacaucaacgggaaccugcaccccgacuccgccacccucgugagcgacaucgacaucaccuuccugaagaaggacgcccccuacaucgugggcgacgucgugcaggagggcgugcugaccgccgucgugauccccacgaagaaggccgggggcaccaccgagaugcucgcgaaggcccugcgcaaggugccgaccgacaacuacaucacgaccuaccccgggcagggccugaacggguacaccgucgaggaggccaagaccgugcucaagaagugcaaguccgccuucuacauccugcccagcaucaucuccaacgagaagcaggagauccugggcaccgugagcuggaaccuccgggagaugcuggcgcacgccgaggagacgcgcaagcugaugcccgucugcguggagaccaaggccaucguguccaccauccagcggaaguacaagggcaucaagauccaggagggggucguggacuacggcgcccgcuucuacuucuacaccagcaagacgaccguggccucccugaucaacacccucaacgaccugaacgagacccuggucacgaugccgcucggguacgugacccacggccugaaccuggaggaggcggcccgguacaugcgcagccucaaggugcccgccaccgucuccgugagcucccccgacgccgugaccgccuacaacggguaccugacgagcuccagcaagacccccgaggagcacuucaucgagaccaucucccuggcgggcagcuacaaggacuggagcuacuccggccagagcacccagcucgggaucgaguuccugaagcggggcgacaaguccgucuacuacacgagcaacccgaccaccuuccaccuggacggggaggugaucaccuucgacaaccucaagacgcugcugucccuccgcgaggugcggaccaucaaggucuucaccaccguggacaacaucaaccugcacacgcagguggucgacaugagcaugaccuacggccagcaguucggccccaccuaccuggacggggccgacgugaccaagaucaagccccacaacucccacgagggcaagacguucuacgugcucccgaacgacgacacccugcgcgucgaggccuucgaguacuaccacaccaccgaccccagcuuccuggggcgguacauguccgcccucaaccacacgaagaaguggaaguacccccaggugaacggccugaccagcaucaagugggccgacaacaacugcuaccuggcgaccgcccuccugacccugcagcagaucgagcucaaguucaaccccccggcccugcaggacgccuacuaccgcgcgcgggccggggaggccgccaacuucugcgcccugauccucgcguacugcaacaagacggugggcgagcugggcgacguccgcgagaccauguccuaccuguuccagcacgccaaccucgacagcugcaagcgggugcugaacgucgugugcaagaccugcgggcagcagcagaccacccugaagggcguggaggccgucauguacauggggacgcucuccuacgagcaguucaagaagggcgugcagauccccugcaccugcgggaagcaggccaccaaguaccuggugcagcaggagagccccuucgucaugauguccgcccccccggcgcaguacgagcugaagcacggcaccuucacgugcgccagcgaguacaccggcaacuaccagugcgggcacuacaagcacaucaccuccaaggagacccucuacugcaucgacggcgcccugcugacgaagagcagcgaguacaaggggcccaucaccgacguguucuacaaggagaacuccuacaccaccacgaucaagcccgugaccuacaagcucgacggcgucgugugcaccgagaucgaccccaagcuggacaacuacuacaagaaggacaacagcuacuucaccgagcagccgaucgaccuggugcccaaccagcccuaccccaacgccuccuucgacaacuucaaguucgucugcgacaacaucaaguucgccgacgaccucaaccagcugacgggguacaagaagccggcgagccgcgagcugaaggugaccuucuuccccgaccucaacggcgacguggucgccaucgacuacaagcacuacacccccuccuucaagaagggcgccaagcugcugcacaagcccaucguguggcacgugaacaacgccaccaacaaggcgacguacaagccgaacaccuggugcauccggugccucuggagcaccaagcccgucgagaccuccaacagcuucgacgugcugaaguccgaggacgcccaggggauggacaaccuggccugcgaggaccucaagcccgugagcgaggaggucguggagaaccccacgauccagaaggacgugcuggagugcaacgucaagaccaccgagguggugggcgacaucauccugaagccggccaacaacucccucaagaucaccgaggaggucgggcacacggaccugauggccgcguacguggacaacagcucccugaccaucaagaagcccaacgagcucagccgcgugcugggccugaagacccucgccacccacgggcuggccgccgucaacuccgugcccugggacacgaucgccaacuacgcgaagccguuccugaacaagguggucagcaccaccaccaacaucgugacgcgcugccucaaccgggugugcaccaacuacaugcccuacuucuucacccugcugcuccagcugugcaccuucacccgcuccacgaacagccggaucaaggccuccaugcccaccaccaucgccaagaacaccgucaagagcgugggcaaguucugccuggaggccagcuucaacuaccucaagucccccaacuucagcaagcugaucaacaucaucaucugguuccugcuccuguccgugugccugggcagccucaucuacuccacggccgcgcuggggguccugaugagcaaccucggcaugccguccuacugcaccggguaccgcgagggcuaccugaacagcaccaacgugaccaucgccacguacugcaccggcuccauccccugcagcgugugccuguccgggcucgacagccuggacaccuaccccucccuggagaccauccagaucacgaucagcuccuucaagugggaccucaccgccuucggccuggucgccgagugguuccuggccuacauccucuucacccgguucuucuacgugcuggggcuggcggccaucaugcagcucuucuucagcuacuucgccgugcacuucaucuccaacagcuggcugauguggcugaucaucaaccugguccagauggcccccaucuccgcgauggugcgcauguacaucuucuucgccagcuucuacuacguguggaagagcuacguccacgugguggacggcugcaacuccagcaccugcaugaugugcuacaagcggaaccgcgccacgcgggucgagugcaccaccaucgugaacgggguccgccgguccuucuacguguacgccaacggcggcaagggguucugcaagcuccacaacuggaacugcgugaacugcgacaccuucugcgccggcagcacguucaucuccgacgaggucgcgcgcgaccugagccugcaguucaagcggccgaucaaccccaccgaccaguccagcuacaucguggacuccgugaccgucaagaacgggagcauccaccucuacuucgacaaggccggccagaagaccuacgagcgccacucccugagccacuucgugaaccuggacaaccuccgggccaacaacacgaaggggucccugcccaucaacgugaucgucuucgacggcaagagcaagugcgaggaguccagcgccaaguccgccagcguguacuacucccagcugaugugccagcccauccuccugcuggaccaggcgcucgugagcgacgucggcgacagcgccgagguggccgugaagauguucgacgccuacgucaacaccuucuccagcaccuucaacguguccauggagaagcugaagacccugguggccacggcggaggccgagcucgccaagaacgucagccuggacaacgugcuguccaccuucaucagcgccgcgcgccagggguucguggacuccgacgucgagaccaaggacgugguggagugccucaagcugagccaccaguccgacaucgaggucaccggcgacagcugcaacaacuacaugcugacguacaacaagguggagaacaugaccccgcgggaccucggggccugcaucgacugcuccgcccgccacaucaacgcccagguggccaagagccacaacaucgcgcugaucuggaacgucaaggacuucaugucccugagcgagcagcuccggaagcagauccgcuccgccgccaagaagaacaaccugcccuucaagcugaccugcgccaccacgcgccagguggugaacgucgugaccaccaagaucgcccucaagggcgggugaggacuaguuauaagacugacuagcccgaugggccucccaacgggcccuccuccccuccuugcaccgagauuaauaaaaaaaaaaaaaaaaaaaaaaaaaaaaaaaaaaaaaaaaaaaaaaaaaaaaaaaaaaaaaaaaugcaucccccccccccccccccccccccccccccccaaaggcucuuuucagagccaccagaauu

SEQ ID NO: 21677 - RNA, 6058 nt, Artificial Sequence
  SARS-CoV-2__MT791962.1__non-structural protein 3 (NSP3) mRNA gc
aggagaaagcuuaccauggcccccaccaaggugaccuucggcgacgacacggucaucgaggugcagggguacaagagcgugaacaucaccuucgagcuggacgagcgcaucgacaagguccucaacgagaagugcuccgccuacaccguggagcugggcaccgaggugaacgaguucgcgugcgucguggccgacgccgugaucaagacgcugcagccggucagcgagcuccugaccccccuggggaucgaccucgacgagugguccauggccaccuacuaccuguucgacgagagcggcgaguucaagcuggccucccacauguacugcagcuucuacccccccgacgaggacgaggaggagggggacugcgaggaggaggaguucgagccguccacccaguacgaguacggcacggaggacgacuaccagggcaagccccucgaguucggggcgaccagcgccgcccugcagcccgaggaggagcaggaggaggacuggcuggacgacgacucccagcagaccgugggccagcaggacgggagcgaggacaaccagaccacgaccauccagaccaucguggagguccagccccagcucgagauggagcugaccccgguggugcagacgaucgaggucaacuccuucagcggcuaccugaagcucaccgacaacguguacaucaagaacgccgacaucguggaggaggcgaagaaggucaagcccaccgugguggucaacgccgccaacguguaccugaagcacgggggcggcguggccggggcccugaacaaggcgaccaacaacgccaugcaggucgaguccgacgacuacaucgccacgaacggcccccucaagguggggggcagcugcguccuguccggccacaaccuggccgagcacugccuccacgugguggggcccaacgucaacaagggcgaggacauccagcugcugaagagcgccuacgagaacuucaaccagcacgaggugcuccuggcgccgcugcucuccgccgggaucuucggcgccgaccccauccacagccugcgggugugcgucgacaccgugcgcaccaacguguaccuggccgucuucgacaagaaccucuacgacaagcugguguccagcuuccuggagaugaagagcgagaagcagguggagcagaagaucgccgagauccccaaggaggaggucaagcccuucaucaccgaguccaagccgagcguggagcagcggaagcaggacgacaagaagaucaaggcgugcguggaggaggucacgaccacccucgaggagaccaaguuccugacggagaaccugcuccuguacaucgacaucaacgggaaccugcaccccgacuccgccacccucgugagcgacaucgacaucaccuuccugaagaaggacgcccccuacaucgugggcgacgucgugcaggagggcgugcugaccgccgucgugauccccacgaagaaggccgggggcaccaccgagaugcucgcgaaggcccugcgcaaggugccgaccgacaacuacaucacgaccuaccccgggcagggccugaacggguacaccgucgaggaggccaagaccgugcucaagaagugcaaguccgccuucuacauccugcccagcaucaucuccaacgagaagcaggagauccugggcaccgugagcuggaaccuccgggagaugcuggcgcacgccgaggagacgcgcaagcugaugcccgucugcguggagaccaaggccaucguguccaccauccagcggaaguacaagggcaucaagauccaggagggggucguggacuacggcgcccgcuucuacuucuacaccagcaagacgaccguggccucccugaucaacacccucaacgaccugaacgagacccuggucacgaugccgcucggguacgugacccacggccugaaccuggaggaggcggcccgguacaugcgcagccucaaggugcccgccaccgucuccgugagcucccccgacgccgugaccgccuacaacggguaccugacgagcuccagcaagacccccgaggagcacuucaucgagaccaucucccuggcgggcagcuacaaggacuggagcuacuccggccagagcacccagcucgggaucgaguuccugaagcggggcgacaaguccgucuacuacacgagcaacccgaccaccuuccaccuggacggggaggugaucaccuucgacaaccucaagacgcugcugucccuccgcgaggugcggaccaucaaggucuucaccaccguggacaacaucaaccugcacacgcagguggucgacaugagcaugaccuacggccagcaguucggccccaccuaccuggacggggccgacgugaccaagaucaagccccacaacucccacgagggcaagacguucuacgugcucccgaacgacgacacccugcgcgucgaggccuucgaguacuaccacaccaccgaccccagcuuccuggggcgguacauguccgcccucaaccacacgaagaaguggaaguacccccaggugaacggccugaccagcaucaagugggccgacaacaacugcuaccuggcgaccgcccuccugacccugcagcagaucgagcucaaguucaaccccccggcccugcaggacgccuacuaccgcgcgcgggccggggaggccgccaacuucugcgcccugauccucgcguacugcaacaagacggugggcgagcugggcgacguccgcgagaccauguccuaccuguuccagcacgccaaccucgacagcugcaagcgggugcugaacgucgugugcaagaccugcgggcagcagcagaccacccugaagggcguggaggccgucauguacauggggacgcucuccuacgagcaguucaagaagggcgugcagauccccugcaccugcgggaagcaggccaccaaguaccuggugcagcaggagagccccuucgucaugauguccgcccccccggcgcaguacgagcugaagcacggcaccuucacgugcgccagcgaguacaccggcaacuaccagugcgggcacuacaagcacaucaccuccaaggagacccucuacugcaucgacggcgcccugcugacgaagagcagcgaguacaaggggcccaucaccgacguguucuacaaggagaacuccuacaccaccacgaucaagcccgugaccuacaagcucgacggcgucgugugcaccgagaucgaccccaagcuggacaacuacuacaagaaggacaacagcuacuucaccgagcagccgaucgaccuggugcccaaccagcccuaccccaacgccuccuucgacaacuucaaguucgucugcgacaacaucaaguucgccgacgaccucaaccagcugacgggguacaagaagccggcgagccgcgagcugaaggugaccuucuuccccgaccucaacggcgacguggucgccaucgacuacaagcacuacacccccuccuucaagaagggcgccaagcugcugcacaagcccaucguguggcacgugaacaacgccaccaacaaggcgacguacaagccgaacaccuggugcauccggugccucuggagcaccaagcccgucgagaccuccaacagcuucgacgugcugaaguccgaggacgcccaggggauggacaaccuggccugcgaggaccucaagcccgugagcgaggaggucguggagaaccccacgauccagaaggacgugcuggagugcaacgucaagaccaccgagguggugggcgacaucauccugaagccggccaacaacucccucaagaucaccgaggaggucgggcacacggaccugauggccgcguacguggacaacagcucccugaccaucaagaagcccaacgagcucagccgcgugcugggccugaagacccucgccacccacgggcuggccgccgucaacuccgugcccugggacacgaucgccaacuacgcgaagccguuccugaacaagguggucagcaccaccaccaacaucgugacgcgcugccucaaccgggugugcaccaacuacaugcccuacuucuucacccugcugcuccagcugugcaccuucacccgcuccacgaacagccggaucaaggccuccaugcccaccaccaucgccaagaacaccgucaagagcgugggcaaguucugccuggaggccagcuucaacuaccucaagucccccaacuucagcaagcugaucaacaucaucaucugguuccugcuccuguccgugugccugggcagccucaucuacuccacggccgcgcuggggguccugaugagcaaccucggcaugccguccuacugcaccggguaccgcgagggcuaccugaacagcaccaacgugaccaucgccacguacugcaccggcuccauccccugcagcgugugccuguccgggcucgacagccuggacaccuaccccucccuggagaccauccagaucacgaucagcuccuucaagugggaccucaccgccuucggccuggucgccgagugguuccuggccuacauccucuucacccgguucuucuacgugcuggggcuggcggccaucaugcagcucuucuucagcuacuucgccgugcacuucaucuccaacagcuggcugauguggcugaucaucaaccugguccagauggcccccaucuccgcgauggugcgcauguacaucuucuucgccagcuucuacuacguguggaagagcuacguccacgugguggacggcugcaacuccagcaccugcaugaugugcuacaagcggaaccgcgccacgcgggucgagugcaccaccaucgugaacgggguccgccgguccuucuacguguacgccaacggcggcaagggguucugcaagcuccacaacuggaacugcgugaacugcgacaccuucugcgccggcagcacguucaucuccgacgaggucgcgcgcgaccugagccugcaguucaagcggccgaucaaccccaccgaccaguccagcuacaucguggacuccgugaccgucaagaacgggagcauccaccucuacuucgacaaggccggccagaagaccuacgagcgccacucccugagccacuucgugaaccuggacaaccuccgggccaacaacacgaaggggucccugcccaucaacgugaucgucuucgacggcaagagcaagugcgaggaguccagcgccaaguccgccagcguguacuacucccagcugaugugccagcccauccuccugcuggaccaggcgcucgugagcgacgucggcgacagcgccgagguggccgugaagauguucgacgccuacgucaacaccuucuccagcaccuucaacgugccgauggagaagcugaagacccugguggccacggcggaggccgagcucgccaagaacgucucccuggacaacgugcugagcaccuucaucuccgccgcgcgccagggguucguggacagcgacgucgagaccaaggacgugguggagugccucaagcugucccaccagagcgacaucgaggucaccggcgacuccugcaacaacuacaugcugacguacaacaagguggagaacaugaccccccgggaccucggggccugcaucgacugcagcgcccgccacaucaacgcccagguggccaagucccacaacaucgcgcugaucuggaacgucaaggacuucaugagccuguccgagcagcuccggaagcagauccgcagcgccgccaagaagaacaaccugcccuucaagcugaccugcgccaccacgcgccagguggugaacgucgugaccaccaagaucgcccucaagggcgggugaggacuaguuauaagacugacuagcccgaugggccucccaacgggcccuccuccccuccuugcaccgagauuaauaaaaaaaaaaaaaaaaaaaaaaaaaaaaaaaaaaaaaaaaaaaaaaaaaaaaaaaaaaaaaaaaugcaucccccccccccccccccccccccccccccccaaaggcucuuuucagagccaccagaauu

SEQ ID NO: 21678 - RNA, 6058 nt, Artificial Sequence
  SARS-CoV-2__MT786438.1__non-structural protein 3 (NSP3) mRNA gc
aggagaaagcuuaccauggcccccaccaaggugaccuucggcgacgacacggucaucgaggugcagggguacaagagcgugaacaucaccuucgagcuggacgagcgcaucgacaagguccucaacgagaagugcuccgccuacaccguggagcugggcaccgaggugaacgaguucgcgugcgucguggccgacgccgugaucaagacgcugcagccggucagcgagcuccugaccccccuggggaucgaccucgacgagugguccauggccaccuacuaccuguucgacgagagcggcgaguucaagcuggccucccacauguacugcagcuucuacccccccgacgaggacgaggaggagggggacugcgaggaggaggaguucgagccguccacccaguacgaguacggcacggaggacgacuaccagggcaagccccucgaguucggggcgaccagcgccgcccugcagcccgaggaggagcaggaggaggacuggcuggacgacgacucccagcagaccgugggccagcaggacgggagcgaggacaaccagaccacgaccauccagaccaucguggagguccagccccagcucgagauggagcugaccccgguggugcagacgaucgaggucaacuccuucagcggcuaccugaagcucaccgacaacguguacaucaagaacgccgacaucguggaggaggcgaagaaggucaagcccaccgugguggucaacgccgccaacguguaccugaagcacgggggcggcguggccggggcccugaacaaggcgaccaacaacgccaugcaggucgaguccgacgacuacaucgccacgaacggcccccucaagguggggggcagcugcguccuguccggccacaaccuggccaagcacugccuccacgugguggggcccaacgucaacaagggcgaggacauccagcugcugaagagcgccuacgagaacuucaaccagcacgaggugcuccuggcgccgcugcucuccgccgggaucuucggcgccgaccccauccacagccugcgggugugcgucgacaccgugcgcaccaacguguaccuggccgucuucgacaagaaccucuacgacaagcugguguccagcuuccuggagaugaagagcgagaagcagguggagcagaagaucgccgagauccccaaggaggaggucaagcccuucaucaccgaguccaagccgagcguggagcagcggaagcaggacgacaagaagaucaaggcgugcguggaggaggucacgaccacccucgaggagaccaaguuccugacggagaaccugcuccuguacaucgacaucaacgggaaccugcaccccgacuccgccacccucgugagcgacaucgacaucaccuuccugaagaaggacgcccccuacaucgugggcgacgucgugcaggagggcgugcugaccgccgucgugauccccacgaagaaggccgggggcaccaccgagaugcucgcgaaggcccugcgcaaggugccgaccgacaacuacaucacgaccuaccccgggcagggccugaacggguacaccgucgaggaggccaagaccgugcucaagaagugcaaguccgccuucuacauccugcccagcaucaucuccaacgagaagcaggagauccugggcaccgugagcuggaaccuccgggagaugcuggcgcacgccgaggagacgcgcaagcugaugcccgucugcguggagaccaaggccaucguguccaccauccagcggaaguacaagggcaucaagauccaggagggggucguggacuacggcgcccgcuucuacuucuacaccagcaagacgaccguggccucccugaucaacacccucaacgaccugaacgagacccuggucacgaugccgcucggguacgugacccacggccugaaccuggaggaggcggcccgguacaugcgcagccucaaggugcccgccaccgucuccgugagcucccccgacgccgugaccgccuacaacggguaccugacgagcuccagcaagacccccgaggagcacuucaucgagaccaucucccuggcgggcagcuacaaggacuggagcuacuccggccagagcacccagcucgggaucgaguuccugaagcggggcgacaaguccgucuacuacacgagcaacccgaccaccuuccaccuggacggggaggugaucaccuucgacaaccucaagacgcugcugucccuccgcgaggugcggaccaucaaggucuucaccaccguggacaacaucaaccugcacacgcagguggucgacaugagcaugaccuacggccagcaguucggccccaccuaccuggacggggccgacgugaccaagaucaagccccacaacucccacgagggcaagacguucuacgugcucccgaacgacgacacccugcgcgucgaggccuucgaguacuaccacaccaccgaccccagcuuccuggggcgguacauguccgcccucaaccacacgaagaaguggaaguacccccaggugaacggccugaccagcaucaagugggccgagaacaacugcuaccuggcgaccgcccuccugacccugcagcagaucgagcucaaguucaaccccccggcccugcaggacgccuacuaccgcgcgcgggccggggaggccgccaacuucugcgcccugauccucgcguacugcaacaagacggugggcgagcugggcgacguccgcgagaccauguccuaccuguuccagcacgccaaccucgacagcugcaagcgggugcugaacgucgugugcaagaccugcgggcagcagcagaccacccugaagggcguggaggccgucauguacauggggacgcucuccuacgagcaguucaagaagggcgugcagauccccugcaccugcgggaagcaggccaccaaguaccuggugcagcaggagagccccuucgucaugauguccgcccccccggcgcaguacgagcugaagcacggcaccuucacgugcgccagcgaguacaccggcaacuaccagugcgggcacuacaagcacaucaccuccaaggagacccucuacugcaucgacggcgcccugcugacgaagagcagcgaguacaaggggcccaucaccgacguguucuacaaggagaacuccuacaccaccacgaucaagcccgugaccuacaagcucgacggcgucgugugcaccgagaucgaccccaagcuggacaacuacuacaagaaggacaacagcuacuucaccgagcagccgaucgaccuggugcccaaccagcccuaccccaacgccuccuucgacaacuucaaguucgucugcgacaacaucaaguucgccgacgaccucaaccagcugacgggguacaagaagccggcgagccgcgagcugaaggugaccuucuuccccgaccucaacggcgacguggucgccaucgacuacaagcacuacacccccuccuucaagaagggcgccaagcugcugcacaagcccaucguguggcacgugaacaacgccaccaacaaggcgacguacaagccgaacaccuggugcauccggugccucuggagcaccaagcccgucgagaccuccaacagcuucgacgugcugaaguccgaggacgcccaggggauggacaaccuggccugcgaggaccucaagcccgugagcgaggaggucguggagaaccccacgauccagaaggacgugcuggagugcaacgucaagaccaccgagguggugggcgacaucauccugaagccggccaacaacucccucaagaucaccgaggaggucgggcacacggaccugauggccgcguacguggacaacagcucccugaccaucaagaagcccaacgagcucagccgcgugcugggccugaagacccucgccacccacgggcuggccgccgucaacuccgugcccugggacacgaucgccaacuacgcgaagccguuccugaacaagguggucagcaccaccaccaacaucgugacgcgcugccucaaccgggugugcaccaacuacaugcccuacuucuucacccugcugcuccagcugugcaccuucacccgcuccacgaacagccggaucaaggccuccaugcccaccaccaucgccaagaacaccgucaagagcgugggcaaguucugccuggaggccagcuucaacuaccucaagucccccaacuucagcaagcugaucaacaucaucaucugguuccugcuccuguccgugugccugggcagccucaucuacuccacggccgcgcuggggguccugaugagcaaccucggcaugccguccuacugcaccggguaccgcgagggcuaccugaacagcaccaacgugaccaucgccacguacugcaccggcuccauccccugcagcgugugccuguccgggcucgacagccuggacaccuaccccucccuggagaccauccagaucacgaucagcuccuucaagugggaccucaccgccuucggccuggucgccgagugguuccuggccuacauccucuucacccgguucuucuacgugcuggggcuggcggccaucaugcagcucuucuucagcuacuucgccgugcacuucaucuccaacagcuggcugauguggcugaucaucaaccugguccagauggcccccaucuccgcgauggugcgcauguacaucuucuucgccagcuucuacuacguguggaagagcuacguccacgugguggacggcugcaacuccagcaccugcaugaugugcuacaagcggaaccgcgccacgcgggucgagugcaccaccaucgugaacgggguccgccgguccuucuacguguacgccaacggcggcaagggguucugcaagcuccacaacuggaacugcgugaacugcgacaccuucugcgccggcagcacguucaucuccgacgaggucgcgcgcgaccugagccugcaguucaagcggccgaucaaccccaccgaccaguccagcuacaucguggacuccgugaccgucaagaacgggagcauccaccucuacuucgacaaggccggccagaagaccuacgagcgccacucccugagccacuucgugaaccuggacaaccuccgggccaacaacacgaaggggucccugcccaucaacgugaucgucuucgacggcaagagcaagugcgaggaguccagcgccaaguccgccagcguguacuacucccagcugaugugccagcccauccuccugcuggaccaggcgcucgugagcgacgucggcgacagcgccgagguggccgugaagauguucgacgccuacgucaacaccuucuccagcaccuucaacgugccgauggagaagcugaagacccugguggccacggcggaggccgagcucgccaagaacgucucccuggacaacgugcugagcaccuucaucuccgccgcgcgccagggguucguggacagcgacgucgagaccaaggacgugguggagugccucaagcugucccaccagagcgacaucgaggucaccggcgacuccugcaacaacuacaugcugacguacaacaagguggagaacaugaccccccgggaccucggggccugcaucgacugcagcgcccgccacaucaacgcccagguggccaagucccacaacaucgcgcugaucuggaacgucaaggacuucaugagccuguccgagcagcuccggaagcagauccgcagcgccgccaagaagaacaaccugcccuucaagcugaccugcgccaccacgcgccagguggugaacgucgugaccaccaagaucgcccucaagggcgggugaggacuaguuauaagacugacuagcccgaugggccucccaacgggcccuccuccccuccuugcaccgagauuaauaaaaaaaaaaaaaaaaaaaaaaaaaaaaaaaaaaaaaaaaaaaaaaaaaaaaaaaaaaaaaaaaugcaucccccccccccccccccccccccccccccccaaaggcucuuuucagagccaccagaauu

SEQ ID NO: 21679 - RNA, 6058 nt, Artificial Sequence
  SARS-CoV-2__MT786444.1__non-structural protein 3 (NSP3) mRNA gc
aggagaaagcuuaccauggcccccaccaaggugaccuucggcgacgacacggucaucgaggugcagggguacaagagcgugaacaucaccuucgagcuggacgagcgcaucgacaagguccucaacgagaagugcuccgccuacaccguggagcugggcaccgaggugaacgaguucgcgugcgucguggccgacgccgugaucaagacgcugcagccggucagcgagcuccugaccccccuggggaucgaccucgacgagugguccauggccaccuacuaccuguucgacgagagcggcgaguucaagcuggccucccacauguacugcagcuucuacccccccgacgaggacgaggaggagggggacugcgaggaggaggaguucgagccguccacccaguacgaguacggcacggaggacgacuaccagggcaagccccucgaguucggggcgaccagcgccgcccugcagcccgaggaggagcaggaggaggacuggcuggacgacgacucccagcagaccgugggccagcaggacgggagcgaggacaaccagaccacgaccauccagaccaucguggagguccagccccagcucgagauggagcugaccccgguggugcagacgaucgaggucaacuccuucagcggcuaccugaagcucaccgacaacguguacaucaagaacgccgacaucguggaggaggcgaagaaggucaagcccaccgugguggucaacgccgccaacguguaccugaagcacgggggcggcguggccggggcccugaacaaggcgaccaacaacgccaugcaggucgaguccgacgacuacaucgccacgaacggcccccucaagguggggggcagcugcguccuguccggccacaaccuggccaagcacugccuccacgugguggggcccaacgucaacaagggcgaggacauccagcugcugaagagcgccuacgagaacuucaaccagcacgaggugcuccuggcgccgcugcucuccgccgggaucuucggcgccgaccccauccacagccugcgggugugcgucgacaccgugcgcaccaacguguaccuggccgucuucgacaagaaccucuacgacaagcugguguccagcuuccuggagaugaagagcgagaagcagguggagcagaagaucgccgagauccccaaggaggaggucaagcccuucaucaccgaguccaagccgagcguggagcagcggaagcaggacgacaagaagaucaaggcgugcguggaggaggucacgaccacccucgaggagaccaaguuccugacggagaaccugcuccuguacaucgacaucaacgggaaccugcaccccgacuccgccacccucgugagcgacaucgacaucaccuuccugaagaaggacgcccccuacaucgugggcgacgucgugcaggagggcgugcugaccgccgucgugauccccacgaagaaggccgggggcaccaccgagaugcucgcgaaggcccugcgcaaggugccgaccgacaacuacaucacgaccuaccccgggcagggccugaacggguacaccgucgaggaggccaagaccgugcucaagaagugcaaguccgccuucuacauccugcccagcaucaucuccaacgagaagcaggagauccugggcaccgugagcuggaaccuccgggagaugcuggcgcacgccgaggagacgcgcaagcugaugcccgucugcguggagaccaaggccaucguguccaccauccagcggaaguacaagggcaucaagauccaggagggggucguggacuacggcgcccgcuucuacuucuacaccagcaagacgaccguggccucccugaucaacacccucaacgaccugaacgagacccuggucacgaugccgcucggguacgugacccacggccugaaccuggaggaggcggcccgguacaugcgcagccucaaggugcccgccaccgucuccgugagcucccccgacgccgugaccgccuacaacggguaccugacgagcuccagcaagacccccgaggagcacuucaucgagaccaucucccuggcgggcagcuacaaggacuggagcuacuccggccagagcacccagcucgggaucgaguuccugaagcggggcgacaaguccgucuacuacacgagcaacccgaccaccuuccaccuggacggggaggugaucaccuucgacaaccucaagacgcugcugucccuccgcgaggugcggaccaucaaggucuucaccaccguggacaacaucaaccugcacacgcagguggucgacaugagcaugaccuacggccagcaguucggccccaccuaccuggacggggccgacgugaccaagaucaagccccacaacucccacgagggcaagacguucuacgugcucccgaacgacgacacccugcgcgucgaggccuucgaguacuaccacaccaccgaccccagcuuccuggggcgguacauguccgcccucaaccacacgaagaaguggaaguacccccaggugaacggccugaccagcaucaagugggccgagaacaacugcuaccuggcgaccgcccuccugacccugcagcagaucgagcucaaguucaaccccccggcccugcaggacgccuacuaccgcgcgcgggccggggaggccgccaacuucugcgcccugauccucgcguacugcaacaagacggugggcgagcugggcgacguccgcgagaccauguccuaccuguuccagcacgccaaccucgacagcugcaagcgggugcugaacgucgugugcaagaccugcgggcagcagcagaccacccugaagggcguggaggccgucauguacauggggacgcucuccuacgagcaguucaagaagggcgugcagauccccugcaccugcgggaagcaggccaccaaguaccuggugcagcaggagagccccuucgucaugauguccgcccccccggcgcaguacgagcugaagcacggcaccuucacgugcgccagcgaguacaccggcaacuaccagugcgggcacuacaagcacaucaccuccaaggagacccucuacugcaucgacggcgcccugcugacgaagagcagcgaguacaaggggcccaucaccgacguguucuacaaggagaacuccuacaccaccacgaucaagcccgugaccuacaagcucgacggcgucgugugcaccgagaucgaccccaagcuggacaacuacuacaagaaggacaacagcuacuucaccgagcagccgaucgaccuggugcccaaccagcccuaccccaacgccuccuucgacaacuucaaguucgucugcgacaacaucaaguucgccgacgaccucaaccagcugacgggguacaagaagccggcgagccgcgagcugaaggugaccuucuuccccgaccucaacggcgacguggucgccaucgacuacaagcacuacacccccuccuucaagaagggcgccaagcugcugcacaagcccaucguguggcacgugaacaacgccaccaacaaggcgacguacaagccgaacaccuggugcauccggugccucuggagcaccaagcccgucgagaccuccaacagcuucgacgugcugaaguccgaggacgcccaggggauggacaaccuggccugcgaggaccucaagcccgugagcgaggaggucguggagaaccccacgauccagaaggacgugcuggagugcaacgucaagaccaccgagguggugggcgacaucauccugaagccggccaacaacucccucaagaucaccgaggaggucgggcacacggaccugauggccgcguacguggacaacuucagccugaccaucaagaagcccaacgagcucucccgcgugcugggccugaagacccucgccacccacgggcuggccgccgucaacagcgugcccugggacacgaucgccaacuacgcgaagccguuccugaacaagguggucuccaccaccaccaacaucgugacgcgcugccucaaccgggugugcaccaacuacaugcccuacuucuucacccugcugcuccagcugugcaccuucacccgcagcacgaacucccggaucaaggccagcaugcccaccaccaucgccaagaacaccgucaaguccgugggcaaguucugccuggaggccagcuucaacuaccucaagagccccaacuucuccaagcugaucaacaucaucaucugguuccugcuccugagcgugugccugggcucccucaucuacagcacggccgcgcuggggguccugauguccaaccucggcaugccgagcuacugcaccggguaccgcgagggcuaccugaacuccaccaacgugaccaucgccacguacugcaccggcagcauccccugcuccgugugccugagcgggcucgacucccuggacaccuaccccagccuggagaccauccagaucacgaucuccagcuucaagugggaccucaccgccuucggccuggucgccgagugguuccuggccuacauccucuucacccgguucuucuacgugcuggggcuggcggccaucaugcagcucuucuucuccuacuucgccgugcacuucaucagcaacuccuggcugauguggcugaucaucaaccugguccagauggcccccaucagcgcgauggugcgcauguacaucuucuucgccuccuucuacuacguguggaagagcuacguccacgugguggacggcugcaacagcuccaccugcaugaugugcuacaagcggaaccgcgccacgcgggucgagugcaccaccaucgugaacgggguccgccggagcuucuacguguacgccaacggcggcaagggguucugcaagcuccacaacuggaacugcgugaacugcgacaccuucugcgccggcuccacguucaucagcgacgaggucgcgcgcgaccugucccugcaguucaagcggccgaucaaccccaccgaccagagcuccuacaucguggacagcgugaccgucaagaacggguccauccaccucuacuucgacaaggccggccagaagaccuacgagcgccacagccugucccacuucgugaaccuggacaaccuccgggccaacaacacgaaggggagccugcccaucaacgugaucgucuucgacggcaaguccaagugcgaggagagcuccgccaagagcgccuccguguacuacagccagcugaugugccagcccauccuccugcuggaccaggcgcucguguccgacgucggcgacagcgccgagguggccgugaagauguucgacgccuacgucaacaccuucagcuccaccuucaacgugccgauggagaagcugaagacccugguggccacggcggaggccgagcucgccaagaacgucagccuggacaacgugcuguccaccuucaucagcgccgcgcgccagggguucguggacuccgacgucgagaccaaggacgugguggagugccucaagcugagccaccaguccgacaucgaggucaccggcgacagcugcaacaacuacaugcugacguacaacaagguggagaacaugaccccccgggaccucggggccugcaucgacugcuccgcccgccacaucaacgcccagguggccaagagccacaacaucgcgcugaucuggaacgucaaggacuucaugucccugagcgagcagcuccggaagcagauccgcuccgccgccaagaagaacaaccugcccuucaagcugaccugcgccaccacgcgccagguggugaacgucgugaccaccaagaucgcccucaagggcgggugaggacuaguuauaagacugacuagcccgaugggccucccaacgggcccuccuccccuccuugcaccgagauuaauaaaaaaaaaaaaaaaaaaaaaaaaaaaaaaaaaaaaaaaaaaaaaaaaaaaaaaaaaaaaaaaaugcaucccccccccccccccccccccccccccccccaaaggcucuuuucagagccaccagaauu

SEQ ID NO: 21680 - RNA, 6058 nt, Artificial Sequence
  SARS-CoV-2__MT786809.1__non-structural protein 3 (NSP3) mRNA gc
aggagaaagcuuaccauggcccccaccaaggugaccuucggcgacgacacggucaucgaggugcagggguacaagagcgugaacaucaccuucgagcuggacgagcgcaucgacaagguccucaacgagaagugcuccgccuacaccguggagcugggcaccgaggugaacgaguucgcgugcgucguggccgacgccgugaucaagacgcugcagccggucagcgagcuccugaccccccuggggaucgaccucgacgagugguccauggccaccuacuaccuguucgacgagagcggcgaguucaagcuggccucccacauguacugcagcuucuacccccccgacgaggacgaggaggagggggacugcgaggaggaggaguucgagccguccacccaguacgaguacggcacggaggacgacuaccagggcaagccccucgaguucggggcgaucagcgccgcccugcagcccgaggaggagcaggaggaggacuggcuggacgacgacucccagcagaccgugggccagcaggacgggagcgaggacaaccagaccaccacgauccagaccaucguggagguccagccccagcucgagauggagcugaccccgguggugcagaccaucgaggucaacuccuucagcggcuaccugaagcucacggacaacguguacaucaagaacgccgacaucguggaggaggcgaagaaggucaagcccaccgugguggucaacgccgccaacguguaccugaagcacgggggcggcguggccggggcccugaacaaggcgaccaacaacgccaugcaggucgaguccgacgacuacaucgccaccaacggcccccucaagguggggggcagcugcguccuguccggccacaaccuggccaagcacugccuccacgugguggggcccaacgucaacaagggcgaggacauccagcugcugaagagcgccuacgagaacuucaaccagcacgaggugcuccuggcgccgcugcucuccgccgggaucuucggcgccgaccccauccacagccugcgggugugcgucgacacggugcgcaccaacguguaccuggccgucuucgacaagaaccucuacgacaagcugguguccagcuuccuggagaugaagagcgagaagcagguggagcagaagaucgccgagauccccaaggaggaggucaagcccuucaucaccgaguccaagccgagcguggagcagcggaagcaggacgacaagaagaucaaggcgugcguggaggaggucaccacgacccucgaggagaccaaguuccugaccgagaaccugcuccuguacaucgacaucaacgggaaccugcaccccgacuccgccacgcucgugagcgacaucgacaucaccuuccugaagaaggacgcccccuacaucgugggcgacgucgugcaggagggcgugcugaccgccgucgugauccccaccaagaaggccgggggcacgaccgagaugcucgcgaaggcccugcgcaaggugccgaccgacaacuacaucaccacguaccccgggcagggccugaacggguacaccgucgaggaggccaagaccgugcucaagaagugcaaguccgccuucuacauccugcccagcaucaucuccaacgagaagcaggagauccugggcaccgugagcuggaaccuccgggagaugcuggcgcacgccgaggagacccgcaagcugaugcccgucugcguggagacgaaggccaucguguccaccauccagcggaaguacaagggcaucaagauccaggagggggucguggacuacggcgcccgcuucuacuucuacaccagcaagaccacgguggccucccugaucaacacccucaacgaccugaacgagacccuggucaccaugccgcucggguacgugacgcacggccugaaccuggaggaggcggcccgguacaugcgcagccucaaggugcccgccaccgucuccgugagcucccccgacgccgugaccgccuacaacggguaccugaccagcuccagcaagacgcccgaggagcacuucaucgagaccaucucccuggcgggcagcuacaaggacuggagcuacuccggccagagcacccagcucgggaucgaguuccugaagcggggcgacaaguccgucuacuacaccagcaacccgacgaccuuccaccuggacggggaggugaucaccuucgacaaccucaagacccugcugucccuccgcgaggugcggacgaucaaggucuucaccaccguggacaacaucaaccugcacacccagguggucgacaugagcaugacguacggccagcaguucggccccaccuaccuggacggggccgacgugaccaagaucaagccccacaacucccacgagggcaagaccuucuacgugcucccgaacgacgacacgcugcgcgucgaggccuucgaguacuaccacaccaccgaccccagcuuccuggggcgguacauguccgcccucaaccacaccaagaaguggaaguacccccaggugaacggccugacgagcaucaagugggccgacaacaacugcuaccuggcgaccgcccuccugacccugcagcagaucgagcucaaguucaaccccccggcccugcaggacgccuacuaccgcgcgcgggccggggaggccgccaacuucugcgcccugauccucgcguacugcaacaagaccgugggcgagcugggcgacguccgcgagacgauguccuaccuguuccagcacgccaaccucgacagcugcaagcgggugcugaacgucgugugcaagaccugcgggcagcagcagaccacccugaagggcguggaggccgucauguacauggggacccucuccuacgagcaguucaagaagggcgugcagauccccugcacgugcgggaagcaggccaccaaguaccuggugcagcaggagagccccuucgucaugauguccgcccccccggcgcaguacgagcugaagcacggcaccuucaccugcgccagcgaguacacgggcaacuaccagugcgggcacuacaagcacaucaccuccaaggagacccucuacugcaucgacggcgcccugcugaccaagagcagcgaguacaaggggcccaucacggacguguucuacaaggagaacuccuacaccaccaccaucaagcccgugacguacaagcucgacggcgucgugugcaccgagaucgaccccaagcuggacaacuacuacaagaaggacaacagcuacuucaccgagcagccgaucgaccuggugcccaaccagcccuaccccaacgccuccuucgacaacuucaaguucgucugcgacaacaucaaguucgccgacgaccucaaccagcugaccggguacaagaagccggcgagccgcgagcugaaggugacguucuuccccgaccucaacggcgacguggucgccaucgacuacaagcacuacacccccuccuucaagaagggcgccaagcugcugcacaagcccaucguguggcacgugaacaacgccaccaacaaggcgaccuacaagccgaacacguggugcauccggugccucuggagcaccaagcccgucgagaccuccaacagcuucgacgugcugaaguccgaggacgcccaggggauggacaaccuggccugcgaggaccucaagcccgugagcgaggaggucguggagaaccccaccauccagaaggacgugcuggagugcaacgucaagacgaccgagguggugggcgacaucauccugaagccggccaacaacucccucaagaucaccgaggaggucgggcacaccgaccugauggccgcguacguggacaacagcucccugacgaucaagaagcccaacgagcucagccgcgugcugggccugaagacccucgccacccacgggcuggccgccgucaacuccgugcccugggacaccaucgccaacuacgcgaagccguuccugaacaagguggucagcacgaccaccaacaucgugacccgcugccucaaccgggugugcacgaacuacaugcccuacuucuucacccugcugcuccagcugugcaccuucacccgcuccaccaacagccggaucaaggccuccaugcccacgaccaucgccaagaacaccgucaagagcgugggcaaguucugccuggaggccagcuucaacuaccucaagucccccaacuucagcaagcugaucaacaucaucaucugguuccugcuccuguccgugugccugggcagccucaucuacuccaccgccgcgcuggggguccugaugagcaaccucggcaugccguccuacugcacgggguaccgcgagggcuaccugaacagcaccaacgugaccaucgccaccuacugcacgggcuccauccccugcagcgugugccuguccgggcucgacagccuggacaccuaccccucccuggagaccauccagaucaccaucagcuccuucaagugggaccucacggccuucggccuggucgccgagugguuccuggccuacauccucuucacccgguucuucuacgugcuggggcuggcggccaucaugcagcucuucuucagcuacuucgccgugcacuucaucuccaacagcuggcugauguggcugaucaucaaccugguccagauggcccccaucuccgcgauggugcgcauguacaucuucuucgccagcuucuacuacguguggaagagcuacguccacgugguggacggcugcaacuccagcaccugcaugaugugcuacaagcggaaccgcgccacccgggucgagugcacgaccaucgugaacgggguccgccgguccuucuacguguacgccaacggcggcaagggguucugcaagcuccacaacuggaacugcgugaacugcgacaccuucugcgccggcagcaccuucaucuccgacgaggucgcgcgcgaccugagccugcaguucaagcggccgaucaaccccacggaccaguccagcuacaucguggacuccgugaccgucaagaacgggagcauccaccucuacuucgacaaggccggccagaagaccuacgagcgccacucccugagccacuucgugaaccuggacaaccuccgggccaacaacaccaaggggucccugcccaucaacgugaucgucuucgacggcaagagcaagugcgaggaguccagcgccaaguccgccagcguguacuacucccagcugaugugccagcccauccuccugcuggaccaggcgcucgugagcgacgucggcgacagcgccgagguggccgugaagauguucgacgccuacgucaacacguucuccagcaccuucaacgugccgauggagaagcugaagacccugguggccaccgcggaggccgagcucgccaagaacgucucccuggacaacgugcugagcacguucaucuccgccgcgcgccagggguucguggacagcgacgucgagaccaaggacgugguggagugccucaagcugucccaccagagcgacaucgaggucaccggcgacuccugcaacaacuacaugcugaccuacaacaagguggagaacaugacgccccgggaccucggggccugcaucgacugcagcgcccgccacaucaacgcccagguggccaagucccacaacaucgcgcugaucuggaacgucaaggacuucaugagccuguccgagcagcuccggaagcagauccgcagcgccgccaagaagaacaaccugcccuucaagcugaccugcgccaccacccgccagguggugaacgucgugacgaccaagaucgcccucaagggcgggugaggacuaguuauaagacugacuagcccgaugggccucccaacgggcccuccuccccuccuugcaccgagauuaauaaaaaaaaaaaaaaaaaaaaaaaaaaaaaaaaaaaaaaaaaaaaaaaaaaaaaaaaaaaaaaaaugcaucccccccccccccccccccccccccccccccaaaggcucuuuucagagccaccagaauu

SEQ ID NO: 21681 - RNA, 6058 nt, Artificial Sequence
  SARS-CoV-2__MT786845.1__non-structural protein 3 (NSP3) mRNA gc
aggagaaagcuuaccauggcccccaccaaggugaccuucggcgacgacacggucaucgaggugcagggguacaagagcgugaacaucaccuucgagcuggacgagcgcaucgacaagguccucaacgagaagugcuccgccuacaccguggagcugggcaccgaggugaacgaguucgcgugcgucguggccgacgccgugaucaagacgcugcagccggucagcgagcuccugaccccccuggggaucgaccucgacgagugguccauggccaccuacuaccuguucgacgagagcggcgaguucaagcuggccucccacauguacugcagcuucuacccccccgacgaggacgaggaggagggggacugcgaggaggaggaguucgagccguccacccaguacgaguacggcacggaggacgacuaccagggcaagccccucgaguucggggcgaccagcgccgcccugcagcccgaggaggagcaggaggaggacuggcuggacgacgacucccagcagaccgugggccagcaggacgggagcgaggacaaccagaccacgaccauccagaccaucguggagguccagccccagcucgagauggagcugaccccgguggugcagacgaucgaggucaacuccuucagcggcuaccugaagcucaccgacaacguguacaucaagaacgccgacaucguggaggaggcgaagaaggucaagcccaccgugguggucaacgccgccaacguguaccugaagcacgggggcggcguggccggggcccugaacaaggcgaccaacaacgccaugcaggucgaguccgacgacuacaucgccacgaacggcccccucaagguggggggcagcugcguccuguccggccacaaccuggccaagcacugccuccacgugguggggcccaacgucaacaagggcgaggacauccagcugcugaagagcgccuacgagaacuucaaccagcacgaggugcuccuggcgccgcugcucuccgccgggaucuucggcgccgaccccauccacagccugcgggugugcgucgacaccgugcgcaccaacguguaccuggccgucuucgacaagaaccucuacgacaagcugguguccagcuuccuggagaugaagagcgagaagcagguggagcagaagaucgccgagauccccaaggaggaggucaagcccuucaucaccgaguccaagccgagcguggagcagcggaagcaggacgacaagaagaucaaggcgugcguggaggaggucacgaccacccucgaggagaccaaguuccugacggagaaccugcuccuguacaucgacaucaacgggaaccugcaccccgacuccgccacccucgugagcgacaucgacaucaccuuccugaagaaggacgcccccuacaucgugggcgacgucgugcaggagggcgugcugaccgccgucgugauccccacgaagaaggccgggggcaccaccgagaugcucgcgaaggcccugcgcaaggugccgaccgacaacuacaucacgaccuaccccgggcagggccugaacggguacaccgucgaggaggccaagaccgugcucaagaagugcaaguccgccuucuacauccugcccagcaucaucuccaacgagaagcaggagauccugggcaccgugagcuggaaccuccgggagaugcuggcgcacgccgaggagacgcgcaagcugaugcccgucugcguggagaccaaggccaucguguccaccauccagcggaaguacaagggcaucaagauccaggagggggucguggacuacggcgcccgcuucuacuucuacaccagcaagacgaccguggccucccugaucaacacccucaacgaccugaacgagacccuggucacgaugccgcucggguacgugacccacggccugaaccuggaggaggcggcccgguacaugcgcagccucaaggugcccgccaccgucuccgugagcucccccgacgccgugaccgccuacaacggguaccugacgagcuccagcaagacccccgaggagcacuucaucgagaccaucucccuggcgggcagcuacaaggacuggagcuacuccggccagagcacccagcucgggaucgaguuccugaagcggggcgacaaguccgucuacuacacgagcaacccgaccaccuuccaccuggacggggaggugaucaccuucgacaaccucaagacgcugcugucccuccgcgaggugcggaccaucaaggucuucaccaccguggacaacaucaaccugcacacgcagguggucgacaugagcaugaccuacggccagcaguucggccccaccuaccuggacggggccgacgugaccaagaucaagccccacaacucccacgagggcaagacguucuacgugcucccgaacgacgacacccugcgcgucgaggccuucgaguacuaccacaccaccgaccccagcuuccuggggcgguacauguccgcccucaaccacacgaagaaguggaaguacccccaggugaacggccugaccagcaucaagugggccgacaacaacugcuaccuggcgaccgcccuccugacccugcagcagaucgagcucaaguucaaccccccggcccugcaggacgccuacuaccgcgcgcgggccggggaggccgccaacuucugcgcccugauccucgcguacugcaacaagacggugggcgagcugggcgacguccgcgagaccauguccuaccuguuccagcacgccaaccucgacagcugcaagcgggugcugaacgucgugugcaagaccugcgggcagcagcagaccacccugaagggcguggaggccgucauguacauggggacgcucuccuacgagcaguucaagaagggcgugcagauccugugcaccugcgggaagcaggccaccaaguaccuggugcagcaggagagccccuucgucaugauguccgccccccccgcgcaguacgagcucaagcacggcaccuucacgugcgccagcgaguacaccggcaacuaccagugcgggcacuacaagcacaucaccuccaaggagacccuguacugcaucgacggcgcccugcucacgaagagcagcgaguacaaggggccgaucaccgacguguucuacaaggagaacuccuacaccaccacgaucaagcccgugaccuacaagcuggacggcgucgugugcaccgagaucgaccccaagcuggacaacuacuacaagaaggacaacagcuacuucaccgagcagcccaucgaccucgugccgaaccagcccuaccccaacgccuccuucgacaacuucaaguucgucugcgacaacaucaaguucgccgacgaccugaaccagcugacgggguacaagaagcccgcgagccgcgagcucaaggugaccuucuucccggaccugaacggcgacguggucgccaucgacuacaagcacuacacccccuccuucaagaagggcgccaagcugcuccacaagcccaucguguggcacgugaacaacgccaccaacaaggcgacguacaagcccaacaccuggugcauccggugccuguggagcaccaagccggucgagaccuccaacagcuucgacgugcugaaguccgaggacgcccaggggauggacaaccucgccugcgaggaccugaagcccgugagcgaggaggucguggagaaccccacgauccagaaggacgugcuggagugcaacgucaagaccaccgagguggugggcgacaucauccucaagcccgccaacaacucccugaagaucaccgaggaggucgggcacacggaccugauggccgcguacguggacaacagcucccucaccaucaagaagccgaacgagcugagccgcgugcugggccucaagacccuggccacccacgggcuggccgccgucaacuccgugcccugggacacgaucgccaacuacgcgaagcccuuccucaacaagguggucagcaccaccaccaacaucgugacgcgcugccugaaccgggugugcaccaacuacaugccguacuucuucacccugcuccugcagcugugcaccuucacccgcuccacgaacagccggaucaaggccuccaugcccaccaccaucgccaagaacaccgucaagagcgugggcaaguucugccucgaggccagcuucaacuaccugaagucccccaacuucagcaagcugaucaacaucaucaucugguuccuccugcuguccgugugccucggcagccugaucuacuccacggccgcgcuggggguccucaugagcaaccugggcaugcccuccuacugcaccggguaccgcgagggcuaccugaacagcaccaacgugaccaucgccacguacugcaccggcuccaucccgugcagcgugugccucuccgggcuggacagccuggacaccuaccccucccucgagaccauccagaucacgaucagcuccuucaagugggaccugaccgccuucggccuggucgccgagugguuccucgccuacauccuguucacccgguucuucuacgugcuggggcucgcggccaucaugcagcuguucuucagcuacuucgccgugcacuucaucuccaacagcuggcugauguggcugaucaucaaccucguccagauggcccccaucuccgcgauggugcgcauguacaucuucuucgccagcuucuacuacguguggaagagcuacguccacgugguggacggcugcaacuccagcaccugcaugaugugcuacaagcggaaccgcgccacgcgggucgagugcaccaccaucgugaacgggguccgccgguccuucuacguguacgccaacggcggcaagggguucugcaagcugcacaacuggaacugcgugaacugcgacaccuucugcgccggcagcacguucaucuccgacgaggucgcgcgcgaccugagccuccaguucaagcggcccaucaacccgaccgaccaguccagcuacaucguggacuccgugaccgucaagaacgggagcauccaccuguacuucgacaaggccggccagaagaccuacgagcgccacucccugagccacuucgugaaccucgacaaccugcgggccaacaacacgaaggggucccugcccaucaacgugaucgucuucgacggcaagagcaagugcgaggaguccagcgccaaguccgccagcguguacuacucccagcucaugugccagcccauccugcugcucgaccaggcgcuggugagcgacgucggcgacagcgccgagguggccgugaagauguucgacgccuacgucaacaccuucuccagcaccuucaacgugcccauggagaagcugaagacccucguggccacggcggaggccgagcuggccaagaacgucucccuggacaacgugcucagcaccuucaucuccgccgcgcgccagggguucguggacagcgacgucgagaccaaggacgugguggagugccugaagcugucccaccagagcgacaucgaggucaccggcgacuccugcaacaacuacaugcucacguacaacaagguggagaacaugaccccgcgggaccugggggccugcaucgacugcagcgcccgccacaucaacgcccagguggccaagucccacaacaucgcgcugaucuggaacgucaaggacuucaugagccucuccgagcagcugcggaagcagauccgcagcgccgccaagaagaacaaccugcccuucaagcucaccugcgccaccacgcgccagguggugaacgucgugaccaccaagaucgcccugaagggcgggugaggacuaguuauaagacugacuagcccgaugggccucccaacgggcccuccuccccuccuugcaccgagauuaauaaaaaaaaaaaaaaaaaaaaaaaaaaaaaaaaaaaaaaaaaaaaaaaaaaaaaaaaaaaaaaaaugcaucccccccccccccccccccccccccccccccaaaggcucuuuucagagccaccagaauu

SEQ ID NO: 21682 - RNA, 6058 nt, Artificial Sequence
  SARS-CoV-2__MT787503.1__non-structural protein 3 (NSP3) mRNA gc
aggagaaagcuuaccauggcccccaccaaggugaccuucggcgacgacacggucaucgaggugcagggguacaagagcgugaacaucaccuucgagcuggacgagcgcaucgacaagguccucaacgagaagugcuccgccuacaccguggagcugggcaccgaggugaacgaguucgcgugcgucguggccgacgccgugaucaagacgcugcagccggucagcgagcuccugaccccccuggggaucgaccucgacgagugguccauggccaccuacuaccuguucgacgagagcggcgaguucaagcuggccucccacauguacugcagcuucuacccccccgacgaggacgaggaggagggggacugcgaggaggaggaguucgagccguccacccaguacgaguacggcacggaggacgacuaccagggcaagccccucgaguucggggcgaccagcgccgcccugcagcccgaggaggagcaggaggaggacuggcuggacgacgacucccagcagaccgugggccagcaggacgggagcgaggacaaccagaccacgaccauccagaccaucguggagguccagccccagcucgagauggagcugaccccgguggugcagacgaucgaggucaacuccuucagcggcuaccugaagcucaccgacaacguguacaucaagaacgccgacaucguggaggaggcgaagaaggucaagcccaccgugguggucaacgccgccaacguguaccugaagcacgggggcggcguggccggggcccugaacaaggcgaccaacaacgccaugcaggucgaguccgacgacuacaucgccacgaacggcccccucaagguggggggcagcugcguccuguccggccacaaccuggccaagcacugccuccacgugguggggcccaacgucaacaagggcgaggacauccagcugcugaagagcgccuacgagaacuucaaccagcacgaggugcuccuggcgccgcugcucuccgccgggaucuucggcgccgaccccauccacagccugcgggugugcgucgacaccgugcgcaccaacguguaccuggccgucuucgacaagaaccucuacgacaagcugguguccagcuuccuggagaugaagagcgagaagcagguggagcagaagaucgccgagauccccaaggaggaggucaagcccuucaucaccgaguccaagccgagcguggagcagcggaagcaggacgacaagaagaucaaggcgugcguggaggaggucacgaccacccucgaggagaccaaguuccugacggagaaccugcuccuguacaucgacaucaacgggaaccugcaccccgacuccgccacccucgugagcgacaucgacaucaccuuccugaagaaggacgcccccuacaucgugggcgacgucgugcaggagggcgugcugaccgccgucgugauccccacgaagaaggccgggggcaccaccgagaugcucgcgaaggcccugcgcaaggugccgaccgacaacuacaucacgaccuaccccgggcagggccugaacggguacaccgucgaggaggccaagaccgugcucaagaagugcaaguccgccuucuacauccugcccagcaucaucuccaacgagaagcaggagauccugggcaccgugagcuggaaccuccgggagaugcuggcgcacgccgaggagacgcgcaagcugaugcccgucugcguggagaccaaggccaucguguccaccauccagcggaaguacaagggcaucaagauccaggagggggucguggacuacggcgcccgcuucuacuucuacaccagcaagacgaccguggccucccugaucaacacccucaacgaccugaacgagacccuggucacgaugccgcucggguacgugacccacggccugaaccuggaggaggcggcccgguacaugcgcagccucaaggugcccgccaccgucuccgugagcucccccgacgccgugaccgccuacaacggguaccugacgagcuccagcaagacccccgaggagcacuucaucgagaccaucucccuggcgggcagcuacaaggacuggagcuacuccggccagagcacccagcucgggaucgaguuccugaagcggggcgacaaguccgucuacuacacgagcaacccgaccaccuuccaccuggacggggaggugaucaccuucgacaaccucaagacgcugcugucccuccgcgaggugcggaccaucaaggucuucaccaccguggacaacaucaaccugcacacgcaggugauggacaugagcaugaccuacggccagcaguucggccccaccuaccuggacggggccgacgucaccaagaucaagccccacaacucccacgagggcaagacguucuacgugcucccgaacgacgacacccugcgcguggaggccuucgaguacuaccacaccaccgaccccagcuuccuggggcgguacauguccgcccucaaccacacgaagaaguggaaguacccccaggucaacggccugaccagcaucaagugggccgacaacaacugcuaccuggcgaccgcccuccugacccugcagcagaucgagcucaaguucaaccccccggcccugcaggacgccuacuaccgcgcgcgggccggggaggccgccaacuucugcgcccugauccucgcguacugcaacaagacggugggcgagcugggcgacgugcgcgagaccauguccuaccuguuccagcacgccaaccucgacagcugcaagcggguccugaacguggucugcaagaccugcgggcagcagcagaccacccugaagggcguggaggccgugauguacauggggacgcucuccuacgagcaguucaagaagggcguccagauccccugcaccugcgggaagcaggccaccaaguaccuggugcagcaggagagccccuucgugaugauguccgcccccccggcgcaguacgagcugaagcacggcaccuucacgugcgccagcgaguacaccggcaacuaccagugcgggcacuacaagcacaucaccuccaaggagacccucuacugcaucgacggcgcccugcugacgaagagcagcgaguacaaggggcccaucaccgacgucuucuacaaggagaacuccuacaccaccacgaucaagcccgugaccuacaagcucgacggcguggucugcaccgagaucgaccccaagcuggacaacuacuacaagaaggacaacagcuacuucaccgagcagccgaucgaccuggugcccaaccagcccuaccccaacgccuccuucgacaacuucaaguucgugugcgacaacaucaaguucgccgacgaccucaaccagcugacgggguacaagaagccggcgagccgcgagcugaaggucaccuucuuccccgaccucaacggcgacgugguggccaucgacuacaagcacuacacccccuccuucaagaagggcgccaagcugcugcacaagcccaucgucuggcacgugaacaacgccaccaacaaggcgacguacaagccgaacaccuggugcauccggugccucuggagcaccaagcccguggagaccuccaacagcuucgacguccugaaguccgaggacgcccaggggauggacaaccuggccugcgaggaccucaagcccgugagcgaggagguggucgagaaccccacgauccagaaggacgugcuggagugcaacgugaagaccaccgaggucgugggcgacaucauccugaagccggccaacaacucccucaagaucaccgaggagguggggcacacggaccugauggccgcguacgucgacaacagcucccugaccaucaagaagcccaacgagcucagccgcgugcugggccugaagacccucgccacccacgggcuggccgccgugaacuccguccccugggacacgaucgccaacuacgcgaagccguuccugaacaagguggugagcaccaccaccaacaucgucacgcgcugccucaaccgggugugcaccaacuacaugcccuacuucuucacccugcugcuccagcugugcaccuucacccgcuccacgaacagccggaucaaggccuccaugcccaccaccaucgccaagaacaccgugaagagcgucggcaaguucugccuggaggccagcuucaacuaccucaagucccccaacuucagcaagcugaucaacaucaucaucugguuccugcuccuguccgugugccugggcagccucaucuacuccacggccgcgcugggggugcugaugagcaaccucggcaugccguccuacugcaccggguaccgcgagggcuaccugaacagcaccaacgucaccaucgccacguacugcaccggcuccauccccugcagcgugugccuguccgggcucgacagccuggacaccuaccccucccuggagaccauccagaucacgaucagcuccuucaagugggaccucaccgccuucggccugguggccgagugguuccuggccuacauccucuucacccgguucuucuacguccuggggcuggcggccaucaugcagcucuucuucagcuacuucgccgugcacuucaucuccaacagcuggcugauguggcugaucaucaaccuggugcagauggcccccaucuccgcgaugguccgcauguacaucuucuucgccagcuucuacuacguguggaagagcuacgugcacgucguggacggcugcaacuccagcaccugcaugaugugcuacaagcggaaccgcgccacgcggguggagugcaccaccaucgucaacggggugcgccgguccuucuacgucuacgccaacggcggcaagggguucugcaagcuccacaacuggaacugcgugaacugcgacaccuucugcgccggcagcacguucaucuccgacgagguggcgcgcgaccugagccugcaguucaagcggccgaucaaccccaccgaccaguccagcuacaucgucgacuccgugaccgugaagaacgggagcauccaccucuacuucgacaaggccggccagaagaccuacgagcgccacucccugagccacuucgucaaccuggacaaccuccgggccaacaacacgaaggggucccugcccaucaacgugaucguguucgacggcaagagcaagugcgaggaguccagcgccaaguccgccagcgucuacuacucccagcugaugugccagcccauccuccugcuggaccaggcgcucgugagcgacgugggcgacagcgccgaggucgccgugaagauguucgacgccuacgugaacaccuucuccagcaccuucaacgucccgauggagaagcugaagacccugguggccacggcggaggccgagcucgccaagaacgugucccuggacaacguccugagcaccuucaucuccgccgcgcgccagggguucguggacagcgacguggagaccaaggacgucguggagugccucaagcugucccaccagagcgacaucgaggugaccggcgacuccugcaacaacuacaugcugacguacaacaaggucgagaacaugaccccccgggaccucggggccugcaucgacugcagcgcccgccacaucaacgcccagguggccaagucccacaacaucgcgcugaucuggaacgugaaggacuucaugagccuguccgagcagcuccggaagcagauccgcagcgccgccaagaagaacaaccugcccuucaagcugaccugcgccaccacgcgccaggucgugaacguggucaccaccaagaucgcccucaagggcgggugaggacuaguuauaagacugacuagcccgaugggccucccaacgggcccuccuccccuccuugcaccgagauuaauaaaaaaaaaaaaaaaaaaaaaaaaaaaaaaaaaaaaaaaaaaaaaaaaaaaaaaaaaaaaaaaaugcaucccccccccccccccccccccccccccccccaaaggcucuuuucagagccaccagaauu

SEQ ID NO: 21683 - RNA, 6058 nt, Artificial Sequence
  SARS-CoV-2__MT781415.1__non-structural protein 3 (NSP3) mRNA gc
aggagaaagcuuaccauggcccccaccaaggugaccuucggcgacgacacggucaucgaggugcagggguacaagagcgugaacaucaccuucgagcuggacgagcgcaucgacaagguccucaacgagaagugcuccgccuacaccguggagcugggcaccgaggugaacgaguucgcgugcgucguggccgacgccgugaucaagacgcugcagccggucagcgagcuccugaccccccuggggaucgaccucgacgagugguccauggccaccuacuaccuguucgacgagagcggcgaguucaagcuggccucccacauguacugcagcuucuacccccccgacgaggacgaggaggagggggacugcgaggaggaggaguucgagccguccacccaguacgaguacggcacggaggacgacuaccagggcaagccccucgaguucggggcgaccagcgccgcccugcagcccgaggaggagcaggaggaggacuggcuggacgacgacucccagcagaccgugggccagcaggacgggagcgaggacaaccagaccacgaccauccagaccaucguggagguccagccccagcucgagauggagcugaccccgguggugcagacgaucgaggucaacuccuucagcggcuaccugaagcucaccgacaacguguacaucaagaacgccgacaucguggaggaggcgaagaaggucaagcccaccgugguggucaacgccgccaacguguaccugaagcacgggggcggcguggccggggcccugaacaaggcgaccaacaacgccaugcaggucgaguccgacgacuacaucgccacgaacggcccccucaagguggggggcagcugcguccuguccggccacaaccuggccaagcacugccuccacgugguggggcccaacgucaacaagggcgaggacauccagcugcugaagagcgccuacgagaacuucaaccagcacgaggugcuccuggcgccgcugcucuccgccgggaucuucggcgccgaccccauccacagccugcgggugugcgucgacaccgugcgcaccaacguguaccuggccgucuucgacaagaaccucuacgacaagcugguguccagcuuccuggagaugaagagcgagaagcagguggagcagaagaucgccgagauccccaaggaggaggucaagcccuucaucaccgaguccaagccgagcguggagcagcggaagcaggacgacaagaagaucaaggcgugcguggaggaggucacgaccacccucgaggagaccaaguuccugacggagaaccugcuccuguacaucgacaucaacgggaaccugcaccccgacuccgccacccucgugagcgacaucgacaucaccuuccugaagaaggacgcccccuacaucgugggcgacgucgugcaggagggcgugcugaccgccgucgugauccccacgaagaaggccgggggcaccaccgagaugcucgcgaaggcccugcgcaaggugccgaccgacaacuacaucacgaccuaccccgggcagggccugaacggguacaccgucgaggaggccaagaccgugcucaagaagugcaaguccgccuucuacauccugcccagcaucaucuccaacgagaagcaggagauccugggcaccgugagcuggaacuuccgggagaugcucgcgcacgccgaggagacgcgcaagcugaugcccgucugcguggagaccaaggccaucguguccaccauccagcggaaguacaagggcaucaagauccaggagggggucguggacuacggcgcccgcuucuacuucuacaccagcaagacgaccguggccucccugaucaacacccugaacgaccucaacgagacccuggucacgaugccgcugggguacgugacccacggccucaaccuggaggaggcggcccgguacaugcgcagccugaaggugcccgccaccgucuccgugagcucccccgacgccgugaccgccuacaacggguaccucacgagcuccagcaagacccccgaggagcacuucaucgagaccaucucccuggcgggcagcuacaaggacuggagcuacuccggccagagcacccagcuggggaucgaguuccucaagcggggcgacaaguccgucuacuacacgagcaacccgaccaccuuccaccuggacggggaggugaucaccuucgacaaccugaagacgcuccugucccugcgcgaggugcggaccaucaaggucuucaccaccguggacaacaucaaccuccacacgcagguggucgacaugagcaugaccuacggccagcaguucggccccaccuaccuggacggggccgacgugaccaagaucaagccccacaacucccacgagggcaagacguucuacgugcugccgaacgacgacacccuccgcgucgaggccuucgaguacuaccacaccaccgaccccagcuuccuggggcgguacauguccgcccugaaccacacgaagaaguggaaguacccccaggugaacggccucaccagcaucaagugggccgacaacaacugcuaccuggcgaccgcccugcucacccugcagcagaucgagcugaaguucaaccccccggcccuccaggacgccuacuaccgcgcgcgggccggggaggccgccaacuucugcgcccugauccuggcguacugcaacaagacggugggcgagcucggcgacguccgcgagaccauguccuaccuguuccagcacgccaaccuggacagcugcaagcgggugcucaacgucgugugcaagaccugcgggcagcagcagaccacccugaagggcguggaggccgucauguacauggggacgcuguccuacgagcaguucaagaagggcgugcagauccccugcaccugcgggaagcaggccaccaaguaccucgugcagcaggagagccccuucgucaugauguccgcccccccggcgcaguacgagcugaagcacggcaccuucacgugcgccagcgaguacaccggcaacuaccagugcgggcacuacaagcacaucaccuccaaggagacccuguacugcaucgacggcgcccuccugacgaagagcagcgaguacaaggggcccaucaccgacguguucuacaaggagaacuccuacaccaccacgaucaagcccgugaccuacaagcuggacggcgucgugugcaccgagaucgaccccaagcucgacaacuacuacaagaaggacaacagcuacuucaccgagcagccgaucgaccuggugcccaaccagcccuaccccaacgccuccuucgacaacuucaaguucgucugcgacaacaucaaguucgccgacgaccugaaccagcucacgggguacaagaagccggcgagccgcgagcugaaggugaccuucuuccccgaccugaacggcgacguggucgccaucgacuacaagcacuacacccccuccuucaagaagggcgccaagcuccugcacaagcccaucguguggcacgugaacaacgccaccaacaaggcgacguacaagccgaacaccuggugcauccggugccuguggagcaccaagcccgucgagaccuccaacagcuucgacgugcucaaguccgaggacgcccaggggauggacaaccuggccugcgaggaccugaagcccgugagcgaggaggucguggagaaccccacgauccagaaggacgugcucgagugcaacgucaagaccaccgagguggugggcgacaucauccugaagccggccaacaacucccugaagaucaccgaggaggucgggcacacggaccucauggccgcguacguggacaacagcucccugaccaucaagaagcccaacgagcugagccgcgugcucggccugaagacccuggccacccacgggcucgccgccgucaacuccgugcccugggacacgaucgccaacuacgcgaagccguuccugaacaagguggucagcaccaccaccaacaucgugacgcgcugccugaaccgggugugcaccaacuacaugcccuacuucuucacccuccugcugcagcucugcaccuucacccgcuccacgaacagccggaucaaggccuccaugcccaccaccaucgccaagaacaccgucaagagcgugggcaaguucugccuggaggccagcuucaacuaccugaagucccccaacuucagcaagcucaucaacaucaucaucugguuccugcugcucuccgugugccugggcagccugaucuacuccacggccgcgcucgggguccugaugagcaaccugggcaugccguccuacugcaccggguaccgcgagggcuaccucaacagcaccaacgugaccaucgccacguacugcaccggcuccauccccugcagcgugugccuguccgggcuggacagccucgacaccuaccccucccuggagaccauccagaucacgaucagcuccuucaagugggaccugaccgccuucggccucgucgccgagugguuccuggccuacauccuguucacccgguucuucuacgugcucgggcuggcggccaucaugcagcuguucuucagcuacuucgccgugcacuucaucuccaacagcuggcucauguggcugaucaucaaccugguccagauggcccccaucuccgcgauggugcgcauguacaucuucuucgccagcuucuacuacguguggaagagcuacguccacgugguggacggcugcaacuccagcaccugcaugaugugcuacaagcggaaccgcgccacgcgggucgagugcaccaccaucgugaacgggguccgccgguccuucuacguguacgccaacggcggcaagggguucugcaagcugcacaacuggaacugcgugaacugcgacaccuucugcgccggcagcacguucaucuccgacgaggucgcgcgcgaccucagccugcaguucaagcggccgaucaaccccaccgaccaguccagcuacaucguggacuccgugaccgucaagaacgggagcauccaccuguacuucgacaaggccggccagaagaccuacgagcgccacucccucagccacuucgugaaccuggacaaccugcgggccaacaacacgaaggggucccuccccaucaacgugaucgucuucgacggcaagagcaagugcgaggaguccagcgccaaguccgccagcguguacuacucccagcugaugugccagcccauccugcuccuggaccaggcgcuggugagcgacgucggcgacagcgccgagguggccgugaagauguucgacgccuacgucaacaccuucuccagcaccuucaacgugccgauggagaagcucaagacccugguggccacggcggaggccgagcuggccaagaacgucucccucgacaacgugcugagcaccuucaucuccgccgcgcgccagggguucguggacagcgacgucgagaccaaggacgugguggagugccugaagcucucccaccagagcgacaucgaggucaccggcgacuccugcaacaacuacaugcugacguacaacaagguggagaacaugaccccccgggaccugggggccugcaucgacugcagcgcccgccacaucaacgcccagguggccaagucccacaacaucgcgcucaucuggaacgucaaggacuucaugagccuguccgagcagcugcggaagcagauccgcagcgccgccaagaagaacaaccuccccuucaagcugaccugcgccaccacgcgccagguggugaacgucgugaccaccaagaucgcccugaagggcgggugaggacuaguuauaagacugacuagcccgaugggccucccaacgggcccuccuccccuccuugcaccgagauuaauaaaaaaaaaaaaaaaaaaaaaaaaaaaaaaaaaaaaaaaaaaaaaaaaaaaaaaaaaaaaaaaaugcaucccccccccccccccccccccccccccccccaaaggcucuuuucagagccaccagaauu

SEQ ID NO: 21684 - RNA, 6058 nt, Artificial Sequence
  SARS-CoV-2__MT782381.1__non-structural protein 3 (NSP3) mRNA gc
aggagaaagcuuaccauggcccccaccaaggugaccuucggcgacgacacggucaucgaggugcagggguacaagagcgugaacaucaccuucgagcuggacgagcgcaucgacaagguccucaacgagaagugcuccgccuacaccguggagcugggcaccgaggugaacgaguucgcgugcgucguggccgacgccgugaucaagacgcugcagccggucagcgagcuccugaccucccuggggaucgaccucgacgaguggagcauggccaccuacuaccuguucgacgaguccggcgaguucaagcuggccagccacauguacugcuccuucuacccccccgacgaggacgaggaggagggggacugcgaggaggaggaguucgagcccagcacccaguacgaguacggcacggaggacgacuaccagggcaagccgcucgaguucggggcgaccuccgccgcccugcagcccgaggaggagcaggaggaggacuggcuggacgacgacagccagcagaccgugggccagcaggacggguccgaggacaaccagaccacgaccauccagaccaucguggagguccagccccagcucgagauggagcugacccccguggugcagacgaucgaggucaacagcuucuccggcuaccugaagcucaccgacaacguguacaucaagaacgccgacaucguggaggaggcgaagaaggucaagccgaccgugguggucaacgccgccaacguguaccugaagcacgggggcggcguggccggggcccugaacaaggcgaccaacaacgccaugcaggucgagagcgacgacuacaucgccacgaacggcccccucaagguggggggcuccugcguccugagcggccacaaccuggccaagcacugccuccacgugguggggcccaacgucaacaagggcgaggacauccagcugcugaaguccgccuacgagaacuucaaccagcacgaggugcuccuggcgccccugcucagcgccgggaucuucggcgccgacccgauccacucccugcgggugugcgucgacaccgugcgcaccaacguguaccuggccgucuucgacaagaaccucuacgacaagcuggugagcagcuuccuggagaugaaguccgagaagcagguggagcagaagaucgccgagauccccaaggaggaggucaagcccuucaucaccgagagcaagcccuccguggagcagcggaagcaggacgacaagaagaucaaggcgugcguggaggaggucacgaccacccucgaggagaccaaguuccugacggagaaccugcuccuguacaucgacaucaacgggaaccugcacccggacagcgccacccucguguccgacaucgacaucaccuuccugaagaaggacgcccccuacaucgugggcgacgucgugcaggagggcgugcugaccgccgucgugauccccacgaagaaggccgggggcaccaccgagaugcucgcgaaggcccugcgcaaggugcccaccgacaacuacaucacgaccuacccggggcagggccugaacggguacaccgucgaggaggccaagaccgugcucaagaagugcaagagcgccuucuacauccugcccuccaucaucagcaacgagaagcaggagauccugggcaccguguccuggaaccuccgggagaugcuggcgcacgccgaggagacgcgcaagcugaugcccgucugcguggagaccaaggccaucgugagcaccauccagcggaaguacaagggcaucaagauccaggagggggucguggacuacggcgcccgcuucuacuucuacaccuccaagacgaccguggccagccugaucaacacccucaacgaccugaacgagacccuggucacgaugccccucggguacgugacccacggccugaaccuggaggaggcggcccgguacaugcgcucccucaaggugccggccaccgucagcguguccagccccgacgccgugaccgccuacaacggguaccugacguccagcuccaagacccccgaggagcacuucaucgagaccaucagccuggcgggcagcuacaaggacugguccuacagcggccaguccacccagcucgggaucgaguuccugaagcggggcgacaagagcgucuacuacacguccaaccccaccaccuuccaccuggacggggaggugaucaccuucgacaaccucaagacgcugcugagccuccgcgaggugcggaccaucaaggucuucaccaccguggacaacaucaaccugcacacgcagguggucgacauguccaugaccuacggccagcaguucggcccgaccuaccuggacggggccgacgugaccaagaucaagccccacaacagccacgagggcaagacguucuacgugcuccccaacgacgacacccugcgcgucgaggccuucgaguacuaccacaccaccgacccguccuuccuggggcgguacaugagcgcccucaaccacacgaagaaguggaaguacccccaggugaacggccugaccuccaucaagugggccgacaacaacugcuaccuggcgaccgcccuccugacccugcagcagaucgagcucaaguucaacccccccgcccugcaggacgccuacuaccgcgcgcgggccggggaggccgccaacuucugcgcccugauccucgcguacugcaacaagacggugggcgagcugggcgacguccgcgagaccaugagcuaccuguuccagcacgccaaccucgacuccugcaagcgggugcugaacgucgugugcaagaccugcgggcagcagcagaccacccugaagggcguggaggccgucauguacauggggacgcucagcuacgagcaguucaagaagggcgugcagaucccgugcaccugcgggaagcaggccaccaaguaccuggugcagcaggagucccccuucgucaugaugagcgccccccccgcgcaguacgagcugaagcacggcaccuucacgugcgccuccgaguacaccggcaacuaccagugcgggcacuacaagcacaucaccagcaaggagacccucuacugcaucgacggcgcccugcugacgaagagcuccgaguacaaggggccgaucaccgacguguucuacaaggagaacagcuacaccaccacgaucaagcccgugaccuacaagcucgacggcgucgugugcaccgagaucgaccccaagcuggacaacuacuacaagaaggacaacuccuacuucaccgagcagcccaucgaccuggugccgaaccagcccuaccccaacgccagcuucgacaacuucaaguucgucugcgacaacaucaaguucgccgacgaccucaaccagcugacgggguacaagaagcccgcgucccgcgagcugaaggugaccuucuucccggaccucaacggcgacguggucgccaucgacuacaagcacuacacccccagcuucaagaagggcgccaagcugcugcacaagcccaucguguggcacgugaacaacgccaccaacaaggcgacguacaagcccaacaccuggugcauccggugccucugguccaccaagccggucgagaccagcaacuccuucgacgugcugaagagcgaggacgcccaggggauggacaaccuggccugcgaggaccucaagcccguguccgaggaggucguggagaaccccacgauccagaaggacgugcuggagugcaacgucaagaccaccgagguggugggcgacaucauccugaagcccgccaacaacagccucaagaucaccgaggaggucgggcacacggaccugauggccgcguacguggacaacuccagccugaccaucaagaagccgaacgagcucucccgcgugcugggccugaagacccucgccacccacgggcuggccgccgucaacagcgugcccugggacacgaucgccaacuacgcgaagcccuuccugaacaagguggucuccaccaccaccaacaucgugacgcgcugccucaaccgggugugcaccaacuacaugccguacuucuucacccugcugcuccagcugugcaccuucacccgcagcacgaacucccggaucaaggccagcaugcccaccaccaucgccaagaacaccgucaagagcgugggcaaguucugccuggaggccuccuucaacuaccucaagagccccaacuucuccaagcugaucaacaucaucaucugguuccugcuccugagcgugugccugggcucccucaucuacagcacggccgcgcuggggguccugauguccaaccucggcaugcccagcuacugcaccggguaccgcgagggcuaccugaacuccaccaacgugaccaucgccacguacugcaccggcagcaucccgugcuccgugugccugagcgggcucgacucccuggacaccuaccccagccuggagaccauccagaucacgaucuccagcuucaagugggaccucaccgccuucggccuggucgccgagugguuccuggccuacauccucuucacccgguucuucuacgugcuggggcuggcggccaucaugcagcucuucuucuccuacuucgccgugcacuucaucagcaacuccuggcugauguggcugaucaucaaccugguccagauggcccccaucagcgcgauggugcgcauguacaucuucuucgccagcuucuacuacguguggaaguccuacguccacgugguggacggcugcaacagcuccaccugcaugaugugcuacaagcggaaccgcgccacgcgggucgagugcaccaccaucgugaacgggguccgccggagcuucuacguguacgccaacggcggcaagggguucugcaagcuccacaacuggaacugcgugaacugcgacaccuucugcgccggcuccacguucaucagcgacgaggucgcgcgcgaccugucccugcaguucaagcggcccaucaacccgaccgaccagagcuccuacaucguggacagcgugaccgucaagaacggguccauccaccucuacuucgacaaggccggccagaagaccuacgagcgccacagccugucccacuucgugaaccuggacaaccuccgggccaacaacacgaaggggagccugcccaucaacgugaucgucuucgacggcaaguccaagugcgaggagagcuccgccaagagcgccuccguguacuacagccagcugaugugccagcccauccuccugcuggaccaggcgcucgugagcgacgucggcgacuccgccgagguggccgugaagauguucgacgccuacgucaacaccuucagcuccaccuucaacgugcccauggagaagcugaagacccugguggccacggcggaggccgagcucgccaagaacgucagccuggacaacgugcuguccaccuucaucagcgccgcgcgccagggguucguggacuccgacgucgagaccaaggacgugguggagugccucaagcugagccaccaguccgacaucgaggucaccggcgacagcugcaacaacuacaugcugacguacaacaagguggagaacaugaccccgcgggaccucggggccugcaucgacugcuccgcccgccacaucaacgcccagguggccaagagccacaacaucgcgcugaucuggaacgucaaggacuucaugucccugagcgagcagcuccggaagcagauccgcuccgccgccaagaagaacaaccugcccuucaagcugaccugcgccaccacgcgccagguggugaacgucgugaccaccaagaucgcccucaagggcgggugaggacuaguuauaagacugacuagcccgaugggccucccaacgggcccuccuccccuccuugcaccgagauuaauaaaaaaaaaaaaaaaaaaaaaaaaaaaaaaaaaaaaaaaaaaaaaaaaaaaaaaaaaaaaaaaaugcaucccccccccccccccccccccccccccccccaaaggcucuuuucagagccaccagaauu

SEQ ID NO: 21685 - RNA, 6058 nt, Artificial Sequence
  SARS-CoV-2__MT786334.1__non-structural protein 3 (NSP3) mRNA gc
aggagaaagcuuaccauggcccccaccaaggugaccuucggcgacgacacggucaucgaggugcagggguacaagagcgugaacaucaccuucgagcuggacgagcgcaucgacaagguccucaacgagaagugcuccgccuacaccguggagcugggcaccgaggugaacgaguucgcgugcgucguggccgacgccgugaucaagacgcugcagccggucagcgagcuccugaccccccuggggaucgaccucgacgagugguccauggccaccuacuaccuguucgacgagagcggcgaguucaagcuggccucccacauguacugcagcuucuacccccccgacgaggacgaggaggagggggacugcgaggaggaggaguucgagccguccacccaguacgaguacggcacggaggacgacuaccagggcaagccccucgaguucggggcgaccagcgccgcccugcagcccgaggaggagcaggaggaggacuggcuggacgacgacucccagcagaccgugggccagcaggacgggagcgaggacaaccagaccacgaccauccagaccaucguggagguccagccccagcucgagauggagcugaccccgguggugcagacgaucgaggucaacuccuucagcggcuaccugaagcucaccgacaacguguacaucaagaacgccgacaucguggaggaggcgaagaaggucaagcccaccgugguggucaacgccgccaacguguaccugaagcacgggggcggcguggccggggcccugaacaaggcgaccaacaacgccaugcaggucgaguccgacgacuacaucgccacgaacggcccccucaagguggggggcagcugcguccuguccggccacaaccuggccaagcacugccuccacgugguggggcccaacgucaacaagggcgaggacauccagcugcugaagagcgccuacgagaacuucaaccagcacgaggugcuccuggcgccgcugcucuccgccgggaucuucggcgccgaccccauccacagccugcgggugugcgucgacaccgugcgcaccaacguguaccuggccgucuucgacaagaaccucuacgacaagcugguguccagcuuccuggagaugaagagcgagaagcagguggagcagaagaucgccgagauccccaaggaggaggucaagcccuucaucaccgaguccaagccgagcguggagcagcggaagcaggacgacaagaagaucaaggcgugcguggaggaggucacgaccacccucgaggagaccaaguuccugacggagaaccugcuccuguacaucgacaucaacgggaaccugcaccccgacuccgccacccucgugagcgacaucgacaucaccuuccugaagaaggacgcccccuacaucgugggcgacgucgugcaggagggcgugcugaccgccgucgugauccccacgaagaaggccgggggcaccaccgagaugcucgcgaaggcccugcgcaaggugccgaccgacaacuacaucacgaccuaccccgggcagggccugaacggguacaccgucgaggaggccaagaccgugcucaagaagugcaaguccgccuucuacauccugcccagcaucaucuccaacgagaagcaggagauccugggcaccgugagcuggaaccuccgggagaugcuggcgcacgccgaggagacgcgcaagcugaugcccgucugcguggagaccaaggccaucguguccaccauccagcggaaguacaagggcaucaagauccaggagggggucguggacuacggcgcccgcuucuacuucuacaccagcaagacgaccguggccucccugaucaacacccucaacgaccugaacgagacccuggucacgaugccgcucggguacgugacccacggccugaaccuggaggaggcggcccgguacaugcgcagccucaaggugcccgccaccgucuccgugagcucccccgacgccgugaccgccuacaacggguaccugacgagcuccagcaagacccccgaggagcacuucaucgagaccaucucccuggcgggcagcuacaaggacuggagcuacuccggccagagcacccagcucgggaucgaguuccugaagcggggcgacaaguccgucuacuacacgagcaacccgaccaccuuccaccuggacggggaggugaucaccuucgacaaccucaagacgcugcugucccuccgcgaggugcggaccaucaaggucuucaccaccguggacaacaucaaccugcacacgcagguggucgacaugagcaugaccuacggccagcaguucggccccaccuaccuggacggggccgacgugaccaagaucaagccccacaacucccacgagggcaagacguucuacgugcucccgaacgacgacacccugcgcgucgaggccuucgaguacuaccacaccaccgaccccagcuuccuggggcgguacauguccgcccucaaccacacgaagaaguggaaguacccccaggugaacggccugaccagcaucaagugggccgacaacaacugcuaccuggcgaccgcccuccugacccugcagcagaucgagcucaaguucaaccccccggcccugcaggacgccuacuaccgcgcgcgggccggggaggccgccaacuucugcgcccugauccucgcguacugcaacaagacggugggcgagcugggcgacguccgcgagaccauguccuaccuguuccagcacgccaaccucgacagcugcaagcgggugcugaacgucgugugcaagaccugcgggcagcagcagaccacccugaagggcguggaggccgucauguacauggggacgcucuccuacgagcaguucaagaagggcgugcagauccccugcaccugcgggaagcaggccaccaaguaccuggugcagcaggagagccccuucgucaugauguccgcccccccggcgcaguacgagcugaagcacggcaccuucacgugcgccagcgaguacaccggcaacuaccagugcgggcacuacaagcacaucaccuccaaggagacccucuacugcaucgacggcgcccugcugacgaagagcagcgaguacaaggggcccaucaccgacguguucuacaaggagaacuccuacaccaccacgaucaagcccgugaccuacaagcucgacggcgucgugugcaccgagaucgaccccaagcuggacaacuacuacaagaaggacaacagcuacuucaccgagcagccgaucgaccuggugcccaaccagcccuaccccaacgccuccuucgacaacuucaaguucgucugcgacaacaucaaguucgccgacgaccucaaccagcugacgggguacaagaagccggcgagccgcgagcugaaggugaccuucuuccccgaccucaacggcgacguggucgccaucgacuacaagcacuacacccccuccuucaagaagggcgccaagcugcugcacaagcccaucguguggcacgugaacaacgccaccaacaaggcgacguacaagccgaacaccuggugcauccggugccucuggagcaccaaguccgucgagaccagcaacuccuucgacgugcugaagagcgaggacgcccaggggauggacaaccuggccugcgaggaccucaagcccguguccgaggaggucguggagaaccccacgauccagaaggacgugcuggagugcaacgucaagaccaccgagguggugggcgacaucauccugaagcccgccaacaacagccucaagaucaccgaggaggucgggcacacggaccugauggccgcguacguggacaacuccagccugaccaucaagaagccgaacgagcucucccgcgugcugggccugaagacccucgccacccacgggcuggccgccgucaacagcgugcccugggacacgaucgccaacuacgcgaagcccuuccugaacaagguggucuccaccaccaccaacaucgugacgcgcugccucaaccgggugugcaccaacuacaugccguacuucuucacccugcugcuccagcugugcaccuucacccgcagcacgaacucccggaucaaggccagcaugcccaccaccaucgccaagaacaccgucaagagcgugggcaaguucugccuggaggccuccuucaacuaccucaagagccccaacuucuccaagcugaucaacaucaucaucugguuccugcuccugagcgugugccugggcucccucaucuacagcacggccgcgcuggggguccugauguccaaccucggcaugcccagcuacugcaccggguaccgcgagggcuaccugaacuccaccaacgugaccaucgccacguacugcaccggcagcaucccgugcuccgugugccugagcgggcucgacucccuggacaccuaccccagccuggagaccauccagaucacgaucuccagcuucaagugggaccucaccgccuucggccuggucgccgagugguuccuggccuacauccucuucacccgguucuucuacgugcuggggcuggcggccaucaugcagcucuucuucuccuacuucgccgugcacuucaucagcaacuccuggcugauguggcugaucaucaaccugguccagauggcccccaucagcgcgauggugcgcauguacaucuucuucgccagcuucuacuacguguggaaguccuacguccacgugguggacggcugcaacagcuccaccugcaugaugugcuacaagcggaaccgcgccacgcgggucgagugcaccaccaucgugaacgggguccgccggagcuucuacguguacgccaacggcggcaagggguucugcaagcuccacaacuggaacugcgugaacugcgacaccuucugcgccggcuccacguucaucagcgacgaggucgcgcgcgaccugucccugcaguucaagcggcccaucaacccgaccgaccagagcuccuacaucguggacagcgugaccgucaagaacggguccauccaccucuacuucgacaaggccggccagaagaccuacgagcgccacagccugucccacuucgugaaccuggacaaccuccgggccaacaacacgaaggggagccugcccaucaacgugaucgucuucgacggcaaguccaagugcgaggagagcuccgccaagagcgccuccguguacuacagccagcugaugugccagcccauccuccugcuggaccaggcgcucgugagcgacgucggcgacuccgccgagguggccgugaagauguucgacgccuacgucaacaccuucagcuccaccuucaacgugcccauggagaagcugaagacccugguggccacggcggaggccgagcucgccaagaacgucagccuggacaacgugcuguccaccuucaucagcgccgcgcgccagggguucguggacuccgacgucgagaccaaggacgugguggagugccucaagcugagccaccaguccgacaucgaggucaccggcgacagcugcaacaacuacaugcugacguacaacaagguggagaacaugaccccgcgggaccucggggccugcaucgacugcuccgcccgccacaucaacgcccagguggccaagagccacaacaucgcgcugaucuggaacgucaaggacuucaugucccugagcgagcagcuccggaagcagauccgcuccgccgccaagaagaacaaccugcccuucaagcugaccugcgccaccacgcgccagguggugaacgucgugaccaccaagaucgcccucaagggcgggugaggacuaguuauaagacugacuagcccgaugggccucccaacgggcccuccuccccuccuugcaccgagauuaauaaaaaaaaaaaaaaaaaaaaaaaaaaaaaaaaaaaaaaaaaaaaaaaaaaaaaaaaaaaaaaaaugcaucccccccccccccccccccccccccccccccaaaggcucuuuucagagccaccagaauu

SEQ ID NO: 21686 - RNA, 6058 nt, Artificial Sequence
  SARS-CoV-2__MT775826.1__non-structural protein 3 (NSP3) mRNA gc
aggagaaagcuuaccauggcccccaccaaggugaccuucggcgacgacacggucaucgaggugcagggguacaagagcgugaacaucaccuucgagcuggacgagcgcaucgacaagguccucaacgagaagugcuccgccuacaccguggagcugggcaccgaggugaacgaguucgcgugcgucguggccgacgccgugaucaagacgcugcagccggucagcgagcuccugaccccccuggggaucgaccucgacgagugguccauggccaccuacuaccuguucgacgagagcggcgaguucaagcuggccucccacauguacugcagcuucuacccccccgacgaggacgaggaggagggggacugcgaggaggaggaguucgagccguccacccaguacgaguacggcacggaggacgacuaccagggcaagccccucgaguucggggcgaccagcgccgcccugcagcccgaggaggagcaggaggaggacuggcuggacgacgacucccagcagaccgugggccagcaggacgggagcgaggacaaccagaccacgaccauccagaccaucguggagguccagccccagcucgagauggagcugaccccgguggugcagacgaucgaggucaacuccuucagcggcuaccugaagcucaccgacaacguguacaucaagaacgccgacaucguggaggaggcgaagaaggucaagcccaccgugguggucaacgccgccaacguguaccugaagcacgggggcggcguggccggggcccugaacaaggcgaccaacaacgccaugcaggucgaguccgacgacuacaucgccacgaacggcccccucaagguggggggcagcugcguccuguccggcuacaaccuggccaagcacugccuccacgugguggggcccaacgucaacaagggcgaggacauccagcugcugaagagcgccuacgagaacuucaaccagcacgaggugcuccuggcgccgcugcucuccgccgggaucuucggcgccgaccccauccacagccugcgggugugcgucgacaccgugcgcaccaacguguaccuggccgucuucgacaagaaccucuacgacaagcugguguccagcuuccuggagaugaagagcgagaagcagguggagcagaagaucgccgagauccccaaggaggaggucaagcccuucaucaccgaguccaagccgagcguggagcagcggaagcaggacgacaagaagaucaaggcgugcguggaggaggucacgaccacccucgaggagaccaaguuccugacggagaaccugcuccuguacaucgacaucaacgggaaccugcaccccgacuccgccacccucgugagcgacaucgacaucaccuuccugaagaaggacgcccccuacaucgugggcgacgucgugcaggagggcgugcugaccgccgucgugauccccacgaagaaggccgggggcaccaccgagaugcucgcgaaggcccugcgcaaggugccgaccgacaacuacaucacgaccuaccccgggcagggccugaacggguacaccgucgaggaggccaagaccgugcucaagaagugcaaguccgccuucuacauccugcccagcaucaucuccaacgagaagcaggagauccugggcaccgugagcuggaaccuccgggagaugcuggcgcacgccgaggagacgcgcaagcugaugcccgucugcguggagaccaaggccaucguguccaccauccagcggaaguacaagggcaucaagauccaggagggggucguggacuacggcgcccgcuucuacuucuacaccagcaagacgaccguggccucccugaucaacacccucaacgaccugaacgagacccuggucacgaugccgcucggguacgugacccacggccugaaccuggaggaggcggcccgguacaugcgcagccucaaggugcccgccaccgucuccgugagcucccccgacgccgugaccgccuacaacggguaccugacgagcuccagcaagacccccgaggagcacuucaucgagaccaucucccuggcgggcagcuacaaggacuggagcuacuccggccagagcacccagcucgggaucgaguuccugaagcggggcgacaaguccgucuacuacacgagcaacccgaccaccuuccaccuggacggggaggugaucaccuucgacaaccucaagacgcugcugucccuccgcgaggugcggaccaucaaggucuucaccaccguggacaacaucaaccugcacacgcagguggucgacaugagcaugaccuacggccagcaguucggccccaccuaccuggacggggccgacgugaccaagaucaagccccacaacucccacgagggcaagacguucuacgugcucccgaacgacgacacccugcgcgucgaggccuucgaguacuaccacaccaccgaccccagcuuccuggggcgguacauguccgcccucaaccacacgaagaaguggaaguacccccaggugaacggccugaccagcaucaagugggccgacaacaacugcuaccuggcgaccgcccuccugacccugcagcagaucgagcucaaguucaaccccccggcccugcaggacgccuacuaccgcgcgcgggccggggaggccgccaacuucugcgcccugauccucgcguacugcaacaagacggugggcgagcugggcgacguccgcgagaccauguccuaccuguuccagcacgccaaccucgacagcugcaagcgggugcugaacgucgugugcaagaccugcgggcagcagcagaccacccugaagggcguggaggccgucauguacauggggacgcucuccuacgagcaguucaagaagggcgugcagauccccugcaccugcgggaagcaggccaccaaguaccuggugcagcaggagagccccuucgucaugauguccgcccccccggcgcaguacgagcugaagcacggcaccuucacgugcgccagcgaguacaccggcaacuaccagugcgggcacuacaagcacaucaccuccaaggagacccucuacugcaucgacggcgcccugcugacgaagagcagcgaguacaaggggcccaucaccgacguguucuacaaggagaacuccuacaccaccacgaucaagcccgugaccuacaagcucgacggcgucgugugcaccgagaucgaccccaagcuggacaacuacuacaagaaggacaacagcuacuucaccgagcagccgaucgaccuggugcccaaccagcccuaccccaacgccuccuucgacaacuucaaguucgucugcgacaacaucaaguucgccgacgaccucaaccagcugacgggguacaagaagccggcgagccgcgagcugaaggugaccuucuuccccgaccucaacggcgacguggucgccaucgacuacaagcacuacacccccuccuucaagaagggcgccaagcugcugcacaagcccaucguguggcacgugaacaacgccaccaacaaggcgacguacaagccgaacaccuggugcauccggugccucuggagcaccaagcccgucgagaccuccaacagcuucgacgugcugaaguccgaggacgcccaggggauggacaaccuggccugcgaggaccucaagcccgugagcgaggaggucguggagaaccccacgauccagaaggacgugcuggagugcaacgucaagaccaccgagguggugggcgacaucauccugaagccggccaacaacucccucaagaucaccgaggaggucgggcacacggaccugauggccgcguacguggacaacagcucccugaccaucaagaagcccaacgagcucagccgcgugcugggccugaagacccucgccacccacgggcuggccgccgucaacuccgugcccugggacacgaucgccaacuacgcgaagccguuccugaacaagguggucagcaccaccaccaacaucgugacgcgcugccucaaccgggugugcaccaacuacaugcccuacuucuucacccugcugcuccagcugugcaccuucacccgcuccacgaacagccggaucaaggccuccaugcccaccaccaucgccaagaacaccgucaagagcgugggcaaguucugccuggaggccagcuucaacuaccucaagucccccaacuucagcaagcugaucaacaucaucaucugguuccugcuccuguccgugugccugggcagccucaucuacuccacggccgcgcuggggguccugaugagcaaccucggcaugccguccuacugcaccggguaccgcgagggcuaccugaacagcaccaacgugaccaucgccacguacugcaccggcuccauccccugcagcgugugccuguccgggcucgacagccuggacaccuaccccucccuggagaccauccagaucacgaucagcuccuucaagugggaccucaccgccuucggccuggucgccgagugguuccuggccuacauccucuucacccgguucuucuacgugcuggggcuggcggccaucaugcagcucuucuucagcuacuucgccgugcacuucaucuccaacagcuggcugauguggcugaucaucaaccugguccagauggcccccaucuccgcgauggugcgcauguacaucuucuucgccagcuucuacuacguguggaagagcuacguccacgugguggacggcugcaacuccagcaccugcaugaugugcuacaagcggaaccgcgccacgcgggucgagugcaccaccaucgugaacgggguccgccgguccuucuacguguacgccaacggcggcaagggguucugcaagcuccacaacuggaacugcgugaacugcgacaccuucugcgccggcagcacguucaucuccgacgaggucgcgcgcgaccugagccugcaguucaagcggccgaucaaccccaccgaccaguccagcuacaucguggacuccgugaccgucaagaacgggagcauccaccucuacuucgacaaggccggccagaagaccuacgagcgccacucccugagccacuucgugaaccuggacaaccuccgggccaacaacacgaaggggucccugcccaucaacgugaucgucuucgacggcaagagcaagugcgaggaguccagcgccaaguccgccagcguguacuacucccagcugaugugccagcccauccuccugcuggaccaggcgcucgugagcgacgucggcgacagcgccgagguggccgugaagauguucgacgccuacgucaacaccuucuccagcaccuucaacgugccgauggagaagcugaagacccugguggccacggcggaggccgagcucgccaagaacgucucccuggacaacgugcugagcaccuucaucuccgccgcgcgccagggguucguggacagcgacgucgagaccaaggacgugguggagugccucaagcugucccaccagagcgacaucgaggucaccggcgacuccugcaacaacuacaugcugacguacaacaagguggagaacaugaccccccgggaccucggggccugcaucgacugcagcgcccgccacaucaacgcccagguggccaagucccacaacaucgcgcugaucuggaacgucaaggacuucaugagccuguccgagcagcuccggaagcagauccgcagcgccgccaagaagaacaaccugcccuucaagcugaccugcgccaccacgcgccagguggugaacgucgugaccaccaagaucgcccucaagggcgggugaggacuaguuauaagacugacuagcccgaugggccucccaacgggcccuccuccccuccuugcaccgagauuaauaaaaaaaaaaaaaaaaaaaaaaaaaaaaaaaaaaaaaaaaaaaaaaaaaaaaaaaaaaaaaaaaugcaucccccccccccccccccccccccccccccccaaaggcucuuuucagagccaccagaauu

SEQ ID NO: 21687 - RNA, 6058 nt, Artificial Sequence
  SARS-CoV-2__MT775832.1__non-structural protein 3 (NSP3) mRNA gc
aggagaaagcuuaccauggcccccaccaaggugaccuucggcgacgacacggucaucgaggugcagggguacaagagcgugaacaucaccuucgagcuggacgagcgcaucgacaagguccucaacgagaagugcuccgccuacaccguggagcugggcaccgaggugaacgaguucgcgugcgucguggccgacgccgugaucaagacgcugcagccggucagcgagcuccugaccccccuggggaucgaccucgacgagugguccauggccaccuacuaccuguucgacgagagcggcgaguucaagcuggccucccacauguacugcagcuucuacccccccgacgaggacgaggaggagggggacugcgaggaggaggaguucgagccguccacccaguacgaguacggcacggaggacgacuaccagggcaagccccucgaguucggggcgaccagcgccgcccugcagcccgaggaggagcaggaggaggacuggcuggacgacgacucccagcagaccgugggccagcaggacgggagcgaggacaaccagaccacgaccauccagaccaucguggagguccagccccagcucgagauggagcugaccccgguggugcagacgaucgaggucaacuccuucagcggcuaccugaagcucaccgacaacguguacaucaagaacgccgacaucguggaggaggcgaagaaggucaagcccaccgugguggucaacgccgccaacguguaccugaagcacgggggcggcguggccggggcccugaacaaggcgaccaacaacgccaugcaggucgaguccgacgacuacaucgccacgaacggcccccucaagguggggggcagcugcguccuguccggccacaaccuggccaagcacugccuccacgugguggggcccaacgucaacaagggcgaggacauccagcugcugaagagcgccuacgagaacuucaaccagcacgaggugcuccuggcgccgcugcucuccgccgggaucuucggcgccgaccccauccacagccugcgggugugcgucgacaccgugcgcaccaacguguaccuggccgucuucgacaagaaccucuacgacaagcugguguccagcuuccuggagaugaagagcgagaagcagguggagcagaagaucgccgagauccccaaggaggaggucaagcccuucaucaccgaguccaagccgagcguggagcagcggaagcaggacgacaagaagaucaaggcgugcguggaggaggucacgaccacccucgaggagaccaaguuccugacggagaaccugcuccuguacaucgacaucaacgggaaccugcaccccgacuccgccacccucgugagcgacaucgacaucaccuuccugaagaaggacgcccccuacaucgugggcgacgucgugcaggagggcgugcugaccgccgucgugauccccacgaagaaggccgggggcaccaccgagaugcucgcgaaggcccugcgcaaggugccgaccgacaacuacaucacgaccuaccccgggcagggccugaacggguacaccgucgaggaggccaagaccgugcucaagaagugcaaguccgccuucuacauccugcccagcaucaucuccaacgagaagcaggagauccugggcaccgugagcuggaaccuccgggagaugcuggcgcacgccgaggagacgcgcaagcugaugcccgucugcguggagaccaaggccaucguguccaccauccagcggaaguacaagggcaucaagauccaggagggggucguggacuacggcgcccgcuucuacuucuacaccagcaagacgaccguggccucccugaucaacacccucaacgaccugaacgagacccuggucacgaugccgcucggguacgugacccacggccugaaccuggaggaggcggcccgguacaugcgcagccucaaggugcccgccaccgucuccgugagcucccccgacgccgugaccgccuacaacggguaccugacgagcuccagcaagacccccgaggagcacuucaucgagaccaucucccuggcgggcagcuacaaggacuggagcuacuccggccagagcacccagcucgggaucgaguuccugaagcggggcgacaaguccgucuacuacacgagcaacccgaccaccuuccaccuggacggggaggugaucaccuucgacaaccucaagacgcugcugucccuccgcgaggugcggaccaucaaggucuucaccaccguggacaacaucaaccugcacacgcagguggucgacaugagcaugaccuacggccagcaguucggccccaccuaccuggacggggccgacgugaccaagaucaagccccacaacucccacgagggcaagacguucuacgugcucccgaacgacgacacccugcgcgucgaggccuucgaguacuaccacaccaccgaccccagcuuccuggggcgguacauguccgcccucaaccacacgaagaaguggaaguacccccaggugaacggccugaccagcaucaagugggccgacaacaacugcuaccuggcgaccgcccuccugacccugcagcagaucgagcucaaguucaaccccccggcccugcaggacgccuacuaccgcgcgcgggccggggaggccgccaacuucugcgcccugauccucgcguacugcaacaagacggugggcgagcugggcgacguccgcgagaccauguccuaccuguuccagcacgccaaccucgacagcugcaagcgggugcugaacgucgugugcaagaccugcgggcagcagcagaccacccugaagggcguggaggccgucauguacauggggacgcucuccuacgagcaguucaagaagggcgugcagauccccugcaccugcgggaagcaggccaccaaguaccuggugcagcaggagagccccuucgucaugauguccgcccccccggcgcaguacgagcugaagcacggcaccuucacgugcgccagcgaguacaccggcaacuaccagugcgggcacuacaagcacaucaccuccaaggagacccucuacugcaucgacggcgcccugcugacgaagagcagcgaguacaaggggcccaucaccgacguguucuacaaggagaacuccuacaccaccacgaucaagcccgugaccuacaagcucgacggcgucgugugcaccgagaucgaccccaagcuggacaacuacuacaagaaggacaacagcuacuucaccgagcagccgaucgaccuggugcccaaccagcccuaccccaacgccuccuucgacaacuucaaguucgucugcgacaacaucaaguucgccgacgaccucaaccagcugacgggguacaagaagccggcgagccgcgagcugaaggugaccuucuuccccgaccucaacggcgacguggucgccaucgacuacaagcacuacacccccuccuucaagaagggcgccaagcugcugcacaagcccaucguguggcacgugaacaacgccaccaacaaggcgacguacaagccgaacaccuggugcauccggugccucuggagcaccaagcccgucgagaccuccaacagcuucgacgugcugaaguccgaggacgugcaggggauggacaaccuggccugcgaggaccucaagcccgucagcgaggaggugguggagaaccccacgauccagaaggacguccuggagugcaacgugaagaccaccgagguggucggcgacaucauccugaagccggccaacaacucccucaagaucaccgaggagguggggcacacggaccugauggccgccuacguggacaacagcucccugaccaucaagaagcccaacgagcucagccgcguccugggccugaagacccucgcgacccacgggcuggccgccgugaacuccgugcccugggacacgaucgccaacuacgccaagccguuccugaacaaggucgugagcaccaccaccaacaucgugacgcgcugccucaaccgggucugcaccaacuacaugcccuacuucuucacccugcugcuccagcugugcaccuucacccgcuccacgaacagccggaucaaggcguccaugcccaccaccaucgccaagaacaccgugaagagcgugggcaaguucugccuggaggccagcuucaacuaccucaagucccccaacuucagcaagcugaucaacaucaucaucugguuccugcuccuguccgucugccugggcagccucaucuacuccacggccgcccugggggugcugaugagcaaccucggcaugccguccuacugcaccggguaccgcgagggcuaccugaacagcaccaacgugaccaucgcgacguacugcaccggcuccauccccugcagcgucugccuguccgggcucgacagccuggacaccuaccccucccuggagaccauccagaucacgaucagcuccuucaagugggaccucaccgccuucggccugguggccgagugguuccuggccuacauccucuucacccgguucuucuacgugcuggggcuggccgcgaucaugcagcucuucuucagcuacuucgccguccacuucaucuccaacagcuggcugauguggcugaucaucaaccuggugcagauggcccccaucuccgccauggugcgcauguacaucuucuucgcgagcuucuacuacgucuggaagagcuacgugcacguggucgacggcugcaacuccagcaccugcaugaugugcuacaagcggaaccgcgccacgcggguggagugcaccaccaucgucaacggggugcgccgguccuucuacguguacgccaacggcggcaagggguucugcaagcuccacaacuggaacugcgucaacugcgacaccuucugcgccggcagcacguucaucuccgacgagguggcccgcgaccugagccugcaguucaagcggccgaucaaccccaccgaccaguccagcuacaucguggacuccgucaccgugaagaacgggagcauccaccucuacuucgacaaggcgggccagaagaccuacgagcgccacucccugagccacuucgugaaccuggacaaccuccgggccaacaacacgaaggggucccugcccaucaacgucaucguguucgacggcaagagcaagugcgaggaguccagcgccaaguccgccagcguguacuacucccagcugaugugccagcccauccuccugcuggaccaggcccucgucagcgacgugggcgacagcgcggagguggccgucaagauguucgacgccuacgugaacaccuucuccagcaccuucaacgugccgauggagaagcugaagacccuggucgccacggccgaggcggagcucgccaagaacgugucccuggacaacgugcugagcaccuucaucuccgccgcccgccagggguucgucgacagcgacguggagaccaaggacguggucgagugccucaagcugucccaccagagcgacaucgaggugaccggcgacuccugcaacaacuacaugcugacguacaacaagguggagaacaugaccccccgggaccucggggcgugcaucgacugcagcgcccgccacaucaacgcccaggucgccaagucccacaacaucgcccugaucuggaacgugaaggacuucaugagccuguccgagcagcuccggaagcagauccgcagcgcggccaagaagaacaaccugcccuucaagcugaccugcgccaccacgcgccagguggucaacguggugaccaccaagaucgcccucaagggcgggugaggacuaguuauaagacugacuagcccgaugggccucccaacgggcccuccuccccuccuugcaccgagauuaauaaaaaaaaaaaaaaaaaaaaaaaaaaaaaaaaaaaaaaaaaaaaaaaaaaaaaaaaaaaaaaaaugcaucccccccccccccccccccccccccccccccaaaggcucuuuucagagccaccagaauu

SEQ ID NO: 21688 - RNA, 6058 nt, Artificial Sequence
  SARS-CoV-2__MT776407.1__non-structural protein 3 (NSP3) mRNA gc
aggagaaagcuuaccauggcccccaccaaggugaccuucggcgacgacacggucaucgaggugcagggguacaagagcgugaacaucaccuucgagcuggacgagcgcaucgacaagguccucaacgagaagugcuccgccuacaccguggagcugggcaccgaggugaacgaguucgcgugcgucguggccgacgccgugaucaagacgcugcagccggucagcgagcuccugaccccccuggggaucgaccucgacgagugguccauggccaccuacuaccuguucgacgagagcggcgaguucaagcuggccucccacauguacugcagcuucuacccccccgacgaggacgaggaggagggggacugcgaggaggaggaguucgagccguccacccaguacgaguacggcacggaggacgacuaccagggcaagccccucgaguucggggcgaccagcgccgcccugcagcuggaggaggagcaggaggaggacuggcucgacgacgacucccagcagaccgugggccagcaggacgggagcgaggacaaccagaccacgaccauccagaccaucguggagguccagccccagcuggagauggagcugacccccguggugcagacgaucgaggucaacuccuucagcggcuaccucaagcugaccgacaacguguacaucaagaacgccgacaucguggaggaggcgaagaaggucaagccgaccgugguggucaacgccgccaacguguaccugaagcacgggggcggcguggccggggcccucaacaaggcgaccaacaacgccaugcaggucgaguccgacgacuacaucgccacgaacggcccccugaagguggggggcagcugcguccuguccggccacaaccucgccaagcacugccugcacgugguggggcccaacgucaacaagggcgaggacauccagcugcucaagagcgccuacgagaacuucaaccagcacgaggugcugcuggcgccccuccuguccgccgggaucuucggcgccgacccgauccacagccugcgggugugcgucgacaccgugcgcaccaacguguaccucgccgucuucgacaagaaccuguacgacaagcugguguccagcuuccucgagaugaagagcgagaagcagguggagcagaagaucgccgagauccccaaggaggaggucaagcccuucaucaccgaguccaagcccagcguggagcagcggaagcaggacgacaagaagaucaaggcgugcguggaggaggucacgaccacccuggaggagaccaaguuccugacggagaaccuccugcuguacaucgacaucaacgggaaccuccacccggacuccgccacccuggugagcgacaucgacaucaccuuccugaagaaggacgcccccuacaucgugggcgacgucgugcaggagggcgugcucaccgccgucgugauccccacgaagaaggccgggggcaccaccgagaugcuggcgaaggcccugcgcaaggugcccaccgacaacuacaucacgaccuacccggggcagggccucaacggguacaccgucgaggaggccaagaccgugcugaagaagugcaaguccgccuucuacauccugcccagcaucaucuccaacgagaagcaggagauccucggcaccgugagcuggaaccugcgggagaugcuggcgcacgccgaggagacgcgcaagcugaugcccgucugcguggagaccaaggccaucguguccaccauccagcggaaguacaagggcaucaagauccaggagggggucguggacuacggcgcccgcuucuacuucuacaccagcaagacgaccguggccucccucaucaacacccugaacgaccugaacgagacccucgucacgaugccccugggguacgugacccacggccugaaccucgaggaggcggcccgguacaugcgcagccugaaggugccggccaccgucuccgugagcucccccgacgccgugaccgccuacaacggguaccugacgagcuccagcaagacccccgaggagcacuucaucgagaccaucucccucgcgggcagcuacaaggacuggagcuacuccggccagagcacccagcuggggaucgaguuccugaagcggggcgacaaguccgucuacuacacgagcaaccccaccaccuuccaccucgacggggaggugaucaccuucgacaaccugaagacgcugcucucccugcgcgaggugcggaccaucaaggucuucaccaccguggacaacaucaaccugcacacgcagguggucgacaugagcaugaccuacggccagcaguucggcccgaccuaccucgacggggccgacgugaccaagaucaagccccacaacucccacgagggcaagacguucuacgugcugcccaacgacgacacccugcgcgucgaggccuucgaguacuaccacaccaccgacccgagcuuccucgggcgguacauguccgcccugaaccacacgaagaaguggaaguacccccaggugaacggccugaccagcaucaagugggccgacaacaacugcuaccucgcgaccgcccugcugacccuccagcagaucgagcugaaguucaacccccccgcccugcaggacgccuacuaccgcgcgcgggccggggaggccgccaacuucugcgcccucauccuggcguacugcaacaagacggugggcgagcugggcgacguccgcgagaccauguccuaccucuuccagcacgccaaccuggacagcugcaagcgggugcugaacgucgugugcaagaccugcgggcagcagcagaccacccucaagggcguggaggccgucauguacauggggacgcuguccuacgagcaguucaagaagggcgugcagaucccgugcaccugcgggaagcaggccaccaaguaccuggugcagcaggagagccccuucgucaugauguccgccccccccgcgcaguacgagcucaagcacggcaccuucacgugcgccagcgaguacaccggcaacuaccagugcgggcacuacaagcacaucaccuccaaggagacccuguacugcaucgacggcgcccugcucacgaagagcagcgaguacaaggggccgaucaccgacguguucuacaaggagaacuccuacaccaccacgaucaagcccgugaccuacaagcuggacggcgucgugugcaccgagaucgaccccaagcuggacaacuacuacaagaaggacaacagcuacuucaccgagcagcccaucgaccucgugccgaaccagcccuaccccaacgccuccuucgacaacuucaaguucgucugcgacaacaucaaguucgccgacgaccugaaccagcugacgggguacaagaagcccgcgagccgcgagcucaaggugaccuucuucccggaccugaacggcgacguggucgccaucgacuacaagcacuacacccccuccuucaagaagggcgccaagcugcuccacaagcccaucguguggcacgugaacaacgccaccaacaaggcgacguacaagcccaacaccuggugcauccggugccuguggagcaccaagccggucgagaccuccaacagcuucgacgugcugaaguccgaggacgcccaggggauggacaaccucgccugcgaggaccugaagcccgugagcgaggaggucguggagaaccccacgauccagaaggacgugcuggagugcaacgucaagaccaccgagguggugggcgacaucauccucaagcccgccaacaacucccugaagaucaccgaggaggucgggcacacggaccugauggccgcguacguggacaacagcucccucaucaucaagaagccgaacgagcugagccgcgugcugggccucaagacccuggccacccacgggcuggccgccgucaacuccgugcccugggacaccaucgccaacuacgcgaagcccuuccucaacaagguggucagcacgaccaccaacaucgugacccgcugccugaaccgggugugcacgaacuacaugccguacuucuucacccugcuccugcagcugugcaccuucacccgcuccaccaacagccggaucaaggccuccaugcccacgaccaucgccaagaacaccgucaagagcgugggcaaguucugccucgaggccagcuucaacuaccugaagucccccaacuucagcaagcugaucaacaucaucaucugguuccuccugcuguccgugugccucggcagccugaucuacuccaccgccgcgcuggggguccucaugagcaaccugggcaugcccuccuacugcacgggguaccgcgagggcuaccugaacagcaccaacgugaccaucgccaccuacugcacgggcuccaucccgugcagcgugugccucuccgggcuggacagccuggacaccuaccccucccucgagaccauccagaucaccaucagcuccuucaagugggaccugacggccuucggccuggucgccgagugguuccucgccuacauccuguucacccgguucuucuacgugcuggggcucgcggccaucaugcagcuguucuucagcuacuucgccgugcacuucaucuccaacagcuggcugauguggcugaucaucaaccucguccagauggcccccaucuccgcgauggugcgcauguacaucuucuucgccagcuucuacuacguguggaagagcuacguccacgugguggacggcugcaacuccagcaccugcaugaugugcuacaagcggaaccgcgccacccgggucgagugcacgaccaucgugaacgggguccgccgguccuucuacguguacgccaacggcggcaagggguucugcaagcugcacaacuggaacugcgugaacugcgacaccuucugcgccggcagcaccuucaucuccgacgaggucgcgcgcgaccugagccuccaguucaagcggcccaucaacccgacggaccaguccagcuacaucguggacuccgugaccgucaagaacgggagcauccaccuguacuucgacaaggccggccagaagaccuacgagcgccacucccugagccacuucgugaaccucgacaaccugcgggccaacaacaccaaggggucccugcccaucaacgugaucgucuucgacggcaagagcaagugcgaggaguccagcgccaaguccgccagcguguacuacucccagcucaugugccagcccauccugcugcucgaccaggcgcuggugagcgacgucggcgacagcgccgagguggccgugaagauguucgacgccuacgucaacacguucuccagcaccuucaacgugcccauggagaagcugaagacccucguggccaccgcggaggccgagcuggccaagaacgucucccuggacaacgugcucagcacguucaucuccgccgcgcgccagggguucguggacagcgacgucgagaccaaggacgugguggagugccugaagcugucccaccagagcgacaucgaggucaccggcgacuccugcaacaacuacaugcucaccuacaacaagguggagaacaugacgccgcgggaccugggggccugcaucgacugcagcgcccgccacaucaacgcccagguggccaagucccacaacaucgcgcugaucuggaacgucaaggacuucaugagccucuccgagcagcugcggaagcagauccgcagcgccgccaagaagaacaaccugcccuucaagcucaccugcgccaccacccgccagguggugaacgucgugacgaccaagaucgcccugaagggcgggugaggacuaguuauaagacugacuagcccgaugggccucccaacgggcccuccuccccuccuugcaccgagauuaauaaaaaaaaaaaaaaaaaaaaaaaaaaaaaaaaaaaaaaaaaaaaaaaaaaaaaaaaaaaaaaaaugcaucccccccccccccccccccccccccccccccaaaggcucuuuucagagccaccagaauu

SEQ ID NO: 21689 - RNA, 6058 nt, Artificial Sequence
  SARS-CoV-2__MT772271.1__non-structural protein 3 (NSP3) mRNA gc
aggagaaagcuuaccauggcccccaccaaggugaccuucggcgacgacacggucaucgaggugcagggguacaagagcgugaacaucaccuucgagcuggacgagcgcaucgacaagguccucaacgagaagugcuccgccuacaccguggagcugggcaccgaggugaacgaguucgcgugcgucguggccgacgccgugaucaagacgcugcagccggucagcgagcuccugaccccccuggggaucgaccucgacgagugguccauggccaccuacuaccuguucgacgagagcggcgaguucaagcuggccucccacauguacugcagcuucuacccccccgacgaggacgaggaggagggggacugcgaggaggaggaguucgagccguccacccaguacgaguacggcacggaggacgacuaccagggcaagccccucgaguucggggcgaccagcgccgcccugcagcccgaggaggagcaggaggaggacuggcuggacgacgacucccagcagaccgugggccagcaggacgggagcgaggacaaccagaccacgaccauccagaccaucguggagguccagccccagcucgagauggagcugaccccgguggugcagacgaucgaggucaacuccuucagcggcuaccugaagcucaccgacaacguguacaucaagaacgccgacaucguggaggaggcgaagaaggucaagcccaccgugguggucaacgccgccaacguguaccugaagcacgggggcggcguggccggggcccugaacaaggcgaccaacaacgccaugcaggucgaguccgacgacuacaucgccacgaacggcccccucaagguggggggcagcugcguccuguccggccacaaccuggccaagcacugccuccacgugguggggcccaacgucaacaagggcgaggacauccagcugcugaagagcgccuacgagaacuucaaccagcacgaggugcuccuggcgccgcugcucuccgccgggaucuucggcgccgaccccauccacagccugcgggugugcgucgacaccgugcgcaccaacguguaccuggccgucuucgacaagaaccucuacgacaagcugguguccagcuuccuggagaugaagagcgagaagcagguggagcagaagaucgccgagauccccaaggaggaggucaagcccuucaucaccgaguccaagccgagcguggagcagcggaagcaggacgacaagaagaucaaggcgugcguggaggaggucacgaccacccucgaggagaccaaguuccugacggagaaccugcuccuguacaucgacaucaacgggaaccugcaccccgacuccgccacccucgugagcgacaucgacaucaccuuccugaagaaggacgcccccuacaucgugggcgacgucgugcaggagggcgugcugaccgccgucgugauccccacgaagaaggccgggggcaccaccgagaugcucgcgaaggcccugcgcaaggugccgaccgacaacuacaucacgaccuaccccgggcagggccugaacggguacaccgucgaggaggccaagaccgugcucaagaagugcaaguccgccuucuacauccugcccagcaucaucuccaacgagaagcaggagauccugggcaccgugagcuggaaccuccgggagaugcuggcgcacgccgaggagacgcgcaagcugaugcccgucugcguggagaccaaggccaucguguccaccauccagcggaaguacaagggcaucaagauccaggagggggucguggacuacggcgcccgcuucuacuucuacaccagcaagacgaccguggccucccugaucaacacccucaacgaccugaacgagacccuggucacgaugccgcucggguacgugacccacggccugaaccuggaggaggcggcccgguacaugcgcagccucaaggugcccgccaccgucuccgugagcucccccgacgccgugaccgccuacaacggguaccugacgagcuccagcaagacccccgaggagcacuucaucgagaccaucucccuggcgggcagcuacaaggacuggagcuacuccggccagagcacccagcucgggaucgaguuccugaagcggggcgacaaguccgucuacuacacgagcaacccgaccaccuuccaccuggacggggaggugaucaccuucgacaaccucaagacgcugcugucccuccgcgaggugcggaccaucaaggucuucaccaccguggacaacaucaaccugcacacgcagguggucgacaugagcaugaccuacggccagcaguucggccccaccuaccuggacggggccgacgugaccaagaucaagccccacaacucccacgagggcaagacguucuacgugcucccgaacgacgacacccugcgcgucgaggccuucgaguacuaccacaccaccgaccccagcuuccuggggcgguacauguccgcccucaaccacacgaagaaguggaaguacccccaggugaacggccugaccagcaucaagugggccgacaacaacugcuaccuggcgaccgcccuccugacccugcagcagaucgagcucaaguucaaccccccggcccugcaggacgccuacuaccgcgcgcgggccggggaggccgccaacuucugcgcccugauccucgcguacugcaacaagacggugggcgagcugggcgacguccgcgagaccauguccuaccuguuccagcacgccaaccucgacagcugcaagcgggugcugaacgucgugugcaagaccugcgggcagcagcagaccacccugaagggcguggaggccgucauguacauggggacgcucuccuacgagcaguucaagaagggcgugcagauccccugcaccugcgggaagcaggccaccaaguaccuggugcagcaggagagccccuucgucaugauguccgcccccccggcgcaguacgagcugaagcacggcaccuucacgugcgccagcgaguacaccggcaacuaccagugcgggcacuacaagcacaucaccuccaaggagacccucuacugcaucgacggcgcccugcugacgaagagcagcgaguacaaggggcccaucaccgacguguucuacaaggagaacuccuacaccaccacgaucaagcccgugaccuacaagcucgacggcgucgugugcaccgagaucgaccccaagcuggacaacuacuacaagaaggacaacagcuacuucaccgagcagccgaucgaccuggugcccaaccagcccuaccccaacgccuccuucgacaacuucaaguucgucugcgacaacaucaaguucgccgacgaccucaaccagcugacgggguacaagaagccggcgagccgcgagcugaaggugaccuucuuccccgaccucaacggcgacguggucgccaucgacuacaagcacuacacccccuccuucaagaagggcgccaagcugcugcacaagcccaucguguggcacgugaacaacgccaccaacaaggcgacguacaagccgaacaccuggugcauccggugccucuggagcaccaagcccgucgagaccuccaacagcuucgacgugcugaaguccgaggacgcccaggggauggacaaccuggccugcgaggaccucaagcccgugagcgaggaggucguggagaaccccacgauccagaaggacgugcuggagugcaacgucaagaccaccgagguggugggcgacaucauccugaagccggccaacaacucccucaagaucaccgaggaggucgggcacacggaccugauggccgcguacguggacaacagcucccugaccaucaagaagcccaacgagcucagccgcgugcugggccugaagacccucgccacccacgggcuggccgccgucaacuccgugcccugggacacgaucgccaacuacgcgaagccguuccugaacaagguggucagcaccaccaccaacaucgugacgcgcugccucaaccgggugugcaccaacuacaugcccuacuucuucacccugcugcuccagcugugcaccuucacccgcuccacgaacagccggaucaaggccuccaugcccaccaccaucgccaagaacaccgucaagagcgugggcaaguucugccuggaggccagcuucaacuaccucaagucccccaacuucagcaagcugaucaacaucaucaucugguuccugcuccuguccgugugccugggcagccucaucuacuccacggccgcgcuggggguccugaugagcaaccucggcaugccguccuacugcaccggguaccgcgagggcuaccugaacagcaccaacgugaccaucgccacguacugcaccggcuccauccccugcagcgugugccuguccgggcucgacagccuggacaccuaccccucccuggagaccauccagaucacgaucagcuccuucaagugggaccucaccgccuucggccuggucgccgagugguuccuggccuacauccucuucacccgguucuucuacgugcuggggcuggcggccaucaugcagcucuucuucagcuacuucgccgugcacuucaucuccaacagcuggcugauguggcugaucaucaaccugguccagauggcccccaucuccgcgauggugcgcauguacaucuucuucgccagcuucuacuacguguggaagagcuacguccacgugguggacggcugcaacuccagcaccugcaugaugugcuacaagcggaaccgcgccacgcgggucgagugcaccaccaucgugaacgggguccgccgguccuucuacguguacgccaacggcggcaagggguucugcaagcuccacaacuggaacugcgugaacugcgacaccuucugcgccggcagcacguucaucuccgacgaggucgcgcgcgaccugagccugcaguucaagcggccgaucaaccccaccgaccaguccagcuacaucguggacuccgugaccgucaagaacgggagcauccaccucuacuucgacaaggccggccagaagaccuacgagcgccacucccugagccgguucgugaaccuggacaaccuccgcgccaacaacacgaaggggucccugcccaucaacgugaucgucuucgacggcaagagcaagugcgaggaguccagcgccaaguccgccagcguguacuacucccagcugaugugccagcccauccuccugcuggaccaggcgcucgugagcgacgucggcgacagcgccgagguggccgugaagauguucgacgccuacgucaacaccuucuccagcaccuucaacgugccgauggagaagcugaagacccugguggccacggcggaggccgagcucgccaagaacgucucccuggacaacgugcugagcaccuucaucuccgccgcgcggcagggguucguggacagcgacgucgagaccaaggacgugguggagugccucaagcugucccaccagagcgacaucgaggucaccggcgacuccugcaacaacuacaugcugacguacaacaagguggagaacaugaccccccgcgaccucggggccugcaucgacugcagcgcccggcacaucaacgcccagguggccaagucccacaacaucgcgcugaucuggaacgucaaggacuucaugagccuguccgagcagcuccgcaagcagauccgcagcgccgccaagaagaacaaccugcccuucaagcugaccugcgccaccacgcggcagguggugaacgucgugaccaccaagaucgcccucaagggcgggugaggacuaguuauaagacugacuagcccgaugggccucccaacgggcccuccuccccuccuugcaccgagauuaauaaaaaaaaaaaaaaaaaaaaaaaaaaaaaaaaaaaaaaaaaaaaaaaaaaaaaaaaaaaaaaaaugcaucccccccccccccccccccccccccccccccaaaggcucuuuucagagccaccagaauu

SEQ ID NO: 21690 - RNA, 6058 nt, Artificial Sequence
  SARS-CoV-2__MT772417.1__non-structural protein 3 (NSP3) mRNA gc
aggagaaagcuuaccauggcccccaccaaggugaccuucggcgacgacacggucaucgaggugcagggguacaagagcgugaacaucaccuucgagcuggacgagcgcaucgacaagguccucaacgagaagugcuccgccuacaccguggagcugggcaccgaggugaacgaguucgcgugcgucguggccgacgccgugaucaagacgcugcagccggucagcgagcuccugaccccccuggggaucgaccucgacgagugguccauggccaccuacuaccuguucgacgagagcggcgaguucaagcuggccucccacauguacugcagcuucuacccccccgacgaggacgaggaggagggggacugcgaggaggaggaguucgagccguccacccaguacgaguacggcacggaggacgacuaccagggcaagccccucgaguucggggcgaccagcgccgcccugcagcccgaggaggagcaggaggaggacuggcuggacgacgacucccagcagaccgugggccagcaggacgggagcgaggacaaccagaccacgaccauccagaccaucguggagguccagccccagcucgagauggagcugaccccgguggugcagacgaucgaggucaacuccuucagcggcuaccugaagcucaccgacaacguguacaucaagaacgccgacaucguggaggaggcgaagaaggucaagcccaccgugguggucaacgccgccaacguguaccugaagcacgggggcggcguggccggggcccugaacaaggcgaccaacaacgccaugcaggucgaguccgacgacuacaucgccacgaacggcccccucaagguggggggcagcugcguccuguccggccacaaccuggccaagcacugccuccacgugguggggcccaacgucaacaagggcgaggacauccagcugcugaagagcgccuacgagaacuucaaccagcacgaggugcuccuggcgccgcugcucuccgccgggaucuucggcgccgaccccauccacagccugcgggugugcgucgacaccgugcgcaccaacguguaccuggccgucuucgacaagaaccucuacgacaagcugguguccagcuuccuggagaugaagagcgagaagcagguggagcagaacaucgccgagauccccaaggaggaggucaagcccuucaucaccgaguccaagccgagcguggagcagcggaagcaggacgacaagaagaucaaggcgugcguggaggaggucacgaccacccucgaggagaccaaguuccugacggagaaccugcuccuguacaucgacaucaacgggaaccugcaccccgacuccgccacccucgugagcgacaucgacaucaccuuccugaagaaggacgcccccuacaucgugggcgacgucgugcaggagggcgugcugaccgccgucgugauccccacgaagaaggccgggggcaccaccgagaugcucgcgaaggcccugcgcaaggugccgaccgacaacuacaucacgaccuaccccgggcagggccugaacggguacaccgucgaggaggccaagaccgugcucaagaagugcaaguccgccuucuacauccugcccagcaucaucuccaacgagaagcaggagauccugggcaccgugagcuggaaccuccgggagaugcuggcgcacgccgaggagacgcgcaagcugaugcccgucugcguggagaccaaggccaucguguccaccauccagcggaaguacaagggcaucaagauccaggagggggucguggacuacggcgcccgcuucuacuucuacaccagcaagacgaccguggccucccugaucaacacccucaacgaccugaacgagacccuggucacgaugccgcucggguacgugacccacggccugaaccuggaggaggcggcccgguacaugcgcagccucaaggugcccgccaccgucuccgugagcucccccgacgccgugaccgccuacaacggguaccugacgagcuccagcaagacccccgaggagcacuucaucgagaccaucucccuggcgggcagcuacaaggacuggagcuacuccggccagagcacccagcucgggaucgaguuccugaagcggggcgacaaguccgucuacuacacgagcaacccgaccaccuuccaccuggacggggaggugaucaccuucgacaaccucaagacgcugcugucccuccgcgaggugcggaccaucaaggucuucaccaccguggacaacaucaaccugcacacgcagguggucgacaugagcaugaccuacggccagcaguucggccccaccuaccuggacggggccgacgugaccaagaucaagccccacaacucccacgagggcaagacguucuacgugcucccgaacgacgacacccugcgcgucgaggccuucgaguacuaccacaccaccgaccccagcuuccuggggcgguacauguccgcccucaaccacacgaagaaguggaaguacccccaggugaacggccugaccagcaucaagugggccgacaacaacugcuaccuggcgaccgcccuccugacccugcagcagaucgagcucaaguucaaccccccggcccugcaggacgccuacuaccgcgcgcgggccggggaggccgccaacuucugcgcccugauccucgcguacugcaacaagacggugggcgagcugggcgacguccgcgagaccauguccuaccuguuccagcacgccaaccucgacagcugcaagcgggugcugaacgucgugugcaagaccugcgggcagcagcagaccacccugcgcggcguggaggccgucauguacauggggacgcucuccuacgagcaguucaagaagggcgugcagauccccugcaccugcgggaagcaggccaccaaguaccuggugcagcaggagagccccuucgucaugauguccgcccccccggcgcaguacgagcugaagcacggcaccuucacgugcgccagcgaguacaccggcaacuaccagugcgggcacuacaagcacaucaccuccaaggagacccucuacugcaucgacggcgcccugcugacgaagagcagcgaguacaaggggcccaucaccgacguguucuacaaggagaacuccuacaccaccacgaucaagcccgugaccuacaagcucgacggcgucgugugcaccgagaucgaccccaagcuggacaacuacuacaagaaggacaacagcuacuucaccgagcagccgaucgaccuggugcccaaccagcccuaccccaacgccuccuucgacaacuucaaguucgucugcgacaacaucaaguucgccgacgaccucaaccagcugacgggguacaagaagccggcgagccgggagcugaaggugaccuucuuccccgaccucaacggcgacguggucgccaucgacuacaagcacuacacccccuccuucaagaagggcgccaagcugcugcacaagcccaucguguggcacgugaacaacgccaccaacaaggcgacguacaagccgaacaccuggugcauccgcugccucuggagcaccaagcccgucgagaccuccaacagcuucgacgugcugaaguccgaggacgcccaggggauggacaaccuggccugcgaggaccucaagcccgugagcgaggaggucguggagaaccccacgauccagaaggacgugcuggagugcaacgucaagaccaccgagguggugggcgacaucauccugaagccggccaacaacucccucaagaucaccgaggaggucgggcacacggaccugauggccgcguacguggacaacagcucccugaccaucaagaagcccaacgagcucagccgcgugcugggccugaagacccucgccacccacgggcuggccgccgucaacuccgugcccugggacacgaucgccaacuacgcgaagccguuccugaacaagguggucagcaccaccaccaacaucgugacgcggugccucaaccgcgugugcaccaacuacaugcccuacuucuucacccugcugcuccagcugugcaccuucacccgguccacgaacagccgcaucaaggccuccaugcccaccaccaucgccaagaacaccgucaagagcgugggcaaguucugccuggaggccagcuucaacuaccucaagucccccaacuucagcaagcugaucaacaucaucaucugguuccugcuccuguccgugugccugggcagccucaucuacuccacggccgcgcuggggguccugaugagcaaccucggcaugccguccuacugcaccggguaccgggagggcuaccugaacagcaccaacgugaccaucgccacguacugcaccggcuccauccccugcagcgugugccuguccgggcucgacagccuggacaccuaccccucccuggagaccauccagaucacgaucagcuccuucaagugggaccucaccgccuucggccuggucgccgagugguuccuggccuacauccucuucacccgcuucuucuacgugcuggggcuggcggccaucaugcagcucuucuucagcuacuucgccgugcacuucaucuccaacagcuggcugauguggcugaucaucaaccugguccagauggcccccaucuccgcgauggugcggauguacaucuucuucgccagcuucuacuacguguggaagagcuacguccacgugguggacggcugcaacuccagcaccugcaugaugugcuacaagcgcaaccgggccacgcgcgucgagugcaccaccaucgugaacgggguccggcgcuccuucuacguguacgccaacggcggcaagggguucugcaagcuccacaacuggaacugcgugaacugcgacaccuucugcgccggcagcacguucaucuccgacgaggucgcgcgggaccugagccugcaguucaagcgcccgaucaaccccaccgaccaguccagcuacaucguggacuccgugaccgucaagaacgggagcauccaccucuacuucgacaaggccggccagaagaccuacgagcggcacucccugagcuacuucgugaaccuggacaaccuccgcgccaacaacacgaaggggucccugcccaucaacgugaucgucuucgacggcaagagcaagugcgaggaguccagcgccaaguccgccagcguguacuacucccagcugaugugccagcccauccuccugcuggaccaggcgcucgugagcgacgucggcgacagcgccgagguggccgugaagauguucgacgccuacgucaacaccuucuccagcaccuucaacgugccgauggagaagcugaagacccugguggccacggcggaggccgagcucgccaagaacgucucccuggacaacgugcugagcaccuucaucuccgccgcgcggcagggguucguggacagcgacgucgagaccaaggacgugguggagugccucaagcugucccaccagagcgacaucgaggucaccggcgacuccugcaacaacuacaugcugacguacaacaagguggagaacaugaccccccgcgaccucggggccugcaucgacugcagcgcccggcacaucaacgcccagguggccaagucccacaacaucgcgcugaucuggaacgucaaggacuucaugagccuguccgagcagcuccgcaagcagauccgcagcgccgccaagaagaacaaccugcccuucaagcugaccugcgccaccacgcggcagguggugaacgucgugaccaccaagaucgcccucaagggcgggugaggacuaguuauaagacugacuagcccgaugggccucccaacgggcccuccuccccuccuugcaccgagauuaauaaaaaaaaaaaaaaaaaaaaaaaaaaaaaaaaaaaaaaaaaaaaaaaaaaaaaaaaaaaaaaaaugcaucccccccccccccccccccccccccccccccaaaggcucuuuucagagccaccagaauu

SEQ ID NO: 21691 - RNA, 6058 nt, Artificial Sequence
  SARS-CoV-2__MT772475.1__non-structural protein 3 (NSP3) mRNA gc
aggagaaagcuuaccauggcccccaccaaggugaccuucggcgacgacacggucaucgaggugcagggguacaagagcgugaacaucaccuucgagcuggacgagcgcaucgacaagguccucaacgagaagugcuccgccuacaccguggagcugggcaccgaggugaacgaguucgcgugcgucguggccgacgccgugaucaagacgcugcagccggucagcgagcuccugaccccccuggggaucgaccucgacgagugguccauggccaccuacuaccuguucgacgagagcggcgaguucaagcuggccucccacauguacugcagcuucuacccccccgacgaggacgaggaggagggggacugcgaggaggaggaguucgagccguccacccaguacgaguacggcacggaggacgacuaccagggcaagccccucgaguucggggcgaccagcgccgcccugcagcccgaggaggagcaggaggaggacuggcuggacgacgacucccagcagaccgugggccagcaggacgggagcgaggacaaccagaccacgaccauccagaccaucguggagguccagccccagcucgagauggagcugaccccgguggugcagacgaucgaggucaacuccuucagcggcuaccugaagcucaccgacaacguguacaucaagaacgccgacaucguggaggaggcgaagaaggucaagcccaccgugguggucaacgccgccaacguguaccugaagcacgggggcggcguggccggggcccugaacaaggcgaccaacaacgccaugcaggucgaguccgacgacuacaucgccacgaacggcccccucaagguggggggcagcugcguccuguccggccacaaccuggccaagcacugccuccacgugguggggcccaacgucaacaagggcgaggacauccagcugcugaagagcgccuacgagaacuucaaccagcacgaggugcuccuggcgccgcugcucuccgccgggaucuucggcgccgaccccauccacagccugcgggugugcgucgacaccgugcgcaccaacguguaccuggccgucuucgacaagaaccucuacgacaagcugguguccagcuuccuggagaugaagagcgagaagcagguggagcagaacaucgccgagauccccaaggaggaggucaagcccuucaucaccgaguccaagccgagcguggagcagcggaagcaggacgacaagaagaucaaggcgugcguggaggaggucacgaccacccucgaggagaccaaguuccugacggagaaccugcuccuguacaucgacaucaacgggaaccugcaccccgacuccgccacccucgugagcgacaucgacaucaccuuccugaagaaggacgcccccuacaucgugggcgacgucgugcaggagggcgugcugaccgccgucgugauccccacgaagaaggccgggggcaccaccgagaugcucgcgaaggcccugcgcaagguguccaccgacaacuacaucacgaccuacccggggcagggccugaacggguacaccgucgaggaggccaagaccgugcucaagaagugcaagagcgccuucuacauccugcccuccaucaucagcaacgagaagcaggagauccugggcaccguguccuggaaccuccgggagaugcuggcgcacgccgaggagacgcgcaagcugaugcccgucugcguggagaccaaggccaucgugagcaccauccagcggaaguacaagggcaucaagauccaggagggggucguggacuacggcgcccgcuucuacuucuacaccuccaagacgaccguggccagccugaucaacacccucaacgaccugaacgagacccuggucacgaugccccucggguacgugacccacggccugaaccuggaggaggcggcccgguacaugcgcucccucaaggugccggccaccgucagcguguccagccccgacgccgugaccgccuacaacggguaccugacguccagcuccaagacccccgaggagcacuucaucgagaccaucagccuggcgggcagcuacaaggacugguccuacagcggccaguccacccagcucgggaucgaguuccugaagcggggcgacaagagcgucuacuacacguccaaccccaccaccuuccaccuggacggggaggugaucaccuucgacaaccucaagacgcugcugagccuccgcgaggugcggaccaucaaggucuucaccaccguggacaacaucaaccugcacacgcagguggucgacauguccaugaccuacggccagcaguucggcccgaccuaccuggacggggccgacgugaccaagaucaagccccacaacagccacgagggcaagacguucuacgugcuccccaacgacgacacccugcgcgucgaggccuucgaguacuaccacaccaccgacccguccuuccuggggcgguacaugagcgcccucaaccacacgaagaaguggaaguacccccaggugaacggccugaccuccaucaagugggccgacaacaacugcuaccuggcgaccgcccuccugacccugcagcagaucgagcucaaguucaacccccccgcccugcaggacgccuacuaccgcgcgcgggccggggaggccgccaacuucugcgcccugauccucgcguacugcaacaagacggugggcgagcugggcgacguccgcgagaccaugagcuaccuguuccagcacgccaaccucgacuccugcaagcgggugcugaacgucgugugcaagaccugcgggcagcagcagaccacccugaagggcguggaggccgucauguacauggggacgcucagcuacgagcaguucaagaagggcgugcagaucccgugcaccugcgggaagcaggccaccaaguaccuggugcagcaggaguccagcuucgucaugauguccgccccccccgcgcaguacgagcugaagcacggcaccuucacgugcgccagcgaguacaccggcaacuaccagugcgggcacuacaagcacaucaccagcaaggagacccucuacugcaucgacggcgcccugcugacgaaguccagcgaguacaaggggcccaucaccgacguguucuacaaggagaacuccuacaccaccacgaucaagccggugaccuacaagcucgacggcgucgugugcaccgagaucgaccccaagcuggacaacuacuacaagaaggacaacagcuacuucaccgagcagcccaucgaccuggugcccaaccagccguaccccaacgccuccuucgacaacuucaaguucgucugcgacaacaucaaguucgccgacgaccucaaccagcugacgggguacaagaagcccgcgagccgcgagcugaaggugaccuucuuccccgaccucaacggcgacguggucgccaucgacuacaagcacuacaccccguccuucaagaagggcgccaagcugcugcacaagcccaucguguggcacgugaacaacgccaccaacaaggcgacguacaagcccaacaccuggugcauccggugccucuggagcaccaagcccgucgagaccuccaacagcuucgacgugcugaaguccgaggacgcccaggggauggacaaccuggccugcgaggaccucaagccggugagcgaggaggucguggagaaccccacgauccagaaggacgugcuggagugcaacgucaccaccaccgagguggugggcgacaucauccugaagcccgccaacaacucccucaagaucacggaggaggucgggcacaccgaccugauggccgcguacguggacaacagcucccugaccaucaagaagcccaacgagcucagccgcgugcugggccugaagacccucgccacgcacgggcuggccgccgucaacuccgugccgugggacaccaucgccaacuacgcgaagcccuuccugaacaagguggucagcaccaccacgaacaucgugacccgcugccucaaccgggugugcaccaacuacaugcccuacuucuucacccugcugcuccagcugugcaccuucacgcgcuccaccaacagccggaucaaggccagcaugccgaccaccaucgccaagaacacggucaaguccgugggcaaguucugccuggaggccagcuucaacuaccucaagucccccaacuucagcaagcugaucaacaucaucaucugguuccugcuccuguccgugugccugggcagccucaucuacuccaccgccgcgcuggggguccugaugagcaaccucggcaugcccuccuacugcaccggguaccgcgagggcuaccugaacagcaccaacgugacgaucgccaccuacugcaccggcuccauccccugcagcgugugccuguccgggcucgacagccuggacaccuacccgucccuggagacgauccagaucaccaucagcuccuucaagugggaccucaccgccuucggccuggucgccgagugguuccuggccuacauccucuucacccgguucuucuacgugcuggggcuggcggccaucaugcagcucuucuucagcuacuucgccgugcacuucaucuccaacagcuggcugauguggcugaucaucaaccugguccagauggcccccaucagcgcgauggugcgcauguacaucuucuucgccuccuucuacuacguguggaagagcuacguccacgugguggacggcugcaacuccagcacgugcaugaugugcuacaagcggaaccgcgccacccgggucgagugcaccaccaucgugaacgggguccgccgguccuucuacguguacgccaacggcggcaagggguucugcaagcuccacaacuggaacugcgugaacugcgacacguucugcgccggcagcaccuucaucuccgacgaggucgcgcgcgaccugagccugcaguucaagcggcccaucaaccccaccgaccaguccagcuacaucguggacuccgugaccgucaagaacgggagcauccaccucuacuucgacaaggccggccagaagacguacgagcgccacucccugagccacuucgugaacuucgacaaccugcgggccaacaacaccaaggggucccucccgaucaacgugaucgucuucgacggcaagagcaagugcgaggaguccagcgccaaguccgccagcguguacuacagccagcugaugugccagcccauccugcuccuggaccaggcgcugguguccgacgucggcgacagcgccgagguggccgugaagauguucgacgccuacgucaacaccuucuccagcaccuucaacgugcccauggagaagcucaagacgcugguggccaccgcggaggccgagcuggccaagaacgucucccucgacaacgugcugagcaccuucaucuccgccgcgcgccagggguucguggacagcgacgucgagaccaaggacgugguggagugccugaagcucucccaccagagcgacaucgaggucacgggcgacuccugcaacaacuacaugcugaccuacaacaagguggagaacaugaccccccgggaccugggggccugcaucgacugcagcgcccgccacaucaacgcccagguggccaagucccacaacaucgcgcucaucuggaacgucaaggacuucaugagccuguccgagcagcugcggaagcagauccgcagcgccgccaagaagaacaaccucccguucaagcugaccugcgccacgacccgccagguggugaacgucgugaccaccaagaucgcccugaagggcgggugaggacuaguuauaagacugacuagcccgaugggccucccaacgggcccuccuccccuccuugcaccgagauuaauaaaaaaaaaaaaaaaaaaaaaaaaaaaaaaaaaaaaaaaaaaaaaaaaaaaaaaaaaaaaaaaaugcaucccccccccccccccccccccccccccccccaaaggcucuuuucagagccaccagaauu

SEQ ID NO: 21692 - RNA, 6058 nt, Artificial Sequence
  SARS-CoV-2__MT772564.1__non-structural protein 3 (NSP3) mRNA gc
aggagaaagcuuaccauggcccccaccaaggugaccuucggcgacgacacggucaucgaggugcagggguacaagagcgugaacaucaccuucgagcuggacgagcgcaucgacaagguccucaacgagaagugcuccgccuacaccguggagcugggcaccgaggugaacgaguucgcgugcgucguggccgacgccgugaucaagacgcugcagccggucagcgagcuccugaccccccuggggaucgaccucgacgagugguccauggccaccuacuaccuguucgacgagagcggcgaguucaagcuggccucccacauguacugcagcuucuacccccccgacgaggacgaggaggagggggacugcgaggaggaggaguucgagccguccacccaguacgaguacggcacggaggacgacuaccagggcaagccccucgaguucggggcgaccagcgccgcccugcagcccgaggaggagcaggaggaggacuggcuggacgacgacucccagcagaccgugggccagcaggacgggagcgaggacaaccagaccacgaccauccagaccaucguggagguccagccccagcucgagauggagcugaccccgguggugcagacgaucgaggucaacuccuucagcggcuaccugaagcucaccgacaacguguacaucaagaacgccgacaucguggaggaggcgaagaaggucaagcccaccgugguggucaacgccgccaacguguaccugaagcacgggggcggcguggccggggcccugaacaaggcgaccaacaacgccaugcaggucgaguccgacgacuacaucgccacgaacggcccccucaagguggggggcagcugcguccuguccggccacaaccuggccaagcacugccuccacgugguggggcccaacgucaacaagggcgaggacauccagcugcugaagagcgccuacgagaacuucaaccagcacgaggugcuccuggcgccgcugcucuccgccgggaucuucggcgccgaccccauccacagccugcgggugugcgucgacaccgugcgcaccaacguguaccuggccgucuucgacaagaaccucuacgacaagcugguguccagcuuccuggagaugaagagcgagaagcagguggagcagaagaucgucgagauccccaaggaggaggugaagcccuucaucaccgaguccaagccgagcguggagcagcggaagcaggacgacaagaagaucaaggccugcgucgaggaggugacgaccacccucgaggagaccaaguuccugacggagaaccugcuccuguacaucgacaucaacgggaaccugcaccccgacuccgcgacccucgugagcgacaucgacaucaccuuccugaagaaggacgcccccuacaucgucggcgacguggugcaggagggcguccugaccgccguggugauccccacgaagaaggccgggggcaccaccgagaugcucgccaaggcgcugcgcaaggucccgaccgacaacuacaucacgaccuaccccgggcagggccugaacggguacaccguggaggaggccaagaccgugcucaagaagugcaaguccgccuucuacauccugcccagcaucaucuccaacgagaagcaggagauccugggcaccgucagcuggaaccuccgggagaugcuggcccacgcggaggagacgcgcaagcugaugcccgugugcguggagaccaaggccaucgucuccaccauccagcggaaguacaagggcaucaagauccaggagggggugguggacuacggcgcccgcuucuacuucuacaccagcaagacgaccgucgccucccugaucaacacccucaacgaccugaacgagacccuggugacgaugccgcucggguacgugacccacggccugaaccuggaggaggccgcgcgguacaugcgcagccucaagguccccgccaccguguccgugagcucccccgacgccgucaccgccuacaacggguaccugacgagcuccagcaagacccccgaggagcacuucaucgagaccaucucccuggccggcagcuacaaggacuggagcuacuccggccagagcacccagcucgggaucgaguuccugaagcggggcgacaaguccguguacuacacgagcaacccgaccaccuuccaccuggacggggaggugaucaccuucgacaaccucaagacgcugcugucccuccgcgagguccggaccaucaagguguucaccaccguggacaacaucaaccugcacacgcaggucguggacaugagcaugaccuacggccagcaguucggccccaccuaccuggacggggcggacgugaccaagaucaagccccacaacucccacgagggcaagacguucuacguccucccgaacgacgacacccugcgcguggaggccuucgaguacuaccacaccaccgaccccagcuuccuggggcgguacauguccgcccucaaccacacgaagaaguggaaguacccccaggugaacggccugaccagcaucaagugggccgacaacaacugcuaccuggccaccgcgcuccugacccugcagcagaucgagcucaaguucaaccccccggcccugcaggacgccuacuaccgcgcccgggcgggggaggccgccaacuucugcgcccugauccucgccuacugcaacaagacggucggcgagcugggcgacgugcgcgagaccauguccuaccuguuccagcacgcgaaccucgacagcugcaagcggguccugaacguggugugcaagaccugcgggcagcagcagaccacccugaagggcgucgaggccgugauguacauggggacgcucuccuacgagcaguucaagaagggcgugcagauccccugcaccugcgggaagcaggccaccaaguaccugguccagcaggagagccccuucgugaugauguccgcccccccggcccaguacgagcugaagcacggcaccuucacgugcgcgagcgaguacaccggcaacuaccagugcgggcacuacaagcacaucaccuccaaggagacccucuacugcaucgacggcgcccugcugacgaagagcagcgaguacaaggggcccaucaccgacguguucuacaaggagaacuccuacaccaccacgaucaagcccgucaccuacaagcucgacggcguggugugcaccgagaucgaccccaagcuggacaacuacuacaagaaggacaacagcuacuucaccgagcagccgaucgaccugguccccaaccagcccuaccccaacgccuccuucgacaacuucaaguucgugugcgacaacaucaaguucgccgacgaccucaaccagcugacgggguacaagaagccggccagccgcgagcugaaggugaccuucuuccccgaccucaacggcgacgucguggcgaucgacuacaagcacuacacccccuccuucaagaagggcgccaagcugcugcacaagcccaucguguggcacgucaacaacgccaccaacaaggccacguacaagccgaacaccuggugcauccggugccucuggagcaccaagcccguggagaccuccaacagcuucgacgugcugaaguccgaggacgcgcaggggauggacaaccuggccugcgaggaccucaagcccgucagcgaggaggugguggagaaccccacgauccagaaggacguccuggagugcaacgugaagaccaccgagguggucggcgacaucauccugaagccggccaacaacucccucaagaucaccgaggagguggggcacacggaccugauggccgccuacguggacaacagcucccugaccaucaagaagcccaacgagcucagccgcguccugggccugaagacccucgcgacccacgggcuggccgccgugaacuccgugcccugggacacgaucgccaacuacgccaagccguuccugaacaaggucgugagcaccaccaccaacaucgugacgcgcugccucaaccgggucugcaccaacuacaugcccuacuucuucacccugcugcuccagcugugcaccuucacccgcuccacgaacagccggaucaaggcguccaugcccaccaccaucgccaagaacaccgugaagagcgugggcaaguucugccuggaggccagcuucaacuaccucaagucccccaacuucagcaagcugaucaacaucaucaucugguuccugcuccuguccgucugccugggcagccucaucuacuccacggccgcccugggggugcugaugagcaaccucggcaugccguccuacugcaccggguaccgcgagggcuaccugaacagcaccaacgugaccaucgcgacguacugcaccggcuccauccccugcagcgucugccuguccgggcucgacagccuggacaccuaccccucccuggagaccauccagaucacgaucagcuccuucaagugggaccucaccgccuucggccugguggccgagugguuccuggccuacauccucuucacccgguucuucuacgugcuggggcuggccgcgaucaugcagcucuucuucagcuacuucgccguccacuucaucuccaacagcuggcugauguggcugaucaucaaccuggugcagauggcccccaucuccgccauggugcgcauguacaucuucuucgcgagcuucuacuacgucuggaagagcuacgugcacguggucgacggcugcaacuccagcaccugcaugaugugcuacaagcggaaccgcgccacgcggguggagugcaccaccaucgucaacggggugcgccgguccuucuacguguacgccaacggcggcaagggguucugcaagcuccacaacuggaacugcgucaacugcgacaccuucugcgccggcagcacguucaucuccgacgagguggcccgcgaccugagccugcaguucaagcggccgaucaaccccaccgaccaguccagcuacaucguggacuccgucaccgugaagaacgggagcauccaccucuacuucgacaaggcgggccagaagaccuacgagcgccacucccugagccacuucgugaaccuggacaaccuccgggccaacaacacgaaggggucccugcccaucaacgucaucguguucgacggcaagagcaagugcgaggaguccagcgccaaguccgccagcguguacuacucccagcugaugugccagcccauccuccugcuggaccaggcccucgucagcgacgugggcgacagcgcggagguggccgucaagauguucgacgccuacgugaacaccuucuccagcaccuucaacgugccgauggagaagcugaagacccuggucgccacggccgaggcggagcucgccaagaacgugucccuggacaacgugcugagcaccuucaucuccgccgcccgccagggguucgucgacagcgacguggagaccaaggacguggucgagugccucaagcugucccaccagagcgacaucgaggugaccggcgacuccugcaacaacuacaugcugacguacaacaagguggagaacaugaccccccgggaccucggggcgugcaucgacugcagcgcccgccacaucaacgcccaggucgccaagucccacaacaucgcccugaucuggaacgugaaggacuucaugagccuguccgagcagcuccggaagcagauccgcagcgcggccaagaagaacaaccugcccuucaagcugaccugcgccaccacgcgccagguggucaacguggugaccaccaagaucgcccucaagggcgggugaggacuaguuauaagacugacuagcccgaugggccucccaacgggcccuccuccccuccuugcaccgagauuaauaaaaaaaaaaaaaaaaaaaaaaaaaaaaaaaaaaaaaaaaaaaaaaaaaaaaaaaaaaaaaaaaugcaucccccccccccccccccccccccccccccccaaaggcucuuuucagagccaccagaauu

SEQ ID NO: 21693 - RNA, 6058 nt, Artificial Sequence
  SARS-CoV-2__MT772565.1__non-structural protein 3 (NSP3) mRNA gc
aggagaaagcuuaccauggcccccaccaaggugaccuucggcgacgacacggucaucgaggugcagggguacaagagcgugaacaucaccuucgagcuggacgagcgcaucgacaagguccucaacgagaagugcuccgccuacaccguggagcugggcaccgaggugaacgaguucgcgugcgucguggccgacgccgugaucaagacgcugcagccggucagcgagcuccugaccccccuggggaucgaccucgacgagugguccauggccaccuacuaccuguucgacgagagcggcgaguucaagcuggccucccacauguacugcagcuucuacccccccgacgaggacgaggaggagggggacugcgaggaggaggaguucgagccguccacccaguacgaguacggcacggaggacgacuaccagggcaagccccucgaguucggggcgaccagcgccgcccugcagcccgaggaggagcaggaggaggacuggcuggacgacgacucccagcagaccgugggccagcaggacgggagcgaggacaaccagaccacgaccauccagaccaucguggagguccagccccagcucgagauggagcugaccccgguggugcagacgaucgaggucaacuccuucagcggcuaccugaagcucaccgacaacguguacaucaagaacgccgacaucguggaggaggcgaagaaggucaagcccaccgugguggucaacgccgccaacguguaccugaagcacgggggcggcguggccggggcccugaacaaggcgaccaacaacgccaugcaggucgaguccgacgacuacaucgccacgaacggcccccucaagguggggggcagcugcguccuguccggccacaaccuggccaagcacugccuccacgugguggggcccaacgucaacaagggcgaggacauccaguuccugaagagcgccuacgagaacuucaaccagcacgaggugcugcucgcgccgcugcuguccgccgggaucuucggcgccgaccccauccacagccuccgggugugcgucgacaccgugcgcaccaacguguaccuggccgucuucgacaagaaccuguacgacaagcucguguccagcuuccuggagaugaagagcgagaagcagguggagcagaagaucgccgagauccccaaggaggaggucaagcccuucaucaccgaguccaagccgagcguggagcagcggaagcaggacgacaagaagaucaaggcgugcguggaggaggucacgaccacccuggaggagaccaaguuccucacggagaaccugcugcucuacaucgacaucaacgggaaccugcaccccgacuccgccacccuggugagcgacaucgacaucaccuuccucaagaaggacgcccccuacaucgugggcgacgucgugcaggagggcgugcugaccgccgucgugauccccacgaagaaggccgggggcaccaccgagaugcuggcgaaggcccuccgcaaggugccgaccgacaacuacaucacgaccuaccccgggcagggccugaacggguacaccgucgaggaggccaagaccgugcugaagaagugcaaguccgccuucuacauccuccccagcaucaucuccaacgagaagcaggagauccugggcaccgugagcuggaaccugcgggagaugcucgcgcacgccgaggagacgcgcaagcugaugcccgucugcguggagaccaaggccaucguguccaccauccagcggaaguacaagggcaucaagauccaggagggggucguggacuacggcgcccgcuucuacuucuacaccagcaagacgaccguggccucccugaucaacacccugaacgaccucaacgagacccuggucacgaugccgcugggguacgugacccacggccucaaccuggaggaggcggcccgguacaugcgcagccugaaggugcccgccaccgucuccgugagcucccccgacgccgugaccgccuacaacggguaccucacgagcuccagcaagacccccgaggagcacuucaucgagaccaucucccuggcgggcagcuacaaggacuggagcuacuccggccagagcacccagcuggggaucgaguuccucaagcggggcgacaaguccgucuacuacacgagcaacccgaccaccuuccaccuggacggggaggugaucaccuucgacaaccugaagacgcuccugucccugcgcgaggugcggaccaucaaggucuucaccaccguggacaacaucaaccuccacacgcagguggucgacaugagcaugaccuacggccagcaguucggccccaccuaccuggacggggccgacgugaccaagaucaagccccacaacucccacgagggcaagacguucuacgugcugccgaacgacgacacccuccgcgucgaggccuucgaguacuaccacaccaccgaccccagcuuccuggggcgguacauguccgcccugaaccacacgaagaaguggaaguacccccaggugaacggccucaccagcaucaagugggccgacaacaacugcuaccuggcgaccgcccugcucacccugcagcagaucgagcugaaguucaaccccccggcccuccaggacgccuacuaccgcgcgcgggccggggaggccgccaacuucugcgcccugauccuggcguacugcaacaagacggugggcgagcucggcgacguccgcgagaccauguccuaccuguuccagcacgccaaccuggacagcugcaagcgggugcucaacgucgugugcaagaccugcgggcagcagcagaccacccugaagggcguggaggccgucauguacauggggacgcuguccuacgagcaguucaagaagggcgugcagauccccugcaccugcgggaagcaggccaccaaguaccucgugcagcaggagagccccuucgucaugauguccgcccccccggcgcaguacgagcugaagcacggcaccuucacgugcgccagcgaguacaccggcaacuaccagugcgggcacuacaagcacaucaccuccaaggagacccuguacugcaucgacggcgcccuccugacgaagagcagcgaguacaaggggcccaucaccgacguguucuacaaggagaacuccuacaccaccacgaucaagcccgugaccuacaagcuggacggcgucgugugcaccgagaucgaccccaagcucgacaacuacuacaagaaggacaacagcuacuucaccgagcagccgaucgaccuggugcccaaccagcccuaccccaacgccuccuucgacaacuucaaguucgucugcgacaacaucaaguucgccgacgaccugaaccagcucacgggguacaagaagccggcgagccgcgagcugaaggugaccuucuuccccgaccugaacggcgacguggucgccaucgacuacaagcacuacacccccuccuucaagaagggcgccaagcuccugcacaagcccaucguguggcacgugaacaacgccaccaacaaggcgacguacaagccgaacaccuggugcauccggugccuguggagcaccaagcccgucgagaccuccaacagcuucgacgugcucaaguccgaggacgcccaggggauggacaaccuggccugcgaggaccugaagcccgugagcgaggaggucguggagaaccccacgauccagaaggacgugcucgagugcaacgucaagaccaccgagguggugggcgacaucauccugaagccggccaacaacucccugaagaucaccgaggaggucgggcacacggaccucauggccgcguacguggacaacagcucccugaccaucaagaagcccaacgagcugagccgcgugcucggccugaagacccuggccacccacgggcucgccgccgucaacuccgugcccugggacacgaucgccaacuacgcgaagccguuccugaacaagguggucagcaccaccaccaacaucgugacgcgcugccugaaccgggugugcaccaacuacaugcccuacuucuucacccuccugcugcagcucugcaccuucacccgcuccacgaacagccggaucaaggccuccaugcccaccaccaucgccaagaacaccgucaagagcgugggcaaguucugccuggaggccagcuucaacuaccugaagucccccaacuucagcaagcucaucaacaucaucaucugguuccugcugcucuccgugugccugggcagccugaucuacuccacggccgcgcucgggguccugaugagcaaccugggcaugccguccuacugcaccggguaccgcgagggcuaccucaacagcaccaacgugaccaucgccacguacugcaccggcuccauccccugcagcgugugccuguccgggcuggacagccucgacaccuaccccucccuggagaccauccagaucacgaucagcuccuucaagugggaccugaccgccuucggccucgucgccgagugguuccuggccuacauccuguucacccgguucuucuacgugcucgggcuggcggccaucaugcagcuguucuucagcuacuucgccgugcacuucaucuccaacagcuggcucauguggcugaucaucaaccugguccagauggcccccaucuccgcgauggugcgcauguacaucuucuucgccagcuucuacuacguguggaagagcuacguccacgugguggacggcugcaacuccagcaccugcaugaugugcuacaagcggaaccgcgccacgcgggucgagugcaccaccaucgugaacgggguccgccgguccuucuacguguacgccaacggcggcaagggguucugcaagcugcacaacuggaacugcgugaacugcgacaccuucugcgccggcagcacguucaucuccgacgaggucgcgcgcgaccucagccugcaguucaagcggccgaucaacuccaccgaccagagcuccuacaucguggacagcgugaccgucaagaacggguccauccaccuguacuucgacaaggccggccagaagaccuacgagcgccacagccucucccacuucgugaaccuggacaaccugcgggccaacaacacgaaggggagccuccccaucaacgugaucgucuucgacggcaaguccaagugcgaggagagcuccgccaagagcgccuccguguacuacagccagcugaugugccagcccauccugcuccuggaccaggcgcuggugagcgacgucggcgacuccgccgagguggccgugaagauguucgacgccuacgucaacaccuucagcuccaccuucaacgugcccauggagaagcucaagacccugguggccacggcggaggccgagcuggccaagaacgucagccucgacaacgugcuguccaccuucaucagcgccgcgcgccagggguucguggacuccgacgucgagaccaaggacgugguggagugccugaagcucagccaccaguccgacaucgaggucaccggcgacagcugcaacaacuacaugcugacguacaacaagguggagaacaugaccccgcgggaccugggggccugcaucgacugcuccgcccgccacaucaacgcccagguggccaagagccacaacaucgcgcucaucuggaacgucaaggacuucaugucccugagcgagcagcugcggaagcagauccgcuccgccgccaagaagaacaaccuccccuucaagcugaccugcgccaccacgcgccagguggugaacgucgugaccaccaagaucgcccugaagggcgggugaggacuaguuauaagacugacuagcccgaugggccucccaacgggcccuccuccccuccuugcaccgagauuaauaaaaaaaaaaaaaaaaaaaaaaaaaaaaaaaaaaaaaaaaaaaaaaaaaaaaaaaaaaaaaaaaugcaucccccccccccccccccccccccccccccccaaaggcucuuuucagagccaccagaauu

SEQ ID NO: 21694 - RNA, 6058 nt, Artificial Sequence
  SARS-CoV-2__MT772569.1__non-structural protein 3 (NSP3) mRNA gc
aggagaaagcuuaccauggcccccaccaaggugaccuucggcgacgacacggucaucgaggugcagggguacaagagcgugaacaucaccuucgagcuggacgagcgcaucgacaagguccucaacgagaagugcuccgccuacaccguggagcugggcaccgaggugaacgaguucgcgugcgucguggccgacgccgugaucaagacgcugcagccggucagcgagcuccugaccccccuggggaucgaccucgacgagugguccauggccaccuacuaccuguucgacgagagcggcgaguucaagcuggccucccacauguacugcagcuucuacccccccgacgaggacgaggaggagggggacugcgaggaggaggaguucgagccgcucacccaguacgaguacggcacggaggacgacuaccagggcaagccccuggaguucggggcgaccuccgccgcccugcagcccgaggaggagcaggaggaggacuggcucgacgacgacagccagcagaccgugggccagcaggacggguccgaggacaaccagaccacgaccauccagaccaucguggagguccagccccagcuggagauggagcugaccccgguggugcagacgaucgaggucaacagcuucuccggcuaccucaagcugaccgacaacguguacaucaagaacgccgacaucguggaggaggcgaagaaggucaagcccaccgugguggucaacgccgccaacguguaccugaagcacgggggcggcguggccggggcccucaacaaggcgaccaacaacgccaugcaggucgagagcgacgacuacaucgccacgaacggcccccugaagguggggggcuccugcguccugagcggccacaaccucgccaagcacugccugcacgugguggggcccaacgucaacaagggcgaggacauccagcugcucaaguccgccuacgagaacuucaaccagcacgaggugcugcuggcgccgcuccugagcgccgggaucuucggcgccgaccccauccacucccugcgggugugcgucgacaccgugcgcaccaacguguaccucgccgucuucgacaagaaccuguacgacaagcuggugagcuccuuccucgagaugaagagcgagaagcagguggagcagaagaucgccgagauccccaaggaggaggucaagcccuucaucaccgagagcaagccguccguggagcagcggaagcaggacgacaagaagaucaaggcgugcguggaggaggucacgaccacccuggaggagaccaaguuccugacggagaaccuccugcuguacaucgacaucaacgggaaccuccaccccgacagcgccacccugguguccgacaucgacaucaccuuccugaagaaggacgcccccuacaucgugggcgacgucgugcaggagggcgugcucaccgccgucgugauccccacgaagaaggccgggggcaccaccgagaugcuggcgaaggcccugcgcaaggugccgaccgacaacuacaucacgaccuaccccgggcagggccucaacggguacaccgucgaggaggccaagaccgugcugaagaagugcaagagcgccuucuacauccugcccuccaucaucagcaacgagaagcaggagauccucggcaccguguccuggaaccugcgggagaugcuggcgcacgccgaggagacgcgcaagcugaugcccgucugcguggagaccaaggccaucgugagcaccauccagcggaaguacaagggcaucaagauccaggagggggucguggacuacggcgcccgcuucuacuucuacaccuccaagacgaccguggccagccucaucaacacccugaacgaccugaacgagacccucgucacgaugccgcugggguacgugacccacggccugaaccucgaggaggcggcccgguacaugcgcucccugaaggugcccgccaccgucagcguguccagccccgacgccgugaccgccuacaacggguaccugacguccagcuccaagacccccgaggagcacuucaucgagaccaucagccucgcgggcuccuacaaggacuggagcuacagcggccaguccacccagcuggggaucgaguuccugaagcggggcgacaagagcgucuacuacacguccaacccgaccaccuuccaccucgacggggaggugaucaccuucgacaaccugaagacgcugcucagccugcgcgaggugcggaccaucaaggucuucaccaccguggacaacaucaaccugcacacgcagguggucgacauguccaugaccuacggccagcaguucggccccaccuaccucgacggggccgacgugaccaagaucaagccccacaacagccacgagggcaagacguucuacgugcugccgaacgacgacacccugcgcgucgaggccuucgaguacuaccacaccaccgaccccuccuuccucgggcgguacaugagcgcccugaaccacacgaagaaguggaaguacccccaggugaacggccugaccuccaucaagugggccgacaacaacugcuaccucgcgaccgcccugcugacccuccagcagaucgagcugaaguucaaccccccggcccugcaggacgccuacuaccgcgcgcgggccggggaggccgccaacuucugcgcccucauccuggcguacugcaacaagacggugggcgagcugggcgacguccgcgagaccaugagcuaccucuuccagcacgccaaccuggacuccugcaagcgggugcugaacgucgugugcaagaccugcgggcagcagcagaccacccucaagggcguggaggccgucauguacauggggacgcugagcuacgagcaguucaagaagggcgugcagauccccugcaccugcgggaagcaggccaccaaguaccuggugcagcaggagucccccuucgucaugaugagcgcccccccggcgcaguacgagcucaagcacggcaccuucacgugcgccuccgaguacaccggcaacuaccagugcgggcacuacaagcacaucaccagcaaggagacccuguacugcaucgacggcgcccugcucacgaaguccagcgaguacaaggggcccaucaccgacguguucuacaaggagaacagcuacaccaccacgaucaagcccgugaccuacaagcuggacggcgucgugugcaccgagaucgaccccaagcuggacaacuacuacaagaaggacaacuccuacuucaccgagcagccgaucgaccucgugcccaaccagcccuaccccaacgccagcuucgacaacuucaaguucgucugcgacaacaucaaguucgccgacgaccugaaccagcugacgggguacaagaagccggcgucccgcgagcucaaggugaccuucuuccccgaccugaacggcgacguggucgccaucgacuacaagcacuacacccccagcuucaagaagggcgccaagcugcuccacaagcccaucguguggcacgugaacaacgccaccaacaaggcgacguacaagccgaacaccuggugcauccggugccugugguccaccaagcccgucgagaccagcaacuccuucgacgugcugaagagcgaggacgcccaggggauggacaaccucgccugcgaggaccugaagcccguguccgaggaggucguggagaaccccacgauccagaaggacgugcuggagugcaacgucaagaccaccgagguggugggcgacaucauccucaagccggccaacaacagccugaagaucaccgaggaggucgggcacacggaccugauggccgcguacguggacaacuccagccucaccaucaagaagcccaacgagcugucccgcgugcugggccucaagacccuggccacccacgggcuggccgccgucaacagcgugcccugggacacgaucgccaacuacgcgaagccguuccucaacaagguggucuccaccaccaccaacaucgugacgcgcugccugaaccgggugugcaccaacuacaugcccuacuucuucacccugcuccugcagcugugcaccuucacccgcagcacgaacucccggaucaaggccagcaugcccaccaccaucgccaagaacaccgucaaguccgugggcaaguucugccucgaggccagcuucaacuaccugaagagccccaacuucuccaagcugaucaacaucaucaucugguuccuccugcugagcgugugccucggcucccugaucuacagcacggccgcgcuggggguccucauguccaaccugggcaugccgagcuacugcaccggguaccgcgagggcuaccugaacuccaccaacgugaccaucgccacguacugcaccggcagcauccccugcuccgugugccucagcgggcuggacucccuggacaccuaccccagccucgagaccauccagaucacgaucuccagcuucaagugggaccugaccgccuucggccuggucgccgagugguuccucgccuacauccuguucacccgguucuucuacgugcuggggcucgcggccaucaugcagcuguucuucuccuacuucgccgugcacuucaucagcaacuccuggcugauguggcugaucaucaaccucguccagauggcccccaucagcgcgauggugcgcauguacaucuucuucgccuccuucuacuacguguggaagagcuacguccacgugguggacggcugcaacagcuccaccugcaugaugugcuacaagcggaaccgcgccacgcgggucgagugcaccaccaucgugaacgggguccgccggagcuucuacguguacgccaacggcggcaagggguucugcaagcugcacaacuggaacugcgugaacugcgacaccuucugcgccggcuccacguucaucagcgacgaggucgcgcgcgaccugucccuccaguucaagcggccgaucaaccccaccgaccagagcuccuacaucguggacagcgugaccgucaagaacggguccauccaccuguacuucgacaaggccggccagaagaccuacgagcgccacagccugucccacuucgugaaccucgacaaccugcgggccaacaacacgaaggggagccugcccaucaacgugaucgucuucgacggcaaguccaagugcgaggagagcuccgccaagagcgccuccguguacuacagccagcucaugugccagcccauccugcugcucgaccaggcgcugguguccgacgucggcgacagcgccgagguggccgugaagauguucgacgccuacgucaacaccuucagcuccaccuucaacgugccgauggagaagcugaagacccucguggccacggcggaggccgagcuggccaagaacgucagccuggacaacgugcucuccaccuucaucagcgccgcgcgccagggguucguggacuccgacgucgagaccaaggacgugguggagugccugaagcugagccaccaguccgacaucgaggucaccggcgacagcugcaacaacuacaugcucacguacaacaagguggagaacaugaccccccgggaccugggggccugcaucgacugcuccgcccgccacaucaacgcccagguggccaagagccacaacaucgcgcugaucuggaacgucaaggacuucaugucccucagcgagcagcugcggaagcagauccgcuccgccgccaagaagaacaaccugcccuucaagcucaccugcgccaccacgcgccagguggugaacgucgugaccaccaagaucgcccugaagggcgggugaggacuaguuauaagacugacuagcccgaugggccucccaacgggcccuccuccccuccuugcaccgagauuaauaaaaaaaaaaaaaaaaaaaaaaaaaaaaaaaaaaaaaaaaaaaaaaaaaaaaaaaaaaaaaaaaugcaucccccccccccccccccccccccccccccccaaaggcucuuuucagagccaccagaauu

SEQ ID NO: 21695 - RNA, 6058 nt, Artificial Sequence
  SARS-CoV-2__MT758193.1__non-structural protein 3 (NSP3) mRNA gc
aggagaaagcuuaccauggcccccaccaaggugaccuucggcgacgacacggucaucgaggugcagggguacaagagcgugaacaucaccuucgagcuggacgagcgcaucgacaagguccucaacgagaagugcuccgccuacaccguggagcugggcaccgaggugaacgaguucgcgugcgucguggccgacgccgugaucaagacgcugcagccggucagcgagcuccugaccccccuggggaucgaccucgacgagugguccauggccaccuacuaccuguucgacgagagcggcgaguucaagcuggccucccacauguacugcagcuucuacccccccgacgaggacgaggaggagggggacugcgaggaggaggaguucgagccguccacccaguacgaguacggcacggaggacgacuaccagggcaagccccucgaguucggggcgaccagcgccgcccugcagcccgaggaggagcaggaggaggacuggcuggacgacgacucccagcagaccgugggccagcaggacgggagcgaggacaaccagaccacgaccauccagaccaucguggagguccagccccagcucgagauggagcugaccccgguggugcagacgaucgaggucaacuccuucagcggcuaccugaagcucaccgacaacguguacaucaagaacgccgacaucguggaggaggcgaagaaggucaagcccaccgugguggucaacgccgccaacguguaccugaagcacgggggcggcguggccggggcccugaacaaggcgaccaacaacgccaugcaggucgaguccgacgacuacaucgccacgaacggcccccucaagguggggggcagcugcguccuguccggccacaaccuggccaagcacugccuccacgugguggggcccaacgucaacaagggcgaggacauccagcugcugaagagcgccuacgagaacuucaaccagcacgaggugcuccuggcgccgcugcucuccgccgggaucuucggcgccgaccccauccacagccugcgggugugcgucgacaccgugcgcaccaacguguaccuggccgucuucgacaagaaccucuacgacaagcugguguccagcuuccuggagaugaagagcgagaagcagguggagcagaagaucgccgagauccccaaggaggaggucaagcccuucaucaccgaguccaagccgagcguggagcagcggaagcaggacgacaagaagaucaaggcgugcguggaggaggucacgaccacccucgaggagaccaaguuccugacggagaaccugcuccuguacaucgacaucaacgggaaccugcaccccgacuccgccacccucgugagcgacaucgacaucaccuuccugaagaaggacgcccccuacaucgugggcgacgucgugcaggagggcgugcugaccgccgucgugauccccacgaagaaggccgggggcaccaccgagaugcucgcgaaggcccugcgcaaggugccgaccgacaacuacaucacgaccuaccccgggcagggccugaacggguacaccgucgaggaggccaagaccgugcucaagaagugcaaguccgccuucuacauccugcccagcaucaucuccaacgagaagcaggagauccugggcaccgugagcuggaaccuccgggagaugcuggcgcacgccgaggagacgcgcaagcugaugcccgucugcguggagaccaaggccaucguguccaccauccagcggaaguacaagggcaucaagauccaggagggggucguggacuacggcgcccgcuucuacuucuacaccagcaagacgaccguggccucccugaucaacacccucaacgaccugaacgagacccuggucacgaugccgcucggguacgugacccacggccugaaccuggaggaggcggcccgguacaugcgcagccucaaggugcccgccaccgucuccgugagcucccccgacgccgugaccgccuacaacggguaccugacgagcuccagcaagacccccgaggagcacuucaucgagaccaucucccuggcgggcagcuacaaggacuggagcuacuccggccagagcacccagcucgggaucgaguuccugaagcggggcgacaaguccgucuacuacacgagcaacccgaccaccuuccaccuggacggggaggugaucaccuucgacaaccucaagacgcugcugucccuccgcgaggugcggaccaucaaggucuucaccaccguggacaacaucaaccugcacacgcagguggucgacaugagcaugaccuacggccagcaguucggccccaccuaccuggacggggccgacgugaccaagaucaagccccacaacucccacgagggcaagacguucuacgugcucccgaacgacgacacccugcgcgucgaggccuucgaguacuaccacaccaccgaccccagcuuccuggggcgguacauguccgcccucaaccacacgaagaaguggaaguacccccaggugaacggccugaccagcaucaagugggccgacaacaacugcuaccuggcgaccgcccuccugacccugcagcagaucgagcucaaguucaaccccccggcccugcaggacgccuacuaccgcgcgcgggccggggaggccgccaacuucugcgcccugauccucgcguacugcaacaagacggugggcgagcugggcgacguccgcgagaccauguccuaccuguuccagcacgccaaccucgacagcugcaagcgggugcugaacgucgugugcaagaccugcgggcagcagcagaccacccugaagggcguggaggccgucauguacauggggacgcucuccuacgagcaguucaagaagggcgugcagauccccugcaccugcgggaagcaggccaccaaguaccuggugcagcaggagagccccuucgucaugauguccgcccccccggcgcaguacgagcugaagcacggcaccuucacgugcgccagcgaguacaccggcaacuaccagugcgggcacuacaagcacaucaccuccaaggagacccucuacugcaucgacggcgcccugcugacgaagagcagcgaguacaaggggcccaucaccgacguguucuacaaggagaacuccuacaccaccacgaucaagcccgugaccuacaagcucgacggcgucgugugcaccgagaucgaccccaagcuggacaacuacuacaagaaggacaacagcuacuucaccgagcagccgaucgaccuggugcccaaccagcccuaccccaacgccuccuucgacaacuucaaguucgucugcgacaacaucaaguucgccgacgaccucaaccagcugacgggguacaagaagccggcgagccgcgagcugaaggugaccuucuuccccgaccucaacggcgacguggucgccaucgacuacaagcacuacacccccuccuucaagaagggcgccaagcugcugcacaagcccaucguguggcacgugaacaacgccaccaacaaggcgacguacaagccgaacaccuggugcauccggugccucuggagcaccaagcccgucgagaccuccaacagcuucgacgugcugaaguccgaggacgcccaggggauggacaaccuggccugcgaggaccucaagcccgugagcgaggaggucguggagaaccccacgauccagaaggacgugcuggagugcaacgucaagaccaccgagguggugggcgacaucauccugaagccggccaacaacucccucaagaucaccgaggaggucgggcacacggaccugauggccgcguacguggacaacagcucccugaccaucaagaagcccaacgagcucagccgcgugcugggccugaagacccucgccacccacgggcuggccgccgucaacuccgugcccugggacacgaucgccaacuacgcgaagccguuccugaacaagguggucagcaccaccaccaacaucgugacgcgcugccucaaccgggugugcaccaacuacaugcccuacuucuucacccugcugcuccagcugugcaccuucacccgcuccacgaacagccggaucaaggccuccaugcccaccaccaucgccaagaacaccgucaagagcgugggcaaguucugccuggaggccagcuucaacuaccucaagucccccaacuucagcaagcugaucaacaucaucaucugguuccugcuccuguccgugugccugggcagccucaucuacuccacggccgcgcuggggguccugaugagcaaccucggcaugccguccuacugcaccggguaccgcgagggcuaccugaacagcaccaacgugaccaucgccacguacugcaccggcuccauccccugcagcgugugccuguccgggcucgacagccuggacaccuaccccucccuggagaccauccagaucacgaucagcuccuucaagugggaccucaccgccuucggccuggucgccgagugguuccuggccuacauccucuucacccgguucuucuacgugcuggggcuggcggccaucaugcagcucuucuucagcuacuucgccgugcacuucaucuccaacagcuggcugauguggcugaucaucaaccugguccagauggcccccaucuccgcgauggugcgcauguacaucuucuucgccagcuucuacuacguguggaagagcuacguccacgugguggacggcugcaacuccagcaccugcaugaugugcuacaagcggaaccgcgccacgcgggucgagugcaccaccaucgugaacgggguccgccgguccuucuacguguacgccaacggcggcaagggguucugcaagcuccacaacuggaacugcgugaacugcgacaccuucugcgccggcagcacguucaucuccgacgaggucgcgcgcgaccugagccugcaguucaagcggccgaucaaccccaccgaccaguccagcuacaucguggacuccgugaccgucaagaacgggagcauccaccucuacuucgacaaggccggccagaagaccuacgagcgccacucccugagccacuucgugaaccuggacaaccuccgggccaacaacacgaaggggucccugcccaucaacgugaucgucuucgacggcaagagcaagugcgaggaguccagcgccaaguccgccagcguguacuacucccagcugaugugccagcccauccuccugcuggaccaggcgcucgugagcgacgucggcgacagcgccgagguggccgugaagauguucgacgccuacgucaacaccuucuccagcaccuucaacgugccgauggagaagcugaagacccugguggccacggcggaggccgagcucgccaagaacgucucccuggacaacgugcugagcaccuucaucuccgccgcgcgccagggguucguggacagcgacgucgagaccaaggacgugguggagugccucaagcugucccaccagagcgacaucgaggucaccggcgacuccugcaacaacuacaugcugacguacaacaagguggagaacaugaccccccgggaccucggggccugcaucgacugcagcgcccgccacaucaacgcccagguggccaagucccacaacaucgcgcugaucuggaacgucaaggacuucaugagccuguccgagcagcuccggaagcagauccgcagcgacgccaagaagaacaaccugcccuucaagcugaccugcgccaccacgcgccagguggugaacgucgugaccaccaagaucgcccucaagggcgggugaggacuaguuauaagacugacuagcccgaugggccucccaacgggcccuccuccccuccuugcaccgagauuaauaaaaaaaaaaaaaaaaaaaaaaaaaaaaaaaaaaaaaaaaaaaaaaaaaaaaaaaaaaaaaaaaugcaucccccccccccccccccccccccccccccccaaaggcucuuuucagagccaccagaauu

SEQ ID NO: 21696 - RNA, 6058 nt, Artificial Sequence
  SARS-CoV-2__MT758215.1__non-structural protein 3 (NSP3) mRNA gc
aggagaaagcuuaccauggcccccaccaaggugaccuucggcgacgacacggucaucgaggugcagggguacaagagcgugaacaucaccuucgagcuggacgagcgcaucgacaagguccucaacgagaagugcuccgccuacaccguggagcugggcaccgaggugaacgaguucgcgugcgucguggccgacgccgugaucaagacgcugcagccggucagcgagcuccugaccccccuggggaucgaccucgacgagugguccauggccaccuacuaccuguucgacgagagcggcgaguucaagcuggccucccacauguacugcagcuucuacccccccgacgaggacgaggaggagggggacugcgaggaggaggaguucgagccguccacccaguacgaguacggcacggaggacgacuaccagggcaagccccucgaguucggggcgaccagcgccgcccugcagcccgaggaggagcaggaggaggacuggcuggacgacgacucccagcagaccgugggccagcaggacgggagcgaggacaaccagaccacgaccauccagaccaucguggagguccagccccagcucgagauggagcugaccccgguggugcagacgaucgaggucaacuccuucagcggcuaccugaagcucaccgacaacguguacaucaagaacgccgacaucguggaggaggcgaagaaggucaagcccaccgugguggucaacgccgccaacguguaccugaagcacgggggcggcguggccggggcccugaacaaggcgaccaacaacgccaugcaggucgaguccgacgacuacaucgccacgaacggcccccucaagguggggggcagcugcguccuguccggccacaaccuggccaagcacugccuccacgugguggggcccaacgucaacaagggcgaggacauccagcugcugaagagcgccuacgagaacuucaaccagcacgaggugcuccuggcgccgcugcucuccgccgggaucuucggcgccgaccccauccacagccugcgggugugcgucgacaccgugcgcaccaacguguaccuggccgucuucgacaagaaccucuacgacaagcugguguccagcuuccuggagaugaagagcgagaagcagguggagcagaagaucgccgagauccccaaggaggaggucaagcccuucaucaccgaguccaagccgagcguggagcagcggaagcaggacgacaagaagaucaaggcgugcguggaggaggucacgaccacccucgaggagaccaaguuccugacggagaaccugcuccuguacaucgacaucaacgggaaccugcaccccgacuccgccacccucgugagcgacaucgacaucaccuuccugaagaaggacgcccccuacaucgugggcgacgucgugcaggagggcgugcugaccgccgucgugauccccacgaagaaggccgggggcaccaccgagaugcucgcgaaggcccugcgcaaggugccgaccgacaacuacaucacgaccuaccccgggcagggccugaacggguacaccgucgaggaggccaagaccgugcucaagaagugcaaguccgccuucuacauccugcccagcaucaucuccaacgagaagcaggagauccugggcaccgugagcuggaaccuccgggagaugcuggcgcacgccgaggagacgcgcaagcugaugcccgucugcguggagaccaaggccaucguguccaccauccagcggaaguacaagggcaucaagauccaggagggggucguggacuacggcgcccgcuucuacuucuacaccagcaagacgaccguggccucccugaucaacacccucaacgaccugaacgagacccuggucacgaugccgcucggguacgugacccacggccugaaccuggaggaggcggcccgguacaugcgcagccucaaggugcccgccaccgucuccgugagcucccccgacgccgugaccgccuacaacggguaccugacgagcuccagcaagacccccgaggagcacuucaucgagaccaucucccuggcgggcagcuacaaggacuggagcuacuccggccagagcacccagcucgggaucgaguuccugaagcggggcgacaaguccgucuacuacacgagcaacccgaccaccuuccaccuggacggggaggugaucaccuucgacaaccucaagacgcugcugucccuccgcgaggugcggaccaucaaggucuucaccaccguggacaacaucaaccugcacacgcagguggucgacaugagcaugaccuacggccagcaguucggccccaccuaccuggacggggccgacgugaccaagaucaagccccacaacucccacgagggcaagacguucuacgugcucccgaacgacgacacccugcgcgucgaggccuucgaguacuaccacaccaccgaccccagcuuccuggggcgguacauguccgcccucaaccacacgaagaaguggaaguacccccaggugaacggccugaccagcaucaagugggccgacaacaacugcuaccuggcgaccgcccuccugacccugcagcagaucgagcucaaguucaaccccccggcccugcaggacgccuacuaccgcgcgcgggccggggaggccgccaacuucugcgcccugauccucgcguacugcaacaagacggugggcgagcugggcgacguccgcgagaccauguccuaccuguuccagcacgccaaccucgacagcugcaagcgggugcugaacgucgugugcaagaccugcgggcagcagcagaccacccugaagggcguggaggccgucauguacauggggacgcucuccuacgagcaguucaagaagggcgugcagauccccugcaccugcgggaagcaggccaccaaguaccuggugcagcaggagagccccuucgucaugauguccgcccccccggcgcaguacgagcugaagcacggcaccuucacgugcgccagcgaguacaccggcaacuaccagugcgggcacuacaagcacaucaccuccaaggagacccucuacugcaucgacggcgcccugcugacgaagagcagcgaguacaaggggcccaucaccgacguguucuacaaggagaacuccuacaccaccacgaucaagcccgugaccuacaagcucgacggcgucgugugcaccgagaucgaccccaagcuggacaacuacuacaagaaggacaacagcuacuucaccgagcagccgaucgaccuggugcccaaccagcccuaccccaacgccuccuucgacaacuucaaguucgucugcgacaacaucaaguucgccgacgaccucaaccagcugacgggguacaagaagccggcgagccgcgagcugaaggugaccuucuuccccgaccucaacggcgacguggucgccaucgacuacaagcacuacacccccuccuucaagaagggcgccaagcugcugcacaagcccaucguguggcacgugaacaacgccaccaacaaggcgacguacaagccgaacaccuggugcauccggugccucuggagcaccaagcccgucgagaccuccaacagcuucgacgugcugaaguccgaggacgcccaggggauggacaaccuggccugcgaggaccucaagcccgugagcgaggaggucguggagaaccccacgauccagaaggacgugcuggagugcaacgucaagaccaccgagguggugggcgacaucauccugaagccggccaacaacucccucaagaucaccgaggaggucgggcacacggaccugauggccgcguacguggacaacagcucccugaccaucaagaagcccaacgagcucagccgcgugcugggccugaagacccucgccacccacgggcuggccgccgucaacuccgugcccugggacacgaucgccaacuacgcgaagccguuccugaacaagguggucagcaccaccaccaacaucgugacgcgcugccucaaccgggugugcaccaacuacaugcccuacuucuucacccugcugcuccagcugugcaccuucacccgcuccacgaacagccggaucaaggccuccaugcccaccaccaucgccaagaacaccgucaagagcgugggcaaguucugccuggaggccagcuucaacuaccucaagucccccaacuucagcaagcugaucaacaucaucaucugguuccugcuccuguccgugugccugggcagccucaucuacuccacggccgcgcuggggguccugaugagcaaccucggcaugccguccuacugcaccggguaccgcgagggcuaccugaacagcaccaacgugaccaucgccacguacugcaccggcuccauccccugcagcgugugccuguccgggcucgacagccuggacaccuaccccucccuggagaccauccagaucacgaucagcuccuucaagugggaccucaccgccuucggccuggucgccgagugguuccuggccuacauccucuucacccgguucuucuacgugcuggggcuggcggccaucaugcagcucuucuucagcuacuucgccguguacuucaucuccaacagcuggcugauguggcugaucaucaaccugguccagauggcccccaucuccgcgauggugcgcauguacaucuucuucgccagcuucuacuacguguggaagagcuacguccacgugguggacggcugcaacuccagcaccugcaugaugugcuacaagcggaaccgcgccacgcgggucgagugcaccaccaucgugaacgggguccgccgguccuucuacguguacgccaacggcggcaagggguucugcaagcuccacaacuggaacugcgugaacugcgacaccuucugcgccggcagcacguucaucuccgacgaggucgcgcgcgaccugagccugcaguucaagcggccgaucaaccccaccgaccaguccagcuacaucguggacuccgugaccgucaagaacgggagcauccaccucuacuucgacaaggccggccagaagaccuacgagcgccacucccugagccacuucgugaaccuggacaaccuccgggccaacaacacgaaggggucccugcccaucaacgugaucgucuucgacggcaagagcaagugcgaggaguccagcgccaaguccgccagcguguacuacucccagcugaugugccagcccauccuccugcuggaccaggcgcucgugagcgacgucggcgacagcgccgagguggccgugaagauguucgacgccuacgucaacaccuucuccagcaccuucaacgugccgauggagaagcugaagacccugguggccacggcggaggccgagcucgccaagaacgucucccuggacaacgugcugagcaccuucaucuccgccgcgcgccagggguucguggacagcgacgucgagaccaaggacgugguggagugccucaagcugucccaccagagcgacaucgaggucaccggcgacuccugcaacaacuacaugcugacguacaacaagguggagaacaugaccccccgggaccucggggccugcaucgacugcagcgcccgccacaucaacgcccagguggccaagucccacaacaucgcgcugaucuggaacgucaaggacuucaugagccuguccgagcagcuccggaagcagauccgcagcgccgccaagaagaacaaccugcccuucaagcugaccugcgccaccacgcgccagguggugaacgucgugaccaccaagaucgcccucaagggcgggugaggacuaguuauaagacugacuagcccgaugggccucccaacgggcccuccuccccuccuugcaccgagauuaauaaaaaaaaaaaaaaaaaaaaaaaaaaaaaaaaaaaaaaaaaaaaaaaaaaaaaaaaaaaaaaaaugcaucccccccccccccccccccccccccccccccaaaggcucuuuucagagccaccagaauu

SEQ ID NO: 21697 - RNA, 6058 nt, Artificial Sequence
  SARS-CoV-2__MT758240.1__non-structural protein 3 (NSP3) mRNA gc
aggagaaagcuuaccauggcccccaccaaggugaccuucggcgacgacacggucaucgaggugcagggguacaagagcgugaacaucaccuucgagcuggacgagcgcaucgacaagguccucaacgagaagugcuccgccuacaccguggagcugggcaccgaggugaacgaguucgcgugcgucguggccgacgccgugaucaagacgcugcagccggucagcgagcuccugaccccccuggggaucgaccucgacgagugguccauggccaccuacuaccuguucgacgagagcggcgaguucaagcuggccucccacauguacugcagcuucuacccccccgacgaggacgaggaggagggggacugcgaggaggaggaguucgagccguccacccaguacgaguacggcacggaggacgacuaccagggcaagccccucgaguucggggcgaccagcgccgcccugcagcccgaggaggagcaggaggaggacuggcuggacgacgacucccagcagaccgugggccagcaggacgggagcgaggacaaccagaccacgaccauccagaccaucguggagguccagccccagcucgagauggagcugaccccgguggugcagacgaucgaggucaacuccuucagcggcuaccugaagcucaccgacaacguguacaucaagaacgccgacaucguggaggaggcgaagaaggucaagcccaccgugguggucaacgccgccaacguguaccugaagcacgggggcggcguggccggggcccugaacaaggcgaccaacaacgccaugcaggucgaguccgacgacuacaucgccacgaacggcccccucaagguggggggcagcugcguccuguccggccacaaccuggccaagcacugccuccacgugguggggcccaacgucaacaagggcgaggacauccagcugcugaagagcgccuacgagaacuucaaccagcacgaggugcuccuggcgccgcugcucuccgccgggaucuucggcgccgacagcauccacucccugcgggugugcgucgacaccgugcgcaccaacguguaccuggccgucuucgacaagaaccucuacgacaagcuggugagcagcuuccuggagaugaaguccgagaagcagguggagcagaagaucgccgagauccccaaggaggaggucaagcccuucaucaccgagagcaagcccuccguggagcagcggaagcaggacgacaagaagaucaaggcgugcguggaggaggucacgaccacccucgaggagaccaaguuccugacggagaaccugcuccuguacaucgacaucaacgggaaccugcacccggacagcgccacccucguguccgacaucgacaucaccuuccugaagaaggacgcccccuacaucgugggcgacgucgugcaggagggcgugcugaccgccgucgugauccccacgaagaaggccgggggcaccaccgagaugcucgcgaaggcccugcgcaaggugcccaccgacaacuacaucacgaccuacccggggcagggccugaacggguacaccgucgaggaggccaagaccgugcucaagaagugcaagagcgccuucuacauccugcccuccaucaucagcaacgagaagcaggagauccugggcaccguguccuggaaccuccgggagaugcuggcgcacgccgaggagacgcgcaagcugaugcccgucugcguggagaccaaggccaucgugagcaccauccagcggaaguacaagggcaucaagauccaggagggggucguggacuacggcgcccgcuucuacuucuacaccuccaagacgaccguggccagccugaucaacacccucaacgaccugaacgagacccuggucacgaugccccucggguacgugacccacggccugaaccuggaggaggcggcccgguacaugcgcucccucaaggugccggccaccgucagcguguccagccccgacgccgugaccgccuacaacggguaccugacguccagcuccaagacccccgaggagcacuucaucgagaccaucagccuggcgggcagcuacaaggacugguccuacagcggccaguccacccagcucgggaucgaguuccugaagcggggcgacaagaucgucuacuacacgagcaaccccaccaccuuccaccuggacggggaggugaucaccuucgacaaccucaagacgcugcugucccuccgcgaggugcggaccaucaaggucuucaccaccguggacaacaucaaccugcacacgcagguggucgacaugagcaugaccuacggccagcaguucggcccgaccuaccuggacggggccgacgugaccaagaucaagccccacaacucccacgagggcaagacguucuacgugcuccccaacgacgacacccugcgcgucgaggccuucgaguacuaccacaccaccgacccgagcuuccuggggcgguacauguccgcccucaaccacacgaagaaguggaaguacccccaggugaacggccugaccagcaucaagugggccgacaacaacugcuaccuggcgaccgcccuccugacccugcagcagaucgagcucaaguucaacccccccgcccugcaggacgccuacuaccgcgcgcgggccggggaggccgccaacuucugcgcccugauccucgcguacugcaacaagacggugggcgagcugggcgacguccgcgagaccauguccuaccuguuccagcacgccaaccucgacagcugcaagcgggugcugaacgucgugugcaagaccugcgggcagcagcagaccacccugaagggcguggaggccgucauguacauggggacgcucuccuacgagcaguucaagaagggcgugcagaucccgugcaccugcgggaagcaggccaccaaguaccuggugcagcaggagagccccuucgucaugauguccgccccccccgcgcaguacgagcugaagcacggcaccuucacgugcgccagcgaguacaccggcaacuaccagugcgggcacuacaagcacaucaccuccaaggagacccucuacugcaucgacggcgcccugcugacgaagagcagcgaguacaaggggccgaucaccgacguguucuacaaggagaacuccuacaccaccacgaucaagcccgugaccuacaagcucgacggcgucgugugcaccgagaucgaccccaagcuggacaacuacuacaagaaggacaacagcuacuucaccgagcagcccaucgaccuggugccgaaccagcccuaccccaacgccuccuucgacaacuucaaguucgucugcgacaacaucaaguucgccgacgaccucaaccagcugacgggguacaagaagcccgcgagccgcgagcugaaggugaccuucuucccggaccucaacggcgacguggucgccaucgacuacaagcacuacacccccuccuucaagaagggcgccaagcugcugcacaagcccaucguguggcacgugaacaacgccaccaacaaggcgacguacaagcccaacaccuggugcauccggugccucuggagcaccaagccggucgagaccuccaacagcuucgacgugcugaaguccgaggacgcccaggggauggacaaccuggccugcgaggaccucaagcccgugagcgaggaggucguggagaaccccacgauccagaaggacgugcuggagugcaacgucaagaccaccgagguggugggcgacaucauccugaagcccgccaacaacucccucaagaucaccgaggaggucgggcacacggaccugauggccgcguacguggacaacagcucccugaccaucaagaagccgaacgagcucagccgcgugcugggccugaagacccucgccacccacgggcuggccgccgucaacuccgugcccugggacacgaucgccaacuacgcgaagcccuuccugaacaagguggucagcaccaccaccaacaucgugacgcgcugccucaaccgggugugcaccaacuacaugccguacuucuucacccugcugcuccagcugugcaccuucacccgcuccacgaacagccggaucaaggccuccaugcccaccaccaucgccaagaacaccgucaagagcgugggcaaguucugccuggaggccagcuucaacuaccucaagucccccaacuucagcaagcugaucaacaucaucaucugguuccugcuccuguccgugugccugggcagccucaucuacuccacggccgcgcuggggguccugaugagcaaccucggcaugcccuccuacugcaccggguaccgcgagggcuaccugaacagcaccaacgugaccaucgccacguacugcaccggcuccaucccgugcagcgugugccuguccgggcucgacagccuggacaccuaccccucccuggagaccauccagaucacgaucagcuccuucaagugggaccucaccgccuucggccuggucgccgagugguuccuggccuacauccucuucacccgguucuucuacgugcuggggcuggcggccaucaugcagcucuucuucagcuacuucgccgugcacuucaucuccaacagcuggcugauguggcugaucaucaaccugguccagauggcccccaucuccgcgauggugcgcauguacaucuucuucgccagcuucuacuacguguggaagagcuacguccacgugguggacggcugcaacuccagcaccugcaugaugugcuacaagcggaaccgcgccacgcgggucgagugcaccaccaucgugaacgggguccgccgguccuucuacguguacgccaacggcggcaagggguucugcaagcuccacaacuggaacugcgugaacugcgacaccuucugcgccggcagcacguucaucuccgacgaggucgcgcgcgaccugagccugcaguucaagcggcccaucaacccgaccgaccaguccagcuacaucguggacuccgugaccgucaagaacgggagcauccaccucuacuucgacaaggccggccagaagaccuacgagcgccacucccugagccacuucgugaaccuggacaaccuccgggccaacaacacgaaggggucccugcccaucaacgugaucgucuucgacggcaagagcaagugcgaggaguccagcgccaaguccgccagcguguacuacucccagcugaugugccagcccauccuccugcuggaccaggcgcucgugagcgacgucggcgacagcgccgagguggccgugaagauguucgacgucuacgugaacaccuucuccagcaccuucaacgugcccauggagaagcugaagacccuggucgccacggccgaggcggagcucgccaagaacgugucccuggacaacgugcugagcaccuucaucuccgccgcccgccagggguucgucgacagcgacguggagaccaaggacguggucgagugccucaagcugucccaccagagcgacaucgaggugaccggcgacuccugcaacaacuacaugcugacguacaacaagguggagaacaugaccccgcgggaccucggggcgugcaucgacugcagcgcccgccacaucaacgcccaggucgccaagucccacaacaucgcccugaucuggaacgugaaggacuucaugagccuguccgagcagcuccggaagcagauccgcagcgcggccaagaagaacaaccugcccuucaagcugaccugcgccaccacgcgccagguggucaacguggugaccaccaagaucgcccucaagggcgggugaggacuaguuauaagacugacuagcccgaugggccucccaacgggcccuccuccccuccuugcaccgagauuaauaaaaaaaaaaaaaaaaaaaaaaaaaaaaaaaaaaaaaaaaaaaaaaaaaaaaaaaaaaaaaaaaugcaucccccccccccccccccccccccccccccccaaaggcucuuuucagagccaccagaauu

SEQ ID NO: 21698 - RNA, 6058 nt, Artificial Sequence
  SARS-CoV-2__MT758436.1__non-structural protein 3 (NSP3) mRNA gc
aggagaaagcuuaccauggcccccaccaaggugaccuucggcgacgacacggucaucgaggugcagggguacaagagcgugaacaucaccuucgagcuggacgagcgcaucgacaagguccucaacgagaagugcuccgccuacaccguggagcugggcaccgaggugaacgaguucgcgugcgucguggccgacgccgugaucaagacgcugcagccggucagcgagcuccugaccccccuggggaucgaccucgacgagugguccauggccaccuacuaccuguucgacgagagcggcgaguucaagcuggccucccacauguacugcagcuucuacccccccgacgaggacgaggaggagggggacugcgaggaggaggaguucgagccguccacccaguacgaguacggcacggaggacgacuaccagggcaagccccucgaguucggggcgaccagcgccgcccugcagcccgaggaggagcaggaggaggacuggcuggacgacgacucccagcagaccgugggccagcaggacgggagcgaggacaaccagaccacgaccauccagaccaucguggagguccagccccagcucgagauggagcugaccccgguggugcagacgaucgaggucaacuccuucagcggcuaccugaagcucaccgacaacguguacaucaagaacgccgacaucguggaggaggcgaagaaggucaagcccaccgugguggucaacgccgccaacguguaccugaagcacgggggcggcguggccggggcccugaacaaggcgaccaacaacgccaugcaggucgaguccgacgacuacaucgccacgaacggcccccucaagguggggggcagcugcguccuguccggccacaaccuggccaagcacugccuccacgugguggggcccaacgucaacaagggcgaggacauccagcugcugaagagcgccuacgagaacuucaaccagcacgaggugcuccuggcgccgcugcucuccgccgggaucuucggcgccgaccccauccacagccugcgggugugcgucgacaccgugcgcaccaacguguaccuggccgucuucgacaagaaccucuacgacaagcugguguccagcuuccuggagaugaagagcgagaagcagguggagcagaagaucgccgagauccccaaggaggaggucaagcccuucaucaccgaguccaagccgagcguggagcagcggaagcaggacgacaagaagaucaaggcgugcguggaggaggucacgaccacccucgaggagaccaaguuccugacggagaaccugcuccuguacaucgacaucaacgggaaccugcaccccgacuccgccacccucgugagcgacaucgacaucaccuuccugaagaaggacgcccccuacaucgugggcgacgucgugcaggagggcgugcugaccgccgucgugauccccacgaagaaggccgggggcaccaccgagaugcucgcgaaggcccugcgcaaggugccgaccgacaacuacaucacgaccuaccccgggcagggccugaacggguacaccgucgaggaggccaagaccgugcucaagaagugcaaguccgccuucuacauccugcccagcaucaucuccaacgagaagcaggagauccugggcaccgugagcuggaaccuccgggagaugcuggcgcacgccgaggagacgcgcaagcugaugcccgucugcguggagaccaaggccaucguguccaccauccagcggaaguacaagggcaucaagauccaggagggggucguggacuacggcgcccgcuucuacuucuacaccagcaagacgaccguggccucccugaucaacacccucaacgaccugaacgagacccuggucacgaugccgcucggguacgugacccacggccugaaccuggaggaggcggcccgguacaugcgcagccucaaggugcccgccaccgucuccgugagcucccccgacgccgugaccgccuacaacggguaccugacgagcuccagcaagacccccgaggagcacuucaucgagaccaucucccuggcgggcagcuacaaggacuggagcuacuccggccagagcacccagcucgggaucgaguuccugaagcggggcgacaaguccgucuacuacacgagcaacccgaccaccuuccaccuggacggggaggugaucaccuucgacaaccucaagacgcugcugucccuccgcgaggugcggaccaucaaggucuucaccgccguggacaacaucaaccugcacacccagguggucgacaugagcaugacguacggccagcaguucggccccaccuaccuggacggggccgacgugaccaagaucaagccccacaacucccacgagggcaagaccuucuacgugcucccgaacgacgacacgcugcgcgucgaggccuucgaguacuaccacaccaccgaccccagcuuccuggggcgguacauguccgcccucaaccacaccaagaaguggaaguacccccaggugaacggccugacgagcaucaagugggcggacaacaacugcuaccuggccaccgcccuccugacccugcagcagaucgagcucaaguucaaccccccggcccugcaggacgcguacuaccgcgcccgggccggggaggccgccaacuucugcgcgcugauccucgccuacugcaacaagaccgugggcgagcugggcgacguccgcgagacgauguccuaccuguuccagcacgccaaccucgacagcugcaagcgggugcugaacgucgugugcaagaccugcgggcagcagcagaccacccugaagggcguggaggccgucauguacauggggacccucuccuacgagcaguucaagaagggcgugcagauccccugcacgugcgggaagcaggccaccaaguaccuggugcagcaggagagccccuucgucaugauguccgcgcccccggcccaguacgagcugaagcacggcaccuucaccugcgccagcgaguacacgggcaacuaccagugcgggcacuacaagcacaucaccuccaaggagacccucuacugcaucgacggcgcccugcugaccaagagcagcgaguacaaggggcccaucacggacguguucuacaaggagaacuccuacaccaccaccaucaagcccgugacguacaagcucgacggcgucgugugcaccgagaucgaccccaagcuggacaacuacuacaagaaggacaacagcuacuucaccgagcagccgaucgaccuggugcccaaccagcccuaccccaacgccuccuucgacaacuucaaguucgucugcgacaacaucaaguucgcggacgaccucaaccagcugaccggguacaagaagccggccagccgcgagcugaaggugacguucuuccccgaccucaacggcgacguggucgccaucgacuacaagcacuacacccccuccuucaagaagggcgccaagcugcugcacaagcccaucguguggcacgugaacaacgcgaccaacaaggccaccuacaagccgaacacguggugcauccggugccucuggagcaccaagcccgucgagaccuccaacagcuucgacgugcugaaguccgaggacgcccaggggauggacaaccuggccugcgaggaccucaagcccgugagcgaggaggucguggagaaccccaccauccagaaggacgugcuggagugcaacgucaagacgaccgagguggugggcgacaucauccugaagccggccaacaacucccucaagaucaccgaggaggucgggcacaccgaccugauggcggccuacguggacaacagcucccugacgaucaagaagcccaacgagcucagccgcgugcugggccugaagacccucgccacccacgggcuggccgccgucaacuccgugcccugggacaccaucgcgaacuacgccaagccguuccugaacaagguggucagcacgaccaccaacaucgugacccgcugccucaaccgggugugcacgaacuacaugcccuacuucuucacccugcugcuccagcugugcaccuucacccgcuccaccaacagccggaucaaggccuccaugcccacgaccaucgccaagaacaccgucaagagcgugggcaaguucugccuggaggccagcuucaacuaccucaagucccccaacuucagcaagcugaucaacaucaucaucugguuccugcuccuguccgugugccugggcagccucaucuacuccaccgcggcccuggggguccugaugagcaaccucggcaugccguccuacugcacgggguaccgcgagggcuaccugaacagcaccaacgugaccaucgccaccuacugcacgggcuccauccccugcagcgugugccuguccgggcucgacagccuggacaccuaccccucccuggagaccauccagaucaccaucagcuccuucaagugggaccucacggccuucggccuggucgccgagugguuccuggcguacauccucuucacccgguucuucuacgugcuggggcuggccgccaucaugcagcucuucuucagcuacuucgccgugcacuucaucuccaacagcuggcugauguggcugaucaucaaccugguccagauggcgcccaucuccgccauggugcgcauguacaucuucuucgccagcuucuacuacguguggaagagcuacguccacgugguggacggcugcaacuccagcaccugcaugaugugcuacaagcggaaccgcgccacccgggucgagugcacgaccaucgugaacgggguccgccgguccuucuacguguacgccaacggcggcaagggguucugcaagcuccacaacuggaacugcgugaacugcgacaccuucugcgcgggcagcaccuucaucuccgacgaggucgcccgcgaccugagccugcaguucaagcggccgaucaaccccacggaccaguccagcuacaucguggacuccgugaccgucaagaacgggagcauccaccucuacuucgacaaggccggccagaagaccuacgagcgccacucccugagccacuucgugaaccuggacaaccuccgggccaacaacaccaaggggucccugcccaucaacgugaucgucuucgacggcaagagcaagugcgaggaguccagcgccaaguccgcgagcguguacuacucccagcugaugugccagcccauccuccugcuggaccaggcccucgugagcgacgucggcgacagcgccgagguggccgugaagauguucgacgccuacgucaacacguucuccagcaccuucaacgugccgauggagaagcugaagacccugguggcgaccgccgaggccgagcucgccaagaacgucucccuggacaacgugcugagcacguucaucuccgcggcccgccagggguucguggacagcgacgucgagaccaaggacgugguggagugccucaagcugucccaccagagcgacaucgaggucaccggcgacuccugcaacaacuacaugcugaccuacaacaagguggagaacaugacgccccgggaccucggggccugcaucgacugcagcgcccgccacaucaacgcccagguggcgaagucccacaacaucgcccugaucuggaacgucaaggacuucaugagccuguccgagcagcuccggaagcagauccgcagcgccgccaagaagaacaaccugcccuucaagcugaccugcgccaccacccgccagguggugaacgucgugacgaccaagaucgcgcucaagggcgggugaggacuaguuauaagacugacuagcccgaugggccucccaacgggcccuccuccccuccuugcaccgagauuaauaaaaaaaaaaaaaaaaaaaaaaaaaaaaaaaaaaaaaaaaaaaaaaaaaaaaaaaaaaaaaaaaugcaucccccccccccccccccccccccccccccccaaaggcucuuuucagagccaccagaauu

SEQ ID NO: 21699 - RNA, 6058 nt, Artificial Sequence
  SARS-CoV-2__MT758439.1__non-structural protein 3 (NSP3) mRNA gc
aggagaaagcuuaccauggcccccaccaaggugaccuucggcgacgacacggucaucgaggugcagggguacaagagcgugaacaucaccuucgagcuggacgagcgcaucgacaagguccucaacgagaagugcuccgccuacaccguggagcugggcaccgaggugaacgaguucgcgugcgucguggccgacgccgugaucaagacgcugcagccggucagcgagcuccugaccccccuggggaucgaccucgacgagugguccauggccaccuacuaccuguucgacgagagcggcgaguucaagcuggccucccacauguacugcagcuucuacccccccgacgaggacgaggaggagggggacugcgaggaggaggacuucgagccguccacccaguacgaguacggcacggaggacgacuaccagggcaagccccucgaguucggggcgaccagcgccgcccugcagcccgaggaggagcaggaggaggacuggcuggacgacgacucccagcagaccgugggccagcaggacgggagcgaggacaaccagaccacgaccauccagaccaucguggagguccagccccagcucgagauggagcugaccccgguggugcagacgaucgaggucaacuccuucagcggcuaccugaagcucaccgacaacguguacaucaagaacgccgacaucguggaggaggcgaagaaggucaagcccaccgugguggucaacgccgccaacguguaccugaagcacgggggcggcguggccggggcccugaacaaggcgaccaacaacgccaugcaggucgaguccgacgacuacaucgccacgaacggcccccucaagguggggggcagcugcguccuguccggccacaaccuggccaagcacugccuccacgugguggggcccaacgucaacaagggcgaggacauccagcugcugaagagcgccuacgagaacuucaaccagcacgaggugcuccuggcgccgcugcucuccgccgggaucuucggcgccgaccccauccacagccugcgggugugcgucgacaccgugcgcaccaacguguaccuggccgucuucgacaagaaccucuacgacaagcugguguccagcuuccuggagaugaagagcgagaagcagguggagcagaagaucgccgagauccccaaggaggaggucaagcccuucaucaccgaguccaagccgagcguggagcagcggaagcaggacgacaagaagaucaaggcgugcguggaggaggucacgaccacccucgaggagaccaaguuccugacggagaaccugcuccuguacaucgacaucaacgggaaccugcaccccgacuccgccacccucgugagcgacaucgacaucaccuuccugaagaaggacgcccccuacaucgugggcgacgucgugcaggagggcgugcugaccgccgucgugauccccacgaagaaggccgggggcaccaccgagaugcucgcgaaggcccugcgcaaggugccgaccgacaacuacaucacgaccuaccccgggcagggccugaacggguacaccgucgaggaggccaagaccgugcucaagaagugcaaguccgccuucuacauccugcccagcaucaucuccaacgagaagcaggagauccugggcaccgugagcuggaaccuccgggagaugcuggcgcacgccgaggagacgcgcaagcugaugcccgucugcguggagaccaaggccaucguguccaccauccagcggaaguacaagggcaucaagauccaggagggggucguggacuacggcgcccgcuucuacuucuacaccagcaagacgaccguggccucccugaucaacacccucaacgaccugaacgagacccuggucacgaugccgcucggguacgugacccacggccugaaccuggaggaggcggcccgguacaugcgcagccucaaggugcccgccaccgucuccgugagcucccccgacgccgugaccgccuacaacggguaccugacgagcuccagcaagacccccgaggagcacuucaucgagaccaucucccuggcgggcagcuacaaggacuggagcuacuccggccagagcacccagcucgggaucgaguuccugaagcggggcgacaaguccgucuacuacacgagcaacccgaccaccuuccaccuggacggggaggugaucaccuucgacaaccucaagacgcugcugucccuccgcgaggugcggaccaucaaggucuucaccaccguggacaacaucaaccugcacacgcagguggucgacaugagcaugaccuacggccagcaguucggccccaccuaccuggacggggccgacgugaccaagaucaagccccacaacucccacgagggcaagacguucuacgugcucccgaacgacgacacccugcgcgucgaggccuucgaguacuaccacaccaccgaccccagcuuccuggggcgguacauguccgcccucaaccacacgaagaaguggaaguacccccaggugaacggccugaccagcaucaagugggccgacaacaacugcuaccuggcgaccgcccuccugacccugcagcagaucgagcucaaguucaaccccccggcccugcaggacgccuacuaccgcgcgcgggccggggaggccgccaacuucugcgcccugauccucgcguacugcaacaagacggugggcgagcugggcgacguccgcgagaccauguccuaccuguuccagcacgccaaccucgacagcugcaagcgggugcugaacgucgugugcaagaccugcgggcagcagcagaccacccugaagggcguggaggccgucauguacauggggacgcucuccuacgagcaguucaagaagggcgugcagauccccugcaccugcgggaagcaggccaccaaguaccuggugcagcaggagagccccuucgucaugauguccgcccccccggcgcaguacgagcugaagcacggcaccuucacgugcgccagcgaguacaccggcaacuaccagugcgggcacuacaagcacaucaccuccaaggagacccucuacugcaucgacggcgcccugcugacgaagagcagcgaguacaaggggcccaucaccgacguguucuacaaggagaacuccuacaccaccacgaucaagcccgugaccuacaagcucgacggcgucgugugcaccgagaucgaccccaagcuggacaacuacuacaagaaggacaacagcuacuucaccgagcagccgaucgaccuggugcccaaccagcccuaccccaacgccuccuucgacaacuucaaguucgucugcgacaacaucaaguucgccgacgaccucaaccagcugacgggguacaagaagccggcgagccgcgagcugaaggugaccuucuuccccgaccucaacggcgacguggucgccaucgacuacaagcacuacacccccuccuucaagaagggcgccaagcugcugcacaagcccaucguguggcacgugaacaacgccaccaacaaggcgacguacaagccgaacaccuggugcauccggugccucuggagcaccaagcccgucgagaccuccaacagcuucgacgugcugaaguccgaggacgcccaggggauggacaaccuggccugcgaggaccucaagcccgugagcgaggaggucguggagaaccccacgauccagaaggacgugcuggagugcaacgucaagaccaccgagguggugggcgacaucauccugaagccggccaacaacucccucaagaucaccgaggaggucgggcacacggaccugauggccgcguacguggacaacagcucccugaccaucaagaagcccaacgagcucagccgcgugcugggccugaagacccucgccacccacgggcuggccgccgucaacuccgugcccugggacacgaucgccaacuacgcgaagccguuccugaacaagguggucagcaccaccaccaacaucgugacgcgcugccucaaccgggugugcaccaacuacaugcccuacuucuucacccugcugcuccagcugugcaccuucacccgcuccacgaacagccggaucaaggccuccaugcccaccaccaucgccaagaacaccgucaagagcgugggcaaguucugccuggaggccagcuucaacuaccucaagucccccaacuucagcaagcugaucaacaucaucaucugguuccugcuccuguccgugugccugggcagccucaucuacuccacggccgcgcuggggguccugaugagcaaccucggcaugccguccuacugcaccggguaccgcgagggcuaccugaacagcaccaacgugaccaucgccacguacugcaccggcuccauccccugcagcgugugccuguccgggcucgacagccuggacaccuaccccucccuggagaccauccagaucacgaucagcuccuucaagugggaccucaccgccuucggccuggucgccgagugguuccuggccuacauccucuucacccgguucuucuacgugcuggggcuggcggccaucaugcagcucuucuucagcuacuucgccgugcacuucaucuccaacagcuggcugauguggcugaucaucaaccugguccagauggcccccaucuccgcgauggugcgcauguacaucuucuucgccagcuucuacuacguguggaagagcuacguccacgugguggacggcugcaacuccagcaccugcaugaugugcuacaagcggaaccgcgccacgcgggucgagugcaccaccaucgugaacgggguccgccgguccuucuacguguacgccaacggcggcaagggguucugcaagcuccacaacuggaacugcgugaacugcgacaccuucugcgccggcagcacguucaucuccgacgaggucgcgcgcgaccugagccugcaguucaagcggccgaucaaccccaccgaccaguccagcuacaucguggacuccgugaccgucaagaacgggagcauccaccucuacuucgacaaggccggccagaagaccuacgagcgccacucccugagccacuucgugaaccuggacaaccuccgggccaacaacacgaaggggucccugcccaucaacgugaucgucuucgacggcaagagcaagugcgaggaguccagcgccaaguccgccagcguguacuacucccagcugaugugccagcccauccuccugcuggaccaggcgcucgugagcgacgucggcgacagcgccgagguggccgugaagauguucgacgccuacgucaacaccuucuccagcaccuucaacgugccgauggagaagcugaagacccugguggccacggcggaggccgagcucgccaagaacgucucccuggacaacgugcugagcaccuucaucuccgccgcgcgccagggguucguggacagcgacgucgagaccaaggacgugguggagugccucaagcugucccaccagagcgacaucgaggucaccggcgacuccugcaacaacuacaugcugacguacaacaagguggagaacaugaccccccgggaccucggggccugcaucgacugcagcgcccgccacaucaacgcccagguggccaagucccacaacaucgcgcugaucuggaacgucaaggacuucaugagccuguccgagcagcuccggaagcagauccgcagcgccgccaagaagaacaaccugcccuucaagcugaccugcgccaccacgcgccagguggugaacgucgugaccaccaagaucgcccucaagggcgggugaggacuaguuauaagacugacuagcccgaugggccucccaacgggcccuccuccccuccuugcaccgagauuaauaaaaaaaaaaaaaaaaaaaaaaaaaaaaaaaaaaaaaaaaaaaaaaaaaaaaaaaaaaaaaaaaugcaucccccccccccccccccccccccccccccccaaaggcucuuuucagagccaccagaauu

SEQ ID NO: 21700 - RNA, 6058 nt, Artificial Sequence
  SARS-CoV-2__MT762396.1__non-structural protein 3 (NSP3) mRNA gc
aggagaaagcuuaccauggcccccaccaaggugaccuucggcgacgacacggucaucgaggugcagggguacaagagcgugaacaucaccuucgagcuggacgagcgcaucgacaagguccucaacgagaagugcuccgccuacaccguggagcugggcaccgaggugaacgaguucgcgugcgucguggccgacgccgugaucaagauccugcagccggucagcgagcuccugacgccccuggggaucgaccucgacgagugguccauggccaccuacuaccuguucgacgagagcggcgaguucaagcuggccucccacauguacugcagcuucuacccccccgacgaggacgaggaggagggggacugcgaggaggaggaguucgagccguccacccaguacgaguacggcaccgaggacgacuaccagggcaagccccucgaguucggggcgacgagcgccgcccugcagcccgaggaggagcaggaggaggacuggcuggacgacgacucccagcagaccgugggccagcaggacgggagcgaggacaaccagaccaccacgauccagaccaucguggagguccagccccagcucgagauggagcugaccccgguggugcagaccaucgaggucaacuccuucagcggcuaccugaagcucacggacaacguguacaucaagaacgccgacaucguggaggaggcgaagaaggucaagcccaccgugguggucaacgccgccaacguguaccugaagcacgggggcggcguggccggggcccugaacaaggcgaccaacaacgccaugcaggucgaguccgacgacuacaucgccaccaacggcccccucaagguggggggcagcugcguccuguccggccacaaccuggccaagcacugccuccacgugguggggcccaacgucaacaagggcgaggacauccagcugcugaagagcgccuacgagaacuucaaccagcacgaggugcuccuggcgccgcugcucuccgccgggaucuucggcgccgaccccauccacagccugcgggugugcgucgacacggugcgcaccaacguguaccuggccgucuucgacaagaaccucuacgacaagcugguguccagcuuccuggagaugaagagcgagaagcagguggagcagaagaucgccgagauccccaaggaggaggucaagcccuucaucaccgaguccaagccgagcguggagcagcggaagcaggacgacaagaagaucaaggcgugcguggaggaggucaccacgacccucgaggagaccaaguuccugaccgagaaccugcuccuguacaucgacaucaacgggaaccugcaccccgacuccgccacgcucgugagcgacaucgacaucaccuuccugaagaaggacgcccccuacaucgugggcgacgucgugcaggagggcgugcugaccgccgucgugauccccaccaagaaggccgggggcacgaccgagaugcucgcgaaggcccugcgcaaggugccgaccgacaacuacaucaccacguaccccgggcagggccugaacggguacaccgucgaggaggccaagaccgugcucaagaagugcaaguccgccuucuacauccugcccagcaucaucuccaacgagaagcaggagauccugggcaccgugagcuggaaccuccgggagaugcuggcgcacgccgaggagacccgcaagcugaugcccgucugcguggagacgaaggccaucguguccaccauccagcggaaguacaagggcaucaagauccaggagggggucguggacuacggcgcccgcuucuacuucuacaccagcaagaccacgguggccucccugaucaacacccucaacgaccugaacgagacccuggucaccaugccgcucggguacgugacgcacggccugaaccuggaggaggcggcccgguacaugcgcagccucaaggugcccgccaccgucuccgugagcucccccgacgccgugaccgccuacaacggguaccugaccagcuccagcaagacgcccgaggagcacuucaucgagaccaucucccuggcgggcagcuacaaggacuggagcuacuccggccagagcacccagcucgggaucgaguuccugaagcggggcgacaaguccgucuacuacaccagcaacccgacgaccuuccaccuggacggggaggugaucaccuucgacaaccucaagacccugcugucccuccgcgaggugcggacgaucaaggucuucaccaccguggacaacaucaaccugcacacccagguggucgacaugagcaugacguacggccagcaguucggccccaccuaccuggacggggccgacgugaccaagaucaagccccacaacucccacgagggcaagaccuucuacgugcucccgaacgacgacacgcugcgcgucgaggccuucgaguacuaccacaccaccgaccccagcuuccuggggcgguacauguccgcccucaaccacaccaagaaguggaaguacccccaggugaacggccugacgagcaucaagugggccgacaacaacugcuaccuggcgaccgcccuccugacccugcagcagaucgagcucaaguucaaccccccggcccugcaggacgccuacuaccgcgcgcgggccggggaggccgccaacuucugcgcccugauccucgcguacugcaacaagaccgugggcgagcugggcgacguccgcgagacgauguccuaccuguuccagcacgccaaccucgacagcugcaagcgggugcugaacgucgugugcaagaccugcgggcagcagcagaccacccugaagggcguggaggccgucauguacauggggacccucuccuacgagcaguucaagaagggcgugcagauccccugcacgugcgggaagcaggccaccaaguaccuggugcagcaggagagccccuucgucaugauguccgcccccccggcgcaguacgagcugaagcacggcaccuucaccugcgccagcgaguacacgggcaacuaccagugcgggcacuacaagcacaucaccuccaaggagacccucuacugcaucgacggcgcccugcugaccaagagcagcgaguacaaggggcccaucacggacguguucuacaaggagaacuccuacaccaccaccaucaagcccgugacguacaagcucgacggcgucgugugcaccgagaucgaccccaagcuggacaacuacuacaagaaggacaacagcuacuucaccgagcagccgaucgaccuggugcccaaccagcccuaccccaacgccuccuucgacaacuucaaguucgucugcgacaacaucaaguucgccgacgaccucaaccagcugaccggguacaagaagccggcgagccgcgagcugaaggugacguucuuccccgaccucaacggcgacguggucgccaucgacuacaagcacuacacccccuccuucaagaagggcgccaagcugcugcacaagcccaucguguggcacgugaacaacgccaccaacaaggcgaccuacaagccgaacacguggugcauccggugccucuggagcaccaagcccgucgagaccuccaacagcuucgacgugcugaaguccgaggacgcccaggggauggacaaccuggccugcgaggaccucaagcccgugagcgaggaggucguggagaaccccaccauccagaaggacgugcuggagugcaacgucaagacgaccgagguggugggcgacaucauccugaagccggccaacaacucccucaagaucaccgaggaggucgggcacaccgaccugauggccgcguacguggacaacagcucccugacgaucaagaagcccaacgagcucagccgcgugcugggccugaagacccucgccacccacgggcuggccgccgucaacuccgugcccugggacaccaucgccaacuacgcgaagccguuccugaacaagguggucagcacgaccaccaacaucgugacccgcugccucaaccgggugugcacgaacuacaugcccuacuucuucacccugcugcuccagcugugcaccuucacccgcuccaccaacagccggaucaaggccuccaugcccacgaccaucgccaagaacaccgucaagagcgugggcaaguucugccuggaggccagcuucaacuaccucaagucccccaacuucagcaagcugaucaacaucaucaucugguuccugcuccuguccgugugccugggcagccucaucuacuccaccgccgcgcuggggguccugaugagcaaccucggcaugccguccuacugcacgggguaccgcgagggcuaccugaacagcaccaacgugaccaucgccaccuacugcacgggcuccauccccugcagcgugugccuguccgggcucgacagccuggacaccuaccccucccuggagaccauccagaucaccaucagcuccuucaagugggaccucacggccuucggccuggucgccgagugguuccuggccuacauccucuucacccgguucuucuacgugcuggggcuggcggccaucaugcagcucuucuucagcuacuucgccgugcacuucaucuccaacagcuggcugauguggcugaucaucaaccugguccagauggcccccaucuccgcgauggugcgcauguacaucuucuucgccagcuucuacuacguguggaagagcuacguccacgugguggacggcugcaacuccagcaccugcaugaugugcuacaagcggaaccgcgccacccgggucgagugcacgaccaucgugaacgggguccgccgguccuucuacguguacgccaacggcggcaagggguucugcaagcuccacaacuggaacugcgugaacugcgacaccuucugcgccggcagcaccuucaucuccgacgaggucgcgcgcgaccugagccugcaguucaagcggccgaucaaccccacggaccaguccagcuacaucguggacuccgugaccgucaagaacgggagcauccaccucuacuucgacaaggccggccagaagaccuacgagcgccacucccugagccacuucgugaaccuggacaaccuccgggccaacaacaccaaggggucccugcccaucaacgugaucgucuucgacggcaagagcaagugcgaggaguccagcgccaaguccgccagcguguacuacucccagcugaugugccagcccauccuccugcuggaccaggcgcucgugagcgacgucggcgacagcgccgagguggccgugaagauguucgacgccuacgucaacacguucuccagcaccuucaacgugccgauggagaagcugaagacccugguggccaccgcggaggccgagcucgccaagaacgucucccuggacaacgugcugagcacguucaucuccgccgcgcgccagggguucguggacagcgacgucgagaccaaggacgugguggagugccucaagcugucccaccagagcgacaucgaggucaccggcgacuccugcaacaacuacaugcugaccuacaacaagguggagaacaugacgccccgggaccucggggccugcaucgacugcagcgcccgccacaucaacgcccagguggccaagucccacaacaucgcgcugaucuggaacgucaaggacuucaugagccuguccgagcagcuccggaagcagauccgcagcgccgccaagaagaacaaccugcccuucaagcugaccugcgccaccacccgccagguggugaacgucgugacgaccaagaucgcccucaagggcgggugaggacuaguuauaagacugacuagcccgaugggccucccaacgggcccuccuccccuccuugcaccgagauuaauaaaaaaaaaaaaaaaaaaaaaaaaaaaaaaaaaaaaaaaaaaaaaaaaaaaaaaaaaaaaaaaaugcaucccccccccccccccccccccccccccccccaaaggcucuuuucagagccaccagaauu

SEQ ID NO: 21701 - RNA, 6058 nt, Artificial Sequence
  SARS-CoV-2__MT762397.1__non-structural protein 3 (NSP3) mRNA gc
aggagaaagcuuaccauggcccccaccaaggugaccuucggcgacgacacggucaucgaggugcagggguacaagagcgugaacaucaccuucgagcuggacgagcgcaucgacaagguccucaacgagaagugcuccgccuacaccguggagcugggcaccgaggugaacgaguucgcgugcgucguggccgacgccgugaucaagacgcugcagccggucagcgagcuccugaccccccuggggaucgaccucgacgagugguccauggccaccuacuaccuguucgacgagagcggcgaguucaagcuggccucccacauguacugcagcuucuacccccccgacgaggacgaggaggagggggacugcgaggaggaggaguucgagccguccacccaguacgaguacggcacggaggacgacuaccagggcaagccccucgaguucggggcgaccagcgccgcccugcagcccgaggaggagcaggaggaggacuggcuggacgacgacucccagcagaccgugggccagcaggacgggagcgaggacaaccagaccacgaccauccagaccaucguggagguccagccccagcucgagauggagcugaccccgguggugcagacgaucgaggucaacuccuucagcggcuaccugaagcucaccgacaacguguacaucaagaacgccgacaucguggaggaggcgaagaaggucaagcccaccgugguggucaacgccgccaacguguaccugaagcacgggggcggcguggccggggcccugaacaaggcgaccaacaacgccaugcaggucgaguccgacgacuacaucgccacgaacggcccccucaagguggggggcagcugcguccuguccggccacaaccuggccaagcacugccuccacgugguggggcccaacgucaacaagggcgaggacauccagcugcugaagagcgccuacgagaacuucaaccagcacgaggugcuccuggcgccgcugcucuccgccgggaucuucggcgccgaccccauccacagccugcgggugugcgucgacaccgugcgcaccaacguguaccuggccgucuucgacaagaaccucuacgacaagcugguguccagcuuccuggagaugaagagcgagaagcagguggagcagaagaucgccgagauccccaaggaggaggucaagcccuucaucaccgaguccaagccgagcguggagcagcggaagcaggacgacaagaagaucaaggcgugcguggaggaggucacgaccacccucgaggagaccaaguuccugacggagaaccugcuccuguacaucgacaucaacgggaaccugcaccccgacuccgccacccucgugagcgacaucgacaucaccuuccugaagaaggacgcccccuacaucgugggcgacgucgugcaggagggcgugcugaccgccgucgugauccccacgaagaaggccgggggcaccaccgagaugcucgcgaaggcccugcgcaaggugccgaccgacaacuacaucacgaccuaccccgggcagggccugaacggguacaccgucgaggaggccaagaccgugcucaagaagugcaaguccgccuucuacauccugcccagcaucaucuccaacgagaagcaggagauccugggcaccgugagcuggaaccuccgggagaugcuggcgcacgccgaggagacgcgcaagcugaugcccgucugcguggagaccaaggccaucguguccaccauccagcggaaguacaagggcaucaagauccaggagggggucguggacuacggcgcccgcuucuacuucuacaccagcaagacgaccguggccucccugaucaacacccucaacgaccugaacgagacccuggucacgaugccgcucggguacgugacccacggccugaaccuggaggaggcggcccgguacaugcgcagccucaaggugcccgccaccgucuccgugagcucccccgacgccgugaccgccuacaacggguaccugacgagcuccagcaagacccccgaggagcacuucaucgagaccaucucccuggcgggcagcuacaaggacuggagcuacuccggccagagcacccagcucgggaucgaguuccugaagcggggcgacaaguccgucuacuacacgagcaacccgaccaccuuccaccuggacggggaggugaucaccuucgacaaccucaagacgcugcugucccuccgcgaggugcggaccaucaaggucuucaccaccguggacaacaucaaccugcacacgcagguggucgacaugagcaugaccuacggccagcaguucggccccaccuaccuggacggggccgacgugaccaagaucaagccccacaacucccacgagggcaagacguucuacgugcucccgaacgacgacacccugcgcgucgaggccuucgaguacuaccacaccaccgaccccagcuuccuggggcgguacauguccgcccucaaccacacgaagaaguggaaguacccccaggugaacggccugaccagcaucaagugggccgacaacaacugcuaccuggcgaccgcccuccugacccugcagcagaucgagcucaaguucaaccccccggcccugcaggacgccuacuaccgcgcgcgggccggggaggccgccaacuucugcgcccugauccucgcguacugcaacaagacggugggcgagcugggcgacguccgcgagaccauguccuaccuguuccagcacgccaaccucgacagcugcaagcgggugcugaacgucgugugcaagaccugcgggcagcagcagaccacccugaagggcguggaggccgucauguacauggggacgcucuccuacgagcaguucaagaagggcgugcagauccccugcaccugcgggaagcaggccaccaaguaccuggugcagcaggagagccccuucgucaugauguccgcccccccggcgcaguacgagcugaagcacggcaccuucacgugcgccagcgaguacaccggcaacuaccagugcgggcacuacaagcacaucaccuccaaggagacccucuacugcaucgacggcgcccugcugacgaagagcagcgaguacaaggggcccaucaccgacguguucuacaaggagaacuccuacaccaccacgaucaagcccgugaccuacaagcucgacggcgucgugugcaccgagaucgaccccaagcuggacaacuacuacaagaaggacaacagcuacuucaccgagcagccgaucgaccuggugcccaaccagcccuaccccaacgccuccuucgacaacuucaaguucgucugcgacaacaucaaguucgccgacgaccucaaccagcugacgggguaccgcaagccggcgagccgggagcugaaggugaccuucuuccccgaccucaacggcgacguggucgccaucgacuacaagcacuacacccccuccuucaagaagggcgccaagcugcugcacaagcccaucguguggcacgugaacaacgccaccaacaaggcgacguacaagccgaacaccuggugcauccgcugccucuggagcaccaagcccgucgagaccuccaacagcuucgacgugcugaaguccgaggacgcccaggggauggacaaccuggccugcgaggaccucaagcccgugagcgaggaggucguggagaaccccacgauccagaaggacgugcuggagugcaacgucaagaccaccgagguggugggcgacaucauccugaagccggccaacaacucccucaagaucaccgaggaggucgggcacacggaccugauggccgcguacguggacaacagcucccugaccaucaagaagcccaacgagcucagccgcgugcugggccugaagacccucgccacccacgggcuggccgccgucaacuccgugcccugggacacgaucgccaacuacgcgaagccguuccugaacaagguggucagcaccaccaccaacaucgugacgcggugccucaaccgcgugugcaccaacuacaugcccuacuucuucacccugcugcuccagcugugcaccuucacccgguccacgaacagccgcaucaaggccuccaugcccaccaccaucgccaagaacaccgucaagagcgugggcaaguucugccuggaggccagcuucaacuaccucaagucccccaacuucagcaagcugaucaacaucaucaucugguuccugcuccuguccgugugccugggcagccucaucuacuccacggccgcgcuggggguccugaugagcaaccucggcaugccguccuacugcaccggguaccgggagggcuaccugaacagcaccaacgugaccaucgccacguacugcaccggcuccauccccugcagcgugugccuguccgggcucgacagccuggacaccuaccccucccuggagaccauccagaucacgaucagcuccuucaagugggaccucaccgccuucggccuggucgccgagugguuccuggccuacauccucuucacccgcuucuucuacgugcuggggcuggcggccaucaugcagcucuucuucagcuacuucgccgugcacuucaucuccaacagcuggcugauguggcugaucaucaaccugguccagauggcccccaucuccgcgauggugcggauguacaucuucuucgccagcuucuacuacguguggaagagcuacguccacgugguggacggcugcaacuccagcaccugcaugaugugcuacaagcgcaaccgggccacgcgcgucgagugcaccaccaucgugaacgggguccggcgcuccuucuacguguacgccaacggcggcaagggguucugcaagcuccacaacuggaacugcgugaacugcgacaccuucugcgccggcagcacguucaucuccgacgaggucgcgcgggaccugagccugcaguucaagcgcccgaucaaccccaccgaccaguccagcuacaucguggacuccgugaccgucaagaacgggagcauccaccucuacuucgacaaggccggccagaagaccuacgagcggcacucccugagccacuucgugaaccuggacaaccuccgcgccaacaacacgaaggggucccugcccaucaacgugaucgucuucgacggcaagagcaagugcgaggaguccagcgccaaguccgccagcguguacuacucccagcugaugugccagcccauccuccugcuggaccaggcgcucgugagcgacgucggcgacagcgccgagguggccgugaagauguucgacgccuacgucaacaccuucuccagcaccuucaacgugccgauggagaagcugaagacccugguggccacggcggaggccgagcucgccaagaacgucucccuggacaacgugcugagcaccuucaucuccgccgcgcggcagggguucguggacagcgacgucgagaccaaggacgugguggagugccucaagcugucccaccagagcgacaucgaggucaccggcgacuccugcaacaacuacaugcugacguacaacaagguggagaacaugaccccccgcgaccucggggccugcaucgacugcagcgcccggcacaucaacgcccagguggccaagucccacaacaucgcgcugaucuggaacgucaaggacuucaugagccuguccgagcagcuccgcaagcagauccgcagcgccgccaagaagaacaaccugcccuucaagcugaccugcgccaccacgcggcagguggugaacgucgugaccaccaagaucgcccucaagggcgggugaggacuaguuauaagacugacuagcccgaugggccucccaacgggcccuccuccccuccuugcaccgagauuaauaaaaaaaaaaaaaaaaaaaaaaaaaaaaaaaaaaaaaaaaaaaaaaaaaaaaaaaaaaaaaaaaugcaucccccccccccccccccccccccccccccccaaaggcucuuuucagagccaccagaauu

SEQ ID NO: 21702 - RNA, 6058 nt, Artificial Sequence
  SARS-CoV-2__MT762398.1__non-structural protein 3 (NSP3) mRNA gc
aggagaaagcuuaccauggcccccaccaaggugaccuucggcgacgacacggucaucgaggugcagggguacaagagcgugaacaucaccuucgagcuggacgagcgcaucgacaagguccucaacgagaagugcuccgccuacaccguggagcugggcaccgaggugaacgaguucgcgugcgucguggccgacgccgugaucaagacgcugcagccggucagcgagcuccugacccugcucgggaucgaccuggacgagugguccauggccaccuacuaccuguucgacgagagcggcgaguucaagcucgccucccacauguacugcagcuucuacccccccgacgaggacgaggaggagggggacugcgaggaggaggaguucgagcccuccacccaguacgaguacggcacggaggacgacuaccagggcaagccgcuggaguucggggcgaccagcgccgcccugcagcccgaggaggagcaggaggaggacuggcucgacgacgacucccagcagaccgugggccagcaggacgggagcgaggacaaccagaccacgaccauccagaccaucguggagguccagccccagcuggagauggagcugacccccguggugcagacgaucgaggucaacuccuucagcggcuaccucaagcugaccgacaacguguacaucaagaacgccgacaucguggaggaggcgaagaaggucaagccgaccgugguggucaacgccgccaacguguaccugaagcacgggggcggcguggccggggcccucaacaaggcgaccaacaacgccaugcaggucgaguccgacgacuacaucgccacgaacggcccccugaagguggggggcagcugcguccuguccggccacaaccucgccaagcacugccugcacgugguggggcccaacgucaacaagggcgaggacauccagcugcucaagagcgccuacgagaacuucaaccagcacgaggugcugcuggcgccccuccuguccgccgggaucuucggcgccgacccgauccacagccugcgggugugcgucgacaccgugcgcaccaacguguaccucgccgucuucgacaagaaccuguacgacaagcugguguccagcuuccucgagaugaagagcgagaagcagguggagcagaagaucgccgagauccccaaggaggaggucaagcccuucaucaccgaguccaagcccagcguggagcagcggaagcaggacgacaagaagaucaaggcgugcguggaggaggucacgaccacccuggaggagaccaaguuccugacggagaaccuccugcuguacaucgacaucaacgggaaccuccacccggacuccgccacccuggugagcgacaucgacaucaccuuccugaagaaggacgcccccuacaucgugggcgacgucgugcaggagggcgugcucaccgccgucgugauccccacgaagaaggccgggggcaccaccgagaugcuggcgaaggcccugcgcaaggugcccaccgacaacuacaucacgaccuacccggggcagggccucaacggguacaccgucgaggaggccaagaccgugcugaagaagugcaaguccgccuucuacauccugcccagcaucaucuccaacgagaagcaggagauccucggcaccgugagcuggaaccugcgggagaugcuggcgcacgccgaggagacgcgcaagcugaugcccgucugcguggagaccaaggccaucguguccaccauccagcggaaguacaagggcaucaagauccaggagggggucguggacuacggcgcccgcuucuacuucuacaccagcaagacgaccguggccucccucaucaacacccugaacgaccugaacgagacccucgucacgaugccccugggguacgugacccacggccugaaccucgaggaggcggcccgguacaugcgcagccugaaggugccggccaccgucuccgugagcucccccgacgccgugaccgccuacaacggguaccugacgagcuccagcaagacccccgaggagcacuucaucgagaccaucucccucgcgggcagcuacaaggacuggagcuacuccggccagagcacccagcuggggaucgaguuccugaagcggggcgacaaguccgucuacuacacgagcaaccccaccaccuuccaccucgacggggaggugaucaccuucgacaaccugaagacgcugcucucccugcgcgaggugcggaccaucaaggucuucaccaccguggacaacaucaaccugcacacgcagguggucgacaugagcaugaccuacggccagcaguucggcccgaccuaccucgacggggccgacgugaccaagaucaagccccacaacucccacgagggcaagacguucuacgugcugcccaacgacgacacccugcgcgucgaggccuucgaguacuaccacaccaccgacccgagcuuccucgggcgguacauguccgcccugaaccacacgaagaaguggaaguacccccaggugaacggccugaccagcaucaagugggccgacaacaacugcuaccucgcgaccgcccugcugacccuccagcagaucgagcugaaguucaacccccccgcccugcaggacgccuacuaccgcgcgcgggccggggaggccgccaacuucugcgcccucauccuggcguacugcaacaagacggugggcgagcugggcgacguccgcgagaccauguccuaccucuuccagcacgccaaccuggacagcugcaagcgggugcugaacgucgugugcaagaccugcgggcagcagcagaccacccucaagggcguggaggccgucauguacauggggacgcuguccuacgagcaguucaagaagggcgugcagaucccgugcaccugcgggaagcaggccaccaaguaccuggugcagcaggagagccccuucgucaugauguccgccccccccgcgcaguacgagcucaagcacggcaccuucacgugcgccagcgaguacaccggcaacuaccagugcgggcacuacaagcacaucaccuccaaggagacccuguacugcaucgacggcgcccugcucacgaagagcagcgaguacaaggggccgaucaccgacguguucuacaaggagaacuccuacaccaccacgaucaagcccgugaccuacaagcuggacggcgucgugugcaccgagaucgaccccaagcuggacaacuacuacaagaaggacaacagcuacuucaccgagcagcccaucgaccucgugccgaaccagcccuaccccaacgccuccuucgacaacuucaaguucgucugcgacaacaucaaguucgccgacgaccugaaccagcugacgggguacaagaagcccgcgagccgcgagcucaaggugaccuucuucccggaccugaacggcgacguggucgccaucgacuacaagcacuacacccccuccuucaagaagggcgccaagcugcuccacaagcccaucguguggcacgugaacaacgccaccaacaaggcgacguacaagcccaacaccuggugcauccggugccuguggagcaccaagccggucgagaccuccaacagcuucgacgugcugaaguccgaggacgcccaggggauggacaaccucgccugcgaggaccugaagcccgugagcgaggaggucguggagaaccccacgauccagaaggacgugcuggagugcaacgucaagaccaccgagguggugggcgacaucauccucaagcccgccaacaacucccugaagaucaccgaggaggucgggcacacggaccugauggccgcguacguggacaacagcucccucaccaucaagaagccgaacgagcugagccgcgugcugggccucaagacccuggccacccacgggcuggccgccgucaacuccgugcccugggacacgaucgccaacuacgcgaagcccuuccucaacaagguggucagcaccaccaccaacaucgugacgcgcugccugaaccgggugugcaccaacuacaugccguacuucuucacccugcuccugcagcugugcaccuucacccgcuccacgaacagccggaucaaggccuccaugcccaccaccaucgccaagaacaccgucaagagcgugggcaaguucugccucgaggccagcuucaacuaccugaagucccccaacuucagcaagcugaucaacaucaucaucugguuccuccugcuguccgugugccucggcagccugaucuacuccacggccgcgcuggggguccucaugagcaaccugggcaugcccuccuacugcaccggguaccgcgagggcuaccugaacagcaccaacgugaccaucgccacguacugcaccggcuccaucccgugcagcgugugccucuccgggcuggacagccuggacaccuaccccucccucgagaccauccagaucacgaucagcuccuucaagugggaccugaccgccuucggccuggucgccgagugguuccucgccuacauccuguucacccgguucuucuacgugcuggggcucgcggccaucaugcagcuguucuucagcuacuucgccgugcacuucaucuccaacagcuggcugauguggcugaucaucaaccucguccagauggcccccaucuccgcgauggugcgcauguacaucuucuucgccagcuucuacuacguguggaagagcuacguccacgugguggacggcugcaacuccagcaccugcaugaugugcuacaagcggaaccgcgccacgcgggucgagugcaccaccaucgugaacgggguccgccgguccuucuacguguacgccaacggcggcaagggguucugcaagcugcacaacuggaacugcgugaacugcgacaccuucugcgccggcagcacguucaucuccgacgaggucgcgcgcgaccugagccuccaguucaagcggcccaucaacccgaccgaccaguccagcuacaucguggacuccgugaccgucaagaacgggagcauccaccuguacuucgacaaggccggccagaagaccuacgagcgccacucccugagccacuucgugaaccucgacaaccugcgggccaacaacacgaaggggucccugcccaucaacgugaucgucuucgacggcaagagcaagugcgaggaguccagcgccaaguccgccagcguguacuacucccagcucaugugccagcccauccugcugcucgaccaggcgcuggugagcgacgucggcgacagcgccgagguggccgugaagauguucgacgccuacgucaacaccuucuccagcaccuucaacgugcccauggagaagcugaagacccucguggccacggcggaggccgagcuggccaagaacgucucccuggacaacgugcucagcaccuucaucuccgccgcgcgccagggguucguggacagcgacgucgagaccaaggacgugguggagugccugaagcugucccaccagagcgacaucgaggucaccggcgacuccugcaacaacuacaugcucacguacaacaagguggagaacaugaccccgcgggaccugggggccugcaucgacugcagcgcccgccacaucaacgcccagguggccaagucccacaacaucgcgcugaucuggaacgucaaggacuucaugagccucuccgagcagcugcggaagcagauccgcagcgccgccaagaagaacaaccugcccuucaagcucaccugcgccaccacgcgccagguggugaacgucgugaccaccaagaucgcccugaagggcgggugaggacuaguuauaagacugacuagcccgaugggccucccaacgggcccuccuccccuccuugcaccgagauuaauaaaaaaaaaaaaaaaaaaaaaaaaaaaaaaaaaaaaaaaaaaaaaaaaaaaaaaaaaaaaaaaaugcaucccccccccccccccccccccccccccccccaaaggcucuuuucagagccaccagaauu

SEQ ID NO: 21703 - RNA, 6058 nt, Artificial Sequence
  SARS-CoV-2__MT764179.1__non-structural protein 3 (NSP3) mRNA gc
aggagaaagcuuaccauggcccccaccaaggugaccuucggcgacgacacggucaucgaggugcagggguacaagagcgugaacaucaccuucgagcuggacgagcgcaucgacaagguccucaacgagaagugcuccgccuacaccguggagcugggcaccgaggugaacgaguucgcgugcgucguggccgacgccgugaucaagacgcugcagccggucagcgagcuccugaccccccuggggaucgaccucgacgagugguccauggccaccuacuaccuguucgacgagagcggcgaguucaagcuggccucccacauguacugcagcuucuacccccccgacgaggacgaggaggagggggacugcgaggaggaggaguucgagccguccacccaguacgaguacggcacggaggacgacuaccagggcaagccccucgaguucggggcgaccagcgccgcccugcagcuggaggaggagcaggaggaggacuggcucgacgacgacucccagcagaccgugggccagcaggacgggagcgaggacaaccagaccacgaccauccagaccaucguggagguccagccccagcuggagauggagcugacccccguggugcagacgaucgaggucaacuccuucagcggcuaccucaagcugaccgacaacguguacaucaagaacgccgacaucguggaggaggcgaagaaggucaagccgaccgugguggucaacgccgccaacguguaccugaagcacgggggcggcguggccggggcccucaacaaggcgaccaacaacgccaugcaggucgaguccgacgacuacaucgccacgaacggcccccugaagguggggggcagcugcguccuguccggccacaaccucgccaagcacugccugcacgugguggggcccaacgucaacaagggcgaggacauccagcugcucaagagcgccuacgagaacuucaaccagcacgaggugcugcuggcgccccuccuguccgccgggaucuucggcgccgacccgauccacagccugcgggugugcgucgacaccgugcgcaccaacguguaccucgccgucuucgacaagaaccuguacgacaagcugguguccagcuuccucgagaugaagagcgagaagcagguggagcagaagaucgccgagauccccaaggaggaggucaagcccuucaucaccgaguccaagcccagcguggagcagcggaagcaggacgacaagaagaucaaggcgugcguggaggaggucacgaccacccuggaggagaccaaguuccugacggagaaccuccugcuguacaucgacaucaacgggaaccuccacccggacuccgccacccuggugagcgacaucgacaucaccuuccugaagaaggacgcccccuacaucgugggcgacgucgugcaggagggcgugcucaccgccgucgugauccccacgaagaaggccgggggcaccaccgagaugcuggcgaaggcccugcgcaaggugcccaccgacaacuacaucacgaccuacccggggcagggccucaacggguacaccgucgaggaggccaagaccgugcugaagaagugcaaguccgccuucuacauccugcccagcaucaucuccaacgagaagcaggagauccucggcaccgugagcuggaaccugcgggagaugcuggcgcacgccgaggagacgcgcaagcugaugcccgucugcguggagaccaaggccaucguguccaccauccagcggaaguacaagggcaucaagauccaggagggggucguggacuacggcgcccgcuucuacuucuacaccagcaagacgaccguggccucccucaucaacacccugaacgaccugaacgagacccucgucacgaugccccugggguacgugacccacggccugaaccucgaggaggcggcccgguacaugcgcagccugaaggugccggccaccgucuccgugagcucccccgacgccgugaccgccuacaacggguaccugacgagcuccagcaagacccccgaggagcacuucaucgagaccaucucccucgcgggcagcuacaaggacuggagcuacuccggccagagcacccagcuggggaucgaguuccugaagcggggcgacaaguccgucuacuacacgagcaaccccaccaccuuccaccucgacggggaggugaucaccuucgacaaccugaagacgcugcucucccugcgcgaggugcggaccaucaaggucuucaccaccguggacaacaucaaccugcacacgcagguggucgacaugagcaugaccuacggccagcaguucggcccgaccuaccucgacggguccgacgugaccaagaucaagccccacaacagccacgagggcaagacguucuacgugcugcccaacgacgacacccugcgcgucgaggccuucgaguacuaccacaccaccgacccguccuuccucgggcgguacaugagcgcccugaaccacacgaagaaguggaaguacccccaggugaacggccugaccuccaucaagugggccgacaacaacugcuaccucgccaccgcgcugcugacccuccagcagaucgagcugaaguucaacccccccgcccugcaggacgccuacuaccgcgcccgggcgggggaggccgccaacuucugcgcccucauccuggccuacugcaacaagacggugggcgagcugggcgacguccgcgagaccaugagcuaccucuuccagcacgcgaaccuggacuccugcaagcgggugcugaacgucgugugcaagaccugcgggcagcagcagaccacccucaagggcguggaggccgucauguacauggggacgcugagcuacgagcaguucaagaagggcgugcagaucccgugcaccugcgggaagcaggccaccaaguaccuggugcagcaggagucccccuucgucaugaugagcgccccccccgcccaguacgagcucaagcacggcaccuucacgugcgcguccgaguacaccggcaacuaccagugcgggcacuacaagcacaucaccagcaaggagacccuguacugcaucgacggcgcccugcucacgaagagcuccgaguacaaggggccgaucaccgacguguucuacaaggagaacagcuacaccaccacgaucaagcccgugaccuacaagcuggacggcgucgugugcaccgagaucgaccccaagcuggacaacuacuacaagaaggacaacuccuacuucaccgagcagcccaucgaccucgugccgaaccagcccuaccccaacgccagcuucgacaacuucaaguucgucugcgacaacaucaaguucgccgacgaccugaaccagcugacgggguacaagaagcccgccucccgcgagcucaaggugaccuucuucccggaccugaacggcgacguggucgcgaucgacuacaagcacuacacccccagcuucaagaagggcgccaagcugcuccacaagcccaucguguggcacgugaacaacgccaccaacaaggccacguacaagcccaacaccuggugcauccggugccugugguccaccaagccggucgagaccagcaacuccuucgacgugcugaagagcgaggacgcgcaggggauggacaaccucgccugcgaggaccugaagcccguguccgaggaggucguggagaaccccacgauccagaaggacgugcuggagugcaacgucaagaccaccgagguggugggcgacaucauccucaagcccgccaacaacagccugaagaucaccgaggaggucgggcacacggaccugauggccgccuacguggacaacuccagccucaccaucaagaagccgaacgagcugucccgcgugcugggccucaagacccuggcgacccacgggcuggccgccgucaacagcgugcccugggacacgaucgccaacuacgccaagcccuuccucaacaagguggucuccaccaccaccaacaucgugacgcgcugccugaaccgggugugcaccaacuacaugccguacuucuucacccugcuccugcagcugugcaccuucacccgcagcacgaacucccggaucaaggcgagcaugcccaccaccaucgccaagaacaccgucaagagcgugggcaaguucugccucgaggccuccuucaacuaccugaagagccccaacuucuccaagcugaucaacaucaucaucugguuccuccugcugagcgugugccucggcucccugaucuacagcacggccgcccuggggguccucauguccaaccugggcaugcccagcuacugcaccggguaccgcgagggcuaccugaacuccaccaacgugaccaucgcgacguacugcaccggcagcaucccgugcuccgugugccucagcgggcuggacucccuggacaccuaccccagccucgagaccauccagaucacgaucuccagcuucaagugggaccugaccgccuucggccuggucgccgagugguuccucgccuacauccuguucacccgguucuucuacgugcuggggcucgccgcgaucaugcagcuguucuucuccuacuucgccgugcacuucaucagcaacuccuggcugauguggcugaucaucaaccucguccagauggcccccaucagcgccauggugcgcauguacaucuucuucgcgagcuucuacuacguguggaaguccuacguccacgugguggacggcugcaacagcuccaccugcaugaugugcuacaagcggaaccgcgccacgcgggucgagugcaccaccaucgugaacgggguccgccggagcuucuacguguacgccaacggcggcaagggguucugcaagcugcacaacuggaacugcgugaacugcgacaccuucugcgccggcuccacguucaucagcgacgaggucgcccgcgaccugucccuccaguucaagcggcccaucaacccgaccgaccagagcuccuacaucguggacagcgugaccgucaagaacggguccauccaccuguacuucgacaaggcgggccagaagaccuacgagcgccacagccugucccacuucgugaaccucgacaaccugcgggccaacaacacgaaggggagccugcccaucaacgugaucgucuucgacggcaaguccaagugcgaggagagcuccgccaagagcgccuccguguacuacagccagcucaugugccagcccauccugcugcucgaccaggcccuggugagcgacgucggcgacuccgcggagguggccgugaagauguucgacgccuacgucaacaccuucagcuccaccuucaacgugcccauggagaagcugaagacccucguggccacggccgaggcggagcuggccaagaacgucagccuggacaacgugcucuccaccuucaucagcgccgcccgccagggguucguggacuccgacgucgagaccaaggacgugguggagugccugaagcugagccaccaguccgacaucgaggucaccggcgacagcugcaacaacuacaugcucacguacaacaagguggagaacaugaccccgcgggaccugggggcgugcaucgacugcuccgcccgccacaucaacgcccagguggccaagagccacaacaucgcccugaucuggaacgucaaggacuucaugucccucagcgagcagcugcggaagcagauccgcuccgcggccaagaagaacaaccugcccuucaagcucaccugcgccaccacgcgccagguggugaacgucgugaccaccaagaucgcccugaagggcgggugaggacuaguuauaagacugacuagcccgaugggccucccaacgggcccuccuccccuccuugcaccgagauuaauaaaaaaaaaaaaaaaaaaaaaaaaaaaaaaaaaaaaaaaaaaaaaaaaaaaaaaaaaaaaaaaaugcaucccccccccccccccccccccccccccccccaaaggcucuuuucagagccaccagaauu

SEQ ID NO: 21704 - RNA, 6058 nt, Artificial Sequence
  SARS-CoV-2__MT755602.1__non-structural protein 3 (NSP3) mRNA gc
aggagaaagcuuaccauggcccccaccaaggugaccuucggcgacgacacggucaucgaggugcagggguacaagagcgugaacaucaccuucgagcuggacgagcgcaucgacaagguccucaacgagaagugcuccgccuacaccguggagcugggcaccgaggugaacgaguucgcgugcgucguggccgacgccgugaucaagacgcugcagccggucagcgagcuccugaccccccuggggaucgaccucgacgagugguccauggccaccuacuaccuguucgacgagagcggcgaguucaagcuggccucccacauguacugcagcuucuacccccccgacgaggacgaggaggagggggacugcgaggaggaggaguucgagccguccacccaguacgaguacggcacggaggacgacuaccagggcaagccccucgaguucggggcgaccagcgccgcccugcagcccgaggaggagcaggaggaggacuggcuggacgacgacucccagcagaccgugggccagcaggacgggagcgaggacaaccagaccacgaccauccagaccaucguggagguccagccccagcucgagauggagcugaccccgguggugcagacgaucgaggucaacuccuucagcggcuaccugaagcucaccgacaacguguacaucaagaacgccgacaucguggaggaggcgaagaaggucaagcccaccgugguggucaacgccgccaacguguaccugaagcacgggggcggcguggccggggcccugaacaaggcgaccaacaacgccaugcaggucgaguccgacgacuacaucgccacgaacggcccccucaagguggggggcagcugcguccuguccggccacaaccuggccaagcacugccuccacgugguggggcccaacgucaacaagggcgaggacauccagcugcugaagagcgccuacgagaacuucaaccagcacgaggugcuccuggcgccgcugcucuccgccgggaucuucggcgccgaccccauccacagccugcgggugugcgucgacaccgugcgcaccaacguguaccuggccgucuucgacaagaaccucuacgacaagcugguguccagcuuccuggagaugaagagcgagaagcagguggagcagaagaucgccgagauccccaaggaggaggucaagcccuucaucaccgaguccaagccgagcguggagcagcggaagcaggacgacaagaagaucaaggcgugcguggaggaggucacgaccacccucgaggagaccaaguuccugacggagaaccugcuccuguacaucgacaucaacgggaaccugcaccccgacuccgccacccucgugagcgacaucgacaucaccuuccugaagaaggacgcccccuacaucgugggcgacgucgugcaggagggcgugcugaccgccgucgugauccccacgaagaaggccgggggcaccaccgagaugcucgcgaaggcccugcgcaaggugccgaccgacaacuacaucacgaccuaccccgggcagggccugaacggguacaccgucgaggaggccaagaccgugcucaagaagugcaaguccgccuucuacauccugcccagcaucaucuccaacgagaagcaggagauccugggcaccgugagcuggaaccuccgggagaugcuggcgcacgccgaggagacgcgcaagcugaugcccgucugcguggagaccaaggccaucguguccaccauccagcggaaguacaagggcaucaagauccaggagggggucguggacuacggcgcccgcuucuacuucuacaccagcaagacgaccguggccucccugaucaacacccucaacgaccugaacgagacccuggucacgaugccgcucggguacgugacccacggccugaaccuggaggaggcggcccgguacaugcgcagccucaaggugcccgccaccgucuccgugagcucccccgacgccgugaccgccuacaacggguaccugacgagcuccagcaagacccccgaggagcacuucaucgagaccaucucccuggcgggcagcuacaaggacuggagcuacuccggccagagcacccagcucgggaucgaguuccugaagcggggcgacaaguccgucuacuacacgagcaacccgaccaccuuccaccuggacggggaggugaucaccuucgacaaccucaagacgcugcugucccuccgcgaggugcggaccaucaaggucuucaccaccguggacaacaucaaccugcacacgcagguggucgacaugagcaugaccuacggccagcaguucggccccaccuaccuggacggggccgacgugaccaagaucaagccccacaacucccacgagggcaagacguucuacgugcucccgaacgacgacacccugcgcgucgaggccuucgaguacuaccacaccaccgaccccagcuuccuggggcgguacauguccgcccucaaccacacgaagaaguggaaguacccccaggugaacggccugaccagcaucaagugggccgacaacaacugcuaccuggcgaccgcccuccugacccugcagcagaucgagcucaaguucaaccccccggcccugcaggacgccuacuaccgcgcgcgggccggggaggccgccaacuucugcgcccugauccucgcguacugcaacaagacggugggcgagcugggcgacguccgcgagaccauguccuaccuguuccagcacgccaaccucgacagcugcaagcgggugcugaacgucgugugcaagaccugcgggcagcagcagaccacccugaagggcguggaggccgucauguacauggggacgcucuccuacgagcaguucaagaagggcgugcagauccccugcaccugcgggaagcaggccaccaaguaccuggugcagcaggagagccccuucgucaugauguccgcccccccggcgcaguacgagcugaagcacggcaccuucacgugcgccagcgaguacaccggcaacuaccagugcgggcacuacaagcacaucaccuccaaggagacccucuacugcaucgacggcgcccugcugacgaagagcagcgaguacaaggggcccaucaccgacguguucuacaaggagaacuccuacaccaccacgaucaagcccgugaccuacaagcucgacggcgucgugugcaccgagaucgaccccaagcuggacaacuacuacaagaaggacaacagcuacuucaccgagcagccgaucgaccuggugcccaaccagcccuaccccaacgccuccuucgacaacuucaaguucgucugcgacaacaucaaguucgccgacgaccucaaccagcugacgggguacaagaagccggcgagccgcgagcugaaggugaccuucuuccccgaccucaacggcgacguggucgccaucgacuacaagcacuacacccccuccuucaagaagggcgccaagcugcugcacaagcccaucguguggcacgugaacaacgccaccaacaaggcgacguacaagccgaacaccuggugcauccggugccucuggagcaccaagcccgucgagaccuccaacagcuucgacgugcugaaguccgaggacgcccaggggauggacaaccuggccugcgaggaccucaagcccgugagcgaggaggucguggagaaccccacgauccagaagaacgugcuggagugcaacgucaagaccaccgagguggugggcgacaucauccugaagccggccaacaacucccucaagaucaccgaggaggucgggcacacggaccugauggccgcguacguggacaacagcucccugaccaucaagaagcccaacgagcucagccgcgugcugggccugaagacccucgccacccacgggcuggccgccgucaacuccgugcccugggacacgaucgccaacuacgcgaagccguuccugaacaagguggucagcaccaccaccaacaucgugacgcgcugccucaaccgggugugcaccaacuacaugcccuacuucuucacccugcugcuccagcugugcaccuucacccgcuccacgaacagccggaucaaggccuccaugcccaccaccaucgccaagaacaccgucaagagcgugggcaaguucugccuggaggccagcuucaacuaccucaagucccccaacuucagcaagcugaucaacaucaucaucugguuccugcuccuguccgugugccugggcagccucaucuacuccacggccgcgcuggggguccugaugagcaaccucggcaugccguccuacugcaccggguaccgcgagggcuaccugaacagcaccaacgugaccaucgccacguacugcaccggcuccauccccugcagcgugugccuguccgggcucgacagccuggacaccuaccccucccuggagaccauccagaucacgaucagcuccuucaagugggaccucaccgccuucggccuggucgccgagugguuccuggccuacauccucuucacccgguucuucuacgugcuggggcuggcggccaucaugcagcucuucuucagcuacuucgccgugcacuucaucuccaacagcuggcugauguggcugaucaucaaccugguccagauggcccccaucuccgcgauggugcgcauguacaucuucuucgccagcuucuacuacguguggaagagcuacguccacgugguggacggcugcaacuccagcaccugcaugaugugcuacaagcggaaccgcgccacgcgggucgagugcaccaccaucgugaacgggguccgccgguccuucuacguguacgccaacggcggcaagggguucugcaagcuccacaacuggaacugcgugaacugcgacaccuucugcgccggcagcacguucaucuccgacgaggucgcgcgcgaccugagccugcaguucaagcggccgaucaaccccaccgaccaguccagcuacaucguggacuccgugaccgucaagaacgggagcauccaccucuacuucgacaaggccggccagaagaccuacgagcgccacucccugagccacuucgugaaccuggacaaccuccgggccaacaacacgaaggggucccugcccaucaacgugaucgucuucgacggcaagagcaagugcgaggaguccagcgccaaguccgccagcguguacuacucccagcugaugugccagcccauccuccugcuggaccaggcgcucgugagcgacgucggcgacagcgccgagguggccgugaagauguucgacgccuacgucaacaccuucuccagcaccuucaacgugccgauggagaagcugaagacccugguggccacggcggaggccgagcucgccaagaacgucucccuggacaacgugcugagcaccuucaucuccgccgcgcgccagggguucguggacagcgacgucgagaccaaggacgugguggagugccucaagcugucccaccagagcgacaucgaggucaccggcgacuccugcaacaacuacaugcugacguacaacaagguggagaacaugaccccccgggaccucggggccugcaucgacugcagcgcccgccacaucaacgcccagguggccaagucccacaacaucgcgcugaucuggaacgucaaggacuucaugagccuguccgagcagcuccggaagcagauccgcagcgccgccaagaagaacaaccugcccuucaagcugaccugcgccaccacgcgccagguggugaacgucgugaccaccaagaucgcccucaagggcgggugaggacuaguuauaagacugacuagcccgaugggccucccaacgggcccuccuccccuccuugcaccgagauuaauaaaaaaaaaaaaaaaaaaaaaaaaaaaaaaaaaaaaaaaaaaaaaaaaaaaaaaaaaaaaaaaaugcaucccccccccccccccccccccccccccccccaaaggcucuuuucagagccaccagaauu

SEQ ID NO: 21705 - RNA, 6058 nt, Artificial Sequence
  SARS-CoV-2__MT755830.1__non-structural protein 3 (NSP3) mRNA gc
aggagaaagcuuaccauggcccccaccaaggugaccuucggcgacgacacggucaucgaggugcagggguacaagagcgugaacaucaccuucgagcuggacgagcgcaucgacaagguccucaacgagaagugcuccgccuacaccguggagcugggcaccgagguggacgaguucgcgugcgucguggccgacgccgugaucaagacgcugcagccggucagcgagcuccugaccccccuggggaucgaccucgacgagugguccauggccaccuacuaccuguucgacgagagcggcgaguucaagcuggccucccacauguacugcagcuucuacccccccgacgaggacgaggaggagggggacugcgaggaggaggaguucgagccguccacccaguacgaguacggcacggaggacgacuaccagggcaagccccucgaguucggggcgaccagcgccgcccugcagcccgaggaggagcaggaggaggacuggcuggacgacgacucccagcagaccgugggccagcaggacgggagcgaggacaaccagaccacgaccauccagaccaucguggagguccagccccagcucgagauggagcugaccccgguggugcagacgaucgaggucaacuccuucagcggcuaccugaagcucaccgacaacguguacaucaagaacgccgacaucguggaggaggcgaagaaggucaagcccaccgugguggucaacgccgccaacguguaccugaagcacgggggcggcguggccggggcccugaacaaggcgaccaacaacgccaugcaggucgaguccgacgacuacaucgccacgaacggcccccucaagguggggggcagcugcguccuguccggccacaaccuggccaagcacugccuccacgugguggggcccaacgucaacaagggcgaggacauccagcugcugaagagcgccuacgagaacuucaaccagcacgaggugcuccuggcgccgcugcucuccgccgggaucuucggcgccgaccccauccacagccugcgggugugcgucgacaccgugcgcaccaacguguaccuggccgucuucgacaagaaccucuacgacaagcugguguccagcuuccuggagaugaagagcgagaagcagguggagcagaagaucgccgagauccccaaggaggaggucaagcccuucaucaccgaguccaagccgagcguggagcagcggaagcaggacgacaagaagaucaaggcgugcguggaggaggucacgaccacccucgaggagaccaaguuccugacggagaaccugcuccuguacaucgacaucaacgggaaccugcaccccgacuccgccacccucgugagcgacaucgacaucaccuuccugaagaaggacgcccccuacaucgugggcgacgucgugcaggagggcgugcugaccgccgucgugauccccacgaagaaggccgggggcaccaccgagaugcucgcgaaggcccugcgcaaggugccgaccgacaacuacaucacgaccuaccccgggcagggccugaacggguacaccgucgaggaggccaagaccgugcucaagaagugcaaguccgccuucuacauccugcccagcaucaucuccaacgagaagcaggagauccugggcaccgugagcuggaaccuccgggagaugcuggcgcacgccgaggagacgcgcaagcugaugcccgucugcguggagaccaaggccaucguguccaccauccagcggaaguacaagggcaucaagauccaggagggggucguggacuacggcgcccgcuucuacuucuacaccagcaagacgaccguggccucccugaucaacacccucaacgaccugaacgagacccuggucacgaugccgcucggguacgugacccacggccugaaccuggaggaggcggcccgguacaugcgcagccucaaggugcccgccaccgucuccgugagcucccccgacgccgugaccgccuacaacggguaccugacgagcuccagcaagacccccgaggagcacuucaucgagaccaucucccuggcgggcagcuacaaggacuggagcuacuccggccagagcacccagcucgggaucgaguuccugaagcggggcgacaaguccgucuacuacacgagcaacccgaccaccuuccaccuggacggggaggugaucaccuucgacaaccucaagacgcugcugucccuccgcgaggugcggaccaucaaggucuucaccaccguggacaacaucaaccugcacacgcagguggucgacaugagcaugaccuacggccagcaguucggccccaccuaccuggacggggccgacgugaccaagaucaagccccacaacucccacgagggcaagacguucuacgugcucccgaacgacgacacccugcgcgucgaggccuucgaguacuaccacaccaccgaccccagcuuccuggggcgguacauguccgcccucaaccacacgaagaaguggaaguacccccaggugaacggccugaccagcaucaagugggccgacaacaacugcuaccuggcgaccgcccuccugacccugcagcagaucgagcucaaguucaaccccccggcccugcaggacgccuacuaccgcgcgcgggccggggaggccgccaacuucugcgcccugauccucgcguacugcaacaagacggugggcgagcugggcgacguccgcgagaccauguccuaccuguuccagcacgccaaccucgacagcugcaagcgggugcugaacgucgugugcaagaccugcgggcagcagcagaccacccugaagggcguggaggccgucauguacauggggacgcucuccuacgagcaguucaagaagggcgugcagauccccugcaccugcgggaagcaggccaccaaguaccuggugcagcaggagagccccuucgucaugauguccgcccccccggcgcaguacgagcugaagcacggcaccuucacgugcgccagcgaguacaccggcaacuaccagugcgggcacuacaagcacaucaccuccaaggagacccucuacugcaucgacggcgcccugcugacgaagagcagcgaguacaaggggcccaucaccgacguguucuacaaggagaacuccuacaccaccacgaucaagcccgugaccuacaagcucgacggcgucgugugcaccgagaucgaccccaagcuggacaacuacuacaagaaggacaacagcuacuucaccgagcagccgaucgaccuggugcccaaccagcccuaccccaacgccuccuucgacaacuucaaguucgucugcgacaacaucaaguucgccgacgaccucaaccagcugacgggguacaagaagccggcgagccgcgagcugaaggugaccuucuuccccgaccucaacggcgacguggucgccaucgacuacaagcacuacacccccuccuucaagaagggcgccaagcugcugcacaagcccaucguguggcacgugaacaacgccaccaacaaggcgacguacaagccgaacaccuggugcauccggugccucuggagcaccaagcccgucgagaccuccaacagcuucgacgugcugaaguccgaggacgcccaggggauggacaaccuggccugcgaggaccucaagcccgugagcgaggaggucguggagaaccccacgauccagaaggacgugcuggagugcaacgucaagaccaccgagguggugggcgacaucauccugaagccggccaacaacucccucaagaucaccgaggaggucgggcacacggaccugauggccgcguacguggacaacagcucccugaccaucaagaagcccaacgagcucagccgcgugcugggccugaagacccucgccacccacgggcuggccgccgucaacuccgugcccugggacacgaucgccaacuacgcgaagccguuccugaacaagguggucagcaccaccaccaacaucgugacgcgcugccucaaccgggugugcaccaacuacaugcccuacuucuucacccugcugcuccagcugugcaccuucacccgcuccacgaacagccggaucaaggccuccaugcccaccaccaucgccaagaacaccgucaagagcgugggcaaguucugccuggaggccagcuucaacuaccucaagucccccaacuucagcaagcugaucaacaucaucaucugguuccugcuccuguccgugugccugggcagccucaucuacuccacggccgcgcuggggguccugaugagcaaccucggcaugccguccuacugcaccggguaccgcgagggcuaccugaacagcaccaacgugaccaucgccacguacugcaccggcuccauccccugcagcgugugccuguccgggcucgacagccuggacaccuaccccucccuggagaccauccagaucacgaucagcuccuucaagugggaccucaccgccuucggccuggucgccgagugguuccuggccuacauccucuucacccgguucuucuacgugcuggggcuggcggccaucaugcagcucuucuucagcuacuucgccgugcacuucaucuccaacagcuggcugauguggcugaucaucaaccugguccagauggcccccaucuccgcgauggugcgcauguacaucuucuucgccagcuucuacuacguguggaagagcuacguccacgugguggacggcugcaacuccagcaccugcaugaugugcuacaagcggaaccgcgccacgcgggucgagugcaccaccaucgugaacgggguccgccgguccuucuacguguacgccaacggcggcaagggguucugcaagcuccacaacuggaacugcgugaacugcgacaccuucugcgccggcagcacguucaucuccgacgaggucgcgcgcgaccugagccugcaguucaagcggccgaucaaccccaccgaccaguccagcuacaucguggacuccgugaccgucaagaacgggagcauccaccucuacuucgacaaggccggccagaagaccuacgagcgccacucccugagccacuucgugaaccuggacaaccuccgggccaacaacacgaaggggucccugcccaucaacgugaucgucuucgacggcaagagcaagugcgaggaguccagcgccaaguccgccagcguguacuacucccagcugaugugccagcccauccuccugcuggaccaggcgcucgugagcgacgucggcgacagcgccgagguggccgugaagauguucgacgccuacgucaacaccuucuccagcaccuucaacgugccgauggagaagcugaagacccugguggccacggcggaggccgagcucgccaagaacgucucccuggacaacgugcugagcaccuucaucuccgccgcgcgccagggguucguggacagcgacgucgagaccaaggacgugguggagugccucaagcugucccaccagagcgacaucgaggucaccggcgacuccugcaacaacuacaugcugacguacaacaagguggagaacaugaccccccgggaccucggggccugcaucgacugcagcgcccgccacaucaacgcccagguggccaagucccacaacaucgcgcugaucuggaacgucaaggacuucaugagccuguccgagcagcuccggaagcagauccgcagcgccgccaagaagaacaaccugcccuucaagcugaccugcgccaccacgcgccagguggugaacgucgugaccaccaagaucgcccucaagggcgggugaggacuaguuauaagacugacuagcccgaugggccucccaacgggcccuccuccccuccuugcaccgagauuaauaaaaaaaaaaaaaaaaaaaaaaaaaaaaaaaaaaaaaaaaaaaaaaaaaaaaaaaaaaaaaaaaugcaucccccccccccccccccccccccccccccccaaaggcucuuuucagagccaccagaauu

SEQ ID NO: 21706 - RNA, 6058 nt, Artificial Sequence
  SARS-CoV-2__MT755834.1__non-structural protein 3 (NSP3) mRNA gc
aggagaaagcuuaccauggcccccaccaaggugaccuucggcgacgacacggucaucgaggugcagggguacaagagcgugaacaucaccuucgagcuggacgagcgcaucgacaagguccucaacgagaagugcuccgccuacaccguggagcugggcaccgaggugaacgaguucgcgugcgucguggccgacgccgugaucaagacgcugcagccggucagcgagcuccugaccccccuggggaucgaccucgacgagugguccauggccaccuacuaccuguucgacgagagcggcgaguucaagcuggccucccacauguacugcagcuucuacccccccgacgaggacgaggaggagggggacugcgaggaggaggaguucgagccguccacccaguacgaguacggcacggaggacgacuaccagggcaagccccucgaguucggggcgaccagcgccgcccugcagcccgaggaggagcaggaggaggacuggcuggacgacgacucccagcagaccgugggccagcaggacgggagcgaggacaaccagaccacgaccauccagaccaucguggagguccagccccagcucgagauggagcugaccccgguggugcagacgaucgaggucaacuccuucagcggcuaccugaagcucaccgacaacguguacaucaagaacgccgacaucguggaggaggcgaagaaggucaagcccaccgugguggucaacgccgccaacguguaccugaagcacgggggcggcguggccggggcccugaacaaggcgaccaacaacgccaugcaggucgaguccgacgacuacaucgccacgaacggcccccucaagguggggggcagcugcguccuguccggccacaaccuggccaagcacugccuccacgugguggggcccaacgucaacaagggcgaggacauccagcugcugaagagcgccuacgagaacuucaaccagcacgaggugcuccuggcgccgcugcucuccgccgggaucuucggcgccgaccccauccacagccugcgggugugcgucgacaccgugcgcaccaacguguaccuggccgucuucgacaagaaccucuacgacaagcugguguccagcuuccuggagaugaagagcgagaagcagguggagcagaagaucgccgagauccccaaggaggaggucaagcccuucaucaccgaguccaagccgagcguggagcagcggaagcaggacgacaagaagaucaaggcgugcguggaggaggucacgaccacccucgaggagaccaaguuccugacggagaaccugcuccuguacaucgacaucaacgggaaccugcaccccgacuccgccacccucgugagcgacaucgacaucaccuuccugaagaaggacgcccccuacaucgugggcgacgucgugcaggagggcgugcugaccgccgucgugauccccacgaagaaggccgggggcaccaccgagaugcucgcgaaggcccugcgcaaggugccgaccgacaacuacaucacgaccuaccccgggcagggccugaacggguacaccgucgaggaggccaagaccgugcucaagaagugcaaguccgccuucuacauccugcccagcaucaucuccaacgagaagcaggagauccugggcaccgugagcuggaaccuccgggagaugcuggcgcacgccgaggagacgcgcaagcugaugcccgucugcguggagaccaaggccaucguguccaccauccagcggaaguacaagggcaucaagauccaggucggggugguggacuacggcgcccgcuucuacuucuacaccagcaagacgaccgucgccucccugaucaacacccucaacgaccugaacgagacccuggugacgaugccgcucggguacgugacccacggccugaaccuggaggaggcggcccgguacaugcgcagccucaagguccccgccaccguguccgugagcucccccgacgccgucaccgccuacaacggguaccugacgagcuccagcaagacccccgaggagcacuucaucgagaccaucucccuggcgggcagcuacaaggacuggagcuacuccggccagagcacccagcucgggaucgaguuccugaagcggggcgacaaguccguguacuacacgagcaacccgaccaccuuccaccuggacggggaggugaucaccuucgacaaccucaagacgcugcugucccuccgcgagguccggaccaucaagguguucaccaccguggacaacaucaaccugcacacgcaggucguggacaugagcaugaccuacggccagcaguucggccccaccuaccuggacggggccgacgugaccaagaucaagccccacaacucccacgagggcaagacguucuacguccucccgaacgacgacacccugcgcguggaggccuucgaguacuaccacaccaccgaccccagcuuccuggggcgguacauguccgcccucaaccacacgaagaaguggaaguacccccaggugaacggccugaccagcaucaagugggccgacaacaacugcuaccuggcgaccgcccuccugacccugcagcagaucgagcucaaguucaaccccccggcccugcaggacgccuacuaccgcgcgcgggccggggaggccgccaacuucugcgcccugauccucgcguacugcaacaagacggucggcgagcugggcgacgugcgcgagaccauguccuaccuguuccagcacgccaaccucgacagcugcaagcggguccugaacguggugugcaagaccugcgggcagcagcagaccacccugaagggcgucgaggccgugauguacauggggacgcucuccuacgagcaguucaagaagggcgugcagauccccugcaccugcgggaagcaggccaccaaguaccugguccagcaggagagccccuucgugaugauguccgcccccccggcgcaguacgagcugaagcacggcaccuucacgugcgccagcgaguacaccggcaacuaccagugcgggcacuacaagcacaucaccuccaaggagacccucuacugcaucgacggcgcccugcugacgaagagcagcgaguacaaggggcccaucaccgacguguucuacaaggagaacuccuacaccaccacgaucaagcccgucaccuacaagcucgacggcguggugugcaccgagaucgaccccaagcuggacaacuacuacaagaaggacaacagcuacuucaccgagcagccgaucgaccugguccccaaccagcccuaccccaacgccuccuucgacaacuucaaguucgugugcgacaacaucaaguucgccgacgaccucaaccagcugacgggguacaagaagccggcgagccgcgagcugaaggugaccuucuuccccgaccucaacggcgacgucguggccaucgacuacaagcacuacacccccuccuucaagaagggcgccaagcugcugcacaagcccaucguguggcacgucaacaacgccaccaacaaggcgacguacaagccgaacaccuggugcauccggugccucuggagcaccaagcccguggagaccuccaacagcuucgacgugcugaaguccgaggacgcccaggggauggacaaccuggccugcgaggaccucaagcccgucagcgaggaggugguggagaaccccacgauccagaaggacguccuggagugcaacgugaagaccaccgagguggucggcgacaucauccugaagccggccaacaacucccucaagaucaccgaggagguggggcacacggaccugauggccgcguacguggacaacagcucccugaccaucaagaagcccaacgagcucagccgcguccugggccugaagacccucgccacccacgggcuggccgccgugaacuccgugcccugggacacgaucgccaacuacgcgaagccguuccugaacaaggucgugagcaccaccaccaacaucgugacgcgcugccucaaccgggucugcaccaacuacaugcccuacuucuucacccugcugcuccagcugugcaccuucacccgcuccacgaacagccggaucaaggccuccaugcccaccaccaucgccaagaacaccgugaagagcgugggcaaguucugccuggaggccagcuucaacuaccucaagucccccaacuucagcaagcugaucaacaucaucaucugguuccugcuccuguccgucugccugggcagccucaucuacuccacggccgcgcugggggugcugaugagcaaccucggcaugccguccuacugcaccggguaccgcgagggcuaccugaacagcaccaacgugaccaucgccacguacugcaccggcuccauccccugcagcgucugccuguccgggcucgacagccuggacaccuaccccucccuggagaccauccagaucacgaucagcuccuucaagugggaccucaccgccuucggccugguggccgagugguuccuggccuacauccucuucacccgguucuucuacgugcuggggcuggcggccaucaugcagcucuucuucagcuacuucgccguccacuucaucuccaacagcuggcugauguggcugaucaucaaccuggugcagauggcccccaucuccgcgauggugcgcauguacaucuucuucgccagcuucuacuacgucuggaagagcuacgugcacguggucgacggcugcaacuccagcaccugcaugaugugcuacaagcggaaccgcgccacgcggguggagugcaccaccaucgucaacggggugcgccgguccuucuacguguacgccaacggcggcaagggguucugcaagcuccacaacuggaacugcgucaacugcgacaccuucugcgccggcagcacguucaucuccgacgagguggcgcgcgaccugagccugcaguucaagcggccgaucaaccccaccgaccaguccagcuacaucguggacuccgucaccgugaagaacgggagcauccaccucuacuucgacaaggccggccagaagaccuacgagcgccacucccugagccacuucgugaaccuggacaaccuccgggccaacaacacgaaggggucccugcccaucaacgucaucguguucgacggcaagagcaagugcgaggaguccagcgccaaguccgccagcguguacuacucccagcugaugugccagcccauccuccugcuggaccaggcgcucgucagcgacgugggcgacagcgccgagguggccgucaagauguucgacgccuacgugaacaccuucuccagcaccuucaacgugccgauggagaagcugaagacccuggucgccacggcggaggccgagcucgccaagaacgugucccuggacaacgugcugagcaccuucaucuccgccgcgcgccagggguucgucgacagcgacguggagaccaaggacguggucgagugccucaagcugucccaccagagcgacaucgaggugaccggcgacuccugcaacaacuacaugcugacguacaacaagguggagaacaugaccccccgggaccucggggccugcaucgacugcagcgcccgccacaucaacgcccaggucgccaagucccacaacaucgcgcugaucuggaacgugaaggacuucaugagccuguccgagcagcuccggaagcagauccgcagcgccgccaagaagaacaaccugcccuucaagcugaccugcgccaccacgcgccagguggucaacguggugaccaccaagaucgcccucaagggcgggugaggacuaguuauaagacugacuagcccgaugggccucccaacgggcccuccuccccuccuugcaccgagauuaauaaaaaaaaaaaaaaaaaaaaaaaaaaaaaaaaaaaaaaaaaaaaaaaaaaaaaaaaaaaaaaaaugcaucccccccccccccccccccccccccccccccaaaggcucuuuucagagccaccagaauu

SEQ ID NO: 21707 - RNA, 6058 nt, Artificial Sequence
  SARS-CoV-2__MT755883.1__non-structural protein 3 (NSP3) mRNA gc
aggagaaagcuuaccauggcccccaccaaggugaccuucggcgacgacacggucaucgaggugcagggguacaagagcgugaacaucaccuucgagcuggacgagcgcaucgacaagguccucaacgagaagugcuccgccuacaccguggagcugggcaccgaggugaacgaguucgcgugcgucguggccgacgccgugaucaagacgcugcagccggucagcgagcuccugaccccccuggggaucgaccucgacgagugguccauggccaccuacuaccuguucgacgagagcggcgaguucaagcuggccucccacauguacugcagcuucuacccccccgacgaggacgaggaggagggggacugcgaggaggaggaguucgagccguccacccaguacgaguacggcacggaggacgacuaccagggcaagccccucgaguucggggcgaccagcgccgcccugcagcccgaggaggagcaggaggaggacuggcuggacgacgacucccagcagaccgugggccagcaggacgggagcgaggacaaccagaccacgaccauccagaccaucguggagguccagccccagcucgagauggagcugaccccgguggugcagacgaucgaggucaacuccuucagcggcuaccugaagcucaccgacaacguguacaucaagaacgccgacaucguggaggaggcgaagaaggucaagcccaccgugguggucaacgccgccaacguguaccugaagcacgggggcggcguggccggggcccugaacaaggcgaccaacaacgccaugcaggucgaguccgacgacuacaucgccacgaacggcccccucaagguggggggcagcugcguccuguccggccacaaccuggccaagcacugccuccacgugguggggcccaacgucaacaagggcgaggacauccagcugcugaagagcgccuacgagaacuucaaccagcacgaggugcuccuggcgccgcugcucuccgccgggaucuucggcgccgaccccauccacagccugcgggugugcgucgacaccgugcgcaccaacguguaccuggccgucuucgacaagaaccucuacgacaagcugguguccagcuuccuggagaugaagagcgagaagcagguggagcagaagaucgccgagauccccaaggaggaggucaagcccuucaucaccgaguccaagccgagcguggagcagcggaagcaggacgacaagaagaucaaggcgugcguggaggaggucacgaccacccucgaggagaccaaguuccugacggagaaccugcuccuguacaucgacaucaacgggaaccugcaccccgacuccgccacccucgugagcgacaucgacaucaccuuccugaagaaggacgcccccuacaucgugggcgacgucgugcaggagggcgugcugaccgccgucgugauccccacgaagaaggccgggggcaccaccgagaugcucgcgaaggcccugcgcaaggugccgaccgacaacuacaucacgaccuaccccgggcagggccugaacggguacaccgucgaggaggccaagaccgugcucaagaagugcaaguccgccuucuacauccugcccagcaucaucuccaacgagaagcaggagauccugggcaccgugagcuggaaccuccgggagaugcuggcgcacgccgaggagacgcgcaagcugaugcccgucugcguggagaccaaggccaucguguccaccauccagcggaaguacaagggcaucaagauccaggagggggucguggacuacggcgcccgcuucuacuucuacaccagcaagacgaccguggccucccugaucaacacccucaacgaccugaacgagacccuggucacgaugccgcucggguacgugacccacggccugaaccuggaggaggcggcccgguacaugcgcagccucaaggugcccgccaccgucuccgugagcucccccgacgccgugaccgccuacaacggguaccugacgagcuccagcaagacccccgaggagcacuucaucgagaccaucucccuggcgggcagcuacaaggacuggagcuacuccggccagagcacccagcucgggaucgaguuccugaagcggggcgacaaguccgucuacuacacgagcaacccgaccaccuuccaccuggacggggaggugaucaccuucgacaaccucaagacgcugcugucccuccgcgaggugcggaccaucaaggucuucaccaccguggacaacaucaaccugcacacgcagguggucgacaugagcaugaccuacggccagcaguucggccccaccuaccuggacggggccgacgugaccaagaucaagccccacaacucccacgagggcaagacguucuacgugcucccgaacgacgacacccugcgcgucgaggccuucgaguacuaccacaccaccgaccccagcuuccuggggcgguacauguccgcccucaaccacacgaagaaguggaaguacccccaggugaacggccugaccagcaucaagugggccgacaacaacugcuaccuggcgaccgcccuccugacccugcagcagaucgagcucaaguucaaccccccggcccugcaggacgccuacuaccgcgcgcgggccggggaggccgccaacuucugcgcccugauccucgcguacugcaacaagacggugggcgagcugggcgacguccgcgagaccauguccuaccuguuccagcacgccaaccucgacagcugcaagcgggugcugaacgucgugugcaagaccugcgggcagcagcagaccacccugaagggcguggaggccgucauguacauggggacgcucuccuacgagcaguucaagaagggcgugcagauccccugcaccugcgggaagcaggccaccaaguaccuggugcagcaggagagccccuucgucaugauguccgcccccccggcgcaguacgagcugaagcacggcaccuucacgugcgccagcgaguacaccggcaacuaccagugcgggcacuacaagcacaucaccuccaaggagacccucuacugcaucgacggcgcccugcugacgaagagcagcgaguacaaggggcccaucaccgacguguucuacaaggagaacuccuacaccaccacgaucaagcccgugaccuacaagcucgacggcgucgugugcaccgagaucgaccccaagcuggacaacuacuacaagaaggacaacagcuacuucaccgagcagccgaucgaccuggugcccaaccagcccuaccccaacgccuccuucgacaacuucaaguucgucugcgacaacaucaaguucgccgacgaccucaaccagcugacgggguacaagaagccggcgagccgcgagcugaaggugaccuucuuccccgaccucaacggcgacguggucgccaucgacuacaagcacuacacccccuccuucaagaagggcgccaagcugcugcacaagcccaucguguggcacgugaacaacgccaccaacaaggcgacguacaagccgaacaccuggugcauccggugccucuggagcaccaagcccgucgagaccuccaacagcuucgacgugcugaaguccgaggacgcccaggggauggacaaccuggccugcgaggaccucaagcccgugagcgaggaggucguggagaaccccacgauccagaaggacgugcuggagugcaacgucaagaccaccgagguggugggcgacaucauccugaagccggccaacaacucccucaagaucaccgaggaggucgggcacacggaccugauggccgcguacguggacaacagcucccugaccaucaagaagcccaacgagcucagccgcgugcugggccugaagacccucgccacccacgggcuggccgccgucaacuccgugcccugggacacgaucgccaacuacgcgaagccguuccugaacaagguggucagcaccaccaccaacaucgugacgcgcugccucaaccgggugugcaccaacuacaugcccuacuucuucacccugcugcuccagcugugcaccuucacccgcuccacgaacagccggaucaaggccuccaugcccaccaccaucgccaagaacaccgucaagagcgugggcaaguucugccuggaggccagcuucaacuaccucaagucccccaacuucagcaagcugaucaacaucaucaucugguuccugcuccuguccgugugccugggcagccucaucuacuccacggccgcgcuggggguccugaugagcaaccucggcaugccguccuacugcaccggguaccgcgagggcuaccugaacagcaccaacgugaccaucgccacguacugcaccggcuccauccccugcagcgugugccuguccgggcucgacagccuggacaccuaccccucccuggagaccauccagaucacgaucagcuccuucaagugggaccucaccgccuucggccuggucgccgagugguuccuggccuacauccucuucacccgguucuucuacgugcuggggcuggcggccaucaugcagcucuucuucagcuacuucgccgugcacuucaucuccaacagcuggcugauguggcugaucaucaaccugguccagauggcccccaucuccgcgauggugcgcauguacaucuucuucgccagcuucuacuacguguggaagagcuacguccacgugguggacggcugcaacuccagcaccugcaugaugugcuacaagcggaaccgcgccacgcgggucgagugcaccaccaucgugaacgggguccgccgguccuucuacguguacgccaacggcggcaagggguucugcaagcuccacaacuggaacugcgugaacugcgacaccuucugcgccggcagcacguucaucuccgacgaggucgcgcgcgaccugagccugcaguucaagcggccgaucaaccccaccgaccaguccagcuacaucguggacuccgugaccgucaagaacgggagcauccaccucuacuucgacaaggccggccagaagaccuacgagcgccacucccugagccacuucgugaaccuggacaaccuccgggccaacaacacgaaggggucccugcccaucaacgugaucgucuucgacggcaagagcaagugcgaggaguccagcgccaaguccgccagcguguacuacucccagcugaugugccagcccauccuccugcuggaccaggcgcucgugagcgacgucggcgacagcgccgagguggccgugcgcauguucgacgccuacgucaacaccuucuccagcaccuucaacgugccgauggagaagcugaagacccugguggccacggcggaggccgagcucgccaagaacgucucccuggacaacgugcugagcaccuucaucuccgccgcgcggcagggguucguggacagcgacgucgagaccaaggacgugguggagugccucaagcugucccaccagagcgacaucgaggucaccggcgacuccugcaacaacuacaugcugacguacaacaagguggagaacaugaccccccgcgaccucggggccugcaucgacugcagcgcccggcacaucaacgcccagguggccaagucccacaacaucgcgcugaucuggaacgucaaggacuucaugagccuguccgagcagcuccgcaagcagauccgcagcgccgccaagaagaacaaccugcccuucaagcugaccugcgccaccacgcggcagguggugaacgucgugaccaccaagaucgcccucaagggcgggugaggacuaguuauaagacugacuagcccgaugggccucccaacgggcccuccuccccuccuugcaccgagauuaauaaaaaaaaaaaaaaaaaaaaaaaaaaaaaaaaaaaaaaaaaaaaaaaaaaaaaaaaaaaaaaaaugcaucccccccccccccccccccccccccccccccaaaggcucuuuucagagccaccagaauu

SEQ ID NO: 21708 - RNA, 6058 nt, Artificial Sequence
  SARS-CoV-2__MT755884.1__non-structural protein 3 (NSP3) mRNA gc
aggagaaagcuuaccauggcccccaccaaggugaccuucggcgacgacacggucaucgaggugcagggguacaagagcgugaacaucaccuucgagcuggacgagcgcaucgacaagguccucaacgagaagugcuccgccuacaccguggagcugggcaccgaggugaacgaguucgcgugcgucguggccgacgccgugaucaagacgcugcagccggucagcgagcuccugaccccccuggggaucgaccucgacgagugguccauggccaccuacuaccuguucgacgagagcggcgaguucaagcuggccucccacauguacugcagcuucuacccccccgacgaggacgaggaggagggggacugcgaggaggaggaguucgagccguccacccaguacgaguacggcacggaggacgacuaccagggcaagccccucgaguucggggcgaccagcgccgcccugcagcccgaggaggagcaggaggaggacuggcuggacgacgacucccagcagaccgugggccagcaggacgggagcgaggacaaccagaccacgaccauccagaccaucguggagguccagccccagcucgagauggagcugaccccgguggugcagacgaucgaggucaacuccuucagcggcuaccugaagcucaccgacaacguguacaucaagaacgccgacaucguggaggaggcgaagaaggucaagcccaccgugguggucaacgccgccaacguguaccugaagcacgggggcggcguggccggggcccugaacaaggcgaccaacaacgccaugcaggucgaguccgacgacuacaucgccacgaacggcccccucaagguggggggcagcugcguccuguccggccacaaccuggccaagcacugccuccacgugguggggcccaacgucaacaagggcgaggacauccagcugcugaagagcgccuacgagaacuucaaccagcacgaggugcuccuggcgccgcugcucuccgccgggaucuucggcgccgaccccauccacagccugcgggugugcgucgacaccgugcgcaccaacguguaccuggccgucuucgacaagaaccucuacgacaagcugguguccagcuuccuggagaugaagagcgagaagcagguggagcagaagaucgccgagauccccaaggaggaggucaagcccuucaucaccgaguccaagccgagcguggagcagcggaagcaggacgacaagaagaucaaggcgugcguggaggaggucacgaccacccucgaggagaccaaguuccugacggagaaccugcuccuguacaucgacaucaacgggaaccugcaccccgacuccgccacccucgugagcgacaucgacaucaccuuccugaagaaggacgcccccuacaucgugggcgacgucgugcaggagggcgugcugaccgccgucgugauccccacgaagaaggccgggggcaccaccgagaugcucgcgaaggcccugcgcaaggugccgaccgacaacuacaucacgaccuaccccgggcagggccugaacggguacaccgucgaggaggccaagaccgugcucaagaagugcaaguccgccuucuacauccugcccagcaucaucuccaacgagaagcaggagauccugggcaccgugagcuggaaccuccgggagaugcuggcgcacgccgaggagacgcgcaagcugaugcccgucugcguggagaccaaggccaucguguccaccauccagcggaaguacaagggcaucaagauccaggagggggucguggacuacggcgcccgcuucuacuucuacaccagcaagacgaccguggccucccugaucaacacccucaacgaccugaacgagacccuggucacgaugccgcucggguacgugacccacggccugaaccuggaggaggcggcccgguacaugcgcagccucaaggugcccgccaccgucuccgugagcucccccgacgccgugaccgccuacaacggguaccugacgagcuccagcaagacccccgaggagcacuucaucgagaccaucucccuggcgggcagcuacaaggacuggagcuacuccggccagagcacccagcucgggaucgaguuccugaagcggggcgacaaguccgucuacuacacgagcaacccgaccaccuuccaccuggacggggaggugaucaccuucgacaaccucaagacgcugcugucccuccgcgaggugcggaccaucaaggucuucaccaccguggacaacaucaaccugcacacgcagguggucgacaugagcaugaccuacggccagcaguucggccccaccuaccuggacggggccgacgugaccaagaucaagccccacaacucccacgagggcaagacguucuacgugcucccgaacgacgacacccugcgcgucgaggccuucgaguacuaccacaccaccgaccccagcuuccuggggcgguacauguccgcccucaaccacacgaagaaguggaaguacccccaggugaacggccugaccagcaucaagugggccgggaacaacugcuaccuggcgaccgcccuccugacccugcagcagaucgagcucaaguucaaccccccggcccugcaggacgccuacuaccgcgcgcgggccggcgaggccgccaacuucugcgcccugauccucgcguacugcaacaagacggugggcgagcugggggacguccgcgagaccauguccuaccuguuccagcacgccaaccucgacagcugcaagcgggugcugaacgucgugugcaagaccugcggccagcagcagaccacccugaaggggguggaggccgucauguacaugggcacgcucuccuacgagcaguucaagaagggggugcagauccccugcaccugcggcaagcaggccaccaaguaccuggugcagcaggagagccccuucgucaugauguccgcccccccggcgcaguacgagcugaagcacggcaccuucacgugcgccagcgaguacaccgggaacuaccagugcggccacuacaagcacaucaccuccaaggagacccucuacugcaucgacggggcccugcugacgaagagcagcgaguacaagggccccaucaccgacguguucuacaaggagaacuccuacaccaccacgaucaagcccgugaccuacaagcucgacggggucgugugcaccgagaucgaccccaagcuggacaacuacuacaagaaggacaacagcuacuucaccgagcagccgaucgaccuggugcccaaccagcccuaccccaacgccuccuucgacaacuucaaguucgucugcgacaacaucaaguucgccgacgaccucaaccagcugacgggcuacaagaagccggcgagccgcgagcugaaggugaccuucuuccccgaccucaacggcgacguggucgccaucgacuacaagcacuacacccccuccuucaagaagggggccaagcugcugcacaagcccaucguguggcacgugaacaacgccaccaacaaggcgacguacaagccgaacaccuggugcauccggugccucuggagcaccaagcccgucgagaccuccaacagcuucgacgugcugaaguccgaggacgcccagggcauggacaaccuggccugcgaggaccucaagcccgugagcgaggaggucguggagaaccccacgauccagaaggacgugcuggagugcaacgucaagaccaccgagguggugggggacaucauccugaagccggccaacaacucccucaagaucaccgaggaggucggccacacggaccugauggccgcguacguggacaacagcucccugaccaucaagaagcccaacgagcucagccgcgugcuggggcugaagacccucgccacccacggccuggccgccgucaacuccgugcccugggacacgaucgccaacuacgcgaagccguuccugaacaagguggucagcaccaccaccaacaucgugacgcgcugccucaaccgggugugcaccaacuacaugcccuacuucuucacccugcugcuccagcugugcaccuucacccgcuccacgaacagccggaucaaggccuccaugcccaccaccaucgccaagaacaccgucaagagcgugggcaaguucugccuggaggccagcuucaacuaccucaagucccccaacuucagcaagcugaucaacaucaucaucugguuccugcuccuguccgugugccuggggagccucaucuacuccacggccgcgcugggcguccugaugagcaaccucgggaugccguccuacugcaccggcuaccgcgagggcuaccugaacagcaccaacgugaccaucgccacguacugcaccggguccauccccugcagcgugugccuguccggccucgacagccuggacaccuaccccucccuggagaccauccagaucacgaucagcuccuucaagugggaccucaccgccuucgggcuggucgccgagugguuccuggccuacauccucuucacccgguucuucuacgugcugggccuggcggccaucaugcagcucuucuucagcuacuucgccgugcacuucaucuccaacagcuggcugauguggcugaucaucaaccugguccagauggcccccaucuccgcgauggugcgcauguacaucuucuucgccagcuucuacuacguguggaagagcuacguccacgugguggacgggugcaacuccagcaccugcaugaugugcuacaagcggaaccgcgccacgcgggucgagugcaccaccaucgugaacggcguccgccgguccuucuacguguacgccaacggcgggaagggcuucugcaagcuccacaacuggaacugcgugaacugcgacaccuucugcgccgggagcacguucaucuccgacgaggucgcgcgcgaccugagccugcaguucaagcggccgaucaaccccaccgaccaguccagcuacaucguggacuccgugaccgucaagaacggcagcauccaccucuacuucgacaaggccgggcagaagaccuacgagcgccacucccugagccacuucgugaaccuggacaaccuccgggccaacaacacgaagggcucccugcccaucaacgugaucgucuucgacggcaagagcaagugcgaggaguccagcgccaaguccgccagcguguacuacucccagcugaugugccagcccauccuccugcuggaccaggcgcucgugagcgacgucggggacagcgccgagguggccgugaagauguucgacgccuacgucaacaccuucuccagcaccuucaacgugccgauggagaagcugaagacccugguggccacggcggaggccgagcucgccaagaacgucucccuggacaacgugcugagcaccuucaucuccgccgcgcgccagggcuucguggacagcgacgucgagaccaaggacgugguggagugccucaagcugucccaccagagcgacaucgaggucaccggggacuccugcaacaacuacaugcugacguacaacaagguggagaacaugaccccccgggaccucggcgccugcaucgacugcagcgcccgccacaucaacgcccagguggccaagucccacaacaucgcgcugaucuggaacgucaaggacuucaugagccuguccgagcagcuccggaagcagauccgcagcgccgccaagaagaacaaccugcccuucaagcugaccugcgccaccacgcgccagguggugaacgucgugaccaccaagaucgcccucaaggggggcugaggacuaguuauaagacugacuagcccgaugggccucccaacgggcccuccuccccuccuugcaccgagauuaauaaaaaaaaaaaaaaaaaaaaaaaaaaaaaaaaaaaaaaaaaaaaaaaaaaaaaaaaaaaaaaaaugcaucccccccccccccccccccccccccccccccaaaggcucuuuucagagccaccagaauu

SEQ ID NO: 21709 - RNA, 6058 nt, Artificial Sequence
  SARS-CoV-2__MT755885.1__non-structural protein 3 (NSP3) mRNA gc
aggagaaagcuuaccauggcccccaccaaggugaccuucggcgacgacacggucaucgaggugcagggguacaagagcgugaacaucaccuucgagcuggacgagcgcaucgacaagguccucaacgagaagugcuccgccuacaccguggagcugggcaccgaggugaacgaguucgcgugcgucguggccgacgccgugaucaagacgcugcagccggucagcgagcuccugaccccccuggggaucgaccucgacgagugguccauggccaccuacuaccuguucgacgagagcggcgaguucaagcuggccucccacauguacugcagcuucuacccccccgacgaggacgaggaggagggggacugcgaggaggaggaguucgagccguccacccaguacgaguacggcacggaggacgacuaccagggcaagccccucgaguucggggcgaccagcgccgcccugcagcccgaggaggagcaggaggaggacuggcuggacgacgacucccagcagaccgugggccagcaggacgggagcgaggacaaccagaccacgaccauccagaccaucguggagguccagccccagcucgagauggagcugaccccgguggugcagacgaucgaggucaacuccuucagcggcuaccugaagcucaccgacaacguguacaucaagaacgccgacaucguggaggaggcgaagaaggucaagcccaccgugguggucaacgccgccaacguguaccugaagcacgggggcggcguggccggggcccugaacaaggcgaccaacaacgccaugcaggucgaguccgacgacuacaucgccacgaacggcccccucaagguggggggcagcugcguccuguccggccacaaccuggccaagcacugccuccacgugguggggcccaacgucaacaagggcgaggacauccagcugcugaagagcgccuacgagaacuucaaccagcacgaggugcuccuggcgccgcugcucuccgccgggaucuucggcgccgaccccauccacagccugcgggugugcgucgacaccgugcgcaccaacguguaccuggccgucuucgacaagaaccucuacgacaagcugguguccagcuuccuggagaugaagagcgagaagcagguggagcagaagaucgccgagauccccaaggaggaggucaagcccuucaucaccgaguccaagccgagcguggagcagcggaagcaggacgacaagaagaucaaggcgugcguggaggaggucacgaccacccucgaggagaccaaguuccugacggagaaccugcuccuguacaucgacaucaacgggaaccugcaccccgacuccgccacccucgugagcgacaucgacaucaccuuccugaagaaggacgcccccuacaucgugggcgacgucgugcaggagggcgugcugaccgccgucgugauccccacgaagaaggccgggggcaccaccgagaugcucgcgaaggcccugcgcaaggugccgaccgacaacuacaucacgaccuaccccgggcagggccugaacggguacaccgucgaggaggccaagaccgugcucaagaagugcaaguccgccuucuacauccugcccagcaucaucuccaacgagaagcaggagauccugggcaccgugagcuggaaccuccgggagaugcuggcgcacgccgaggagacgcgcaagcugaugcccgucugcguggagaccaaggccaucguguccaccauccagcggaaguacaagggcaucaagauccaggagggggucguggacuacggcgcccgcuucuacuucuacaccagcaagacgaccguggccucccugaucaacacccucaacgaccugaacgagacccuggucacgaugccgcucggguacgugacccacggccugaaccuggaggaggcggcccgguacaugcgcagccucaaggugcccgccaccgucuccgugagcucccccgacgccgugaccgccuacaacggguaccugacgagcuccagcaagacccccgaggagcacuucaucgagaccaucucccuggcgggcagcuacaaggacuggagcuacuccggccagagcacccagcucgggaucgaguuccugaagcggggcgacaaguccgucuacuacacgagcaacccgaccaccuuccaccuggacggggaggugaucaccuucgacaaccucaagacgcugcugucccuccgcgaggugcggaccaucaaggucuucaccaccguggacaacaucaaccugcacacgcagguggucgacaugagcaugaccuacggccagcaguucggccccaccuaccuggacggggccgacgugaccaagaucaagccccacaacucccacgagggcaagacguucuacgugcucccgaacgacgacacccugcgcgucgaggccuucgaguacuaccacaccaccgaccccagcuuccuggggcgguacauguccgcccucaaccacacgaagaaguggaaguacccccaggugaacggccugaccagcaucaagugggccgacaacaacugcuaccuggcgaccgcccuccugacccugcagcagaucgagcucaaguucaaccccccggcccugcaggacgccuacuaccgcgcgcgggccggggaggccgccaacuucugcgcccugauccucgcguacugcaacaagacggugggcgagcugggcgacguccgcgagaccauguccuaccuguuccagcacgccaaccucgacagcugcaagcgggugcugaacgucgugugcaagaccugcgggcagcagcagaccacccugaagggcguggaggccgucauguacauggggacgcucuccuacgagcaguucaagaagggcgugcagauccccugcaccugcgggaagcaggccaccaaguaccuggugcagcaggagagccccuucgucaugauguccgcccccccggcgcaguacgagcugaagcacggcaccuucacgugcgccagcgaguacaccggcaacuaccagugcgggcacuacaagcacaucaccuccaaggagacccucuacugcaucgacggcgcccugcugacgaagagcagcgaguacaaggggcccaucaccgacguguucuacaaggagaacuccuacaccaccacgaucaagcccgugaccuacaagcucgacggcgucgugugcaccgagaucgaccccaagcuggacaacuacuacaagaaggacaacagcuacuucaccgagcagccgaucgaccuggugcccaaccagcccuaccccaacgccuccuucgacaacuucaaguucgucugcgacaacaucaaguucgccgacgaccucaaccagcugacgggguacaagaagccggcgagccgcgagcugaaggugaccuucuuccccgaccucaacggcgacguggucgccaucgacuacaagcacuacacccccuccuucaagaagggcgccaagcugcugcacaagcccaucguguggcacgugaacaacgccaccaacaaggcgacguacaagccgaacaccuggugcauccggugccucuggagcaccaagcccgucgagaccuccaacagcuucgacgugcugaaguccgaggacgcccaggggauggacaaccuggccugcgaggaccucaagcccgugagcgaggaggucguggagaaccccacgauccagaaggacgugcuggagugcaacgucaagaccaccgagguggugggcgacaucauccugaagccggccaacaacucccucaagaucaccgaggaggucgggcacacggaccugauggccgcguacguggacaacagcucccugaccaucaagaagcccaacgagcucagccgcgugcugggccugaagacccucgccacccacgggcuggccgccgucaacuccgugcccugggacacgaucgccaacuacgcgaagccguuccugaacaagguggucagcaccaccaccaacaucgugacgcgcugccucaaccgggugugcaccaacuacaugcccuacuucuucacccugcugcuccagcugugcaccuucacccgcuccacgaacagccggaucaaggccuccaugcccaccaccaucgccaagaacaccgucaagagcgugggcaaguucugccuggaggccagcuucaacuaccucaagucccccaacuucagcaagcugaucaacaucaucaucugguuccugcuccuguccgugugccugggcagccucaucuacuccacggccgcgcuggggguccugaugagcaaccucggcaugccguccuacugcaccggguaccgcaagggcuaccugaacagcaccaacgugaccaucgccacguacugcaccggcuccauccccugcagcgugugccuguccgggcucgacagccuggacaccuaccccucccuggagaccauccagaucacgaucagcuccuucaagugggaccucaccgccuucggccuggucgccgagugguuccuggccuacauccucuucacccgguucuucuacgugcuggggcuggcggccaucaugcagcucuucuucagcuacuucgccgugcacuucaucuccaacagcuggcugauguggcugaucaucaaccugguccagauggcccccaucuccgcgauggugcgcauguacaucuucuucgccagcuucuacuacguguggaagagcuacguccacgugguggacggcugcaacuccagcaccugcaugaugugcuacaagcggaaccgcgccacgcgggucgagugcaccaccaucgugaacgggguccgccgguccuucuacguguacgccaacggcggcaagggguucugcaagcuccacaacuggaacugcgugaacugcgacaccuucugcgccggcagcacguucaucuccgacgaggucgcgcgcgaccugagccugcaguucaagcggccgaucaaccccaccgaccaguccagcuacaucguggacuccgugaccgucaagaacgggagcauccaccucuacuucgacaaggccggccagaagaccuacgagcgccacucccugagccacuucgugaaccuggacaaccuccgggccaacaacacgaaggggucccugcccaucaacgugaucgucuucgacggcaagagcaagugcgaggaguccagcgccaaguccgccagcguguacuacucccagcugaugugccagcccauccuccugcuggaccaggcgcucgugagcgacgucggcgacagcgccgagguggccgugaagauguucgacgccuacgucaacaccuucuccagcaccuucaacgugccgauggagaagcugaagacccugguggccacggcggaggccgagcucgccaagaacgucucccuggacaacgugcugagcaccuucaucuccgccgcgcgccagggguucguggacagcgacgucgagaccaaggacgugguggagugccucaagcugucccaccagagcgacaucgaggucaccggcgacuccugcaacaacuacaugcugacguacaacaagguggagaacaugaccccccgggaccucggggccugcaucgacugcagcgcccgccacaucaacgcccagguggccaagucccacaacaucgcgcugaucuggaacgucaaggacuucaugagccuguccgagcagcuccggaagcagauccgcagcgccgccaagaagaacaaccugcccuucaagcugaccugcgccaccacgcgccagguggugaacgucgugaccaccaagaucgcccucaagggcgggugaggacuaguuauaagacugacuagcccgaugggccucccaacgggcccuccuccccuccuugcaccgagauuaauaaaaaaaaaaaaaaaaaaaaaaaaaaaaaaaaaaaaaaaaaaaaaaaaaaaaaaaaaaaaaaaaugcaucccccccccccccccccccccccccccccccaaaggcucuuuucagagccaccagaauu

SEQ ID NO: 21710 - RNA, 6058 nt, Artificial Sequence
  SARS-CoV-2__MT755889.1__non-structural protein 3 (NSP3) mRNA gc
aggagaaagcuuaccauggcccccaccaaggugaccuucggcgacgacacggucaucgaggugcagggguacaagagcgugaacaucaccuucgagcuggacgagcgcaucgacaagguccucaacgagaagugcuccgccuacaccguggagcugggcaccgaggugaacgaguucgcgugcgucguggccgacgccgugaucaagacgcugcagccggucagcgagcuccugaccccccuggggaucgaccucgacgagugguccauggccaccuacuaccuguucgacgagagcggcgaguucaagcuggccucccacauguacugcagcuucuacccccccgacgaggacgaggaggagggggacugcgaggaggaggaguucgagccguccacccaguacgaguacggcacggaggacgacuaccagggcaagccccucgaguucggggcgaccagcgccgcccugcagcccgaggaggagcaggaggaggacuggcuggacgacgacucccagcagaccgugggccagcaggacgggagcgaggacaaccagaccacgaccauccagaccaucguggagguccagccccagcucgagauggagcugaccccgguggugcagacgaucgaggucaacuccuucagcggcuaccugaagcucaccgacaacguguacaucaagaacgccgacaucguggaggaggcgaagaaggucaagcccaccgugguggucaacgccgccaacguguaccugaagcacgggggcggcguggccggggcccugaacaaggcgaccaacaacgccaugcaggucgaguccgacgacuacaucgccacgaacggcccccucaagguggggggcagcugcguccuguccggccacaaccuggccaagcacugccuccacgugguggggcccaacgucaacaagggcgaggacauccagcugcugaagagcgccuacgagaacuucaaccagcacgaggugcuccuggcgccgcugcucuccgccgggaucuucggcgccgaccccauccacagccugcgggugugcgucgacaccgugcgcaccaacguguaccuggccgucuucgacaagaaccucuacgacaagcugguguccagcuuccuggagaugaagagcgagaagcagguggagcagaagaucgccgagauccccaaggaggaggucaagcccuucaucaccgaguccaagccgagcguggagcagcggaagcaggacgacaagaagaucaaggcgugcguggaggaggucacgaccacccucgaggagaccaaguuccugacggagaaccugcuccuguacaucgacaucaacgggaaccugcaccccgacuccgccacccucgugagcgacaucgacaucaccuuccugaagaaggacgcccccuacaucgugggcgacgucgugcaggagggcgugcugaccgccgucgugauccccacgaagaaggccgggggcaccaccgagaugcucgcgaaggcccugcgcaaggugccgaccgacaacuacaucacgaccuaccccgggcagggccugaacggguacaccgucgaggaggccaagaccgugcucaagaagugcaaguccgccuucuacauccugcccagcaucaucuccaacgagaagcaggagauccugggcaccgugagcuggaaccuccgggagaugcuggcgcacgccgaggagacgcgcaagcugaugcccgucugcguggagaccaaggccaucguguccaccauccagcggaaguacaagggcaucaagauccaggagggggucguggacuacggcgcccgcuucuacuucuacaccagcaagacgaccguggccucccugaucaacacccucaacgaccugaacgagacccuggucacgaugccgcucggguacgugacccacggccugaaccuggaggaggcggcccgguacaugcgcagccucaaggugcccgccaccgucuccgugagcucccccgacgccgugaccgccuacaacggguaccugacgagcuccagcaagacccccgaggagcacuucaucgagaccaucucccuggcgggcagcuacaaggacuggagcuacuccggccagagcacccagcucgggaucgaguuccugaagcggggcgacaaguccgucuacuacacgagcaacccgaccaccuuccaccuggacggggaggugaucaccuucgacaaccucaagacgcugcugucccuccgcgaggugcggaccaucaaggucuucaccaccguggacaacaucaaccugcacacgcagguggucgacaugagcaugaccuacggccagcaguucggccccaccuaccuggacggggccgacgugaccaagaucaagccccacaacucccacgagggcaagacguucuacgugcucccgaacgacgacacccugcgcgucgaggccuucgaguacuaccacaccaccgaccccagcuuccuggggcgguacauguccgcccucaaccacacgaagaaguggaaguacccccaggugaacggccugaccagcaucaagugggccgacaacaacugcuaccuggcgaccgcccuccugacccugcagcagaucgagcucaaguucaaccccccggcccugcaggacgccuacuaccgcgcgcgggccggggaggccgccaacuucugcgcccugauccucgcguacugcaacaagacggugggcgagcugggcgacguccgcgagaccauguccuaccuguuccagcacgccaaccucgacagcugcaagcgggugcugaacgucgugugcaagaccugcgggcagcagcagaccacccugaagggcguggaggccgucauguacauggggacgcucuccuacgagcaguucaagaagggcgugcagauccccugcaccugcgggaagcaggccaccaaguaccuggugcagcaggagagccccuucgucaugauguccgcccccccggcgcaguacgagcugaagcacggcaccuucacgugcgccagcgaguacaccggcaacuaccagugcgggcacuacaagcacaucaccuccaaggagacccucuacugcaucgacggcgcccugcugacgaagagcagcgaguacaaggggcccaucaccgacguguucuacaaggagaacuccuacaccaccacgaucaagcccgugaccuacaagcucgacggcgucgugugcaccgagaucgaccccaagcuggacaacuacuacaagaaggacaacagcuacuucaccgagcagccgaucgaccuggugcccaaccagcccuaccccaacgccuccuucgacaacuucaaguucgucugcgacaacaucaaguucgccgacgaccucaaccagcugacgggguacaagaagccggcgagccgcgagcugaaggugaccuucuuccccgaccucaacggcgacguggucgccaucgacuacaagcacuacacccccuccuucaagaagggcgccaagcugcugcacaagcccaucguguggcacgugaacaacgccaccaacaaggcgacguacaagccgaacaccuggugcauccggugccucuggagcaccaagcccgucgagaccuccaacagcuucgacgugcugaaguccgaggacgcccaggggauggacaaccuggccugcgaggaccucaagcccgugagcgaggaggucguggagaaccccacgauccagaaggacgugcuggagugcaacgucaagaccaccgagguggugggcgacaucauccugaagccggccaacaacucccucaagaucaccgaggaggucgggcacacggaccugauggccgcguacguggacaacagcucccugaccaucaagaagcccaacgagcucagccgcgugcugggccugaagacccucgccacccacgggcuggccgccgucaacuccgugcccugggacacgaucgccaacuacgcgaagccguuccugaacaagguggucagcaccaccaccaacaucgugacgcgcugccucaaccgggugugcaccaacuacaugcccuacuucuucacccugcugcuccagcugugcaccuucacccgcuccacgaacagccggaucaaggccuccaugcccaccaccaucgccaagaacaccgucaagagcgugggcaaguucugccuggaggccagcuucaacuaccucaagucccccaacuucagcaagcugaucaacaucaucaucugguuccugcuccuguccgugugccugggcagccucaucuacuccacggccgcgcuggggguccugaugagcaaccucggcaugccguccuacugcaccggguaccgcgagggcuaccugaacagcaccaacgugaccaucgccacguacugcaccggcuccauccccugcagcgugugccuguccgggcucgacagccuggacaccuaccccucccuggagaccauccagaucacgaucagcuccuucaagugggaccucaccgccuucggccuggucgccgagugguuccuggccuacauccucuucacccgguucuucuacgugcuggggcuggcggccaucaugcagcucuucuucagcuacuucgccgugcacuucaucuccaacagcuggcugauguggcugaucaucaaccugguccagaccgcccccaucuccgcgauggugcgcauguacaucuucuucgccagcuucuacuacguguggaagagcuacguccacgugguggacggcugcaacuccagcgccugcaugaugugcuacaagcggaaccgcgccacgcgggucgagugcaccaccaucgugaacgggguccgccgguccuucuacguguacgccaacggcggcaagggguucugcaagcuccacaacuggaacugcgugaacugcgacaccuucugcgcgggcagcacguucaucuccgacgaggucgcccgcgaccugagccugcaguucaagcggccgaucaaccccaccgaccaguccagcuacaucguggacuccgugaccgucaagaacgggagcauccaccucuacuucgacaaggccggccagaagaccuacgagcgccacucccugagccacuucgugaaccuggacaaccuccgggccaacaacacgaaggggucccugcccaucaacgugaucgucuucgacggcaagagcaagugcgaggaguccagcgccaaguccgcgagcguguacuacucccagcugaugugccagcccauccuccugcuggaccaggcccucgugagcgacgucggcgacagcgccgagguggccgugaagauguucgacgccuacgucaacaccuucuccagcaccuucaacgugccgauggagaagcugaagacccugguggcgacggccgaggccgagcucgccaagaacgucucccuggacaacgugcugagcaccuucaucuccgcggcccgccagggguucguggacagcgacgucgagaccaaggacgugguggagugccucaagcugucccaccagagcgacaucgaggucaccggcgacuccugcaacaacuacaugcugacguacaacaagguggagaacaugaccccccgggaccucggggccugcaucgacugcagcgcccgccacaucaacgcccagguggcgaagucccacaacaucgcccugaucuggaacgucaaggacuucaugagccuguccgagcagcuccggaagcagauccgcagcgccgccaagaagaacaaccugcccuucaagcugaccugcgccaccacgcgccagguggugaacgucgugaccaccaagaucgcgcucaagggcgggugaggacuaguuauaagacugacuagcccgaugggccucccaacgggcccuccuccccuccuugcaccgagauuaauaaaaaaaaaaaaaaaaaaaaaaaaaaaaaaaaaaaaaaaaaaaaaaaaaaaaaaaaaaaaaaaaugcaucccccccccccccccccccccccccccccccaaaggcucuuuucagagccaccagaauu

SEQ ID NO: 21711 - RNA, 6058 nt, Artificial Sequence
  SARS-CoV-2__MT755897.1__non-structural protein 3 (NSP3) mRNA gc
aggagaaagcuuaccauggcccccaccaaggugaccuucggcgacgacacggucaucgaggugcagggguacaagagcgugaacaucaccuucgagcuggacgagcgcaucgacaagguccucaacgagaagugcuccgccuacaccguggagcugggcaccgaggugaacgaguucgcgugcgucguggccgacgccgugaucaagacgcugcagccggucagcgagcuccugaccccccuggggaucgaccucgacgagugguccauggccaccuacuaccuguucgacgagagcggcgaguucaagcuggccucccacauguacugcagcuucuacccccccgacgaggacgaggaggagggggacugcgaggaggaggaguucgagccguccacccaguacgaguacggcacggaggacgacuaccagggcaagccccucgaguucggggcgaccagcgccgcccugcagcccgaggaggagcaggaggaggacuggcuggacgacgacucccagcagaccgugggccagcaggacgggagcgaggacaaccagaccacgaccauccagaccaucguggagguccagccccagcucgagauggagcugaccccgguggugcagacgaucgaggucaacuccuucagcggcuaccugaagcucaccgacaacguguacaucaagaacgccgacaucguggaggaggcgaagaaggucaagcccaccgugguggucaacgccgccaacguguaccugaagcacgggggcggcaucgccggggcccugaacaaggcgaccaacaacgccaugcagguggaguccgacgacuacaucgccacgaacggcccccucaaggucgggggcagcugcgugcuguccggccacaaccuggccaagcacugccuccacgucguggggcccaacgugaacaagggcgaggacauccagcugcugaagagcgccuacgagaacuucaaccagcacgagguccuccuggcgccgcugcucuccgccgggaucuucggcgccgaccccauccacagccugcgggugugcguggacaccguccgcaccaacguguaccuggccguguucgacaagaaccucuacgacaagcuggucuccagcuuccuggagaugaagagcgagaagcagguggagcagaagaucgccgagauccccaaggaggaggugaagcccuucaucaccgaguccaagccgagcgucgagcagcggaagcaggacgacaagaagaucaaggcgugcguggaggaggugacgaccacccucgaggagaccaaguuccugacggagaaccugcuccuguacaucgacaucaacgggaaccugcaccccgacuccgccacccucgucagcgacaucgacaucaccuuccugaagaaggacgcccccuacaucgugggcgacgugguccaggagggcgugcugaccgccguggucauccccacgaagaaggccgggggcaccaccgagaugcucgcgaaggcccugcgcaaggugccgaccgacaacuacaucacgaccuaccccgggcagggccugaacggguacaccguggaggaggccaagaccguccucaagaagugcaaguccgccuucuacauccugcccagcaucaucuccaacgagaagcaggagauccugggcaccgugagcuggaaccuccgggagaugcuggcgcacgccgaggagacgcgcaagcugaugcccgugugcgucgagaccaaggccaucguguccaccauccagcggaaguacaagggcaucaagauccaggaggggguggucgacuacggcgcccgcuucuacuucuacaccagcaagacgaccguggccucccugaucaacacccucaacgaccugaacgagacccuggugacgaugccgcucggguacgucacccacggccugaaccuggaggaggcggcccgguacaugcgcagccucaaggugcccgccaccguguccgucagcucccccgacgccgugaccgccuacaacggguaccugacgagcuccagcaagacccccgaggagcacuucaucgagaccaucucccuggcgggcagcuacaaggacuggagcuacuccggccagagcacccagcucgggaucgaguuccugaagcggggcgacaaguccguguacuacacgagcaacccgaccaccuuccaccuggacggggaggucaucaccuucgacaaccucaagacgcugcugucccuccgcgaggugcggaccaucaagguguucaccaccgucgacaacaucaaccugcacacgcaggugguggacaugagcaugaccuacggccagcaguucggccccaccuaccuggacggggccgacgucaccaagaucaagccccacaacucccacgagggcaagacguucuacgugcucccgaacgacgacacccugcgcguggaggccuucgaguacuaccacaccaccgaccccagcuuccuggggcgguacauguccgcccucaaccacacgaagaaguggaaguacccccaggucaacggccugaccagcaucaagugggccgacaacaacugcuaccuggcgaccgcccuccugacccugcagcagaucgagcucaaguucaaccccccggcccugcaggacgccuacuaccgcgcgcgggccggggaggccgccaacuucugcgcccugauccucgcguacugcaacaagacggugggcgagcugggcgacgugcgcgagaccauguccuaccuguuccagcacgccaaccucgacagcugcaagcggguccugaacguggucugcaagaccugcgggcagcagcagaccacccugaagggcguggaggccgugauguacauggggacgcucuccuacgagcaguucaagaagggcguccagauccccugcaccugcgggaagcaggccaccaaguaccuggugcagcaggagagccccuucgugaugauguccgcccccccggcgcaguacgagcugaagcacggcaccuucacgugcgccagcgaguacaccggcaacuaccagugcgggcacuacaagcacaucaccuccaaggagacccucuacugcaucgacggcgcccugcugacgaagagcagcgaguacaaggggcccaucaccgacgucuucuacaaggagaacuccuacaccaccacgaucaagcccgugaccuacaagcucgacggcguggucugcaccgagaucgaccccaagcuggacaacuacuacaagaaggacaacagcuacuucaccgagcagccgaucgaccuggugcccaaccagcccuaccccaacgccuccuucgacaacuucaaguucgugugcgacaacaucaaguucgccgacgaccucaaccagcugacgggguacaagaagccggcgagccgcgagcugaaggucaccuucuuccccgaccucaacggcgacgugguggccaucgacuacaagcacuacacccccuccuucaagaagggcgccaagcugcugcacaagcccaucgucuggcacgugaacaacgccaccaacaaggcgacguacaagccgaacaccuggugcauccggugccucuggagcaccaagcccguggagaccuccaacagcuucgacguccugaaguccgaggacgcccaggggauggacaaccuggccugcgaggaccucaagcccgugagcgaggagguggucgagaaccccacgauccagaaggacgugcuggagugcaacgugaagaccaccgaggucgugggcgacaucauccugaagccggccaacaacucccucaagaucaccgaggagguggggcacacggaccugauggccgcguacgucgacaacagcucccugaccaucaagaagcccaacgagcucagccgcgugcugggccugaagacccucgccacccacgggcuggccgccgugaacuccguccccugggacacgaucgccaacuacgcgaagccguuccugaacaagguggugagcaccaccaccaacaucgucacgcgcugccucaaccgggugugcaccaacuacaugcccuacuucuucacccugcugcuccagcugugcaccuucacccgcuccacgaacagccggaucaaggccuccaugcccaccaccaucgccaagaacaccgugaagagcgucggcaaguucugccuggaggccagcuucaacuaccucaagucccccaacuucagcaagcugaucaacaucaucaucugguuccugcuccuguccgugugccugggcagccucaucuacuccacggccgcgcugggggugcugaugagcaaccucggcaugccguccuacugcaccggguaccgcgagggcuaccugaacagcaccaacgucaccaucgccacguacugcaccggcuccauccccugcagcgugugccuguccgggcucgacagccuggacaccuaccccucccuggagaccauccagaucacgaucagcuccuucaagugggaccucaccgccuucggccugguggccgagugguuccuggccuacauccucuucacccgguucuucuacguccuggggcuggcggccaucaugcagcucuucuucagcuacuucgccgugcacuucaucuccaacagcuggcugauguggcugaucaucaaccuggugcagauggcccccaucuccgcgaugguccgcauguacaucuucuucgccagcuucuacuacguguggaagagcuacgugcacgucguggacggcugcaacuccagcaccugcaugaugugcuacaagcggaaccgcgccacgcggguggagugcaccaccaucgucaacggggugcgccgguccuucuacgucuacgccaacggcggcaagggguucugcaagcuccacaacuggaacugcgugaacugcgacaccuucugcgccggcagcacguucaucuccgacgagguggcgcgcgaccugagccugcaguucaagcggccgaucaaccccaccgaccaguccagcuacaucgucgacuccgugaccgugaagaacgggagcauccaccucuacuucgacaaggccggccagaagaccuacgagcgccacucccugagccacuucgucaaccuggacaaccuccgggccaacaacacgaaggggucccugcccaucaacgugaucguguucgacggcaagagcaagugcgaggaguccagcgccaaguccgccagcgucuacuacucccagcugaugugccagcccauccuccugcuggaccaggcgcucgugagcgacgugggcgacagcgccgaggucgccgugaagauguucgacgccuacgugaacaccuucuccagcaccuucaacgucccgauggagaagcugaagacccugguggccacggcggaggccgagcucgccaagaacgugucccuggacaacguccugagcaccuucaucuccgccgcgcgccagggguucguggacagcgacguggagaccaaggacgucguggagugccucaagcugucccaccagagcgacaucgaggugaccggcgacuccugcaacaacuacaugcugacguacaacaaggucgagaacaugaccccccgggaccucggggccugcaucgacugcagcgcccgccacaucaacgcccagguggccaagucccacaacaucgcgcugaucuggaacgugaaggacuucaugagccuguccgagcagcuccggaagcagauccgcagcgccgccaagaagaacaaccugcccuucaagcugaccugcgccaccacgcgccaggucgugaacguggucaccaccaagaucgcccucaagggcgggugaggacuaguuauaagacugacuagcccgaugggccucccaacgggcccuccuccccuccuugcaccgagauuaauaaaaaaaaaaaaaaaaaaaaaaaaaaaaaaaaaaaaaaaaaaaaaaaaaaaaaaaaaaaaaaaaugcaucccccccccccccccccccccccccccccccaaaggcucuuuucagagccaccagaauu

SEQ ID NO: 21712 - RNA, 6058 nt, Artificial Sequence
  SARS-CoV-2__MT755898.1__non-structural protein 3 (NSP3) mRNA gc
aggagaaagcuuaccauggcccccaccaaggugaccuucggcgacgacacggucaucgaggugcagggguacaagagcgugaacaucaccuucgagcuggacgagcgcaucgacaagguccucaacgagaagugcuccgccuacaccguggagcugggcaccgaggugaacgaguucgcgugcgucguggccgacgccgugaucaagacgcugcagccggucagcgagcuccugaccccccuggggaucgaccucgacgagugguccauggccaccuacuaccuguucgacgagagcggcgaguucaagcuggccucccacauguacugcagcuucuacccccccgacgaggacgaggaggagggggacugcgaggaggaggaguucgagccguccacccaguacgaguacggcacggaggacgacuaccagggcaagccccucgaguucggggcgaccagcgccgcccugcagcccgaggaggagcaggaggaggacuggcuggacgacgacucccagcagaccgugggccagcaggacgggagcgaggacaaccagaccacgaccauccagaccaucguggagguccagccccagcucgagauggagcugaccccgguggugcagacgaucgaggucaacuccuucagcggcuaccugaagcucaccgacaacguguacaucaagaacgccgacaucguggaggaggcgaagaaggucaagcccaccgugguggucaacgccgccaacguguaccugaagcacgggggcggcguggccggggcccugaacaaggcgaccaacaacgccaugcaggucgaguccgacgacuacaucgccacgaacggcccccucaagguggggggcagcugcguccuguccggccacaaccuggccaagcacugccuccacgugguggggcccaacgucaacaagggcgaggacauccagcugcugaagagcgccuacgagaacuucaaccagcacgaggugcuccuggcgccgcugcucuccgccgggaucuucggcgccgaccccauccacagccugcgggugugcgucgacaccgugcgcaccaacguguaccuggccgucuucgacaagaaccucuacgacaagcugguguccagcuuccuggagaugaagagcgagaagcagguggagcagaagaucgccgagauccccaaggaggaggucaagcccuucaucaccgaguccaagccgagcguggagcagcggaagcaggacgacaagaagaucaaggcgugcguggaggaggucacgaccacccucgaggagaccaaguuccugacggagaaccugcuccuguacaucgacaucaacgggaaccugcaccccgacuccgccacccucgugagcgacaucgacaucaccuuccugaagaaggacgcccccuacaucgugggcgacgucgugcaggagggcgugcugaccgccgucgugauccccacgaagaaggccgggggcaccaccgagaugcucgcgaaggcccugcgcaaggugccgaccgacaacuacaucacgaccuaccccgggcagggccugaacggguacaccgucgaggaggccaagaccgugcucaagaagugcaaguccgccuucuacauccugcccagcaucaucuccaacgagaagcaggagauccugggcaccgugagcuggaaccuccgggagaugcuggcgcacgccgaggagacgcgcaagcugaugcccgucugcguggagaccaaggccaucguguccaccauccagcggaaguacaagggcaucaagauccaggagggggucguggacuacggcgcccgcuucuacuucuacaccagcaagacgaccguggccucccugaucaacacccucaacgaccugaacgagacccuggucacgaugccgcucggguacgugacccacggccugaaccuggaggaggcggcccgguacaugcgcagccucaaggugcccgccaccgucuccgugagcucccccgacgccgugaccgccuacaacggguaccugacgagcuccagcaagacccccgaggagcacuucaucgagaccaucucccuggcgggcagcuacaaggacuggagcuacuccggccagagcacccagcucgggaucgaguuccugaagcggggcgacaaguccgucuacuacacgagcaacccgaccaccuuccaccuggacggggaggugaucaccuucgacaaccucaagacgcugcugucccuccgcgaggugcggaccaucaaggucuucaccaccguggacaacaucaaccugcacacgcagguggucgacaugagcaugaccuacggccagcaguucggccccaccuaccuggacggggccgacgugaccaagaucaagccccacaacucccacgagggcaagacguucuacgugcucccgaacgacgacacccugcgcgucgaggccuucgaguacuaccacaccaccgaccccagcuuccuggggcgguacauguccgcccucaaccacacgaagaaguggaaguacccccaggugaacggccugaccagcaucaagugggccgacaacaacugcuaccuggcgaccgcccuccugacccugcagcagaucgagcucaaguucaaccccccggcccugcaggacgccuacuaccgcgcgcgggccggggaggccgccaacuucugcgcccugauccucgcguacugcaacaagacggugggcgagcugggcgacguccgcgagaccauguccuaccuguuccagcacgccaaccucgacagcugcaagcgggugcugaacgucgugugcaagaccugcgggcagcagcagaccacccugaagggcguggaggccgucauguacauggggacgcucuccuacgagcaguucaagaagggcgugcagauccccugcaccugcgggaagcaggccaccaaguaccuggugcagcaggagagccccuucgucaugauguccgcccccccggugcaguacgagcugaagcacggcaccuucacgugcgcgagcgaguacaccggcaacuaccagugcgggcacuacaagcacaucaccuccaaggagacccucuacugcaucgacggcgcccugcugacgaagagcagcgaguacaaggggcccaucaccgacguguucuacaaggagaacuccuacaccaccacgaucaagcccgucaccuacaagcucgacggcguggugugcaccgagaucgaccccaagcuggacaacuacuacaagaaggacaacagcuacuucaccgagcagccgaucgaccugguccccaaccagcccuaccccaacgccuccuucgacaacuucaaguucgugugcgacaacaucaaguucgccgacgaccucaaccagcugacgggguacaagaagccggccagccgcgagcugaaggugaccuucuuccccgaccucaacggcgacgucguggcgaucgacuacaagcacuacacccccuccuucaagaagggcgccaagcugcugcacaagcccaucguguggcacgucaacaacgccaccaacaaggccacguacaagccgaacaccuggugcauccggugccucuggagcaccaagcccguggagaccuccaacagcuucgacgugcugaaguccgaggacgcgcaggggauggacaaccuggccugcgaggaccucaagcccgucagcgaggaggugguggagaaccccacgauccagaaggacguccuggagugcaacgugaagaccaccgagguggucggcgacaucauccugaagccggccaacaacucccucaagaucaccgaggagguggggcacacggaccugauggccgccuacguggacaacagcucccugaccaucaagaagcccaacgagcucagccgcguccugggccugaagacccucgcgacccacgggcuggccgccgugaacuccgugcccugggacacgaucgccaacuacgccaagccguuccugaacaaggucgugagcaccaccaccaacaucgugacgcgcugccucaaccgggucugcaccaacuacaugcccuacuucuucacccugcugcuccagcugugcaccuucacccgcuccacgaacagccggaucaaggcguccaugcccaccaccaucgccaagaacaccgugaagagcgugggcaaguucugccuggaggccagcuucaacuaccucaagucccccaacuucagcaagcugaucaacaucaucaucugguuccugcuccuguccgucugccugggcagccucaucuacuccacggccgcccugggggugcugaugagcaaccucggcaugccguccuacugcaccggguaccgcgagggcuaccugaacagcaccaacgugaccaucgcgacguacugcaccggcuccauccccugcagcgucugccuguccgggcucgacagccuggacaccuaccccucccuggagaccauccagaucacgaucagcuccuucaagugggaccucaccgccuucggccugguggccgagugguuccuggccuacauccucuucacccgguucuucuacgugcuggggcuggccgcgaucaugcagcucuucuucagcuacuucgccguccacuucaucuccaacagcuggcugauguggcugaucaucaaccuggugcagauggcccccaucuccgccauggugcgcauguacaucuucuucgcgagcuucuacuacgucuggaagagcuacgugcacguggucgacggcugcaacuccagcaccugcaugaugugcuacaagcggaaccgcgccacgcggguggagugcaccaccaucgucaacggggugcgccgguccuucuacguguacgccaacggcggcaagggguucugcaagcuccacaacuggaacugcgucaacugcgacaccuucugcgccggcagcacguucaucuccgacgagguggcccgcgaccugagccugcaguucaagcggccgaucaaccccaccgaccaguccagcuacaucguggacuccgucaccgugaagaacgggagcauccaccucuacuucgacaaggcgggccagaagaccuacgagcgccacucccugagccacuucgugaaccuggacaaccuccgggccaacaacacgaaggggucccugcccaucaacgucaucguguucgacggcaagagcaagugcgaggaguccagcgccaaguccgccagcguguacuacucccagcugaugugccagcccauccuccugcuggaccaggcccucgucagcgacgugggcgacagcgcggagguggccgucaagauguucgacgccuacgugaacaccuucuccagcaccuucaacgugccgauggagaagcugaagacccuggucgccacggccgaggcggagcucgccaagaacgugucccuggacaacgugcugagcaccuucaucuccgccgcccgccagggguucgucgacagcgacguggagaccaaggacguggucgagugccucaagcugucccaccagagcgacaucgaggugaccggcgacuccugcaacaacuacaugcugacguacaacaagguggagaacaugaccccccgggaccucggggcgugcaucgacugcagcgcccgccacaucaacgcccaggucgccaagucccacaacaucgcccugaucuggaacgugaaggacuucaugagccuguccgagcagcuccggaagcagauccgcagcgcggccaagaagaacaaccugcccuucaagcugaccugcgccaccacgcgccagguggucaacguggugaccaccaagaucgcccucaagggcgggugaggacuaguuauaagacugacuagcccgaugggccucccaacgggcccuccuccccuccuugcaccgagauuaauaaaaaaaaaaaaaaaaaaaaaaaaaaaaaaaaaaaaaaaaaaaaaaaaaaaaaaaaaaaaaaaaugcaucccccccccccccccccccccccccccccccaaaggcucuuuucagagccaccagaauu

SEQ ID NO: 21713 - RNA, 6058 nt, Artificial Sequence
  SARS-CoV-2__MT755916.1__non-structural protein 3 (NSP3) mRNA gc
aggagaaagcuuaccauggcccccaccaaggugaccuucggcgacgacacggucaucgaggugcagggguacaagagcgugaacaucaccuucgagcuggacgagcgcaucgacaagguccucaacgagaagugcuccgccuacaccguggagcugggcaccgaggugaacgaguucgcgugcgucguggccgacgccgugaucaagacgcugcagccggucagcgagcuccugaccccccuggggaucgaccucgacgagugguccauggccaccuacuaccuguucgacgagagcggcgaguucaagcuggccucccacauguacugcagcuucuacccccccgacgaggacgaggaggagggggacugcgaggaggaggaguucgagccguccacccaguacgaguacggcacggaggacgacuaccagggcaagccccucgaguucggggcgaccagcgccgcccugcagcccgaggaggagcaggaggaggacuggcuggacgacgacucccagcagaccgugggccagcaggacgggagcgaggacaaccagaccacgaccauccagaccaucguggagguccagccccagcucgagauggagcugaccccgguggugcagacgaucgaggucaacuccuucagcggcuaccugaagcucaccgacaacguguacaucaagaacgccgacaucguggaggaggcgaagaaggucaagcccaccgugguggucaacgccgccaacguguaccugaagcacgggggcggcguggccggggcccugaacaaggcgaccaacaacgccaugcaggucgaguccgacgacuacaucgccacgaacggcccccucaagguggggggcagcugcguccuguccggccacaaccuggccaagcacugccuccacgugguggggcccaacgucaacaagggcgaggacauccagcugcugaagagcgccuacgagaacuucaaccagcacgaggugcuccuggcgccgcugcucuccgccgggaucuucggcgccgaccccauccacagccugcgggugugcgucgacaccgugcgcaccaacguguaccuggccgucuucgacaagaaccucuacgacaagcugguguccagcuuccuggagaugaagagcgagaagcagguggagcagaagaucgccgagauccccaaggaggaggucaagcccuucaucaccgaguccaagccgagcguggagcagcggaagcaggacgacaagaagaucaaggcgugcguggaggaggucacgaccacccucgaggagaccaaguuccugacggagaaccugcuccuguacaucgacaucaacgggaaccugcaccccgacuccgccacccucgugagcgacaucgacaucaccuuccugaagaaggacgcccccuacaucgugggcgacgucgugcaggagggcgugcugaccgccgucgugauccccacgaagaaggccgggggcaccaccgagaugcucgcgaaggcccugcgcaaggugccgaccgacaacuacaucacgaccuaccccgggcagggccugaacggguacaccgucgaggaggccaagaccgugcucaagaagugcaaguccgccuucuacauccugcccagcaucaucuccaacgagaagcaggagauccugggcaccgugagcuggaaccuccgggagaugcuggcgcacgccgaggagacgcgcaagcugaugcccgucugcguggagaccaaggccaucguguccaccauccagcggaaguacaagggcaucaagauccaggagggggucguggacuacggcgcccgcuucuacuucuacaccagcaagacgaccguggccucccugaucaacacccucaacgaccugaacgagacccuggucacgaugccgcucggguacgugacccacggccugaaccuggaggaggcggcccgguacaugcgcagccucaaggugcccgccaccgucuccgugagcucccccgacgccgugaccgccuacaacggguaccugacgagcuccagcaagacccccgaggagcacuucaucgagaccaucucccuggcgggcagcuacaaggacuggagcuacuccggccagagcacccagcucgggaucgaguuccugaagcggggcgacaaguccgucuacuacacgagcaacccgaccaccuuccaccuggacggggaggugaucaccuucgacaaccucaagacgcugcugucccuccgcgaggugcggaccaucaaggucuucaccaccguggacaacaucaaccugcacacgcagguggucgacaugagcaugaccuacggccagcaguucggccccaccuaccuggacggggccgacgugaccaagaucaagccccacaacucccacgagggcaagacguucuacgugcucccgaacgacgacacccugcgcgucgaggccuucgaguacuaccacaccaccgaccccagcuuccuggggcgguacauguccgcccucaaccacacgaagaaguggaaguacccccaggugaacggccugaccagcaucaagugggccgacaacaacugcuaccuggcgaccgcccuccugacccugcagcagaucgagcuccgcuucaaccccccggcccugcaggacgccuacuaccgggcgcgcgccggggaggccgccaacuucugcgcccugauccucgcguacugcaacaagacggugggcgagcugggcgacguccgggagaccauguccuaccuguuccagcacgccaaccucgacagcugcaagcgcgugcugaacgucgugugcaagaccugcgggcagcagcagaccacccugaagggcguggaggccgucauguacauggggacgcucuccuacgagcaguucaagaagggcgugcagauccccugcaccugcgggaagcaggccaccaaguaccuggugcagcaggagagccccuucgucaugauguccgcccccccggcgcaguacgagcugaagcacggcaccuucacgugcgccagcgaguacaccggcaacuaccagugcgggcacuacaagcacaucaccuccaaggagacccucuacugcaucgacggcgcccugcugacgaagagcagcgaguacaaggggcccaucaccgacguguucuacaaggagaacuccuacaccaccacgaucaagcccgugaccuacaagcucgacggcgucgugugcaccgagaucgaccccaagcuggacaacuacuacaagaaggacaacagcuacuucaccgagcagccgaucgaccuggugcccaaccagcccuaccccaacgccuccuucgacaacuucaaguucgucugcgacaacaucaaguucgccgacgaccucaaccagcugacgggguacaagaagccggcgagccgggagcugaaggugaccuucuuccccgaccucaacggcgacguggucgccaucgacuacaagcacuacacccccuccuucaagaagggcgccaagcugcugcacaagcccaucguguggcacgugaacaacgccaccaacaaggcgacguacaagccgaacaccuggugcauccgcugccucuggagcaccaagcccgucgagaccuccaacagcuucgacgugcugaaguccgaggacgcccaggggauggacaaccuggccugcgaggaccucaagcccgugagcgaggaggucguggagaaccccacgauccagaaggacgugcuggagugcaacgucaagaccaccgagguggugggcgacaucauccugaagccggccaacaacucccucaagaucaccgaggaggucgggcacacggaccugauggccgcguacguggacaacagcucccugaccaucaagaagcccaacgagcucagccgcgugcugggccugaagacccucgccacccacgggcuggccgccgucaacuccgugcccugggacacgaucgccaacuacgcgaagccguuccugaacaagguggucagcaccaccaccaacaucgugacgcggugccucaaccgcgugugcaccaacuacaugcccuacuucuucacccugcugcuccagcugugcaccuucacccgguccacgaacagccgcaucaaggccuccaugcccaccaccaucgccaagaacaccgucaagagcgugggcaaguucugccuggaggccagcuucaacuaccucaagucccccaacuucagcaagcugaucaacaucaucaucugguuccugcuccuguccgugugccugggcagccucaucuacuccacggccgcgcuggggguccugaugagcaaccucggcaugccguccuacugcaccggguaccgggagggcuaccugaacagcaccaacgugaccaucgccacguacugcaccggcuccauccccugcagcgugugccuguccgggcucgacagccuggacaccuaccccucccuggagaccauccagaucacgaucagcuccuucaagugggaccucaccgccuucggccuggucgccgagugguuccuggccuacauccucuucacccgcuucuucuacgugcuggggcuggcggccaucaugcagcucuucuucagcuacuucgccgugcacuucaucuccaacagcuggcugauguggcugaucaucaaccugguccagauggcccccaucuccgcgauggugcggauguacaucuucuucgccagcuucuacuacguguggaagagcuacguccacgugguggacggcugcaacuccagcaccugcaugaugugcuacaagcgcaaccgggccacgcgcgucgagugcaccaccaucgugaacgggguccggcgcuccuucuacguguacgccaacggcggcaagggguucugcaagcuccacaacuggaacugcgugaacugcgacaccuucugcgccggcagcacguucaucuccgacgaggucgcgcgggaccugagccugcaguucaagcgcccgaucaaccccaccgaccaguccagcuacaucguggacuccgugaccgucaagaacgggagcauccaccucuacuucgacaaggccggccagaagaccuacgagcggcacucccugagccacuucgugaaccuggacaaccuccgcgccaacaacacgaaggggucccugcccaucaacgugaucgucuucgacggcaagagcaagugcgaggaguccagcgccaaguccgccagcguguacuacucccagcugaugugccagcccauccuccugcuggaccaggcgcucgugagcgacgucggcgacagcgccgagguggccgugaagauguucgacgccuacgucaacaccuucuccagcaccuucaacgugccgauggagaagcugaagacccugguggccacggcggaggccgagcucgccaagaacgucucccuggacaacgugcugagcaccuucaucuccgccgcgcggcagggguucguggacagcgacgucgagaccaaggacgugguggagugccucaagcugucccaccagagcgacaucgaggucaccggcgacuccugcaacaacuacaugcugacguacaacaagguggagaacaugaccccccgcgaccucggggccugcaucgacugcagcgcccggcacaucaacgcccacguggccaagucccacaacaucgcgcugaucuggaacgucaaggacuucaugagccuguccgagcagcuccgcaagcagauccgcagcgccgccaagaagaacaaccugcccuucaagcugaccugcgccaccacgcggcagguggugaacgucgugaccaccaagaucgcccucaagggcgggugaggacuaguuauaagacugacuagcccgaugggccucccaacgggcccuccuccccuccuugcaccgagauuaauaaaaaaaaaaaaaaaaaaaaaaaaaaaaaaaaaaaaaaaaaaaaaaaaaaaaaaaaaaaaaaaaugcaucccccccccccccccccccccccccccccccaaaggcucuuuucagagccaccagaauu

SEQ ID NO: 21714 - RNA, 6058 nt, Artificial Sequence
  SARS-CoV-2__MT757029.1__non-structural protein 3 (NSP3) mRNA gc
aggagaaagcuuaccauggcccccaccaaggugaccuucggcgacgacacggucaucgaggugcagggguacaagagcgugaacaucaccuucgagcuggacgagcgcaucgacaagguccucaacgagaagugcuccgccuacaccguggagcugggcaccgaggugaacgaguucgcgugcgucguggccgacgccgugaucaagacgcugcagccggucagcgagcuccugaccccccuggggaucgaccucgacgagugguccauggccaccuacuaccuguucgacgagagcggcgaguucaagcuggccucccacauguacugcagcuucuacccccccgacgaggacgaggaggagggggacugcgaggaggaggaguucgagccguccacccaguacgaguacggcacggaggacgacuaccagggcaagccccucgaguucggggcgaccagcgccgcccugcagcuggaggaggagcaggaggaggacuggcucgacgacgacucccagcagaccgugggccagcaggacgggagcgaggacaaccagaccacgaccauccagaccaucguggagguccagccccagcuggagauggagcugacccccguggugcagacgaucgaggucaacuccuucagcggcuaccucaagcugaccgacaacguguacaucaagaacgccgacaucguggaggaggcgaagaaggucaagccgaccgugguggucaacgccgccaacguguaccugaagcacgggggcggcguggccggggcccucaacaaggcgaccaacaacgccaugcaggucgaguccgacgacuacaucgccacgaacggcccccugaagguggggggcagcugcguccuguccggccacaaccucgccaagcacugccugcacgugguggggcccaacgucaacaagggcgaggacauccagcugcucaagagcgccuacgagaacuucaaccagcacgaggugcugcuggcgccccuccuguccgccgggaucuucggcgccgacccgauccacagccugcgggugugcgucgacaccgugcgcaccaacguguaccucgccgucuucgacaagaaccuguacgacaagcugguguccagcuuccucgagaugaagagcgagaagcagguggagcagaagaucgccgagauccccaaggaggaggucaagcccuucaucaccgaguccaagcccagcguggagcagcggaagcaggacgacaagaagaucaaggcgugcguggaggaggucacgaccacccuggaggagaccaaguuccugacggagaaccuccugcuguacaucgacaucaacgggaaccuccacccggacuccgccacccuggugagcgacaucgacaucaccuuccugaagaaggacgcccccuacaucgugggcgacgucgugcaggagggcgugcucaccgccgucgugauccccacgaagaaggccgggggcaccaccgagaugcuggcgaaggcccugcgcaaggugcccaccgacaacuacaucacgaccuacccggggcagggccucaacggguacaccgucgaggaggccaagaccgugcugaagaagugcaaguccgccuucuacauccugcccagcaucaucuccaacgagaagcaggagauccucggcaccgugagcuggaaccugcgggagaugcuggcgcacgccgaggagacgcgcaagcugaugcccgucugcguggagaccaaggccaucguguccaccauccagcggaaguacaagggcaucaagauccaggagggggucguggacuacggcgcccgcuucuacuucuacaccagcaagacgaccguggccucccucaucaacacccugaacgaccugaacgagacccucgucacgaugccccugggguacgugacccacggccugaaccucgaggaggcggcccgguacaugcgcagccugaaggugccggccaccgucuccgugagcucccccgacgccgugaccgccuacaacggguaccugacgagcuccagcaagacccccgaggagcacuucaucgagaccaucucccucgcgggcagcuacaaggacuggagcuacuccggccagagcacccagcuggggaucgaguuccugaagcggggcgacaaguccgucuacuacacgagcaaccccaccaccuuccaccucgacggggaggugaucaccuucgacaaccugaagacgcugcucucccugcgcgaggugcggaccaucaaggucuucaccaccguggacaacaucaaccugcacacgcagguggucgacaugagcaugaccuacggccagcaguucggccucaccuaccuggacggggccgacgugaccaagaucaagccgcacaacucccacgagggcaagacguucuacgugcugcccaacgacgacacccuccgcgucgaggccuucgaguacuaccacaccaccgaccccagcuuccuggggcgguacauguccgcccugaaccacacgaagaaguggaaguacccgcaggugaacggccucaccagcaucaagugggccgacaacaacugcuaccuggcgaccgcccugcucacccugcagcagaucgagcugaaguucaacccccccgcccuccaggacgccuacuaccgcgcgcgggccggggaggccgccaacuucugcgcccugauccuggcguacugcaacaagacggugggcgagcucggcgacguccgcgagaccauguccuaccuguuccagcacgccaaccuggacagcugcaagcgggugcucaacgucgugugcaagaccugcgggcagcagcagaccacccugaagggcguggaggccgucauguacauggggacgcuguccuacgagcaguucaagaagggcgugcagauccccugcaccugcgggaagcaggccaccaaguaccucgugcagcaggagagcccguucgucaugauguccgccccccccgcgcaguacgagcugaagcacggcaccuucacgugcgccagcgaguacaccggcaacuaccagugcgggcacuacaagcacaucaccuccaaggagacccuguacugcaucgacggcgcccuccugacgaagagcagcgaguacaaggggcccaucaccgacguguucuacaaggagaacuccuacaccaccacgaucaagccggugaccuacaagcuggacggcgucgugugcaccgagaucgaccccaagcucgacaacuacuacaagaaggacaacagcuacuucaccgagcagcccaucgaccuggugcccaaccagccguaccccaacgccuccuucgacaacuucaaguucgucugcgacaacaucaaguucgccgacgaccugaaccagcucacgggguacaagaagcccgcgagccgcgagcugaaggugaccuucuuccccgaccugaacggcgacguggucgccaucgacuacaagcacuacaccccguccuucaagaagggcgccaagcuccugcacaagcccaucguguggcacgugaacaacgccaccaacaaggcgacguacaagcccaacaccuggugcauccggugccuguggagcaccaagcccgucgagaccuccaacagcuucgacgugcucaaguccgaggacgcccaggggauggacaaccuggccugcgaggaccugaagccggugagcgaggaggucguggagaaccccacgauccagaaggacgugcucgagugcaacgucaagaccaccgagguggugggcgacaucauccugaagcccgccaacaacucccugaagaucaccgaggaggucgggcacacggaccucauggccgcguacguggacaacagcucccugaccaucaagaagcccaacgagcugagccgcgugcucggccugaagacccuggccacccacgggcucgccgccgucaacuccgugccgugggacacgaucgccaacuacgcgaagcccuuccugaacaagguggucagcaccaccaccaacaucgugacgcgcugccugaaccgggugugcaccaacuacaugcccuacuucuucacccuccugcugcagcucugcaccuucacccgcuccacgaacagccggaucaaggccuccaugccgaccaccaucgccaagaacaccgucaagagcgugggcaaguucugccuggaggccagcuucaacuaccugaagucccccaacuucagcaagcucaucaacaucaucaucugguuccugcugcucuccgugugccugggcagccugaucuacuccacggccgcgcucgggguccugaugagcaaccugggcaugcccuccuacugcaccggguaccgcgagggcuaccucaacagcaccaacgugaccaucgccacguacugcaccggcuccauccccugcagcgugugccuguccgggcuggacagccucgacaccuacccgucccuggagaccauccagaucacgaucagcuccuucaagugggaccugaccgccuucggccucgucgccgagugguuccuggccuacauccuguucacccgguucuucuacgugcucgggcuggcggccaucaugcagcuguucuucagcuacuucgccgugcacuucaucuccaacagcuggcugauguggcucaucaucaaccugguccagauggcccccaucuccgcgauggugcgcauguacaucuucuucgccagcuucuacuacguguggaagagcuacguccacgugguggacggcugcaacuccagcaccugcaugaugugcuacaagcggaaccgcgccacgcgggucgagugcaccaccaucgugaacgggguccgccgguccuucuacguguacgccaacggcggcaagggguucugcaagcugcacaacuggaacugcgugaacugcgacaccuucugcgccggcagcacguucaucuccgacgaggucgcgcgcgaccucagccugcaguucaagcggcccaucaaccccaccgaccaguccagcuacaucguggacuccgugaccgucaagaacgggagcauccaccuguacuucgacaaggccggccagaagaccuacgagcgccacucccucagccacuucgugaaccuggacaaccugcgggccaacaacacgaaggggucccucccgaucaacgugaucgucuucgacggcaagagcaagugcgaggaguccagcgccaaguccgccagcguguacuacucccagcugaugugccagcccauccugcuccuggaccaggcgcuggugagcgacgucggcgacagcgccgagguggccgugaagauguucgacgccuacgucaacaccuucuccagcaccuucaacgugcccauggagaagcucaagacccugguggccacggcggaggccgagcuggccaagaacgucucccucgacaacgugcugagcaccuucaucuccgccgcgcgccagggguucguggacagcgacgucgagaccaaggacgugguggagugccugaagcucucccaccagagcgacaucgaggucaccggcgacuccugcaacaacuacaugcugacguacaacaagguggagaacaugaccccccgggaccugggggccugcaucgacugcagcgcccgccacaucaacgcccagguggccaagucccacaacaucgcgcucaucuggaacgucaaggacuucaugagccuguccgagcagcugcggaagcagauccgcagcgccgccaagaagaacaaccucccguucaagcugaccugcgccaccacgcgccagguggugaacgucgugaccaccaagaucgcccugaagggcgggugaggacuaguuauaagacugacuagcccgaugggccucccaacgggcccuccuccccuccuugcaccgagauuaauaaaaaaaaaaaaaaaaaaaaaaaaaaaaaaaaaaaaaaaaaaaaaaaaaaaaaaaaaaaaaaaaugcaucccccccccccccccccccccccccccccccaaaggcucuuuucagagccaccagaauu

SEQ ID NO: 21715 - RNA, 6058 nt, Artificial Sequence
  SARS-CoV-2__MT757047.1__non-structural protein 3 (NSP3) mRNA gc
aggagaaagcuuaccauggcccccaccaaggugaccuucggcgacgacacggucaucgaggugcagggguacaagagcgugaacaucaccuucgagcuggacgagcgcaucgacaagguccucaacgagaagugcuccgccuacaccguggagcugggcaccgaggugaacgaguucgcgugcgucguggccgacgccgugaucaagacgcugcagccggucagcgagcuccugaccccccuggggaucgaccucgacgagugguccauggccaccuacuaccuguucgacgagagcggcgaguucaagcuggccucccacauguacugcagcuucuacccccccgacgaggacgaggaggagggggacugcgaggaggaggaguucgagccguccacccaguacgaguacggcacggaggacgacuaccagggcaagccccucgaguucggggcgaccagcgccgcccugcagcuggaggaggagcaggaggaggacuggcucgacgacgacucccagcagaccgugggccagcaggacgggagcgaggacaaccagaccacgaccauccagaccaucguggagguccagccccagcuggagauggagcugacccccguggugcagacgaucgaggucaacuccuucagcggcuaccucaagcugaccgacaacguguacaucaagaacgccgacaucguggaggaggcgaagaaggucaagccgaccgugguggucaacgccgccaacguguaccugaagcacgggggcggcguggccggggcccucaacaaggcgaccaacaacgccaugcaggucgaguccgacgacuacaucgccacgaacggcccccugaagguggggggcagcugcguccuguccggccacaaccucgccaagcacugccugcacgugguggggcccaacgucaacaagggcgaggacauccagcugcucaagagcgccuacgagaacuucaaccagcacgaggugcugcuggcgccccuccuguccgccgggaucuucggcgccgacccgauccacagccugcgggugugcgucgacaccgugcgcaccaacguguaccucgccgucuucgacaagaaccuguacgacaagcugguguccagcuuccucgagaugaagagcgagaagcagguggagcagaagaucgccgagauccccaaggaggaggucaagcccuucaucaccgaguccaagcccagcguggagcagcggaagcaggacgacaagaagaucaaggcgugcguggaggaggucacgaccacccuggaggagaccaaguuccugacggagaaccuccugcuguacaucgacaucaacgggaaccuccacccggacuccgccacccuggugagcgacaucgacaucaccuuccugaagaaggacgcccccuacaucgugggcgacgucgugcaggagggcgugcucaccgccgucgugauccccacgaagaaggccgggggcaccaccgagaugcuggcgaaggcccugcgcaaggugcccaccgacaacuacaucacgaccuacccggggcagggccucaacggguacaccgucgaggaggccaagaccgugcugaagaagugcaaguccgccuucuacauccugcccagcaucaucuccaacgagaagcaggagauccucggcaccgugagcuggaaccugcgggagaugcuggcgcacgccgaggagacgcgcaagcugaugcccgucugcguggagaccaaggccaucguguccaccauccagcggaaguacaagggcaucaagauccaggagggggucguggacuacggcgcccgcuucuacuucuacaccagcaagacgaccguggccucccucaucaacacccugaacgaccugaacgagacccucgucacgaugccccugggguacgugacccacggccugaaccucgaggaggcggcccgguacaugcgcagccugaaggugccggccaccgucuccgugagcucccccgacgccgugaccgccuacaacggguaccugacgagcuccagcaagacccccgaggagcacuucaucgagaccaucucccucgcgggcagcuacaaggacuggagcuacuccggccagagcacccagcuggggaucgaguuccugaagcggggcgacaaguccgucuacuacacgagcaaccccaccaccuuccaccucgacggggaggugaucaccuucgacaaccugaagacgcugcucucccugcgcgaggugcggaccaucaaggucuucaccaccguggacaacaucaaccugcacacgcagguggucgacaugagcaugaccuacggccagcaguucggcccgaccuaccucgacggggccgacgugaccaagaucaagccccacaacucccacgagggcaagacguucuacgugcugcccaacgacgacacccugcgcgucgaggccuucgaguacuaccacgccaccgacccgagcuuccucgggcgguacauguccgcccugaaccacaccaagaaguggaaguacccccaggugaacggccugacgagcaucaagugggcggacaacaacugcuaccucgccaccgcccugcugacccuccagcagaucgagcugaaguucaacccccccgcccugcaggacgcguacuaccgcgcccgggccggggaggccgccaacuucugcgcgcucauccuggccuacugcaacaagaccgugggcgagcugggcgacguccgcgagacgauguccuaccucuuccagcacgccaaccuggacagcugcaagcgggugcugaacgucgugugcaagaccugcgggcagcagcagaccacccucaagggcguggaggccgucauguacauggggacccuguccuacgagcaguucaagaagggcgugcagaucccgugcacgugcgggaagcaggccaccaaguaccuggugcagcaggagagccccuucgucaugauguccgcgccccccgcccaguacgagcucaagcacggcaccuucaccugcgccagcgaguacacgggcaacuaccagugcgggcacuacaagcacaucaccuccaaggagacccuguacugcaucgacggcgcccugcucaccaagagcagcgaguacaaggggccgaucacggacguguucuacaaggagaacuccuacaccaccaccaucaagcccgugacguacaagcuggacggcgucgugugcaccgagaucgaccccaagcuggacaacuacuacaagaaggacaacagcuacuucaccgagcagcccaucgaccucgugccgaaccagcccuaccccaacgccuccuucgacaacuucaaguucgucugcgacaacaucaaguucgcggacgaccugaaccagcugaccggguacaagaagcccgccagccgcgagcucaaggugacguucuucccggaccugaacggcgacguggucgccaucgacuacaagcacuacacccccuccuucaagaagggcgccaagcugcuccacaagcccaucguguggcacgugaacaacgcgaccaacaaggccaccuacaagcccaacacguggugcauccggugccuguggagcaccaagccggucgagaccuccaacagcuucgacgugcugaaguccgaggacgcccaggggauggacaaccucgccugcgaggaccugaagcccgugagcgaggaggucguggagaaccccaccauccagaaggacgugcuggagugcaacgucaagacgaccgagguggugggcgacaucauccucaagcccgccaacaacucccugaagaucaccgaggaggucgggcacaccgaccugauggcggccuacguggacaacagcucccucacgaucaagaagccgaacgagcugagccgcgugcugggccucaagacccuggccacccacgggcuggccgccgucaacuccgugcccugggacaccaucgcgaacuacgccaagcccuuccucaacaagguggucagcacgaccaccaacaucgugacccgcugccugaaccgggugugcacgaacuacaugccguacuucuucacccugcuccugcagcugugcaccuucacccgcuccaccaacagccggaucaaggccuccaugcccacgaccaucgccaagaacaccgucaagagcgugggcaaguucugccucgaggccagcuucaacuaccugaagucccccaacuucagcaagcugaucaacaucaucaucugguuccuccugcuguccgugugccucggcagccugaucuacuccaccgcggcccuggggguccucaugagcaaccugggcaugcccuccuacugcacgggguaccgcgagggcuaccugaacagcaccaacgugaccaucgccaccuacugcacgggcuccaucccgugcagcgugugccucuccgggcuggacagccuggacaccuaccccucccucgagaccauccagaucaccaucagcuccuucaagugggaccugacggccuucggccuggucgccgagugguuccucgcguacauccuguucacccgguucuucuacgugcuggggcucgccgccaucaugcagcuguucuucagcuacuucgccgugcacuucaucuccaacagcuggcugauguggcugaucaucaaccucguccagauggcgcccaucuccgccauggugcgcauguacaucuucuucgccagcuucuacuacguguggaagagcuacguccacgugguggacggcugcaacuccagcaccugcaugaugugcuacaagcggaaccgcgccacccgggucgagugcacgaccaucgugaacgggguccgccgguccuucuacguguacgccaacggcggcaagggguucugcaagcugcacaacuggaacugcgugaacugcgacaccuucugcgcgggcagcaccuucaucuccgacgaggucgcccgcgaccugagccuccaguucaagcggcccaucaacccgacggaccaguccagcuacaucguggacuccgugaccgucaagaacgggagcauccaccuguacuucgacaaggccggccagaagaccuacgagcgccacucccugagccacuucgugaaccucgacaaccugcgggccaacaacaccaaggggucccugcccaucaacgugaucgucuucgacggcaagagcaagugcgaggaguccagcgccaaguccgcgagcguguacuacucccagcucaugugccagcccauccugcugcucgaccaggcccuggugagcgacgucggcgacagcgccgagguggccgugaagauguucgacgccuacgucaacacguucuccagcaccuucaacgugcccauggagaagcugaagacccucguggcgaccgccgaggccgagcuggccaagaacgucucccuggacaacgugcucagcacguucaucuccgcggcccgccagggguucguggacagcgacgucgagaccaaggacgugguggagugccugaagcugucccaccagagcgacaucgaggucaccggcgacuccugcaacaacuacaugcucaccuacaacaagguggagaacaugacgccgcgggaccugggggccugcaucgacugcagcgcccgccacaucaacgcccagguggcgaagucccacaacaucgcccugaucuggaacgucaaggacuucaugagccucuccgagcagcugcggaagcagauccgcagcgccgccaagaagaacaaccugcccuucaagcucaccugcgccaccacccgccagguggugaacgucgugacgaccaagaucgcgcugaagggcgggugaggacuaguuauaagacugacuagcccgaugggccucccaacgggcccuccuccccuccuugcaccgagauuaauaaaaaaaaaaaaaaaaaaaaaaaaaaaaaaaaaaaaaaaaaaaaaaaaaaaaaaaaaaaaaaaaugcaucccccccccccccccccccccccccccccccaaaggcucuuuucagagccaccagaauu

SEQ ID NO: 21716 - RNA, 6058 nt, Artificial Sequence
  SARS-CoV-2__MT757076.1__non-structural protein 3 (NSP3) mRNA gc
aggagaaagcuuaccauggcccccaccaaggugaccuucggcgacgacacggucaucgaggugcagggguacaagagcgugaacaucaccuucgagcuggacgagcgcaucgacaagguccucaacgagaagugcuccgccuacaccguggagcugggcaccgaggugaacgaguucgcgugcgucguggccgacgccgugaucaagacgcugcagccggucagcgagcuccugaccccccuggggaucgaccucgacgagugguccauggccaccuacuaccuguucgacgagagcggcgaguucaagcuggccucccacauguacugcagcuucuacccccccgacgaggacgaggaggagggggacugcgaggaggaggaguucgagccguccacccaguacgaguacggcacggaggacgacuaccagggcaagccccucgaguucggggcgaccagcgccgcccugcagcccgaggaggagcaggaggaggacuggcuggacgacgacucccagcagaccgugggccagcaggacgggagcgaggacaaccagaccacgaccauccagaccaucguggagguccagccccagcucgagauggagcugaccccgguggugcagacgaucgaggucaacuccuucagcggcuaccugaagcucaccgacaacguguacaucaagaacgccgacaucguggaggaggcgaagaaggucaagcccaccgugguggucaacgccgccaacguguaccugaagcacgggggcggcguggccggggcccugaacaaggcgaccaacaacgccaugcaggucgaguccgacgacuacaucgccacgaacggcccccucaagguggggggcagcugcguccuguccggccacaaccuggccaagcacugccuccacgugguggggcccaacgucaacaagggcgaggacauccagcugcugaagagcgccuacgagaacuucaaccagcacgaggugcuccuggcgccgcugcucuccgccgggaucuucggcgccgaccccauccacagccugcgggugugcgucgacaccgugcgcaccaacguguaccuggccgucuucgacaagaaccucuacgacaagcugguguccagcuuccuggagaugaagagcgagaagcagguggagcagaagaucgccgagauccccaaggaggaggucaagcccuucaucaccgaguccaagccgagcguggagcagcggaagcaggacgacaagaagaucaaggcgugcguggaggaggucacgaccacccucgaggagaccaaguuccugacggagaaccugcuccuguacaucgacaucaacgggaaccugcaccccgacuccgccacccucgugagcgacaucgacaucaccuuccugaagaaggacgcccccuacaucgugggcgacgucgugcaggagggcgugcugaccgccgucgugauccccacgaagaaggccgggggcaccaccgagaugcucgcgaaggcccugcgcaaggugccgaccgacaacuacaucacgaccuaccccgggcagggccugaacggguacaccgucgaggaggccaagaccgugcucaagaagugcaaguccgccuucuacauccugcccagcaucaucuccaacgagaagcaggagauccugggcaccgugagcuggaaccuccgggagaugcuggcgcacgccgaggagacgcgcaagcugaugcccgucugcguggagaccaaggccaucguguccaccauccagcggaaguacaagggcaucaagauccaggagggggucguggacuacggcgcccgcuucuacuucuacaccagcaagacgaccguggccucccugaucaacacccucaacgaccugaacgagacccuggucacgaugccgcucggguacgugacccacggccugaaccuggaggaggcggcccgguacaugcgcagccucaaggugcccgccaccgucuccgugagcucccccgacgccgugaccgccuacaacggguaccugacgagcuccagcaagacccccgaggagcacuucaucgagaccaucucccuggcgggcagcuacaaggacuggagcuacuccggccagagcacccagcucgggaucgaguuccugaagcggggcgacaaguccgucuacuacacgagcaacccgaccaccuuccaccuggacggggaggugaucaccuucgacaaccucaagacgcugcugucccuccgcgaggugcggaccaucaaggucuucaccaccguggacaacaucaaccugcacacgcagguggucgacaugagcaugaccuacggccagcaguucggccccaccuaccuggacggggccgacgugaccaagaucaagccccacaacucccacgagggcaagacguucuacgugcucccgaacgacgacacccugcgcgucgaggccuucgaguacuaccacaccaccgaccccagcuuccuggggcgguacauguccgcccucaaccacacgaagaaguggaaguacccccaggugaacggccugaccagcaucaagugggccgacaacaacugcuaccuggcgaccgcccuccugacccugcagcagaucgagcucaaguucaaccccccggcccugcaggacgccuacuaccgcgcgcgggccggggaggccgccaacuucugcgcccugauccucgcguacugcaacaagacggugggcgagcugggcgacguccgcgagaccauguccuaccuguuccagcacgccaaccucgacagcugcaagcgggugcugaacgucgugugcaagaccugcgggcagcagcagaccacccugaagggcguggaggccgucauguacauggggacgcucuccuacgagcaguucaagaagggcgugcagauccccugcaccugcgggaagcaggccaccaaguaccuggugcagcaggagagccccuucgucaugauguccgcccccccggcgcaguacgagcugaagcacggcaccuucacgugcgccagcgaguacaccggcaacuaccagugcgggcacuacaagcacaucaccuccaaggagacccucuacugcaucgacggcgcccugcugacgaagagcagcgaguacaaggggcccaucaccgacguguucuacaaggagaacuccuacaccaccacgaucaagcccgugaccuacaagcucgacggcgucgugugcaccgagaucgaccccaagcuggacaacuacuacaagaaggacaacagcuacuucaccgagcagccgaucgaccuggugcccaaccagcccuaccccaacgccuccuucgacaacuucaaguucgucugcgacaacaucaaguucgccgacgaccucaaccagcugacgggguacaagaagccggcgagccgcgagcugaaggugaccuucuuccccgaccucaacggcgacguggucgccaucgacuacaagcacuacacccccuccuucaagaagggcgccaagcugcugcacaagcccaucguguggcacgugaacaacgccaccaacaaggcgacguacaagccgaacaccuggugcauccggugccucuggagcaccaagcccgucgagaccuccaacagcuucgacgugcugaaguccgaggacgcccaggggauggacaaccuggccugcgaggaccucaagcccgugagcgaggaggucguggagaaccccacgauccagaaggacgugcuggagugcaacgucaagaccaccgagguggugggcgacaucauccugaagccggccaacaacucccucaagaucaccgaggaggucgggcacacggaccugauggccgcguacguggacaacagcucccugaccaucaagaagcccaacgagcucagccgcgugcugggccugaagacccucgccacccacgggcuggccgccgucaacuccgugcccugggacacgaucgccaacuacgcgaagccguuccugaacaagguggucagcaccaccaccaacaucgugacgcgcugccucaaccgggugugcaccaacuacaugcccuacuucuucacccugcugcuccagcugugcaccuucacccgcuccacgaacagccggaucaaggccuccaugcccaccaccaucgccaagaacaccgucaagagcgugggcaaguucugccuggaggccagcuucaacuaccucaagucccccaacuucagcaagcugaucaacaucaucaucugguuccugcuccuguccgugugccugggcagccucaucuacuccacggccgcgcuggggguccugaugagcaaccucggcaugccguccuacugcaccggguaccgcgagggcuaccugaacagcaccaacgugaccaucgccacguacugcaccggcuccauccccugcagcgugugccuguccgggcucgacagccuggacaccuaccccucccuggagaccauccagaucacgaucagcuccuucaagugggaccucaccgccuucggccuggucgccgagugguuccuggccuacauccucuucacccgguucuucuacgugcuggggcuggcggccaucaugcagcucuucuucagcuacuucgccgugcacuucaucuccaacagcuggcugauguggcugaucaucaaccugguccagauggcccccaucuccgcgauggugcgcauguacaucuucuucgccagcuucuacuacguguggaagagcuacguccacgugguggacggcugcaacuccagcaccugcaugaugugcuacaagcggaaccgcgccacgcgggucgagugcaccaccaucgugaacgggguccgccgguccuucuacguguacgccaacggcggcaagggguucugcaagcuccacaacuggaacugcgugaacugcgacaccuucugcgccggcagcacguucaucuccgacgaggucgcgcgcgaccugagccugcaguucaagcggccgaucaaccccaccgaccaguccagcuacaucguggacuccgugaccgucaagaacgggagcauccaccucuacuucgacaaggccggccagaagaccuacgagcgccacucccugagccacuucgugaaccuggacaaccuccgggccaacaacacgaaggggucccugcccaucaacgugaucgucuucgacggcaagagcaagugcgaggaguccagcgccaaguccgccagcguguacuacucccagcugaugugccagcccauccuccugcuggaccaggcgcucgugagcgacgucggcgacagcgccgagguggccgugaagauguucgacgccuacgucaacaccuucuccagcaccuucaacgugccgauggagaagcugaagacccugguggccacggcggaggccgagcucgccaagaacgucucccuggacaacgugcugagcaccuucaucuccgccgcgcgccagggguucguggacagcgacgucgagaccaaggacgugguggagugccucaagcugucccaccagagcgacaucgaggucaccggcgacuccugcaacaacuacaugcugacguacaacaagguggagaacauggccccccgggaccucggggccugcaucgacugcagcgcccgccacaucaacgcccagguggcgaagucccacaacaucgcccugaucuggaacgucaaggacuucaugagccuguccgagcagcuccggaagcagauccgcagcgccgccaagaagaacaaccugcccuucaagcugaccugcgccaccacccgccagguggugaacgucgugacgaccaagaucgcgcucaagggcgggugaggacuaguuauaagacugacuagcccgaugggccucccaacgggcccuccuccccuccuugcaccgagauuaauaaaaaaaaaaaaaaaaaaaaaaaaaaaaaaaaaaaaaaaaaaaaaaaaaaaaaaaaaaaaaaaaugcaucccccccccccccccccccccccccccccccaaaggcucuuuucagagccaccagaauu

SEQ ID NO: 21717 - RNA, 6058 nt, Artificial Sequence
  SARS-CoV-2__MT757085.1__non-structural protein 3 (NSP3) mRNA gc
aggagaaagcuuaccauggcccccaccaaggugaccuucggcgacgacacggucaucgaggugcagggguacaagagcgugaacaucaccuucgagcuggacgagcgcaucgacaagguccucaacgagaagugcuccgccuacaccguggagcugggcaccgaggugaacgaguucgcgugcgucguggccgacgccgugaucaagacgcugcagccggucagcgagcuccugaccccccuggggaucgaccucgacgagugguccauggccaccuacuaccuguucgacgagagcggcgaguucaagcuggccucccacauguacugcagcuucuacccccccgacgaggacgaggaggagggggacugcgaggaggaggaguucgagccguccacccaguacgaguacggcacggaggacgacuaccagggcaagccccucgaguucggggcgaccagcgccgcccugcagcccgaggaggagcaggaggaggacuggcuggacgacgacucccagcagaccgugggccagcaggacgggagcgaggacaaccagaccacgaccauccagaccaucguggagguccagccccagcucgagauggagcugaccccgguggugcagacgaucgaggucaacuccuucagcggcuaccugaagcucaccgacaacguguacaucaagaacgccgacaucguggaggaggcgaagaaggucaagcccaccgugguggucaacgccgccaacguguaccugaagcacgggggcggcguggccggggcccugaacaaggcgaccaacaacgccaugcaggucgaguccgacgacuacaucgccacgaacggcccccucaagguggggggcagcugcguccuguccggccacaaccuggccaagcacugccuccacgugguggggcccaacgucaacaagggcgaggacauccagcugcugaagagcgccuacgagaacuucaaccagcacgaggugcuccuggcgccgcugcucuccgccgggaucuucggcgccgaccccauccacagccugcgggugugcgucgacaccgugcgcaccaacguguaccuggccgucuucgacaagaaccucuacgacaagcugguguccagcuuccuggagaugaagagcgagaagcagguggagcagaagaucgccgagauccccaaggaggaggucaagcccuucaucaccgaguccaagccgagcguggagcagcggaagcaggacgacaagaagaucaaggcgugcguggaggaggucacgaccacccucgaggagaccaaguuccugacggagaaccugcuccuguacaucgacaucaacgggaaccugcaccccgacuccgccacccucgugagcgacaucgacaucaccuuccugaagaaggacgcccccuacaucgugggcgacgucgugcaggagggcgugcugaccgccgucgugauccccacgaagaaggccgggggcaccaccgagaugcucgcgaaggcccugcgcaaggugccgaccgacaacuacaucacgaccuaccccgggcagggccugaacggguacaccgucgaggaggccaagaccgugcucaagaagugcaaguccgccuucuacauccugcccagcaucaucuccaacgagaagcaggagauccugggcaccgugagcuggaaccuccgggagaugcuggcgcacgccgaggagacgcgcaagcugaugcccgucugcguggagaccaaggccaucguguccaccauccagcggaaguacaagggcaucaagauccaggagggggucguggacuacggcgcccgcuucuacuucuacaccagcaagaucacgguggccucccugaucaacacccucaacgaccugaacgagacccuggucaccaugccgcucggguacgugacgcacggccugaaccuggaggaggcggcccgguacaugcgcagccucaaggugcccgccaccgucuccgugagcucccccgacgccgugaccgccuacaacggguaccugaccagcuccagcaagacgcccgaggagcacuucaucgagaccaucucccuggcgggcagcuacaaggacuggagcuacuccggccagagcacccagcucgggaucgaguuccugaagcggggcgacaaguccgucuacuacaccagcaacccgacgaccuuccaccuggacggggaggugaucaccuucgacaaccucaagacccugcugucccuccgcgaggugcggacgaucaaggucuucaccaccguggacaacaucaaccugcacacccagguggucgacaugagcaugacguacggccagcaguucggccccaccuaccuggacggggccgacgugaccaagaucaagccccacaacucccacgagggcaagaccuucuacgugcucccgaacgacgacacgcugcgcgucgaggccuucgaguacuaccacaccaccgaccccagcuuccuggggcgguacauguccgcccucaaccacaccaagaaguggaaguacccccaggugaacggccugacgagcaucaagugggccgacaacaacugcuaccuggcgaccgcccuccugacccugcagcagaucgagcucaaguucaaccccccggcccugcaggacgccuacuaccgcgcgcgggccggggaggccgccaacuucugcgcccugauccucgcguacugcaacaagaccgugggcgagcugggcgacguccgcgagacgauguccuaccuguuccagcacgccaaccucgacagcugcaagcgggugcugaacgucgugugcaagaccugcgggcagcagcagaccacccugaagggcguggaggccgucauguacauggggacccucuccuacgagcaguucaagaagggcgugcagauccccugcacgugcgggaagcaggccaccaaguaccuggugcagcaggagagccccuucgucaugauguccgcccccccggcgcaguacgagcugaagcacggcaccuucaccugcgccagcgaguacacgggcaacuaccagugcgggcacuacaagcacaucaccuccaaggagacccucuacugcaucgacggcgcccugcugaccaagagcagcgaguacaaggggcccaucacggacguguucuacaaggagaacuccuacaccaccaccaucaagcccgugacguacaagcucgacggcgucgugugcaccgagaucgaccccaagcuggacaacuacuacaagaaggacaacagcuacuucaccgagcagccgaucgaccuggugcccaaccagcccuaccccaacgccuccuucgacaacuucaaguucgucugcgacaacaucaaguucgccgacgaccucaaccagcugaccggguacaagaagccggcgagccgcgagcugaaggugacguucuuccccgaccucaacggcgacguggucgccaucgacuacaagcacuacacccccuccuucaagaagggcgccaagcugcugcacaagcccaucguguggcacgugaacaacgccaccaacaaggcgaccuacaagccgaacacguggugcauccggugccucuggagcaccaagcccgucgagaccuccaacagcuucgacgugcugaaguccgaggacgcccaggggauggacaaccuggccugcgaggaccucaagcccgugagcgaggaggucguggagaaccccaccauccagaaggacgugcuggagugcaacgucaagacgaccgagguggugggcgacaucauccugaagccggccaacaacucccucaagaucaccgaggaggucgggcacaccgaccugauggccgcguacguggacaacagcucccugacgaucaagaagcccaacgagcucagccgcgugcugggccugaagacccucgccacccacgggcuggccgccgucaacuccgugcccugggacaccaucgccaacuacgcgaagccguuccugaacaagguggucagcacgaccaccaacaucgugacccgcugccucaaccgggugugcacgaacuacaugcccuacuucuucacccugcugcuccagcugugcaccuucacccgcuccaccaacagccggaucaaggccuccaugcccacgaccaucgccaagaacaccgucaagagcgugggcaaguucugccuggaggccagcuucaacuaccucaagucccccaacuucagcaagcugaucaacaucaucaucugguuccugcuccuguccgugugccugggcagccucaucuacuccaccgccgcgcuggggguccugaugagcaaccucggcaugccguccuacugcacgggguaccgcgagggcuaccugaacagcaccaacgugaccaucgccaccuacugcacgggcuccauccccugcagcgugugccuguccgggcucgacagccuggacaccuaccccucccuggagaccauccagaucaccaucagcuccuucaagugggaccucacggccuucggccuggucgccgagugguuccuggccuacauccucuucacccgguucuucuacgugcuggggcuggcggccaucaugcagcucuucuucagcuacuucgccgugcacuucaucuccaacagcuggcugauguggcugaucaucaaccugguccagauggcccccaucuccgcgauggugcgcauguacaucuucuucgccagcuucuacuacguguggaagagcuacguccacgugguggacggcugcaacuccagcaccugcaugaugugcuacaagcggaaccgcgccacccgggucgagugcacgaccaucgugaacgggguccgccgguccuucuacguguacgccaacggcggcaagggguucugcaagcuccacaacuggaacugcgugaacugcgacaccuucugcgccggcagcaccuucaucuccgacgaggucgcgcgcgaccugagccugcaguucaagcggccgaucaaccccacggaccaguccagcuacaucguggacuccgugaccgucaagaacgggagcauccaccucuacuucgacaaggccggccagaagaccuacgagcgccacucccugagccacuucgugaaccuggacaaccuccgggccaacaacaccaaggggucccugcccaucaacgugaucgucuucgacggcaagagcaagugcgaggaguccagcgccaaguccgccagcguguacuacucccagcugaugugccagcccauccuccugcuggaccaggcgcucgugagcgacgucggcgacagcgccgagguggccgugaagauguucgacgccuacgucaacacguucuccagcaccuucaacgugccgauggagaagcugaagacccugguggccaccgcggaggccgagcucgccaagaacgucucccuggacaacgugcugagcacguucaucuccgccgcgcgccagggguucguggacagcgacgucgagaccaaggacgugguggagugccucaagcugucccaccagagcgacaucgaggucaccggcgacuccugcaacaacuacaugcugaccuacaacaagguggagaacaugacgccccgggaccucggggccugcaucgacugcagcgcccgccacaucaacgcccagguggccaagucccacaacaucgcgcugaucuggaacgucaaggacuucaugagccuguccgagcagcuccggaagcagauccgcagcgccgccaagaagaacaaccugcccuucaagcugaccugcgccaccacccgccagguggugaacgucgugacgaccaagaucgcccucaagggcgggugaggacuaguuauaagacugacuagcccgaugggccucccaacgggcccuccuccccuccuugcaccgagauuaauaaaaaaaaaaaaaaaaaaaaaaaaaaaaaaaaaaaaaaaaaaaaaaaaaaaaaaaaaaaaaaaaugcaucccccccccccccccccccccccccccccccaaaggcucuuuucagagccaccagaauu

SEQ ID NO: 21718 - RNA, 6058 nt, Artificial Sequence
  SARS-CoV-2__MT757105.1__non-structural protein 3 (NSP3) mRNA gc
aggagaaagcuuaccauggcccccaccaaggugaccuucggcgacgacacggucaucgaggugcagggguacaagagcgugaacaucaccuucgagcuggacgagcgcaucgacaagguccucaacgagaagugcuccgccuacaccguggagcugggcaccgaggugaacgaguucgcgugcgucguggccgacgccgugaucaagacgcugcagccggucagcgagcuccugaccccccuggggaucgaccucgacgagugguccauggccaccuacuaccuguucgacgagagcggcgaguucaagcuggccucccacauguacugcagcuucuacccccccgacgaggacgaggaggagggggacugcgaggaggaggaguucgagccguccacccaguacgaguacggcacggaggacgacuaccagggcaagccccucgaguucggggcgaccagcgccgcccugcagcccgaggaggagcaggaggaggacuggcuggacgacgacucccagcagaccgugggccagcaggacgggagcgaggacaaccagaccacgaccauccagaccaucguggagguccagccccagcucgagauggagcugaccccgguggugcagacgaucgaggucaacuccuucagcggcuaccugaagcucaccgacaacguguacaucaagaacgccgacaucguggaggaggcgaagaaggucaagcccaccgugguggucaacgccgccaacguguaccugaagcacgggggcggcguggccggggcccugaacaaggcgaccaacaacgccaugcaggucgaguccgacgacuacaucgccacgaacggcccccucaagguggggggcagcugcguccuguccggccacaaccuggccaagcacugccuccacgugguggggcccaacgucaacaagggcgaggacauccagcugcugaagagcgccuacgagaacuucaaccagcacgaggugcuccuggcgccgcugcucuccgccgggaucuucggcgccgaccccauccacagccugcgggugugcgucgacaccgugcgcaccaacguguaccuggccgucuucgacaagaaccucuacgacaagcugguguccagcuuccuggagaugaagagcgagaagcagguggagcagaagaucgccgagauccccaaggaggaggucaagcccuucaucaccgaguccaagccgagcguggagcagcggaagcaggacgacaagaagaucaaggcgugcguggaggaggucacgaccacccucgaggagaccaaguuccugacggagaaccugcuccuguacaucgacaucaacgggaaccugcaccccgacuccgccacccucgugagcgacaucgacaucaccuuccugaagaaggacgcccccuacaucgugggcgacgucgugcaggagggcgugcugaccgccgucgugauccccacgaagaaggccgggggcaccaccgagaugcucgcgaaggcccugcgcaaggugccgaccgacaacuacaucacgaccuaccccgggcagggccugaacggguacaccgucgaggaggccaagaccgugcucaagaagugcaaguccgccuucuacauccugcccagcaucaucuccaacgagaagcaggagauccugggcaccgugagcuggucccuccgggagaugcuggcgcacgccgaggagacgcgcaagcugaugcccgucugcguggagaccaaggccaucgugagcaccauccagcggaaguacaagggcaucaagauccaggagggggucguggacuacggcgcccgcuucuacuucuacaccuccaagacgaccguggccagccugaucaacacccucaacgaccugaacgagacccuggucacgaugccgcucggguacgugacccacggccugaaccuggaggaggcggcccgguacaugcgcucccucaaggugcccgccaccgucagcguguccagccccgacgccgugaccgccuacaacggguaccugacguccagcuccaagacccccgaggagcacuucaucgagaccaucagccuggcgggcagcuacaaggacugguccuacagcggccaguccacccagcucgggaucgaguuccugaagcggggcgacaagagcgucuacuacacguccaacccgaccaccuuccaccuggacggggaggugaucaccuucgacaaccucaagacgcugcugagccuccgcgaggugcggaccaucaaggucuucaccaccguggacaacaucaaccugcacacgcagguggucgacauguccaugaccuacggccagcaguucggccccaccuaccuggacggggccgacgugaccaagaucaagccccacaacagccacgagggcaagacguucuacgugcucccgaacgacgacacccugcgcgucgaggccuucgaguacuaccacaccaccgaccccuccuuccuggggcgguacaugagcgcccucaaccacacgaagaaguggaaguacccccaggugaacggccugaccuccaucaagugggccgacaacaacugcuaccuggcgaccgcccuccugacccugcagcagaucgagcucaaguucaaccccccggcccugcaggacgccuacuaccgcgcgcgggccggggaggccgccaacuucugcgcccugauccucgcguacugcaacaagacggugggcgagcugggcgacguccgcgagaccaugagcuaccuguuccagcacgccaaccucgacuccugcaagcgggugcugaacgucgugugcaagaccugcgggcagcagcagaccacccugaagggcguggaggccgucauguacauggggacgcucagcuacgagcaguucaagaagggcgugcagauccccugcaccugcgggaagcaggccaccaaguaccuggugcagcaggagucccccuucgucaugaugagcgcccccccggcgcaguacgagcugaagcacggcaccuucacgugcgccuccgaguacaccggcaacuaccagugcgggcacuacaagcacaucaccagcaaggagacccucuacugcaucgacggcgcccugcugacgaagagcuccgaguacaaggggcccaucaccgacguguucuacaaggagaacagcuacaccaccacgaucaagcccgugaccuacaagcucgacggcgucgugugcaccgagaucgaccccaagcuggacaacuacuacaagaaggacaacuccuacuucaccgagcagccgaucgaccuggugcccaaccagcccuaccccaacgccagcuucgacaacuucaaguucgucugcgacaacaucaaguucgccgacgaccucaaccagcugacgggguacaagaagccggcgucccgcgagcugaaggugaccuucuuccccgaccucaacggcgacguggucgccaucgacuacaagcacuacacccccagcuucaagaagggcgccaagcugcugcacaagcccaucguguggcacgugaacaacgccaccaacaaggcgacguacaagccgaacaccuggugcauccggugccucugguccaccaagcccgucgagaccagcaacuccuucgacgugcugaagagcgaggacgcccaggggauggacaaccuggccugcgaggaccucaagcccguguccgaggaggucguggagaaccccacgauccagaaggacgugcuggagugcaacgucaagaccaccgagguggugggcgacaucauccugaagccggccaacaacagccucaagaucaccgaggaggucgggcacacggaccugauggccgcguacguggacaacuccagccugaccaucaagaagcccaacgagcucucccgcgugcugggccugaagacccucgccacccacgggcuggccgccgucaacagcgugcccugggacacgaucgccaacuacgcgaagccguuccugaacaagguggucuccaccaccaccaacaucgugacgcgcugccucaaccgggugugcaccaacuacaugcccuacuucuucacccugcugcuccagcugugcaccuucacccgcagcacgaacucccggaucaaggccagcaugcccaccaccaucgccaagaacaccgucaagagcgugggcaaguucugccuggaggccuccuucaacuaccucaagagccccaacuucuccaagcugaucaacaucaucaucugguuccugcuccugagcgugugccugggcucccucaucuacagcacggccgcgcuggggguccugauguccaaccucggcaugccgagcuacugcaccggguaccgcgagggcuaccugaacuccaccaacgugaccaucgccacguacugcaccggcagcauccccugcuccgugugccugagcgggcucgacucccuggacaccuaccccagccuggagaccauccagaucacgaucuccagcuucaagugggaccucaccgccuucggccuggucgccgagugguuccuggccuacauccucuucacccgguucuucuacgugcuggggcuggcggccaucaugcagcucuucuucuccuacuucgccgugcacuucaucagcaacuccuggcugauguggcugaucaucaaccugguccagauggcccccaucagcgcgauggugcgcauguacaucuucuucgccagcuucuacuacguguggaaguccuacguccacgugguggacggcugcaacagcuccaccugcaugaugugcuacaagcggaaccgcgccacgcgggucgagugcaccaccaucgugaacgggguccgccggagcuucuacguguacgccaacggcggcaagggguucugcaagcuccacaacuggaacugcgugaacugcgacaccuucugcgccggcuccacguucaucagcgacgaggucgcgcgcgaccugucccugcaguucaagcggccgaucaaccccaccgaccagagcuccuacaucguggacagcgugaccgucaagaacggguccauccaccucuacuucgacaaggccggccagaagaccuacgagcgccacagccugucccacuucgugaaccuggacaaccuccgggccaacaacacgaaggggagccugcccaucaacgugaucgucuucgacggcaaguccaagugcgaggagagcuccgccaagagcgccuccguguacuacagccagcugaugugccagcccauccuccugcuggaccaggcgcucgugagcgacgucggcgacuccgccgagguggccgugaagauguucgacgccuacgucaacaccuucagcuccaccuucaacgugccgauggagaagcugaagacccugguggccacggcggaggccgagcucgccaagaacgucagccuggacaacgugcuguccaccuucaucagcgccgcgcgccagggguucguggacuccgacgucgagaccaaggacgugguggagugccucaagcugagccaccaguccgacaucgaggucaccggcgacagcugcaacaacuacaugcugacguacaacaagguggagaacaugaccccccgggaccucggggccugcaucgacugcuccgcccgccacaucaacgcccagguggccaagagccacaacaucgcgcugaucuggaacgucaaggacuucaugucccugagcgagcagcuccggaagcagauccgcuccgccgccaagaagaacaaccugcccuucaagcugaccugcgccaccacgcgccagguggugaacgucgugaccaccaagaucgcccucaagggcgggugaggacuaguuauaagacugacuagcccgaugggccucccaacgggcccuccuccccuccuugcaccgagauuaauaaaaaaaaaaaaaaaaaaaaaaaaaaaaaaaaaaaaaaaaaaaaaaaaaaaaaaaaaaaaaaaaugcaucccccccccccccccccccccccccccccccaaaggcucuuuucagagccaccagaauu

SEQ ID NO: 21719 - RNA, 6058 nt, Artificial Sequence
  SARS-CoV-2__MT745584.1__non-structural protein 3 (NSP3) mRNA gc
aggagaaagcuuaccauggcccccaccaaggugaccuucggcgacgacacggucaucgaggugcagggguacaagagcgugaacaucaccuucgagcuggacgagcgcaucgacaagguccucaacgagaagugcuccgccuacaccguggagcugggcaccgaggugaacgaguucgcgugcgucguggccgacgccgugaucaagacgcugcagccggucagcgagcuccugaucccccuggggaucgaccucgacgagugguccauggccaccuacuaccuguucgacgagagcggcgaguucaagcuggccucccacauguacugcagcuucuacccccccgacgaggacgaggaggagggggacugcgaggaggaggaguucgagccguccacccaguacgaguacggcaccgaggacgacuaccagggcaagccccucgaguucggggcgacgagcgccgcccugcagcccgaggaggagcaggaggaggacuggcuggacgacgacucccagcagaccgugggccagcaggacgggagcgaggacaaccagaccaccacgauccagaccaucguggagguccagccccagcucgagauggagcugaccccgguggugcagaccaucgaggucaacuccuucagcggcuaccugaagcucacggacaacguguacaucaagaacgccgacaucguggaggaggcgaagaaggucaagcccaccgugguggucaacgccgccaacguguaccugaagcacgggggcggcguggccggggcccugaacaaggcgaccaacaacgccaugcaggucgaguccgacgacuacaucgccaccaacggcccccucaagguggggggcagcugcguccuguccggccacaaccuggccaagcacugccuccacgugguggggcccaacgucaacaagggcgaggacauccagcugcugaagagcgccuacgagaacuucaaccagcacgaggugcuccuggcgccgcugcucuccgccgggaucuucggcgccgaccccauccacagccugcgggugugcgucgacacggugcgcaccaacguguaccuggccgucuucgacaagaaccucuacgacaagcugguguccagcuuccuggagaugaagagcgagaagcagguggagcagaagaucgccgagauccccaaggaggaggucaagcccuucaucaccgaguccaagccgagcguggagcagcggaagcaggacgacaagaagaucaaggcgugcguggaggaggucaccacgacccucgaggagaccaaguuccugaccgagaaccugcuccuguacaucgacaucaacgggaaccugcaccccgacuccgccacgcucgugagcgacaucgacaucaccuuccugaagaaggacgcccccuacaucgugggcgacgucgugcaggagggcgugcugaccgccgucgugauccccaccaagaaggccgggggcacgaccgagaugcucgcgaaggcccugcgcaaggugccgaccgacaacuacaucaccacguaccccgggcagggccugaacggguacaccgucgaggaggccaagaccgugcucaagaagugcaaguccgccuucuacauccugcccagcaucaucuccaacgagaagcaggagauccugggcaccgugagcuggaaccuccgggagaugcuggcgcacgccgaggagacccgcaagcugaugcccgucugcguggagacgaaggccaucguguccaccauccagcggaaguacaagggcaucaagauccaggagggggucguggacuacggcgcccgcuucuacuucuacaccagcaagaccacgguggccucccugaucaacacccucaacgaccugaacgagacccuggucaccaugccgcucggguacgugacgcacggccugaaccuggaggaggcggcccgguacaugcgcagccucaaggugcccgccaccgucuccgugagcucccccgacgccgugaccgccuacaacggguaccugaccagcuccagcaagacgcccgaggagcacuucaucgagaccaucucccuggcgggcagcuacaaggacuggagcuacuccggccagagcacccagcucgggaucgaguuccugaagcggggcgacaaguccgucuacuacaccagcaacccgacgaccuuccaccuggacggggaggugaucaccuucgacaaccucaagacccugcugucccuccgcgaggugcggacgaucaaggucuucaccaccguggacaacaucaaccugcacacccagguggucgacaugagcaugacguacggccagcaguucggccccaccuaccuggacggggccgacgugaccaagaucaagccccacaacucccacgagggcaagaccuucuacgugcucccgaacgacgacacgcugcgcgucgaggccuucgaguacuaccacaccaccgaccccagcuuccuggggcgguacauguccgcccucaaccacaccaagaaguggaaguacccccaggugaacggccugacgagcaucaagugggccgacaacaacugcuaccuggcgaccgcccuccugacccugcagcagaucgagcucaaguucaaccccccggcccugcaggacgccuacuaccgcgcgcgggccggggaggccgccaacuucugcgcccugauccucgcguacugcaacaagaccgugggcgagcugggcgacguccgcgagacgauguccuaccuguuccagcacgccaaccucgacagcugcaagcgggugcugaacgucgugugcaagaccugcgggcagcagcagaccacccugaagggcguggaggccgucauguacauggggacccucuccuacgagcaguucaagaagggcgugcagauccccugcacgugcgggaagcaggccaccaaguaccuggugcagcaggagagccccuucgucaugauguccgcccccccggcgcaguacgagcugaagcacggcaccuucaccugcgccagcgaguacacgggcaacuaccagugcgggcacuacaagcacaucaccuccaaggagacccucuacugcaucgacggcgcccugcugaccaagagcagcgaguacaaggggcccaucacggacguguucuacaaggagaacuccuacaccaccaccaucaagcccgugacguacaagcucgacggcgucgugugcaccgagaucgaccccaagcuggacaacuacuacaagaaggacaacagcuacuucaccgagcagccgaucgaccuggugcccaaccagcccuaccccaacgccuccuucgacaacuucaaguucgucugcgacaacaucaaguucgccgacgaccucaaccagcugaccggguacaagaagccggcgagccgcgagcugaaggugacguucuuccccgaccucaacggcgacguggucgccaucgacuacaagcacuacacccccuccuucaagaagggcgccaagcugcugcacaagcccaucguguggcacgugaacaacgccaccaacaaggcgaccuacaagccgaacacguggugcauccggugccucuggagcaccaagcccgucgagaccuccaacagcuucgacgugcugaaguccgaggacgcccaggggauggacaaccuggccugcgaggaccucaagcccgugagcgaggaggucguggagaaccccaccauccagaaggacgugcuggagugcaacgucaagacgaccgagguggugggcgacaucauccugaagccggccaacaacucccucaagaucaccgaggaggucgggcacaccgaccugauggccgcguacguggacaacagcucccugacgaucaagaagcccaacgagcucagccgcgugcugggccugaagacccucgccacccacgggcuggccgccgucaacuccgugcccugggacaccaucgccaacuacgcgaagccguuccugaacaagguggucagcacgaccaccaacaucgugacccgcugccucaaccgggugugcacgaacuacaugcccuacuucuucacccugcugcuccagcugugcaccuucacccgcuccaccaacagccggaucaaggccuccaugcccacgaccaucgccaagaacaccgucaagagcgugggcaaguucugccuggaggccagcuucaacuaccucaagucccccaacuucagcaagcugaucaacaucaucaucugguuccugcuccuguccgugugccugggcagccucaucuacuccaccgccgcgcuggggguccugaugagcaaccucggcaugccguccuacugcacgggguaccgcgagggcuaccugaacagcaccaacgugaccaucgccaccuacugcacgggcuccauccccugcagcgugugccuguccgggcucgacagccuggacaccuaccccucccuggagaccauccagaucaccaucagcuccuucaagugggaccucacggccuucggccuggucgccgagugguuccuggccuacauccucuucacccgguucuucuacgugcuggggcuggcggccaucaugcagcucuucuucagcuacuucgccgugcacuucaucuccaacagcuggcugauguggcugaucaucaaccugguccagauggcccccaucuccgcgauggugcgcauguacaucuucuucgccagcuucuacuacguguggaagagcuacguccacgugguggacggcugcaacuccagcaccugcaugaugugcuacaagcggaaccgcgccacccgggucgagugcacgaccaucgugaacgggguccgccgguccuucuacguguacgccaacggcggcaagggguucugcaagcuccacaacuggaacugcgugaacugcgacaccuucugcgccggcagcaccuucaucuccgacgaggucgcgcgcgaccugagccugcaguucaagcggccgaucaaccccacggaccaguccagcuacaucguggacuccgugaccgucaagaacgggagcauccaccucuacuucgacaaggccggccagaagaccuacgagcgccacucccugagccacuucgugaaccuggacaaccuccgggccaacaacaccaaggggucccugcccaucaacgugaucgucuucgacggcaagagcaagugcgaggaguccagcgccaaguccgccagcguguacuacucccagcugaugugccagcccauccuccugcuggaccaggcgcucgugagcgacgucggcgacagcgccgagguggccgugaagauguucgacgccuacgucaacacguucuccagcaccuucaacgugccgauggagaagcugaagacccugguggccaccgcggaggccgagcucgccaagaacgucucccuggacaacgugcugagcacguucaucuccgccgcgcgccagggguucguggacagcgacgucgagaccaaggacgugguggagugccucaagcugucccaccagagcgacaucgaggucaccggcgacuccugcaacaacuacaugcugaccuacaacaagguggagaacaugacgccccgggaccucggggccugcaucgacugcagcgcccgccacaucaacgcccacguggccaagucccacaacaucgcgcugaucuggaacgucaaggacuucaugagccuguccgagcagcuccggaagcagauccgcagcgccgccaagaagaacaaccugcccuucaagcugaccugcgccaccacccgccagguggugaacgucgugacgaccaagaucgcccucaagggcgggugaggacuaguuauaagacugacuagcccgaugggccucccaacgggcccuccuccccuccuugcaccgagauuaauaaaaaaaaaaaaaaaaaaaaaaaaaaaaaaaaaaaaaaaaaaaaaaaaaaaaaaaaaaaaaaaaugcaucccccccccccccccccccccccccccccccaaaggcucuuuucagagccaccagaauu

SEQ ID NO: 21720 - RNA, 6058 nt, Artificial Sequence
  SARS-CoV-2__MT745648.1__non-structural protein 3 (NSP3) mRNA gc
aggagaaagcuuaccauggcccccaccaaggugaccuucggcgacgacacggucaucgaggugcagggguacaagagcgugaacaucaccuucgagcuggacgagcgcaucgacaagguccucaacgagaagugcuccgccuacaccguggagcugggcaccgaggugaacgaguucgcgugcgucguggccgacgccgugaucaagacgcugcagccggucagcgagcuccugaccccccuggggaucgaccucgacgagugguccauggccaccuacuaccuguucgacgagagcggcgaguucaagcuggccucccacauguacugcagcuucuacccccccgacgaggacgaggaggagggggacugcgaggaggaggaguucgagccguccacccaguacgaguacggcacggaggacgacuaccagggcaagccccucgaguucggggcgaccagcgccgcccugcagcccgaggaggagcaggaggaggacuggcuggacgacgacucccagcagaccgugggccagcaggacgggagcgaggacaaccagaccacgaccauccagaccaucguggagguccagccccagcucgagauggagcugaccccgguggugcagacgaucgaggucaacuccuucagcggcuaccugaagcucaccgacaacguguacaucaagaacgccgacaucguggaggaggcgaagaaggucaagcccaccgugguggucaacgccgccaacguguaccugaagcacgggggcggcguggccggggcccugaacaaggcgaccaacaacgccaugcaggucgaguccgacgacuacaucgccacgaacggcccccucaagguggggggcagcugcguccuguccggccacaaccuggccaagcacugccuccacgugguggggcccaacgucaacaagggcgaggacauccagcugcugaagagcgccuacgagaacuucaaccagcacgaggugcuccuggcgccgcugcucuccgccgggaucuucggcgccgaccccauccacagccugcgggugugcgucgacaccgugcgcaccaacguguaccuggccgucuucgacaagaaccucuacgacaagcugguguccagcuuccuggagaugaagagcgagaagcagguggagcagaagaucgccgagauccccaaggaggaggucaagcccuucaucaccgaguccaagccgagcguggagcagcggaagcaggacgacaacaagaucaaggcgugcguggaggaggucacgaccacccucgaggagaucaaguuccugaccgagaaccugcuccuguacaucgacaucaacgggaaccugcaccccgacuccgccacgcucgugagcgacaucgacaucaccuuccugaagaaggacgcccccuacaucgugggcgacgucgugcaggagggcgugcugaccgccgucgugauccccaccaagaaggccgggggcacgaccgagaugcucgcgaaggcccugcgcaaggugccgaccgacaacuacaucaccacguaccccgggcagggccugaacggguacaccgucgaggaggccaagaccgugcucaagaagugcaaguccgccuucuacauccugcccagcaucaucuccaacgagaagcaggagauccugggcaccgugagcuggaaccuccgggagaugcuggcgcacgccgaggagacccgcaagcugaugcccgucugcguggagacgaaggccaucguguccaccauccagcggaaguacaagggcaucaagauccaggagggggucguggacuacggcgcccgcuucuacuucuacaccagcaagaccacgguggccucccugaucaacacccucaacgaccugaacgagacccuggucaccaugccgcucggguacgugacgcacggccugaaccuggaggaggcggcccgguacaugcgcagccucaaggugcccgccaccgucuccgugagcucccccgacgccgugaccgccuacaacggguaccugaccagcuccagcaagacgcccgaggagcacuucaucgagaccaucucccuggcgggcagcuacaaggacuggagcuacuccggccagagcacccagcucgggaucgaguuccugaagcggggcgacaaguccgucuacuacaccagcaacccgacgaccuuccaccuggacggggaggugaucaccuucgacaaccucaagacccugcugucccuccgcgaggugcggacgaucaaggucuucaccaccguggacaacaucaaccugcacacccagguggucgacaugagcaugacguacggccagcaguucggccccaccuaccuggacggggccgacgugaccaagaucaagccccacaacucccacgagggcaagaccuucuacgugcucccgaacgacgacacgcugcgcgucgaggccuucgaguacuaccacaccaccgaccccagcuuccuggggcgguacauguccgcccucaaccacaccaagaaguggaaguacccccaggugaacggccugacgagcaucaagugggccgacaacaacugcuaccuggcgaccgcccuccugacccugcagcagaucgagcucaaguucaaccccccggcccugcaggacgccuacuaccgcgcgcgggccggggaggccgccaacuucugcgcccugauccucgcguacugcaacaagaccgugggcgagcugggcgacguccgcgagacgauguccuaccuguuccagcacgccaaccucgacagcugcaagcgggugcugaacgucgugugcaagaccugcgggcagcagcagaccacccugaagggcguggaggccgucauguacauggggacccucuccuacgagcaguucaagaagggcgugcagauccccugcacgugcgggaagcaggccaccaaguaccuggugcagcaggagagccccuucgucaugauguccgcccccccggcgcaguacgagcugaagcacggcaccuucaccugcgccagcgaguacacgggcaacuaccagugcgggcacuacaagcacaucaccuccaaggagacccucuacugcaucgacggcgcccugcugaccaagagcagcgaguacaaggggcccaucacggacguguucuacaaggagaacuccuacaccaccaccaucaagcccgugacguacaagcucgacggcgucgugugcaccgagaucgaccccaagcuggacaacuacuacaagaaggacaacagcuacuucaccgagcagccgaucgaccuggugcccaaccagcccuaccccaacgccuccuucgacaacuucaaguucgucugcgacaacaucaaguucgccgacgaccucaaccagcugaccggguacaagaagccggcgagccgcgagcugaaggugacguucuuccccgaccucaacggcgacguggucgccaucgacuacaagcacuacacccccuccuucaagaagggcgccaagcugcugcacaagcccaucguguggcacgugaacaacgccaccaacaaggcgaccuacaagccgaacacguggugcauccggugccucuggagcaccaagcccgucgagaccuccaacagcuucgacgugcugaaguccgaggacgcccaggggauggacaaccuggccugcgaggaccucaagcccgugagcgaggaggucguggagaaccccaccauccagaaggacgugcuggagugcaacgucaagacgaccgagguggugggcgacaucauccugaagccggccaacaacucccucaagaucaccgaggaggucgggcacaccgaccugauggccgcguacguggacaacagcucccugacgaucaagaagcccaacgagcucagccgcgugcugggccugaagacccucgccacccacgggcuggccgccgucaacuccgugcccugggacaccaucgccaacuacgcgaagccguuccugaacaagguggucagcacgaccaccaacaucgugacccgcugccucaaccgggugugcacgaacuacaugcccuacuucuucacccugcugcuccagcugugcaccuucacccgcuccaccaacagccggaucaaggccuccaugcccacgaccaucgccaagaacaccgucaagagcgugggcaaguucugccuggaggccagcuucaacuaccucaagucccccaacuucagcaagcugaucaacaucaucaucugguuccugcuccuguccgugugccugggcagccucaucuacuccaccgccgcgcuggggguccugaugagcaaccucggcaugccguccuacugcacgggguaccgcgagggcuaccugaacagcaccaacgugaccaucgccaccuacugcacgggcuccauccccugcagcgugugccuguccgggcucgacagccuggacaccuaccccucccuggagaccauccagaucaccaucagcuccuucaagugggaccucacggccuucggccuggucgccgagugguuccuggccuacauccucuucacccgguucuucuacgugcuggggcuggcggccaucaugcagcucuucuucagcuacuucgccgugcacuucaucuccaacagcuggcugauguggcugaucaucaaccugguccagauggcccccaucuccgcgauggugcgcauguacaucuucuucgccagcuucuacuacguguggaagagcuacguccacgugguggacggcugcaacuccagcaccugcaugaugugcuacaagcggaaccgcgccacccgggucgagugcacgaccaucgugaacgggguccgccgguccuucuacguguacgccaacggcggcaagggguucugcaagcuccacaacuggaacugcgugaacugcgacaccuucugcgccggcagcaccuucaucuccgacgaggucgcgcgcgaccugagccugcaguucaagcggccgaucaaccccacggaccaguccagcuacaucguggacuccgugaccgucaagaacgggagcauccaccucuacuucgacaaggccggccagaagaccuacgagcgccacucccugagccacuucgugaaccuggacaaccuccgggccaacaacaccaaggggucccugcccaucaacgugaucgucuucgacggcaagagcaagugcgaggaguccagcgccaaguccgccagcguguacuacucccagcugaugugccagcccauccuccugcuggaccaggcgcucgugagcgacgucggcgacagcgccgagguggccgugaagauguucgacgccuacgucaacacguucuccagcaccuucaacgugccgauggagaagcugaagacccugguggccaccgcggaggccgagcucgccaagaacgucucccuggacaacgugcugagcacguucaucuccgccgcgcgccagggguucguggacagcgacgucgagaccaaggacgugguggagugccucaagcugucccaccagagcgacaucgaggucaccggcgacuccugcaacaacuacaugcugaccuacaacaagguggagaacaugacgccccgggaccucggggccugcaucgacugcagcgcccgccacaucaacgcccagguggccaagucccacaacaucgcgcugaucuggaacgucaaggacuucaugagccuguccgagcagcuccggaagcagauccgcagcgccgccaagaagaacaaccugcccuucaagcugaccugcgccaccacccgccagguggugaacgucgugacgaccaagaucgcccucaagggcgggugaggacuaguuauaagacugacuagcccgaugggccucccaacgggcccuccuccccuccuugcaccgagauuaauaaaaaaaaaaaaaaaaaaaaaaaaaaaaaaaaaaaaaaaaaaaaaaaaaaaaaaaaaaaaaaaaugcaucccccccccccccccccccccccccccccccaaaggcucuuuucagagccaccagaauu

SEQ ID NO: 21721 - RNA, 6058 nt, Artificial Sequence
  SARS-CoV-2__MT745658.1__non-structural protein 3 (NSP3) mRNA gc
aggagaaagcuuaccauggcccccaccaaggugaccuucggcgacgacacggucaucgaggugcagggguacaagagcgugaacaucaccuucgagcuggacgagcgcaucgacaagguccucaacgagaagugcuccgccuacaccguggagcugggcaccgaggugaacgaguucgcgugcgucguggccgacgccgugaucaagacgcugcagccggucagcgagcuccugaccccccuggggaucgaccucgacgagugguccauggccaccuacuaccuguucgacgagagcggcgaguucaagcuggccucccacauguacugcagcuucuacccccccgacgaggacgaggaggagggggacugcgaggaggaggaguucgagccguccacccaguacgaguacggcacggaggacgacuaccagggcaagccccucgaguucggggcgaccagcgccgcccugcagcccgaggaggagcaggaggaggacuggcuggacgacgacucccagcagaccgugggccagcaggacgggagcgacgacaaccagaccacgaccauccagaccaucguggagguccagccccagcucgagauggagcugaccccgguggugcagacgaucgaggucaacuccuucagcggcuaccugaagcucaccgacaacguguacaucaagaacgccgacaucguggaggaggcgaagaaggucaagcccaccgugguggucaacgccgccaacguguaccugaagcacgggggcggcguggccggggcccugaacaaggcgaccaacaacgccaugcaggucgaguccgacgacuacaucgccacgaacggcccccucaagguggggggcagcugcguccuguccggccacaaccuggccaagcacugccuccacgugguggggcccaacgucaacaagggcgaggacauccagcugcugaagagcgccuacgagaacuucaaccagcacgaggugcuccuggcgccgcugcucuccgccgggaucuucggcgccgaccccauccacagccugcgggugugcgucgacaccgugcgcaccaacguguaccuggccgucuucgacaagaaccucuacgacaagcugguguccagcuuccuggagaugaagagcgagaagcagguggagcagaagaucgccgagauccccaaggaggaggucaagcccuucaucaccgaguccaagccgagcguggagcagcggaagcaggacgacaagaagaucaaggcgugcguggaggaggucacgaccacccucgaggagaccaaguuccugacggagaaccugcuccuguacaucgacaucaacgggaaccugcaccccgacuccgccacccucgugagcgacaucgacaucaccuuccugaagaaggacgcccccuacaucgugggcgacgucgugcaggagggcgugcugaccgccgucgugauccccacgaagaaggccgggggcaccaccgagaugcucgcgaaggcccugcgcaaggugccgaccgacaacuacaucacgaccuaccccgggcagggccugaacggguacaccgucgaggaggccaagaccgugcucaagaagugcaaguccgccuucuacauccugcccagcaucaucuccaacgagaagcaggagauccugggcaccgugagcuggaaccuccgggagaugcuggcgcacgccgaggagacgcgcaagcugaugcccgucugcguggagaccaaggccaucguguccaccauccagcggaaguacaagggcaucaagauccaggagggggucguggacuacggcgcccgcuucuacuucuacaccagcaagacgaccguggccucccugaucaacacccucaacgaccugaacgagacccuggucacgaugccgcucggguacgugacccacggccugaaccuggaggaggcggcccgguacaugcgcagccucaaggugcccgccaccgucuccgugagcucccccgacgccgugaccgccuacaacggguaccugacgagcuccagcaagacccccgaggagcacuucaucgagaccaucucccuggcgggcagcuacaaggacuggagcuacuccggccagagcacccagcucgggaucgaguuccugaagcggggcgacaaguccgucuacuacacgagcaacccgaccaccuuccaccuggacggggaggugaucaccuucgacaaccucaagacgcugcugucccuccgcgaggugcggaccaucaaggucuucaccaccguggacaacaucaaccugcacacgcagguggucgacaugagcaugaccuacggccagcaguucggccccaccuaccuggacggggccgacgugaccaagaucaagccccacaacucccacgagggcaagacguucuacgugcucccgaacgacgacacccugcgcgucgaggccuucgaguacuaccacaccaccgaccccagcuuccuggggcgguacauguccgcccucaaccacacgaagaaguggaaguacccccaggugaacggccugaccagcaucaagugggccgacaacaacugcuaccuggcgaccgugcuccugacccugcagcagaucgagcucaaguucaaccccccggcccugcaggacgccuacuaccgcgcccgggcgggggaggccgccaacuucugcgcccugauccucgccuacugcaacaagacggucggcgagcugggcgacgugcgcgagaccauguccuaccuguuccagcacgcgaaccucgacagcugcaagcggguccugaacguggugugcaagaccugcgggcagcagcagaccacccugaagggcgucgaggccgugauguacauggggacgcucuccuacgagcaguucaagaagggcgugcagauccccugcaccugcgggaagcaggccaccaaguaccugguccagcaggagagccccuucgugaugauguccgcccccccggcccaguacgagcugaagcacggcaccuucacgugcgcgagcgaguacaccggcaacuaccagugcgggcacuacaagcacaucaccuccaaggagacccucuacugcaucgacggcgcccugcugacgaagagcagcgaguacaaggggcccaucaccgacguguucuacaaggagaacuccuacaccaccacgaucaagcccgucaccuacaagcucgacggcguggugugcaccgagaucgaccccaagcuggacaacuacuacaagaaggacaacagcuacuucaccgagcagccgaucgaccugguccccaaccagcccuaccccaacgccuccuucgacaacuucaaguucgugugcgacaacaucaaguucgccgacgaccucaaccagcugacgggguacaagaagccggccagccgcgagcugaaggugaccuucuuccccgaccucaacggcgacgucguggcgaucgacuacaagcacuacacccccuccuucaagaagggcgccaagcugcugcacaagcccaucguguggcacgucaacaacgccaccaacaaggccacguacaagccgaacaccuggugcauccggugccucuggagcaccaagcccguggagaccuccaacagcuucgacgugcugaaguccgaggacgcgcaggggauggacaaccuggccugcgaggaccucaagcccgucagcgaggaggugguggagaaccccacgauccagaaggacguccuggagugcaacgugaagaccaccgagguggucggcgacaucauccugaagccggccaacaacucccucaagaucaccgaggagguggggcacacggaccugauggccgccuacguggacaacagcucccugaccaucaagaagcccaacgagcucagccgcguccugggccugaagacccucgcgacccacgggcuggccgccgugaacuccgugcccugggacacgaucgccaacuacgccaagccguuccugaacaaggucgugagcaccaccaccaacaucgugacgcgcugccucaaccgggucugcaccaacuacaugcccuacuucuucacccugcugcuccagcugugcaccuucacccgcuccacgaacagccggaucaaggcguccaugcccaccaccaucgccaagaacaccgugaagagcgugggcaaguucugccuggaggccagcuucaacuaccucaagucccccaacuucagcaagcugaucaacaucaucaucugguuccugcuccuguccgucugccugggcagccucaucuacuccacggccgcccugggggugcugaugagcaaccucggcaugccguccuacugcaccggguaccgcgagggcuaccugaacagcaccaacgugaccaucgcgacguacugcaccggcuccauccccugcagcgucugccuguccgggcucgacagccuggacaccuaccccucccuggagaccauccagaucacgaucagcuccuucaagugggaccucaccgccuucggccugguggccgagugguuccuggccuacauccucuucacccgguucuucuacgugcuggggcuggccgcgaucaugcagcucuucuucagcuacuucgccguccacuucaucuccaacagcuggcugauguggcugaucaucaaccuggugcagauggcccccaucuccgccauggugcgcauguacaucuucuucgcgagcuucuacuacgucuggaagagcuacgugcacguggucgacggcugcaacuccagcaccugcaugaugugcuacaagcggaaccgcgccacgcggguggagugcaccaccaucgucaacggggugcgccgguccuucuacguguacgccaacggcggcaagggguucugcaagcuccacaacuggaacugcgucaacugcgacaccuucugcgccggcagcacguucaucuccgacgagguggcccgcgaccugagccugcaguucaagcggccgaucaaccccaccgaccaguccagcuacaucguggacuccgucaccgugaagaacgggagcauccaccucuacuucgacaaggcgggccagaagaccuacgagcgccacucccugagccacuucgugaaccuggacaaccuccgggccaacaacacgaaggggucccugcccaucaacgucaucguguucgacggcaagagcaagugcgaggaguccagcgccaaguccgccagcguguacuacucccagcugaugugccagcccauccuccugcuggaccaggcccucgucagcgacgugggcgacagcgcggagguggccgucaagauguucgacgccuacgugaacaccuucuccagcaccuucaacgugccgauggagaagcugaagacccuggucgccacggccgaggcggagcucgccaagaacgugucccuggacaacgugcugagcaccuucaucuccgccgcccgccagggguucgucgacagcgacguggagaccaaggacguggucgagugccucaagcugucccaccagagcgacaucgaggugaccggcgacuccugcaacaacuacaugcugacguacaacaagguggagaacaugaccccccgggaccucggggcgugcaucgacugcagcgcccgccacaucaacgcccaggucgccaagucccacaacaucgcccugaucuggaacgugaaggacuucaugagccuguccgagcagcuccggaagcagauccgcagcgcggccaagaagaacaaccugcccuucaagcugaccugcgccaccacgcgccagguggucaacguggugaccaccaagaucgcccucaagggcgggugaggacuaguuauaagacugacuagcccgaugggccucccaacgggcccuccuccccuccuugcaccgagauuaauaaaaaaaaaaaaaaaaaaaaaaaaaaaaaaaaaaaaaaaaaaaaaaaaaaaaaaaaaaaaaaaaugcaucccccccccccccccccccccccccccccccaaaggcucuuuucagagccaccagaauu

SEQ ID NO: 21722 - RNA, 6058 nt, Artificial Sequence
  SARS-CoV-2__MT745659.1__non-structural protein 3 (NSP3) mRNA gc
aggagaaagcuuaccauggcccccaccaaggugaccuucggcgacgacacggucaucgaggugcagggguacaagagcgugaacaucaccuucgagcuggacgagcgcaucgacaagguccucaacgagaagugcuccgccuacaccguggagcugggcaccgaggugaacgaguucgcgugcgucguggccgacgccgugaucaagacgcugcagccggucagcgagcuccugaccccccuggggaucgaccucgacgagugguccauggccaccuacuaccuguucgacgagagcggcgaguucaagcuggccucccacauguacugcagcuucuacccccccgacgaggacgaggaggagggggacugcgaggaggaggaguucgagccguccacccaguacgaguacggcacggaggacgacuaccagggcaagccccucgaguucggggcgaccagcgccgcccugcagcccgaggaggagcaggaggaggacuggcuggacgacgacucccagcagaccgugggccagcaggacgggagcgaggacaaccagaccacgaccauccagaccaucguggagguccagccccagcucgagauggagcugaccccgguggugcagacgaucgaggucaacuccuucagcggcuaccugaagcucaccgacaacguguacaucaagaacgccgacaucguggaggaggcgaagaaggucaagcccaccgugguggucaacgccgccaacguguaccugaagcacgggggcggcguggccggggcccugaacaaggcgaccaacaacgccaugcaggucgaguccgacgacuacaucgccacgaacggcccccucaagguggggggcagcugcguccuguccggccacaaccuggccaagcacugccuccacgugguggggcccaacgucaacaagggcgaggacauccagcugcugaagagcgccuacgagaacuucaaccagcacgaggugcuccuggcgccgcugcucuccgccgggaucuucggcgccgaccccauccacagccugcgggugugcgucgacaccgugcgcaccaacguguaccuggccgucuucgacaagaaccucuacgacaagcugguguccagcuuccuggagaugaagagcgagaagcagguggagcagaagaucgccgagauccccaaggaggaggucaagcccuucaucaccgaguccaagccgagcguggagcagcggaagcaggacgacaagaagaucaaggcgugcguggaggaggucacgaccacccucgaggagaucaaguuccugaccgagaaccugcuccuguacaucgacaucaacgggaaccugcaccccgacuccgccacgcucgugagcgacaucgacaucaccuuccugaagaaggacgcccccuacaucgugggcgacgucgugcaggagggcgugcugaccgccgucgugauccccaccaagaaggccgggggcacgaccgagaugcucgugaaggcgcugcgcaaggucccgaccgacaacuacaucaccacguaccccgggcagggccugaacggguacaccguggaggaggccaagaccgugcucaagaagugcaaguccgccuucuacauccugcccagcaucaucuccaacgagaagcaggagauccugggcaccgucagcuggaaccuccgggagaugcuggcccacgcggaggagacccgcaagcugaugcccgugugcguggagacgaaggccaucgucuccaccauccagcggaaguacaagggcaucaagauccaggagggggugguggacuacggcgcccgcuucuacuucuacaccagcaagaccacggucgccucccugaucaacacccucaacgaccugaacgagacccuggugaccaugccgcucggguacgugacgcacggccugaaccuggaggaggccgcgcgguacaugcgcagccucaagguccccgccaccguguccgugagcucccccgacgccgucaccgccuacaacggguaccugaccagcuccagcaagacgcccgaggagcacuucaucgagaccaucucccuggccggcagcuacaaggacuggagcuacuccggccagagcacccagcucgggaucgaguuccugaagcggggcgacaaguccguguacuacaccagcaacccgacgaccuuccaccuggacggggaggugaucaccuucgacaaccucaagacccugcugucccuccgcgagguccggacgaucaagguguucaccaccguggacaacaucaaccugcacacccaggucguggacaugagcaugacguacggccagcaguucggccccaccuaccuggacggggcggacgugaccaagaucaagccccacaacucccacgagggcaagaccuucuacguccucccgaacgacgacacgcugcgcguggaggccuucgaguacuaccacaccaccgaccccagcuuccuggggcgguacauguccgcccucaaccacaccaagaaguggaaguacccccaggugaacggccugacgagcaucaagugggccgacaacaacugcuaccuggccaccgcgcuccugacccugcagcagaucgagcucaaguucaaccccccggcccugcaggacgccuacuaccgcgcccgggcgggggaggccgccaacuucugcgcccugauccucgccuacugcaacaagaccgucggcgagcugggcgacgugcgcgagacgauguccuaccuguuccagcacgcgaaccucgacagcugcaagcggguccugaacguggugugcaagaccugcgggcagcagcagaccacccugaagggcgucgaggccgugauguacauggggacccucuccuacgagcaguucaagaagggcgugcagauccccugcacgugcgggaagcaggccaccaaguaccugguccagcaggagagccccuucgugaugauguccgcccccccggcccaguacgagcugaagcacggcaccuucaccugcgcgagcgaguacacgggcaacuaccagugcgggcacuacaagcacaucaccuccaaggagacccucuacugcaucgacggcgcccugcugaccaagagcagcgaguacaaggggcccaucacggacguguucuacaaggagaacuccuacaccaccaccaucaagcccgucacguacaagcucgacggcguggugugcaccgagaucgaccccaagcuggacaacuacuacaagaaggacaacagcuacuucaccgagcagccgaucgaccugguccccaaccagcccuaccccaacgccuccuucgacaacuucaaguucgugugcgacaacaucaaguucgccgacgaccucaaccagcugaccggguacaagaagccggccagccgcgagcugaaggugacguucuuccccgaccucaacggcgacgucguggcgaucgacuacaagcacuacacccccuccuucaagaagggcgccaagcugcugcacaagcccaucguguggcacgucaacaacgccaccaacaaggccaccuacaagccgaacacguggugcauccggugccucuggagcaccaagcccguggagaccuccaacagcuucgacgugcugaaguccgaggacgcgcaggggauggacaaccuggccugcgaggaccucaagcccgucagcgaggaggugguggagaaccccaccauccagaaggacguccuggagugcaacgugaagacgaccgagguggucggcgacaucauccugaagccggccaacaacucccucaagaucaccgaggagguggggcacaccgaccugauggccgccuacguggacaacagcucccugacgaucaagaagcccaacgagcucagccgcguccugggccugaagacccucgcgacccacgggcuggccgccgugaacuccgugcccugggacaccaucgccaacuacgccaagccguuccugaacaaggucgugagcacgaccaccaacaucgugacccgcugccucaaccgggucugcacgaacuacaugcccuacuucuucacccugcugcuccagcugugcaccuucacccgcuccaccaacagccggaucaaggcguccaugcccacgaccaucgccaagaacaccgugaagagcgugggcaaguucugccuggaggccagcuucaacuaccucaagucccccaacuucagcaagcugaucaacaucaucaucugguuccugcuccuguccgucugccugggcagccucaucuacuccaccgccgcccugggggugcugaugagcaaccucggcaugccguccuacugcacgggguaccgcgagggcuaccugaacagcaccaacgugaccaucgcgaccuacugcacgggcuccauccccugcagcgucugccuguccgggcucgacagccuggacaccuaccccucccuggagaccauccagaucaccaucagcuccuucaagugggaccucacggccuucggccugguggccgagugguuccuggccuacauccucuucacccgguucuucuacgugcuggggcuggccgcgaucaugcagcucuucuucagcuacuucgccguccacuucaucuccaacagcuggcugauguggcugaucaucaaccuggugcagauggcccccaucuccgccauggugcgcauguacaucuucuucgcgagcuucuacuacgucuggaagagcuacgugcacguggucgacggcugcaacuccagcaccugcaugaugugcuacaagcggaaccgcgccacccggguggagugcacgaccaucgucaacggggugcgccgguccuucuacguguacgccaacggcggcaagggguucugcaagcuccacaacuggaacugcgucaacugcgacaccuucugcgccggcagcaccuucaucuccgacgagguggcccgcgaccugagccugcaguucaagcggccgaucaaccccacggaccaguccagcuacaucguggacuccgucaccgugaagaacgggagcauccaccucuacuucgacaaggcgggccagaagaccuacgagcgccacucccugagccacuucgugaaccuggacaaccuccgggccaacaacaccaaggggucccugcccaucaacgucaucguguucgacggcaagagcaagugcgaggaguccagcgccaaguccgccagcguguacuacucccagcugaugugccagcccauccuccugcuggaccaggcccucgucagcgacgugggcgacagcgcggagguggccgucaagauguucgacgccuacgugaacacguucuccagcaccuucaacgugccgauggagaagcugaagacccuggucgccaccgccgaggcggagcucgccaagaacgugucccuggacaacgugcugagcacguucaucuccgccgcccgccagggguucgucgacagcgacguggagaccaaggacguggucgagugccucaagcugucccaccagagcgacaucgaggugaccggcgacuccugcaacaacuacaugcugaccuacaacaagguggagaacaugacgccccgggaccucggggcgugcaucgacugcagcgcccgccacaucaacgcccaggucgccaagucccacaacaucgcccugaucuggaacgugaaggacuucaugagccuguccgagcagcuccggaagcagauccgcagcgcggccaagaagaacaaccugcccuucaagcugaccugcgccaccacccgccagguggucaacguggugacgaccaagaucgcccucaagggcgggugaggacuaguuauaagacugacuagcccgaugggccucccaacgggcccuccuccccuccuugcaccgagauuaauaaaaaaaaaaaaaaaaaaaaaaaaaaaaaaaaaaaaaaaaaaaaaaaaaaaaaaaaaaaaaaaaugcaucccccccccccccccccccccccccccccccaaaggcucuuuucagagccaccagaauu

SEQ ID NO: 21723 - RNA, 6058 nt, Artificial Sequence
  SARS-CoV-2__MT745676.1__non-structural protein 3 (NSP3) mRNA gc
aggagaaagcuuaccauggcccccaccaaggugaccuucggcgacgacacggucaucgaggugcagggguacaagagcgugaacaucaccuucgagcuggacgagcgcaucgacaagguccucaacgagaagugcuccgccuacaccguggagcugggcaccgaggugaacgaguucgcgugcgucguggccgacgccgugaucaagacgcugcagccggucagcgagcuccugaccccccuggggaucgaccucgacgagugguccauggccaccuacuaccuguucgacgagagcggcgaguucaagcuggccucccacauguacugcagcuucuacccccccgacgaggacgaggaggagggggacugcgaggaggaggaguucgagccguccacccaguacgaguacggcacggaggacgacuaccagggcaagccccucgaguucggggcgaccagcgccgcccugcagcccgaggaggagcaggaggaggacuggcuggacgacgacucccagcagaccgugggccagcaggacgggagcgaggacaaccagaccacgaccauccagaccaucguggagguccagccccagcucgagauggagcugaccccgguggugcagacgaucgaggucaacuccuucagcggcuaccugaagcucaccgacaacguguacaucaagaacgccgacaucguggaggaggcgaagaaggucaagcccaccgugguggucaacgccgccaacguguaccugaagcacgggggcggcguggccggggcccugaacaaggcgaccaacaacgccaugcaggucgaguccgacgacuacaucgccacgaacggcccccucaagguggggggcagcugcguccuguccggccacaaccuggccaagcacugccuccacgugguggggcccaacgucaacaagggcgaggacauccagcugcugaagagcgccuacgagaacuucaaccagcacgaggugcuccuggcgccgcugcucuccgccgggaucuucggcgccgaccccauccacagccugcgggugugcgucgacaccgugcgcaccaacguguaccuggccgucuucgacaagaaccucuacgacaagcugguguccagcuuccuggagaugaagagcgagaagcagguggagcagaagaucgccgagauccccaaggaggaggucaagcccuucaucaccgaguccaagccgagcguggagcagcggaagcaggacgacaagaagaucaaggcgugcguggaggaggucacgaccacccucgaggagaccaaguuccugacggagaaccugcuccuguacaucgacaucaacgggaaccugcaccccgacuccgccacccucgugagcgacaucgacaucaccuuccugaagaaggacgcccccuacaucgugggcgacgucgugcaggagggcgugcugaccgccgucgugauccccacgaagaaggccgggggcaccaccgagaugcucgcgaaggcccugcgcaaggugccgaccgacaacuacaucacgaccuaccccgggcagggccugaacggguacaccgucgaggaggccaagaccgugcucaagaagugcaaguccgccuucuacauccugcccagcaucaucuccaacgagaagcaggagauccugggcaccgugagcuggaaccuccgggagaugcuggcgcacgccgaggagacgcgcaagcugaugcccgucugcguggagaccaaggccaucguguccaccauccagcggaaguacaagggcaucaagauccaggagggggucguggacuacggcgcccgcuucuacuucuacaccagcaagacgaccguggccucccugaucaacacccucaacgaccugaacgagacccuggucacgaugccgcucggguacgugacccacggccugaaccuggaggaggcggcccgguacaugcgcagccucaaggugcccgccaccgucuccgugagcucccccgacgccgugaccgccuacaacggguaccugacgagcuccagcaagacccccgaggagcacuucaucgagaccaucucccuggcgggcagcuacaaggacuggagcuacuccggccagagcacccagcucgggaucgaguuccugaagcggggcgacaaguccgucuacuacacgagcaacccgaccaccuuccaccuggacggggaggugaucaccuucgacaaccucaagacgcugcugucccuccgcgaggugcggaccaucaaggucuucaccaccguggacaacaucaaccugcacacgcagguggucgacaugagcaugaccuacggccagcaguucggccccaccuaccuggacggggccgacgugaccaagaucaagccccacaacucccacgagggcaagacguucuacgugcucccgaacgacgacacccugcgcgucgaggccuucgaguacuaccacaccaccgaccccagcuuccuggggcgguacauguccgcccucaaccacacgaagaaguggaaguacccccaggugaacggccugaccagcaucaagugggccgacaacaacugcuaccuggcgaccgcccuccugacccugcagcagaucgagcucaaguucaaccccccggcccugcaggacgccuacuaccgcgcgcgggccggggaggccgccaacuucugcgcccugauccucgcguacugcaacaagacggugggcgagcugggcgacguccgcgagaccauguccuaccuguuccagcacgccaaccucgacagcugcaagcgggugcugaacgucgugugcaagaccugcgggcagcagcagaccacccugaagggcguggaggccgucauguacauggggacgcucuccuacgagcaguucaagaagggcgugcagauccccugcaccugcgggaagcaggccaccaaguaccuggugcagcaggagagccccuucgucaugauguccgcccccccggcgcaguacgagcugaagcacggcaccuucacgugcgccagcgaguacaccggcaacuaccagugcgggcacuacaagcacaucaccuccaaggagacccucuacugcaucgacggcgcccugcugacgaagagcagcgaguacaaggggcccaucaccgacguguucuacaaggagaacuccuacaccaccacgaucaagcccgugaccuacaagcucgacggcgucgugugcaccgagaucgaccccaagcuggacaacuacuacaagaaggacaacagcuacuucaccgagcagccgaucgaccuggugcccaaccagcccuaccccaacgccuccuucgacaacuucaaguucgucugcgacaacaucaaguucgccgacgaccucaaccagcugacgggguacaagaagccggcgagccgcgagcugaaggugaccuucuuccccgaccucaacggcgacguggucgccaucgacuacaagcacuacacccccuccuucaagaagggcgccaagcugcugcacaagcccaucguguggcacgugaacaacgccaccaacaaggcgacguacaagccgaacaccuggugcauccggugccucuggagcaagaagcccgucgagaccuccaacagcuucgacgugcugaaguccgaggacgcccaggggauggacaaccuggccugcgaggaccucaagcccgugagcgaggaggucguggagaaccccaccauccagaaggacgugcuggagugcaacgucaagacgaccgagguggugggcgacaucauccugaagccggccaacaacucccucaagaucaccgaggaggucgggcacaccgaccugauggccgcguacguggacaacagcucccugacgaucaagaagcccaacgagcucagccgcgugcugggccugaagacccucgccacccacgggcuggccgccgucaacuccgugcccugggacaccaucgccaacuacgcgaagccguuccugaacaagguggucagcacgaccaccaacaucgugacccgcugccucaaccgggugugcacgaacuacaugcccuacuucuucacccugcugcuccagcugugcaccuucacccgcuccaccaacagccggaucaaggccuccaugcccacgaccaucgccaagaacaccgucaagagcgugggcaaguucugccuggaggccagcuucaacuaccucaagucccccaacuucagcaagcugaucaacaucaucaucugguuccugcuccuguccgugugccugggcagccucaucuacuccaccgccgcgcuggggguccugaugagcaaccucggcaugccguccuacugcacgggguaccgcgagggcuaccugaacagcaccaacgugaccaucgccaccuacugcacgggcuccauccccugcagcgugugccuguccgggcucgacagccuggacaccuaccccucccuggagaccauccagaucaccaucagcuccuucaagugggaccucacggccuucggccuggucgccgagugguuccuggccuacauccucuucacccgguucuucuacgugcuggggcuggcggccaucaugcagcucuucuucagcuacuucgccgugcacuucaucuccaacagcuggcugauguggcugaucaucaaccugguccagauggcccccaucuccgcgauggugcgcauguacaucuucuucgccagcuucuacuacguguggaagagcuacguccacgugguggacggcugcaacuccagcaccugcaugaugugcuacaagcggaaccgcgccacccgggucgagugcacgaccaucgugaacgggguccgccgguccuucuacguguacgccaacggcggcaagggguucugcaagcuccacaacuggaacugcgugaacugcgacaccuucugcgccggcagcaccuucaucuccgacgaggucgcgcgcgaccugagccugcaguucaagcggccgaucaaccccacggaccaguccagcuacaucguggacuccgugaccgucaagaacgggagcauccaccucuacuucgacaaggccggccagaagaccuacgagcgccacucccugagccacuucgugaaccuggacaaccuccgggccaacaacaccaaggggucccugcccaucaacgugaucgucuucgacggcaagagcaagugcgaggaguccagcgccaaguccgccagcguguacuacucccagcugaugugccagcccauccuccugcuggaccaggcgcucgugagcgacgucggcgacagcgccgagguggccgugaagauguucgacgccuacgucaacacguucuccagcaccuucaacgugccgauggagaagcugaagacccugguggccaccgcggaggccgagcucgccaagaacgucucccuggacaacgugcugagcacguucaucuccgccgcgcgccagggguucguggacagcgacgucgagaccaaggacgugguggagugccucaagcugucccaccagagcgacaucgaggucaccggcgacuccugcaacaacuacauccugaccuacaacaagguggagaacaugacgccccgggaccucggggccugcaucgacugcagcgcccgccacaucaacgcccagguggccaagucccacaacaucgcgcugaucuggaacgucaaggacuucaugagccuguccgagcagcuccggaagcagauccgcagcgccgccaagaagaacaaccugcccuucaagcugaccugcgccaccacccgccagguggugaacgucgugacgaccaagaucgcccucaagggcgggugaggacuaguuauaagacugacuagcccgaugggccucccaacgggcccuccuccccuccuugcaccgagauuaauaaaaaaaaaaaaaaaaaaaaaaaaaaaaaaaaaaaaaaaaaaaaaaaaaaaaaaaaaaaaaaaaugcaucccccccccccccccccccccccccccccccaaaggcucuuuucagagccaccagaauu

SEQ ID NO: 21724 - RNA, 6058 nt, Artificial Sequence
  SARS-CoV-2__MT745677.1__non-structural protein 3 (NSP3) mRNA gc
aggagaaagcuuaccauggcccccaccaaggugaccuucggcgacgacacggucaucgaggugcagggguacaagagcgugaacaucaccuucgagcuggacgagcgcaucgacaagguccucaacgagaagugcuccgccuacaccguggagcugggcaccgaggugaacgaguucgcgugcgucguggccgacgccgugaucaagacgcugcagccggucagcgagcuccugaccccccuggggaucgaccucgacgagugguccauggccaccuacuaccuguucgacgagagcggcgaguucaagcuggccucccacauguacugcagcuucuacccccccgacgaggacgaggaggagggggacugcgaggaggaggaguucgagccguccacccaguacgaguacggcacggaggacgacuaccagggcaagccccucgaguucggggcgaccagcgccgcccugcagcccgaggaggagcaggaggaggacuggcuggacgacgacucccagcagaccgugggccagcaggacgggagcgaggacaaccagaccacgaccauccagaccaucguggagguccagccccagcucgagauggagcugaccccgguggugcagacgaucgaggucaacuccuucagcggcuaccugaagcucaccgacaacguguacaucaagaacgccgacaucguggaggaggcgaagaaggucaagcccaccgugguggucaacgccgccaacguguaccugaagcacgggggcggcguggccggggcccugaacaaggcgaccaacaacgccaugcaggucgaguccgacgacuacaucgccacgaacggcccccucaagguggggggcagcugcguccuguccggccacaaccuggccaagcacugccuccacgugguggggcccaacgucaacaagggcgaggacauccagcugcugaagagcgccuacgagaacuucaaccagcacgaggugcuccuggcgccgcugcucuccgccgggaucuucggcgccgaccccauccacagccugcgggugugcgucgacaccgugcgcaccaacguguaccuggccgucuucgacaagaaccucuacgacaagcugguguccagcuuccuggagaugaagagcgagaagcagguggagcagaagaucgccgagauccccaaggaggaggucaagcccuucaucaccgaguccaagccgagcguggagcagcggaagcaggacgacaagaagaucaaggcgugcguggaggaggucacgaccacccucgaggagaccaaguuccugacggagaaccugcuccuguacaucgacaucaacgggaaccugcaccccgacuccgccacccucgugagcgacaucgacaucaccuuccugaagaaggacgcccccuacaucgugggcgacgucgugcaggagggcgugcugaccgccgucgugauccccacgaagaaggccgggggcaccaccgagaugcucgcgaaggcccugcgcaaggugccgaccgacaacuacaucacgaccuaccccgggcagggccugaacggguacaccgucgaggaggccaagaccgugcucaagaagugcaaguccgccuucuacauccugcccagcaucaucuccaacgagaagcaggagauccugggcaccgugagcuggaaccuccgggagaugcuggcgcacgccgaggagacgcgcaagcugaugcccgucugcguggagaccaaggccaucguguccaccauccagcggaaguacaagggcaucaagauccaggagggggucguggacuacggcgcccgcuucuacuucuacaccagcaagacgaccguggccucccugaucaacacccucaacgaccugaacgagacccuggucacgaugccgcucggguacgugacccacggccugaaccuggaggaggcggcccgguacaugcgcagccucaaggugcccgccaccgucuccgugagcucccccgacgccgugaccgccuacaacggguaccugacgagcuccagcaagacccccgaggagcacuucaucgagaccaucucccuggcgggcagcuacaaggacuggagcuacuccggccagagcacccagcucgggaucgaguuccugaagcggggcgacaaguccgucuacuacacgagcaacccgaccaccuuccaccuggacggggaggugaucaccuucgacaaccucaagacgcugcugucccuccgcgaggugcggaucaucaaggucuucaccaccguggacaacaucaaccugcacacccagguggucgacaugagcaugacguacggccagcaguucggccccaccuaccuggacggggccgacgugaccaagaucaagccccacaacucccacgagggcaagaccuucuacgugcucccgaacgacgacacgcugcgcgucgaggccuucgaguacuaccacaccaccgaccccagcuuccuggggcgguacauguccgcccucaaccacaccaagaaguggaaguacccccaggugaacggccugacgagcaucaagugggccgacaacaacugcuaccuggcgaccgcccuccugacccugcagcagaucgagcucaaguucaaccccccggcccugcaggacgccuacuaccgcgcgcgggccggggaggccgccaacuucugcgcccugauccucgcguacugcaacaagaccgugggcgagcugggcgacguccgcgagacgauguccuaccuguuccagcacgccaaccucgacagcugcaagcgggugcugaacgucgugugcaagaccugcgggcagcagcagaccacccugaagggcguggaggccgucauguacauggggacccucuccuacgagcaguucaagaagggcgugcagauccccugcacgugcgggaagcaggccaccaaguaccuggugcagcaggagagccccuucgucaugauguccgcccccccggcgcaguacgagcugaagcacggcaccuucaccugcgccagcgaguacacgggcaacuaccagugcgggcacuacaagcacaucaccuccaaggagacccucuacugcaucgacggcgcccugcugaccaagagcagcgaguacaaggggcccaucacggacguguucuacaaggagaacuccuacaccaccaccaucaagcccgugacguacaagcucgacggcgucgugugcaccgagaucgaccccaagcuggacaacuacuacaagaaggacaacagcuacuucaccgagcagccgaucgaccuggugcccaaccagcccuaccccaacgccuccuucgacaacuucaaguucgucugcgacaacaucaaguucgccgacgaccucaaccagcugaccggguacaagaagccggcgagccgcgagcugaaggugacguucuuccccgaccucaacggcgacguggucgccaucgacuacaagcacuacacccccuccuucaagaagggcgccaagcugcugcacaagcccaucguguggcacgugaacaacgccaccaacaaggcgaccuacaagccgaacacguggugcauccggugccucuggagcaccaagcccgucgagaccuccaacagcuucgacgugcugaaguccgaggacgcccaggggauggacaaccuggccugcgaggaccucaagcccgugagcgaggaggucguggagaaccccaccauccagaaggacgugcuggagugcaacgucaagacgaccgagguggugggcgacaucauccugaagccggccaacaacucccucaagaucaccgaggaggucgggcacaccgaccugauggccgcguacguggacaacagcucccugacgaucaagaagcccaacgagcucagccgcgugcugggccugaagacccucgccacccacgggcuggccgccgucaacuccgugcccugggacaccaucgccaacuacgcgaagccguuccugaacaagguggucagcacgaccaccaacaucgugacccgcugccucaaccgggugugcacgaacuacaugcccuacuucuucacccugcugcuccagcugugcaccuucacccgcuccaccaacagccggaucaaggccuccaugcccacgaccaucgccaagaacaccgucaagagcgugggcaaguucugccuggaggccagcuucaacuaccucaagucccccaacuucagcaagcugaucaacaucaucaucugguuccugcuccuguccgugugccugggcagccucaucuacuccaccgccgcgcuggggguccugaugagcaaccucggcaugccguccuacugcacgggguaccgcgagggcuaccugaacagcaccaacgugaccaucgccaccuacugcacgggcuccauccccugcagcgugugccuguccgggcucgacagccuggacaccuaccccucccuggagaccauccagaucaccaucagcuccuucaagugggaccucacggccuucggccuggucgccgagugguuccuggccuacauccucuucacccgguucuucuacgugcuggggcuggcggccaucaugcagcucuucuucagcuacuucgccgugcacuucaucuccaacagcuggcugauguggcugaucaucaaccugguccagauggcccccaucuccgcgauggugcgcauguacaucuucuucgccagcuucuacuacguguggaagagcuacguccacgugguggacggcugcaacuccagcaccugcaugaugugcuacaagcggaaccgcgccacccgggucgagugcacgaccaucgugaacgggguccgccgguccuucuacguguacgccaacggcggcaagggguucugcaagcuccacaacuggaacugcgugaacugcgacaccuucugcgccggcagcaccuucaucuccgacgaggucgcgcgcgaccugagccugcaguucaagcggccgaucaaccccacggaccaguccagcuacaucguggacuccgugaccgucaagaacgggagcauccaccucuacuucgacaaggccggccagaagaccuacgagcgccacucccugagccacuucgugaaccuggacaaccuccgggccaacaacaccaaggggucccugcccaucaacgugaucgucuucgacggcaagagcaagugcgaggaguccagcgccaaguccgccagcguguacuacucccagcugaugugccagcccauccuccugcuggaccaggcgcucgugagcgacgucggcgacagcgccgagguggccgugaagauguucgacgccuacgucaacacguucuccagcaccuucgacgugccgauggagaagcugaagacccugguggccaccgcggaggccgagcucgccaagaacgucucccuggacaacgugcugagcacguucaucuccgccgcgcgccagggguucguggacagcgacgucgagaccaaggacgugguggagugccucaagcugucccaccagagcgacaucgaggucaccggcgacuccugcaacaacuacaugcugaccuacaacaagguggagaacaugacgccccgggaccucggggccugcaucgacugcagcgcccgccacaucaacgcccagguggccaagucccacaacaucgcgcugaucuggaacgucaaggacuucaugagccuguccgagcagcuccggaagcagauccgcagcgccgccaagaagaacaaccugcccuucaagcugaccugcgccaccacccgccagguggugaacgucgugacgaccaagaucgcccucaagggcgggugaggacuaguuauaagacugacuagcccgaugggccucccaacgggcccuccuccccuccuugcaccgagauuaauaaaaaaaaaaaaaaaaaaaaaaaaaaaaaaaaaaaaaaaaaaaaaaaaaaaaaaaaaaaaaaaaugcaucccccccccccccccccccccccccccccccaaaggcucuuuucagagccaccagaauu

SEQ ID NO: 21725 - RNA, 6058 nt, Artificial Sequence
  SARS-CoV-2__MT745688.1__non-structural protein 3 (NSP3) mRNA gc
aggagaaagcuuaccauggcccccaccaaggugaccuucggcgacgacacggucaucgaggugcagggguacaagagcgugaacaucaccuucgagcuggacgagcgcaucgacaagguccucaacgagaagugcuccgccuacaccguggagcugggcaccgaggugaacgaguucgcgugcgucguggccgacgccgugaucaagacgcugcagccggucagcgagcuccugaccccccuggggaucgaccucgacgagugguccauggccaccuacuaccuguucgacgagagcggcgaguucaagcuggccucccacauguacugcagcuucuacccccccgacgaggacgaggaggagggggacugcgaggaggaggaguucgagccguccacccaguacgaguacggcacggaggacgacuaccagggcaagccccucgaguucggggcgaccagcgccgcccugcagcccgaggaggagcaggaggaggacuggcuggacgacgacucccagcagaccgugggccagcaggacgggagcgacgacaaccagaccacgaccauccagaccaucguggagguccagccccagcucgagauggagcugaccccgguggugcagacgaucgaggucaacuccuucagcggcuaccugaagcucaccgacaacguguacaucaagaacgccgacaucguggaggaggcgaagaaggucaagcccaccgugguggucaacgccgccaacguguaccugaagcacgggggcggcguggccggggcccugaacaaggcgaccaacaacgccaugcaggucgaguccgacgacuacaucgccacgaacggcccccucaagguggggggcagcugcguccuguccggccacaaccuggccaagcacugccuccacgugguggggcccaacgucaacaagggcgaggacauccagcugcugaagagcgccuacgagaacuucaaccagcacgaggugcuccuggcgccgcugcucuccgccgggaucuucugcgccgaccccauccacagccugcgggugugcgucgacaccgugcgcaccaacguguaccuggccgucuucgacaagaaccucuacgacaagcugguguccagcuuccuggagaugaagagcgagaagcagguggagcagaagaucgccgagauccccaaggaggaggucaagcccuucaucaccgaguccaagccgagcguggagcagcggaagcaggacgacaagaagaucaaggcgugcguggaggaggucacgaccacccucgaggagaccaaguuccugacggagaaccugcuccuguacaucgacaucaacggcaaccugcaccccgacuccgccacccucgugagcgacaucgacaucaccuuccugaagaaggacgcccccuacaucgugggggacgucgugcaggagggcgugcugaccgccgucgugauccccacgaagaaggccggcgggaccaccgagaugcucgcgaaggcccugcgcaaggugccgaccgacaacuacaucacgaccuaccccggccaggggcugaacggcuacaccgucgaggaggccaagaccgugcucaagaagugcaaguccgccuucuacauccugcccagcaucaucuccaacgagaagcaggagauccuggggaccgugagcuggaaccuccgggagaugcuggcgcacgccgaggagacgcgcaagcugaugcccgucugcguggagaccaaggccaucguguccaccauccagcggaaguacaagggcaucaagauccaggagggcgucguggacuacggggcccgcuucuacuucuacaccagcaagacgaccguggccucccugaucaacacccucaacgaccugaacgagacccuggucacgaugccgcucggcuacgugacccacgggcugaaccuggaggaggcggcccgguacaugcgcagccucaaggugcccgccaccgucuccgugagcucccccgacgccgugaccgccuacaacggcuaccugacgagcuccagcaagacccccgaggagcacuucaucgagaccaucucccuggcggggagcuacaaggacuggagcuacuccggccagagcacccagcucggcaucgaguuccugaagcggggggacaaguccgucuacuacacgagcaacccgaccaccuuccaccuggacggcgaggugaucaccuucgacaaccucaagacgcugcugucccuccgcgaggugcggaccaucaaggucuucaccaccguggacaacaucaaccugcacacgcagguggucgacaugagcaugaccuacgggcagcaguucggccccaccuaccuggacggcgccgacgugaccaagaucaagccccacaacucccacgaggggaagacguucuacgugcucccgaacgacgacacccugcgcgucgaggccuucgaguacuaccacaccaccgaccccagcuuccugggccgguacauguccgcccucaaccacacgaagaaguggaaguacccccaggugaacgggcugaccagcaucaagugggccgacaacaacugcuaccuggcgaccgugcuccugacccugcagcagaucgagcucaaguucaaccccccggcccugcaggacgccuacuaccgcgcccgggcgggcgaggccgccaacuucugcgcccugauccucgccuacugcaacaagacggucggggagcugggcgacgugcgcgagaccauguccuaccuguuccagcacgcgaaccucgacagcugcaagcggguccugaacguggugugcaagaccugcggccagcagcagaccacccugaagggggucgaggccgugauguacaugggcacgcucuccuacgagcaguucaagaagggggugcagauccccugcaccugcggcaagcaggccaccaaguaccugguccagcaggagagccccuucgugaugauguccgcccccccggcccaguacgagcugaagcacgggaccuucacgugcgcgagcgaguacaccggcaacuaccagugcggccacuacaagcacaucaccuccaaggagacccucuacugcaucgacggggcccugcugacgaagagcagcgaguacaagggccccaucaccgacguguucuacaaggagaacuccuacaccaccacgaucaagcccgucaccuacaagcucgacgggguggugugcaccgagaucgaccccaagcuggacaacuacuacaagaaggacaacagcuacuucaccgagcagccgaucgaccugguccccaaccagcccuaccccaacgccuccuucgacaacuucaaguucgugugcgacaacaucaaguucgccgacgaccucaaccagcugacgggcuacaagaagccggccagccgcgagcugaaggugaccuucuuccccgaccucaacggggacgucguggcgaucgacuacaagcacuacacccccuccuucaagaagggcgccaagcugcugcacaagcccaucguguggcacgucaacaacgccaccaacaaggccacguacaagccgaacaccuggugcauccggugccucuggagcaccaagcccguggagaccuccaacagcuucgacgugcugaaguccgaggacgcgcagggcauggacaaccuggccugcgaggaccucaagcccgucagcgaggaggugguggagaaccccacgauccagaaggacguccuggagugcaacgugaagaccaccgagguggucggggacaucauccugaagccggccaacaacucccucaagaucaccgaggaggugggccacacggaccugauggccgccuacguggacaacagcucccugaccaucaagaagcccaacgagcucagccgcguccuggggcugaagacccucgcgacccacggccuggccgccgugaacuccgugcccugggacacgaucgccaacuacgccaagccguuccugaacaaggucgugagcaccaccaccaacaucgugacgcgcugccucaaccgggucugcaccaacuacaugcccuacuucuucacccugcugcuccagcugugcaccuucacccgcuccacgaacagccggaucaaggcguccaugcccaccaccaucgccaagaacaccgugaagagcguggggaaguucugccuggaggccagcuucaacuaccucaagucccccaacuucagcaagcugaucaacaucaucaucugguuccugcuccuguccgucugccugggcagccucaucuacuccacggccgcccugggcgugcugaugagcaaccucgggaugccguccuacugcaccggcuaccgcgagggguaccugaacagcaccaacgugaccaucgcgacguacugcaccggcuccauccccugcagcgucugccuguccggccucgacagccuggacaccuaccccucccuggagaccauccagaucacgaucagcuccuucaagugggaccucaccgccuucgggcugguggccgagugguuccuggccuacauccucuucacccgguucuucuacgugcugggccuggccgcgaucaugcagcucuucuucagcuacuucgccguccacuucaucuccaacagcuggcugauguggcugaucaucaaccuggugcagauggcccccaucuccgccauggugcgcauguacaucuucuucgcgagcuucuacuacgucuggaagagcuacgugcacguggucgacgggugcaacuccagcaccugcaugaugugcuacaagcggaaccgcgccacgcggguggagugcaccaccaucgucaacggcgugcgccgguccuucuacguguacgccaacgggggcaagggcuucugcaagcuccacaacuggaacugcgucaacugcgacaccuucugcgccgggagcacguucaucuccgacgagguggcccgcgaccugagccugcaguucaagcggccgaucaaccccaccgaccaguccagcuacaucguggacuccgucaccgugaagaacggcagcauccaccucuacuucgacaaggcggggcagaagaccuacgagcgccacucccugagccacuucgugaaccuggacaaccuccgggccaacaacacgaagggcucccugcccaucaacgucaucguguucgacgggaagagcaagugcgaggaguccagcgccaaguccgccagcguguacuacucccagcugaugugccagcccauccuccugcuggaccaggcccucgucagcgacgugggcgacagcgcggagguggccgucaagauguucgacgccuacgugaacaccuucuccagcaccuucaacgugccgauggagaagcugaagacccuggucgccacggccgaggcggagcucgccaagaacgugucccuggacaacgugcugagcaccuucaucuccgccgcccgccagggcuucgucgacagcgacguggagaccaaggacguggucgagugccucaagcugucccaccagagcgacaucgaggugaccggggacuccugcaacaacuacaugcugacguacaacaagguggagaacaugaccccccgggaccucggcgcgugcaucgacugcagcgcccgccacaucaacgcccaggucgccaagucccacaacaucgcccugaucuggaacgugaaggacuucaugagccuguccgagcagcuccggaagcagauccgcagcgcggccaagaagaacaaccugcccuucaagcugaccugcgccaccacgcgccagguggucaacguggugaccaccaagaucgcccucaaggggggcugaggacuaguuauaagacugacuagcccgaugggccucccaacgggcccuccuccccuccuugcaccgagauuaauaaaaaaaaaaaaaaaaaaaaaaaaaaaaaaaaaaaaaaaaaaaaaaaaaaaaaaaaaaaaaaaaugcaucccccccccccccccccccccccccccccccaaaggcucuuuucagagccaccagaauu

SEQ ID NO: 21726 - RNA, 6058 nt, Artificial Sequence
  SARS-CoV-2__MT745694.1__non-structural protein 3 (NSP3) mRNA gc
aggagaaagcuuaccauggcccccaccaaggugaccuucggcgacgacacggucaucgaggugcagggguacaagagcgugaacaucaccuucgagcuggacgagcgcaucgacaagguccucaacgagaagugcuccgccuacaccguggagcugggcaccgaggugaacgaguucgcgugcgucguggccgacgccgugaucaagacgcugcagccggucagcgagcuccugaccccccuggggaucgaccucgacgagugguccauggccaccuacuaccuguucgacgagagcggcgaguucaagcuggccucccacauguacugcagcuucuacccccccgacgaggacgaggaggagggggacugcgaggaggaggaguucgagccguccacccaguacgaguacggcacggaggacgacuaccagggcaagccccucgaguucggggcgaccagcgccgcccugcagcccgaggaggagcaggaggaggacuggcuggacgacgacucccagcagaccgugggccagcaggacgggagcgaggacaaccagaccacgaccauccagaccaucguggagguccagccccagcucgagauggagcugaccccgguggugcagacgaucgaggucaacuccuucagcggcuaccugaagcucaccgacaacguguacaucaagaacgccgacaucguggaggaggcgaagaaggucaagcccaccgugguggucaacgccgccaacguguaccugaagcacgggggcggcguggccggggcccugaacaaggcgaccaacaacgccaugcaggucgaguccgacgacuacaucgccacgaacggcccccucaagguggggggcagcugcguccuguccggccacaaccuggccaagcacugccuccacgugguggggcccaacgucaacaagggcgaggacauccagcugcugaagagcgccuacgagaacuucaaccagcacgaggugcuccuggcgccgcugcucuccgccgggaucuucggcgccgaccccauccacagccugcgggugugcgucgacaccgugcgcaccaacguguaccuggccgucuucgacaagaaccucuacgacaagcugguguccagcuuccuggagaugaagagcgagaagcagguggagcagaagaucgccgagauccccaaggaggaggucaagcccuucaucaccgaguccaagccgagcguggagcagcggaagcaggacgacaagaagaucaaggcgugcguggaggaggucacgaccacccucgaggagaccaaguuccugacggagaaccugcuccuguacaucgacaucaacgggaaccugcaccccgacuccgccacccucgugagcgacaucgacaucaccuuccugaagaaggacgcccccuacaucgugggcgacgucgugcaggagggcgugcugaccgccgucgugauccccacgaagaaggccgggggcaccaccgagaugcucgcgaaggcccugcgcaaggugccgaccgacaacuacaucacgaccuaccccgggcagggccugaacggguacaccgucgaggaggccaagaccgugcucaagaagugcaaguccgccuucuacauccugcccagcaucaucuccaacgagaagcaggagauccugggcaccgugagcuggaaccuccgggagaugcuggcgcacgccgaggagacgcgcaagcugaugcccgucugcguggagaccaaggccaucguguccaccauccagcggaaguacaagggcaucaagauccaggagggggucguggacuacggcgcccgcuucuacuucuacaccagcaagacgaccguggccucccugaucaacacccucaacgaccugaacgagacccuggucacgaugccgcucggguacgugacccacggccugaaccuggaggaggcggcccgguacaugcgcagccucaaggugcccgccaccgucuccgugagcucccccgacgccgugaccgccuacaacggguaccugacgagcuccagcaagacccccgaggagcacuucaucgagaccaucucccuggcgggcagcuacaaggacuggagcuacuccggccagagcacccagcucgggaucgaguuccugaagcggggcgacaaguccgucuacuacacgagcaacccgaccaccuuccaccuggacggggaggugaucaccuucgacaaccucaagacgcugcugucccuccgcgaggugcggaccaucaaggucuucaccaccguggacaacaucaaccugcacacgcagguggucgacaugagcaugaccuacggccagcaguucggccccaccuaccuggacggggccgacgugaccaagaucaagccccacaacucccacgagggcaagacguucuacgugcucccgaacgacgacacccugcgcgucgaggccuucgaguacuaccacaccaccgaccccagcuuccuggggcgguacauguccgcccucaaccacacgaagaaguggaaguacccccaggugaacggccugaccagcaucaagugggccgacaacaacugcuaccuggcgaccgcccuccugacccugcagcagaucgagcucaaguucaaccccccggcccugcaggacgccuacuaccgcgcgcgggccggggaggccgccaacuucugcgcccugauccucgcguacugcaacaagacggugggcgagcugggcgacguccgcgagaccauguccuaccuguuccagcacgccaaccucgacagcugcaagcgggugcugaacgucgugugcaagaccugcgggcagcagcagaccacccugaagggcguggaggccgucauguacauggggacgcucuccuacgagcaguucaagaagggcgugcagauccccugcaccugcgggaagcaggccaccaaguaccuggugcagcaggagagccccuucgucaugauguccgcccccccggcgcaguacgagcugaagcacggcaccuucacgugcgccagcgaguacaccggcaacuaccagugcgggcacuacaagcacaucaccuccaaggagacccucuacugcaucgacggcgcccugcugacgaagagcagcgaguacaaggggcccaucaccgacguguucuacaaggagaacuccuacaccaccacgaucaagcccgugaccuacaagcucgacggcgucgugugcaccgagaucgaccccaagcuggacaacuacuacaagaaggacaacagcuacuucaccgagcagccgaucgaccuggugcccaaccagcccuaccccaacgccuccuucgacaacuucaaguucgucugcgacaacaucaaguucgccgacgaccucaaccagcugacgggguacaagaagccggcgagccgcgagcugaaggugaccuucuuccccgaccucaacggcgacguggucgccaucgacuacaagcacuacacccccuccuucaagaagggcgccaagcugcugcacaagcccaucguguggcacgugaacaacgccaccaacaaggcgacguacaagccgaacaccuggugcauccggugccucuggagcaccaagcccgucgagaccuccaacagcuucgacgugcugaaguccgaggacgcccaggggauggacaaccuggccugcgaggaccucaagcccgugagcgaggaggucguggagaaccccacgauccagaaggacgugcuggagugcaacgucaagaccaccgagguggugggcgacaucauccugaagccggccaacaacucccucaagaucaccgaggaggucgggcacacggaccugauggccgcguacguggacaacagcucccugaccaucaagaagcccaacgagcucagccgcgugcugggccugaagacccucgccacccacgggcuggccgccgucaacuccgugcccugggacacgaucgccaacuacgcgaagccguuccugaacaagguggucagcaccaccaccaacaucgugacgcgcugccucaaccgggugugcaccaacuacaugcccuacuucuucacccugcugcuccagcugugcaccuucacccgcuccacgaacagccggaucaaggucuccaugcccaccaccaucgccaagaacaccgugaagagcgugggcaaguucugccuggaggccagcuucaacuaccucaagucccccaacuucagcaagcugaucaacaucaucaucugguuccugcuccuguccgucugccugggcagccucaucuacuccacggccgcccugggggugcugaugagcaaccucggcaugccguccuacugcaccggguaccgcgagggcuaccugaacagcaccaacgugaccaucgcgacguacugcaccggcuccauccccugcagcgucugccuguccgggcucgacagccuggacaccuaccccucccuggagaccauccagaucacgaucagcuccuucaagugggaccucaccgccuucggccugguggccgagugguuccuggccuacauccucuucacccgguucuucuacgugcuggggcuggccgcgaucaugcagcucuucuucagcuacuucgccguccacuucaucuccaacagcuggcugauguggcugaucaucaaccuggugcagauggcccccaucuccgccauggugcgcauguacaucuucuucgcgagcuucuacuacgucuggaagagcuacgugcacguggucgacggcugcaacuccagcaccugcaugaugugcuacaagcggaaccgcgccacgcggguggagugcaccaccaucgucaacggggugcgccgguccuucuacguguacgccaacggcggcaagggguucugcaagcuccacaacuggaacugcgucaacugcgacaccuucugcgccggcagcacguucaucuccgacgagguggcccgcgaccugagccugcaguucaagcggccgaucaaccccaccgaccaguccagcuacaucguggacuccgucaccgugaagaacgggagcauccaccucuacuucgacaaggcgggccagaagaccuacgagcgccacucccugagccacuucgugaaccuggacaaccuccgggccaacaacacgaaggggucccugcccaucaacgucaucguguucgacggcaagagcaagugcgaggaguccagcgccaaguccgccagcguguacuacucccagcugaugugccagcccauccuccugcuggaccaggcccucgucagcgacgugggcgacagcgcggagguggccgucaagauguucgacgccuacgugaacaccuucuccagcaccuucaacgugccgauggagaagcugaagacccuggucgccacggccgaggcggagcucgccaagaacgugucccuggacaacgugcugagcaccuucaucuccgccgcccgccagggguucgucgacagcgacguggagaccaaggacguggucgagugccucaagcugucccaccagagcgacaucgaggugaccggcgacuccugcaacaacuacaugcugacguacaacaagguggagaacaugaccccccgggaccucggggcgugcaucgacugcagcgcccgccacaucaacgcccaggucgccaagucccacaacaucgcccugaucuggaacgugaaggacuucaugagccuguccgagcagcuccggaagcagauccgcagcgcggccaagaagaacaaccugcccuucaagcugaccugcgccaccacgcgccagguggucaacguggugaccaccaagaucgcccucaagggcgggugaggacuaguuauaagacugacuagcccgaugggccucccaacgggcccuccuccccuccuugcaccgagauuaauaaaaaaaaaaaaaaaaaaaaaaaaaaaaaaaaaaaaaaaaaaaaaaaaaaaaaaaaaaaaaaaaugcaucccccccccccccccccccccccccccccccaaaggcucuuuucagagccaccagaauu

SEQ ID NO: 21727 - RNA, 6058 nt, Artificial Sequence
  SARS-CoV-2__MT745711.1__non-structural protein 3 (NSP3) mRNA gc
aggagaaagcuuaccauggcccccaccaaggugaccuucggcgacgacacggucaucgaggugcagggguacaagagcgugaacaucaccuucgagcuggacgagcgcaucgacaagguccucaacgagaagugcuccgccuacaccguggagcugggcaccgaggugaacgaguucgcgugcgucguggccgacgccgugaucaagacgcugcagccggucagcgagcuccugaccccccuggggaucgaccucgacgagugguccauggccaccuacuaccuguucgacgagagcggcgaguucaagcuggccucccacauguacugcagcuucuacccccccgacgaggacgaggaggagggggacugcgaggaggaggaguucgagccguccacccaguacgaguacggcacggaggacgacuaccagggcaagccccucgaguucggggcgaccagcgccgcccugcagcccgaggaggagcaggaggaggacuggcuggacgacgacucccagcagaccgugggccagcaggacgggagcgaggacaaccagaccacgaccauccagaccaucguggagguccagccccagcucgagauggagcugaccccgguggugcagacgaucgaggucaacuccuucagcggcuaccugaagcucaccgacaacguguacaucaagaacgccgacaucguggaggaggcgaagaaggucaagcccaccgugguggucaacgccgccaacguguaccugaagcacgggggcggcguggccggggcccugaacaaggcgaccaacaacgccaugcaggucgaguccgacgacuacaucgccacgaacggcccccucaagguggggggcagcugcguccuguccggccacaaccuggccaagcacugccuccacgugguggggcccaacgucaacaagggcgaggacauccagcugcugaagagcgccuacgagaacuucaaccagcacgaggugcuccuggcgccgcugcucuccgccgggaucuucggcgccgaccccauccacagccugcgggugugcgucgacaccgugcgcaccaacguguaccuggccgucuucgacaagaaccucuacgacaagcugguguccagcuuccuggagaugaagagcgagaagcagguggagcagaagaucgccgagauccccaaggaggaggucaagcccuucaucaccgaguccaagccgagcguggagcagcggaagcaggacgacaagaagaucaaggcgugcguggaggaggucacgaccacccucgaggagaccaaguuccugacggagaaccugcuccuguacaucgacaucaacgggaaccugcaccccgacuccgccacccucgugagcgacaucgacaucaccuuccugaagaaggacgcccccuacaucgugggcgacgucgugcaggagggcgugcugaccgccgucgugauccccacgaagaaggccgggggcaccaccgagaugcucgcgaaggcccugcgcaaggugccgaccgacaacuacaucacgaccuaccccgggcagggccugaacggguacaccgucgaggaggccaagaccgugcucaagaagugcaaguccgccuucuacauccugcccagcaucaucuccaacgagaagcaggagauccugggcaccgugagcuggaaccuccgggagaugcuggcgcacgccgaggagacgcgcaagcugaugcccgucugcguggagaccaaggccaucguguccaccauccagcggaaguacaagggcaucaagauccaggagggggucguggacuacggcgcccgcuucuacuucuacaccagcaagacgaccguggccucccugaucaacacccucaacgaccugaacgagacccuggucacgaugccgcucggguacgugacccacggccugaaccuggaggaggcggcccgguacaugcgcagccucaaggugcccgccaccgucuccgugagcucccccgacgccgugaccgccuacaacggguaccugacgagcuccagcaagacccccgaggagcacuucaucgagaccaucucccuggcgggcagcuacaaggacuggagcuacuccggccagagcacccagcucgggaucgaguuccugaagcggggcgacaaguccgucuacuacacgagcaacccgaccaccuuccaccuggacggggaggugaucaccuucgacaaccucaagacgcugcugucccuccgcgaggugcggaccaucaaggucuucaccaccguggacaacaucaaccugcacacgcagguggucgacaugagcaugaccuacggccagcaguucggccccaccuaccuggacggggccgacgugaccaagaucaagccccacaacucccacgagggcaagacguucuacgugcucccgaacgacgacacccugcgcgucgaggccuucgaguacuaccacaccaccgaccccagcuuccuggggcgguacauguccgcccucaaccacacgaagaaguggaaguacccccaggugaacggccugaccagcaucaagugggccgacaacaacugcuaccuggcgaccgcccuccugacccugcagcagaucgagcucaaguucaaccccccggcccugcaggacgccuacuaccgcgcgcgggccggggaggccgccaacuucugcgcccugauccucgcguacugcaacaagacggugggcgagcugggcgacguccgcgagaccauguccuaccuguuccagcacgccaaccucgacagcugcaagcgggugcugaacgucgugugcaagaccugcgggcagcagcagaccacccugaagggcguggaggccgucauguacauggggacgcucuccuacgagcaguucaagaagggcgugcagauccccugcaccugcgggaagcaggccaccaaguaccuggugcagcaggagagccccuucgucaugauguccgcccccccggcgcaguacgagcugaagcacggcaccuucacgugcgccagcgaguacaccggcaacuaccagugcgggcacuacaagcacaucaccuccaaggagacccucuacugcaucgacggcgcccugcugacgaagagcagcgaguacaaggggcccaucaccgacguguucuacaaggagaacuccuacaccaccacgaucaagcccgugaccuacaagcucgacggcgucgugugcaccgagaucgaccccaagcuggacaacuacuacaagaaggacaacagcuacuucaccgagcagccgaucgaccuggugcccaaccagcccuaccccaacgccuccuucgacaacuucaaguucgucugcgacaacaucaaguucgccgacgaccucaaccagcugacgggguacaagaagccggcgagccgcgagcugaaggugaccuucuuccccgaccucaacggcgacguggucgccaucgacuacaagcacuacacccccuccuucaagaagggcgccaagcugcugcacaagcccaucguguggcacgugaacaacgccaccaacaaggcgacguacaagccgaacaccuggugcauccggugccucuggagcaccaagcccgucgagaccuccaacagcuucgacgugcugaaguccgaggacgcccaggggauggacaaccuggccugcgaggaccucaagcccgugagcgaggaggucguggagaaccccacgauccagaaggacuuccuggagugcaacgugaagaccaccgaggucgugggcgacaucauccugaagccggccaacaacucccucaagaucaccgaggagguggggcacacggaccugauggccgcguacgucgacaacagcucccugaccaucaagaagcccaacgagcucagccgcgugcugggccugaagacccucgccacccacgggcuggccgccgugaacuccguccccugggacacgaucgccaacuacgcgaagccguuccugaacaagguggugagcaccaccaccaacaucgucacgcgcugccucaaccgggugugcaccaacuacaugcccuacuucuucacccugcugcuccagcugugcaccuucacccgcuccacgaacagccggaucaaggccuccaugcccaccaccaucgccaagaacaccgugaagagcgucggcaaguucugccuggaggccagcuucaacuaccucaagucccccaacuucagcaagcugaucaacaucaucaucugguuccugcuccuguccgugugccugggcagccucaucuacuccacggccgcgcugggggugcugaugagcaaccucggcaugccguccuacugcaccggguaccgcgagggcuaccugaacagcaccaacgucaccaucgccacguacugcaccggcuccauccccugcagcgugugccuguccgggcucgacagccuggacaccuaccccucccuggagaccauccagaucacgaucagcuccuucaagugggaccucaccgccuucggccugguggccgagugguuccuggccuacauccucuucacccgguucuucuacguccuggggcuggcggccaucaugcagcucuucuucagcuacuucgccgugcacuucaucuccaacagcuggcugauguggcugaucaucaaccuggugcagauggcccccaucuccgcgaugguccgcauguacaucuucuucgccagcuucuacuacguguggaagagcuacgugcacgucguggacggcugcaacuccagcaccugcaugaugugcuacaagcggaaccgcgccacgcggguggagugcaccaccaucgucaacggggugcgccgguccuucuacgucuacgccaacggcggcaagggguucugcaagcuccacaacuggaacugcgugaacugcgacaccuucugcgccggcagcacguucaucuccgacgagguggcgcgcgaccugagccugcaguucaagcggccgaucaaccccaccgaccaguccagcuacaucgucgacuccgugaccgugaagaacgggagcauccaccucuacuucgacaaggccggccagaagaccuacgagcgccacucccugagccacuucgucaaccuggacaaccuccgggccaacaacacgaaggggucccugcccaucaacgugaucguguucgacggcaagagcaagugcgaggaguccagcgccaaguccgccagcgucuacuacucccagcugaugugccagcccauccuccugcuggaccaggcgcucgugagcgacgugggcgacagcgccgaggucgccgugaagauguucgacgccuacgugaacaccuucuccagcaccuucaacgucccgauggagaagcugaagacccugguggccacggcggaggccgagcucgccaagaacgugucccuggacaacguccugagcaccuucaucuccgccgcgcgccagggguucguggacagcgacguggagaccaaggacgucguggagugccucaagcugucccaccagagcgacaucgaggugaccggcgacuccugcaacaacuacaugcugacguacaacaaggucgagaacaugaccccccgggaccucggggccugcaucgacugcagcgcccgccacaucaacgcccagguggccaagucccacaacaucgcgcugaucuggaacgugaaggacuucaugagccuguccgagcagcuccggaagcagauccgcagcgccgccaagaagaacaaccugcccuucaagcugaccugcgccaccacgcgccaggucgugaacguggucaccaccaagaucgcccucaagggcgggugaggacuaguuauaagacugacuagcccgaugggccucccaacgggcccuccuccccuccuugcaccgagauuaauaaaaaaaaaaaaaaaaaaaaaaaaaaaaaaaaaaaaaaaaaaaaaaaaaaaaaaaaaaaaaaaaugcaucccccccccccccccccccccccccccccccaaaggcucuuuucagagccaccagaauu

SEQ ID NO: 21728 - RNA, 6058 nt, Artificial Sequence
  SARS-CoV-2__MT745715.1__non-structural protein 3 (NSP3) mRNA gc
aggagaaagcuuaccauggcccccaccaaggugaccuucggcgacgacacggucaucgaggugcagggguacaagagcgugaacaucaccuucgagcuggacgagcgcaucgacaagguccucaacgagaagugcuccgccuacaccguggagcugggcaccgaggugaacgaguucgcgugcgucguggccgacgccgugaucaagacgcugcagccggucagcgagcuccugaccccccuggggaucgaccucgacgagugguccauggccaccuacuaccuguucgacgagagcggcgaguucaagcuggccucccacauguacugcagcuucuacccccccgacgaggacgaggaggagggggacugcgaggaggaggaguucgagccguccacccaguacgaguacggcacggaggacgacuaccagggcaagccccucgaguucggggcgaccagcgccgcccugcagcccgaggaggagcaggaggaggacuggcuggacgacgacucccagcagaccgugggccagcaggacgggagcgaggacaaccagaccacgaccauccagaccaucguggagguccagccccagcucgagauggagcugaccccgguggugcagacgaucgaggucaacuccuucagcggcuaccugaagcucaccgacaacguguacaucaagaacgccgacaucguggaggaggcgaagaaggucaagcccaccgugguggucaacgccgccaacguguaccugaagcacgggggcggcguggccggggcccugaacaaggcgaccaacaacgccaugcaggucgaguccgacgacuacaucgccacgaacggcccccucaagguggggggcagcugcguccuguccggccacaaccuggccaagcacugccuccacgugguggggcccaacgucaacaagggcgaggacauccagcugcugaagagcgccuacgagaacuucaaccagcacgaggugcuccuggcgccgcugcucuccgccgggaucuucggcgccgaccccauccacagccugcgggugugcgucgacaccgugcgcaccaacguguaccuggccgucuucgacaagaaccucuacgacaagcugguguccagcuuccuggagaugaagagcgagaagcagguggagcagaagaucgccgagauccccaaggaggaggucaagcccuucaucaccgaguccaagccgagcguggagcagcggaagcaggacgacaagaagaucaaggcgugcguggaggaggucacgaccacccucgaggagaccaaguuccugacggagaaccugcuccuguacaucgacaucaacgggaaccugcaccccgacuccgccacccucgugagcgacaucgacaucaccuuccugaagaaggacgcccccuacaucgugggcgacgucgugcaggagggcgugcugaccgccgucgugauccccacgaagaaggccgggggcaccaccgagaugcucgcgaaggcccugcgcaaggugccgaccgacaacuacaucacgaccuaccccgggcagggccugaacggguacaccgucgaggaggccaagaccgugcucaagaagugcaaguccgccuucuacauccugcccagcaucaucuccaacgagaagcaggagauccugggcaccgugagcuggaaccuccgggagaugcuggcgcacgccgaggagacgcgcaagcugaugcccgucugcguggagaccaaggccaucguguccaccauccagcggaaguacaagggcaucaagauccaggagggggucguggacuacggcgcccgcuucuacuucuacaccagcaagacgaccguggccucccugaucaacacccucaacgaccugaacgagacccuggucacgaugccgcucggguacgugacccacggccugaaccuggaggaggcggcccgguacaugcgcagccucaaggugcccgccaccgucuccgugagcucccccgacgccgugaccgccuacaacggguaccugacgagcuccagcaagacccccgaggagcacuucaucgagaccaucucccuggcgggcagcuacaaggacuggagcuacuccggccagagcacccagcucgggaucgaguuccugaagcggggcgacaaguccgucuacuacacgagcaacccgaccaccuuccaccuggacggggaggugaucaccuucgacaaccucaagacgcugcugucccuccgcgaggugcggaccaucaaggucuucaccaccguggacaacaucaaccugcacacgcagguggucgacaugagcaugaccuacggccagcaguucggccccaccuaccuggacggggccgacgugaccaagaucaagccccacaacucccacgagggcaagacguucuacgugcucccgaacgacgacacccugcgcgucgaggccuucgaguacuaccacaccaccgaccccagcuuccuggggcgguacauguccgcccucaaccacacgaagaaguggaaguacccccaggugaacggccugaccagcaucaagugggccgacaacaacugcuaccuggcgaccgcccuccugacccugcagcagaucgagcucaaguucaaccccccggcccugcaggacgccuacuaccgcgcgcgggccggggaggccgccaacuucugcgcccugauccucgcguacugcaacaagacggugggcgagcugggcgacguccgcgagaccauguccuaccuguuccagcacgccaaccucgacagcugcaagcgggugcugaacgucgugugcaagaccugcgggcagcagcagaccacccugaagggcguggaggccgucauguacauggggacgcucuccuacgagcaguucaagaagggcgugcagauccccugcaccugcgggaagcaggccaccaaguaccuggugcagcaggagagccccuucgucaugauguccgcccccccggcgcaguacgagcugaagcacggcaccuucacgugcgccagcgaguacaccggcaacuaccagugcgggcacuacaagcacaucaccuccaaggagacccucuacugcaucgacggcgcccugcugacgaagagcagcgaguacaaggggcccaucaccgacguguucuacaaggagaacuccuacaucaccaccaucaagcccgugacguacaagcucgacggcgucgugugcaccgagaucgaccccaagcuggacaacuacuacaagaaggacaacagcuacuucaccgagcagccgaucgaccuggugcccaaccagcccuaccccaacgccuccuucgacaacuucaaguucgucugcgacaacaucaaguucgccgacgaccucaaccagcugaccggguacaagaagccggcgagccgcgagcugaaggugacguucuuccccgaccucaacggcgacguggucgccaucgacuacaagcacuacacccccuccuucaagaagggcgccaagcugcugcacaagcccaucguguggcacgugaacaacgccaccaacaaggcgaccuacaagccgaacacguggugcauccggugccucuggagcaccaagcccgucgagaccuccaacagcuucgacgugcugaaguccgaggacgcccaggggauggacaaccuggccugcgaggaccucaagcccgugagcgaggaggucguggagaaccccaccauccagaaggacgugcuggagugcaacgucaagacgaccgagguggugggcgacaucauccugaagccggccaacaacucccucaagaucaccgaggaggucgggcacaccgaccugauggccgcguacguggacaacagcucccugacgaucaagaagcccaacgagcucagccgcgugcugggccugaagacccucgccacccacgggcuggccgucgugaacuccgugcccugggacaccaucgccaacuacgccaagccguuccugaacaaggucgugagcacgaccaccaacaucgugacccgcugccucaaccgggucugcacgaacuacaugcccuacuucuucacccugcugcuccagcugugcaccuucacccgcuccaccaacagccggaucaaggcguccaugcccacgaccaucgccaagaacaccgugaagagcgugggcaaguucugccuggaggccagcuucaacuaccucaagucccccaacuucagcaagcugaucaacaucaucaucugguuccugcuccuguccgucugccugggcagccucaucuacuccaccgccgcccugggggugcugaugagcaaccucggcaugccguccuacugcacgggguaccgcgagggcuaccugaacagcaccaacgugaccaucgcgaccuacugcacgggcuccauccccugcagcgucugccuguccgggcucgacagccuggacaccuaccccucccuggagaccauccagaucaccaucagcuccuucaagugggaccucacggccuucggccugguggccgagugguuccuggccuacauccucuucacccgguucuucuacgugcuggggcuggccgcgaucaugcagcucuucuucagcuacuucgccguccacuucaucuccaacagcuggcugauguggcugaucaucaaccuggugcagauggcccccaucuccgccauggugcgcauguacaucuucuucgcgagcuucuacuacgucuggaagagcuacgugcacguggucgacggcugcaacuccagcaccugcaugaugugcuacaagcggaaccgcgccacccggguggagugcacgaccaucgucaacggggugcgccgguccuucuacguguacgccaacggcggcaagggguucugcaagcuccacaacuggaacugcgucaacugcgacaccuucugcgccggcagcaccuucaucuccgacgagguggcccgcgaccugagccugcaguucaagcggccgaucaaccccacggaccaguccagcuacaucguggacuccgucaccgugaagaacgggagcauccaccucuacuucgacaaggcgggccagaagaccuacgagcgccacucccugagccacuucgugaaccuggacaaccuccgggccaacaacaccaaggggucccugcccaucaacgucaucguguucgacggcaagagcaagugcgaggaguccagcgccaaguccgccagcguguacuacucccagcugaugugccagcccauccuccugcuggaccaggcccucgucagcgacgugggcgacagcgcggagguggccgucaagauguucgacgccuacgugaacacguucuccagcaccuucaacgugccgauggagaagcugaagacccuggucgccaccgccgaggcggagcucgccaagaacgugucccuggacaacgugcugagcacguucaucuccgccgcccgccagggguucgucgacagcgacguggagaccaaggacguggucgagugccucaagcugucccaccagagcgacaucgaggugaccggcgacuccugcaacaacuacaugcugaccuacaacaagguggagaacaugacgccccgggaccucggggcgugcaucgacugcagcgcccgccacaucaacgcccaggucgccaagucccacaacaucgcccugaucuggaacgugaaggacuucaugagccuguccgagcagcuccggaagcagauccgcagcgcggccaagaagaacaaccugcccuucaagcugaccugcgccaccacccgccagguggucaacguggugacgaccaagaucgcccucaagggcgggugaggacuaguuauaagacugacuagcccgaugggccucccaacgggcccuccuccccuccuugcaccgagauuaauaaaaaaaaaaaaaaaaaaaaaaaaaaaaaaaaaaaaaaaaaaaaaaaaaaaaaaaaaaaaaaaaugcaucccccccccccccccccccccccccccccccaaaggcucuuuucagagccaccagaauu

SEQ ID NO: 21729 - RNA, 6058 nt, Artificial Sequence
  SARS-CoV-2__MT750044.1__non-structural protein 3 (NSP3) mRNA gc
aggagaaagcuuaccauggcccccaccaaggugaccuucggcgacgacacggucaucgaggugcagggguacaagagcgugaacaucaccuucgagcuggacgagcgcaucgacaagguccucaacgagaagugcuccgccuacaccguggagcugggcaccgaggugaacgaguucgcgugcgucguggccgacgccgugaucaagacgcugcagccggucagcgagcuccugaccccccuggggaucgaccucgacgagugguccauggccaccuacuaccuguucgacgagagcggcgaguucaagcuggccucccacauguacugcagcuucuacccccccgacgaggacgaggaggagggggacugcgaggaggaggaguucgagccguccacccaguacgaguacggcacggaggacgacuaccagggcaagccccucgaguucggggcgaccagcgccgcccugcagcccgaggaggagcaggaggaggacuggcuggacgacgacucccagcagaccgugggccagcaggacgggagcgaggacaaccagaccacgaccauccagaccaucguggagguccagccccagcucgagauggagcugaccccgguggugcagacgaucgaggucaacuccuucagcggcuaccugaagcucaccgacaacguguacaucaagaacgccgacaucguggaggaggcgaagaaggucaagcccaccgugguggucaacgccgccaacguguaccugaagcacgggggcggcguggccggggcccugaacaaggcgaccaacaacgccaugcaggucgaguccgacgacuacaucgccacgaacggcccccucaagguggggggcagcugcguccuguccggccacaaccuggccaagcacugccuccacgugguggggcccaacgucaacaagggcgaggacauccagcugcugaagagcgccuacgagaacuucaaccagcacgaggugcuccuggcgccgcugcucuccgccgggaucuucggcgccgaccccauccacagccugcgggugugcgucgacaccgugcgcaccaacguguaccuggccgucuucgacaagaaccucuacgacaagcugguguccagcuuccuggagaugaagagcgagaagcagguggagcagaacaucgccgagauccccaaggaggaggucaagcccuucaucaccgaguccaagccgagcguggagcagcggaagcaggacgacaagaagaucaaggcgugcguggaggaggucacgaccacccucgaggagaccaaguuccugacggagaaccugcuccuguacaucgacaucaacgggaaccugcaccccgacuccgccacccucgugagcgacaucgacaucaccuuccugaagaaggacgcccccuacaucgugggcgacgucgugcaggagggcgugcugaccgccgucgugauccccacgaagaaggccgggggcaccaccgagaugcucgcgaaggcccugcgcaaggugccgaccgacaacuacaucacgaccuaccccgggcagggccugaacggguacaccgucgaggaggccaagaccgugcucaagaagugcaaguccgccuucuacauccugcccagcaucaucuccaacgagaagcaggagauccugggcaccgugagcuggaaccuccgggagaugcuggcgcacgccgaggagacgcgcaagcugaugcccgucugcguggagaccaaggccaucguguccaccauccagcggaaguacaagggcaucaagauccaggagggggucguggacuacggcgcccgcuucuacuucuacaccagcaagacgaccguggccucccugaucaacacccucaacgaccugaacgagacccuggucacgaugccgcucggguacgugacccacggccugaaccuggaggaggcggcccgguacaugcgcagccucaaggugcccgccaccgucuccgugagcucccccgacgccgugaccgccuacaacggguaccugacgagcuccagcaagacccccgaggagcacuucaucgagaccaucucccuggcgggcagcuacaaggacuggagcuacuccggccagagcacccagcucgggaucgaguuccugaagcggggcgacaaguccgucuacuacacgagcaacccgaccaccuuccaccuggacggggaggugaucaccuucgacaaccucaagacgcugcugucccuccgcgaggugcggaccaucaaggucuucaccaccguggacaacaucaaccugcacacgcagguggucgacaugagcaugaccuacggccagcaguucggccccaccuaccuggacggggccgacgugaccaagaucaagccccacaacucccacgagggcaagacguucuacgugcucccgaacgacgacacccugcgcgucgaggccuucgaguacuaccacaccaccgaccccagcuuccuggggcgguacauguccgcccucaaccacacgaagaaguggaaguacccccaggugaacggccugaccagcaucaagugggccgacaacaacugcuaccuggcgaccgcccuccugacccugcagcagaucgagcucaaguucaaccccccggcccugcaggacgccuacuaccgcgcgcgggccggggaggccgccaacuucugcgcccugauccucgcguacugcaacaagacggugggcgagcugggcgacguccgcgagaccauguccuaccuguuccagcacgccaaccucgacagcugcaagcgggugcugaacgucgugugcaagaccugcgggcagcagcagaccacccugaagggcguggaggccgucauguacauggggacgcucuccuacgagcaguucaagaagggcgugcagauccccugcaccugcgggaagcaggccaccaaguaccuggugcagcaggagagccccuucgucaugauguccgcccccccggcgcaguacgagcugaagcacggcaccuucacgugcgccagcgaguacaccggcaacuaccagugcgggcacuacaagcacaucaccuccaaggagacccucuacugcaucgacggcgcccugcugacgaagagcagcgaguacaaggggcccaucaccgacguguucuacaaggagaacuccuacaccaccacgaucaagcccgugaccuacaagcucgacggcgucgugugcaccgagaucgaccccaagcuggacaacuacuacaagaaggacaacagcuacuucaccgagcagccgaucgaccuggugcccaaccagcccuaccccaacgccuccuucgacaacuucaaguucgucugcgacaacaucaaguucgccgacgaccucaaccagcugacgggguacaagaagccggcgagccgcgagcugaaggugaccuucuuccccgaccucaacggcgacguggucgccaucgacuacaagcacuacacccccuccuucaagaagggcgccaagcugcugcacaagcccaucguguggcacgugaacaacgccaccaacaaggcgacguacaagccgaacaccuggugcauccggugccucuggagcaccaagcccgucgagaccuccaacagcuucgacgugcugaaguccgaggacgcccaggggauggacaaccuggccugcgaggaccucaagcccgugagcgaggaggucguggagaaccccacgauccagaaggacgugcuggagugcaacgucaagaccaccgagguggugggcgacaucauccugaagccggccaacaacucccucaagaucaccgaggaggucgggcacacggaccugauggccgcguacguggacaacagcucccugaccaucaagaagcccaacgagcucagccgcgugcugggccugaagacccucgccacccacgggcuggccgccgucaacuccgugcccugggacacgaucgccaacuacgcgaagccguuccugaacaagguggucagcaccaccaccaacaucgugacgcgcugccucaaccgggugugcaccaacuacaugcccuacuucuucacccugcugcuccagcugugcaccuucacccgcuccacgaacagccggaucaaggccuccaugcccaccaccaucgccaagaacaccgucaagagcgugggcaaguucugccuggaggcccucuucaacuaccugaagagccccaacuucuccaagcugaucaacaucaucaucugguuccuccugcugagcgugugccucggcucccugaucuacagcacggccgcgcuggggguccucauguccaaccugggcaugccgagcuacugcaccggguaccgcgagggcuaccugaacuccaccaacgugaccaucgccacguacugcaccggcagcauccccugcuccgugugccucagcgggcuggacucccuggacaccuaccccagccucgagaccauccagaucacgaucuccagcuucaagugggaccugaccgccuucggccuggucgccgagugguuccucgccuacauccuguucacccgguucuucuacgugcuggggcucgcggccaucaugcagcuguucuucuccuacuucgccgugcacuucaucagcaacuccuggcugauguggcugaucaucaaccucguccagauggcccccaucagcgcgauggugcgcauguacaucuucuucgccuccuucuacuacguguggaagagcuacguccacgugguggacggcugcaacagcuccaccugcaugaugugcuacaagcggaaccgcgccacgcgggucgagugcaccaccaucgugaacgggguccgccggagcuucuacguguacgccaacggcggcaagggguucugcaagcugcacaacuggaacugcgugaacugcgacaccuucugcgccggcuccacguucaucagcgacgaggucgcgcgcgaccugucccuccaguucaagcggccgaucaaccccaccgaccagagcuccuacaucguggacagcgugaccgucaagaacggguccauccaccuguacuucgacaaggccggccagaagaccuacgagcgccacagccugucccacuucgugaaccucgacaaccugcgggccaacaacacgaaggggagccugcccaucaacgugaucgucuucgacggcaaguccaagugcgaggagagcuccgccaagagcgccuccguguacuacagccagcucaugugccagcccauccugcugcucgaccaggcgcugguguccgacgucggcgacagcgccgagguggccgugaagauguucgacgccuacgucaacaccuucagcuccaccuucaacgugccgauggagaagcugaagacccucguggccacggcggaggccgagcuggccaagaacgucagccuggacaacgugcucuccaccuucaucagcgccgcgcgccagggguucguggacuccgacgucgagaccaaggacgugguggagugccugaagcugagccaccaguccgacaucgaggucaccggcgacagcugcaacaacuacaugcucacguacaacaagguggagaacaugaccccccgggaccugggggccugcaucgacugcuccgcccgccacaucaacgcccagguggccaagagccacaacgucgcgcugaucuggaacgugaaggacuucaugucccucagcgagcagcugcggaagcagauccgcuccgccgccaagaagaacaaccugcccuucaagcucaccugcgccaccacgcgccagguggucaacguggugaccaccaagaucgcccugaagggcgggugaggacuaguuauaagacugacuagcccgaugggccucccaacgggcccuccuccccuccuugcaccgagauuaauaaaaaaaaaaaaaaaaaaaaaaaaaaaaaaaaaaaaaaaaaaaaaaaaaaaaaaaaaaaaaaaaugcaucccccccccccccccccccccccccccccccaaaggcucuuuucagagccaccagaauu

SEQ ID NO: 21730 - RNA, 6058 nt, Artificial Sequence
  SARS-CoV-2__MT750049.1__non-structural protein 3 (NSP3) mRNA gc
aggagaaagcuuaccauggcccccaccaaggugaccuucggcgacgacacggucaucgaggugcagggguacaagagcgugaacaucaccuucgagcuggacgagcgcaucgacaagguccucaacgagaagugcuccgccuacaccguggagcugggcaccgaggugaacgaguucgcgugcgucguggccgacgccgugaucaagacgcugcagccggucagcgagcuccugaccccccuggggaucgaccucgacgagugguccauggccaccuacuaccuguucgacgagagcggcgaguucaagcuggccucccacauguacugcagcuucuacccccccgacgaggacgaggaggagggggacugcgaggaggaggaguucgagccguccacccaguacgaguacggcacggaggacgacuaccagggcaagccccucgaguucggggcgaccagcgccgcccugcagcccgaggaggagcaggaggaggacuggcuggacgacgacucccagcagaccgugggccagcaggacgggagcgaggacaaccagaccacgaccauccagaccaucguggagguccagccccagcucgagauggagcugaccccgguggugcagacgaucgaggucaacuccuucagcggcuaccugaagcucaccgacaacguguacaucaagaacgccgacaucguggaggaggcgaagaaggucaagcccaccgugguggucaacgccgccaacguguaccugaagcacgggggcggcguggccggggcccugaacaaggcgaccaacaacgccaugcaggucgaguccgacgacuacaucgccacgaacggcccccucaagguggggggcagcugcguccuguccggccacaaccuggccaagcacugccuccacgugguggggcccaacgucaacaagggcgaggacauccagcugcugaagagcgccuacgagaacuucaaccagcacgaggugcuccuggcgccgcugcucuccgccgggaucuucggcgccgaccccauccacagccugcgggugugcgucgacaccgugcgcaccaacguguaccuggccgucuucgacaagaaccucuacgacaagcugguguccagcuuccuggagaugaagagcgagaagcagguggagcagaacaucgccgagauccccaaggaggaggucaagcccuucaucaccgaguccaagccgagcguggagcagcggaagcaggacgacaagaagaucaaggcgugcguggaggaggucacgaccacccucgaggagaccaaguuccugacggagaaccugcuccuguacaucgacaucaacgggaaccugcaccccgacuccgccacccucgugagcgacaucgacaucaccuuccugaagaaggacgcccccuacaucgugggcgacgucgugcaggagggcgugcugaccgccgucgugauccccacgaagaaggccgggggcaccaccgagaugcucgcgaaggcccugcgcaagguguccaccgacaacuacaucacgaccuacccggggcagggccugaacggguacaccgucgaggaggccaagaccgugcucaagaagugcaagagcgccuucuacauccugcccuccaucaucagcaacgagaagcaggagauccugggcaccguguccuggaaccuccgggagaugcuggcgcacgccgaggagacgcgcaagcugaugcccgucugcguggagaccaaggccaucgugagcaccauccagcggaaguacaagggcaucaagauccaggagggggucguggacuacggcgcccgcuucuacuucuacaccuccaagacgaccguggccagccugaucaacacccucaacgaccugaacgagacccuggucacgaugccccucggguacgugacccacggccugaaccuggaggaggcggcccgguacaugcgcucccucaaggugccggccaccgucagcguguccagccccgacgccgugaccgccuacaacggguaccugacguccagcuccaagacccccgaggagcacuucaucgagaccaucagccuggcgggcagcuacaaggacugguccuacagcggccaguccacccagcucgggaucgaguuccugaagcggggcgacaagagcgucuacuacacguccaaccccaccaccuuccaccuggacggggaggugaucaccuucgacaaccucaagacgcugcugagccuccgcgaggugcggaccaucaaggucuucaccaccguggacaacaucaaccugcacacgcagguggucgacauguccaugaccuacggccagcaguucggcccgaccuaccuggacggggccgacgugaccaagaucaagccccacaacagccacgagggcaagacguucuacgugcuccccaacgacgacacccugcgcgucgaggccuucgaguacuaccacaccaccgacccguccuuccuggggcgguacaugagcgcccucaaccacacgaagaaguggaaguacccccaggugaacggccugaccuccaucaagugggccgacaacaacugcuaccuggcgaccgcccuccugacccugcagcagaucgagcucaaguucaacccccccgcccugcaggacgccuacuaccgcgcgcgggccggggaggccgccaacuucugcgcccugauccucgcguacugcaacaagacggugggcgagcugggcgacguccgcgagaccaugagcuaccuguuccagcacgccaaccucgacuccugcaagcgggugcugaacgucgugugcaagaccugcgggcagcagcagaccacccugaagggcguggaggccgucauguacauggggacgcucagcuacgagcaguucaagaagggcgugcagaucccgugcaccugcgggaagcaggccaccaaguaccuggugcagcaggaguccagcuucgucaugauguccgccccccccgcgcaguacgagcugaagcacggcaccuucacgugcgccagcgaguacaccggcaacuaccagugcgggcacuacaagcacaucaccagcaaggagacccucuacugcaucgacggcgcccugcugacgaaguccagcgaguacaaggggcccaucaccgacguguucuacaaggagaacuccuacaccaccacgaucaagccggugaccuacaagcucgacggcgucgugugcaccgagaucgaccccaagcuggacaacuacuacaagaaggacaacagcuacuucaccgagcagcccaucgaccuggugcccaaccagccguaccccaacgccuccuucgacaacuucaaguucgucugcgacaacaucaaguucgccgacgaccucaaccagcugacgggguacaagaagcccgcgagccgcgagcugaaggugaccuucuuccccgaccucaacggcgacguggucgccaucgacuacaagcacuacaccccguccuucaagaagggcgccaagcugcugcacaagcccaucguguggcacgugaacaacgccaccaacaaggcgacguacaagcccaacaccuggugcauccggugccucuggagcaccaagcccgucgagaccuccaacagcuucgacgugcugaaguccgaggacgcccaggggauggacaaccuggccugcgaggaccucaagccggugagcgaggaggucguggagaaccccacgauccagaaggacgugcuggagugcaacgucaagaccaccgagguggugggcgacaucauccugaagcccgccaacaacucccucaagaucaccgaggaggucgggcacacggaccugauggccgcguacguggacaacagcucccugaccaucaagaagcccaacgagcucagccgcgugcugggccugaagacccucgccacccacgggcuggccgccgucaacuccgugccgugggacacgaucgccaacuacgcgaagcccuuccugaacaagguggucagcaccaccaccaacaucgugacgcgcugccucaaccgggugugcaccaacuacaugcccuacuucuucacccugcugcuccagcugugcaccuucacccgcuccacgaacagccggaucaaggccagcaugccgaccaccaucgccaagaacaccgucaaguccgugggcaaguucugccuggaggccagcuucaacuaccucaagucccccaacuucagcaagcugaucaacaucaucaucugguuccugcuccuguccgugugccugggcagccucaucuacuccacggccgcgcuggggguccugaugagcaaccucggcaugcccuccuacugcaccggguaccgcgagggcuaccugaacagcaccaacgugaccaucgccacguacugcaccggcuccauccccugcagcgugugccuguccagccucgacucccuggacaccuacccgagccuggagaccauccagaucacgaucuccagcuucaagugggaccucaccgccuucgggcuggucgccgagugguuccuggccuacauccucuucacccgguucuucuacgugcugggccuggcggccaucaugcagcucuucuucuccuacuucgccgugcacuucaucagcaacagcuggcugauguggcugaucaucaaccugguccagauggcccccaucuccgcgauggugcgcauguacaucuucuucgccagcuucuacuacguguggaaguccuacguccacgugguggacgggugcaacagcuccaccugcaugaugugcuacaagcggaaccgcgccacgcgggucgagugcaccaccaucgugaacggcguccgccggagcuucuacguguacgccaacgggggcaagggcuucugcaagcuccacaacuggaacugcgugaacugcgacaccuucugcgccggguccacguucaucagcgacgaggucgcgcgcgaccugucccugcaguucaagcggcccaucaaccccaccgaccagagcuccuacaucguggacagcgugaccgucaagaacggcuccauccaccucuacuucgacaaggccgggcagaagaccuacgagcgccacagccugucccacuucgugaacuucgacaaccugcgggccaacaacacgaagggcagccucccgaucaacgugaucgucuucgacgggaaguccaagugcgaggagagcuccgccaagagcgccagcguguacuacucccagcugaugugccagcccauccugcuccuggaccaggcgcuggugagcgacgucggcgacuccgccgagguggccgugaagauguucgacgccuacgucaacaccuucagcuccaccuucaacgugcccauggagaagcucaagacccugguggccacggcggaggccgagcuggccaagaacgucagccucgacaacgugcuguccaccuucaucagcgccgcgcgccagggcuucguggacuccgacgucgagaccaaggacgugguggagugccugaagcucagccaccaguccgacaucgaggucaccggggacagcugcaacaacuacaugcugacguacaacaagguggagaacaugaccccccgggaccugggcgccugcaucgacugcuccgcccgccacaucaacgcccagguggccaagagccacaacaucgcgcucaucuggaacgucaaggacuucaugucccugagcgagcagcugcggaagcagauccgcuccgccgccaagaagaacaaccucccguucaagcugaccugcgccaccacgcgccagguggugaacgucgugaccaccaagaucgcccugaaggggggcugaggacuaguuauaagacugacuagcccgaugggccucccaacgggcccuccuccccuccuugcaccgagauuaauaaaaaaaaaaaaaaaaaaaaaaaaaaaaaaaaaaaaaaaaaaaaaaaaaaaaaaaaaaaaaaaaugcaucccccccccccccccccccccccccccccccaaaggcucuuuucagagccaccagaauu

SEQ ID NO: 21731 - RNA, 6058 nt, Artificial Sequence
  SARS-CoV-2__MT750056.1__non-structural protein 3 (NSP3) mRNA gc
aggagaaagcuuaccauggcccccaccaaggugaccuucggcgacgacacggucaucgaggugcagggguacaagagcgugaacaucaccuucgagcuggacgagcgcaucgacaagguccucaacgagaagugcuccgccuacaccguggagcugggcaccgaggugaacgaguucgcgugcgucguggccgacgccgugaucaagacgcugcagccggucagcgagcuccugaccccccuggggaucgaccucgacgagugguccauggccaccuacuaccuguucgacgagagcggcgaguucaagcuggccucccacauguacugcagcuucuacccccccgacgaggacgaggaggagggggacugcgaggaggaggaguucgagccguccacccaguacgaguacggcacggaggacgacuaccagggcaagccccucgaguucggggcgaccagcgccgcccugcagcccgaggaggagcaggaggaggacuggcuggacgacgacucccagcagaccgugggccagcaggacgggagcgaggacaaccagaccacgaccauccagaccaucguggagguccagccccagcucgagauggagcugaccccgguggugcagacgaucgaggucaacuccuucagcggcuaccugaagcucaccgacaacguguacaucaagaacgccgacaucguggaggaggcgaagaaggucaagcccaccgugguggucaacgccgccaacguguaccugaagcacgggggcggcguggccggggcccugaacaaggcgaccaacaacgccaugcaggucgaguccgacgacuacaucgccacgaacggcccccucaagguggggggcagcugcguccuguccggccacaaccuggccaagcacugccuccacgugguggggcccaacgucaacaagggcgaggacauccagcugcugaagagcgccuacgagaacuucaaccagcacgaggugcuccuggcgccgcugcucuccgccgggaucuucggcgccgaccccauccacagccugcgggugugcgucgacaccgugcgcaccaacguguaccuggccgucuucgacaagaaccucuacgacaagcugguguccagcuuccuggagaugaagagcgagaagcagguggagcagaacaucgccgagauccccaaggaggaggucaagcccuucaucaccgaguccaagccgagcguggagcagcggaagcaggacgacaagaagaucaaggcgugcguggaggaggucacgaccacccucgaggagaccaaguuccugacggagaaccugcuccuguacaucgacaucaacgggaaccugcaccccgacuccgccacccucgugagcgacaucgacaucaccuuccugaagaaggacgcccccuacaucgugggcgacgucgugcaggagggcgugcugaccgccgucgugauccccacgaagaaggccgggggcaccaccgagaugcucgcgaaggcccugcgcaaggugccgaccgacaacuacaucacgaccuaccccgggcagggccugaacggguacaccgucgaggaggccaagaccgugcucaagaagugcaaguccgccuucuacauccugcccagcaucaucuccaacgagaagcaggagauccugggcaccgugagcuggaaccuccgggagaugcuggcgcacgccgaggagacgcgcaagcugaugcccgucugcguggagaccaaggccaucguguccaccauccagcggaaguacaagggcaucaagauccaggagggggucguggacuacggcgcccgcuucuacuucuacaccagcaagacgaccguggccucccugaucaacacccucaacgaccugaacgagacccuggucacgaugccgcucggguacgugacccacggccugaaccuggaggaggcggcccgguacaugcgcagccucaaggugcccgccaccgucuccgugagcucccccgacgccgugaccgccuacaacggguaccugacgagcuccagcaagacccccgaggagcacuucaucgagaccaucucccuggcgggcagcuacaaggacuggagcuacuccggccagagcacccagcucgggaucgaguuccugaagcggggcgacaaguccgucuacuacacgagcaacccgaccaccuuccaccuggacggggaggugaucaccuucgacaaccucaagacgcugcugucccuccgcgaggugcggaccaucaaggucuucaccaccguggacaacaucaaccugcacacgcagguggucgacaugagcaugaccuacggccagcaguucggccccaccuaccuggacggggccgacgugaccaagaucaagccccacaacucccacgagggcaagacguucuacgugcucccgaacgacgacacccugcgcgucgaggccuucgaguacuaccacaccaccgaccccagcuuccuggggcgguacauguccgcccucaaccacacgaagaaguggaaguacccccaggugaacggccugaccagcaucaagugggccgacaacaacugcuaccuggcgaccgcccuccugacccugcagcagaucgagcucaaguucaaccccccggcccugcaggacgccuacuaccgcgcgcgggccggggaggccgccaacuucugcgcccugauccucgcguacugcaacaagacggugggcgagcugggcgacguccgcgagaccauguccuaccuguuccagcacgccaaccucgacagcugcaagcgggugcugaacgucgugugcaagaccugcgggcagcagcagaccacccugaagggcguggaggccgucauguacauggggacgcucuccuacgagcaguucaagaagggcgugcagauccccugcaccugcgggaagcaggccaccaaguaccuggugcagcaggagagccccuucgucaugauguccgcccccccggcgcaguacgagcugaagcacggcaccuucacgugcgccagcgaguacaccggcaacuaccagugcgggcacuacaagcacaucaccuccaaggagacccucuacugcaucgacggcgcccugcugacgaagagcagcgaguacaaggggcccaucaccgacguguucuacaaggagaacuccuacaccaccacgaucaagcccgugaccuacaagcucgacggcgucgugugcaccgagaucgaccccaagcuggacaacuacuacaagaaggacaacagcuacuucaccgagcagccgaucgaccuggugcccaaccagcccuaccccaacgccuccuucgacaacuucaaguucgucugcgacaacaucaaguucgccgacgaccucaaccagcugacgggguacaagaagccggcgagccgcgagcugaaggugaccuucuuccccgaccucaacggcgacguggucgccaucgacuacaagcacuacacccccuccuucaagaagggcgccaagcugcugcacaagcccaucguguggcacgugaacaacgccaccaacaaggcgacguacaagccgaacaccuggugcauccggugccucuggagcaccaagcccgucgagaccuccaacagcuucgacgugcugaaguccgaggacgcccaggggauggacaaccuggccugcgaggaccucaagcccgugagcgaggaggucguggagaaccccacgauccagaaggacgugcuggagugcaacgucaagaccaccgagguggugggcgacaucauccugaagccggccaacaacucccucaagaucaccgaggaggucgggcacacggaccugauggccgcguacguggacaacagcucccugaccaucaagaagcccaacgagcucagccgcgugcugggccugaagacccucgccacccacgggcuggccgccgucaacuccgugcccugggacacgaucgccaacuacgcgaagccguuccugaacaagguggucagcaccaccaccaacaucgugacgcgcugccucaaccgggugugcaccaacuacaugcccuacuucuucacccugcugcuccagcugugcaccuucacccgcuccacgaacagccggaucaaggccuccaugcccaccaccaucgccaagaacaccgucaagagcgugggcaaguucugccuggaggccagcuucaacuaccucaagucccccaacuucagcaagcugaucaacaucaucaucugguuccugcuccuguccgugugccugggcagccucaucuacuccacggccgcgcuggggguccugaugagcaaccucggcaugccguccuacugcaccggguaccgcgagggcuaccugaacagcaccaacgugaccaucgccacguacugcaccggcuccauccccugcagcgugugccuguccgggcucgacagccuggacaccuaccccucccuggagaccauccagaucacgaucagcuccuucaagugggaccucaccgccuucggccuggucgccgagugguuccuggccuacauccucuucacccgguucuucuacgugcuggggcuggcggccaucaugcagcucuucuucagcuacuucgccgugcacuucaucuccaacagcuggcugauguggcugaucaucaaccugguccagauggcccccaucuccgcgauggugcgcauguacaucuucuucgccagcuucuacuacguguggaagagcuacguccacgugguggacggcugcaacuccagcaccugcaugaugugcuacaagcggaaccgcgccacgcgggucgagugcaccaccaucgugaacgggguccgccgguccuucuacguguacgccaacggcggcaagggguucugcaagcuccacaacuggaacugcgugaacugcgacaccuucugcgccggcagcacguucaucuccgacgaggucgcgcgcgaccugagccugcaguucaagcggccgaucaaccccaccgaccaguccagcuacaucguggacuccgugaccgucaagaacgggagcauccaccucuacuucgacaaggccggccagaagaccuacgagcgccacucccugagccacuucgugaaccuggacaaccuccgggccaacaacacgaaguccagccugcccaucaacgugaucgucuucgacgggaaguccaagugcgaggagagcuccgccaagagcgccuccguguacuacagccagcugaugugccagcccauccuccugcuggaccaggcgcucgugagcgacgucggcgacuccgccgagguggccgugaagauguucgacgccuacgucaacaccuucagcuccaccuucaacgugccgauggagaagcugaagacccugguggccacggcggaggccgagcucgccaagaacgucagccuggacaacgugcuguccaccuucaucagcgccgcgcgccagggcuucguggacuccgacgucgagaccaaggacgugguggagugccucaagcugagccaccaguccgacaucgaggucaccggggacagcugcaacaacuacaugcugacguacaacaagguggagaacaugaccccccgggaccucggcgccugcaucgacugcuccgcccgccacaucaacgcccagguggccaagagccacaacaucgcgcugaucuggaacgucaaggacuucaugucccugagcgagcagcuccggaagcagauccgcuccgccgccaagaagaacaaccugcccuucaagcugaccugcgccaccacgcgccagguggugaacgucgugaccaccaagaucgcccucaaggggggcugaggacuaguuauaagacugacuagcccgaugggccucccaacgggcccuccuccccuccuugcaccgagauuaauaaaaaaaaaaaaaaaaaaaaaaaaaaaaaaaaaaaaaaaaaaaaaaaaaaaaaaaaaaaaaaaaugcaucccccccccccccccccccccccccccccccaaaggcucuuuucagagccaccagaauu

SEQ ID NO: 21732 - RNA, 6058 nt, Artificial Sequence
  SARS-CoV-2__MT750087.1__non-structural protein 3 (NSP3) mRNA gc
aggagaaagcuuaccauggcccccaccaaggugaccuucggcgacgacacggucaucgaggugcagggguacaagagcgugaacaucaccuucgagcuggacgagcgcaucgacaagguccucaacgagaagugcuccgccuacaccguggagcugggcaccgaggugaacgaguucgcgugcgucguggccgacgccgugaucaagacgcugcagccggucagcgagcuccugaccccccuggggaucgaccucgacgagugguccauggccaccuacuaccuguucgacgagagcggcgaguucaagcuggccucccacauguacugcagcuucuacccccccgacgaggacgaggaggagggggacugcgaggaggaggaguucgagccguccacccaguacgaguacggcacggaggacgacuaccagggcaagccccucgaguucggggcgaccagcgccgcccugcagcccgaggaggagcaggaggaggacuggcuggacgacgacucccagcagaccgugggccagcaggacgggagcgaggacaaccagaccacgaccauccagaccaucguggagguccagccccagcucgagauggagcugaccccgguggugcagacgaucgaggucaacuccuucagcggcuaccugaagcucaccgacaacguguacaucaagaacgccgacaucguggaggaggcgaagaaggucaagcccaccgugguggucaacgccgccaacguguaccugaagcacgggggcggcguggccggggcccugaacaaggcgaccaacaacgccaugcaggucgaguccgacgacuacaucgccacgaacggcccccucaagguggggggcagcugcguccuguccggccacaaccuggccaagcacugccuccacgugguggggcccaacgucaacaagggcgaggacauccagcugcugaagagcgccuacgagaacuucaaccagcacgaggugcuccuggcgccgcugcucuccgccgggaucuucggcgccgaccccauccacagccugcgggugugcgucgacaccgugcgcaccaacguguaccuggccgucuucgacaagaaccucuacgacaagcugguguccagcuuccuggagaugaagagcgagaagcagguggagcagaagaucgccgagauccccaaggaggaggucaagcccuucaucaccgaguccaagccgagcguggagcagcggaagcaggacgacaagaagaucaaggcgugcguggaggaggucacgaccacccucgaggagaccaaguuccugacggagaaccugcuccuguacaucgacaucaacgggaaccugcaccccgacuccgccacccucgugagcgacaucgacaucaccuuccugaagaaggacgcccccuacaucgugggcgacgucgugcaggagggcgugcugaccgccgucgugauccccacgaagaaggccgggggcaccaccgagaugcucgcgaaggcccugcgcaaggugccgaccgacaacuacaucacgaccuaccccgggcagggccugaacggguacaccgucgaggaggccaagaccgugcucaagaagugcaaguccgccuucuacauccugcccagcaucaucuccaacgagaagcaggagauccugggcaccgugagcuggaaccuccgggagaugcuggcgcacgccgaggagacgcgcaagcugaugcccgucugcguggagaccaaggccaucguguccaucauccagcggaaguacaagggcaucaagauccaggagggggucguggacuacggcgcccgcuucuacuucuacaccagcaagaccacgguggccucccugaucaacacccucaacgaccugaacgagacccuggucaccaugccgcucggguacgugacgcacggccugaaccuggaggaggcggcccgguacaugcgcagccucaaggugcccgccaccgucuccgugagcucccccgacgccgugaccgccuacaacggguaccugaccagcuccagcaagacgcccgaggagcacuucaucgagaccaucucccuggcgggcagcuacaaggacuggagcuacuccggccagagcacccagcucgggaucgaguuccugaagcggggcgacaaguccgucuacuacaccagcaacccgacgaccuuccaccuggacggggaggugaucaccuucgacaaccucaagacccugcugucccuccgcgaggugcggacgaucaaggucuucaccaccguggacaacaucaaccugcacacccagguggucgacaugagcaugacguacggccagcaguucggccccaccuaccuggacggggccgacgugaccaagaucaagccccacaacucccacgagggcaagaccuucuacgugcucccgaacgacgacacgcugcgcgucgaggccuucgaguacuaccacaccaccgaccccagcuuccuggggcgguacauguccgcccucaaccacaccaagaaguggaaguacccccaggugaacggccugacgagcaucaagugggccgacaacaacugcuaccuggcgaccgcccuccugacccugcagcagaucgagcucaaguucaaccccccggcccugcaggacgccuacuaccgcgcgcgggccggggaggccgccaacuucugcgcccugauccucgcguacugcaacaagaccgugggcgagcugggcgacguccgcgagacgauguccuaccuguuccagcacgccaaccucgacagcugcaagcgggugcugaacgucgugugcaagaccugcgggcagcagcagaccacccugaagggcguggaggccgucauguacauggggacccucuccuacgagcaguucaagaagggcgugcagauccccugcacgugcgggaagcaggccaccaaguaccuggugcagcaggagagccccuucgucaugauguccgcccccccggcgcaguacgagcugaagcacggcaccuucaccugcgccagcgaguacacgggcaacuaccagugcgggcacuacaagcacaucaccuccaaggagacccucuacugcaucgacggcgcccugcugaccaagagcagcgaguacaaggggcccaucacggacguguucuacaaggagaacuccuacaccaccaccaucaagcccgugacguacaagcucgacggcgucgugugcaccgagaucgaccccaagcuggacaacuacuacaagaaggacaacagcuacuucaccgagcagccgaucgaccuggugcccaaccagcccuaccccaacgccuccuucgacaacuucaaguucgucugcgacaacaucaaguucgccgacgaccucaaccagcugaccggguacaagaagccggcgagccgcgagcugaaggugacguucuuccccgaccucaacggcgacguggucgccaucgacuacaagcacuacacccccuccuucaagaagggcgccaagcugcugcacaagcccaucguguggcacgugaacaacgccaccaacaaggcgaccuacaagccgaacacguggugcauccggugccucuggagcaccaagcccgucgagaccuccaacagcuucgacgugcugaaguccgaggacgcccaggggauggacaaccuggccugcgaggaccucaagcccgugagcgaggaggucguggagaaccccaccauccagaaggacgugcuggagugcaacgucaagacgaccgagguggugggcgacaucauccugaagccggccaacaacucccucaagaucaccgaggaggucgggcacaccgaccugauggccgcguacguggacaacagcucccugacgaucaagaagcccaacgagcucagccgcgugcugggccugaagacccucgccacccacgggcuggccgccgucaacuccgugcccugggacaccaucgccaacuacgcgaagccguuccugaacaagguggucagcacgaccaccaacaucgugacccgcugccucaaccgggugugcacgaacuacaugcccuacuucuucacccugcugcuccagcugugcaccuucacccgcuccaccaacagccggaucaaggccuccaugcccacgaccaucgccaagaacaccgucaagagcgugggcaaguucugccuggaggccagcuucaacuaccucaagucccccaacuucagcaagcugaucaacaucaucaucugguuccugcuccuguccgugugccugggcagccucaucuacuccaccgccgcgcuggggguccugaugagcaaccucggcaugccguccuacugcacgggguaccgcgagggcuaccugaacagcaccaacgugaccaucgccaccuacugcacgggcuccauccccugcagcgugugccuguccgggcucgacagccuggacaccuaccccucccuggagaccauccagaucaccaucagcuccuucaagugggaccucacggccuucggccuggucgccgagugguuccuggccuacauccucuucacccgguucuucuacgugcuggggcuggcggccaucaugcagcucuucuucagcuacuucgccgugcacuucaucuccaacagcuggcugauguggcugaucaucaaccugguccagauggcccccaucuccgcgauggugcgcauguacaucuucuucgccagcuucuacuacguguggaagagcuacguccacgugguggacggcugcaacuccagcaccugcaugaugugcuacaagcggaaccgcgccacccgggucgagugcacgaccaucgugaacgggguccgccgguccuucuacguguacgccaacggcggcaagggguucugcaagcuccacaacuggaacugcgugaacugcgacaccuucugcgccggcagcaccuucaucuccgacgaggucgcgcgcgaccugagccugcaguucaagcggccgaucaaccccacggaccaguccagcuacaucguggacuccgugaccgucaagaacgggagcauccaccucuacuucgacaaggccggccagaagaccuacgagcgccacucccugagccacuucgugaaccuggacaaccuccgggccaacaacaccaaggggucccugcccaucaacgugaucgucuucgacggcaagagcaagugcgaggaguccagcgccaaguccgccagcguguacuacucccagcugaugugccagcccauccuccugcuggaccaggcgcucgugagcgacgucggcgacagcgccgagguggccgugaagauguucgacgccuacgucaacacguucuccagcaccuucaacgugccgauggagaagcugaagacccugguggccaccgcggaggccgagcucgccaagaacgucucccuggacaacgugcugagcacguucaucuccgccgcgcgccagggguucguggacagcgacgucgagaccaaggacgugguggagugccucaagcugucccaccagagcgacaucgaggucaccggcgacuccugcaacaacuacaugcugaccuacaacaagguggagaacaugacgccccgggaccucggggccugcaucgacugcagcgcccgccacaucaacgcccagguggccaagucccacaacaucgcgcugaucuggaacgucaaggacuucaugagccuguccgagcagcuccggaagcagauccgcagcgccgccaagaagaacaaccugcccuucaagcugaccugcgccaccacccgccagguggugaacgucgugacgaccaagaucgcccucaagggcgggugaggacuaguuauaagacugacuagcccgaugggccucccaacgggcccuccuccccuccuugcaccgagauuaauaaaaaaaaaaaaaaaaaaaaaaaaaaaaaaaaaaaaaaaaaaaaaaaaaaaaaaaaaaaaaaaaugcaucccccccccccccccccccccccccccccccaaaggcucuuuucagagccaccagaauu

SEQ ID NO: 21733 - RNA, 6058 nt, Artificial Sequence
  SARS-CoV-2__MT750365.1__non-structural protein 3 (NSP3) mRNA gc
aggagaaagcuuaccauggcccccaccaaggugaccuucggcgacgacacggucaucgaggugcagggguacaagagcgugaacaucaccuucgagcuggacgagcgcaucgacaagguccucaacgagaagugcuccgccuacaccguggagcugggcaccgaggugaacgaguucgcgugcgucguggccgacgccgugaucaagacgcugcagccggucagcgagcuccugaccccccuggggaucgaccucgacgagugguccauggccaccuacuaccuguucgacgagagcggcgaguucaagcuggccucccacauguacugcagcuucuacccccccgacgaggacgaggaggagggggacugcgaggaggaggaguucgagccguccacccaguacgaguacggcacggaggacgacuaccagggcaagccccucgaguucggggcgaccagcgccgcccugcagcccgaggaggagcaggaggaggacuggcuggacgacgacucccagcagaccgugggccagcaggacgggagcgaggacaaccagaccacgaccauccagaccaucguggagguccagccccagcucgagauggagcugaccccgguggugcagacgaucgaggucaacuccuucagcggcuaccugaagcucaccgacaacguguacaucaagaacgccgacaucguggaggaggcgaagaaggucaagcccaccgugguggucaacgccgccaacguguaccugaagcacgggggcggcguggccggggcccugaacaaggcgaccaacaacgccaugcaggucgaguccgacgacuacaucgccacgaacggcccccucaagguggggggcagcugcguccuguccggccacaaccuggccaagcacugccuccacgugguggggcccaacgucaacaagggcgaggacauccagcugcugaagagcgccuacgagaacuucaaccagcacgaggugcuccuggcgccgcugcucuccgccgggaucuucggcgccgaccccauccacagccugcgggugugcgucgacaccgugcgcaccaacguguaccuggccgucuucgacaagaaccucuacgacaagcugguguccagcuuccuggagaugaagagcgagaagcagguggagcagaagaucgccgagauccccaaggaggaggucaagcccuucaucaccgaguccaagccgagcguggagcagcggaagcaggacgacaagaagaucaaggcgugcguggaggaggucacgaccacccucgaggagaccaaguuccugacggagaaccugcuccuguacaucgacaucaacgggaaccugcaccccgacuccgccacccucgugagcgacaucgacaucaccuuccugaagaaggacgcccccuacaucgugggcgacgucgugcaggagggcgugcugaccgccgucgugauccccacgaagaaggccgggggcaccaccgagaugcucgcgaaggcccugcgcaaggugccgaccgacaacuacaucacgaccuaccccgggcagggccugaacggguacaccgucgaggaggccaagaccgugcucaagaagugcaaguccgccuucuacauccugcccagcaucaucuccaacgagaagcaggagauccugggcaccgugagcuggaaccuccgggagaugcuggcgcacgccgaggagacgcgcaagcugaugcccgucugcguggagaccaaggccaucguguccaccauccagcggaaguacaagggcaucaagauccaggagggggucguggacuacggcgcccgcuucuacuucuacaccagcaagacgaccguggccucccugaucaacacccucaacgaccugaacgagacccuggucacgaugccgcucggguacgugacccacggccugaaccuggaggaggcggcccgguacaugcgcagccucaaggugcccgccaccgucuccgugagcucccccgacgccgugaccgccuacaacggguaccugacgagcuccagcaagacccccgaggagcacuucaucgagaccaucucccuggcgggcagcuacaaggacuggagcuacuccggccagagcacccagcucgggaucgaguuccugaagcggggcgacaaguccgucuacuacacgagcaacccgaccaccuuccaccuggacggggaggugaucaccuucgacaaccucaagacgcugcugucccuccgcgaggugcggaccaucaaggucuucaccaccguggacaacaucaaccugcacacgcagguggucgacaugagcaugaccuacggccagcaguucggccccaccuaccuggacggggccgacgugaccaagaucaagccccacaacucccacgagggcaagacguucuacgugcucccgaacgacgacacccugcgcgucgaggccuucgaguacuaccacaccaccgaccccagcuuccuggggcgguacauguccgcccucaaccacacgaagaaguggaaguacccccaggugaacggccugaccagcaucaagugggccgacaacaacugcuaccuggcgaccgcccuccugacccugcagcagaucgagcucaaguucaaccccccggcccugcaggacgccuacuaccgcgcgcgggccggggaggccgccaacuucugcgcccugauccucgcguacugcaacaagacggugggcgagcugggcgacguccgcgagaccauguccuaccuguuccagcacgccaaccucgacagcugcaagcgggugcugaacgucgugugcaagaccugcgggcagcagcagaccacccugaagggcguggaggccgucauguacauggggacgcucuccuacgagcaguucaagaagggcgugcagauccccugcaccugcgggaagcaggccaccaaguaccuggugcagcaggagagccccuucgucaugauguccgcccccccggcgcaguacgagcugaagcacggcaccuucacgugcgccagcgaguacaccggcaacuaccagugcgggcacuacaagcacaucaccuccaaggagacccucuacugcaucgacggcgcccugcugacgaagagcagcgaguacaaggggcccaucaccgacguguucuacaaggagaacuccuacaccaccacgaucaagcccgugaccuacaagcucgacggcgucgugugcaccgagaucgaccccaagcuggacaacuacuacaagaaggacaacagcuacuucaccgagcagccgaucgaccuggugcccaaccagcccuaccccaacgccuccuucgacaacuucaaguucgucugcgacaacaucaaguucgccgacgaccucaaccagcugacgggguacaagaagccggcgagccgcgagcugaaggugaccuucuuccccgaccucaacggcgacguggucgccaucgacuacaagcacuacacccccuccuucaagaagggcgccaagcugcugcacaagcccaucguguggcacgugaacaacgccaccaacaaggcgacguacaagccgaacaccuggugcauccggugccucuggagcaccaagcccgucgagaccuccaacagcuucgacgugcugaaguccgaggacgcccaggggauggacaaccuggccugcgaggaccucaagcccgugagcgaggaggucguggagaaccccacgauccagaaggacgugcuggagugcaacgucaagaccaccgagguggugggcgacaucauccugaagccggccaacaacucccucaagaucaccgaggacgucgggcacacggaccugauggccgcguacguggacaacagcucccugaccaucaagaagcccaacgagcucagccgcgugcugggccugaagacccucgccacccacgggcuggccgccgucaacuccgugcccugggacacgaucgccaacuacgcgaagccguuccugaacaagguggucagcaccaccaccaacaucgugacgcgcugccucaaccgggugugcaccaacuacaugcccuacuucuucacccugcugcuccagcugugcaccuucacccgcuccacgaacagccggaucaaggccuccaugcccaccaccaucgccaagaacaccgucaagagcgugggcaaguucugccuggaggccagcuucaacuaccucaagucccccaacuucagcaagcugaucaacaucaucaucugguuccugcuccuguccgugugccugggcagccucaucuacuccacggccgcgcuggggguccugaugagcaaccucggcaugccguccuacugcaccggguaccgcgagggcuaccugaacagcaccaacgugaccaucgccacguacugcaccggcuccauccccugcagcgugugccuguccgggcucgacagccuggacaccuaccccucccuggagaccauccagaucacgaucagcuccuucaagugggaccucaccgccuucggccuggucgccgagugguuccuggccuacauccucuucacccgguucuucuacgugcuggggcuggcggccaucaugcagcucuucuucagcuacuucgccgugcacuucaucuccaacagcuggcugauguggcugaucaucaaccugguccagauggcccccaucuccgcgauggugcgcauguacaucuucuucgccagcuucuacuacguguggaagagcuacguccacgugguggacggcugcaacuccagcaccugcaugaugugcuacaagcggaaccgcgccacgcgggucgagugcaccaccaucgugaacgggguccgccgguccuucuacguguacgccaacggcggcaagggguucugcaagcuccacaacuggaacugcgugaacugcgacaccuucugcgccggcagcacguucaucuccgacgaggucgcgcgcgaccugagccugcaguucaagcggccgaucaaccccaccgaccaguccagcuacaucguggacuccgugaccgucaagaacgggagcauccaccucuacuucgacaaggccggccagaagaccuacgagcgccacucccugagccacuucgugaaccuggacaaccuccgggccaacaacacgaaggggucccugcccaucaacgugaucgucuucgacggcaagagcaagugcgaggaguccagcgccaaguccgccagcguguacuacucccagcugaugugccagcccauccuccugcuggaccaggcgcucgugagcgacgucggcgacagcgccgagguggccgugaagauguucgacgccuacgucaacaccuucuccagcaccuucaacgugccgauggagaagcugaagacccugguggccacggcggaggccgagcucgccaagaacgucucccuggacaacgugcugagcaccuucaucuccgccgcgcgccagggguucguggacagcgacgucgagaccaaggacgugguggagugccucaagcugucccaccagagcgacaucgaggucaccggcgacuccugcaacaacuacaugcugacguacaacaagguggagaacaugaccccccgggaccucggggccugcaucgacugcagcgcccgccacaucaacgcccagguggccaagucccacaacaucgcgcugaucuggaacgucaaggacuucaugagccuguccgagcagcuccggaagcagauccgcagcgccgccaagaagaacaaccugcccuucaagcugaccugcgccaccacgcgccagguggugaacgucgugaccaccaagaucgcccucaagggcgggugaggacuaguuauaagacugacuagcccgaugggccucccaacgggcccuccuccccuccuugcaccgagauuaauaaaaaaaaaaaaaaaaaaaaaaaaaaaaaaaaaaaaaaaaaaaaaaaaaaaaaaaaaaaaaaaaugcaucccccccccccccccccccccccccccccccaaaggcucuuuucagagccaccagaauu

SEQ ID NO: 21734 - RNA, 6058 nt, Artificial Sequence
  SARS-CoV-2__MT750410.1__non-structural protein 3 (NSP3) mRNA gc
aggagaaagcuuaccauggcccccaccaaggugaccuucggcgacgacacggucaucgaggugcagggguacaagagcgugaacaucaccuucgagcuggacgagcgcaucgacaagguccucaacgagaagugcuccgccuacaccguggagcugggcaccgaggugaacgaguucgcgugcgucguggccgacgccgugaucaagacgcugcagccggucagcgagcuccugaccccccuggggaucgaccucgacgagugguccauggccaccuacuaccuguucgacgagagcggcgaguucaagcuggccucccacauguacugcagcuucuacccccccgacgaggacgaggaggagggggacugcgaggaggaggaguucgagccguccacccaguacgaguacggcacggaggacgacuaccagggcaagccccucgaguucggggcgaccagcgccgcccugcagcccgaggaggagcaggaggaggacuggcuggacgacgacucccagcagaccgugggccagcaggacgggagcgaggacaaccagaccacgaccauccagaccaucgugggcguccagccccagcucgagauggagcugaccccgguggugcagacgaucgaggucaacuccuucagcggguaccugaagcucaccgacaacguguacaucaagaacgccgacaucguggaggaggcgaagaaggucaagcccaccgugguggucaacgccgccaacguguaccugaagcacggcggcgggguggccggcgcccugaacaaggcgaccaacaacgccaugcaggucgaguccgacgacuacaucgccacgaacgggccccucaaggugggcggcagcugcguccuguccgggcacaaccuggccaagcacugccuccacguggugggccccaacgucaacaagggggaggacauccagcugcugaagagcgccuacgagaacuucaaccagcacgaggugcuccuggcgccgcugcucuccgccggcaucuucggggccgaccccauccacagccugcgggugugcgucgacaccgugcgcaccaacguguaccuggccgucuucgacaagaaccucuacgacaagcugguguccagcuuccuggagaugaagagcgagaagcagguggagcagaagaucgccgagauccccaaggaggaggucaagcccuucaucaccgaguccaagccgagcguggagcagcggaagcaggacgacaagaagaucaaggcgugcguggaggaggucacgaccacccucgaggagaccaaguuccugacggagaaccugcuccuguacaucgacaucaacggcaaccugcaccccgacuccgccacccucgugagcgacaucgacaucaccuuccugaagaaggacgcccccuacaucgugggcgacgucgugcaggagggggugcugaccgccgucgugauccccacgaagaaggccggcgggaccaccgagaugcucgcgaaggcccugcgcaaggugccgaccgacaacuacaucacgaccuaccccggccaggggcugaacggcuacaccgucgaggaggccaagaccgugcucaagaagugcaaguccgccuucuacauccugcccagcaucaucuccaacgagaagcaggagauccugggcaccgugagcuggaaccuccgggagaugcuggcgcacgccgaggagacgcgcaagcugaugcccgucugcguggagaccaaggccaucguguccaccauccagcggaaguacaaggggaucaagauccaggagggcgucguggacuacggggcccgcuucuacuucuacaccagcaagacgaccguggccucccugaucaacacccucaacgaccugaacgagacccuggucacgaugccgcucggcuacgugacccacgggcugaaccuggaggaggcggcccgguacaugcgcagccucaaggugcccgccaccgucuccgugagcucccccgacgccgugaccgccuacaacggcuaccugacgagcuccagcaagacccccgaggagcacuucaucgagaccaucucccuggcgggcagcuacaaggacuggagcuacuccgggcagagcacccagcucggcaucgaguuccugaagcggggggacaaguccgucuacuacacgagcaacccgaccaccuuccaccuggacggcgaggugaucaccuucgacaaccucaagacgcugcugucccuccgcgaggugcggaccaucaaggucuucaccaccguggacaacaucaaccugcacacgcagguggucgacaugagcaugaccuacggccagcaguucgggcccaccuaccuggacggcgccgacgugaccaagaucaagccccacaacucccacgaggggaagacguucuacgugcucccgaacgacgacacccugcgcgucgaggccuucgaguacuaccacaccaccgaccccagcuuccugggccgguacauguccgcccucaaccacacgaagaaguggaaguacccccaggugaacgggcugaccagcaucaagugggccgacaacaacugcuaccuggcgaccgcccuccugacccugcagcagaucgagcucaaguucaaccccccggcccugcaggacgccuacuaccgcgcgcgggccggcgaggccgccaacuucugcgcccugauccucgcguacugcaacaagacggugggcgagcugggggacguccgcgagaccauguccuaccuguuccagcacgccaaccucgacagcugcaagcgggugcugaacgucgugugcaagaccugcggccagcagcagaccacccugaaggggguggaggccgucauguacaugggcacgcucuccuacgagcaguucaagaagggggugcagauccccugcaccugcggcaagcaggccaccaaguaccuggugcagcaggagagccccuucgucaugauguccgcccccccggcgcaguacgagcugaagcacggcaccuucacgugcgccagcgaguacaccgggaacuaccagugcggccacuacaagcacaucaccuccaaggagacccucuacugcaucgacggggcccugcugacgaagagcagcgaguacaagggccccaucaccgacguguucuacaaggagaacuccuacaccaccacgaucaagcccgugaccuacaagcucgacggggucgugugcaccgagaucgaccccaagcuggacaacuacuacaagaaggacaacagcuacuucaccgagcagccgaucgaccuggugcccaaccagcccuaccccaacgccuccuucgacaacuucaaguucgucugcgacaacaucaaguucgccgacgaccucaaccagcugacgggcuacaagaagccggcgagccgcgagcugaaggugaccuucuuccccgaccucaacggcgacguggucgccaucgacuacaagcacuacacccccuccuucaagaagggggccaagcugcugcacaagcccaucguguggcacgugaacaacgccaccaacaaggcgacguacaagccgaacaccuggugcauccggugccucuggagcaccaagcccgucgagaccuccaacagcuucgacgugcugaaguccgaggacgcccagggcauggacaaccuggccugcgaggaccucaagcccgugagcgaggaggucguggagaaccccacgauccagaaggacgugcuggagugcaacgucaagaccaccgagguggugggggacaucauccugaagccggccaacaacucccucaagaucaccgaggaggucggccacacggaccugauggccgcguacguggacaacagcucccugaccaucaagaagcccaacgagcucagccgcgugcuggggcugaagacccucgccacccacggccuggccgccgucaacuccgugcccugggacacgaucgccaacuacgcgaagccguuccugaacaagguggucagcaccaccaccaacaucgugacgcgcugccucaaccgggugugcaccaacuacaugcccuacuucuucacccugcugcuccagcugugcaccuucacccgcuccacgaacagccggaucaaggccuccaugcccaccaccaucgccaagaacaccgucaagagcgugggcaaguucugccuggaggccagcuucaacuaccucaagucccccaacuucagcaagcugaucaacaucaucaucugguuccugcuccuguccgugugccuggggagccucaucuacuccacggccgcgcugggcguccugaugagcaaccucgggaugccguccuacugcaccggcuaccgcgagggcuaccugaacagcaccaacgugaccaucgccacguacugcaccggguccauccccugcagcgugugccuguccggccucgacagccuggacaccuaccccucccuggagaccauccagaucacgaucagcuccuucaagugggaccucaccgccuucgggcuggucgccgagugguuccuggccuacauccucuucacccgguucuucuacgugcugggccuggcggccaucaugcagcucuucuucagcuacuucgccgugcacuucaucuccaacagcuggcugauguggcugaucaucaaccugguccagauggcccccaucuccgcgauggugcgcauguacaucuucuucgccagcuucuacuacguguggaagagcuacguccacgugguggacgggugcaacuccagcaccugcaugaugugcuacaagcggaaccgcgccacgcgggucgagugcaccaccaucgugaacggcguccgccgguccuucuacguguacgccaacggcgggaagggcuucugcaagcuccacaacuggaacugcgugaacugcgacaccuucugcgccgggagcacguucaucuccgacgaggucgcgcgcgaccugagccugcaguucaagcggccgaucaaccccaccgaccaguccagcuacaucguggacuccgugaccgucaagaacggcagcauccaccucuacuucgacaaggccgggcagaagaccuacgagcgccacucccugagccacuucgugaaccuggacaaccuccgggccaacaacacgaagggcucccugcccaucaacgugaucgucuucgacggcaagagcaagugcgaggaguccagcgccaaguccgccagcguguacuacucccagcugaugugccagcccauccuccugcuggaccaggcgcucgugagcgacgucggggacagcgccgagguggccgugaagauguucgacgccuacgucaacaccuucuccagcaccuucaacgugccgauggagaagcugaagacccugguggccacggcggaggccgagcucgccaagaacgucucccuggacaacgugcugagcaccuucaucuccgccgcgcgccagggcuucguggacagcgacgucgagaccaaggacgugguggagugccucaagcugucccaccagagcgacaucgaggucaccggggacuccugcaacaacuacaugcugacguacaacaagguggagaacaugaccccccgggaccucggcgccugcaucgacugcagcgcccgccacaucaacgcccagguggccaagucccacaacaucgcgcugaucuggaacgucaaggacuucaugagccuguccgagcagcuccggaagcagauccgcagcgccgccaagaagaacaaccugcccuucaagcugaccugcgccaccacgcgccagguggugaacgucgugaccaccaagaucgcccucaaggggggcugaggacuaguuauaagacugacuagcccgaugggccucccaacgggcccuccuccccuccuugcaccgagauuaauaaaaaaaaaaaaaaaaaaaaaaaaaaaaaaaaaaaaaaaaaaaaaaaaaaaaaaaaaaaaaaaaugcaucccccccccccccccccccccccccccccccaaaggcucuuuucagagccaccagaauu

SEQ ID NO: 21735 - RNA, 6058 nt, Artificial Sequence
  SARS-CoV-2__MT750418.1__non-structural protein 3 (NSP3) mRNA gc
aggagaaagcuuaccauggcccccaccaaggugaccuucggcgacgacacggucaucgaggugcagggguacaagagcgugaacaucaccuucgagcuggacgagcgcaucgacaagguccucaacgagaagugcuccgccuacaccguggagcugggcaccgaggugaacgaguucgcgugcgucguggccgacgccgugaucaagacgcugcagccggucagcgagcuccugaccccccuggggaucgaccucgacgagugguccauggccaccuacuaccuguucgacgagagcggcgaguucaagcuggccucccacauguacugcagcuucuacccccccgacgaggacgaggaggagggggacugcgaggaggaggaguucgagccguccacccaguacgaguacggcacggaggacgacuaccagggcaagccccucgaguucggggcgaccagcgccgcccugcagcccgaggaggagcaggaggaggacuggcuggacgacgacucccagcagaccgugggccagcaggacgggagcgaggacaaccagaccacgaccauccagaccaucguggagguccagccccagcucgagauggagcugaccccgguggugcagacgaucgaggucaacuccuucagcggcuaccugaagcucaccgacaacguguacaucaagaacgccgacaucguggaggaggcgaagaaggucaagcccaccgugguggucaacgccgccaacguguaccugaagcacgggggcggcguggccggggcccugaacaaggcgaccaacaacgccaugcaggucgaguccgacgacuacaucgccacgaacggcccccucaagguggggggcagcugcguccuguccggccacaaccuggccaagcacugccuccacgugguggggcccaacgucaacaagggcgaggacauccagcugcugaagagcgccuacgagaacuucaaccagcacgaggugcuccuggcgccgcugcucuccgccgggaucuucggcgccgaccccauccacagccugcgggugugcgucgacaccgugcgcaccaacguguaccuggccgucuucgacaagaaccucuacgacaagcugguguccagcuuccuggagaugaagagcgagaagcagguggagcagaagaucgccgagauccccaaggaggaggucaagcccuucaucaccgaguccaagccgagcguggagcagcggaagcaggacgacaagaagaucaaggcgugcguggaggaggucacgaccacccucgaggagaccaaguuccugacggagaaccugcuccuguacaucgacaucaacgggaaccugcaccccgacuccgccacccucgugagcgacaucgacaucaccuuccugaagaaggacgcccccuacaucgugggcgacgucgugcaggagggcgugcugaccgccgucgugauccccacgaagaaggccgggggcaccaccgagaugcucgcgaaggcccugcgcaaggugccgaccgacaacuacaucacgaccuaccccgggcagggccugaacggguacaccgucgaggaggccaagaccgugcucaagaagugcaaguccgccuucuacauccugcccagcaucaucuccaacgagaagcaggagauccugggcaccgugagcuggaaccuccgggagaugcuggcgcacgccgaggagacgcgcaagcugaugcccgucugcguggagaccaaggccaucguguccaccauccagcggaaguacaagggcaucaagauccaggagggggucguggacuacggcgcccgcuucuacuucuacaccagcaagacgaccguggccucccugaucaacacccucaacgaccugaacgagacccuggucacgaugccgcucggguacgugacccacggccugaaccuggaggaggcggcccgguacaugcgcagccucaaggugcccgccaccgucuccgugagcucccccgacgccgugaccgccuacaacggguaccugacgagcuccagcaagacccccgaggagcacuucaucgagaccaucucccuggcgggcagcuacaaggacuggagcuacuccggccagagcacccagcucgggaucgaguuccugaagcggggcgacaaguccgucuacuacacgagcaacccgaccaccuuccaccuggacggggaggugaucaccuucgacaaccucaagacgcugcugucccuccgcgaggugcggaccaucaaggucuucaccaccguggacaacaucaaccugcacacgcagguggucgacaugagcaugaccuacggccagcaguucggccccaccuaccuggacggggccgacgugaccaagaucaagccccacaacucccacgagggcaagacguucuacgugcucccgaacgacgacacccugcgcgucgaggccuucgaguacuaccacaccaccgaccccagcuuccuggggcgguacauguccgcccucaaccacacgaagaaguggaaguacccccaggugaacggccugaccagcaucaagugggccgacaacaacugcuaccuggcgaccgcccuccugacccugcagcagaucgagcucaaguucaaccccccggcccugcaggacgccuacuaccgcgcgcgggccggggaggccgccaacuucugcgcccugauccucgcguacugcaacaagacggugggcgagcugggcgacguccgcgagaccauguccuaccuguuccagcacgccaaccucgacagcugcaagcgggugcugaacgucgugugcaagaccugcgggcagcagcagaccacccugaagggcguggaggccgucauguacauggggacgcucuccuacgagcaguucaagaagggcgugcagauccccugcaccugcgggaagcaggccaccaaguaccuggugcagcaggagagccccuucgucaugauguccgcccccccggcgcaguacgagcugaagcacggcaccuucacgugcgccagcgaguacaccggcaacuaccagugcgggcacuacaagcacaucaccuccaaggagacccucuacugcaucgacggcgcccugcugacgaagagcagcgaguacaaggggcccaucaccgacguguucuacaaggagaacuccuacaccaccacgaucaagcccgugaccuacaagcucgacggcgucgugugcaccgagaucgaccccaagcuggacaacuacuacaagaaggacaacagcuacuucaccgagcagccgaucgaccuggugcccaaccagcccuaccccaacgccuccuucgacaacuucaaguucgucugcgacaacaucaaguucgccgacgaccucaaccagcugacgggguacaagaagccggcgagccgcgagcugaaggugaccuucuuccccgaccucaacggcgacguggucgccaucgacuacaagcacuacacccccuccuucaagaagggcgccaagcugcugcacaagcccaucguguggcacgugaacaacgccaccaacaaggcgacguacaagccgaacaccuggugcauccggugccucuggagcaccaagcccgucgagaccuccaacagcuucgacgugcugaaguccgaggacgcccaggggauggacaaccuggccugcgaggaccucaagcccgugagcgaggaggucguggagaaccccacgauccagaaggacgugcuggagugcaacgucaagaccaccgagguggugggcgacaucauccugaagccggccaacaacucccucaagaucaccgaggaggucgggcacacggaccugauggccgcguacguggacaacagcucccugaccaucaagaagcccaacgagcucagccgcgugcugggccugaagacccucgccacccacgggcuggccgccgucaacuccgugcccugggacacgaucgccaacuacgcgaagccguuccugaacaagguggucagcaccaccaccaacaucgugacgcgcugccucaaccgggugugcaccaacuacaugcccuacuucuucacccugcugcuccagcugugcaccuucacccgcuccacgaacagccggaucaaggccuccaugcccaccaccaucgccaagaacaccgucaagagcgugggcaaguucugccuggaggccagcuucaacuaccucaagucccccaacuucagcaagcugaucaacaucaucaucugguuccugcuccuguccgugugccugggcagccucaucuacuccacggccgcgcuggggguccugaugagcaaccucggcaugccguccuacugcaccggguaccgcgagggcuaccugaacagcaccaacgugaccaucgccacguacugcaccggcuccauccccugcagcgugugccuguccgggcucgacagccuggacaccuaccccucccuggagaccauccagaucacgaucagcuccuucaagugggaccucaccgccuucggccuggucgccgagugguuccuggccuacauccucuucacccgguucuucuacgugcuggggcuggcggccaucaugcagcucuucuucagcuacuucgccgugcacuucaucuccaacagcuggcugauguggcugaucaucaaccugguccagauggcccccaucuccgcgauggugcgcauguacaucuucuucgccagcuucuacuacguguggaagagcuacguccacgugguggacggcugcaacuccagcaccugcaugaugugcuacaagcggaaccgcgccacgcgggucgagugcaccaccaucgugaacgggguccgccgguccuucuacguguacgccaacggcggcaagggguucugcaagcuccacaacuggaacugcgugaacugcgacaccuucugcgccggcagcacguucaucuccgacgaggucgcgcgcgaccugagccugcaguucaagcggccgaucaaccccaccgaccaguccagcuacaucguggacuccgugaccgucaagaacgggagcauccaccucuacuucgacaaggccggccagaagaccuacgagcgccacucccugagccacuucgugaaccuggacaaccuccgggccaacaacacgaaggggucccugcccaucaacgugaucgucuucgacggcaagagcaagugcgaggaguccagcgccaaguccgccagcguguacuacucccagcugaugugccagcccauccuccugcuggaccaggcgcucgugagcgacgucggcgacagcgccgaggccgccgugaagauguucgacgccuacgugaacaccuucuccagcaccuucaacgucccgauggagaagcugaagacccugguggcgacggccgaggccgagcucgccaagaacgugucccuggacaacguccugagcaccuucaucuccgcggcccgccagggguucguggacagcgacguggagaccaaggacgucguggagugccucaagcugucccaccagagcgacaucgaggugaccggcgacuccugcaacaacuacaugcugacguacaacaaggucgagaacaugaccccccgggaccucggggccugcaucgacugcagcgcccgccacaucaacgcccagguggcgaagucccacaacaucgcccugaucuggaacgugaaggacuucaugagccuguccgagcagcuccggaagcagauccgcagcgccgccaagaagaacaaccugcccuucaagcugaccugcgccaccacgcgccaggucgugaacguggucaccaccaagaucgcgcucaagggcgggugaggacuaguuauaagacugacuagcccgaugggccucccaacgggcccuccuccccuccuugcaccgagauuaauaaaaaaaaaaaaaaaaaaaaaaaaaaaaaaaaaaaaaaaaaaaaaaaaaaaaaaaaaaaaaaaaugcaucccccccccccccccccccccccccccccccaaaggcucuuuucagagccaccagaauu

SEQ ID NO: 21736 - RNA, 6058 nt, Artificial Sequence
  SARS-CoV-2__MT750436.1__non-structural protein 3 (NSP3) mRNA gc
aggagaaagcuuaccauggcccccaccaaggugaccuucggcgacgacacggucaucgaggugcagggguacaagagcgugaacaucaccuucgagcuggacgagcgcaucgacaagguccucaacgagaagugcuccgccuacaccguggagcugggcaccgaggugaacgaguucgcgugcgucguggccgacgccgugaucaagacgcugcagccggucagcgagcuccugaccccccuggggaucgaccucgacgagugguccauggccaccuacuaccuguucgacgagagcggcgaguucaagcuggccucccacauguacugcagcuucuacccccccgacgaggacgaggaggagggggacugcgaggaggaggaguucgagccguccacccaguacgaguacggcacggaggacgacuaccagggcaagccccucgaguucggggcgaccagcgccgcccugcagcccgaggaggagcaggaggaggacuggcuggacgacgacucccagcagaccgugggccagcaggacgggagcgaggacaaccagaccacgaccauccagaccaucguggagguccagccccagcucgacauggagcugaccccgguggugcagacgaucgaggucaacuccuucagcggcuaccugaagcucaccgacaacguguacaucaagaacgccgacaucguggaggaggcgaagaaggucaagcccaccgugguggucaacgccgccaacguguaccugaagcacgggggcggcguggccggggcccugaacaaggcgaccaacaacgccaugcaggucgaguccgacgacuacaucgccacgaacggcccccucaagguggggggcagcugcguccuguccggccacaaccuggccaagcacugccuccacgugguggggcccaacgucaacaagggcgaggacauccagcugcugaagagcgccuacgagaacuucaaccagcacgaggugcuccuggcgccgcugcucuccgccgggaucuucggcgccgaccccauccacagccugcgggugugcgucgacaccgugcgcaccaacguguaccuggccgucuucgacaagaaccucuacgacaagcugguguccagcuuccuggagaugaagagcgagaagcagguggagcagaagaucgccgagauccccaaggaggaggucaagcccuucaucaccgaguccaagccgagcguggagcagcggaagcaggacgacaagaagaucaaggcgugcguggaggaggucacgaccacccucgaggagaccaaguuccugacggagaaccugcuccuguacaucgacaucaacgggaaccugcaccccgacuccgccacccucgugagcgacaucgacaucaccuuccugaagaaggacgcccccuacaucgugggcgacgucgugcaggagggcgugcugaccgccgucgugauccccacgaagaaggccgggggcaccaccgagaugcucgcgaaggcccugcgcaaggugccgaccgacaacuacaucacgaccuaccccgggcagggccugaacggguacaccgucgaggaggccaagaccgugcucaagaagugcaaguccgccuucuacauccugcccagcaucaucuccaacgagaagcaggagauccugggcaccgugagcuggaaccuccgggagaugcuggcgcacgccgaggagacgcgcaagcugaugcccgucugcguggagaccaaggccaucguguccaccauccagcggaaguacaagggcaucaagauccaggagggggucguggacuacggcgcccgcuucuacuucuacaccagcaagacgaccguggccucccugaucaacacccucaacgaccugaacgagacccuggucacgaugccgcucggguacgugacccacggccugaaccuggaggaggcggcccgguacaugcgcagccucaaggugcccgccaccgucuccgugagcucccccgacgccgugaccgccuacaacggguaccugacgagcuccagcaagacccccgaggagcacuucaucgagaccaucucccuggcgggcagcuacaaggacuggagcuacuccggccagagcacccagcucgggaucgaguuccugaagcggggcgacaaguccgucuacuacacgagcaacccgaccaccuuccaccuggacggggaggugaucaccuucgacaaccucaagacgcugcugucccuccgcgaggugcggaccaucaaggucuucaccaccguggacaacaucaaccugcacacgcagguggucgacaugagcaugaccuacggccagcaguucggccccaccuaccuggacggggccgacgugaccaagaucaagccccacaacucccacgagggcaagacguucuacgugcucccgaacgacgacacccugcgcgucgaggccuucgaguacuaccacaccaccgaccccagcuuccuggggcgguacauguccgcccucaaccacacgaagaaguggaaguacccccaggugaacggccugaccagcaucaagugggccgacaacaacugcuaccuggcgaccgcccuccugacccugcagcagaucgagcucaaguucaaccccccggcccugcaggacgccuacuaccgcgcgcgggccggggaggccgccaacuucugcgcccugauccucgcguacugcaacaagacggugggcgagcugggcgacguccgcgagaccauguccuaccuguuccagcacgccaaccucgacagcugcaagcgggugcugaacgucgugugcaagaccugcgggcagcagcagaccacccugaagggcguggaggccgucauguacauggggacgcucuccuacgagcaguucaagaagggcgugcagauccccugcaccugcgggaagcaggccaccaaguaccuggugcagcaggagagccccuucgucaugauguccgcccccccggcgcaguacgagcugaagcacggcaccuucacgugcgccagcgaguacaccggcaacuaccagugcgggcacuacaagcacaucaccuccaaggagacccucuacugcaucgacggcgcccugcugacgaagagcagcgaguacaaggggcccaucaccgacguguucuacaaggagaacuccuacaccaccacgaucaagcccgugaccuacaagcucgacggcgucgugugcaccgagaucgaccccaagcuggacaacuacuacaagaaggacaacagcuacuucaccgagcagccgaucgaccuggugcccaaccagcccuaccccaacgccuccuucgacaacuucaaguucgucugcgacaacaucaaguucgccgacgaccucaaccagcugacgggguacaagaagccggcgagccgcgagcugaaggugaccuucuuccccgaccucaacggcgacguggucgccaucgacuacaagcacuacacccccuccuucaagaagggcgccaagcugcugcacaagcccaucguguggcacgugaacaacgccaccaacaaggcgacguacaagccgaacaccuggugcauccggugccucuggagcaccaagcccgucgagaccuccaacagcuucgacgugcugaaguccgaggacgcccaggggauggacaaccuggccugcgaggaccucaagcccgugagcgaggaggucguggagaaccccacgauccagaaggacgugcuggagugcaacgucaagaccaccgagguggugggcgacaucauccugaagccggccaacaacucccucaagaucaccgaggaggucgggcacacggaccugauggccgcguacguggacaacagcucccugaccaucaagaagcccaacgagcucagccgcgugcugggccugaagacccucgccacccacgggcuggccgccgucaacuccgugcccugggacacgaucgccaacuacgcgaagccguuccugaacaagguggucagcaccaccaccaacaucgugacgcgcugccucaaccgggugugcaccaacuacaugcccuacuucuucacccugcugcuccagcugugcaccuucacccgcuccacgaacagccggaucaaggccuccaugcccaccaccaucgccaagaacaccgucaagagcgugggcaaguucugccuggaggccagcuucaacuaccucaagucccccaacuucagcaagcugaucaacaucaucaucugguuccugcuccuguccgugugccugggcagccucaucuacuccacggccgcgcuggggguccugaugagcaaccucggcaugccguccuacugcaccggguaccgcgagggcuaccugaacagcaccaacgugaccaucgccacguacugcaccggcuccauccccugcagcgugugccuguccgggcucgacagccuggacaccuaccccucccuggagaccauccagaucacgaucagcuccuucaagugggaccucaccgccuucggccuggucgccgagugguuccuggccuacauccucuucacccgguucuucuacgugcuggggcuggcggccaucaugcagcucuucuucagcuacuucgccgugcacuucaucuccaacagcuggcugauguggcugaucaucaaccugguccagauggcccccaucuccgcgauggugcgcauguacaucuucuucgccagcuucuacuacguguggaagagcuacguccacgugguggacggcugcaacuccagcaccugcaugaugugcuacaagcggaaccgcgccacgcgggucgagugcaccaccaucgugaacgggguccgccgguccuucuacguguacgccaacggcggcaagggguucugcaagcuccacaacuggaacugcgugaacugcgacaccuucugcgccggcagcacguucaucuccgacgaggucgcgcgcgaccugagccugcaguucaagcggccgaucaaccccaccgaccaguccagcuacaucguggacuccgugaccgucaagaacgggagcauccaccucuacuucgacaaggccggccagaagaccuacgagcgccacucccugagccacuucgugaaccuggacaaccuccgggccaacaacacgaaggggucccugcccaucaacgugaucgucuucgacggcaagagcaagugcgaggaguccagcgccaaguccgccagcguguacuacucccagcugaugugccagcccauccuccugcuggaccaggcgcucgugagcgacgucggcgacagcgccgagguggccgugaagauguucgacgccuacgucaacaccuucuccagcaccuucaacgugccgauggagaagcugaagacccugguggccacggcggaggccgagcucgccaagaacgucucccuggacaacgugcugagcaccuucaucuccgccgcgcgccagggguucguggacagcgacgucgagaccaaggacgugguggagugccucaagcugucccaccagagcgacaucgaggucaccggcgacuccugcaacaacuacaugcugacguacaacaagguggagaacaugaccccccgggaccucggggccugcaucgacugcagcgcccgccacaucaacgcccagguggccaagucccacaacaucgcgcugaucuggaacgucaaggacuucaugagccuguccgagcagcuccggaagcagauccgcagcgccgccaagaagaacaaccugcccuucaagcugaccugcgccaccacgcgccagguggugaacgucgugaccaccaagaucgcccucaagggcgggugaggacuaguuauaagacugacuagcccgaugggccucccaacgggcccuccuccccuccuugcaccgagauuaauaaaaaaaaaaaaaaaaaaaaaaaaaaaaaaaaaaaaaaaaaaaaaaaaaaaaaaaaaaaaaaaaugcaucccccccccccccccccccccccccccccccaaaggcucuuuucagagccaccagaauu

SEQ ID NO: 21737 - RNA, 6058 nt, Artificial Sequence
  SARS-CoV-2__MT742784.1__non-structural protein 3 (NSP3) mRNA gc
aggagaaagcuuaccauggcccccaccaaggugaccuucggcgacgacacggucaucgaggugcagggguacaagagcgugaacaucaccuucgagcuggacgagcgcaucgacaagguccucaacgagaagugcuccgccuacaccguggagcugggcaccgaggugaacgaguucgcgugcgucguggccgacgccgugaucaagacgcugcagccggucagcgagcuccugaccccccuggggaucgaccucgacgagugguccauggccaccuacuaccuguucgacgagagcggcgaguucaagcuggccucccacauguacugcagcuucuacccccucgacgaggacgaggaggagggggacugcgaggaggaggaguucgagcccuccacccaguacgaguacggcacggaggacgacuaccagggcaagccgcuggaguucggggcgaccagcgccgcccugcagcccgaggaggagcaggaggaggacuggcucgacgacgacucccagcagaccgugggccagcaggacgggagcgaggacaaccagaccacgaccauccagaccaucguggagguccagccccagcuggagauggagcugacccccguggugcagacgaucgaggucaacuccuucagcggcuaccucaagcugaccgacaacguguacaucaagaacgccgacaucguggaggaggcgaagaaggucaagccgaccgugguggucaacgccgccaacguguaccugaagcacgggggcggcguggccggggcccucaacaaggcgaccaacaacgccaugcaggucgaguccgacgacuacaucgccacgaacggcccccugaagguggggggcagcugcguccuguccggccacaaccucgccaagcacugccugcacgugguggggcccaacgucaacaagggcgaggacauccagcugcucaagagcgccuacgagaacuucaaccagcacgaggugcugcuggcgccccuccuguccgccgggaucuucggcgccgacccgauccacagccugcgggugugcgucgacaccgugcgcaccaacguguaccucgccgucuucgacaagaaccuguacgacaagcugguguccagcuuccucgagaugaagagcgagaagcagguggagcagaagaucgccgagauccccaaggaggaggucaagcccuucaucaccgaguccaagcccagcguggagcagcggaagcaggacgacaagaagaucaaggcgugcguggaggaggucacgaccacccuggaggagaccaaguuccugacggagaaccuccugcuguacaucgacaucaacgggaaccuccacccggacuccgccacccuggugagcgacaucgacaucaccuuccugaagaaggacgcccccuacaucgugggcgacgucgugcaggagggcgugcucaccgccgucgugauccccacgaagaaggccgggggcaccaccgagaugcuggcgaaggcccugcgcaaggugcccaccgacaacuacaucacgaccuacccggggcagggccucaacggguacaccgucgaggaggccaagaccgugcugaagaagugcaaguccgccuucuacauccugcccagcaucaucuccaacgagaagcaggagauccucggcaccgugagcuggaaccugcgggagaugcuggcgcacgccgaggagacgcgcaagcugaugcccgucugcguggagaccaaggccaucguguccaccauccagcggaaguacaagggcaucaagauccaggagggggucguggacuacggcgcccgcuucuacuucuacaccagcaagacgaccguggccucccucaucaacacccugaacgaccugaacgagacccucgucacgaugccccugggguacgugacccacggccugaaccucgaggaggcggcccgguacaugcgcagccugaaggugccggccaccgucuccgugagcucccccgacgccgugaccgccuacaacggguaccugacgagcuccagcaagacccccgaggagcacuucaucgagaccaucucccucgcgggcagcuacaaggacuggagcuacuccggccagagcacccagcuggggaucgaguuccugaagcggggcgacaaguccgucuacuacacgagcaaccccaccaccuuccaccucgacggggaggugaucaccuucgacaaccugaagacgcugcucucccugcgcgaggugcggaccaucaaggucuucaccaccguggacaacaucaaccugcacacgcagguggucgacaugagcaugaccuacggccagcaguucggcccgaccuaccucgacggggccgacgugaccaagaucaagccccacaacucccacgagggcaagacguucuacgugcugcccaacgacgacacccugcgcgucgaggccuucgaguacuaccacaccaccgacccgagcuuccucgggcgguacauguccgcccugaaccacacgaagaaguggaaguacccccaggugaacggccugaccagcaucaagugggccgacaacaacugcuaccucgcgaccgcccugcugacccuccagcagaucgagcugaaguucaacccccccgcccugcaggacgccuacuaccgcgcgcgggccggggaggccgccaacuucugcgcccucauccuggcguacugcaacaagacggugggcgagcugggcgacguccgcgagaccauguccuaccucuuccagcacgccaaccuggacagcugcaagcgggugcugaacgucgugugcaagaccugcgggcagcagcagaccacccucaagggcguggaggccgucauguacauggggacgcuguccuacgagcaguucaagaagggcgugcagaucccgugcaccugcgggaagcaggccaccaaguaccuggugcagcaggagagccccuucgucaugauguccgccccccccgaccaguacgagcucaagcacggcaccuucacgugcgcgagcgaguacaccggcaacuaccagugcgggcacuacaagcacaucaccuccaaggagacccuguacugcaucgacggcgcccugcucacgaagagcagcgaguacaaggggccgaucaccgacguguucuacaaggagaacuccuacaccaccacgaucaagcccgugaccuacaagcuggacggcgucgugugcaccgagaucgaccccaagcuggacaacuacuacaagaaggacaacagcuacuucaccgagcagcccaucgaccucgugccgaaccagcccuaccccaacgccuccuucgacaacuucaaguucgucugcgacaacaucaaguucgccgacgaccugaaccagcugacgggguacaagaagcccgccagccgcgagcucaaggugaccuucuucccggaccugaacggcgacguggucgcgaucgacuacaagcacuacacccccuccuucaagaagggcgccaagcugcuccacaagcccaucguguggcacgugaacaacgccaccaacaaggccacguacaagcccaacaccuggugcauccggugccuguggagcaccaagccggucgagaccuccaacagcuucgacgugcugaaguccgaggacgcgcaggggauggacaaccucgccugcgaggaccugaagcccgugagcgaggaggucguggagaaccccacgauccagaaggacgugcuggagugcaacgucaagaccaccgagguggugggcgacaucauccucaagcccgccaacaacucccugaagaucaccgaggaggucgggcacacggaccugauggccgccuacguggacaacagcucccucaccaucaagaagccgaacgagcugagccgcgugcugggccucaagacccuggcgacccacgggcuggccgccgucaacuccgugcccugggacacgaucgccaacuacgccaagcccuuccucaacaagguggucagcaccaccaccaacaucgugacgcgcugccugaaccgggugugcaccaacuacaugccguacuucuucacccugcuccugcagcugugcaccuucacccgcuccacgaacagccggaucaaggcguccaugcccaccaccaucgccaagaacaccgucaagagcgugggcaaguucugccucgaggccagcuucaacuaccugaagucccccaacuucagcaagcugaucaacaucaucaucugguuccuccugcuguccgugugccucggcagccugaucuacuccacggccgcccuggggguccucaugagcaaccugggcaugcccuccuacugcaccggguaccgcgagggcuaccugaacagcaccaacgugaccaucgcgacguacugcaccggcuccaucccgugcagcgugugccucuccgggcuggacagccuggacaccuaccccucccucgagaccauccagaucacgaucagcuccuucaagugggaccugaccgccuucggccuggucgccgagugguuccucgccuacauccuguucacccgguucuucuacgugcuggggcucgccgcgaucaugcagcuguucuucagcuacuucgccgugcacuucaucuccaacagcuggcugauguggcugaucaucaaccucguccagauggcccccaucuccgccauggugcgcauguacaucuucuucgcgagcuucuacuacguguggaagagcuacguccacgugguggacggcugcaacuccagcaccugcaugaugugcuacaagcggaaccgcgccacgcgggucgagugcaccaccaucgugaacgggguccgccgguccuucuacguguacgccaacggcggcaagggguucugcaagcugcacaacuggaacugcgugaacugcgacaccuucugcgccggcagcacguucaucuccgacgaggucgcccgcgaccugagccuccaguucaagcggcccaucaacccgaccgaccaguccagcuacaucguggacuccgugaccgucaagaacgggagcauccaccuguacuucgacaaggcgggccagaagaccuacgagcgccacucccugagccacuucgugaaccucgacaaccugcgggccaacaacacgaaggggucccugcccaucaacgugaucgucuucgacggcaagagcaagugcgaggaguccagcgccaaguccgccagcguguacuacucccagcucaugugccagcccauccugcugcucgaccaggcccuggugagcgacgucggcgacagcgcggagguggccgugaagauguucgacgccuacgucaacaccuucuccagcaccuucaacgugcccauggagaagcugaagacccucguggccacggccgaggcggagcuggccaagaacgucucccuggacaacgugcucagcaccuucaucuccgccgcccgccagggguucguggacagcgacgucgagaccaaggacgugguggagugccugaagcugucccaccagagcgacaucgaggucaccggcgacuccugcaacaacuacaugcucacguacaacaagguggagaacaugaccccgcgggaccugggggcgugcaucgacugcagcgcccgccacaucaacgcccagguggccaagucccacaacaucgcccugaucuggaacgucaaggacuucaugagccucuccgagcagcugcggaagcagauccgcagcgcggccaagaagaacaaccugcccuucaagcucaccugcgccaccacgcgccagguggugaacgucgugaccaccaagaucgcccugaagggcgggugaggacuaguuauaagacugacuagcccgaugggccucccaacgggcccuccuccccuccuugcaccgagauuaauaaaaaaaaaaaaaaaaaaaaaaaaaaaaaaaaaaaaaaaaaaaaaaaaaaaaaaaaaaaaaaaaugcaucccccccccccccccccccccccccccccccaaaggcucuuuucagagccaccagaauu

SEQ ID NO: 21738 - RNA, 6058 nt, Artificial Sequence
  SARS-CoV-2__MT740392.1__non-structural protein 3 (NSP3) mRNA gc
aggagaaagcuuaccauggcccccaccaaggugaccuucggcgacgacacggucaucgaggugcagggguacaagagcgugaacaucaccuucgagcuggacgagcgcaucgacaagguccucaacgagaagugcuccgccuacaccguggagcugggcaccgaggugaacgaguucgcgugcgucguggccgacgccgugaucaagacgcugcagccggucagcgagcuccugaccccccuggggaucgaccucgacgagugguccauggccaccuacuaccuguucgacgagagcggcgaguucaagcuggccucccacauguacugcagcuucuacccccccgacgaggacgaggaggagggggacugcgaggaggaggaguucgagccguccacccaguacgaguacggcacggaggacgacuaccagggcaagccccucgaguucggggcgaccagcgccgcccugcagcccgaggaggagcaggaggaggacuggcuggacgacgacucccagcagaccgugggccagcaggacgggagcgacgacaaccagaccacgaccauccagaccaucguggagguccagccccagcucgagauggagcugaccccgguggugcagacgaucgaggucaacuccuucagcggcuaccugaagcucaccgacaacguguacaucaagaacgccgacaucguggaggaggcgaagaaggucaagcccaccgugguggucaacgccgccaacguguaccugaagcacgggggcggcguggccggggcccugaacaaggcgaccaacaacgccaugcaggucgaguccgacgacuacaucgccacgaacggcccccucaagguggggggcagcugcguccuguccggccacaaccuggccaagcacugccuccacgugguggggcccaacgucaacaagggcgaggacauccagcugcugaagagcgccuacgagaacuucaaccagcacgaggugcuccuggcgccgcugcucuccgccgggaucuucggcgccgaccccauccacagccugcgggugugcgucgacaccgugcgcaccaacguguaccuggccgucuucgacaagaaccucuacgacaagcugguguccagcuuccuggagaugaagagcgagaagcagguggagcagaagaucgccgagauccccaaggaggaggucaagcccuucaucaccgaguccaagccgagcguggagcagcggaagcaggacgacaagaagaucaaggcgugcguggaggaggucacgaccacccucgaggagaccaaguuccugacggagaaccugcuccuguacaucgacaucaacgggaaccugcaccccgacuccgccacccucgugagcgacaucgacaucaccuuccugaagaaggacgcccccuacaucgugggcgacgucgugcaggagggcgugcugaccgccgucgugauccccacgaagaaggccgggggcaccaccgagaugcucgcgaaggcccugcgcaaggugccgaccgacaacuacaucacgaccuaccccgggcagggccugaacggguacaccgucgaggaggccaagaccgugcucaagaagugcaaguccgccuucuacauccugcccagcaucaucuccaacgagaagcaggagauccugggcaccgugagcuggaaccuccgggagaugcuggcgcacgccgaggagacgcgcaagcugaugcccgucugcguggagaccaaggccaucguguccaccauccagcggaaguacaagggcaucaagauccaggagggggucguggacuacggcgcccgcuucuacuucuacaccagcaagacgaccguggccucccugaucaacacccucaacgaccugaacgagacccuggucacgaugccgcucggguacgugacccacggccugaaccuggaggaggcggcccgguacaugcgcagccucaaggugcccgccaccgucuccgugagcucccccgacgccgugaccgccuacaacggguaccugacgagcuccagcaagacccccgaggagcacuucaucgagaccaucucccuggcgggcagcuacaaggacuggagcuacuccggccagagcacccagcucgggaucgaguuccugaagcggggcgacaaguccgucuacuacacgagcaacccgaccaccuuccaccuggacggggaggugaucaccuucgacaaccucaagacgcugcugucccuccgcgaggugcggaccaucaaggucuucaccaccguggacaacaucaaccugcacacgcagguggucgacaugagcaugaccuacggccagcaguucggccccaccuaccuggacggggccgacgugaccaagaucaagccccacaacucccacgagggcaagacguucuacgugcucccgaacgacgacacccugcgcgucgaggccuucgaguacuaccacaccaccgaccccagcuuccuggggcgguacauguccgcccucaaccacacgaagaaguggaaguacccccaggugaacggccugaccagcaucaagugggccgacaacaacugcuaccuggcgaccgcccuccugacccugcagcagaucgagcucaaguucaaccccccggcccugcaggacgccuacuaccgcgcgcgggccggggaggccgccaacuucugcgcccugauccucgcguacugcaacaagacggugggcgagcugggcgacguccgcgagaccauguccuaccuguuccagcacgccaaccucgacagcugcaagcgggugcugaacgucgugugcaagaccugcgggcagcagcagaccacccugaagggcguggaggccgucauguacauggggacgcucuccuacgagcaguucaagaagggcgugcagauccccugcaccugcgggaagcaggccaccaaguaccuggugcagcaggagagccccuucgucaugauguccgcccccccggcgcaguacgagcugaagcacggcaccuucacgugcgccagcgaguacaccggcaacuaccagugcgggcacuacaagcacaucaccuccaaggagacccucuacugcaucgacggcgcccugcugacgaagagcagcgaguacaaggggcccaucaccgacguguucuacaaggagaacuccuacaccaccacgaucaagcccgugaccuacaagcucgacggcgucgugugcaccgagaucgaccccaagcuggacaacuacuacaagaaggacaacagcuacuucaccgagcagccgaucgaccuggugcccaaccagcccuaccccaacgccuccuucgacaacuucaaguucgucugcgacaacaucaaguucgccgacgaccucaaccagcugacgggguacaagaagccggcgagccgcgagcugaaggugaccuucuuccccgaccucaacggcgacguggucgccaucgacuacaagcacuacacccccuccuucaagaagggcgccaagcugcugcacaagcccaucguguggcacgugaacaacgccaccaacaaggcgacguacaagccgaacaccuggugcauccggugccucuggagcaccaagcccgucgagaccuccaacagcuucgacgugcugaaguccgaggacgcccaggggauggacaaccuggccugcgaggaccucaagcccgugagcgaggaggucguggagaaccccacgauccagaaggacgugcuggagugcaacgucaagaccaccgagguggugggcgacaucauccugaagccggccaacaacucccucaagaucaccgaggaggucgggcacacggaccugauggccgcguacguggacaacagcucccugaccaucaagaagcccaacgagcucagccgcgugcugggccugaagacccucgccacccacgggcuggccgccgucaacuccgugcccugggacacgaucgccaacuacgcgaagccguuccugaacaagguggucagcaccaccaccaacaucgugacgcgcugccucaaccgggugugcaccaacuacaugcccuacuucuucacccugcugcuccagcugugcaccuucacccgcuccacgaacagccggaucaaggccuccaugcccaccaccaucgccaagaacaccgucaagagcgugggcaaguucugccuggaggccagcuucaacuaccucaagucccccaacuucagcaagcugaucaacaucaucaucugguuccugcuccuguccgugugccugggcagccucaucuacuccacggccgcgcuggggguccugaugagcaaccucggcaugccguccuacugcaccggguaccgcgagggcuaccugaacagcaccaacgugaccaucgccacguacugcaccggcuccauccccugcagcgugugccuguccgggcucgacagccuggacaccuaccccucccuggagaccauccagaucacgaucagcuccuucaagugggaccucaccgccuucggccuggucgccgagugguuccuggccuacauccucuucacccgguucuucuacgugcuggggcuggcggccaucaugcagcucuucuucagcuacuucgccgugcacuucaucuccaacagcuggcugauguggcugaucaucaaccugguccagauggcccccaucuccgcgauggugcgcauguacaucuucuucgccagcuucuacuacguguggaagagcuacguccacgugguggacggcugcaacuccagcaccugcaugaugugcuacaagcggaaccgcgccacgcgggucgagugcaccaccaucgugaacgggguccgccgguccuucuacguguacgccaacggcggcaagggguucugcaagcuccacaacuggaacugcgugaacugcgacaccuucugcgccggcagcacguucaucuccgacgaggucgcgcgcgaccugagccugcaguucaagcggccgaucaaccccaccgaccaguccagcuacaucguggacuccgugaccgucaagaacgggagcauccaccucuacuucgacaaggccggccagaagaccuacgagcgccacucccugagccacuucgugaaccuggacaaccuccgggccaacaacacgaaggggucccugcccaucaacgugaucgucuucgacggcaagagcaagugcgaggaguccagcgccaaguccgccagcguguacuacucccagcugaugugccagcccauccuccugcuggaccaggcgcucgugagcgacgucggcgacagcgccgagguggccgugaagauguucgacgccuacgucaacaccuucuccagcaccuucaacgugccgauggagaagcugaagacccugguggccacggcggaggccgagcucgccaagaacgucucccuggacaacgugcugagcaccuucaucuccgccgcgcgccagggguucguggacagcgacgucgagaccaaggacgugguggagugccucaagcugucccaccagagcgacaucgaggucaccggcgacuccugcaacaacuacaugcugacguacaacaagguggagaacaugaccccccgggaccucggggccugcaucgacugcagcgcccgccacaucaacgcccagguggccaagucccacaacaucgcgcugaucuggaacgucaaggacuucaugagccuguccgagcagcuccggaagcagauccgcagcgccgccaagaagaacaaccugcccuucaagcugaccugcgccaccacgcgccagguggugaacgucgugaccaccaagaucgcccucaagggcgggugaggacuaguuauaagacugacuagcccgaugggccucccaacgggcccuccuccccuccuugcaccgagauuaauaaaaaaaaaaaaaaaaaaaaaaaaaaaaaaaaaaaaaaaaaaaaaaaaaaaaaaaaaaaaaaaaugcaucccccccccccccccccccccccccccccccaaaggcucuuuucagagccaccagaauu

SEQ ID NO: 21739 - RNA, 6058 nt, Artificial Sequence
  SARS-CoV-2__MT740401.1__non-structural protein 3 (NSP3) mRNA gc
aggagaaagcuuaccauggcccccaccaaggugaccuucggcgacgacacggucaucgaggugcagggguacaagagcgugaacaucaccuucgagcuggacgagcgcaucgacaagguccucaacgagaagugcuccgccuacaccguggagcugggcaccgaggugaacgaguucgcgugcgucguggccgacgccgugaucaagacgcugcagccggucagcgagcuccugaccccccuggggaucgaccucgacgagugguccauggccaccuacuaccuguucgacgagagcggcgaguucaagcuggccucccacauguacugcagcuucuacccccccgacgaggacgaggaggagggggacugcgaggaggaggaguucgagccguccacccaguacgaguacggcacggaggacgacuaccagggcaagccccucgaguucggggcgaccagcgccgcccugcagcccgaggaggagcaggaggaggacuggcuggacgacgacucccagcagaccgugggccagcaggacgggagcgaggacaaccagaccacgaccauccagaccaucguggagguccagccccagcucgagauggagcugaccccgguggugcagacgaucgaggucaacuccuucagcggcuaccugaagcucaccgacaacguguacaucaagaacgccgacaucguggaggaggcgaagaaggucaagcccaccgugguggucaacgccgccaacgugugccugaagcacgggggcggcguggccggggcccugaacaaggcgaccaacaacgccaugcaggucgaguccgacgacuacaucgccacgaacggcccccucaagguggggggcagcugcguccuguccggccacaaccuggccaagcacugccuccacgugguggggcccaacgucaacaagggcgaggacauccagcugcugaagagcgccuacgagaacuucaaccagcacgaggugcuccuggcgccgcugcucuccgccgggaucuucggcgccgaccccauccacagccugcgggugugcgucgacaccgugcgcaccaacguguaccuggccgucuucgacaagaaccucuacgacaagcugguguccagcuuccuggagaugaagagcgagaagcagguggagcagaagaucgccgagauccccaaggaggaggucaagcccuucaucaccgaguccaagccgagcguggagcagcggaagcaggacgacaagaagaucaaggcgugcguggaggaggucacgaccacccucgaggagaccaaguuccugacggagaaccugcuccuguacaucgacaucaacgggaaccugcaccccgacuccgccacccucgugagcgacaucgacaucaccuuccugaagaaggacgcccccuacaucgugggcgacgucgugcaggagggcgugcugaccgccgucgugauccccacgaagaaggccgggggcaccaccgagaugcucgcgaaggcccugcgcaaggugccgaccgacaacuacaucacgaccuaccccgggcagggccugaacggguacaccgucgaggaggccaagaccgugcucaagaagugcaaguccgccuucuacauccugcccagcaucaucuccaacgagaagcaggagauccugggcaccgugagcuggaaccuccgggagaugcuggcgcacgccgaggagacgcgcaagcugaugcccgucugcguggagaccaaggccaucguguccaccauccagcggaaguacaagggcaucaagauccaggagggggucguggacuacggcgcccgcuucuacuucuacaccagcaagacgaccguggccucccugaucaacacccucaacgaccugaacgagacccuggucacgaugccgcucggguacgugacccacggccugaaccuggaggaggcggcccgguacaugcgcagccucaaggugcccgccaccgucuccgugagcucccccgacgccgugaccgccuacaacggguaccugacgagcuccagcaagacccccgaggagcacuucaucgagaccaucucccuggcgggcagcuacaaggacuggagcuacuccggccagagcacccagcucgggaucgaguuccugaagcggggcgacaaguccgucuacuacacgagcaacccgaccaccuuccaccuggacggggaggugaucaccuucgacaaccucaagacgcugcugucccuccgcgaggugcggaccaucaaggucuucaccaccguggacaacaucaaccugcacacgcagguggucgacaugagcaugaccuacggccagcaguucggccccaccuaccuggacggggccgacgugaccaagaucaagccccacaacucccacgagggcaagacguucuacgugcucccgaacgacgacacccugcgcgucgaggccuucgaguacuaccacaccaccgaccccagcuuccuggggcgguacauguccgcccucaaccacacgaagaaguggaaguacccccaggugaacggccugaccagcaucaagugggccgacaacaacugcuaccuggcgaccgcccuccugacccugcagcagaucgagcucaaguucaaccccccggcccugcaggacgccuacuaccgcgcgcgggccggggaggccgccaacuucugcgcccugauccucgcguacugcaacaagacggugggcgagcugggcgacguccgcgagaccauguccuaccuguuccagcacgccaaccucgacagcugcaagcgggugcugaacgucgugugcaagaccugcgggcagcagcagaccacccugaagggcguggaggccgucauguacauggggacgcucuccuacgagcaguucaagaagggcgugcagauccccugcaccugcgggaagcaggccaccaaguaccuggugcagcaggagagccccuucgucaugauguccgcccccccggcgcaguacgagcugaagcacggcaccuucacgugcgccagcgaguacaccggcaacuaccagugcgggcacuacaagcacaucaccuccaaggagacccucuacugcaucgacggcgcccugcugacgaagagcagcgaguacaaggggcccaucaccgacguguucuacaaggagaacuccuacaccaccacgaucaagcccgugaccuacaagcucgacggcgucgugugcaccgagaucgaccccaagcuggacaacuacuacaagaaggacaacagcuacuucaccgagcagccgaucgaccuggugcccaaccagcccuaccccaacgccuccuucgacaacuucaaguucgucugcgacaacaucaaguucgccgacgaccucaaccagcugacgggguacaagaagccggcgagccgcgagcugaaggugaccuucuuccccgaccucaacggcgacguggucgccaucgacuacaagcacuacacccccuccuucaagaagggcgccaagcugcugcacaagcccaucguguggcacgugaacaacgccaccaacaaggcgacguacaagccgaacaccuggugcauccggugccucuggagcaccaagcccgucgagaccuccaacagcuucgacgugcugaaguccgaggacgcccaggggauggacaaccuggccugcgaggaccucaagcccgugagcgaggaggucguggagaaccccacgauccagaaggacgugcuggagugcaacgucaagaccaccgagguggugggcgacaucauccugaagccggccaacaacucccucaagaucaccgaggaggucgggcacacggaccugauggccgcguacguggacaacagcucccugaccaucaagaagcccaacgagcucagccgcgugcugggccugaagacccucgccacccacgggcuggccgccgucaacuccgugcccugggacacgaucgccaacuacgcgaagccguuccugaacaagguggucagcaccaccaccaacaucgugacgcgcugccucaaccgggugugcaccaacuacaugcccuacuucuucacccugcugcuccagcugugcaccuucacccgcuccacgaacagccggaucaaggccuccaugcccaccaccaucgccaagaacaccgucaagagcgugggcaaguucugccuggaggccagcuucaacuaccucaagucccccaacuucagcaagcugaucaacaucaucaucugguuccugcuccuguccgugugccugggcagccucaucuacuccacggccgcgcuggggguccugaugagcaaccucggcaugccguccuacugcaccggguaccgcgagggcuaccugaacagcaccaacgugaccaucgccacguacugcaccggcuccauccccugcagcgugugccuguccgggcucgacagccuggacaccuaccccucccuggagaccauccagaucacgaucagcuccuucaagugggaccucaccgccuucggccuggucgccgagugguuccuggccuacauccucuucacccgguucuucuacgugcuggggcuggcggccaucaugcagcucuucuucagcuacuucgccgugcacuucaucuccaacagcuggcugauguggcugaucaucaaccugguccagauggcccccaucuccgcgauggugcgcauguacaucuucuucgccagcuucuacuacguguggaagagcuacguccacgugguggacggcugcaacuccagcaccugcaugaugugcuacaagcggaaccgcgccacgcgggucgagugcaccaccaucgugaacgggguccgccgguccuucuacguguacgccaacggcggcaagggguucugcaagcuccacaacuggaacugcgugaacugcgacaccuucugcgccggcagcacguucaucuccgacgaggucgcgcgcgaccugagccugcaguucaagcggccgaucaaccccaccgaccaguccagcuacaucguggacuccgugaccgucaagaacgggagcauccaccucuacuucgacaaggccggccagaagaccuacgagcgccacucccugagccacuucgugaaccuggacaaccuccgggccaacaacacgaaggggucccugcccaucaacgugaucgucuucgacggcaagagcaagugcgaggaguccagcgccaaguccgccagcguguacuacucccagcugaugugccagcccauccuccugcuggaccaggcgcucgugagcgacgucggcgacagcgccgagguggccgugaagauguucgacgccuacgucaacaccuucuccagcaccuucaacgugccgauggagaagcugaagacccugguggccacggcggaggccgagcucgccaagaacgucucccuggacaacgugcugagcaccuucaucuccgccgcgcgccagggguucguggacagcgacgucgagaccaaggacgugguggagugccucaagcugucccaccagagcgacaucgaggucaccggcgacuccugcaacaacuacaugcugacguacaacaagguggagaacaugaccccccgggaccucggggccugcaucgacugcagcgcccgccacaucaacgcccagguggccaagucccacaacaucgcgcugaucuggaacgucaaggacuucaugagccuguccgagcagcuccggaagcagauccgcagcgccgccaagaagaacaaccugcccuucaagcugaccugcgccaccacgcgccagguggugaacgucgugaccaccaagaucgcccucaagggcgggugaggacuaguuauaagacugacuagcccgaugggccucccaacgggcccuccuccccuccuugcaccgagauuaauaaaaaaaaaaaaaaaaaaaaaaaaaaaaaaaaaaaaaaaaaaaaaaaaaaaaaaaaaaaaaaaaugcaucccccccccccccccccccccccccccccccaaaggcucuuuucagagccaccagaauu

SEQ ID NO: 21740 - RNA, 6058 nt, Artificial Sequence
  SARS-CoV-2__MT740435.1__non-structural protein 3 (NSP3) mRNA gc
aggagaaagcuuaccauggcccccaccaaggugaccuucggcgacgacacggucaucgaggugcagggguacaagagcgugaacaucaccuucgagcuggacgagcgcaucgacaagguccucaacgagaagugcuccgccuacaccguggagcugggcaccgaggugaacgaguucgcgugcgucguggccgacgccgugaucaagacgcugcagccggucagcgagcuccugaccccccuggggaucgaccucgacgagugguccauggccaccuacuaccuguucgacgagagcggcgaguucaagcuggccucccacauguacugcagcuucuacccccccgacgaggacgaggaggagggggacugcgaggaggaggaguucgagccguccacccaguacgaguacggcacggaggacgacuaccagggcaagccccucgaguucggggcgaccagcgccgcccugcagcccgaggaggagcaggaggaggacuggcuggacgacgacucccagcagaccgugggccagcaggacgggagcgaggacaaccagaccacgaccauccagaccaucguggagguccagccccagcucgagauggagcugaccccgguggugcagacgaucgaggucaacuccuucagcggcuaccugaagcucaccgacaacguguacaucaagaacgccgacaucguggaggaggcgaagaaggucaagcccaccgugguggucaacgccgccaacguguaccugaagcacgggggcggcguggccggggcccugaacaaggcgaccaacaacgccaugcaggucgaguccgacgacuacaucgccacgaacggcccccucaagguggggggcagcugcguccuguccggccacaaccuggccaagcacugccuccacgugguggggcccaacgucaacaagggcgaggacauccagcugcugaagagcgccuacgagaacuucaaccagcacgaggugcuccuggcgccgcugcucuccgccgggaucuucggcgccgaccccauccacagccugcgggugugcgucgacaccgugcgcaccaacguguaccuggccgucuucgacaagaaccucuacgacaagcugguguccagcuuccuggagaugaagagcgagaagcagguggagcagaagaucgccgagauccccaaggaggaggucaagcccuucaucaccgaguccaagccgagcguggagcagcggaagcaggacgacaagaagaucaaggcgugcguggaggaggucacgaccacccucgaggagaccaaguuccugacggagaaccugcuccuguacaucgacaucaacgggaaccugcaccccgacuccgccacccucgugagcgacaucgacaucaccuuccugaagaaggacgcccccuacaucgugggcgacgucgugcaggagggcgugcugaccgccgucgugauccccacgaagaaggccgggggcaccaccgagaugcucgcgaaggcccugcgcaaggugccgaccgacaacuacaucacgaccuaccccgggcagggccugaacggguacaccgucgaggaggccaagaccgugcucaagaagugcaaguccgccuucuacauccugcccagcaucaucuccaacgagaagcaggagauccugggcaccgugagcuggaaccuccgggagaugcuggcgcacgccgaggagacgcgcaagcugaugcccgucugcguggagaccaaggccaucguguccaccauccagcggaaguacaagggcaucaagauccaggagggggucguggacuacggcgcccgcuucuacuucuacaccagcaagacgaccguggccucccugaucaacacccucaacgaccugaacgagacccuggucacgaugccgcucggguacgugacccacggccugaaccuggaggaggcggcccgguacaugcgcagccucaaggugcccgccaccgucuccgugagcucccccgacgccgugaccgccuacaacggguaccugacgagcuccagcaagacccccgaggagcacuucaucgagaccaucucccuggcgggcagcuacaaggacuggagcuacuccggccagagcacccagcucgggaucgaguuccugaagcggggcgacaaguccgucuacuacacgagcaacccgaccaccuuccaccuggacggggaggugaucaccuucgacaaccucaagacgcugcugucccuccgcgaggugcggaccaucaaggucuucaccaccguggacaacaucaaccugcacacgcagguggucgacaugagcaugaccuacggccagcaguucggccccaccuaccuggacggggccgacgugaccaagaucaagccccacaacucccacgagggcaagacguucuacgugcucccgaacgacgacacccugcgcgucgaggccuucgaguacuaccacaccaccgaccccagcuuccuggggcgguacauguccgcccucaaccacacgaagaaguggaaguacccccaggugaacggccugaccagcaucaagugggccgacaacaacugcuaccuggcgaccgcccuccugacccugcagcagaucgagcucaaguucaaccccccggcccugcaggacgccuacuaccgcgcgcgggccggggaggccgccaacuucugcgcccugauccucgcguacugcaacaagacggugggcgagcugggcgacguccgcgagaccauguccuaccuguuccagcacgccaaccucgacagcugcaagcgggugcugaacgucgugugcaagaccugcgggcagcagcagaccacccugaagggcguggaggccgucauguacauggggacgcucuccuacgagcaguucaagaagggcgugcagauccccugcaccugcgggaagcaggccaccaaguaccuggugcagcaggagagccccuucgucaugauguccgcccccccggcgcaguacgagcugaagcacggcaccuucacgugcgccagcgaguacaccggcaacuaccagugcgggcacuacaagcacaucaccuccaaggagacccucuacugcaucgacggcgcccugcugacgaagagcagcgaguacaaggggcccaucaccgacguguucuacaaggagaacuccuacaccaccacgaucaagcccgugaccuacaagcucgacggcgucgugugcaccgagaucgaccccaagcuggacaacuacuacaagaaggacaacagcuacuucaccgagcagccgaucgaccuggugcccaaccagcccuaccccaacgccuccuucgacaacuucaaguucgucugcgacaacaucaaguucgccgacgaccucaaccagcugacgggguacaagaagccggcgagccgcgagcugaaggugaccuucuuccccgaccucaacggcgacguggucgccaucgacuacaagcacuacacccccuccuucaagaagggcgccaagcugcugcacaagcccaucguguggcacgugaacaacgccaccaacaaggcgacguacaagccgaacaccuggugcauccggugccucuggagcaccaagcccgucgagaccuccaacagcuucgacgugcugaaguccgaggacgcccaggggauggacaaccuggccugcgaggaccucaagcccgugagcgaggaggucguggagaaccccacgauccagaaggacgugcuggagugcaacgucaagaccaccgagguggugggcgacaucauccugaagccggccaacaacucccucaagaucaccgaggaggucgggcacacggaccugauggccgcguacguggacaacagcucccugaccaucaagaagcccaacgagcucagccgcgugcugggccugaagacccucgccacccacgggcuggccgccgucaacuccgugcccugggacacgaucgccaacuacgcgaagccguuccugaacaagguggucagcaccaccaccaacaucgugacgcgcugccucaaccgggugugcaccaacuacaugcccuacuucuucacccugcugcuccagcugugcaccuucacccgcuccacgaacagccggaucaaggccuccaugcccaccaccaucgccaagaacaccgucaagagcgugggcaaguucugccuggaggccagcuucaacuaccucaagucccccaacuucagcaagcugaucaacaucaucaucugguuccugcuccuguccgugugccugggcagccucaucuacuccacggccgcgcuggggguccugaugagcaaccucggcaugccguccuacugcaccggguaccgcgagggcuaccugaacagcaccaacgugaccaucgccacguacugcaccggcuccauccccugcagcgugugccuguccgggcucgacagccuggacaccuaccccucccuggagaccauccagaucacgaucagcuccuucaagugggaccucaccgccuucggccuggucgccgagugguuccuggccuacauccucuucacccgguucuucuacgugcuggggcuggcggccaucaugcagcucuucuucagcuacuucgccgugcacuucaucuccaacagcuggcugauguggcugaucaucaaccugguccagauggcccccaucuccgcgauggugcgcauguacaucuucuucgccagcuucuacuacguguggaagagcuacguccacgugguggacggcugcaacuccagcaccugcaugaugugcuacaagcggaaccgcgccacgcgggucgagugcaccaccaucgugaacgggguccgccgguccuucuacguguacgccaacggcggcaagggguucugcaagcuccacaacuggaacugcgugaacugcgacaccuucugcgccggcagcacguucaucuccgacgaggucgcgcgcgaccugagccugcaguucaagcggccgaucaaccccaccgaccaguccagcuacaucguggacuccgugaccgucaagaacgggagcauccaccucuacuucgacaaggccggccagaagaccuacgagcgccacucccugagccacuucgugaaccuggacaaccuccgggccaacaacacgaaggggucccugcccaucaacgugaucgucuucgacggcaagagcaagugcgaggaguccagcgccaaguccgccagcguguacuacucccagcugaugugccagcccauccuccugcuggaccaggcgcucgugagcgacgucggcgacagcgccgagguggccgugaagauguucgacgccuacgucaacaccuucuccagcaccuucaacgugccgauggagaagcugaagacccugguggccacggcggaggccgagcucgccaagaacgucucccuggacaacgugcugagcaccuucaucuccgccagccgccagggguucguggacuccgacgucgagaccaaggacgugguggagugccucaagcugagccaccaguccgacaucgaggucaccggcgacagcugcaacaacuacaugcugacguacaacaagguggagaacaugaccccccgggaccucggggcgugcaucgacugcuccgcccgccacaucaacgcccagguggccaagagccacaacaucgcccugaucuggaacgucaaggacuucaugucccugagcgagcagcuccggaagcagauccgcuccgcggccaagaagaacaaccugcccuucaagcugaccugcgccaccacgcgccagguggugaacgucgugaccaccaagaucgcccucaagggcgggugaggacuaguuauaagacugacuagcccgaugggccucccaacgggcccuccuccccuccuugcaccgagauuaauaaaaaaaaaaaaaaaaaaaaaaaaaaaaaaaaaaaaaaaaaaaaaaaaaaaaaaaaaaaaaaaaugcaucccccccccccccccccccccccccccccccaaaggcucuuuucagagccaccagaauu

SEQ ID NO: 21741 - RNA, 6058 nt, Artificial Sequence
  SARS-CoV-2__MT740441.1__non-structural protein 3 (NSP3) mRNA gc
aggagaaagcuuaccauggcccccaccaaggugaccuucggcgacgacacggucaucgaggugcagggguacaagagcgugaacaucaccuucgagcuggacgagcgcaucgacaagguccucaacgagaagugcuccgccuacaccguggagcugggcaccgaggugaacgaguucgcgugcgucguggccgacgccgugaucaagacgcugcagccggucagcgagcuccugaccccccuggggaucgaccucgacgagugguccauggccaccuacuaccuguucgacgagagcggcgaguucaagcuggccucccacauguacugcagcuucuacccccccgacgaggacgaggaggagggggacugcgaggaggaggaguucgagccguccacccaguacgaguacggcacggaggacgacuaccagggcaagccccucgaguucggggcgaccagcgccgcccugcagcccgaggaggagcaggaggaggacuggcuggacgacgacucccagcagaccgugggccagcaggacgggagcgaggacaaccagaccacgaccauccagaccaucguggagguccagccccagcucgagauggagcugaccccgguggugcagacgaucgaggucaacuccuucagcggcuaccugaagcucaccgacaacguguacaucaagaacgccgacaucguggaggaggcgaagaaggucaagcccaccgugguggucaacgccgccaacguguaccugaagcacgggggcggcguggccggggcccugaacaaggcgaccaacaacgccaugcaggucgaguccgacgacuacaucgccacgaacggcccccucaagguggggggcagcugcguccuguccggccacaaccuggccaagcacugccuccacgugguggggcccaacgucaacaagggcgaggacauccagcugcugaagagcgccuacgagaacuucaaccagcacgaggugcuccuggcgccgcugcucuccgccgggaucuucggcgccgaccccauccacagccugcgggugugcgucgacaccgugcgcaccaacguguaccuggccgucuucgacaagaaccucuacgacaagcugguguccagcuuccuggagaugaagagcgagaagcagguggagcagaagaucgccgagauccccaaggaggaggucaagcccuucaucaccgaguccaagccgagcguggagcagcggaagcaggacgacaagaagaucaaggcgugcguggaggaggucacgaccacccucgaggagaccaaguuccugacggagaaccugcuccuguacaucgacaucaacgggaaccugcaccccgacuccgccacccucgugagcgacaucgacaucaccuuccugaagaaggacgcccccuacaucgugggcgacgucgugcaggagggcgugcugaccgccgucgugauccccacgaagaaggccgggggcaccaccgagaugcucgcgaaggcccugcgcaaggugccgaccgacaacuacaucacgaccuaccccgggcagggccugaacggguacaccgucgaggaggccaagaccgugcucaagaagugcaaguccgccuucuacauccugcccagcaucaucuccaacgagaagcaggagauccugggcaccgugagcuggaaccuccgggagaugcuggcgcacgccgaggagacgcgcaagcugaugcccgucugcguggagaccaaggccaucguguccaccauccagcggaaguacaagggcaucaagauccaggagggggucguggacuacggcgcccgcuucuacuucuacaccagcaagacgaccguggccucccugaucaacacccucaacgaccugaacgagacccuggucacgaugccgcucggguacgugacccacggccugaaccuggaggaggcggcccgguacaugcgcagccucaaggugcccgccaccgucuccgugagcucccccgacgccgugaccgccuacaacggguaccugacgagcuccagcaagacccccgaggagcacuucaucgagaccaucucccuggcgggcagcuacaaggacuggagcuacuccggccagagcacccagcucgggaucgaguuccugaagcggggcgacaaguccgucuacuacacgagcaacccgaccaccuuccaccuggacggggaggugaucaccuucgacaaccucaagacgcugcugucccuccgcgaggugcggaccaucaaggucuucaccaccguggacaacaucaaccugcacacgcagguggucgacaugagcaugaccuacggccagcaguucggccccaccuaccuggacggggccgacgugaccaagaucaagccccacaacucccacgagggcaagacguucuacgugcucccgaacgacgacacccugcgcgucgaggccuucgaguacuaccacaccaccgaccccagcuuccuggggcgguacauguccgcccucaaccacacgaagaaguggaaguacccccaggugaacggccugaccagcaucaagugggccgacaacaacugcuaccuggcgaccgcccuccugacccugcagcagaucgagcucaaguucaaccccccggcccugcaggacgccuacuaccgcgcgcgggccggggaggccgccaacuucugcgcccugauccucgcguacugcaacaagacggugggcgagcugggcgacguccgcgagaccauguccuaccuguuccagcacgccaaccucgacagcugcaagcgggugcugaacgucgugugcaagaccugcgggcagcagcagaccacccugaagggcguggaggccgucauguacauggggacgcucuccuacgagcaguucaagaagggcgugcagauccccugcaccugcgggaagcaggccaccaaguaccuggugcagcaggagagccccuucgucaugauguccgcccccccggcgcaguacgagcugaagcacggcaccuucacgugcgccagcgaguacaccggcaacuaccagugcgggcacuacaagcacaucaccuccaaggagacccucuacugcaucgacggcgcccugcugacgaagagcagcgaguacaaggggcccaucaccgacguguucuacaaggagaacuccuacaccaccacgaucaagcccgugaccuacaagcucgacggcgucgugugcaccgagaucgaccccaagcuggacaacuacuacaagaaggacaacagcuacuucaccgagcagccgaucgaccuggugcccaaccagcccuaccccaacgccuccuucgacaacuucaaguucgucugcgacaacaucaaguucgccgacuaccucaaccagcugacgggguacaagaagccggcgagccgcgagcugaaggugaccuucuuccccgaccucaacggcgacguggucgccaucgacuacaagcacuacacccccuccuucaagaagggcgccaagcugcugcacaagcccaucguguggcacgugaacaacgccaccaacaaggcgacguacaagccgaacaccuggugcauccggugccucuggagcaccaagcccgucgagaccuccaacagcuucgacgugcugaaguccgaggacgcccaggggauggacaaccuggccugcgaggaccucaagcccgugagcgaggaggucguggagaaccccacgauccagaaggacgugcuggagugcaacgucaagaccaccgagguggugggcgacaucauccugaagccggccaacaacucccucaagaucaccgaggaggucgggcacacggaccugauggccgcguacguggacaacagcucccugaccaucaagaagcccaacgagcucagccgcgugcugggccugaagacccucgccacccacgggcuggccgccgucaacuccgugcccugggacacgaucgccaacuacgcgaagccguuccugaacaagguggucagcaccaccaccaacaucgugacgcgcugccucaaccgggugugcaccaacuacaugcccuacuucuucacccugcugcuccagcugugcaccuucacccgcuccacgaacagccggaucaaggccuccaugcccaccaccaucgccaagaacaccgucaagagcgugggcaaguucugccuggaggccagcuucaacuaccucaagucccccaacuucagcaagcugaucaacaucaucaucugguuccugcuccuguccgugugccugggcagccucaucuacuccacggccgcgcuggggguccugaugagcaaccucggcaugccguccuacugcaccggguaccgcgagggcuaccugaacagcaccaacgugaccaucgccacguacugcaccggcuccauccccugcagcgugugccuguccgggcucgacagccuggacaccuaccccucccuggagaccauccagaucacgaucagcuccuucaagugggaccucaccgccuucggccuggucgccgagugguuccuggccuacauccucuucacccgguucuucuacgugcuggggcuggcggccaucaugcagcucuucuucagcuacuucgccgugcacuucaucuccaacagcuggcugauguggcugaucaucaaccugguccagauggcccccaucuccgcgauggugcgcauguacaucuucuucgccagcuucuacuacguguggaagagcuacguccacgugguggacggcugcaacuccagcaccugcaugaugugcuacaagcggaaccgcgccacgcgggucgagugcaccaccaucgugaacgggguccgccgguccuucuacguguacgccaacggcggcaagggguucugcaagcuccacaacuggaacugcgugaacugcgacaccuucugcgccggcagcacguucaucuccgacgaggucgcgcgcgaccugagccugcaguucaagcggccgaucaaccccaccgaccaguccagcuacaucguggacuccgugaccgucaagaacgggagcauccaccucuacuucgacaaggccggccagaagaccuacgagcgccacucccugagccacuucgugaaccuggacaaccuccgggccaacaacacgaaggggucccugcccaucaacgugaucgucuucgacggcaagagcaagugcgaggaguccagcgccaaguccgccagcguguacuacucccagcugaugugccagcccauccuccugcuggaccaggcgcucgugagcgacgucggcgacagcgccgagguggccgugaagauguucgacgccuacgucaacaccuucuccagcaccuucaacgugccgauggagaagcugaagacccugguggccacggcggaggccgagcucgccaagaacgucucccuggacaacgugcugagcaccuucaucuccgccgcgcgccagggguucguggacagcgacgucgagaccaaggacgugguggagugccucaagcugucccaccagagcgacaucgaggucaccggcgacuccugcaacaacuacaugcugacguacaacaagguggagaacaugaccccccgggaccucggggccugcaucgacugcagcgcccgccacaucaacgcccagguggccaagucccacaacaucgcgcugaucuggaacgucaaggacuucaugagccuguccgagcagcuccggaagcagauccgcagcgccgccaagaagaacaaccugcccuucaagcugaccugcgccaccacgcgccagguggugaacgucgugaccaccaagaucgcccucaagggcgggugaggacuaguuauaagacugacuagcccgaugggccucccaacgggcccuccuccccuccuugcaccgagauuaauaaaaaaaaaaaaaaaaaaaaaaaaaaaaaaaaaaaaaaaaaaaaaaaaaaaaaaaaaaaaaaaaugcaucccccccccccccccccccccccccccccccaaaggcucuuuucagagccaccagaauu

SEQ ID NO: 21742 - RNA, 6058 nt, Artificial Sequence
  SARS-CoV-2__MT740483.1__non-structural protein 3 (NSP3) mRNA gc
aggagaaagcuuaccauggcccccaccaaggugaccuucggcgacgacacggucaucgaggugcagggguacaagagcgugaacaucaccuucgagcuggacgagcgcaucgacaagguccucaacgagaagugcuccgccuacaccguggagcugggcaccgaggugaacgaguucgcgugcgucguggccgacgccgugaucaagacgcugcagccggucagcgagcuccugaccccccuggggaucgaccucgacgagugguccauggccaccuacuaccuguucgacgagagcggcgaguucaagcuggccucccacauguacugcagcuucuacccccccgacgaggacgaggaggagggggacugcgaggaggaggaguucgagccguccacccaguacgaguacggcacggaggacgacuaccagggcaagccccucgaguucggggcgaccagcgccgcccugcagcccgaggaggagcaggaggaggacuggcuggacgacgacucccagcagaccgugggccagcaggacgggagcgaggacaaccagaccacgaccauccagaccaucguggagguccagccccagcucgagauggagcugaccccgguggugcagacgaucgaggucaacuccuucagcggcuaccugaagcucaccgacaacguguacaucaagaacgccgacaucguggaggaggcgaagaaggucaagcccaccgugguggucaacgccgccaacguguaccugaagcacgggggcggcguggccggggcccugaacaaggcgaccaacaacgccaugcaggucgaguccgacgacuacaucgccacgaacggcccccucaagguggggggcagcugcguccuguccggccacaaccuggccaagcacugccuccacgugguggggcccaacgucaacaagggcgaggacauccagcugcugaagagcgccuacgagaacuucaaccagcacgaggugcuccuggcgccgcugcucuccgccgggaucuucggcgccgaccccauccacagccugcgggugugcgucgacaccgugcgcaccaacguguaccuggccgucuucgacaagaaccucuacgacaagcugguguccagcuuccuggagaugaagagcgagaagcagguggagcagaagaucgccgagauccccaaggaggaggucaagcccuucaucaccgaguccaagccgagcguggagcagcggaagcaggacgacaagaagaucaaggcgugcguggaggaggucacgaccacccucgaggagaccaaguuccugacggagaaccugcuccuguacaucgacaucaacgggaaccugcaccccgacuccgccacccucgugagcgacaucgacaucaccuuccugaagaaggacgcccccuacaucgugggcgacgucgugcaggagggcgugcugaccgccgucgugauccccacgaagaaggccgggggcaccaccgagaugcucgcgaaggcccugcgcaaggugccgaccgacaacuacaucacgaccuaccccgggcagggccugaacggguacaccgucgaggaggccaagaccgugcucaagaagugcaaguccgccuucuacauccugcccagcaucaucuccaacgagaagcaggagauccugggcaccgugagcuggaaccuccgggagaugcuggcgcacgccgaggagacgcgcaagcugaugcccgucugcguggagaccaaggccaucguguccaccauccagcggaaguacaagggcaucaagauccaggagggggucguggacuacggcgcccgcuucuacuucuacaccagcaagacgaccguggccucccugaucaacacccucaacgaccugaacgagacccuggucacgaugccgcucggguacgugacccacggccugaaccuggaggaggcggcccgguacaugcgcagccucaaggugcccgccaccgucuccgugagcucccccgacgccgugaccgccuacaacggguaccugacgagcuccagcaagacccccgaggagcacuucaucgagaccaucucccuggcgggcagcuacaaggacuggagcuacuccggccagagcacccagcucgggaucgaguuccugaagcggggcgacaaguccgucuacuacacgagcaacccgaccaccuuccaccuggacggggaggugaucaccuucgacaaccucaagacgcugcugucccuccgcgaggugcggaccaucaaggucuucaccaccguggacaacaucaaccugcacacgcagguggucgacaugagcaugaccuacggccagcaguucggccccaccuaccuggacggggccgacgugaccaagaucaagccccacaacucccacgagggcaagacguucuacgugcucccgaacgacgacacccugcgcgucgaggccuucgaguacuaccacaccaccgaccccagcuuccuggggcgguacauguccgcccucaaccacacgaagaaguggaaguacccccaggugaacggccugaccagcaucaagugggccgacaacaacugcuaccuggcgaccgcccuccugacccugcagcagaucgagcucaaguucaaccccccggcccugcaggacgccuacuaccgcgcgcgggccggggaggccgccaacuucugcgcccugauccucgcguacugcaacaagacggugggcgagcugggcgacguccgcgagaccauguccuaccuguuccagcacgccaaccucgacagcugcaagcgggugcugaacgucgugugcaagaccugcgggcagcagcagaccacccugaagggcguggaggccgucauguacauggggacgcucuccuacgagcaguucaagaagggcgugcagauccccugcaccugcgggaagcaggccaccaaguaccuggugcagcaggagagccccuucgucaugauguccgcccccccggcgcaguacgagcugaagcacggcaccuucacgugcgccagcgaguacaccggcaacuaccagugcgggcacuacaagcacaucaccuccaaggagacccucuacugcaucgacggcgcccugcugacgaagagcagcgaguacaaggggcccaucaccgacguguucuacaaggagaacuccuacaccaccacgaucaagcccgugaccuacaagcucgacggcgucgugugcaccgagaucgaccccaagcuggacaacuacuacaagaaggacaacagcuacuucaccgagcagccgaucgaccuggugcccaaccagcccuaccccaacgccuccuucgacaacuucaaguucgucugcgacaacaucaaguucgccgacgaccucaaccaccugacgggguacaagaagccggcgagccgcgagcugaaggugaccuucuuccccgaccucaacggcgacguggucgccaucgacuacaagcacuacacccccuccuucaagaagggcgccaagcugcugcacaagcccaucguguggcacgugaacaacgccaccaacaaggcgacguacaagccgaacaccuggugcauccggugccucuggagcaccaagcccgucgagaccuccaacagcuucgacgugcugaaguccgaggacgcccaggggauggacaaccuggccugcgaggaccucaagcccgugagcgaggaggucguggagaaccccacgauccagaaggacgugcuggagugcaacgucaagaccaccgagguggugggcgacaucauccugaagccggccaacaacucccucaagaucaccgaggaggucgggcacacggaccugauggccgcguacguggacaacagcucccugaccaucaagaagcccaacgagcucagccgcgugcugggccugaagacccucgccacccacgggcuggccgccgucaacuccgugcccugggacacgaucgccaacuacgcgaagccguuccugaacaagguggucagcaccaccaccaacaucgugacgcgcugccucaaccgggugugcaccaacuacaugcccuacuucuucacccugcugcuccagcugugcaccuucacccgcuccacgaacagccggaucaaggccuccaugcccaccaccaucgccaagaacaccgucaagagcgugggcaaguucugccuggaggccagcuucaacuaccucaagucccccaacuucagcaagcugaucaacaucaucaucugguuccugcuccuguccgugugccugggcagccucaucuacuccacggccgcgcuggggguccugaugagcaaccucggcaugccguccuacugcaccggguaccgcgagggcuaccugaacagcaccaacgugaccaucgccacguacugcaccggcuccauccccugcagcgugugccuguccgggcucgacagccuggacaccuaccccucccuggagaccauccagaucacgaucagcuccuucaagugggaccucaccgccuucggccuggucgccgagugguuccuggccuacauccucuucacccgguucuucuacgugcuggggcuggcggccaucaugcagcucuucuucagcuacuucgccgugcacuucaucuccaacagcuggcugauguggcugaucaucaaccugguccagauggcccccaucuccgcgauggugcgcauguacaucuucuucgccagcuucuacuacguguggaagagcuacguccacgugguggacggcugcaacuccagcaccugcaugaugugcuacaagcggaaccgcgccacgcgggucgagugcaccaccaucgugaacgggguccgccgguccuucuacguguacgccaacggcggcaagggguucugcaagcuccacaacuggaacugcgugaacugcgacaccuucugcgccggcagcacguucaucuccgacgaggucgcgcgcgaccugagccugcaguucaagcggccgaucaaccccaccgaccaguccagcuacaucguggacuccgugaccgucaagaacgggagcauccaccucuacuucgacaaggccggccagaagaccuacgagcgccacucccugagccacuucgugaaccuggacaaccuccgggccaacaacacgaaggggucccugcccaucaacgugaucgucuucgacggcaagagcaagugcgaggaguccagcgccaaguccgccagcguguacuacucccagcugaugugccagcccauccuccugcuggaccaggcgcucgugagcgacgucggcgacagcgccgagguggccgugaagauguucgacgccuacgucaacaccuucuccagcaccuucaacgugccgauggagaagcugaagacccugguggccacggcggaggccgagcucgccaagaacgucucccuggacaacgugcugagcaccuucaucuccgccgcgcgccagggguucguggacagcgacgucgagaccaaggacgugguggagugccucaagcugucccaccagagcgacaucgaggucaccggcgacuccugcaacaacuacaugcugacguacaacaagguggagaacaugaccccccgggaccucggggccugcaucgacugcagcgcccgccacaucaacgcccagguggccaagucccacaacaucgcgcugaucuggaacgucaaggacuucaugagccuguccgagcagcuccggaagcagauccgcagcgccgccaagaagaacaaccugcccuucaagcugaccugcgccaccacgcgccagguggugaacgucgugaccaccaagaucgcccucaagggcgggugaggacuaguuauaagacugacuagcccgaugggccucccaacgggcccuccuccccuccuugcaccgagauuaauaaaaaaaaaaaaaaaaaaaaaaaaaaaaaaaaaaaaaaaaaaaaaaaaaaaaaaaaaaaaaaaaugcaucccccccccccccccccccccccccccccccaaaggcucuuuucagagccaccagaauu

SEQ ID NO: 21743 - RNA, 6058 nt, Artificial Sequence
  SARS-CoV-2__MT742091.1__non-structural protein 3 (NSP3) mRNA gc
aggagaaagcuuaccauggcccccaccaaggugaccuucggcgacgacacggucaucgaggugcagggguacaagagcgugaacaucaccuucgagcuggacgagcgcaucgacaagguccucaacgagaagugcuccgccuacaccguggagcugggcaccgaggugaacgaguucgcgugcgucguggccgacgccgugaucaagacgcugcagccggucagcgagcuccugaccccccuggggaucgaccucgacgagugguccauggccaccuacuaccuguucgacgagagcggcgaguucaagcuggccucccacauguacugcagcuucuacccccccgacgaggacgaggaggagggggacugcgaggaggaggaguucgagccguccacccaguacgaguacggcacggaggacgacuaccagggcaagccccucgaguucggggcgaccagcgccgcccugcagcccgaggaggagcaggaggaggacuggcuggacgacgacucccagcagaccgugggccagcaggacgggagcgaggacaaccagaccacgaccauccagaccaucguggagguccagccccagcucgagauggagcugaccccgguggugcagacgaucgaggucaacuccuucagcggcuaccugaagcucaccgacaacguguacaucaagaacgccgacaucguggaggaggcgaagaaggucaagcccaccgugguggucaacgccgccaacguguaccugaagcacgggggcggcguggccggggcccugaacaaggcgaccaacaacgccaugcaggucgaguccgacgacuacaucgccacgaacggcccccucaagguggggggcagcugcguccuguccggccacaaccuggccaagcacugccuccacgugguggggcccaacgucaacaagggcgaggacauccagcugcugaagagcgccuacgagaacuucaaccagcacgaggugcuccuggcgccgcugcucuccgccgggaucuucggcgccgaccccauccacagccugcgggugugcgucgacaccgugcgcaccaacguguaccuggccgucuucgacaagaaccucuacgacaagcugguguccagcuuccuggagaugaagagcgagaagcagguggagcagaagaucgccgagauccccaaggaggaggucaagcccuucaucaccgaguccaagccgagcguggagcagcggaagcaggacgacaagaagaucaaggcgugcguggaggaggucacgaccacccucgaggagaccaaguuccugacggagaaccugcuccuguacaucgacaucaacgggaaccugcaccccgacuccgccacccucgugagcgacaucgacaucaccuuccugaagaaggacgcccccuacaucgugggcgacgucgugcaggagggcgugcugaccgccgucgugauccccacgaagaaggccgggggcaccaccgagaugcucgcgaaggcccugcgcaaggugccgaccgacaacuacaucacgaccuaccccgggcagggccugaacggguacaccgucgaggaggccaagaccgugcucaagaagugcaaguccgccuucuacauccugcccagcaucaucuccaacgagaagcaggagauccugggcaccgugagcuggaaccuccgggagaugcuggcgcacgccgaggagacgcgcaagcugaugcccgucugcguggagaccaaggccaucguguccaccauccagcggaaguacaagggcaucaagauccaggagggggucguggacuacggcgcccgcuucuacuucuacaccagcaagacgaccguggccucccugaucaacacccucaacgaccugaacgagacccuggucacgaugccgcucggguacgugacccacggccugaaccuggaggaggcggcccgguacaugcgcagccucaaggugcccgccaccgucuccgugagcucccccgacgccgugaccgccuacaacggguaccugacgagcuccagcaagacccccgaggagcacuucaucgagaccaucucccuggcgggcagcuacaaggacuggagcuacuccggccagagcacccagcucgggaucgaguuccugaagcggggcgacaaguccgucuacuacacgagcaacccgaccaccuuccaccuggacggggaggugaucaccuucgacaaccucaagacgcugcugucccuccgcgaggugcggaccaucaaggucuucaccaccguggacaacaucaaccugcacacgcagguggucgacaugagcaugaccuacggccagcaguucggccccaccuaccuggacggggccgacgugaccaagaucaagccccacaacucccacgagggcaagacguucuacgugcucccgaacgacgacacccugcgcgucgaggccuucgaguacuaccacaccaccgaccccagcuuccuggggcgguacauguccgcccucaaccacacgaagaaguggaaguacccccaggugaacggccugaccagcaucaagugggccgacaacaacugcuaccuggcgaccgcccuccugacccugcagcagaucgagcucaaguucaaccccccggcccugcaggacgccuacuaccgcgcgcgggccggggaggccgccaacuucugcgcccugauccucgcguacugcaacaagacggugggcgagcugggcgacguccgcgagaccauguccuaccuguuccagcacgccaaccucgacagcugcaagcgggugcugaacgucgugugcaagaccugcgggcagcagcagaccacccugaagggcguggaggccgucauguacauggggacgcucuccuacgagcaguucaagaagggcgugcagauccccugcaccugcgggaagcaggccaccaaguaccuggugcagcaggagagccccuucgucaugauguccgcccccccggcgcaguacgagcugaagcacggcaccuucacgugcgccagcgaguacaccggcaacuaccagugcgggcacuacaagcacaucaccuccaaggagacccucuacugcaucgacggcgcccugcugacgaagagcagcgaguacaaggggcccaucaccgacguguucuacaaggagaacuccuacaccaccacgaucaagcccgugaccuacaagcucgacggcgucgugugcaccgagaucgaccccaagcuggacaacuacuacaagaaggacaacagcuacuucaccgagcagccgaucgaccuggugcccaaccagcccuaccccaacgccuccuucgacaacuucaaguucgucugcgacaacaucaaguucgccgacgaccucaaccagcugacgggguacaagaagccggcgagccgcgagcugaaggugaccuucuuccccgaccucaacggcgacguggucgccaucgacuacaagcacuacacccccuccuucaagaagggcgccaagcugcugcacaagcccaucguguggcacgugaacaacgccaccaacaaggcgacguacaagccgaacaccuggugcauccggugccucuggagcaccaagcccgucgagaccuccaacagcuucgacgugcugaaguccgaggacgcccaggggauggacaaccuggccugcgaggaccucaagcccgugagcgaggaggucguggagaaccccacgauccagaaggacgugcuggagugcaacgucaagaccaccgagguggugggcgacaucauccugaagccggccaacaacucccucaagaucaccgaggaggucgggcacacggaccugauggccgcguacguggacaacagcucccugaccaucaagaagcccaacgagcucagccgcgugcugggccugaagacccucgccacccacgggcuggccgccgucaacuccgugcccugggacacgaucgccaacuacgcgaagccguuccugaacaagguggucagcaccaccaccaacaucgugacgcgcugccucaaccgggugugcaccaacuacaugcccuacuucuucacccugcugcuccagcugugcaccuucacccgcuccacgaacagccggaucaaggccuccaugcccaccaccaucgccaagaacagcgucaagagcgugggcaaguucugccuggaggccuccuucaacuaccucaagagccccaacuucuccaagcugaucaacaucaucaucugguuccugcuccugagcgugugccugggcucccucaucuacagcaccgccgcgcuggggguccugauguccaaccucggcaugccgagcuacugcacgggguaccgcgagggcuaccugaacuccaccaacgugaccaucgccaccuacugcacgggcagcauccccugcuccgugugccugagcgggcucgacucccuggacaccuaccccagccuggagaccauccagaucaccaucuccagcuucaagugggaccucacggccuucggccuggucgccgagugguuccuggccuacauccucuucacccgguucuucuacgugcuggggcuggcggccaucaugcagcucuucuucuccuacuucgccgugcacuucaucagcaacuccuggcugauguggcugaucaucaaccugguccagauggcccccaucagcgcgauggugcgcauguacaucuucuucgccagcuucuacuacguguggaaguccuacguccacgugguggacggcugcaacagcuccaccugcaugaugugcuacaagcggaaccgcgccacccgggucgagugcacgaccaucgugaacgggguccgccggagcuucuacguguacgccaacggcggcaagggguucugcaagcuccacaacuggaacugcgugaacugcgacaccuucugcgccggcuccaccuucaucagcgacgaggucgcgcgcgaccugucccugcaguucaagcggccgaucaaccccacggaccagagcuccuacaucguggacagcgugaccgucaagaacggguccauccaccucuacuucgacaaggccggccagaagaccuacgagcgccacagccugucccacuucgugaaccuggacaaccuccgggccaacaacaccaaggggagccugcccaucaacgugaucgucuucgacggcaaguccaagugcgaggagagcuccgccaagagcgccuccguguacuacagccagcugaugugccagcccauccuccugcuggaccaggcgcucgugagcgacgucggcgacuccgccgagguggccgugaagauguucgacgccuacgucaacacguucagcuccaccuucaacgugccgauggagaagcugaagacccugguggccaccgcggaggccgagcucgccaagaacgucagccuggacaacgugcuguccacguucaucagcgccgcgcgccagggguucguggacuccgacgucgagaccaaggacgugguggagugccucaagcugagccaccaguccgacaucgaggucaccggcgacagcugcaacaacuacaugcugaccuacaacaagguggagaacaugacgccccgggaccucggggccugcaucgacugcuccgcccgccacaucaacgcccagguggccaagagccacaacaucgcgcugaucuggaacgucaaggacuucaugucccugagcgagcagcuccggaagcagauccgcuccgccgccaagaagaacaaccugcccuucaagcugaccugcgccaccacccgccagguggugaacgucgugacgaccaagaucgcccucaagggcgggugaggacuaguuauaagacugacuagcccgaugggccucccaacgggcccuccuccccuccuugcaccgagauuaauaaaaaaaaaaaaaaaaaaaaaaaaaaaaaaaaaaaaaaaaaaaaaaaaaaaaaaaaaaaaaaaaugcaucccccccccccccccccccccccccccccccaaaggcucuuuucagagccaccagaauu

SEQ ID NO: 21744 - RNA, 6058 nt, Artificial Sequence
  SARS-CoV-2__MT734055.1__non-structural protein 3 (NSP3) mRNA gc
aggagaaagcuuaccauggcccccaccaaggugaccuucggcgacgacacggucaucgaggugcagggguacaagagcgugaacaucaccuucgagcuggacgagcgcaucgacaagguccucaacgagaagugcuccgccuacaccguggagcugggcaccgaggugaacgaguucgcgugcgucguggccgacgccgugaucaagacgcugcagccggucagcgagcuccugaccccccuggggaucgaccucgacgagugguccauggccaccuacuaccuguucgacgagagcggcgaguucaagcuggccucccacauguacugcagcuucuacccccccgacgaggacgaggaggagggggacugcgaggaggaggaguucgagccguccacccaguacgaguacggcacggaggacgacuaccagggcaagccccucgaguucggggcgaccagcgccgcccugcagcccgaggaggagcaggaggaggacuggcuggacgacgacucccagcagaccgugggccagcaggacgggagcgaggacaaccagaccacgaccauccagaccaucguggagguccagccccagcucgagauggagcugaccccgguggugcagacgaucgaggucaacuccuucagcggcuaccugaagcucaccgacaacguguacaucaagaacgccgacaucguggaggaggcgaagaaggucaagcccaccgugguggucaacgccgccaacguguaccugaagcacgggggcggcguggccggggcccugaacaaggcgaccaacaacgccaugcaggucgaguccgacgacuacaucgccacgaacggcccccucaagguggggggcagcugcguccuguccggccacaaccuggccaagcacugccuccacgugguggggcccaacgucaacaagggcgaggacauccagcugcugaagagcgccuacgagaacuucaaccagcacgaggugcuccuggcgccgcugcucuccgccgggaucuucggcgccgaccccauccacagccugcgggugugcgucgacaccgugcgcaccaacguguaccuggccgucuucgacaagaaccucuacgacaagcugguguccagcuuccuggagaugaagagcgagaagcagguggagcagaagaucgccgagauccccaaggaggaggucaagcccuucaucaccgaguccaagccgagcguggagcagcggaagcaggacgacaagaagaucaaggcgugcguggaggaggucacgaccacccucgaggagaccaaguuccugacggagaaccugcuccuguacaucgacaucaacgggaaccugcaccccgacuccgccacccucgugagcgacaucgacaucaccuuccugaagaaggacgcccccuacaucgugggcgacgucgugcaggagggcgugcugaccgccgucgugauccccacgaagaaggccgggggcaccaccgagaugcucgcgaaggcccugcgcaaggugccgaccgacaacuacaucacgaccuaccccgggcagggccugaacggguacaccgucgaggaggccaagaccgugcucaagaagugcaaguccgccuucuacauccugcccagcaucaucuccaacgagaagcaggagauccugggcaccgugagcuggaaccuccgggagaugcuggcgcacgccgaggagacgcgcaagcugaugcccgucugcguggagaccaaggccaucguguccaccauccagcggaaguacaagggcaucaagauccaggagggggucguggacuacggcgcccgcuucuacuucuacaccagcaagacgaccguggccucccugaucaacacccucaacgaccugaacgagacccuggucacgaugccgcucggguacgugacccacggccugaaccuggaggaggcggcccgguacaugcgcagccucaaggugcccgccaccgucuccgugagcucccccgacgccgugaccgccuacaacggguaccugacgagcuccagcaagacccccgaggagcacuucaucgagaccaucucccuggcgggcagcuacaaggacuggagcuacuccggccagagcacccagcucgggaucgaguuccugaagcggggcgacaaguccgucuacuacacgagcaacccgaccaccuuccaccuggacggggaggugaucaccuucgacaaccucaagacgcugcugucccuccgcgaggugcggaccaucaaggucuucaccaccguggacaacaucaaccugcacacgcagguggucgacaugagcaugaccuacggccagcaguucggccccaccuaccuggacggggccgacgugaccaagaucaagccccacaacucccacgagggcaagacguucuacgugcucccgaacgacgacacccugcgcgucgaggccuucgaguacuaccacaccaccgaccccagcuuccuggggcgguacauguccgcccucaaccacacgaagaaguggaaguacccccaggugaacggccugaccagcaucaagugggccgacaacaacugcuaccuggcgaccgcccuccugacccugcagcagaucgagcucaaguucaaccccccggcccugcaggacgccuacuaccgcgcgcgggccggggaggccgccaacuucugcgcccugauccucgcguacugcaacaagacggugggcgagcugggcgacguccgcgagaccauguccuaccuguuccagcacgccaaccucgacagcugcaagcgggugcugaacgucgugugcaagaccugcgggcagcagcagaccacccugaagggcguggaggccgucauguacauggggacgcucuccuacgagcaguucaagaagggcgugcagauccccugcaccugcgggaagcaggccaccaaguaccuggugcagcaggagagccccuucgucaugauguccgcccccccggcgcaguacgagcugaagcacggcaccuucacgugcgccagcgaguacaccggcaacuaccagugcgggcacuacaagcacaucaccuccaaggagacccucuacugcaucgacggcgcccugcugacgaagagcagcgaguacaaggggcccaucaccgacguguucuacaaggagaacuccuacaccaccacgaucaagcccgugaccuacaagcucgacggcgucgugugcaccgagaucgaccccaagcuggacaacuacuacaagaaggacaacagcuacuucaccgagcagccgaucgaccuggugcccaaccagcccuaccccaacgccuccuucgacaacuucaaguucgucugcgacaacaucaaguucgccgacgaccucaaccagcugacgggguacaagaagccggcgagccgcgagcugaaggugaccuucuuccccgaccucaacggcgacguggucgccaucgacuacaagcacuacacccccuccuucaagaagggcgccaagcugcugcacaagcccaucguguggcacgugaacaacgccaccaacaaggcgacguacaagccgaacaccuggugcauccggugccucuggagcaccaagcccgucgagaccuccaacagcuucgacgugcugaaguccgaggacgcccaggggauggacaaccuggccugcgaggaccucaagcccgugagcgaggaggucguggagaaccccacgauccagaaggacgugcuggagugcaacgucaagaccaccgagguggugggcgacaucauccugaagccggccaacaacucccucaagaucaccgaggaggucgggcacacggaccugauggccgcguacguggacaacagcucccugaccaucaagaagcccaacgagcucagccgcgugcugggccugaagacccucgccacccacgggcuggccgccgucaacuccgugcccugggacacgaucgccaacuacgcgaagccguuccugaacaagguggucagcaccaccaccaacaucgugacgcgcugccucaaccgggugugcaccaacuacaugcccuacuucuucacccugcugcuccagcugugcaccuucacccgcuccacgaacagccggaucaaggccuccaugcccaccaccaucgccaagaacaccgucaagagcgugggcaaguucugccuggaggccagcuucaacuaccucaagucccccaacuucagcaagcugaucaacaucaucaucugguuccugcuccuguccgugugccugggcagccucaucuacuccacggccgcgcuggggguccugaugagcaaccucggcaugccguccuacugcaccggguaccgcgagggcuaccugaacagcaccaacgugaccaucgccacguacugcaccggcuccauccccugcagcgugugccuguccgggcucgacagccuggacaccuaccccucccuggagaccauccagaucacgaucagcuccuucaagugggaccucaccgucuucggccugguggccgagugguuccuggccuacauccucuucacccgguucuucuacgugcuggggcuggccgcgaucaugcagcucuucuucagcuacuucgccguccacuucaucuccaacagcuggcugauguggcugaucaucaaccuggugcagauggcccccaucuccgccauggugcgcauguacaucuucuucgcgagcuucuacuacgucuggaagagcuacgugcacguggucgacggcugcaacuccagcaccugcaugaugugcuacaagcggaaccgcgccacgcggguggagugcaccaccaucgucaacggggugcgccgguccuucuacguguacgccaacggcggcaagggguucugcaagcuccacaacuggaacugcgucaacugcgacaccuucugcgccggcagcacguucaucuccgacgagguggcccgcgaccugagccugcaguucaagcggccgaucaaccccaccgaccaguccagcuacaucguggacuccgucaccgugaagaacgggagcauccaccucuacuucgacaaggcgggccagaagaccuacgagcgccacucccugagccacuucgugaaccuggacaaccuccgggccaacaacacgaaggggucccugcccaucaacgucaucguguucgacggcaagagcaagugcgaggaguccagcgccaaguccgccagcguguacuacucccagcugaugugccagcccauccuccugcuggaccaggcccucgucagcgacgugggcgacagcgcggagguggccgucaagauguucgacgccuacgugaacaccuucuccagcaccuucaacgugccgauggagaagcugaagacccuggucgccacggccgaggcggagcucgccaagaacgugucccuggacaacgugcugagcaccuucaucuccgccgcccgccagggguucgucgacagcgacguggagaccaaggacguggucgagugccucaagcugucccaccagagcgacaucgaggugaccggcgacuccugcaacaacuacaugcugacguacaacaagguggagaacaugaccccccgggaccucggggcgugcaucgacugcagcgcccgccacaucaacgcccaggucgccaagucccacaacaucgcccugaucuggaacgugaaggacuucaugagccuguccgagcagcuccggaagcagauccgcagcgcggccaagaagaacaaccugcccuucaagcugaccugcgccaccacgcgccagguggucaacguggugaccaccaagaucgcccucaagggcgggugaggacuaguuauaagacugacuagcccgaugggccucccaacgggcccuccuccccuccuugcaccgagauuaauaaaaaaaaaaaaaaaaaaaaaaaaaaaaaaaaaaaaaaaaaaaaaaaaaaaaaaaaaaaaaaaaugcaucccccccccccccccccccccccccccccccaaaggcucuuuucagagccaccagaauu

SEQ ID NO: 21745 - RNA, 6058 nt, Artificial Sequence
  SARS-CoV-2__MT730002.1__non-structural protein 3 (NSP3) mRNA gc
aggagaaagcuuaccauggcccccaccaaggugaccuucggcgacgacacggucaucgaggugcagggguacaagagcgugaacaucaccuucgagcuggacgagcgcaucgacaagguccucaacgagaagugcuccgccuacaccguggagcugggcaccgaggugaacgaguucgcgugcgucguggccgacgccgugaucaagacgcugcagccggucagcgagcuccugaccccccuggggaucgaccucgacgagugguccauggccaccuacuaccuguucgacgagagcggcgaguucaagcuggccucccacauguacugcagcuucuacccccccgacgaggacgaggaggagggggacugcgaggaggaggaguucgagccguccacccaguacgaguacggcacggaggacgacuaccagggcaagccccucgaguucggggcgaccagcgccgcccugcagcccgaggaggagcaggaggaggacuggcuggacgacgacucccagcagaccgugggccagcaggacgggagcgaggacaaccagaccacgaccauccagaccaucguggagguccagccccagcucgagauggagcugaccccgguggugcagacgaucgaggucaacuccuucagcggcuaccugaagcucaccgacaacguguacaucaagaacgccgacaucguggaggaggcgaagaaggucaagcccaccgugguggucaacgccgccaacguguaccugaagcacgggggcggcguggccggggcccugaacaaggcgaccaacaacgccaugcaggucgaguccgacgacuacaucgccacgaacggcccccucaagguggggggcagcugcguccuguccggccacaaccuggccaagcacugccuccacgugguggggcccaacgucaacaagggcgaggacauccagcugcugaagagcgccuacgagaacuucaaccagcacgaggugcuccuggcgccgcugcucuccgccgggaucuucggcgccgaccccauccacagccugcgggugugcgucgacaccgugcgcaccaacguguaccuggccgucuucgacaagaaccucuacgacaagcugguguccagcuuccuggagaugaagagcgagaagcagguggagcagaagaucgccgagauccccaaggaggaggucaagcccuucaucaccgaguccaagccgagcguggagcagcggaagcaggacgacaagaagaucaaggcgugcguggaggaggucacgaccacccucgaggagaccaaguuccugacggagaaccugcuccuguacaucgacaucaacgggaaccugcaccccgacuccgccacccucgugagcgacaucgacaucaccuuccugaagaaggacgcccccuacaucgugggcgacgucgugcaggagggcgugcugaccgccgucgugauccccacgaagaaggccgggggcaccaccgagaugcucgcgaaggcccugcgcaaggugccgaccgacaacuacaucacgaccuaccccgggcagggccugaacggguacaccgucgaggaggccaagaccgugcucaagaagugcaaguccgccuucuacauccugcccagcaucaucuccaacgagaagcaggagauccugggcaccgugagcuggaaccuccgggagaugcuggcgcacgccgaggagacgcgcaagcugaugcccgucugcguggagaccaaggccaucguguccaccauccagcggaaguacaagggcaucaagauccaggagggggucguggacuacggcgcccgcuucuacuucuacaccagcaagacgaccguggccucccugaucaacacccucaacgaccugaacgagacccuggucacgaugccgcucggguacgugacccacggccugaaccuggaggaggcggcccgguacaugcgcagccucaaggugcccgccaccgucuccgugagcucccccgacgccgugaccgccuacaacggguaccugacgagcuccagcaagacccccgaggagcacuucaucgagaccaucucccuggcgggcagcuacaaggacuggagcuacuccggccagagcacccagcucgggaucgaguuccugaagcggggcgacaaguccgucuacuacacgagcaacccgaccaccuuccaccuggacggggaggugaucaccuucgacaaccucaagacgcugcugucccuccgcgaggugcggaccaucaaggucuucaccaccguggacaacaucaaccugcacacgcagguggucgacaugagcaugaccuacggccagcaguucggccccaccuaccuggacggggccgacgugaccaagaucaagccccacaacucccacgagggcaagacguucuacgugcucccgaacgacgacacccugcgcgucgaggccuucgaguacuaccacaccaccgaccccagcuuccuggggcgguacauguccgcccucaaccacacgaagaaguggaaguacccccaggugaacggccugaccagcaucaagugggccgacaacaacugcuaccuggcgaccgcccuccugacccugcagcagaucgagcucaaguucaaccccccggcccugcaggacgccuacuaccgcgcgcgggccggggaggccgccaacuucugcgcccugauccucgcguacugcaacaagacggugggcgagcugggcgacguccgcgagaccauguccuaccuguuccagcacgccaaccucgacagcugcaagcgggugcugaacgucgugugcaagaccugcgggcagcagcagaccacccugaagggcguggaggccgucaucuacauggggacgcucuccuacgagcaguucaagaagggcgugcagauccccugcaccugcgggaagcaggccaccaaguaccuggugcagcaggagagccccuucgucaugauguccgcccccccggcgcaguacgagcugaagcacggcaccuucacgugcgccagcgaguacaccggcaacuaccagugcgggcacuacaagcacaucaccuccaaggagacccucuacugcaucgacggcgcccugcugacgaagagcagcgaguacaaggggcccaucaccgacguguucuacaaggagaacuccuacaccaccacgaucaagcccgugaccuacaagcucgacggcgucgugugcaccgagaucgaccccaagcuggacaacuacuacaagaaggacaacagcuacuucaccgagcagccgaucgaccuggugcccaaccagcccuaccccaacgccuccuucgacaacuucaaguucgucugcgacaacaucaaguucgccgacgaccucaaccagcugacgggguacaagaagccggcgagccgcgagcugaaggugaccuucuuccccgaccucaacggcgacguggucgccaucgacuacaagcacuacacccccuccuucaagaagggcgccaagcugcugcacaagcccaucguguggcacgugaacaacgccaccaacaaggcgacguacaagccgaacaccuggugcauccggugccucuggagcaccaagcccgucgagaccuccaacagcuucgacgugcugaaguccgaggacgcccaggggauggacaaccuggccugcgaggaccucaagcccgugagcgaggaggucguggagaaccccacgauccagaaggacgugcuggagugcaacgucaagaccaccgagguggugggcgacaucauccugaagccggccaacaacucccucaagaucaccgaggaggucgggcacacggaccugauggccgcguacguggacaacagcucccugaccaucaagaagcccaacgagcucagccgcgugcugggccugaagacccucgccacccacgggcuggccgccgucaacuccgugcccugggacacgaucgccaacuacgcgaagccguuccugaacaagguggucagcaccaccaccaacaucgugacgcgcugccucaaccgggugugcaccaacuacaugcccuacuucuucacccugcugcuccagcugugcaccuucacccgcuccacgaacagccggaucaaggccuccaugcccaccaccaucgccaagaacaccgucaagagcgugggcaaguucugccuggaggccagcuucaacuaccucaagucccccaacuucagcaagcugaucaacaucaucaucugguuccugcuccuguccgugugccugggcagccucaucuacuccacggccgcgcuggggguccugaugagcaaccucggcaugccguccuacugcaccggguaccgcgagggcuaccugaacagcaccaacgugaccaucgccacguacugcaccggcuccauccccugcagcgugugccuguccgggcucgacagccuggacaccuaccccucccuggagaccauccagaucacgaucagcuccuucaagugggaccucaccgccuucggccuggucgccgagugguuccuggccuacauccucuucacccgguucuucuacgugcuggggcuggcggccaucaugcagcucuucuucagcuacuucgccgugcacuucaucuccaacagcuggcugauguggcugaucaucaaccugguccagauggcccccaucuccgcgauggugcgcauguacaucuucuucgccagcuucuacuacguguggaagagcuacguccacgugguggacggcugcaacuccagcaccugcaugaugugcuacaagcggaaccgcgccacgcgggucgagugcaccaccaucgugaacgggguccgccgguccuucuacguguacgccaacggcggcaagggguucugcaagcuccacaacuggaacugcgugaacugcgacaccuucugcgccggcagcacguucaucuccgacgaggucgcgcgcgaccugagccugcaguucaagcggccgaucaaccccaccgaccaguccagcuacaucguggacuccgugaccgucaagaacgggagcauccaccucuacuucgacaaggccggccagaagaccuacgagcgccacucccugagccacuucgugaaccuggacaaccuccgggccaacaacacgaaggggucccugcccaucaacgugaucgucuucgacggcaagagcaagugcgaggaguccagcgccaaguccgccagcguguacuacucccagcugaugugccagcccauccuccugcuggaccaggcgcucgugagcgacgucggcgacagcgccgagguggccgugaagauguucgacgccuacgucaacaccuucuccagcaccuucaacgugccgauggagaagcugaagacccugguggccacggcggaggccgagcucgccaagaacgucucccuggacaacgugcugagcaccuucaucuccgccgcgcgccagggguucguggacagcgacgucgagaccaaggacgugguggagugccucaagcugucccaccagagcgacaucgaggucaccggcgacuccugcaacaacuacaugcugacguacaacaagguggagaacaugaccccccgggaccucggggccugcaucgacugcagcgcccgccacaucaacgcccagguggccaagucccacaacaucgcgcugaucuggaacgucaaggacuucaugagccuguccgagcagcuccggaagcagauccgcagcgccgccaagaagaacaaccugcccuucaagcugaccugcgccaccacgcgccagguggugaacgucgugaccaccaagaucgcccucaagggcgggugaggacuaguuauaagacugacuagcccgaugggccucccaacgggcccuccuccccuccuugcaccgagauuaauaaaaaaaaaaaaaaaaaaaaaaaaaaaaaaaaaaaaaaaaaaaaaaaaaaaaaaaaaaaaaaaaugcaucccccccccccccccccccccccccccccccaaaggcucuuuucagagccaccagaauu

SEQ ID NO: 21746 - RNA, 6058 nt, Artificial Sequence
  SARS-CoV-2__MT731327.1__non-structural protein 3 (NSP3) mRNA gc
aggagaaagcuuaccauggcccccaccaaggugaccuucggcgacgacacggucaucgaggugcagggguacaagagcgugaacaucaccuucgagcuggacgagcgcaucgacaagguccucaacgagaagugcuccgccuacaccguggagcugggcaccgaggugaacgaguucgcgugcgucguggccgacgccgugaucaagacgcugcagccggucagcgagcuccugaccccccuggggaucgaccucgacgagugguccauggccaccuacuaccuguucgacgagagcggcgaguucaagcuggccucccacauguacugcagcuucuacccccccgacgaggacgaggaggagggggacugcgaggaggaggaguucgagccguccacccaguacgaguacggcacggaggacgacuaccagggcaagccccucgaguucggggcgaccagcgccgcccugcagcccgaggaggagcaggaggaggacuggcuggacgacgacucccagcagaccgugggccagcaggacgggagcgaggacaaccagaccacgaccauccagaccaucguggagguccagccccagcucgagauggagcugaccccgguggugcagacgaucgaggucaacuccuucagcggcuaccugaagcucaccgacaacguguacaucaagaacgccgacaucguggaggaggcgaagaaggucaagcccaccgugguggucaacgccgccaacguguaccugaagcacgggggcggcguggccggggcccugaacaaggcgaccaacaacgccaugcaggucgaguccgacgacuacaucgccacgaacggcccccucaagguggggggcagcugcguccuguccggccacaaccuggccaagcacugccuccacgugguggggcccaacgucaacaagggcgaggacauccagcugcugaagagcgccuacgagaacuucaaccagcacgaggugcuccuggcgccgcugcucuccgccgggaucuucggcgccgaccccauccacagccugcgggugugcgucgacaccgugcgcaccaacguguaccuggccgucuucgacaagaaccucuacgacaagcugguguccagcuuccuggagaugaagagcgagaagcagguggagcagaagaucgccgagauccccaaggaggaggucaagcccuucaucaccgaguccaagccgagcguggagcagcggaagcaggacgacaagaagaucaaggcgugcguggaggaggucacgaccacccucgaggagaccaaguuccugacggagaaccugcuccuguacaucgacaucaacgggaaccugcaccccgacuccgccacccucgugagcgacaucgacaucaccuuccugaagaaggacgcccccuacaucgugggcgacgucgugcaggagggcgugcugaccgccgucgugauccccacgaagaaggccgggggcaccaccgagaugcucgcgaaggcccugcgcaaggugccgaccgacaacuacaucacgaccuaccccgggcagggccugaacggguacaccgucgaggaggccaagaccgugcucaagaagugcaaguccgccuucuacauccugcccagcaucaucuccaacgagaagcaggagauccugggcaccgugagcuggaaccuccgggagaugcuggcgcacgccgaggagacgcgcaagcugaugcccgucugcguggagaccaaggccaucguguccaccauccagcggaaguacaagggcaucaagauccaggagggggucguggacuacggcgcccgcuucuacuucuacaccagcaagacgaccguggccucccugaucaacacccucaacgaccugaacgagacccuggucacgaugccgcucggguacgugacccacggccugaaccuggaggaggcggcccgguacaugcgcagccucaaggugcccgccaccgucuccgugagcucccccgacgccgugaccgccuacaacggguaccugacgagcuccagcaagacccccgaggagcacuucaucgagaccaucucccuggcgggcagcuacaaggacuggagcuacuccggccagagcacccagcucgggaucgaguuccugaagcggggcgacaaguccgucuacuacacgagcaacccgaccaccuuccaccuggacggggaggugaucaccuucgacaaccucaagacgcugcugucccuccgcgaggugcggaccaucaaggucuucaccaccguggacaacaucaaccugcacacgcagguggucgacaugagcaugaccuacggccagcaguucggccccaccuaccuggacggggccgacgugaccaagaucaagccccacaacucccacgagggcaagacguucuacgugcucccgaacgacgacacccugcgcgucgaggccuucgaguacuaccacaccaccgaccccagcuuccuggggcgguacauguccgcccucaaccacacgaagaaguggaaguacccccaggugaacggccugaccagcaucaagugggccgacaacaacugcuaccuggcgaccgcccuccugacccugcagcagaucgagcucaaguucaaccccccggcccugcaggacgccuacuaccgcgcgcgggccggggaggccgccaacuucugcgcccugauccucgcguacugcaacaagacggugggcgagcugggcgacguccgcgagaccauguccuaccuguuccagcacgccaaccucgacagcugcaagcgggugcugaacgucgugugcaagaccugcgggcagcagcagaccacccugaagggcguggaggccgucauguacauggggacgcucuccuacgagcaguucaagaagggcgugcagauccccugcaccugcgggaagcaggccaccaaguaccuggugcagcaggagagccccuucgucaugauguccgcccccccggcgcaguacgagcugaagcacggcaccuucacgugcgccagcgaguacaccggcaacuaccagugcgggcacuacaagcacaucaccuccaaggagacccucuacugcaucgacggcgcccugcugacgaagagcagcgaguacaaggggcccaucaccgacguguucuacaaggagaacuccuacaccaccacgaucaagcccgugaccuacaagcucgacggcgucgugugcaccgagaucgaccccaagcuggacaacuacuacaagaaggacaacagcuacuucaccgagcagccgaucgaccuggugcccaaccagcccuaccccaacgccuccuucgacaacuucaaguucgucugcgacaacaucaaguucgccgacgaccucaaccagcugacgggguacaagaagccggcgagccgcgagcugaaggugaccuucuuccccgaccucaacggcgacguggucgccaucgacuacaagcacuacacccccuccuucaagaagggcgccaagcugcugcacaagcccaucguguggcacgugaacaacgccaccaacaaggcgacguacaagccgaacaccuggugcauccggugccucuggagcaccaagcccgucgagaccuccaacagcuucgacgugcugaaguccgaggacgcccaggggauggacaaccuggccugcgaggaccucaagcccuucagcgaggagguggucgagaaccccacgauccagaaggacgugcuggagugcaacgugaagaccaccgaggucgugggcgacaucauccugaagccggccaacaacucccucaagaucaccgaggagguggggcacacggaccugauggccgcguacgucgacaacagcucccugaccaucaagaagcccaacgagcucagccgcgugcugggccugaagacccucgccacccacgggcuggccgccgugaacuccguccccugggacacgaucgccaacuacgcgaagccguuccugaacaagguggugagcaccaccaccaacaucgucacgcgcugccucaaccgggugugcaccaacuacaugcccuacuucuucacccugcugcuccagcugugcaccuucacccgcuccacgaacagccggaucaaggccuccaugcccaccaccaucgccaagaacaccgugaagagcgucggcaaguucugccuggaggccagcuucaacuaccucaagucccccaacuucagcaagcugaucaacaucaucaucugguuccugcuccuguccgugugccugggcagccucaucuacuccacggccgcgcugggggugcugaugagcaaccucggcaugccguccuacugcaccggguaccgcgagggcuaccugaacagcaccaacgucaccaucgccacguacugcaccggcuccauccccugcagcgugugccuguccgggcucgacagccuggacaccuaccccucccuggagaccauccagaucacgaucagcuccuucaagugggaccucaccgccuucggccugguggccgagugguuccuggccuacauccucuucacccgguucuucuacguccuggggcuggcggccaucaugcagcucuucuucagcuacuucgccgugcacuucaucuccaacagcuggcugauguggcugaucaucaaccuggugcagauggcccccaucuccgcgaugguccgcauguacaucuucuucgccagcuucuacuacguguggaagagcuacgugcacgucguggacggcugcaacuccagcaccugcaugaugugcuacaagcggaaccgcgccacgcggguggagugcaccaccaucgucaacggggugcgccgguccuucuacgucuacgccaacggcggcaagggguucugcaagcuccacaacuggaacugcgugaacugcgacaccuucugcgccggcagcacguucaucuccgacgagguggcgcgcgaccugagccugcaguucaagcggccgaucaaccccaccgaccaguccagcuacaucgucgacuccgugaccgugaagaacgggagcauccaccucuacuucgacaaggccggccagaagaccuacgagcgccacucccugagccacuucgucaaccuggacaaccuccgggccaacaacacgaaggggucccugcccaucaacgugaucguguucgacggcaagagcaagugcgaggaguccagcgccaaguccgccagcgucuacuacucccagcugaugugccagcccauccuccugcuggaccaggcgcucgugagcgacgugggcgacagcgccgaggucgccgugaagauguucgacgccuacgugaacaccuucuccagcaccuucaacgucccgauggagaagcugaagacccugguggccacggcggaggccgagcucgccaagaacgugucccuggacaacguccugagcaccuucaucuccgccgcgcgccagggguucguggacagcgacguggagaucaaggacgucguggagugccucaagcugucccaccagagcgacaucgaggugaccggcgacuccugcaacaacuacaugcugaccuacaacaaggucgagaacaugacgccccgggaccucggggccugcaucgacugcagcgcccgccacaucaacgcccagguggccaagucccacaacaucgcgcugaucuggaacgugaaggacuucaugagccuguccgagcagcuccggaagcagauccgcagcgccgccaagaagaacaaccugcccuucaagcugaccugcgccaccacccgccaggucgugaacguggucacgaccaagaucgcccucaagggcgggugaggacuaguuauaagacugacuagcccgaugggccucccaacgggcccuccuccccuccuugcaccgagauuaauaaaaaaaaaaaaaaaaaaaaaaaaaaaaaaaaaaaaaaaaaaaaaaaaaaaaaaaaaaaaaaaaugcaucccccccccccccccccccccccccccccccaaaggcucuuuucagagccaccagaauu

SEQ ID NO: 21747 - RNA, 6058 nt, Artificial Sequence
  SARS-CoV-2__MT731656.1__non-structural protein 3 (NSP3) mRNA gc
aggagaaagcuuaccauggcccccaccaaggugaccuucggcgacgacacggucaucgaggugcagggguacaagagcgugaacaucaccuucgagcuggacgagcgcaucgacaagguccucaacgagaagugcuccgccuacaccguggagcugggcaccgaggugaacgaguucgcgugcgucguggccgacgccgugaucaagacgcugcagccggucagcgagcuccugaccccccuggggaucgaccucgacgagugguccauggccaccuacuaccuguucgacgagagcggcgaguucaagcuggccucccacauguacugcagcuucuacccccccgacgaggacgaggaggagggggacugcgaggaggaggaguucgagccguccacccaguacgaguacggcacggaggacgacuaccagggcaagccccucgaguucggggcgaccagcgccgcccugcagcccgaggaggagcaggaggaggacuggcuggacgacgacucccagcagaccgugggccagcaggacgggagcgaggacaaccagaccacgaccauccagaccaucguggagguccagccccagcucgagauggagcugaccccgguggugcagacgaucgaggucaacuccuucagcggcuaccugaagcucaccgacaacguguacaucaagaacgccgacaucguggaggaggcgaagaaggucaagcccaccgugguggucaacgccgccaacguguaccugaagcacgggggcggcguggccggggcccugaacaaggcgaccaacaacgccaugcaggucgaguccgacgacuacaucgccacgaacggcccccucaagguggggggcagcugcguccuguccggccacaaccuggccaagcacugccuccacgugguggggcccaacgucaacaagggcgaggacauccagcugcugaagagcgccuacgagaacuucaaccagcacgaggugcuccuggcgccgcugcucuccgccgggaucuucggcgccgaccccauccacagccugcgggugugcgucgacaccgugcgcaccaacguguaccuggccgucuucgacaagaaccucuacgacaagcugguguccagcuucauggagaugaagagcgagaagcagguggagcagaagaucgccgagauccccaaggaggaggucaagcccuucaucaccgaguccaagccgagcguggagcagcggaagcaggacgacaagaagaucaaggcgugcguggaggaggucacgaccacccuggaggagaccaaguuccucacggagaaccugcugcucuacaucgacaucaacgggaaccugcaccccgacuccgccacccuggugagcgacaucgacaucaccuuccucaagaaggacgcccccuacaucgugggcgacgucgugcaggagggcgugcugaccgccgucgugauccccacgaagaaggccgggggcaccaccgagaugcuggcgaaggcccuccgcaaggugccgaccgacaacuacaucacgaccuaccccgggcagggccugaacggguacaccgucgaggaggccaagaccgugcugaagaagugcaaguccgccuucuacauccuccccagcaucaucuccaacgagaagcaggagauccugggcaccgugagcuggaaccugcgggagaugcucgcgcacgccgaggagacgcgcaagcugaugcccgucugcguggagaccaaggccaucguguccaccauccagcggaaguacaagggcaucaagauccaggacggggucguggacuacggcgcccgcuucuacuucuacaccagcaagacgaccguggccucccugaucaacacccugaacgaccucaacgagacccuggucacgaugccgcugggguacgugacccacggccucaaccuggaggaggcggcccgguacaugcgcagccugaaggugcccgccaccgucuccgugagcucccccgacgccgugaccgccuacaacggguaccucacgagcuccagcaagacccccgaggagcacuucaucgagaccaucucccuggcgggcagcuacaaggacuggagcuacuccggccagagcacccagcuggggaucgaguuccucaagcggggcgacaaguccgucuacuacacgagcaacccgaccaccuuccaccuggacggggaggugaucaccuucgacaaccugaagacgcuccugucccugcgcgaggugcggaccaucaaggucuucaccaccguggacaacaucaaccuccacacgcagguggucgacaugagcaugaccuacggccagcaguucggccccaccuaccuggacggggccgacgugaccaagaucaagccccacaacucccacgagggcaagacguucuacgugcugccgaacgacgacacccuccgcgucgaggccuucgaguacuaccacaccaccgaccccagcuuccuggggcgguacauguccgcccugaaccacacgaagaaguggaaguacccccaggugaacggccucaccagcaucaagugggccgacaacaacugcuaccuggcgaccgcccugcucacccugcagcagaucgagcugaaguucaaccccccggcccuccaggacgccuacuaccgcgcgcgggccggggaggccgccaacuucugcgcccugauccuggcguacugcaacaagacggugggcgagcucggcgacguccgcgagaccauguccuaccuguuccagcacgccaaccuggacagcugcaagcgggugcucaacgucgugugcaagaccugcgggcagcagcagaccacccugaagggcguggaggccgucauguacauggggacgcuguccuacgagcaguucaagaagggcgugcagauccccugcaccugcgggaagcaggccaccaaguaccucgugcagcaggagagccccuucgucaugauguccgcccccccggcgcaguacgagcugaagcacggcaccuucacgugcgccagcgaguacaccggcaacuaccagugcgggcacuacaagcacaucaccuccaaggagacccuguacugcaucgacggcgcccuccugacgaagagcagcgaguacaaggggcccaucaccgacguguucuacaaggagaacuccuacaccaccacgaucaagcccgugaccuacaagcuggacggcgucgugugcaccgagaucgaccccaagcucgacaacuacuacaagaaggacaacagcuacuucaccgagcagccgaucgaccuggugcccaaccagcccuaccccaacgccuccuucgacaacuucaaguucgucugcgacaacaucaaguucgccgacgaccugaaccagcucacgggguacaagaagccggcgagccgcgagcugaaggugaccuucuuccccgaccugaacggcgacguggucgccaucgacuacaagcacuacacccccuccuucaagaagggcgccaagcuccugcacaagcccaucguguggcacgugaacaacgccaccaacaaggcgacguacaagccgaacaccuggugcauccggugccuguggagcaccaagcccgucgagaccuccaacagcuucgacgugcucaaguccgaggacgcccaggggauggacaaccuggccugcgaggaccugaagcccgugagcgaggaggucguggagaaccccacgauccagaaggacgugcucgagugcaacgucaagaccaccgagguggugggcgacaucauccugaagccggccaacaacucccugaagaucaccgaggaggucgggcacacggaccucauggccgcguacguggacaacagcucccugaccaucaagaagcccaacgagcugagccgcgugcucggccugaagacccuggccacccacgggcucgccgccgucaacuccgugcccugggacacgaucgccaacuacgcgaagccguuccugaacaagguggucagcaccaccaccaacaucgugacgcgcugccugaaccgggugugcaccaacuacaugcccuacuucuucacccuccugcugcagcucugcaccuucacccgcuccacgaacagccggaucaaggccuccaugcccaccaccaucgccaagaacaccgucaagagcgugggcaaguucugccuggaggccagcuucaacuaccugaagucccccaacuucagcaagcucaucaacaucaucaucugguuccugcugcucuccgugugccugggcagccugaucuacuccacggccgcgcucgggguccugaugagcaaccugggcaugccguccuacugcaccggguaccgcgagggcuaccucaacagcaccaacgugaccaucgccacguacugcaccggcuccauccccugcagcgugugccuguccgggcuggacagccucgacaccuaccccucccuggagaccauccagaucacgaucagcuccuucaagugggaccugaccgccuucggccucgucgccgagugguuccuggccuacauccuguucacccgguucuucuacgugcucgggcuggcggccaucaugcagcuguucuucagcuacuucgccgugcacuucaucuccaacagcuggcucauguggcugaucaucaaccugguccagauggcccccaucuccgcgauggugcgcauguacaucuucuucgccagcuucuacuacguguggaagagcuacguccacgugguggacggcugcaacuccagcaccugcaugaugugcuacaagcggaaccgcgccacgcgggucgagugcaccaccaucgugaacgggguccgccgguccuucuacguguacgccaacggcggcaagggguucugcaagcugcacaacuggaacugcgugaacugcgacaccuucugcgccggcagcacguucaucuccgacgaggucgcgcgcgaccucagccugcaguucaagcggccgaucaaccccaccgaccaguccagcuacaucguggacuccgugaccgucaagaacgggagcauccaccuguacuucgacaaggccggccagaagaccuacgagcgccacucccucagccacuucgugaaccuggacaaccugcgggccaacaacacgaaggggucccuccccaucaacgugaucgucuucgacggcaagagcaagugcgaggaguccagcgccaaguccgccagcguguacuacucccagcugaugugccagcccauccugcuccuggaccaggcgcuggugagcgacgucggcgacagcgccgagguggccgugaagauguucgacgccuacgucaacaccuucuccagcaccuucaacgugccgauggagaagcucaagacccugguggccacggcggaggccgagcuggccaagaacgucucccucgacaacgugcugagcaccuucaucuccgccgcgcgccagggguucguggacagcgacgucgagaccaaggacgugguggagugccugaagcucucccaccagagcgacaucgaggucaccggcgacuccugcaacaacuacaugcugacguacaacaagguggagaacaugaccccccgggaccugggggccugcaucgacugcagcgcccgccacaucaacgcccagguggccaagucccacaacaucgcgcucaucuggaacgucaaggacuucaugagccuguccgagcagcugcggaagcagauccgcagcgccgccaagaagaacaaccuccccuucaagcugaccugcgccaccacgcgccagguggugaacgucgugaccaccaagaucgcccugaagggcgggugaggacuaguuauaagacugacuagcccgaugggccucccaacgggcccuccuccccuccuugcaccgagauuaauaaaaaaaaaaaaaaaaaaaaaaaaaaaaaaaaaaaaaaaaaaaaaaaaaaaaaaaaaaaaaaaaugcaucccccccccccccccccccccccccccccccaaaggcucuuuucagagccaccagaauu

SEQ ID NO: 21748 - RNA, 6058 nt, Artificial Sequence
  SARS-CoV-2__MT731938.1__non-structural protein 3 (NSP3) mRNA gc
aggagaaagcuuaccauggcccccaccaaggugaccuucggcgacgacacggucaucgaggugcagggguacaagagcgugaacaucaccuucgagcuggacgagcgcaucgacaagguccucaacgagaagugcuccgccuacaccguggagcugggcaccgaggugaacgaguucgcgugcgucguggccgacgccgugaucaagacgcugcagccggucagcgagcuccugaccccccuggggaucgaccucgacgagugguccauggccaccuacuaccuguucgacgagagcggcgaguucaagcuggccucccacauguacugcagcuucuacccccccgacgaggacgaggaggagggggacugcgaggaggaggaguucgagccguccacccaguacgaguacggcacggaggacgacuaccagggcaagccccucgaguucggggcgaccagcgccgcccugcagcccgaggaggagcaggaggaggacuggcuggacgacgacucccagcagaccgugggccagcaggacgggagcgaggacaaccagaccacgaccauccagaccaucguggagguccagccccagcucgagauggagcugaccccgguggugcagacgaucgaggucaacuccuucagcggcuaccugaagcucaccgacaacguguacaucaagaacgccgacaucguggaggaggcgaagaaggucaagcccaccgugguggucaacgccgccaacguguaccugaagcacgggggcggcguggccggggcccugaacaaggcgaccaacaacgccaugcaggucgaguccgacgacuacaucgccacgaacggcccccucaagguggggggcagcugcguccuguccggccacaaccuggccaagcacugccuccacgugguggggcccaacgucaacaagggcgaggacauccagcugcugaagagcgccuacgagaacuucaaccagcacgaggugcuccuggcgccgcugcucuccgccgggaucuucggcgccgaccccauccacagccugcgggugugcgucgacaccgugcgcaccaacguguaccuggccgucuucgacaagaaccucuacgacaagcugguguccagcuuccuggagaugaagagcgagaagcagguggagcagaagaucgccgacaucaccgaguccaagcccagcgucgagcagcggaagcaggacgacaagaagaucaaggcgugcguggaggaggugacgaccacccucgaggagaccaaguuccugacggagaaccugcuccuguacaucgacaucaacgggaaccugcaccccgacuccgccacccucgucagcgacaucgacaucaccuuccugaagaaggacgccccguacaucgugggcgacgugguccaggagggcgugcugaccgccguggucauccccacgaagaaggccgggggcaccaccgagaugcucgcgaaggcccugcgcaaggugcccaccgacaacuacaucacgaccuaccccgggcagggccugaacggguacaccguggaggaggccaagaccguccucaagaagugcaaguccgccuucuacauccugccgagcaucaucuccaacgagaagcaggagauccugggcaccgugagcuggaaccuccgggagaugcuggcgcacgccgaggagacgcgcaagcugaugcccgugugcgucgagaccaaggccaucguguccaccauccagcggaaguacaagggcaucaagauccaggaggggguggucgacuacggcgcccgcuucuacuucuacaccagcaagacgaccguggccucccugaucaacacccucaacgaccugaacgagacccuggugacgaugccccucggguacgucacccacggccugaaccuggaggaggcggcccgguacaugcgcagccucaaggugcccgccaccguguccgucagcuccccggacgccgugaccgccuacaacggguaccugacgagcuccagcaagacccccgaggagcacuucaucgagaccaucucccuggcgggcagcuacaaggacuggagcuacuccggccagagcacccagcucgggaucgaguuccugaagcggggcgacaaguccguguacuacacgagcaaccccaccaccuuccaccuggacggggaggucaucaccuucgacaaccucaagacgcugcugucccuccgcgaggugcggaccaucaagguguucaccaccgucgacaacaucaaccugcacacgcaggugguggacaugagcaugaccuacggccagcaguucggccccaccuaccuggacggggccgacgucaccaagaucaagccgcacaacucccacgagggcaagacguucuacgugcuccccaacgacgacacccugcgcguggaggccuucgaguacuaccacaccaccgaccccagcuuccuggggcgguacauguccgcccucaaccacacgaagaaguggaaguacccgcaggucaacggccugaccagcaucaagugggccgacaacaacugcuaccuggcgaccgcccuccugacccugcagcagaucgagcucaaguucaacccccccgcccugcaggacgccuacuaccgcgcgcgggccggggaggccgccaacuucugcgcccugauccucgcguacugcaacaagacggugggcgagcugggcgacgugcgcgagaccauguccuaccuguuccagcacgccaaccucgacagcugcaagcggguccugaacguggucugcaagaccugcgggcagcagcagaccacccugaagggcguggaggccgugauguacauggggacgcucuccuacgagcaguucaagaagggcguccagauccccugcaccugcgggaagcaggccaccaaguaccuggugcagcaggagagcccguucgugaugauguccgccccccccgcgcaguacgagcugaagcacggcaccuucacgugcgccagcgaguacaccggcaacuaccagugcgggcacuacaagcacaucaccuccaaggagacccucuacugcaucgacggcgcccugcugacgaagagcagcgaguacaaggggcccaucaccgacgucuucuacaaggagaacuccuacaccaccacgaucaagccggugaccuacaagcucgacggcguggucugcaccgagaucgaccccaagcuggacaacuacuacaagaaggacaacagcuacuucaccgagcagcccaucgaccuggugcccaaccagccguaccccaacgccuccuucgacaacuucaaguucgugugcgacaacaucaaguucgccgacgaccucaaccagcugacgggguacaagaagcccgcgagccgcgagcugaaggucaccuucuuccccgaccucaacggcgacgugguggccaucgacuacaagcacuacaccccguccuucaagaagggcgccaagcugcugcacaagcccaucgucuggcacgugaacaacgccaccaacaaggcgacguacaagcccaacaccuggugcauccggugccucuggagcaccaagcccguggagaccuccaacagcuucgacguccugaaguccgaggacgcccaggggauggacaaccuggccugcgaggaccucaagccggugagcgaggagguggucgagaaccccacgauccagaaggacgugcuggagugcaacgugaagaccaccgaggucgugggcgacaucauccugaagcccgccaacaacucccucaagaucaccgaggagguggggcacacggaccugauggccgcguacgucgacaacagcucccugaccaucaagaagcccaacgagcucagccgcgugcugggccugaagacccucgccacccacgggcuggccgccgugaacuccgucccgugggacacgaucgccaacuacgcgaagcccuuccugaacaagguggugagcaccaccaccaacaucgucacgcgcugccucaaccgggugugcaccaacuacaugcccuacuucuucacccugcugcuccagcugugcaccuucacccgcuccacgaacagccggaucaaggccuccaugccgaccaccaucgccaagaacaccgugaagagcgucggcaaguucugccuggaggccagcuucaacuaccucaagucccccaacuucagcaagcugaucaacaucaucaucugguuccugcuccuguccgugugccugggcagccucaucuacuccacggccgcgcugggggugcugaugagcaaccucggcaugcccuccuacugcaccggguaccgcgagggcuaccugaacagcaccaacgucaccaucgccacguacugcaccggcuccauccccugcagcgugugccuguccgggcucgacagccuggacaccuacccgucccuggagaccauccagaucacgaucagcuccuucaagugggaccucaccgccuucggccugguggccgagugguuccuggccuacauccucuucacccgguucuucuacguccuggggcuggcggccaucaugcagcucuucuucagcuacuucgccgugcacuucaucuccaacagcuggcugauguggcugaucaucaaccuggugcagauggcccccaucuccgcgaugguccgcauguacaucuucuucgccagcuucuacuacguguggaagagcuacgugcacgucguggacggcugcaacuccagcaccugcaugaugugcuacaagcggaaccgcgccacgcggguggagugcaccaccaucgucaacggggugcgccgguccuucuacgucuacgccaacggcggcaagggguucugcaagcuccacaacuggaacugcgugaacugcgacaccuucugcgccggcagcacguucaucuccgacgagguggcgcgcgaccugagccugcaguucaagcggcccaucaaccccaccgaccaguccagcuacaucgucgacuccgugaccgugaagaacgggagcauccaccucuacuucgacaaggccggccagaagaccuacgagcgccacucccugagccacuucgucaaccuggacaaccuccgggccaacaacacgaaggggucccugccgaucaacgugaucguguucgacggcaagagcaagugcgaggaguccagcgccaaguccgccagcgucuacuacucccagcugaugugccagcccauccuccugcuggaccaggcgcucgugagcgacgugggcgacagcgccgaggucgccgugaagauguucgacgccuacgugaacaccuucuccagcaccuucaacguccccauggagaagcugaagacccugguggccacggcggaggccgagcucgccaagaacgugucccuggacaacguccugagcaccuucaucuccgccgcgcgccagggguucguggacagcgacguggagaccaaggacgucguggagugccucaagcugucccaccagagcgacaucgaggugaccggcgacuccugcaacaacuacaugcugacguacaacaaggucgagaacaugaccccccgggaccucggggccugcaucgacugcagcgcccgccacaucaacgcccagguggccaagucccacaacaucgcgcugaucuggaacgugaaggacuucaugagccuguccgagcagcuccggaagcagauccgcagcgccgccaagaagaacaaccugccguucaagcugaccugcgccaccacgcgccaggucgugaacguggucaccaccaagaucgcccucaagggcgggaagaucgugaacaacuggcugaagcagugaggacuaguuauaagacugacuagcccgaugggccucccaacgggcccuccuccccuccuugcaccgagauuaauaaaaaaaaaaaaaaaaaaaaaaaaaaaaaaaaaaaaaaaaaaaaaaaaaaaaaaaaaaaaaaaaugcaucccccccccccccccccccccccccccccccaaaggcucuuuucagagccaccagaauu

SEQ ID NO: 21749 - RNA, 6058 nt, Artificial Sequence
  SARS-CoV-2__MT712861.1__non-structural protein 3 (NSP3) mRNA gc
aggagaaagcuuaccauggcccccaccaaggugaccuucggcgacgacacggucaucgaggugcagggguacaagagcgugaacaucaccuucgagcuggacgagcgcaucgacaagguccucaacgagaagugcuccgccuacaccguggagcugggcaccgaggugaacgaguucgcgugcgucguggccgacgccgugaucaagacgcugcagccggucagcgagcuccugaccccccuggggaucgaccucgacgagugguccauggccaccuacuaccuguucgacgagagcggcgaguucaagcuggccucccacauguacugcagcuucuacccccccgacgaggacgaggaggagggggacugcgaggaggaggaguucgagccguccacccaguacgaguacggcacggaggacgacuaccagggcaagccccucgaguucggggcgaccagcgccgcccugcagcccgaggaggagcaggaggaggacuggcuggacgacgacucccagcagaccgugggccagcaggacgggagcgaggacaaccagaccacgaccauccagaccaucguggagguccagccccagcucgagauggagcugaccccgguggugcagacgaucgaggucaacuccuucagcggcuaccugaagcucaccgacaacguguacaucaagaacgccgacaucguggaggaggcgaagaaggucaagcccaccgugguggucaacgccgccaacguguaccugaagcacgggggcggcguggccggggcccugaacaaggcgaccaacaacgccaugcaggucgaguccgacgacuacaucgccacgaacggcccccucaagguggggggcagcugcguccuguccggccacaaccuggccaagcacugccuccacgugguggggcccaacgucaacaagggcgaggacauccagcugcugaagagcgccuacgagaacuucaaccagcacgaggugcuccuggcgccgcugcucuccgccgggaucuucggcgccgaccccauccacagccugcgggugugcgucgacaccgugcgcaccaacguguaccuggccgucuucgacaagaaccucuacgacaagcugguguccagcuuccuggagaugaagagcgagaagcagguggagcagaagaucgccgagauccccaaggaggaggucaagcccuucaucaccgaguccaagccgagcguggagcagcggaagcaggacgacaagaagaucaaggcgugcguggaggaggucacgaccacccucgaggagaccaaguuccugacggagaaccugcuccuguacaucgacaucaacgggaaccugcaccccgacuccgccacccucgugagcgacaucgacaucaccuuccugaagaaggacgcccccuacaucgugggcgacgucgugcaggagggcgugcugaccgccgucgugauccccacgaagaaggccgggggcaccaccgagaugcucgcgaaggcccugcgcaaggugccgaccgacaacuacaucacgaccuaccccgggcagggccugaacggguacaccgucgaggaggccaagaccgugcucaagaagugcaaguccgccuucuacauccugcccagcaucaucuccaacgagaagcaggagauccugggcaccgugagcuggaaccuccgggagaugcuggcgcacgccgaggagacgcgcaagcugaugcccgucugcguggagaccaaggccaucguguccaccauccagcggaaguacaagggcaucaagauccaggagggggucguggacuacggcgcccgcuucuacuucuacaccagcaagacgaccguggccucccugaucaacacccucaacgaccugaacgagacccuggucacgaugccgcucggguacgugacccacggccugaaccuggaggaggcggcccgguacaugcgcagccucaaggugcccgccaccgucuccgugagcucccccgacgccgugaccgccuacaacggguaccugacgagcuccagcaagacccccgaggagcacuucaucgagaccaucucccuggcgggcagcuacaaggacuggagcuacuccggccagagcacccagcucgggaucgaguuccugaagcggggcgacaaguccgucuacuacacgagcaacccgaccaccuuccaccuggacggggaggugaucaccuucgacaaccucaagacgcugcugucccuccgcgaggugcggaccaucaaggucuucaccaccguggacaacaucaaccugcacacgcagguggucgacaugagcaugaccuacggccagcaguucggccccaccuaccuggacggggccgacgugaccaagaucaagccccacaacucccacgagggcaagacguucuacgugcucccgaacgacgacacccugcgcgucgaggccuucgaguacuaccacaccaccgaccccagcuuccuggggcgguacauguccgcccucaaccacacgaagaaguggaaguacccccaggugaacggccugaccagcaucaagugggccgacaacaacugcuaccuggcgaccgcccuccugacccugcagcagaucgagcucaaguucaaccccccggcccugcaggacgccuacuaccgcgcgcgggccggggaggccgccaacuucugcgcccugauccucgcguacugcaacaagacggugggcgagcugggcgacguccgcgagaccauguccuaccuguuccagcacgccaaccucgacagcugcaagcgggugcugaacgucgugugcaagaccugcgggcagcagcagaccacccugaagggcguggaggccgucauguacauggggacgcucuccuacgagcaguucaagaagggcgugcagauccccugcaccugcgggaagcaggccaccaaguaccuggugcagcaggagagccccuucgucaugauguccgcccccccggcgcaguacgagcugaagcacggcaccuucacgugcgccagcgaguacaccggcaacuaccagugcgggcacuacaagcacaucaccuccaaggagacccucuacugcaucgacggcgcccugcugacgaagagcagcgaguacaaggggcccaucaccgacguguucuacaaggagaacuccuacaccaccacgaucaagcccgugaccuacaagcucgacggcgucgugugcaccgagaucgaccccaagcuggacaacuacuacaagaaggacaacagcuacuucaccgagcagccgaucgaccuggugcccaaccagcccuaccccaacgccuccuucgacaacuucaaguucgucugcgacaacaucaaguucgccgacgaccucaaccagcugacgggguacaagaagccggcgagccgcgagcugaaggugaccuucuuccccgaccucaacggcgacguggucgccaucgacuacaagcacuacacccccuccuucaagaagggcgccaagcugcugcacaagcccaucguguggcacgugaacaacgccaccaacaaggcgacguacaagccgaacaccuggugcauccggugccucuggagcaccaagcccgucgagaccuccaacagcuucgacgugcugaaguccgaggacgcccaggggauggacaaccuggccugcgaggaccucaagcccgugagcgaggaggucguggagaaccccacgauccagaaggacuuccuggagugcaacgugaagaccaccgaggucgugggcgacaucauccugaagccggccaacaacucccucaagaucaccgaggagguggggcacacggaccugauggccgcguacgucgacaacagcucccugaccaucaagaagcccaacgagcucagccgcgugcugggccugaagacccucgccacccacgggcuggccgccgugaacuccguccccugggacacgaucgccaacuacgcgaagccguuccugaacaagguggugagcaccaccaccaacaucgucacgcgcugccucaaccgggugugcaccaacuacaugcccuacuucuucacccugcugcuccagcugugcaccuucacccgcuccacgaacagccggaucaaggccuccaugcccaccaccaucgccaagaacaccgugaagagcgucggcaaguucugccuggaggccagcuucaacuaccucaagucccccaacuucagcaagcugaucaacaucaucaucugguuccugcuccuguccgugugccugggcagccucaucuacuccacggccgcgcugggggugcugaugagcaaccucggcaugccguccuacugcaccggguaccgcgagggcuaccugaacagcaccaacgucaccaucgccacguacugcaccggcuccauccccugcagcgugugccuguccgggcucgacagccuggacaccuaccccucccuggagaccauccagaucacgaucagcuccuucaagugggaccucaccgccuucggccugguggccgagugguuccuggccuacauccucuucacccgguucuucuacguccuggggcuggcggccaucaugcagcucuucuucagcuacuucgccgugcacuucaucuccaacagcuggcugauguggcugaucaucaaccuggugcagauggcccccaucuccgcgaugguccgcauguacaucuucuucgccagcuucuacuacguguggaagagcuacgugcacgucguggacggcugcaacuccagcaccugcaugaugugcuacaagcggaaccgcgccacgcggguggagugcaccaccaucgucaacggggugcgccgguccuucuacgucuacgccaacggcggcaagggguucugcaagcuccacaacuggaacugcgugaacugcgacaccuucugcgccggcagcacguucaucuccgacgagguggcgcgcgaccugagccugcaguucaagcggccgaucaaccccaccgaccaguccagcuacaucgucgacuccgugaccgugaagaacgggagcauccaccucuacuucgacaaggccggccagaagaccuacgagcgccacucccugagccacuucgucaaccuggacaaccuccgggccaacaacacgaaggggucccugcccaucaacgugaucguguucgacggcaagagcaagugcgaggaguccagcgccaaguccgccagcgucuacuacucccagcugaugugccagcccauccuccugcuggaccaggcgcucgugagcgacgugggcgacagcgccgaggucgccgugaagauguucgacgccuacgugaacaccuucuccagcaccuucaacgucuccauggagaagcugaagacccugguggccacggcggaggccgagcucgccaagaacgugagccuggacaacguccuguccaccuucaucagcgccgcgcgccagggguucguggacuccgacguggagaccaaggacgucguggagugccucaagcugagccaccaguccgacaucgaggugaccggcgacagcugcaacaacuacaugcugacguacaacaaggucgagaacaugaccccgcgggaccucggggccugcaucgacugcuccgcccgccacaucaacgcccagguggccaagagccacaacaucgcgcugaucuggaacgugaaggacuucaugucccugagcgagcagcuccggaagcagauccgcuccgccgccaagaagaacaaccugcccuucaagcugaccugcgccaccacgcgccaggucgugaacguggucaccaccaagaucgcccucaagggcgggugaggacuaguuauaagacugacuagcccgaugggccucccaacgggcccuccuccccuccuugcaccgagauuaauaaaaaaaaaaaaaaaaaaaaaaaaaaaaaaaaaaaaaaaaaaaaaaaaaaaaaaaaaaaaaaaaugcaucccccccccccccccccccccccccccccccaaaggcucuuuucagagccaccagaauu

SEQ ID NO: 21750 - RNA, 6058 nt, Artificial Sequence
  SARS-CoV-2__MT706162.1__non-structural protein 3 (NSP3) mRNA gc
aggagaaagcuuaccauggcccccaccaaggugaccuucggcgacgacacggucaucgaggugcagggguacaagagcgugaacaucaccuucgagcuggacgagcgcaucgacaagguccucaacgagaagugcuccgccuacaccguggagcugggcaccgaggugaacgaguucgcgugcgucguggccgacgccgugaucaagacgcugcagccggucagcgagcuccugaccccccuggggaucgaccucgacgagugguccauggccaccuacuaccuguucgacgagagcggcgaguucaagcuggccucccacauguacugcagcuucuacccccccgacgaggacgaggaggagggggacugcgaggaggaggaguucgagccguccacccaguacgaguacggcacggaggacgacuaccagggcaagccccucgaguucggggcgaccagcgccgcccugcagcccgaggaggagcaggaggaggacuggcuggacgacgacucccagcagaccgugggccagcaggacgggagcgaggacaaccagaccacgaccauccagaccaucguggagguccagccccagcucgagauggagcugaccccgguggugcagacgaucgaggucaacuccuucagcggcuaccugaagcucaccgacaacguguacaucaagaacgccgacaucguggaggaggcgaagaaggucaagcccaccgugguggucaacgccgccaacguguaccugaagcacgggggcggcguggccggggcccugaacaaggcgaccaacaacgccaugcaggucgaguccgacgacuacaucgccacgaacggcccccucaagguggggggcagcugcguccuguccggccacaaccuggccaagcacugccuccacgugguggggcccaacgucaacaagggcgaggacauccagcugcugaagagcgccuacgagaacuucaaccagcacgaggugcuccuggcgccgcugcucuccgccgggaucuucggcgccgaccccauccacagccugcgggugugcgucgacaccgugcgcaccaacguguaccuggccgucuucgacaagaaccucuacgacaagcugguguccagcuuccuggagaugaagagcgagaagcagguggagcagaagaucgccgagauccccaaggaggaggucaagcccuucaucaccgaguccaagccgagcguggagcagcggaagcaggacgacaagaagaucaaggcgugcguggaggaggucacgaccacccucgaggagaccaaguuccugacggagaaccugcuccuguacaucgacaucaacgggaaccugcaccccgacuccgccacccucgugagcgacaucgacaucaccuuccugaagaaggacgcccccuacaucgugggcgacgucgugcaggagggcgugcugaccgccgucgugauccccacgaagaaggccgggggcaccaccgagaugcucgcgaaggcccugcgcaaggugccgaccgacaacuacaucacgaccuaccccgggcagggccugaacggguacaccgucgaggaggccaagaccgugcucaagaagugcaaguccgccuucuacauccugcccagcaucaucuccaacgagaagcaggagauccugggcaccgugagcuggaaccuccgggagaugcuggcgcacgccgaggagacgcgcaagcugaugcccgucugcguggagaccaaggccaucguguccaccauccagcggaaguacaagggcaucaagauccaggagggggucguggacuacggcgcccgcuucuacuucuacaccagcaagacgaccguggccucccugaucaacacccucaacgaccugaacgagacccuggucacgaugccgcucggguacgugacccacggccugaaccuggaggaggcggcccgguacaugcgcagccucaaggugcccgccaccgucuccgugagcucccccgacgccgugaccgccuacaacggguaccugacgagcuccagcaagacccccgaggagcacuucaucgagaccaucucccuggcgggcagcuacaaggacuggagcuacuccggccagagcacccagcucgggaucgaguuccugaagcggggcgacaaguccgucuacuacacgagcaacccgaccaccuuccaccuggacggggaggugaucaccuucgacaaccucaagacgcugcugucccuccgcgaggugcggaccaucaaggucuucaccaccguggacaacaucaaccugcacacgcagguggucgacaugagcaugaccuacggccagcaguucggccccaccuaccuggacggggccgacgugaccaagaucaagccccacaacucccacgagggcaagacguucuacgugcucccgaacgacgacacccugcgcgucgaggccuucgaguacuaccacaccaccgaccccagcuuccuggggcgguacauguccgcccucaaccacacgaagaaguggaaguacccccaggugaacggccugaccagcaucaagugggccgacaacaacugcuaccuggcgaccgcccuccugacccugcagcagaucgagcucaaguucaaccccccggcccugcaggacgccuacuaccgcgcgcgggccggggaggccgccaacuucugcgcccugauccucgcguacugcaacaagacggugggcgagcugggcgacguccgcgagaccauguccuaccuguuccagcacgccaaccucgacagcugcaagcgggugcugaacgucgugugcaagaccugcgggcagcagcagaccacccugaagggcguggaggccgucauguacauggggacgcucuccuacgagcaguucaagaagggcgugcagauccccugcaccugcgggaagcaggccaccaaguaccuggugcagcaggagagccccuucgucaugauguccgcccccccggcgcaguacgagcugaagcacggcaccuucacgugcgccagcgaguacaccggcaacuaccagugcgggcacuacaagcacaucaccuccaaggagacccucuacugcaucgacggcgcccugcugacgaagagcagcgaguacaaggggcccaucaccgacguguucuacaaggagaacuccuacaccaccacgaucaagcccgugaccuacaagcucgacggcgucgugugcaccgagaucgaccccaagcuggacaacuacuacaagaaggacaacagcuacuucaccgagcagccgaucgaccuggugcccaaccagcccuaccccaacgccuccuucgacaacuucaaguucgucugcgacaacaucaaguucgccgacgaccucaaccagcugacgggguacaagaagccggcgagccgcgagcugaaggugaccuucuuccccgaccucaacggcgacguggucgccaucgacuacaagcacuacacccccuccuucaagaagggcgccaagcugcugcacaagcccaucguguggcacgugaacaacgccaccaacaaggcgacguacaagccgaacaccuggugcauccggugccucuggagcaccaagcccgucgagaccuccaacagcuucgacgugcugaaguccgaggacgcccaggggauggacaaccuggccugcgaggaccucaagcccgugagcgaggaggucguggagaaccccacgauccagaaggacgugcuggagugcaacgucaagaccaccgagguggugggcgacaucauccugaagccggccaacaacucccucaagaucaccgaggaggucgggcacacggaccugauggccgcguacguggacaacagcucccugaccaucaagaagcccaacgagcucagccgcgugcugggccugaagacccucgccacccacgggcuggccgccgucaacuccgugcccugggacacgaucgccaacuacgcgaagccguuccugaacaagguggucagcaccaccaccaacaucgugacgcgcugccucaaccgggugugcaccaacuacaugcccuacuucuucacccugcugcuccagcugugcaccuucacccgcuccacgaacagccggaucaaggccuccaugcccaccaccaucgccaagaacaccgucaagagcgugugcaaguucugccuggaggccagcuucaacuaccucaagucccccaacuucagcaagcugaucaacaucaucaucugguuccugcuccuguccgugugccugggcagccucaucuacuccacggccgcgcugggcguccugaugagcaaccucgggaugccguccuacugcaccggcuaccgcgagggguaccugaacagcaccaacgugaccaucgccacguacugcaccggcuccauccccugcagcgugugccuguccggccucgacagccuggacaccuaccccucccuggagaccauccagaucacgaucagcuccuucaagugggaccucaccgccuucgggcuggucgccgagugguuccuggccuacauccucuucacccgguucuucuacgugcugggccuggcggccaucaugcagcucuucuucagcuacuucgccgugcacuucaucuccaacagcuggcugauguggcugaucaucaaccugguccagauggcccccaucuccgcgauggugcgcauguacaucuucuucgccagcuucuacuacguguggaagagcuacguccacgugguggacgggugcaacuccagcaccugcaugaugugcuacaagcggaaccgcgccacgcgggucgagugcaccaccaucgugaacggcguccgccgguccuucuacguguacgccaacgggggcaagggcuucugcaagcuccacaacuggaacugcgugaacugcgacaccuucugcgccgggagcacguucaucuccgacgaggucgcgcgcgaccugagccugcaguucaagcggccgaucaaccccaccgaccaguccagcuacaucguggacuccgugaccgucaagaacggcagcauccaccucuacuucgacaaggccgggcagaagaccuacgagcgccacucccugagccacuucgugaaccuggacaaccuccgggccaacaacacgaagggcucccugcccaucaacgugaucgucuucgacgggaagagcaagugcgaggaguccagcgccaaguccgccagcguguacuacucccagcugaugugccagcccauccuccugcuggaccaggcgcucgugagcgacgucggcgacagcgccgagguggccgugaagauguucgacgccuacgucaacaccuucuccagcaccuucaacgugccgauggagaagcugaagacccugguggccacggcggaggccgagcucgccaagaacgucucccuggacaacgugcugagcaccuucaucuccgccgcgcgccagggcuucguggacagcgacgucgagaccaaggacgugguggagugccucaagcugucccaccagagcgacaucgaggucaccggggacuccugcaacaacuacaugcugacguacaacaagguggagaacaugaccccccgggaccucggcgccugcaucgacugcagcgcccgccacaucaacgcccagguggccaagucccacaacaucgcgcugaucuggaacgucaaggacuucaugagccuguccgagcagcuccggaagcagauccgcagcgccgccaagaagaacaaccugcccuucaagcugaccugcgccaccacgcgccagguggugaacgucgugaccaccaagaucgcccucaaggggggcugaggacuaguuauaagacugacuagcccgaugggccucccaacgggcccuccuccccuccuugcaccgagauuaauaaaaaaaaaaaaaaaaaaaaaaaaaaaaaaaaaaaaaaaaaaaaaaaaaaaaaaaaaaaaaaaaugcaucccccccccccccccccccccccccccccccaaaggcucuuuucagagccaccagaauu

SEQ ID NO: 21751 - RNA, 6058 nt, Artificial Sequence
  SARS-CoV-2__MT706200.1__non-structural protein 3 (NSP3) mRNA gc
aggagaaagcuuaccauggcccccaccaaggugaccuucggcgacgacacggucaucgaggugcagggguacaagagcgugaacaucaccuucgagcuggacgagcgcaucgacaagguccucaacgagaagugcuccgccuacaccguggagcugggcaccgaggugaacgaguucgcgugcgucguggccgacgccgugaucaagacgcugcagccggucagcgagcuccugaccccccuggggaucgaccucgacgagugguccauggccaccuacuaccuguucgacgagagcggcgaguucaagcuggccucccacauguacugcagcuucuacccccccgacgaggacgaggaggagggggacugcgaggaggaggaguucgagccguccacccaguacgaguacggcacggaggacgacuaccagggcaagccccucgaguucggggcgaccagcgccgcccugcagcccgaggaggagcaggaggaggacuggcuggacgacgacucccagcagaccgugggccagcaggacgggagcgaggacaaccagaccacgaccauccagaccaucguggagguccagccccagcucgagauggagcugaccccgguggugcagacgaucgaggucaacuccuucagcggcuaccugaagcucaccgacaacguguacaucaagaacgccgacaucguggaggaggcgaagaaggucaagcccaucgugguggucaacgccgccaacguguaccugaagcacgggggcggcguggccggggcccugaacaaggcgaccaacaacgccaugcaggucgaguccgacgacuacaucgccaccaacggcccccucaagguggggggcagcugcguccuguccggccacaaccuggccaagcacugccuccacgugguggggcccaacgucaacaagggcgaggacauccagcugcugaagagcgccuacgagaacuucaaccagcacgaggugcuccuggcgccgcugcucuccgccgggaucuucggcgccgaccccauccacagccugcgggugugcgucgacacggugcgcaccaacguguaccuggccgucuucgacaagaaccucuacgacaagcugguguccagcuuccuggagaugaagagcgagaagcagguggagcagaagaucgccgagauccccaaggaggaggucaagcccuucaucaccgaguccaagccgagcguggagcagcggaagcaggacgacaagaagaucaaggcgugcguggaggaggucaccacgacccucgaggagaccaaguuccugaccgagaaccugcuccuguacaucgacaucaacgggaaccugcaccccgacuccgccacgcucgugagcgacaucgacaucaccuuccugaagaaggacgcccccuacaucgugggcgacgucgugcaggagggcgugcugaccgccgucgugauccccaccaagaaggccgggggcacgaccgagaugcucgcgaaggcccugcgcaaggugccgaccgacaacuacaucaccacguaccccgggcagggccugaacggguacaccgucgaggaggccaagaccgugcucaagaagugcaaguccgccuucuacauccugcccagcaucaucuccaacgagaagcaggagauccugggcaccgugagcuggaaccuccgggagaugcuggcgcacgccgaggagacccgcaagcugaugcccgucugcguggagacgaaggccaucguguccaccauccagcggaaguacaagggcaucaagauccaggagggggucguggacuacggcgcccgcuucuacuucuacaccagcaagaccacgguggccucccugaucaacacccucaacgaccugaacgagacccuggucaccaugccgcucggguacgugacgcacggccugaaccuggaggaggcggcccgguacaugcgcagccucaaggugcccgccaccgucuccgugagcucccccgacgccgugaccgccuacaacggguaccugaccagcuccagcaagacgcccgaggagcacuucaucgagaccaucucccuggcgggcagcuacaaggacuggagcuacuccggccagagcacccagcucgggaucgaguuccugaagcggggcgacaaguccgucuacuacaccagcaacccgacgaccuuccaccuggacggggaggugaucaccuucgacaaccucaagacccugcugucccuccgcgaggugcggacgaucaaggucuucaccaccguggacaacaucaaccugcacacccagguggucgacaugagcaugacguacggccagcaguucggccccaccuaccuggacggggccgacgugaccaagaucaagccccacaacucccacgagggcaagaccuucuacgugcucccgaacgacgacacgcugcgcgucgaggccuucgaguacuaccacaccaccgaccccagcuuccuggggcgguacauguccgcccucaaccacaccaagaaguggaaguacccccaggugaacggccugacgagcaucaagugggccgacaacaacugcuaccuggcgaccgcccuccugacccugcagcagaucgagcucaaguucaaccccccggcccugcaggacgccuacuaccgcgcgcgggccggggaggccgccaacuucugcgcccugauccucgcguacugcaacaagaccgugggcgagcugggcgacguccgcgagacgauguccuaccuguuccagcacgccaaccucgacagcugcaagcgggugcugaacgucgugugcaagaccugcgggcagcagcagaccacccugaagggcguggaggccgucauguacauggggacccucuccuacgagcaguucaagaagggcgugcagauccccugcacgugcgggaagcaggccaccaaguaccuggugcagcaggagagccccuucgucaugauguccgcccccccggcgcaguacgagcugaagcacggcaccuucaccugcgccagcgaguacacgggcaacuaccagugcgggcacuacaagcacaucaccuccaaggagacccucuacugcaucgacggcgcccugcugaccaagagcagcgaguacaaggggcccaucacggacguguucuacaaggagaacuccuacaccaccaccaucaagcccgugacguacaagcucgacggcgucgugugcaccgagaucgaccccaagcuggacaacuacuacaagaaggacaacagcuacuucaccgagcagccgaucgaccuggugcccaaccagcccuaccccaacgccuccuucgacaacuucaaguucgucugcgacaacaucaaguucgccgacgaccucaaccagcugaccggguacaagaagccggcgagccgcgagcugaaggugacguucuuccccgaccucaacggcgacguggucgccaucgacuacaagcacuacacccccuccuucaagaagggcgccaagcugcugcacaagcccaucguguggcacgugaacaacgccaccaacaaggcgaccuacaagccgaacacguggugcauccggugccucuggagcaccaagcccgucgagaccuccaacagcuucgacgugcugaaguccgaggacgcccaggggauggacaaccuggccugcgaggaccucaagcccgugagcgaggaggucguggagaaccccaccauccagaaggacgugcuggagugcaacgucaagacgaccgagguggugggcgacaucauccugaagccggccaacaacucccucaagaucaccgaggaggucgggcacaccgaccugauggccgcguacguggacaacagcucccugacgaucaagaagcccaacgagcucagccgcgugcugggccugaagacccucgccacccacgggcuggccgccgucaacuccgugcccugggacaccaucgccaacuacgcgaagccguuccugaacaagguggucagcacgaccaccaacaucgugacccgcugccucaaccgggugugcacgaacuacaugcccuacuucuucacccugcugcuccagcugugcaccuucacccgcuccaccaacagccggaucaaggccuccaugcccacgaccaucgccaagaacaccgucaagagcgugggcaaguucugccuggaggccagcuucaacuaccucaagucccccaacuucagcaagcugaucaacaucaucaucugguuccugcuccuguccgugugccugggcagccucaucuacuccaccgccgcgcuggggguccugaugagcaaccucggcaugccguccuacugcacgggguaccgcgagggcuaccugaacagcaccaacgugaccaucgccaccuacugcacgggcuccauccccugcagcgugugccuguccgggcucgacagccuggacaccuaccccucccuggagaccauccagaucaccaucagcuccuucaagugggaccucacggccuucggccuggucgccgagugguuccuggccuacauccucuucacccgguucuucuacgugcuggggcuggcggccaucaugcagcucuucuucagcuacuucgccgugcacuucaucuccaacagcuggcugauguggcugaucaucaaccugguccagauggcccccaucuccgcgauggugcgcauguacaucuucuucgccagcuucuacuacguguggaagagcuacguccacgugguggacggcugcaacuccagcaccugcaugaugugcuacaagcggaaccgcgccacccgggucgagugcacgaccaucgugaacgggguccgccgguccuucuacguguacgccaacggcggcaagggguucugcaagcuccacaacuggaacugcgugaacugcgacaccuucugcgccggcagcaccuucaucuccgacgaggucgcgcgcgaccugagccugcaguucaagcggccgaucaaccccacggaccaguccagcuacaucguggacuccgugaccgucaagaacgggagcauccaccucuacuucgacaaggccggccagaagaccuacgagcgccacucccugagccacuucgugaaccuggacaaccuccgggccaacaacaccaaggggucccugcccaucaacgugaucgucuucgacggcaagagcaagugcgaggaguccagcgccaaguccgccagcguguacuacucccagcugaugugccagcccauccuccugcuggaccaggcgcucgugagcgacgucggcgacagcgccgagguggccgugaagauguucgacgccuacgucaacacguucuccagcaccuucaacgugccgauggagaagcugaagacccugguggccaccgcggaggccgagcucgccaagaacgucucccuggacaacgugcugagcacguucaucuccgccgcgcgccagggguucguggacagcgacgucgagaccaaggacgugguggagugccucaagcugucccaccagagcgacaucgaggucaccggcgacuccugcaacaacuacaugcugaccuacaacaagguggagaacaugacgccccgggaccucggggccugcaucgacugcagcgcccgccacaucaacgcccagguggccaagucccacaacaucgcgcugaucuggaacgucaaggacuucaugagccuguccgagcagcuccggaagcagauccgcagcgccgccaagaagaacaaccugcccuucaagcugaccugcgccaccacccgccagguggugaacgucgugacgaccaagaucgcccucaagggcgggugaggacuaguuauaagacugacuagcccgaugggccucccaacgggcccuccuccccuccuugcaccgagauuaauaaaaaaaaaaaaaaaaaaaaaaaaaaaaaaaaaaaaaaaaaaaaaaaaaaaaaaaaaaaaaaaaugcaucccccccccccccccccccccccccccccccaaaggcucuuuucagagccaccagaauu

SEQ ID NO: 21752 - RNA, 6058 nt, Artificial Sequence
  SARS-CoV-2__MT706216.1__non-structural protein 3 (NSP3) mRNA gc
aggagaaagcuuaccauggcccccaccaaggugaccuucggcgacgacacggucaucgaggugcagggguacaagagcgugaacaucaccuucgagcuggacgagcgcaucgacaagguccucaacgagaagugcuccgccuacaccguggagcugggcaccgaggugaacgaguucgcgugcgucguggccgacgccgugaucaagacgcugcagccggucagcgagcuccugaccccccuggggaucgaccucgacgagugguccauggccaccuacuaccuguucgacgagagcggcgaguucaagcuggccucccacauguacugcagcuucuacccccccgacgaggacgaggaggagggggacugcgaggaggaggaguucgagccguccacccaguacgaguacggcacggaggacgacuaccagggcaagccccucgaguucggggcgaccagcgccgcccugcagcccgaggaggagcaggaggaggacuggcuggacgacgacucccagcagaccgugggccagcaggacgggagcgaggacaaccagaccacgaccauccagaccaucguggagguccagccccagcucgagauggagcugaccccgguggugcagacgaucgaggucaacuccuucagcggcuaccugaagcucaccgacaacguguacaucaagaacgccgacaucguggaggaggcgaagaaggucaagcccaccgugguggucaacgccgccaacguguaccugaagcacgggggcggcguggccggggcccugaacaaggcgaccaacaacgccaugcaggucgaguccgacgacuacaucgccacgaacggcccccucaagguggggggcagcugcguccuguccggccacaaccuggccaagcacugccuccacgugguggggcccaacgucaacaagggcgaggacauccagcugcugaagagcgccuacgagaacuucaaccagcacgaggugcuccuggcgccgcugcucuccgccgggaucuucggcgccgaccccauccacagccugcgggugugcgucgacaccgugcgcaccaacguguaccuggccgucuucgacaagaaccucuacgacaagcugguguccagcuuccuggagaugaagagcgagaagcagguggagcagaagaucgccgagauccccaaggaggaggucaagcccuucaucaccgaguccaagccgagcguggagcagcggaagcaggacgacaagaagaucaaggcgugcguggaggaggucacgaccacccucgaggagaccaaguuccugacggagaaccugcuccuguacaucgacaucaacgggaaccugcaccccgacuccgccacccucgugagcgacaucgacaucaccuuccugaagaaggacgcccccuacaucgugggcgacgucgugcaggagggcgugcugaccgccgucgugauccccacgaagaaggccgggggcaccaccgagaugcucgcgaaggcccugcgcaaggugccgaccgacaacuacaucacgaccuaccccgggcagggccugaacggguacaccgucgaggaggccaagaccgugcucaagaagugcaaguccgccuucuacauccugcccagcaucaucuccaacgagaagcaggagauccugggcaccgugagcuggaaccuccgggagaugcuggcgcacgccgaggagacgcgcaagcugaugcccgucugcguggagaccaaggccaucguguccaccauccagcggaaguacaagggcaucaagauccaggagggggucguggacuacggcgcccgcuucuacuucuacaccagcaagacgaccguggccucccugaucaacacccucaacgaccugaacgagacccuggucacgaugccgcucggguacgugacccacggccugaaccuggaggaggcggcccgguacaugcgcagccucaaggugcccgccaccgucuccgugagcucccccgacgccgugaccgccuacaacggguaccugacgagcuccagcaagacccccgaggagcacuucaucgagaccaucucccuggcgggcagcuacaaggacuggagcuacuccggccagagcacccagcucgggaucgaguuccugaagcggggcgacaaguccgucuacuacacgagcaacccgaccaccuuccaccuggacggggaggugaucaccuucgacaaccucaagacgcugcugucccuccgcgaggugcggaccaucaaggucuucaccaccguggacaacaucaaccugcacacgcagguggucgacaugagcaugaccuacggccagcaguucggccccaccuaccuggacggggccgacgugaccaagaucaagccccacaacucccacgagggcaagacguucuacgugcucccgaacgacgacacccugcgcgucgaggccuucgaguacuaccacaccaccgaccccagcuuccuggggcgguacauguccgcccucaaccacacgaagaaguggaaguacccccaggugaacggccugaccagcaucaagugggccgacaacaacugcuaccuggcgaccgcccuccugacccugcagcagaucgagcucaaguucaaccccccggcccugcaggacgccuacuaccgcgcgcgggccggggaggccgccaacuucugcgcccugauccucgcguacugcaacaagacggugggcgagcugggcgacguccgcgagaccauguccuaccuguuccagcacgccaaccucgacagcugcaagcgggugcugaacgucgugugcaagaccugcgggcagcagcagaccacccugaagggcguggaggccgucauguacauggggacgcucuccuacgagcaguucaagaagggcgugcagauccccugcaccugcgggaagcaggccaccaaguaccuggugcagcaggagagccccuucgucaugauguccgcccccccggcgcaguacgagcugaagcacggcaccuucacgugcgccagcgaguacaccggcaacuaccagugcgggcacuacaagcacaucaccuccaaggagacccucuacugcaucgacggcgcccugcugacgaagagcagcgaguacaaggggcccaucaccgacguguucuacaaggagaacuccuacaccaccacgaucaagcccgugaccuacaagcucgacggcgucgugugcaccgagaucgaccccaagcuggacaacuacuacaagaaggacaacagcuacuucaccgagcagccgaucgaccuggugcccaaccagcccuaccccaacgccuccuucgacaacuucaaguucgucugcgacaacaucaaguucgccgacgaccucaaccagcugacgggguacaagaagccggcgagccgcgagcugaaggugaccuucuuccccgaccucaacggcgacguggucgccaucgacuacaagcacuacacccccuccuucaagaagggcgccaagcugcugcacaagcccaucguguggcacgugaacaacgccaccaacaaggcgacguacaagccgaacaccuggugcauccggugccucuggagcaccaagcccgucgagaccuccaacagcuucgacgugcugaaguccgaggacgcccaggggauggacaaccuggccugcgaggaccucaagcccgugagcgaggaggucguggagaaccccacgauccagaaggacgugcuggacugcaacgucaagaccaccgagguggugggcgacaucauccugaagccggccaacaacucccucaagaucaccgaggaggucgggcacacggaccugauggccgcguacguggacaacagcucccugaccaucaagaagcccaacgagcucagccgcgugcugggccugaagacccucgccacccacgggcuggccgccgucaacuccgugcccugggacacgaucgccaacuacgcgaagccguuccugaacaagguggucagcaccaccaccaacaucgugacgcgcugccucaaccgggugugcaccaacuacaugcccuacuucuucacccugcugcuccagcugugcaccuucacccgcuccacgaacagccggaucaaggccuccaugcccaccaccaucgccaagaacaccgucaagagcgugggcaaguucugccuggaggccagcuucaacuaccucaagucccccaacuucagcaagcugaucaacaucaucaucugguuccugcuccuguccgugugccugggcagccucaucuacuccacggccgcgcuggggguccugaugagcaaccucggcaugccguccuacugcaccggguaccgcgagggcuaccugaacagcaccaacgugaccaucgccacguacugcaccggcuccauccccugcagcgugugccuguccgggcucgacagccuggacaccuaccccucccuggagaccauccagaucacgaucagcuccuucaagugggaccucaccgccuucggccuggucgccgagugguuccuggccuacauccucuucacccgguucuucuacgugcuggggcuggcggccaucaugcagcucuucuucagcuacuucgccgugcacuucaucuccaacagcuggcugauguggcugaucaucaaccugguccagauggcccccaucuccgcgauggugcgcauguacaucuucuucgccagcuucuacuacguguggaagagcuacguccacgugguggacggcugcaacuccagcaccugcaugaugugcuacaagcggaaccgcgccacgcgggucgagugcaccaccaucgugaacgggguccgccgguccuucuacguguacgccaacggcggcaagggguucugcaagcuccacaacuggaacugcgugaacugcgacaccuucugcgccggcagcacguucaucuccgacgaggucgcgcgcgaccugagccugcaguucaagcggccgaucaaccccaccgaccaguccagcuacaucguggacuccgugaccgucaagaacgggagcauccaccucuacuucgacaaggccggccagaagaccuacgagcgccacucccugagccacuucgugaaccuggacaaccuccgggccaacaacacgaaggggucccugcccaucaacgugaucgucuucgacggcaagagcaagugcgaggaguccagcgccaaguccgccagcguguacuacucccagcugaugugccagcccauccuccugcuggaccaggcgcucgugagcgacgucggcgacagcgccgagguggccgugaagauguucgacgccuacgucaacaccuucuccagcaccuucaacgugccgauggagaagcugaagacccugguggccacggcggaggccgagcucgccaagaacgucucccuggacaacgugcugagcaccuucaucuccgccgcgcgccagggguucguggacagcgacgucgagaccaaggacgugguggagugccucaagcugucccaccagagcgacaucgaggucaccggcgacuccugcaacaacuacaugcugacguacaacaagguggagaacaugaccccccgggaccucggggccugcaucgacugcagcgcccgccacaucaacgcccagguggccaagucccacaacaucgcgcugaucuggaacgucaaggacuucaugagccuguccgagcagcuccggaagcagauccgcagcgccgccaagaagaacaaccugcccuucaagcugaccugcgccaccacgcgccagguggugaacgucgugaccaccaagaucgcccucaagggcgggugaggacuaguuauaagacugacuagcccgaugggccucccaacgggcccuccuccccuccuugcaccgagauuaauaaaaaaaaaaaaaaaaaaaaaaaaaaaaaaaaaaaaaaaaaaaaaaaaaaaaaaaaaaaaaaaaugcaucccccccccccccccccccccccccccccccaaaggcucuuuucagagccaccagaauu

SEQ ID NO: 21753 - RNA, 6058 nt, Artificial Sequence
  SARS-CoV-2__MT706222.1__non-structural protein 3 (NSP3) mRNA gc
aggagaaagcuuaccauggcccccaccaaggugaccuucggcgacgacacggucaucgaggugcagggguacaagagcgugaacaucaccuucgagcuggacgagcgcaucgacaagguccucaacgagaagugcuccgccuacaccguggagcugggcaccgaggugaacgaguucgcgugcgucguggccgacgccgugaucaagacgcugcagccggucagcgagcuccugaccccccuggggaucgaccucgacgagugguccauggccaccuacuaccuguucgacgagagcggcgaguucaagcuggccucccacauguacugcagcuucuacccccccgacgaggacgaggaggagggggacugcgaggaggaggaguucgagccguccacccaguacgaguacggcacggaggacgacuaccagggcaagccccucgaguucggggcgaccagcgccgcccugcagcccgaggaggagcaggaggaggacuggcuggacgacgacucccagcagaccgugggccagcaggacgggagcgaggacaaccagaccacgaccauccagaccaucguggagguccagccccagcucgagauggagcugaccccgguggugcagacgaucgaggucaacuccuucagcggcuaccugaagcucaccgacaacguguacaucaagaacgccgacaucguggaggaggcgaagaaggucaagcccaccgugguggucaacgccgccaacguguaccugaagcacgggggcggcguggccggggcccugaacaaggcgaccaacaacgccaugcaggucgaguccgacgacuacaucgccacgaacggcccccucaagguggggggcagcugcguccuguccggccacaaccuggccaagcacugccuccacgugguggggcccaacgucaacaagggcgaggacauccagcugcugaagagcgccuacgagaacuucaaccagcacgaggugcuccuggcgccgcugcucuccgccgggaucuucggcgccgaccccauccacagccugcgggugugcgucgacaccgugcgcaccaacguguaccuggccgucuucgacaagaaccucuacgacaagcugguguccagcuuccuggagaugaagagcgagaagcagguggagcagaagaucgccgagauccccaaggaggaggucaagcccuucaucaccgaguccaagccgagcguggagcagcggaagcaggacgacaagaagaucaaggcgugcguggaggaggucacgaccacccucgaggagaccaaguuccugacggagaaccugcuccuguacaucgacaucaacgggaaccugcaccccgacuccgccacccucgugagcgacaucgacaucaccuuccugaagaaggacgcccccuacaucgugggcgacgucgugcaggagggcgugcugaccgccgucgugauccccacgaagaaggccgggggcaccaccgagaugcucgcgaaggcccugcgcaaggugccgaccgacaacuacaucacgaccuaccccgggcagggccugaacggguacaccgucgaggaggccaagaccgugcucaagaagugcaaguccgccuucuacauccugcccagcaucaucuccaacgagaagcaggagauccugggcaccgugagcuggaaccuccgggagaugcuggcgcacgccgaggagacgcgcaagcugaugcccgucugcguggagaccaaggccaucguguccaccauccagcggaaguacaagggcaucaagauccaggagggggucguggacuacggcgcccgcuucuacuucuacaccagcaagacgaccguggccucccugaucaacacccucaacgaccugaacgagacccuggucacgaugccgcucggguacgugacccacggccugaaccuggaggaggcggcccgguacaugcgcagccucaaggugcccgccaccgucuccgugagcucccccgacgccgugaccgccuacaacggguaccugacgagcuccagcaagacccuggaggagcacuucaucgagaccaucucccucgcgggcagcuacaaggacuggagcuacuccggccagagcacccagcuggggaucgaguuccugaagcggggcgacaaguccgucuacuacacgagcaaccccaccaccuuccaccucgacggggaggugaucaccuucgacaaccugaagacgcugcucucccugcgcgaggugcggaccaucaaggucuucaccaccguggacaacaucaaccugcacacgcagguggucgacaugagcaugaccuacggccagcaguucggcccgaccuaccucgacggggccgacgugaccaagaucaagccccacaacucccacgagggcaagacguucuacgugcugcccaacgacgacacccugcgcgucgaggccuucgaguacuaccacaccaccgacccgagcuuccucgggcgguacauguccgcccugaaccacacgaagaaguggaaguacccccaggugaacggccugaccagcaucaagugggccgacaacaacugcuaccucgcgaccgcccugcugacccuccagcagaucgagcugaaguucaacccccccgcccugcaggacgccuacuaccgcgcgcgggccggggaggccgccaacuucugcgcccucauccuggcguacugcaacaagacggugggcgagcugggcgacguccgcgagaccauguccuaccucuuccagcacgccaaccuggacagcugcaagcgggugcugaacgucgugugcaagaccugcgggcagcagcagaccacccucaagggcguggaggccgucauguacauggggacgcuguccuacgagcaguucaagaagggcgugcagaucccgugcaccugcgggaagcaggccaccaaguaccuggugcagcaggagagccccuucgucaugauguccgccccccccgcgcaguacgagcucaagcacggcaccuucacgugcgccagcgaguacaccggcaacuaccagugcgggcacuacaagcacaucaccuccaaggagacccuguacugcaucgacggcgcccugcucacgaagagcagcgaguacaaggggccgaucaccgacguguucuacaaggagaacuccuacaccaccacgaucaagcccgugaccuacaagcuggacggcgucgugugcaccgagaucgaccccaagcuggacaacuacuacaagaaggacaacagcuacuucaccgagcagcccaucgaccucgugccgaaccagcccuaccccaacgccuccuucgacaacuucaaguucgucugcgacaacaucaaguucgccgacgaccugaaccagcugacgggguacaagaagcccgcgagccgcgagcucaaggugaccuucuucccggaccugaacggcgacguggucgccaucgacuacaagcacuacacccccuccuucaagaagggcgccaagcugcuccacaagcccaucguguggcacgugaacaacgccaccaacaaggcgacguacaagcccaacaccuggugcauccggugccuguggagcaccaagccggucgagaccuccaacagcuucgacgugcugaaguccgaggacgcccaggggauggacaaccucgccugcgaggaccugaagcccgugagcgaggaggucguggagaaccccacgauccagaaggacgugcuggagugcaacgucaagaccaccgagguggugggcgacaucauccucaagcccgccaacaacucccugaagaucaccgaggaggucgggcacacggaccugauggccgcguacguggacaacagcucccucaccaucaagaagccgaacgagcugagccgcgugcugggccucaagacccuggccacccacgggcuggccgccgucaacuccgugcccugggacacgaucgccaacuacgcgaagcccuuccucaacaagguggucagcaccaccaccaacaucgugacgcgcugccugaaccgggugugcaccaacuacaugccguacuucuucacccugcuccugcagcugugcaccuucacccgcuccacgaacagccggaucaaggccuccaugcccaccaccaucgccaagaacaccgucaagagcgugggcaaguucugccucgaggccagcuucaacuaccugaagucccccaacuucagcaagcugaucaacaucaucaucugguuccuccugcuguccgugugccucggcagccugaucuacuccacggccgcgcuggggguccucaugagcaaccugggcaugcccuccuacugcaccggguaccgcgagggcuaccugaacagcaccaacgugaccaucgccacguacugcaccggcuccaucccgugcagcgugugccucuccgggcuggacagccuggacaccuaccccucccucgagaccauccagaucacgaucagcuccuucaagugggaccugaccgccuucggccuggucgccgagugguuccucgccuacauccuguucacccgguucuucuacgugcuggggcucgcggccaucaugcagcuguucuucagcuacuucgccgugcacuucaucuccaacagcuggcugauguggcugaucaucaaccucguccagauggcccccaucuccgcgauggugcgcauguacaucuucuucgccagcuucuacuacguguggaagagcuacguccacgugguggacggcugcaacuccagcaccugcaugaugugcuacaagcggaaccgcgccacgcgggucgagugcaccaccaucgugaacgggguccgccgguccuucuacguguacgccaacggcggcaagggguucugcaagcugcacaacuggaacugcgugaacugcgacaccuucugcgccggcagcacguucaucuccgacgaggucgcgcgcgaccugagccuccaguucaagcggcccaucaacccgaccgaccaguccagcuacaucguggacuccgugaccgucaagaacgggagcauccaccuguacuucgacaaggccggccagaagaccuacgagcgccacucccugagccacuucgugaaccucgacaaccugcgggccaacaacacgaaggggucccugcccaucaacgugaucgucuucgacggcaagagcaagugcgaggaguccagcgccaaguccgccagcguguacuacucccagcucaugugccagcccauccugcugcucgaccaggcgcuggugagcgacgucggcgacagcgccgagguggccgugaagauguucgacgccuacgucaacaccuucuccagcaccuucaacgugcccauggagaagcugaagacccucguggccacggcggaggccgagcuggccaagaacgucucccuggacaacgugcucagcaccuucaucuccgccgcgcgccagggguucguggacagcgacgucgagaccaaggacgugguggagugccugaagcugucccaccagagcgacaucgaggucaccggcgacuccugcaacaacuacaugcucacguacaacaagguggagaacaugaucccgcgggaccugggggccugcaucgacugcagcgcccgccacaucaacgcccagguggccaagucccacaacaucgcgcugaucuggaacgucaaggacuucaugagccucuccgagcagcugcggaagcagauccgcagcgccgccaagaagaacaaccugcccuucaagcucaccugcgccaccacccgccagguggugaacgucgugacgaccaagaucgcccugaagggcgggugaggacuaguuauaagacugacuagcccgaugggccucccaacgggcccuccuccccuccuugcaccgagauuaauaaaaaaaaaaaaaaaaaaaaaaaaaaaaaaaaaaaaaaaaaaaaaaaaaaaaaaaaaaaaaaaaugcaucccccccccccccccccccccccccccccccaaaggcucuuuucagagccaccagaauu

SEQ ID NO: 21754 - RNA, 6058 nt, Artificial Sequence
  SARS-CoV-2__MT706287.1__non-structural protein 3 (NSP3) mRNA gc
aggagaaagcuuaccauggcccccaccaaggugaccuucggcgacgacacggucaucgaggugcagggguacaagagcgugaacaucaccuucgagcuggacgagcgcaucgacaagguccucaacgagaagugcuccgccuacaccguggagcugggcaccgaggugaacgaguucgcgugcgucguggccgacgccgugaucaagacgcugcagccggucagcgagcuccugaccccccuggggaucgaccucgacgagugguccauggccaccuacuaccuguucgacgagagcggcgaguucaagcuggccucccacauguacugcagcuucuacccccccgacgaggacgaggaggagggggacugcgaggaggaggaguucgagccguccacccaguacgaguacggcacggaggacgacuaccagggcaagccccucgaguucggggcgaccagcgccgcccugcagcccgaggaggagcaggaggaggacuggcuggacgacgacucccagcagaccgugggccagcaggacgggagcgaggacaaccagaccacgaccauccagaccaucguggagguccagccccagcucgagauggagcugaccccgguggugcagacgaucgaggucaacuccuucagcggcuaccugaagcucaccgacaacguguacaucaagaacgccgacaucguggaggaggcgaagaaggucaagcccaccgugguggucaacgccgccaacguguaccugaagcacgggggcggcguggccggggcccugaacaaggcgaccaacaacgccaugcaggucgaguccgacgacuacaucgccacgaacggcccccucaagguggggggcagcugcguccuguccggccacaaccuggccaagcacugccuccacgugguggggcccaacgucaacaagggcgaggacauccagcugcugaagagcgccuacgagaacuucaaccagcacgaggugcuccuggcgccgcugcucuccgccgggaucuucggcgccgaccccauccacagccugcgggugugcgucgacaccgugcgcaccaacguguaccuggccgucuucgacaagaaccucuacgacaagcugguguccagcuuccuggagaugaagagcgagaagcagguggagcagaagaucgccgagauccccaaggaggaggucaagcccuucaucaccgaguccaagccgagcguggagcagcggaagcaggacgacaagaagaucaaggcgugcguggaggaggucacgaccacccucgaggagaccaaguuccugacggagaaccugcuccuguacaucgacaucaacgggaaccugcaccccgacuccgccacccucgugagcgacaucgacaucaccuuccugaagaaggacgcccccuacaucgugggcgacgucgugcaggagggcgugcugaccgccgucgugauccccacgaagaaggccgggggcaccaccgagaugcucgcgaaggcccugcgcaaggugccgaccgacaacuacaucacgaccuaccccgggcagggccugaacggguacaccgucgaggaggccaagaccgugcucaagaagugcaaguccgccuucuacauccugcccagcaucaucuccaacgagaagcaggagauccugggcaccgugagcuggaaccuccgggagaugcuggcgcacgccgaggagacgcgcaagcugaugcccgucugcguggagaccaaggccaucguguccaccauccagcggaaguacaagggcaucaagauccaggagggggucguggacuacggcgcccgcuucuacuucuacaccagcaagacgaccguggccucccugaucaacacccucaacgaccugaacgagacccuggucacgaugccgcucggguacgugacccacggccugaaccuggaggaggcggcccgguacaugcgcagccucaaggugcccgccaccgucuccgugagcucccccgacgccgugaccgccuacaacggguaccugacgagcuccagcaagacccccgaggagcacuucaucgagaccaucucccuggcgggcagcuacaaggacuggagcuacuccggccagagcacccagcucgggaucgaguuccugaagcggggcgacaaguccgucuacuacacgagcaacccgaccaccuuccaccuggacggggaggugaucaccuucgacaaccucaagacgcugcugucccuccgcgaggugcggaccaucaaggucuucaccaccguggacaacaucaaccugcacacgcagguggucgacaugagcaugaccuacggccagcaguucggccccaccuaccuggacggggccgacgugaccaagaucaagccccacaacucccacgagggcaagacguucuacgugcucccgaacgacgacacccugcgcgucgaggccuucgaguacuaccacaccaccgaccccagcuuccuggggcgguacauguccgcccucaaccacacgaagaaguggaaguacccccaggugaacggccugaccagcaucaagugggccgacaacaacugcuaccuggcgaccgcccuccugacccugcagcagaucgagcucaaguucaaccccccggcccugcaggacgccuacuaccgcgcgcgggccggggaggccgccaacuucugcgcccugauccucgcguacugcaacaagacggugggcgagcugggcgacguccgcgagaccauguccuaccuguuccagcacgccaaccucgacagcugcaagcgggugcugaacgucgugugcaagaccugcgggcagcagcagaccacccugaagggcguggaggccgucauguacauggggacgcucuccuacgagcaguucaagaagggcgugcagauccccugcaccugcgggaagcaggccaccaaguaccuggugcagcaggagagccccuucgucaugauguccgcccccccggcgcaguacgagcugaagcacggcaccuucacgugcgccagcgaguacaccggcaacuaccagugcgggcacuacaagcacaucaccuccaaggagacccucuacugcaucgacggcgcccugcugacgaagagcagcgaguacaaggggcccaucaccgacguguucuacaaggagaacuccuacaccaccacgaucaagcccgugaccuacaagcucgacggcgucgugugcaccgagaucgaccccaagcuggacaacuacuacaagaaggacaacagcuacuucaccgagcagccgaucgaccuggugcccaaccagcccuaccccaacgccuccuucgacaacuucaaguucgucugcgacaacaucaaguucgccgacgaccucaaccagcugacgggguacaagaagccggcgagccgcgagcugaaggugaccuucuuccccgaccucaacggcgacguggucgccaucgacuacaagcacuacacccccuccuucaagaagggcgccaagcugcugcacaagcccaucguguggcacgugaacaacgccaccaacaaggcgacguacaagccgaacaccuggugcauccggugccucuggagcaccaagcccgucgagaccuccaacagcuucgacgugcugaaguccgaggacgcccaggggauggacaaccuggccugcgaggaccucaagcccgugagcgaggaggucguggagaaccccacgauccagaaggacgugcuggagugcaacgucaagaccaccgagguggugggcgacaucauccugaagccggccaacaacucccucaagaucaccgaggaggucgggcacacggaccugauggccgcguacguggacaacagcucccugaccgugaagaagcccaacgagcucagccgcguccugggccugaagacccucgccacccacgggcuggccgccgugaacuccgugcccugggacacgaucgccaacuacgcgaagccguuccugaacaaggucgugagcaccaccaccaacaucgugacgcgcugccucaaccgggucugcaccaacuacaugcccuacuucuucacccugcugcuccagcugugcaccuucacccgcuccacgaacagccggaucaaggccuccaugcccaccaccaucgccaagaacaccgugaagagcgugggcaaguucugccuggaggccagcuucaacuaccucaagucccccaacuucagcaagcugaucaacaucaucaucugguuccugcuccuguccgucugccugggcagccucaucuacuccacggccgcgcugggggugcugaugagcaaccucggcaugccguccuacugcaccggguaccgcgagggcuaccugaacagcaccaacgugaccaucgccacguacugcaccggcuccauccccugcagcgucugccuguccgggcucgacagccuggacaccuaccccucccuggagaccauccagaucacgaucagcuccuucaagugggaccucaccgccuucggccugguggccgagugguuccuggccuacauccucuucacccgguucuucuacgugcuggggcuggcggccaucaugcagcucuucuucagcuacuucgccguccacuucaucuccaacagcuggcugauguggcugaucaucaaccuggugcagauggcccccaucuccgcgauggugcgcauguacaucuucuucgccagcuucuacuacgucuggaagagcuacgugcacguggucgacggcugcaacuccagcaccugcaugaugugcuacaagcggaaccgcgccacgcggguggagugcaccaccaucgucaacggggugcgccgguccuucuacguguacgccaacggcggcaagggguucugcaagcuccacaacuggaacugcgucaacugcgacaccuucugcgccggcagcacguucaucuccgacgagguggcgcgcgaccugagccugcaguucaagcggccgaucaaccccaccgaccaguccagcuacaucguggacuccgucaccgugaagaacgggagcauccaccucuacuucgacaaggccggccagaagaccuacgagcgccacucccugagccacuucgugaaccuggacaaccuccgggccaacaacacgaaggggucccugcccaucaacgucaucguguucgacggcaagagcaagugcgaggaguccagcgccaaguccgccagcguguacuacucccagcugaugugccagcccauccuccugcuggaccaggcgcucgucagcgacgugggcgacagcgccgagguggccgucaagauguucgacgccuacgugaacaccuucuccagcaccuucaacgugccgauggagaagcugaagacccuggucgccacggcggaggccgagcucgccaagaacgugucccuggacaacgugcugagcaccuucaucuccgccgcgcgccagggguucgucgacagcgacguggagaccaaggacguggucgagugccucaagcugucccaccagagcgacaucgaggugaccggcgacuccugcaacaacuacaugcugacguacaacaagguggagaacaugaccccccgggaccucggggccugcaucgacugcagcgcccgccacaucaacgcccaggucgccaagucccacaacaucgcgcugaucuggaacgugaaggacuucaugagccuguccgagcagcuccggaagcagauccgcagcgccgccaagaagaacaaccugcccuucaagcugaccugcgccaccacgcgccagguggucaacguggugaccaccaagaucgcccucaagggcgggugaggacuaguuauaagacugacuagcccgaugggccucccaacgggcccuccuccccuccuugcaccgagauuaauaaaaaaaaaaaaaaaaaaaaaaaaaaaaaaaaaaaaaaaaaaaaaaaaaaaaaaaaaaaaaaaaugcaucccccccccccccccccccccccccccccccaaaggcucuuuucagagccaccagaauu

SEQ ID NO: 21755 - RNA, 6058 nt, Artificial Sequence
  SARS-CoV-2__MT706289.1__non-structural protein 3 (NSP3) mRNA gc
aggagaaagcuuaccauggcccccaccaaggugaccuucggcgacgacacggucaucgaggugcagggguacaagagcgugaacaucaccuucgagcuggacgagcgcaucgacaagguccucaacgagaagugcuccgccuacaccguggagcugggcaccgaggugaacgaguucgcgugcgucguggccgacgccgugaucaagacgcugcagccggucagcgagcuccugaccccccuggggaucgaccucgacgagugguccauggccaccuacuaccuguucgacgagagcggcgaguucaagcuggccucccacauguacugcagcuucuacccccccgacgaggacgaggaggagggggacugcgaggaggaggaguucgagccguccacccaguacgaguacggcacggaggacgacuaccagggcaagccccucgaguucggggcgaccagcgccgcccugcagcccgaggaggagcaggaggaggacuggcuggacgacgacucccagcagaccgugggccagcaggacgggagcgaggacaaccagaccacgaccauccagaccaucguggagguccagccccagcucgagauggagcugaccccgguggugcagacgaucgaggucaacuccuucagcggcuaccugaagcucaccgacaacguguacaucaagaacgccgacaucguggaggaggcgaagaaggucaagcccaccgugguggucaacgccgccaacguguaccugaagcacgggggcggcguggccggggcccugaacaaggcgaccaacaacgccaugcaggucgaguccgacgacuacaucgccacgaacggcccccucaagguggggggcagcugcguccuguccggccacaaccuggccaagcacugccuccacgugguggggcccaacgucaacaagggcgaggacauccagcugcugaagagcgccuacgagaacuucaaccagcacgaggugcuccuggcgccgcugcucuccgccgggaucuucggcgccgaccccauccacagccugcgggugugcgucgacaccgugcgcaccaacguguaccuggccgucuucgacaagaaccucuacgacaagcugguguccagcuuccuggagaugaagagcgagaagcagguggagcagaagaucgccgagauccccaaggaggaggucaagcccuucaucaccgaguccaagccgagcguggagcagcggaagcaggacgacaagaagaucaaggcgugcguggaggaggucacgaccacccucgaggagaccaaguuccugacggagaaccugcuccuguacaucgacaucaacgggaaccugcaccccgacuccgccacccucgugagcgacaucgacaucaccuuccugaagaaggacgcccccuacaucgugggcgacgucgugcaggagggcgugcugaccgccgucgugauccccacgaagaaggccgggggcaccaccgagaugcucgcgaaggcccugcgcaaggugccgaccgacaacuacaucacgaccuaccccgggcagggccugaacggguacaccgucgaggaggccaagaccgugcucaagaagugcaaguccgccuucuacauccugcccagcaucaucuccaacgagaagcaggagauccugggcaccgugagcuggaaccuccgggagaugcuggcgcacgccgaggagacgcgcaagcugaugcccgucugcguggagaccaaggccaucguguccaccauccagcggaaguacaagggcaucaagauccaggagggggucguggacuacggcgcccgcuucuacuucuacaccagcaagacgaccguggccucccugaucaacacccucaacgaccugaacgagacccuggucacgaugccgcucggguacgugacccacggccugaaccuggaggaggcggcccgguacaugcgcagccucaaggugcccgccaccgucuccgugagcucccccgacgccgugaccgccuacaacggguaccugacgagcuccagcaagacccccgaggagcacuucaucgagaccaucucccuggcgggcagcuacaaggacuggagcuacuccggccagagcacccagcucgggaucgaguuccugaagcggggcgacaaguccgucuacuacacgagcaacccgaccaccuuccaccuggacggggaggugaucaccuucgacaaccucaagacgcugcugucccuccgcgaggugcggaccaucaaggucuucaccaccguggacaacaucaaccugcacacgcagguggucgacaugagcaugaccuacggccagcaguucggccccaccuaccuggacggggccgacgugaccaagaucaagccccacaacucccacgagggcaagacguucuacgugcucccgaacgacgacacccugcgcgucgaggccuucgaguacuaccacaccaccgaccccagcuuccuggggcgguacauguccgcccucaaccacacgaagaaguggaaguacccccaggugaacggccugaccagcaucaagugggccgacaacaacugcuaccuggcgaccgcccuccugacccugcagcagaucgagcucaaguucaaccccccggcccugcaggacgccuacuaccgcgcgcgggccggggaggccgccaacuucugcgcccugauccucgcguacugcaacaagacggugggcgagcugggcgacguccgcgagaccauguccuaccuguuccagcacgccaaccucgacagcugcaagcgggugcugaacgucgugugcaagaccugcgggcagcagcagaccacccugaagggcguggaggccgucauguacauggggacgcucuccuacgagcaguucaagaagggcgugcagauccccugcaccugcgggaagcaggccaccaaguaccuggugcagcaggagagccccuucgucaugauguccgcccccccggcgcaguacgagcugaagcacggcaccuucacgugcgccagcgaguacaccggcaacuaccagugcgggcacuacaagcacaucaccuccaaggagacccucuacugcaucgacggcgcccugcugacgaagagcagcgaguacaaggggcccaucaccgacguguucuacaaggagaacuccuacaccaccacgaucaagcccgugaccuacaagcucgacggcgucgugugcaccgagaucgaccccaagcuggacaacuacuacaagaaggacaacagcuacuucaccgagcagccgaucgaccuggugcccaaccagcccuaccccaacgccuccuucgacaacuucaaguucgucugcgacaacaucaaguucgccgacgaccucaaccagcugacgggguacaagaagccggcgagccgcgagcugaaggugaccuucuuccccgaccucaacggcgacguggucgccaucgacuacaagcacuacacccccuccuucaagaagggcgccaagcugcugcacaagcccaucguguggcacgugaacaacgccaccaacaaggcgacguacaagccgaacaccuggugcauccggugccucuggagcaccaagcccgucgagaccuccaacagcuucgacgugcugaaguccgaggacgcccaggggauggacaaccuggccugcgaggaccucaagcccgugagcgaggaggucguggagaaccccacgauccagaaggacgugcuggagugcaacgucaagaccaccgagguggugggcgacaucauccugaagccggccaacaacucccucaagaucaccgaggaggucgggcacacggaccugauggccgcguacguggacaacagcucccugaccaucaagaagcccaacgagcucagccgcgugcugggccugaagacccucgccacccacgggcuggccgccgucaacuccgugcccugggacacgaucgccaacuacgcgaagccguuccugaacaagguggucagcaccaccaccaacaucgugacgcgcugccucaaccgggugugcaccaacuacaugcccuacuucuucacccugcugcuccagcugugcaccuucacccgcuccacgaacagccggaucaaggccuccaugcccaccaccaucgccaagaacaccgucaagagcgugggcaaguucuuccuggaggccagcuucaacuaccucaagucccccaacuucagcaagcugaucaacaucaucaucugguuccugcuccuguccgugugccugggcagccucaucuacuccacggccgcgcuggggguccugaugagcaaccucggcaugccguccuacugcaccggguaccgcgagggcuaccugaacagcaccaacgugaccaucgccacguacugcaccggcuccauccccugcagcgugugccuguccgggcucgacagccuggacaccuaccccucccuggagaccauccagaucacgaucagcuccuucaagugggaccucaccgccuucggccuggucgccgagugguuccuggccuacauccucuucacccgguucuucuacgugcuggggcuggcggccaucaugcagcucuucuucagcuacuucgccgugcacuucaucuccaacagcuggcugauguggcugaucaucaaccugguccagauggcccccaucuccgcgauggugcgcauguacaucuucuucgccagcuucuacuacguguggaagagcuacguccacgugguggacggcugcaacuccagcaccugcaugaugugcuacaagcggaaccgcgccacgcgggucgagugcaccaccaucgugaacgggguccgccgguccuucuacguguacgccaacggcggcaagggguucugcaagcuccacaacuggaacugcgugaacugcgacaccuucugcgccggcagcacguucaucuccgacgaggucgcgcgcgaccugagccugcaguucaagcggccgaucaaccccaccgaccaguccagcuacaucguggacuccgugaccgucaagaacgggagcauccaccucuacuucgacaaggccggccagaagaccuacgagcgccacucccugagccacuucgugaaccuggacaaccuccgggccaacaacacgaaggggucccugcccaucaacgugaucgucuucgacggcaagagcaagugcgaggaguccagcgccaaguccgccagcguguacuacucccagcugaugugccagcccauccuccugcuggaccaggcgcucgugagcgacgucggcgacagcgccgagguggccgugaagauguucgacgccuacgucaacaccuucuccagcaccuucaacgugccgauggagaagcugaagacccugguggccacggcggaggccgagcucgccaagaacgucucccuggacaacgugcugagcaccuucaucuccgccgcgcgccagggguucguggacagcgacgucgagaccaaggacgugguggagugccucaagcugucccaccagagcgacaucgaggucaccggcgacuccugcaacaacuacaugcugacguacaacaagguggagaacaugaccccccgggaccucggggccugcaucgacugcagcgcccgccacaucaacgcccagguggccaagucccacaacaucgcgcugaucuggaacgucaaggacuucaugagccuguccgagcagcuccggaagcagauccgcagcgccgccaagaagaacaaccugcccuucaagcugaccugcgccaccacgcgccagguggugaacgucgugaccaccaagaucgcccucaagggcgggugaggacuaguuauaagacugacuagcccgaugggccucccaacgggcccuccuccccuccuugcaccgagauuaauaaaaaaaaaaaaaaaaaaaaaaaaaaaaaaaaaaaaaaaaaaaaaaaaaaaaaaaaaaaaaaaaugcaucccccccccccccccccccccccccccccccaaaggcucuuuucagagccaccagaauu

SEQ ID NO: 21756 - RNA, 6058 nt, Artificial Sequence
  SARS-CoV-2__MT706341.1__non-structural protein 3 (NSP3) mRNA gc
aggagaaagcuuaccauggcccccaccaaggugaccuucggcgacgacacggucaucgaggugcagggguacaagagcgugaacaucaccuucgagcuggacgagcgcaucgacaagguccucaacgagaagugcuccgccuacaccguggagcugggcaccgaggugaacgaguucgcgugcgucguggccgacgccgugaucaagacgcugcagccggucagcgagcuccugaccccccuggggaucgaccucgacgagugguccauggccaccuacuaccuguucgacgagagcggcgaguucaagcuggccucccacauguacugcagcuucuacccccccgacgaggacgaggaggagggggacugcgaggaggaggaguucgagccguccacccaguacgaguacggcacggaggacgacuaccagggcaagccccucgaguucggggcgaccagcgccgcccugcagcccgaggaggagcaggaggaggacuggcuggacgacgacucccagcagaccgugggccagcaggacgggagcgaggacaaccagaccacgaccauccagaccaucguggagguccagccccagcucgagauggagcugaccccgguggugcagacgaucgaggucaacuccuucagcggcuaccugaagcucaccgacaacguguacaucaagaacgccgacaucguggaggaggcgaagaaggucaagcccaccgugguggucaacgccgccaacguguaccugaagcacgggggcggcguggccggggcccugaacaaggcgaccaacaacgccaugcaggucgaguccgacgacuacaucgccacgaacggcccccucaagguggggggcagcugcguccuguccggccacaaccuggccaagcacugccuccacgugguggggcccaacgucaacaagggcgaggacauccagcugcugaagagcgccuacgagaacuucaaccagcacgaggugcuccuggcgccgcugcucuccgccgggaucuucggcgccgaccccauccacagccugcgggugugcgucgacaccgugcgcaccaacguguaccuggccgucuucgacaagaaccucuacgacaagcugguguccagcuuccuggagaugaagagcgagaagcagguggagcagaagaucgccgagauccccaaggaggaggucaagcccuucaucaccgaguccaagccgagcguggagcagcggaagcaggacgacaagaagaucaaggcgugcguggaggaggucacgaccacccucgaggagaccaaguuccugacggagaaccugcuccuguacaucgacaucaacgggaaccugcaccccgacuccgccacccucgugagcgacaucgacaucaccuuccugaagaaggacgcccccuacaucgugggcgacgucgugcaggagggcgugcugaccgccgucgugauccccacgaagaaggccgggggcaccaccgagaugcucgcgaaggcccugcgcaaggugccgaccgacaacuacaucacgaccuaccccgggcagggccugaacggguacaccgucgaggaggccaagaccgugcucaagaagugcaaguccgccuucuacauccugcccagcaucaucuccaacgagaagcaggagauccugggcaccgugagcuggaaccuccgggagaugcuggcgcacgccgaggagacgcgcaagcugaugcccgucugcguggagaccaaggccaucguguccaccauccagcggaaguacaagggcaucaagauccaggagggggucguggacuacggcgcccgcuucuacuucuacaccagcaagacgaccguggccucccugaucaacacccucaacgaccugaacgagacccuggucacgaugccgcucggguacgugacccacggccugaaccuggaggaggcggcccgguacaugcgcagccucaaggugcccgccaccgucuccgugagcucccccgacgccgugaccgccuacaacggguaccugacgagcuccagcaagacccccgaggagcacuucaucgagaccaucucccuggcgggcagcuacaaggacuggagcuacuccggccagagcacccagcucgggaucgaguuccugaagcggggcgacaaguccgucuacuacacgagcaacccgaccaccuuccaccuggacggggaggugaucaccuucgacaaccucaagacgcugcugucccuccgcgaggugcggaccaucaaggucuucaccaccguggacaacaucaaccugcacacgcagguggucgacaugagcaugaccuacggccagcaguucggccccaccuaccuggacggggccgacgugaccaagaucaagccccacaacucccacgagggcaagacguucuacgugcucccgaacgacgacacccugcgcgucgaggccuucgaguacuaccacaccaccgaccccagcuuccuggggcgguacauguccgcccucaaccacacgaagaaguggaaguacccccaggugaacggccugaccagcaucaagugggccgacaacaacugcuaccuggcgaccgcccuccugacccugcagcagaucgagcucaaguucaaccccccggcccugcaggacgccuacuaccgcgcgcgggccggggaggccgccaacuucugcgcccugauccucgcguacugcaacaagacggugggcgagcugggcgacguccgcgagaccauguccuaccuguuccagcacgccaaccucgacagcugcaagcgggugcugaacgucgugugcaagaccugcgggcagcagcagaccacccugaagggcguggaggccgucauguacauggggacgcucuccuacgagcaguucaagaagggcgugcagauccccugcaccugcgggaagcaggccaccaaguaccuggugcagcaggagagccccuucgucaugauguccgcccccccggcgcaguacgagcugaagcacggcaccuucacgugcgccagcgaguacaccggcaacuaccagugcgggcacuacaagcacaucaccuccaaggagacccucuacugcaucgacggcgcccugcugacgaagagcagcgaguacaaggggcccaucaccgacguguucuacaaggagaacuccuacaccaccacgaucaagcccgugaccuacaagcucgacggcgucgugugcaccgagaucgaccccaagcuggacaacuacuacaagaaggacaacagcuacuucaccgagcagccgaucgaccuggugcccaaccagcccuaccccaacgccuccuucgacaacuucaaguucgucugcgacaacaucaaguucgccgacgaccucaaccagcugacgggguacaagaagccggcgagccgcgagcugaaggugaccuucuuccccgaccucaacggcgacguggucgccaucgacuacaagcacuacacccccuccuucaagaagggcgccaagcugcugcacaagcccaucguguggcacgugaacaacgccaccaacaaggcgacguacaagccgaacaccuggugcauccggugccucuggagcaccaagcccgucgagaccuccaacagcuucaacgugcugaaguccgaggacgcccaggggauggacaaccuggccugcgaggaccucaagcccgugagcgaggaggucguggagaaccccacgauccagaaggacgugcuggagugcaacgucaagaccaccgagguggugggcgacaucauccugaagccggccaacaacucccucaagaucaccgaggaggucgggcacacggaccugauggccgcguacguggacaacagcucccugaccaucaagaagcccaacgagcucagccgcgugcugggccugaagacccucgccacccacgggcuggccgccgucaacuccgugcccugggacacgaucgccaacuacgcgaagccguuccugaacaagguggucagcaccaccaccaacaucgugacgcgcugccucaaccgggugugcaccaacuacaugcccuacuucuucacccugcugcuccagcugugcaccuucacccgcuccacgaacagccggaucaaggccuccaugcccaccaccaucgccaagaacaccgucaagagcgugggcaaguucugccuggaggccagcuucaacuaccucaagucccccaacuucagcaagcugaucaacaucaucaucugguuccugcuccuguccgugugccugggcagccucaucuacuccacggccgcgcuggggguccugaugagcaaccucggcaugccguccuacugcaccggguaccgcgagggcuaccugaacagcaccaacgugaccaucgccacguacugcaccggcuccauccccugcagcgugugccuguccgggcucgacagccuggacaccuaccccucccuggagaccauccagaucacgaucagcuccuucaagugggaccucaccgccuucggccuggucgccgagugguuccuggccuacauccucuucacccgguucuucuacgugcuggggcuggcggccaucaugcagcucuucuucagcuacuucgccgugcacuucaucuccaacagcuggcugauguggcugaucaucaaccugguccagauggcccccaucuccgcgauggugcgcauguacaucuucuucgccagcuucuacuacguguggaagagcuacguccacgugguggacggcugcaacuccagcaccugcaugaugugcuacaagcggaaccgcgccacgcgggucgagugcaccaccaucgugaacgggguccgccgguccuucuacguguacgccaacggcggcaagggguucugcaagcuccacaacuggaacugcgugaacugcgacaccuucugcgccggcagcacguucaucuccgacgaggucgcgcgcgaccugagccugcaguucaagcggccgaucaaccccaccgaccaguccagcuacaucguggacuccgugaccgucaagaacgggagcauccaccucuacuucgacaaggccggccagaagaccuacgagcgccacucccugagccacuucgugaaccuggacaaccuccgggccaacaacacgaaggggucccugcccaucaacgugaucgucuucgacggcaagagcaagugcgaggaguccagcgccaaguccgccagcguguacuacucccagcugaugugccagcccauccuccugcuggaccaggcgcucgugagcgacgucggcgacagcgccgagguggccgugaagauguucgacgccuacgucaacaccuucuccagcaccuucaacgugccgauggagaagcugaagacccugguggccacggcggaggccgagcucgccaagaacgucucccuggacaacgugcugagcaccuucaucuccgccgcgcgccagggguucguggacagcgacgucgagaccaaggacgugguggagugccucaagcugucccaccagagcgacaucgaggucaccggcgacuccugcaacaacuacaugcugacguacaacaagguggagaacaugaccccccgggaccucggggccugcaucgacugcagcgcccgccacaucaacgcccagguggccaagucccacaacaucgcgcugaucuggaacgucaaggacuucaugagccuguccgagcagcuccggaagcagauccgcagcgccgccaagaagaacaaccugcccuucaagcugaccugcgccaccacgcgccagguggugaacgucgugaccaccaagaucgcccucaagggcgggugaggacuaguuauaagacugacuagcccgaugggccucccaacgggcccuccuccccuccuugcaccgagauuaauaaaaaaaaaaaaaaaaaaaaaaaaaaaaaaaaaaaaaaaaaaaaaaaaaaaaaaaaaaaaaaaaugcaucccccccccccccccccccccccccccccccaaaggcucuuuucagagccaccagaauu

SEQ ID NO: 21757 - RNA, 6058 nt, Artificial Sequence
  SARS-CoV-2__MT706356.1__non-structural protein 3 (NSP3) mRNA gc
aggagaaagcuuaccauggcccccaccaaggugaccuucggcgacgacacggucaucgaggugcagggguacaagagcgugaacaucaccuucgagcuggacgagcgcaucgacaagguccucaacgagaagugcuccgccuacaccguggagcugggcaccgaggugaacgaguucgcgugcgucguggccgacgccgugaucaagacgcugcagccggucagcgagcuccugaccccccuggggaucgaccucgacgagugguccauggccaccuacuaccuguucgacgagagcggcgaguucaagcuggccucccacauguacugcagcuucuacccccccgacgaggacgaggaggagggggacugcgaggaggaggaguucgagccguccacccaguacgaguacggcacggaggacgacuaccagggcaagccccucgaguucggggcgaccagcgccgcccugcagcccgaggaggagcaggaggaggacuggcuggacgacgacucccagcagaccgugggccagcaggacgggagcgaggacaaccagaccacgaccauccagaccaucguggagguccagccccagcucgagauggagcugaccccgguggugcagacgaucgaggucaacuccuucagcggcuaccugaagcucaccgacaacguguacaucaagaacgccgacaucguggaggaggcgaagaaggucaagcccaccgugguggucaacgccgccaacguguaccugaagcacgggggcggcguggccggggcccugaacaaggcgaccaacaacgccaugcaggucgaguccgacgacuacaucgccacgaacggcccccucaagguggggggcagcugcguccuguccggccacaaccuggccaagcacugccuccacgugguggggcccaacgucaacaagggcgaggacauccagcugcugaagagcgccuacgagaacuucaaccagcacgaggugcuccuggcgccgcugcucuccgccgggaucuucggcgccgaccccauccacagccugcgggugugcgucgacaccgugcgcaccaacguguaccuggccgucuucgacaagaaccucuacgacaagcugguguccagcuuccuggagaugaagagcgagaagcagguggagcagaagaucgccgagauccccaaggaggaggucaagcccuucaucaccgaguccaagccgagcguggagcagcggaagcaggacgacaagaagaucaaggcgugcguggaggaggucacgaccacccucgaggagaccaaguuccugacggagaaccugcuccuguacaucgacaucaacgggaaccugcaccccgacuccgccacccucgugagcgacaucgacaucaccuuccugaagaaggacgcccccuacaucgugggcgacgucgugcaggagggcgugcugaccgccgucgugauccccacgaagaaggccgggggcaccaccgagaugcucgcgaaggcccugcgcaaggugccgaccgacaacuacaucacgaccuaccccgggcagggccugaacggguacaccgucgaggaggccaagaccgugcucaagaagugcaaguccgccuucuacauccugcccagcaucaucuccaacgagaagcaggagauccugggcaccgugagcuggaaccuccgggagaugcuggcgcacgccgaggagacgcgcaagcugaugcccgucugcguggagaccaaggccaucguguccaccauccagcggaaguacaagggcaucaagauccaggagggggucguggacuacggcgcccgcuucuacuucuacaccagcaagacgaccguggccucccugaucaacacccucaacgaccugaacgagacccuggucacgaugccgcucggguacgugacccacggccugaaccuggaggaggcggcccgguacaugcgcagccucaaggugcccgccaccgucuccgugagcucccccgacgccgugaccgccuacaacggguaccugacgagcuccagcaagacccccgaggagcacuucaucgagaccaucucccuggcgggcagcuacaaggacuggagcuacuccggccagagcacccagcucgggaucgaguuccugaagcggggcgacaaguccgucuacuacacgagcaacccgaccaccuuccaccuggacggggaggugaucaccuucgacaaccucaagacgcugcugucccuccgcgaggugcggaccaucaaggucuucaccaccguggacaacaucaaccugcacacgcagguggucgacaugagcaugaccuacggccagcaguucggccccaccuaccuggacggggccgacgugaccaagaucaagccccacaacucccacgagggcaagacguucuacgugcucccgaacgacgacacccugcgcgucgaggccuucgaguacuaccacaccaccgaccccagcuuccuggggcgguacauguccgcccucaaccacacgaagaaguggaaguacccccaggugaacggccugaccagcaucaagugggccgacaacaacugcuaccuggcgaccgcccuccugacccugcagcagaucgagcucaaguucaaccccccggcccugcaggacgccuacuaccgcgcgcgggccggggaggccgccaacuucugcgcccugauccucgcguacugcaacaagacggugggcgagcugggcgacguccgcgagaccauguccuaccuguuccagcacgccaaccucgacagcugcaagcgggugcugaacgucgugugcaagaccugcgggcagcagcagaccacccugaagggcguggaggccgucauguacauggggacgcucuccuacgagcaguucaagaagggcgugcagauccccugcaccugcgggaagcaggccaccaaguaccuggugcagcaggagagccccuucgucaugauguccgcccccccggcgcaguacgagcugaagcacggcaccuucacgugcgccagcgaguacaccggcaacuaccagugcgggcacuacaagcacaucaccuccaaggagacccucuacugcaucgacggcgcccugcugacgaagagcagcgaguacaaggggcccaucaccgacguguucuacaaggagaacuccuacaccaccacgaucaagcccgugaccuacaagcucgacggcgucgugugcaccgagaucgaccccaagcuggacaacuacuacaagaaggacaacagcuacuucaccgagcagccgaucgaccuggugcccaaccagcccuaccccaacgccuccuucgacaacuucaaguucgucugcgacaacaucaaguucgccgacgaccucaaccagcugacgggguacaagaagccggcgagccgcgagcugaaggugaccuucuuccccgaccucaacggcgacguggucgccaucgacuacaagcacuacacccccuccuucaagaagggcgccaagcugcugcacaagcccaucguguggcacgugaacaacgccaccaacaaggcgacguacaagccgaacaccuggugcauccggugccucuggagcaccaagcccgucgagaccuccaacagcuucgacgugcugaaguccgaggacgcccaggggauggacaaccuggccugcgaggaccucaagcccgugagcgaggaggucguggagaaccccacgauccagaaggacgugcuggagugcaacgucaagaccaccgagguggugggcgacaucauccugaagccggccaacaacucccucaagaucaccgaggaggucgggcacacggaccugauggccgcguacguggacaacagcucccugaccaucaagaagcccaacgagcucagccgcgugcugggccugaagacccucgccacccacgggcuggccgccgucaacuccgugcccugggacacgaucgccaacuacgcgaagccguuccugaacaagguggucagcaccaccaccaacaucgugacgcgcugccucaaccgggugugcaccaacuacaugcccuacuucuucacccugcugcuccagcugugcaccuucacccgcuccacgaacagccggaucaaggccuccaugcccaccaccaucgccaagaacaccgucaagagcgugggcaaguucugccuggaggccagcuucaacuaccucaagucccccaacuucagcaagcugaucaacaucaucaucugguuccugcuccuguccgugugccugggcagccucaucuacuccacggccgcgcuggggguccugaugagcaaccucggcaugccguccuacugcaccggguaccgcgagggcuaccugaacagcaccaacgugaccaucgccacguacugcaccggcuccauccccugcagcgugugccuguccgggcucgacagccuggacaccuaccccucccuggagaccauccagaucacgaucagcuccuucaagugggaccucaccgccuucggccuggucgccgagugguuccuggccuacauccucuucacccgguucuucuacgugcuggggcuggcggccaucaugcagcucuuccugagcuacuucgccgugcacuucaucuccaacagcuggcugauguggcugaucaucaaccucguccagauggcccccaucuccgcgauggugcgcauguacaucuucuucgccagcuucuacuacguguggaagagcuacguccacgugguggacggcugcaacuccagcaccugcaugaugugcuacaagcggaaccgcgccacgcgggucgagugcaccaccaucgugaacgggguccgccgguccuucuacguguacgccaacggcggcaagggguucugcaagcugcacaacuggaacugcgugaacugcgacaccuucugcgccggcagcacguucaucuccgacgaggucgcgcgcgaccugagccuccaguucaagcggccgaucaaccccaccgaccaguccagcuacaucguggacuccgugaccgucaagaacgggagcauccaccuguacuucgacaaggccggccagaagaccuacgagcgccacucccugagccacuucgugaaccucgacaaccugcgggccaacaacacgaaggggucccugcccaucaacgugaucgucuucgacggcaagagcaagugcgaggaguccagcgccaaguccgccagcguguacuacucccagcucaugugccagcccauccugcugcucgaccaggcgcuggugagcgacgucggcgacagcgccgagguggccgugaagauguucgacgccuacgucaacaccuucuccagcaccuucaacgugccgauggagaagcugaagacccucguggccacggcggaggccgagcuggccaagaacgucucccuggacaacgugcucagcaccuucaucuccgccgcgcgccagggguucguggacagcgacgucgagaccaaggacgugguggagugccugaagcugucccaccagagcgacaucgaggucaccggcgacuccugcaacaacuacaugcucacguacaacaagguggagaacaugaccccccgggaccugggggccugcaucgacugcagcgcccgccacaucaacgcccagguggccaagucccacaacaucgcgcugaucuggaacgucaaggacuucaugagccucuccgagcagcugcggaagcagauccgcagcgccgccaagaagaacaaccugcccuucaagcucaccugcgccaccacgcgccagguggugaacgucgugaccaccaagaucgcccugaagggcgggugaggacuaguuauaagacugacuagcccgaugggccucccaacgggcccuccuccccuccuugcaccgagauuaauaaaaaaaaaaaaaaaaaaaaaaaaaaaaaaaaaaaaaaaaaaaaaaaaaaaaaaaaaaaaaaaaugcaucccccccccccccccccccccccccccccccaaaggcucuuuucagagccaccagaauu

SEQ ID NO: 21758 - RNA, 6058 nt, Artificial Sequence
  SARS-CoV-2__MT706369.1__non-structural protein 3 (NSP3) mRNA gc
aggagaaagcuuaccauggcccccaccaaggugaccuucggcgacgacacggucaucgaggugcagggguacaagagcgugaacaucaccuucgagcuggacgagcgcaucgacaagguccucaacgagaagugcuccgccuacaccguggagcugggcaccgaggugaacgaguucgcgugcgucguggccgacgccgugaucaagacgcugcagccggucagcgagcuccugaccccccuggggaucgaccucgacgagugguccauggccaccuacuaccuguucgacgagagcggcgaguucaagcuggccucccacauguacugcagcuucuacccccccgacgaggacgaggaggagggggacugcgaggaggcggaguucgagccguccacccaguacgaguacggcacggaggacgacuaccagggcaagccccucgaguucggggccaccagcgccgcccugcagcccgaggaggagcaggaggaggacuggcuggacgacgacucccagcagaccgugggccagcaggacgggagcgaggacaaccagaccacgaccauccagaccaucguggagguccagccccagcucgagauggagcugaccccgguggugcagacgaucgaggucaacuccuucagcggcuaccugaagcucaccgacaacguguacaucaagaacgcggacaucguggaggaggccaagaaggucaagcccaccgugguggucaacgccgccaacguguaccugaagcacgggggcggcguggccggggcgcugaacaaggccaccaacaacgccaugcaggucgaguccgacgacuacaucgccacgaacggcccccucaagguggggggcagcugcguccuguccggccacaaccuggccaagcacugccuccacgugguggggcccaacgucaacaagggcgaggacauccagcugcugaagagcgcguacgagaacuucaaccagcacgaggugcuccuggccccgcugcucuccgccgggaucuucggcgccgaccccauccacagccugcgggugugcgucgacaccgugcgcaccaacguguaccuggccgucuucgacaagaaccucuacgacaagcugguguccagcuuccuggagaugaagagcgagaagcagguggagcagaagaucgcggagauccccaaggaggaggucaagcccuucaucaccgaguccaagccgagcguggagcagcggaagcaggacgacaagaagaucaaggccugcguggaggaggucacgaccacccucgaggagaccaaguuccugacggagaaccugcuccuguacaucgacaucaacgggaaccugcaccccgacuccgccacccucgugagcgacaucgacaucaccuuccugaagaaggacgcccccuacaucgugggcgacgucgugcaggagggcgugcugaccgccgucgugauccccacgaagaaggcggggggcaccaccgagaugcucgccaaggcccugcgcaaggugccgaccgacaacuacaucacgaccuaccccgggcagggccugaacggguacaccgucgaggaggccaagaccgugcucaagaagugcaaguccgcguucuacauccugcccagcaucaucuccaacgagaagcaggagauccugggcaccgugagcuggaaccuccgggagaugcuggcccacgccgaggagacgcgcaagcugaugcccgucugcguggagaccaaggccaucguguccaccauccagcggaaguacaagggcaucaagauccaggagggggucguggacuacggcgcccgcuucuacuucuacaccagcaagacgaccguggcgucccugaucaacacccucaacgaccugaacgagacccuggucacgaugccgcucggguacgugacccacggccugaaccuggaggaggccgcccgguacaugcgcagccucaaggugcccgccaccgucuccgugagcucccccgacgccgugaccgcguacaacggguaccugacgagcuccagcaagacccccgaggagcacuucaucgagaccaucucccuggccggcagcuacaaggacuggagcuacuccggccagagcacccagcucgggaucgaguuccugaagcggggcgacaaguccgucuacuacacgagcaacccgaccaccuuccaccuggacggggaggugaucaccuucgacaaccucaagacgcugcugucccuccgcgaggugcggaccaucaaggucuucaccaccguggacaacaucaaccugcacacgcagguggucgacaugagcaugaccuacggccagcaguucggccccaccuaccuggacggggccgacgugaccaagaucaagccccacaacucccacgagggcaagacguucuacgugcucccgaacgacgacacccugcgcgucgaggccuucgaguacuaccacaccaccgaccccagcuuccuggggcgguacauguccgcccucaaccacacgaagaaguggaaguacccccaggugaacggccugaccagcaucaagugggcggacaacaacugcuaccuggccaccgcccuccugacccugcagcagaucgagcucaaguucaaccccccggcccugcaggacgcguacuaccgcgcccgggccggggaggccgccaacuucugcgcgcugauccucgccuacugcaacaagacggugggcgagcugggcgacguccgcgagaccauguccuaccuguuccagcacgccaaccucgacagcugcaagcgggugcugaacgucgugugcaagaccugcgggcagcagcagaccacccugaagggcguggaggccgucauguacauggggacgcucuccuacgagcaguucaagaagggcgugcagauccccugcaccugcgggaagcaggccaccaaguaccuggugcagcaggagagccccuucgucaugauguccgcgcccccggcccaguacgagcugaagcacggcaccuucacgugcgccagcgaguacaccggcaacuaccagugcgggcacuacaagcacaucaccuccaaggagacccucuacugcaucgacggcgcccugcugacgaagagcagcgaguacaaggggcccaucaccgacguguucuacaaggagaacuccuacaccaccacgaucaagcccgugaccuacaagcucgacggcgucgugugcaccgagaucgaccccaagcuggacaacuacuacaagaaggacaacagcuacuucaccgagcagccgaucgaccuggugcccaaccagcccuaccccaacgccuccuucgacaacuucaaguucgucugcgacaacaucaaguucgcggacgaccucaaccagcugacgggguacaagaagccggccagccgcgagcugaaggugaccuucuuccccgaccucaacggcgacguggucgccaucgacuacaagcacuacacccccuccuucaagaagggcgccaagcugcugcacaagcccaucguguggcacgugaacaacgcgaccaacaaggccacguacaagccgaacaccuggugcauccggugccucuggagcaccaagcccgucgagaccuccaacagcuucgacgugcugaaguccgaggacgcccaggggauggacaaccuggccugcgaggaccucaagcccgugagcgaggaggucguggagaaccccacgauccagaaggacgugcuggagugcaacgucaagaccaccgagguggugggcgacaucauccugaagccggccaacaacucccucaagaucaccgaggaggucgggcacacggaccugauggcggccuacguggacaacagcucccugaccaucaagaagcccaacgagcucagccgcgugcugggccugaagacccucgccacccacgggcuggccgccgucaacuccgugcccugggacacgaucgcgaacuacgccaagccguuccugaacaagguggucagcaccaccaccaacaucgugacgcgcugccucaaccgggugugcaccaacuacaugcccuacuucuucacccugcugcuccagcugugcaccuucacccgcuccacgaacagccggaucaaggccuccaugcccaccaccaucgccaagaacaccgucaagagcgugggcaaguucugccuggaggccagcuucaacuaccucaagucccccaacuucagcaagcugaucaacaucaucaucugguuccugcuccuguccgugugccugggcagccucaucuacuccacggcggcccuggggguccugaugagcaaccucggcaugccguccuacugcaccggguaccgcgagggcuaccugaacagcaccaacgugaccaucgccacguacugcaccggcuccauccccugcagcgugugccuguccgggcucgacagccuggacaccuaccccucccuggagaccauccagaucacgaucagcuccuucaagugggaccucaccgccuucggccuggucgccgagugguuccuggcguacauccucuucacccgguucuucuacgugcuggggcuggccgccaucaugcagcucuucuucagcuacuucgccgugcacuucaucuccaacagcuggcugauguggcugaucaucaaccugguccagauggcgcccaucuccgccauggugcgcauguacaucuucuucgccagcuucuacuacguguggaagagcuacguccacgugguggacggcugcaacuccagcaccugcaugaugugcuacaagcggaaccgcgccacgcgggucgagugcaccaccaucgugaacgggguccgccgguccuucuacguguacgccaacggcggcaagggguucugcaagcuccacaacuggaacugcgugaacugcgacaccuucugcgcgggcagcacguucaucuccgacgaggucgcccgcgaccugagccugcaguucaagcggccgaucaaccccaccgaccaguccagcuacaucguggacuccgugaccgucaagaacgggagcauccaccucuacuucgacaaggccggccagaagaccuacgagcgccacucccugagccacuucgugaaccuggacaaccuccgggccaacaacacgaaggggucccugcccaucaacgugaucgucuucgacggcaagagcaagugcgaggaguccagcgccaaguccgcgagcguguacuacucccagcugaugugccagcccauccuccugcuggaccaggcccucgugagcgacgucggcgacagcgccgagguggccgugaagauguucgacgccuacgucaacaccuucuccagcaccuucaacgugccgauggagaagcugaagacccugguggcgacggccgaggccgagcucgccaagaacgucucccuggacaacgugcugagcaccuucaucuccgcggcccgccagggguucguggacagcgacgucgagaccaaggacgugguggagugccucaagcugucccaccagagcgacaucgaggucaccggcgacuccugcaacaacuacaugcugacguacaacaagguggagaacaugaccccccgggaccucggggccugcaucgacugcagcgcccgccacaucaacgcccagguggcgaagucccacaacaucgcccugaucuggaacgucaaggacuucaugagccuguccgagcagcuccggaagcagauccgcagcgccgccaagaagaacaaccugcccuucaagcugaccugcgccaccacgcgccagguggugaacgucgugaccaccaagaucgcgcucaagggcgggugaggacuaguuauaagacugacuagcccgaugggccucccaacgggcccuccuccccuccuugcaccgagauuaauaaaaaaaaaaaaaaaaaaaaaaaaaaaaaaaaaaaaaaaaaaaaaaaaaaaaaaaaaaaaaaaaugcaucccccccccccccccccccccccccccccccaaaggcucuuuucagagccaccagaauu

SEQ ID NO: 21759 - RNA, 6058 nt, Artificial Sequence
  SARS-CoV-2__MT706386.1__non-structural protein 3 (NSP3) mRNA gc
aggagaaagcuuaccauggcccccaccaaggugaccuucggcgacgacacggucaucgaggugcagggguacaagagcgugaacaucaccuucgagcuggacgagcgcaucgacaagguccucaacgagaagugcuccgccuacaccguggagcugggcaccgaggugaacgaguucgcgugcgucguggccgacgccgugaucaagacgcugcagccggucagcgagcuccugaccccccuggggaucgaccucgacgagugguccauggccaccuacuaccuguucgacgagagcggcgaguucaagcuggccucccacauguacugcagcuucuacccccccgacgaggacgaggaggagggggacugcgaggaggaggaguucgagccguccacccaguacgaguacggcacggaggacgacuaccagggcaagccccucgaguucggggcgaccagcgccgcccugcagcccgaggaggagcaggaggaggacuggcuggacgacgacucccagcagaccgugggccagcaggacgggagcgaggacaaccagaccacgaccauccagaccaucguggagguccagccccagcucgagauggagcugaccccgguggugcagacgaucgaggucaacuccuucagcggcuaccugaagcucaccgacaacguguacaucaagaacgccgacaucguggaggaggcgaagaaggucaagcccaccgugguggucaacgccgccaacguguaccugaagcacgggggcggcguggccggggcccugaacaaggcgaccaacaacgccaugcaggucgaguccgacgacuacaucgccacgaacggcccccucaagguggggggcagcugcguccuguccggccacaaccuggccaagcacugccuccacgugguggggcccaacgucaacaagggcgaggacauccagcugcugaagagcgccuacgagaacuucaaccagcacgaggugcuccuggcgccgcugcucuccgccgggaucuucggcgccgaccccauccacagccugcgggugugcgucgacaccgugcgcaccaacguguaccuggccgucuucgacaagaaccucuacgacaagcugguguccagcuuccuggagaugaagagcgagaagcagguggagcagaagaucgccgagauccccaaggaggaggucaagcccuucaucaccgaguccaagccgagcguggagcagcggaagcaggacgacaagaagaucaaggcgugcguggaggaggucacgaccacccucgaggagaccaaguuccugacggagaaccugcuccuguacaucgacaucaacgggaaccugcaccccgacuccgccacccucgugagcgacaucgacaucaccuuccugaagaaggacgcccccuacaucgugggcgacgucgugcaggagggcgugcugaccgccgucgugauccccacgaagaaggccgggggcaccaccgagaugcucgcgaaggcccugcgcaaggugccgaccgacaacuacaucacgaccuaccccgggcagggccugaacggguacaccgucgaggaggccaagaccgugcucaagaagugcaaguccgccuucuacauccugcccagcaucaucuccaacgagaagcaggagauccugggcaccgugagcuggaaccuccgggagaugcuggcgcacgccgaggagacgcgcaagcugaugcccgucugcguggagaccaaggccaucguguccaccauccagcggaaguacaagggcaucaagauccaggagggggucguggacuacggcgcccgcuucuacuucuacaccagcaagacgaccguggccucccugaucaacacccucaacgaccugaacgagacccuggucacgaugccgcucggguacgugacccacggccugaaccuggaggaggcggcccgguacaugcgcagccucaaggugcccgccaccgucuccgugagcucccccgacgccgugaccgccuacaacggguaccugacgagcuccagcaagacccccgaggagcacuucaucgagaccaucucccuggcgggcagcuacaaggacuggagcuacuccggccagagcacccagcucggggucgaguuccugaagcggggcgacaaguccguguacuacacgagcaacccgaccaccuuccaccuggacggggaggugaucaccuucgacaaccucaagacgcugcugucccuccgcgagguccggaccaucaagguguucaccaccguggacaacaucaaccugcacacgcaggucguggacaugagcaugaccuacggccagcaguucggccccaccuaccuggacggggccgacgugaccaagaucaagccccacaacucccacgagggcaagacguucuacguccucccgaacgacgacacccugcgcguggaggccuucgaguacuaccacaccaccgaccccagcuuccuggggcgguacauguccgcccucaaccacacgaagaaguggaaguacccccaggugaacggccugaccagcaucaagugggccgacaacaacugcuaccuggcgaccgcccuccugacccugcagcagaucgagcucaaguucaaccccccggcccugcaggacgccuacuaccgcgcgcgggccggggaggccgccaacuucugcgcccugauccucgcguacugcaacaagacggucggcgagcugggcgacgugcgcgagaccauguccuaccuguuccagcacgccaaccucgacagcugcaagcggguccugaacguggugugcaagaccugcgggcagcagcagaccacccugaagggcgucgaggccgugauguacauggggacgcucuccuacgagcaguucaagaagggcgugcagauccccugcaccugcgggaagcaggccaccaaguaccugguccagcaggagagccccuucgugaugauguccgcccccccggcgcaguacgagcugaagcacggcaccuucacgugcgccagcgaguacaccggcaacuaccagugcgggcacuacaagcacaucaccuccaaggagacccucuacugcaucgacggcgcccugcugacgaagagcagcgaguacaaggggcccaucaccgacguguucuacaaggagaacuccuacaccaccacgaucaagcccgucaccuacaagcucgacggcguggugugcaccgagaucgaccccaagcuggacaacuacuacaagaaggacaacagcuacuucaccgagcagccgaucgaccugguccccaaccagcccuaccccaacgccuccuucgacaacuucaaguucgugugcgacaacaucaaguucgccgacgaccucaaccagcugacgggguacaagaagccggcgagccgcgagcugaaggugaccuucuuccccgaccucaacggcgacgucguggccaucgacuacaagcacuacacccccuccuucaagaagggcgccaagcugcugcacaagcccaucguguggcacgucaacaacgccaccaacaaggcgacguacaagccgaacaccuggugcauccggugccucuggagcaccaagcccguggagaccuccaacagcuucgacgugcugaaguccgaggacgcccaggggauggacaaccuggccugcgaggaccucaagcccgucagcgaggaggugguggagaaccccacgauccagaaggacguccuggagugcaacgugaagaccaccgagguggucggcgacaucauccugaagccggccaacaacucccucaagaucaccgaggagguggggcacacggaccugauggccgcguacguggacaacagcucccugaccaucaagaagcccaacgagcucagccgcguccugggccugaagacccucgccacccacgggcuggccgccgugaacuccgugcccugggacacgaucgccaacuacgcgaagccguuccugaacaaggucgugagcaccaccaccaacaucgugacgcgcugccucaaccgggucugcaccaacuacaugcccuacuucuucacccugcugcuccagcugugcaccuucacccgcuccacgaacagccggaucaaggccuccaugcccaccaccaucgccaagaacaccgugaagagcgugggcaaguucugccuggaggccagcuucaacuaccucaagucccccaacuucagcaagcugaucaacaucaucaucugguuccugcuccuguccgucugccugggcagccucaucuacuccacggccgcgcugggggugcugaugagcaaccucggcaugccguccuacugcaccggguaccgcgagggcuaccugaacagcaccaacgugaccaucgccacguacugcaccggcuccauccccugcagcgucugccuguccgggcucgacagccuggacaccuaccccucccuggagaccauccagaucacgaucagcuccuucaagugggaccucaccgccuucggccugguggccgagugguuccuggccuacauccucuucacccgguucuucuacgugcuggggcuggcggccaucaugcagcucuucuucagcuacuucgccguccacuucaucuccaacagcuggcugauguggcugaucaucaaccuggugcagauggcccccaucuccgcgauggugcgcauguacaucuucuucgccagcuucuacuacgucuggaagagcuacgugcacguggucgacggcugcaacuccagcaccugcaugaugugcuacaagcggaaccgcgccacgcggguggagugcaccaccaucgucaacggggugcgccgguccuucuacguguacgccaacggcggcaagggguucugcaagcuccacaacuggaacugcgucaacugcgacaccuucugcgccggcagcacguucaucuccgacgagguggcgcgcgaccugagccugcaguucaagcggccgaucaaccccaccgaccaguccagcuacaucguggacuccgucaccgugaagaacgggagcauccaccucuacuucgacaaggccggccagaagaccuacgagcgccacucccugagccacuucgugaaccuggacaaccuccgggccaacaacacgaaggggucccugcccaucaacgucaucguguucgacggcaagagcaagugcgaggaguccagcgccaaguccgccagcguguacuacucccagcugaugugccagcccauccuccugcuggaccaggcgcucgucagcgacgugggcgacagcgccgagguggccgucaagauguucgacgccuacgugaacaccuucuccagcaccuucaacgugccgauggagaagcugaagacccuggucgccacggcggaggccgagcucgccaagaacgugucccuggacaacgugcugagcaccuucaucuccgccgcgcgccagggguucgucgacagcgacguggagaccaaggacguggucgagugccucaagcugucccaccagagcgacaucgaggugaccggcgacuccugcaacaacuacaugcugacguacaacaagguggagaacaugaccccccgggaccucggggccugcaucgacugcagcgcccgccacaucaacgcccaggucgccaagucccacaacaucgcgcugaucuggaacgugaaggacuucaugagccuguccgagcagcuccggaagcagauccgcagcgccgccaagaagaacaaccugcccuucaagcugaccugcgccaccacgcgccagguggucaacguggugaccaccaagaucgcccucaagggcgggugaggacuaguuauaagacugacuagcccgaugggccucccaacgggcccuccuccccuccuugcaccgagauuaauaaaaaaaaaaaaaaaaaaaaaaaaaaaaaaaaaaaaaaaaaaaaaaaaaaaaaaaaaaaaaaaaugcaucccccccccccccccccccccccccccccccaaaggcucuuuucagagccaccagaauu

SEQ ID NO: 21760 - RNA, 6058 nt, Artificial Sequence
  SARS-CoV-2__MT706389.1__non-structural protein 3 (NSP3) mRNA gc
aggagaaagcuuaccauggcccccaccaaggugaccuucggcgacgacacggucaucgaggugcagggguacaagagcgugaacaucaccuucgagcuggacgagcgcaucgacaagguccucaacgagaagugcuccgccuacaccguggagcugggcaccgaggugaacgaguucgcgugcgucguggccgacgccgugaucaagacgcugcagccggucagcgagcuccugaccccccuggggaucgaccucgacgagugguccauggccaccuacuaccuguucgacgagagcggcgaguucaagcuggccucccacauguacugcagcuucuacccccccgacgaggacgaggaggagggggacugcgaggaggaggaguucgagccguccacccaguacgaguacggcacggaggacgacuaccagggcaagccccucgaguucggggcgaccagcgccgcccugcagcccgaggaggagcaggaggaggacuggcuggacgacgacucccagcagaccgugggccagcaggacgggagcgaggacaaccagaccacgaccauccagaccaucguggagguccagccccagcucgagauggagcugaccccgguggugcagacgaucgaggucaacuccuucagcggcuaccugaagcucaccgacaacguguacaucaagaacgccgacaucguggaggaggcgaagaaggucaagcccaccgugguggucaacgccgccaacguguaccugaagcacgggggcggcguggccggggcccugaacaaggcgaccaacaacgccaugcaggucgaguccgacgacuacaucgccacgaacggcccccucaagguggggggcagcugcguccuguccggccacaaccuggccaagcacugccuccacgugguggggcccaacgucaacaagggcgaggacauccagcugcugaagagcgccuacgagaacuucaaccagcacgaggugcuccuggcgccgcugcucuccgccgggaucuucggcgccgaccccauccacagccugcgggugugcgucgacaccgugcgcaccaacguguaccuggccgucuucgacaagaaccucuacgacaagcugguguccagcuuccuggagaugaagagcgagaagcagguggagcagaagaucgccgagauccccaaggaggaggucaagcccuucaucaccgaguccaagccgagcguggagcagcggaagcaggacgacaagaagaucaaggcgugcguggaggaggucacgaccacccucgaggagaccaaguuccugacggagaaccugcuccuguacaucgacaucaacgggaaccugcaccccgacuccgccacccucgugagcgacaucgacaucaccuuccugaagaaggacgcccccuacaucgugggcgacgucgugcaggagggcgugcugaccgccgucgugauccccacgaagaaggccgggggcaccaccgagaugcucgcgaaggcccugcgcaaggugccgaccgacaacuacaucacgaccuaccccgggcagggccugaacggguacaccgucgaggaggccaagaccgugcucaagaagugcaaguccgccuucuacauccugcccagcaucaucuccaacgagaagcaggagauccugggcaccgugagcuggaaccuccgggagaugcuggcgcacgccgaggagacgcgcaagcugaugcccgucugcguggagaccaaggccaucguguccaccauccagcggaaguacaagggcaucaagauccaggagggggucguggacuacggcgcccgcuucuacuucuacaccagcaagacgaccguggccucccugaucaacacccucaacgaccugaacgagacccuggucacgaugccgcucggguacgugacccacggccugaaccuggaggaggcggcccgguacaugcgcagccucaaggugcccgccaccgucuccgugagcucccccgacgccgugaccgccuacaacggguaccugacgagcuccagcaagacccccgaggagcacuucaucgagaccaucucccuggcgggcagcuacaaggacuggagcuacuccggccagagcacccagcucggggucgaguuccugaagcggggcgacaaguccguguacuacacgagcaacccgaccaccuuccaccuggacggggaggugaucaccuucgacaaccucaagacgcugcugucccuccgcgagguccggaccaucaagguguucaccaccguggacaacaucaaccugcacacgcaggucguggacaugagcaugaccuacggccagcaguucggccccaccuaccuggacggggccgacgugaccaagaucaagccccacaacucccacgagggcaagacguucuacguccucccgaacgacgacacccugcgcguggaggccuucgaguacuaccacaccaccgaccccagcuuccuggggcgguacauguccgcccucaaccacacgaagaaguggaaguacccccaggugaacggccugaccagcaucaagugggccgacaacaacugcuaccuggcgaccgcccuccugacccugcagcagaucgagcucaaguucaaccccccggcccugcaggacgccuacuaccgcgcgcgggccggggaggccgccaacuucugcgcccugauccucgcguacugcaacaagacggucggcgagcugggcgacgugcgcgagaccauguccuaccuguuccagcacgccaaccucgacagcugcaagcggguccugaacguggugugcaagaccugcgggcagcagcagaccacccugaagggcgucgaggccgugauguacauggggacgcucuccuacgagcaguucaagaagggcgugcagauccccugcaccugcgggaagcaggccaccaaguaccugguccagcaggagagccccuucgugaugauguccgcccccccggcgcaguacgagcugaagcacggcaccuucacgugcgccagcgaguacaccggcaacuaccagugcgggcacuacaagcacaucaccuccaaggagacccucuacugcaucgacggcgcccugcugacgaagagcagcgaguacaaggggcccaucaccgacguguucuacaaggagaacuccuacaccaccacgaucaagcccgucaccuacaagcucgacggcguggugugcaccgagaucgaccccaagcuggacaacuacuacaagaaggacaacagcuacuucaccgagcagccgaucgaccugguccccaaccagcccuaccccaacgccuccuucgacaacuucaaguucgugugcgacaacaucaaguucgccgacgaccucaaccagcugacgggguacaagaagccggcgagccgcgagcugaaggugaccuucuuccccgaccucaacggcgacgucguggccaucgacuacaagcacuacacccccuccuucaagaagggcgccaagcugcugcacaagcccaucguguggcacgucaacaacgccaccaacaaggcgacguacaagccgaacaccuggugcauccggugccucuggagcaccaagcccguggagaccuccaacagcuucgacgugcugaaguccgaggacgcccaggggauggacaaccuggccugcgaggaccucaagcccgucagcgaggaggugguggagaaccccacgauccagaaggacguccuggagugcaacgugaagaccaccgagguggucggcgacaucauccugaagccggccaacaacucccucaagaucaccgaggagguggggcacacggaccugauggccgcguacguggacaacagcucccugaccaucaagaagcccaacgagcucagccgcguccugggccugaagacccucgccacccacgggcuggccgccgugaacuccgugcccugggacacgaucgccaacuacgcgaagccguuccugaacaaggucgugagcaccaccaccaacaucgugacgcgcugccucaaccgggucugcaccaacuacaugcccuacuucuucacccugcugcuccagcugugcaccuucacccgcuccacgaacagccggaucaaggccuccaugcccaccaccaucgccaagaacaccgugaagagcgugggcaaguucugccuggaggccagcuucaacuaccucaagucccccaacuucagcaagcugaucaacaucaucaucugguuccugcuccuguccgucugccugggcagccucaucuacuccacggccgcgcugggggugcugaugagcaaccucggcaugccguccuacugcaccggguaccgcgagggcuaccugaacagcaccaacgugaccaucgccacguacugcaccggcuccauccccugcagcgucugccuguccgggcucgacagccuggacaccuaccccucccuggagaccauccagaucacgaucagcuccuucaagugggaccucaccgccuucggccugguggccgagugguuccuggccuacauccucuucacccgguucuucuacgugcuggggcuggcggccaucaugcagcucuucuucagcuacuucgccguccacuucaucuccaacagcuggcugauguggcugaucaucaaccuggugcagauggcccccaucuccgcgauggugcgcauguacaucuucuucgccagcuucuacuacgucuggaagagcuacgugcacguggucgacggcugcaacuccagcaccugcaugaugugcuacaagcggaaccgcgccacgcggguggagugcaccaccaucgucaacggggugcgccgguccuucuacguguacgccaacggcggcaagggguucugcaagcuccacaacuggaacugcgucaacugcgacaccuucugcgccggcagcacguucaucuccgacgagguggcgcgcgaccugagccugcaguucaagcggccgaucaaccccaccgaccaguccagcuacaucguggacuccgucaccgugaagaacgggagcauccaccucuacuucgacaaggccggccagaagaccuacgagcgccacucccugagccacuucgugaaccuggacaaccuccgggccaacaacacgaaggggucccugcccaucaacgucaucguguucgacggcaagagcaagugcgaggaguccagcgccaaguccgccagcguguacuacucccagcugaugugccagcccauccuccugcuggaccaggcgcucgucagcgacgugggcgacagcgccgagguggccgucaagauguucgacgccuacgugaacaccuucuccagcaccuucaacgugccgauggagaagcugaagacccuggucgccacggcggaggccgagcucgccaagaacgugucccuggacaacgugcugagcaccuucaucuccgccgcgcgccagggguucgucgacagcgacguggagaccaaggacguggucgagugccucaagcugucccaccagagcgacaucgaggugaccggcgacuccugcaacaacuacaugcugacguacaacaagguggagaacaugaccccccgggaccucggggccugcaucgacugcagcgcccgccacaucaacgcccaggucgccaagucccacaacaccgcgcugaucuggaacgugaaggacuucaugagccuguccgagcagcuccggaagcagauccgcagcgccgccaagaagaacaaccugcccuucaagcugaccugcgccacgacccgccagguggucaacguggugaccaccaagaucgcccucaagggcgggugaggacuaguuauaagacugacuagcccgaugggccucccaacgggcccuccuccccuccuugcaccgagauuaauaaaaaaaaaaaaaaaaaaaaaaaaaaaaaaaaaaaaaaaaaaaaaaaaaaaaaaaaaaaaaaaaugcaucccccccccccccccccccccccccccccccaaaggcucuuuucagagccaccagaauu

SEQ ID NO: 21761 - RNA, 6058 nt, Artificial Sequence
  SARS-CoV-2__MT706390.1__non-structural protein 3 (NSP3) mRNA gc
aggagaaagcuuaccauggcccccaccaaggugaccuucggcgacgacacggucaucgaggugcagggguacaagagcgugaacaucaccuucgagcuggacgagcgcaucgacaagguccucaacgagaagugcuccgccuacaccguggagcugggcaccgaggugaacgaguucgcgugcgucguggccgacgccgugaucaagacgcugcagccggucagcgagcuccugaccccccuggggaucgaccucgacgagugguccauggccaccuacuaccuguucgacgagagcggcgaguucaagcuggccucccacauguacugcagcuucuacccccccgacgaggacgaggaggagggggacugcgaggaggaggaguucgagccguccacccaguacgaguacggcacggaggacgacuaccagggcaagccccucgaguucggggcgaccagcgccgcccugcagcccgaggaggagcaggaggaggacuggcuggacgacgacucccagcagaccgugggccagcaggacgggagcgaggacaaccagaccacgaccauccagaccaucguggagguccagccccagcucgagauggagcugaccccgguggugcagacgaucgaggucaacuccuucagcggcuaccugaagcucaccgacaacguguacaucaagaacgccgacaucguggaggaggcgaagaaggucaagcccaccgugguggucaacgccgccaacguguaccugaagcacgggggcggcguggccggggcccugaacaaggcgaccaacaacgccaugcaggucgaguccgacgacuacaucgccacgaacggcccccucaagguggggggcagcugcguccuguccggccacaaccuggccaagcacugccuccacgugguggggcccaacgucaacaagggcgaggacauccagcugcugaagagcgccuacgagaacuucaaccagcacgaguuccuccuggcgccgcugcucuccgccgggaucuucggcgccgaccccauccacagccugcgggugugcguggacaccguccgcaccaacguguaccuggccguguucgacaagaaccucuacgacaagcuggucuccagcuuccuggagaugaagagcgagaagcagguggagcagaagaucgccgagauccccaaggaggaggugaagcccuucaucaccgaguccaagccgagcgucgagcagcggaagcaggacgacaagaagaucaaggcgugcguggaggaggugacgaccacccucgaggagaccaaguuccugacggagaaccugcuccuguacaucgacaucaacgggaaccugcaccccgacuccgccacccucgucagcgacaucgacaucaccuuccugaagaaggacgcccccuacaucgugggcgacgugguccaggagggcgugcugaccgccguggucauccccacgaagaaggccgggggcaccaccgagaugcucgcgaaggcccugcgcaaggugccgaccgacaacuacaucacgaccuaccccgggcagggccugaacggguacaccguggaggaggccaagaccguccucaagaagugcaaguccgccuucuacauccugcccagcaucaucuccaacgagaagcaggagauccugggcaccgugagcuggaaccuccgggagaugcuggcgcacgccgaggagacgcgcaagcugaugcccgugugcgucgagaccaaggccaucguguccaccauccagcggaaguacaagggcaucaagauccaggaggggguggucgacuacggcgcccgcuucuacuucuacaccagcaagacgaccguggccucccugaucaacacccucaacgaccugaacgagacccuggugacgaugccgcucggguacgucacccacggccugaaccuggaggaggcggcccgguacaugcgcagccucaaggugcccgccaccguguccgucagcucccccgacgccgugaccgccuacaacggguaccugacgagcuccagcaagacccccgaggagcacuucaucgagaccaucucccuggcgggcagcuacaaggacuggagcuacuccggccagagcacccagcucgggguggaguuccugaagcggggcgacaaguccgucuacuacacgagcaacccgaccaccuuccaccuggacggggaggugaucaccuucgacaaccucaagacgcugcugucccuccgcgaggugcggaccaucaaggucuucaccaccguggacaacaucaaccugcacacgcagguggucgacaugagcaugaccuacggccagcaguucggccccaccuaccuggacggggccgacgugaccaagaucaagccccacaacucccacgagggcaagacguucuacgugcucccgaacgacgacacccugcgcgucgaggccuucgaguacuaccacaccaccgaccccagcuuccuggggcgguacauguccgcccucaaccacacgaagaaguggaaguacccccaggugaacggccugaccagcaucaagugggccgacaacaacugcuaccuggcgaccgcccuccugacccugcagcagaucgagcucaaguucaaccccccggcccugcaggacgccuacuaccgcgcgcgggccggggaggccgccaacuucugcgcccugauccucgcguacugcaacaagacggugggcgagcugggcgacguccgcgagaccauguccuaccuguuccagcacgccaaccucgacagcugcaagcgggugcugaacgucgugugcaagaccugcgggcagcagcagaccacccugaagggcguggaggccgucauguacauggggacgcucuccuacgagcaguucaagaagggcgugcagauccccugcaccugcgggaagcaggccaccaaguaccuggugcagcaggagagccccuucgucaugauguccgcccccccggcgcaguacgagcugaagcacggcaccuucacgugcgccagcgaguacaccggcaacuaccagugcgggcacuacaagcacaucaccuccaaggagacccucuacugcaucgacggcgcccugcugacgaagagcagcgaguacaaggggcccaucaccgacguguucuacaaggagaacuccuacaccaccacgaucaagcccgugaccuacaagcucgacggcgucgugugcaccgagaucgaccccaagcuggacaacuacuacaagaaggacaacagcuacuucaccgagcagccgaucgaccuggugcccaaccagcccuaccccaacgccuccuucgacaacuucaaguucgucugcgacaacaucaaguucgccgacgaccucaaccagcugacgggguacaagaagccggcgagccgcgagcugaaggugaccuucuuccccgaccucaacggcgacguggucgccaucgacuacaagcacuacacccccuccuucaagaagggcgccaagcugcugcacaagcccaucguguggcacgugaacaacgccaccaacaaggcgacguacaagccgaacaccuggugcauccggugccucuggagcaccaagcccgucgagaccuccaacagcuucgacgugcugaaguccgaggacgcccaggggauggacaaccuggccugcgaggaccucaagcccgugagcgaggaggucguggagaaccccacgauccagaaggacgugcuggagugcaacgucaagaccaccgagguggugggcgacaucauccugaagccggccaacaacucccucaagaucaccgaggaggucgggcacacggaccugauggccgcguacguggacaacagcucccugaccaucaagaagcccaacgagcucagccgcgugcugggccugaagacccucgccacccacgggcuggccgccgucaacuccgugcccugggacacgaucgccaacuacgcgaagccguuccugaacaagguggucagcaccaccaccaacaucgugacgcgcugccucaaccgggugugcaccaacuacaugcccuacuucuucacccugcugcuccagcugugcaccuucacccgcuccacgaacagccggaucaaggccuccaugcccaccaccaucgccaagaacaccgucaagagcgugggcaaguucugccuggaggccagcuucaacuaccucaagucccccaacuucagcaagcugaucaacaucaucaucugguuccugcuccuguccgugugccugggcagccucaucuacuccacggccgcgcuggggguccugaugagcaaccucggcaugccguccuacugcaccggguaccgcgagggcuaccugaacagcaccaacgugaccaucgccacguacugcaccggcuccauccccugcagcgugugccuguccgggcucgacagccuggacaccuaccccucccuggagaccauccagaucacgaucagcuccuucaagugggaccucaccgccuucggccuggucgccgagugguuccuggccuacauccucuucacccgguucuucuacgugcuggggcuggcggccaucaugcagcucuucuucagcuacuucgccgugcacuucaucuccaacagcuggcugauguggcugaucaucaaccugguccagauggcccccaucuccgcgauggugcgcauguacaucuucuucgccagcuucuacuacguguggaagagcuacguccacgugguggacggcugcaacuccagcaccugcaugaugugcuacaagcggaaccgcgccacgcgggucgagugcaccaccaucgugaacgggguccgccgguccuucuacguguacgccaacggcggcaagggguucugcaagcuccacaacuggaacugcgugaacugcgacaccuucugcgccggcagcacguucaucuccgacgaggucgcgcgcgaccugagccugcaguucaagcggccgaucaaccccaccgaccaguccagcuacaucguggacuccgugaccgucaagaacgggagcauccaccucuacuucgacaaggccggccagaagaccuacgagcgccacucccugagccacuucgugaaccuggacaaccuccgggccaacaacacgaaggggucccugcccaucaacgugaucgucuucgacggcaagagcaagugcgaggaguccagcgccaaguccgccagcguguacuacucccagcugaugugccagcccauccuccugcuggaccaggcgcucgugagcgacgucggcgacagcgccgagguggccgugaagauguucgacgccuacgucaacaccuucuccagcaccuucaacgugccgauggagaagcugaagacccugguggccacggcggaggccgagcucgccaagaacgucucccuggacaacgugcugagcaccuucaucuccgccgcgcgccagggguucguggacagcgacgucgagaccaaggacgugguggagugccucaagcugucccaccagagcgacaucgaggucaccggcgacuccugcaacaacuacaugcugacguacaacaagguggagaacaugaccccccgggaccucggggccugcaucgacugcagcgcccgccacaucaacgcccagguggccaagucccacaacaucgcgcugaucuggaacgucaaggacuucaugagccuguccgagcagcuccggaagcagauccgcagcgccgccaagaagaacaaccugcccuucaagcugaccugcgccaccacgcgccagguggugaacgucgugaccaccaagaucgcccucaagggcgggugaggacuaguuauaagacugacuagcccgaugggccucccaacgggcccuccuccccuccuugcaccgagauuaauaaaaaaaaaaaaaaaaaaaaaaaaaaaaaaaaaaaaaaaaaaaaaaaaaaaaaaaaaaaaaaaaugcaucccccccccccccccccccccccccccccccaaaggcucuuuucagagccaccagaauu

SEQ ID NO: 21762 - RNA, 6058 nt, Artificial Sequence
  SARS-CoV-2__MT706403.1__non-structural protein 3 (NSP3) mRNA gc
aggagaaagcuuaccauggcccccaccaaggugaccuucggcgacgacacggucaucgaggugcagggguacaagagcgugaacaucaccuucgagcuggacgagcgcaucgacaagguccucaacgagaagugcuccgccuacaccguggagcugggcaccgaggugaacgaguucgcgugcgucguggccgacgccgugaucaagacgcugcagccggucagcgagcuccugaccccccuggggaucgaccucgacgagugguccauggccaccuacuaccuguucgacgagagcggcgaguucaagcuggccucccacauguacugcagcuucuacccccccgacgaggacgaggaggagggggacugcgaggaggaggaguucgagccguccacccaguacgaguacggcacggaggacgacuaccagggcaagccccucgaguucggggcgaccagcgccgcccugcagcccgaggaggagcaggaggaggacuggcuggacgacgacucccagcagaccgugggccagcaggacgggagcgaggacaaccagaccacgaccauccagaccaucguggagguccagccccagcucgagauggagcugaccccgguggugcagacgaucgaggucaacuccuucagcggcuaccugaagcucaccgacaacguguacaucaagaacgccgacaucguggaggaggcgaagaaggucaagcccaccgugguggucaacgccgccaacguguaccugaagcacgggggcggcguggccggggcccugaacaaggcgaccaacaacgccaugcaggucgaguccgacgacuacaucgccacgaacggcccccucaagguggggggcagcugcguccuguccggccacaaccuggccaagcacugccuccacgugguggggcccaacgucaacaagggcgaggacauccaguuccugaagagcgccuacgagaacuucaaccagcacgaggugcugcucgcgccgcugcuguccgccgggaucuucggcgccgaccccauccacagccuccgggugugcgucgacaccgugcgcaccaacguguaccuggccgucuucgacaagaaccuguacgacaagcucguguccagcuuccuggagaugaagagcgagaagcagguggagcagaagaucgccgagauccccaaggaggaggucaagcccuucaucaccgaguccaagccgagcguggagcagcggaagcaggacgacaagaagaucaaggcgugcguggaggaggucacgaccacccuggaggagaccaaguuccucacggagaaccugcugcucuacaucgacaucaacgggaaccugcaccccgacuccgccacccuggugagcgacaucgacaucaccuuccucaagaaggacgcccccuacaucgugggcgacgucgugcaggagggcgugcugaccgccgucgugauccccacgaagaaggccgggggcaccaccgagaugcuggcgaaggcccuccgcaaggugccgaccgacaacuacaucacgaccuaccccgggcagggccugaacggguacaccgucgaggaggccaagaccgugcugaagaagugcaaguccgccuucuacauccuccccagcaucaucuccaacgagaagcaggagauccugggcaccgugagcuggaaccugcgggagaugcucgcgcacgccgaggagacgcgcaagcugaugcccgucugcguggagaccaaggccaucguguccaccauccagcggaaguacaagggcaucaagauccaggagggggucguggacuacggcgcccgcuucuacuucuacaccagcaagacgaccguggccucccugaucaacacccugaacgaccucaacgagacccuggucacgaugccgcugggguacgugacccacggccucaaccuggaggaggcggcccgguacaugcgcagccugaaggugcccgccaccgucuccgugagcucccccgacgccgugaccgccuacaacggguaccucacgagcuccagcaagacccccgaggagcacuucaucgagaccaucucccuggcgggcagcuacaaggacuggagcuacuccggccagagcacccagcuggggaucgaguuccucaagcggggcgacaaguccgucuacuacacgagcaacccgaccaccuuccaccuggacggggaggugaucaccuucgacaaccugaagacgcuccugucccugcgcgaggugcggaccaucaaggucuucaccaccguggacaacaucaaccuccacacgcagguggucgacaugagcaugaccuacggccagcaguucggccccaccuaccuggacggggccgacgugaccaagaucaagccccacaacucccacgagggcaagacguucuacgugcugccgaacgacgacacccuccgcgucgaggccuucgaguacuaccacaccaccgaccccagcuuccuggggcgguacauguccgcccugaaccacacgaagaaguggaaguacccccaggugaacggccucaccagcaucaagugggccgacaacaacugcuaccuggcgaccgcccugcucacccugcagcagaucgagcugaaguucaaccccccggcccuccaggacgccuacuaccgcgcgcgggccggggaggccgccaacuucugcgcccugauccuggcguacugcaacaagacggugggcgagcucggcgacguccgcgagaccauguccuaccuguuccagcacgccaaccuggacagcugcaagcgggugcucaacgucgugugcaagaccugcgggcagcagcagaccacccugaagggcguggaggccgucauguacauggggacgcuguccuacgagcaguucaagaagggcgugcagauccccugcaccugcgggaagcaggccaccaaguaccucgugcagcaggagagccccuucgucaugauguccgcccccccggcgcaguacgagcugaagcacggcaccuucacgugcgccagcgaguacaccggcaacuaccagugcgggcacuacaagcacaucaccuccaaggagacccuguacugcaucgacggcgcccuccugacgaagagcagcgaguacaaggggcccaucaccgacguguucuacaaggagaacuccuacaccaccacgaucaagcccgugaccuacaagcuggacggcgucgugugcaccgagaucgaccccaagcucgacaacuacuacaagaaggacaacagcuacuucaccgagcagccgaucgaccuggugcccaaccagcccuaccccaacgccuccuucgacaacuucaaguucgucugcgacaacaucaaguucgccgacgaccugaaccagcucacgggguacaagaagccggcgagccgcgagcugaaggugaccuucuuccccgaccugaacggcgacguggucgccaucgacuacaagcacuacacccccuccuucaagaagggcgccaagcuccugcacaagcccaucguguggcacgugaacaacgccaccaacaaggcgacguacaagccgaacaccuggugcauccggugccuguggagcaccaagcccgucgagaccuccaacagcuucgacgugcucaaguccgaggacgcccaggggauggacaaccuggccugcgaggaccugaagcccgugagcgaggaggucguggagaaccccacgauccagaaggacgugcucgagugcaacgucaagaccaccgagguggugggcgacaucauccugaagccggccaacaacucccugaagaucaccgaggaggucgggcacacggaccucauggccgcguacguggacaacagcucccugaccaucaagaagcccaacgagcugagccgcgugcucggccugaagacccuggccacccacgggcucgccgccgucaacuccgugcccugggacacgaucgccaacuacgcgaagccguuccugaacaagguggucagcaccaccaccaacaucgugacgcgcugccugaaccgggugugcaccaacuacaugcccuacuucuucacccuccugcugcagcucugcaccuucacccgcuccacgaacagccggaucaaggccuccaugcccaccaccaucgccaagaacaccgucaagagcgugggcaaguucugccuggaggccagcuucaacuaccugaagucccccaacuucagcaagcucaucaacaucaucaucugguuccugcugcucuccgugugccugggcagccugaucuacuccacggccgcgcucgggguccugaugagcaaccugggcaugccguccuacugcaccggguaccgcgagggcuaccucaacagcaccaacgugaccaucgccacguacugcaccggcuccauccccugcagcgugugccuguccgggcuggacagccucgacaccuaccccucccuggagaccauccagaucacgaucagcuccuucaagugggaccugaccgccuucggccucgucgccgagugguuccuggccuacauccuguucacccgguucuucuacgugcucgggcuggcggccaucaugcagcuguucuucagcuacuucgccgugcacuucaucuccaacagcuggcucauguggcugaucaucaaccugguccagauggcccccaucuccgcgauggugcgcauguacaucuucuucgccagcuucuacuacguguggaagagcuacguccacgugguggacggcugcaacuccagcaccugcaugaugugcuacaagcggaaccgcgccacgcgggucgagugcaccaccaucgugaacgggguccgccgguccuucuacguguacgccaacggcggcaagggguucugcaagcugcacaacuggaacugcgugaacugcgacaccuucugcgccggcagcacguucaucuccgacgaggucgcgcgcgaccucagccugcaguucaagcggccgaucaaccccaccgaccaguccagcuacaucguggacuccgugaccgucaagaacgggagcauccaccuguacuucgacaaggccggccagaagaccuacgagcgccacucccucagccacuucgugaaccuggacaaccugcgggccaacaacacgaaggggucccuccccaucaacgugaucgucuucgacggcaagagcaagugcgaggaguccagcgccaaguccgccagcguguacuacucccagcugaugugccagcccauccugcuccuggaccaggcgcuggugagcgacgucggcgacagcgccgagguggccgugaagauguucgacgccuacgucaacaccuucuccagcaccuucaacgugccgauggagaagcucaagacccugguggccacggcggaggccgagcuggccaagaacgucucccucgacaacgugcugagcaccuucaucuccgccgcgcgccagggguucguggacagcgacgucgagaccaaggacgugguggagugccugaagcucucccaccagagcgacaucgaggucaccggcgacuccugcaacaacuacaugcugacguacaacaagguggagaacaugaccccccgggaccugggggccugcaucgacugcagcgcccgccacaucaacgcccagguggccaagucccacaacaucgcgcucaucuggaacgucaaggacuucaugagccuguccgagcagcugcggaagcagauccgcagcgccgccaagaagaacaaccuccccuucaagcugaccugcgccaccacgcgccagguggugaacgucgugaccaccaagaucgcccugaagggcgggugaggacuaguuauaagacugacuagcccgaugggccucccaacgggcccuccuccccuccuugcaccgagauuaauaaaaaaaaaaaaaaaaaaaaaaaaaaaaaaaaaaaaaaaaaaaaaaaaaaaaaaaaaaaaaaaaugcaucccccccccccccccccccccccccccccccaaaggcucuuuucagagccaccagaauu

SEQ ID NO: 21763 - RNA, 6058 nt, Artificial Sequence
  SARS-CoV-2__MT706406.1__non-structural protein 3 (NSP3) mRNA gc
aggagaaagcuuaccauggcccccaccaaggugaccuucggcgacgacacggucaucgaggugcagggguacaagagcgugaacaucaccuucgagcuggacgagcgcaucgacaagguccucaacgagaagugcuccgccuacaccguggagcugggcaccgaggugaacgaguucgcgugcgucguggccgacgccgugaucaagacgcugcagccggucagcgagcuccugaccccccuggggaucgaccucgacgagugguccauggccaccuacuaccuguucgacgagagcggcgaguucaagcuggccucccacauguacugcagcuucuacccccccgacgaggacgaggaggagggggacugcgaggaggaggaguucgagccguccacccaguacgaguacggcacggaggacgacuaccagggcaagccccucgaguucggggcgaccagcgccgcccugcagcccgaggaggagcaggaggaggacuggcuggacgacgacucccagcagaccgugggccagcaggacgggagcgaggacaaccagaccacgaccauccagaccaucguggagguccagccccagcucgagauggagcugaccccgguggugcagacgaucgaggucaacuccuucagcggcuaccugaagcucaccgacaacguguacaucaagaacgccgacaucguggaggaggcgaagaaggucaagcccaccgugguggucaacgccgccaacguguaccugaagcacgggggcggcguggccggggcccugaacaaggcgaccaacaacgccaugcaggucgaguccgacgacuacaucgccacgaacggcccccucaagguggggggcagcugcguccuguccggccacaaccuggccaagcacugccuccacgugguggggcccaacgucaacaagggcgaggacauccagcugcugaagagcgccuacgagaacuucaaccagcacgaggugcuccuggcgccgcugcucuccgccgggaucuucggcgccgaccccauccacagccugcgggugugcgucgacaccgugcgcaccaacguguaccuggccgucuucgacaagaaccucuacgacaagcugguguccagcuuccuggagaugaagagcgagaagcagguggagcagaagaucgccgagauccccaaggaggaggucaagcccuucaucaccgaguccaagccgagcguggagcagcggaagcaggacgacaagaagaucaaggcgugcguggaggaggucacgaccacccucgaggagaccaaguuccugacggagaaccugcuccuguacaucgacaucaacgggaaccugcaccccgacuccgccacccucgugagcgacaucgacaucaccuuccugaagaaggacgcccccuacaucgugggcgacgucgugcaggagggcgugcugaccgccgucgugauccccacgaagaaggccgggggcaccaccgagaugcucgcgaaggcccugcgcaaggugccgaccgacaacuacaucacgaccuaccccgggcagggccugaacggguacaccgucgaggaggccaagaccgugcucaagaagugcaaguccgccuucuacauccugcccagcaucaucuccaacgagaagcaggagauccugggcaccgugagcuggaaccuccgggagaugcuggcgcacgccgaggagacgcgcaagcugaugcccgucugcguggagaccaaggccaucguguccaccauccagcggaaguacaagggcaucaagauccaggagggggucguggacuacggcgcccgcuucuacuucuacaccagcaagacgaccguggccucccugaucaacacccucaacgaccugaacgagacccuggucacgaugccgcucggguacgugacccacggccugaaccuggaggaggcggcccgguacaugcgcagccucaaggugcccgccaccgucuccgugagcucccccgacgccgugaccgccuacaacggguaccugacgagcuccagcaagacccccgaggagcacuucaucgagaccaucucccuggcgggcagcuacaaggacuggagcuacuccggccagagcacccagcucggggucgaguuccugaagcggggcgacaaguccguguacuacacgagcaacccgaccaccuuccaccuggacggggaggugaucaccuucgacaaccucaagacgcugcugucccuccgcgagguccggaccaucaagguguucaccaccguggacaacaucaaccugcacacgcaggucguggacaugagcaugaccuacggccagcaguucggccccaccuaccuggacggggccgacgugaccaagaucaagccccacaacucccacgagggcaagacguucuacguccucccgaacgacgacacccugcgcguggaggccuucgaguacuaccacaccaccgaccccagcuuccuggggcgguacauguccgcccucaaccacacgaagaaguggaaguacccccaggugaacggccugaccagcaucaagugggccgacaacaacugcuaccuggcgaccgcccuccugacccugcagcagaucgagcucaaguucaaccccccggcccugcaggacgccuacuaccgcgcgcgggccggggaggccgccaacuucugcgcccugauccucgcguacugcaacaagacggucggcgagcugggcgacgugcgcgagaccauguccuaccuguuccagcacgccaaccucgacagcugcaagcggguccugaacguggugugcaagaccugcgggcagcagcagaccacccugaagggcgucgaggccgugauguacauggggacgcucuccuacgagcaguucaagaagggcgugcagauccccugcaccugcgggaagcaggccaccaaguaccugguccagcaggagagccccuucgugaugauguccgcccccccggcgcaguacgagcugaagcacggcaccuucacgugcgccagcgaguacaccggcaacuaccagugcgggcacuacaagcacaucaccuccaaggagacccucuacugcaucgacggcgcccugcugacgaagagcagcgaguacaaggggcccaucaccgacguguucuacaaggagaacuccuacaccaccacgaucaagcccgucaccuacaagcucgacggcguggugugcaccgagaucgaccccaagcuggacaacuacuacaagaaggacaacagcuacuucaccgagcagccgaucgaccugguccccaaccagcccuaccccaacgccuccuucgacaacuucaaguucgugugcgacaacaucaaguucgccgacgaccucaaccagcugacgggguacaagaagccggcgagccgcgagcugaaggugaccuucuuccccgaccucaacggcgacgucguggccaucgacuacaagcacuacacccccuccuucaagaagggcgccaagcugcugcacaagcccaucguguggcacgucaacaacgccaccaacaaggcgacguacaagccgaacaccuggugcauccggugccucuggagcaccaagcccguggagaccuccaacagcuucgacgugcugaaguccgaggacgcccaggggauggacaaccuggccugcgaggaccucaagcccgucagcgaggaggugguggagaaccccacgauccagaaggacguccuggagugcaacgugaagaccaccgagguggucggcgacaucauccugaagccggccaacaacucccucaagaucaccgaggagguggggcacacggaccugauggccgcguacguggacaacagcucccugaccaucaagaagcccaacgagcucagccgcguccugggccugaagacccucgccacccacgggcuggccgccgugaacuccgugcccugggacacgaucgccaacuacgcgaagccguuccugaacaaggucgugagcaccaccaccaacaucgugacgcgcugccucaaccgggucugcaccaacuacaugcccuacuucuucacccugcugcuccagcugugcaccuucacccgcuccacgaacagccggaucaaggccuccaugcccaccaccaucgccaagaacaccgugaagagcgugggcaaguucugccuggaggccagcuucaacuaccucaagucccccaacuucagcaagcugaucaacaucaucaucugguuccugcuccuguccgucugccugggcagccucaucuacuccacggccgcgcugggggugcugaugagcaaccucggcaugccguccuacugcaccggguaccgcgagggcuaccugaacagcaccaacgugaccaucgccacguacugcaccggcuccauccccugcagcgucugccuguccgggcucgacagccuggacaccuaccccucccuggagaccauccagaucacgaucagcuccuucaagugggaccucaccgccuucggccugguggccgagugguuccuggccuacauccucuucacccgguucuucuacgugcuggggcuggcggccaucaugcagcucuucuucagcuacuucgccguccacuucaucuccaacagcuggcugauguggcugaucaucaaccuggugcagauggcccccaucuccgcgauggugcgcauguacaucuucuucgccagcuucuacuacgucuggaagagcuacgugcacguggucgacggcugcaacuccagcaccugcaugaugugcuacaagcggaaccgcgccacgcggguggagugcaccaccaucgucaacggggugcgccgguccuucuacguguacgccaacggcggcaagggguucugcaagcuccacaacuggaacugcgucaacugcgacaccuucugcgccggcagcacguucaucuccgacgagguggcgcgcgaccugagccugcaguucaagcggccgaucaaccccaccgaccaguccuucuacaucguggacagcgucaccgugaagaacggguccauccaccucuacuucgacaaggccggccagaagaccuacgagcgccacagccugucccacuucgugaaccuggacaaccuccgggccaacaacacgaaggggagccugcccaucaacgucaucguguucgacggcaaguccaagugcgaggagagcuccgccaagagcgccuccguguacuacagccagcugaugugccagcccauccuccugcuggaccaggcgcucgucuccgacgugggcgacagcgccgagguggccgucaagauguucgacgccuacgugaacaccuucagcuccaccuucaacgugccgauggagaagcugaagacccuggucgccacggcggaggccgagcucgccaagaacgugagccuggacaacgugcuguccaccuucaucagcgccgcgcgccagggguucgucgacuccgacguggagaccaaggacguggucgagugccucaagcugagccaccaguccgacaucgaggugaccggcgacagcugcaacaacuacaugcugacguacaacaagguggagaacaugaccccccgggaccucggggccugcaucgacugcuccgcccgccacaucaacgcccaggucgccaagagccacaacaucgcgcugaucuggaacgugaaggacuucaugucccugagcgagcagcuccggaagcagauccgcuccgccgccaagaagaacaaccugcccuucaagcugaccugcgccaccacgcgccagguggucaacguggugaccaccaagaucgcccucaagggcgggugaggacuaguuauaagacugacuagcccgaugggccucccaacgggcccuccuccccuccuugcaccgagauuaauaaaaaaaaaaaaaaaaaaaaaaaaaaaaaaaaaaaaaaaaaaaaaaaaaaaaaaaaaaaaaaaaugcaucccccccccccccccccccccccccccccccaaaggcucuuuucagagccaccagaauu

SEQ ID NO: 21764 - RNA, 6058 nt, Artificial Sequence
  SARS-CoV-2__MT706427.1__non-structural protein 3 (NSP3) mRNA gc
aggagaaagcuuaccauggcccccaccaaggugaccuucggcgacgacacggucaucgaggugcagggguacaagagcgugaacaucaccuucgagcuggacgagcgcaucgacaagguccucaacgagaagugcuccgccuacaccguggagcugggcaccgaggugaacgaguucgcgugcgucguggccgacgccgugaucaagacgcugcagccggucagcgagcuccugaccccccuggggaucgaccucgacgagugguccauggccaccuacuaccuguucgacgagagcggcgaguucaagcuggccucccacauguacugcagcuucuacccccccgacgaggacgaggaggagggggacugcgaggaggaggaguucgagccguccacccaguacgaguacggcacggaggacgacuaccagggcaagccccucgaguucggggcgaccagcgccgcccugcagcccgaggaggagcaggaggaggacuggcuggacgacgacucccagcagaccgugggccagcaggacgggagcgaggacaaccagaccacgaccauccagaccaucguggagguccagccccagcucgagauggagcugaccccgguggugcagacgaucgaggucaacuccuucagcggcuaccugaagcucaccgacaacguguacaucaagaacgccgacaucguggaggaggcgaagaaggucaagcccaccgugguggucaacgccgccaacguguaccugaagcacgggggcggcguggccggggcccugaacaaggcgaccaacaacgccaugcaggucgaguccgacgacuacaucgccacgaacggcccccucaagguggggggcagcugcguccuguccggccacaaccuggccaagcacugccuccacgugguggggcccaacgucaacaagggcgaggacauccagcugcugaagagcgccuacgagaacuucaaccagcacgaggugcuccuggcgccgcugcucuccgccgggaucuucggcgccgaccccauccacagccugcgggugugcgucgacaccgugcgcaccaacguguaccuggccgucuucgacaagaaccucuacgacaagcugguguccagcuuccuggagaugaagagcgagaagcagguggagcagaacaucgccgagauccccaaggaggaggucaagcccuucaucaccgaguccaagccgagcguggagcagcggaagcaggacgacaagaagaucaaggcgugcguggaggaggucacgaccacccucgaggagaccaaguuccugacggagaaccugcuccuguacaucgacaucaacgggaaccugcaccccgacuccgccacccucgugagcgacaucgacaucaccuuccugaagaaggacgcccccuacaucgugggcgacgucgugcaggagggcgugcugaccgccgucgugauccccacgaagaaggccgggggcaccaccgagaugcucgcgaaggcccugcgcaagguguccaccgacaacuacaucacgaccuacccggggcagggccugaacggguacaccgucgaggaggccaagaccgugcucaagaagugcaagagcgccuucuacauccugcccuccaucaucagcaacgagaagcaggagauccugggcaccguguccuggaaccuccgggagaugcuggcgcacgccgaggagacgcgcaagcugaugcccgucugcguggagaccaaggccaucgugagcaccauccagcggaaguacaagggcaucaagauccaggagggggucguggacuacggcgcccgcuucuacuucuacaccuccaagacgaccguggccagccugaucaacacccucaacgaccugaacgagacccuggucacgaugccccucggguacgugacccacggccugaaccuggaggaggcggcccgguacaugcgcucccucaaggugccggccaccgucagcguguccagccccgacgccgugaccgccuacaacggguaccugacguccagcuccaagacccccgaggagcacuucaucgagaccaucagccuggcgggcagcuacaaggacugguccuacagcggccaguccacccagcucgggaucgaguuccugaagcggggcgacaagagcgucuacuacacguccaaccccaccaccuuccaccuggacggggaggugaucaccuucgacaaccucaagacgcugcugagccuccgcgaggugcggaccaucaaggucuucaccaccguggacaacaucaaccugcacacgcagguggucgacauguccaugaccuacggccagcaguucggcccgaccuaccuggacggggccgacgugaccaagaucaagccccacaacagccacgagggcaagacguucuacgugcuccccaacgacgacacccugcgcgucgaggccuucgaguacuaccacaccaccgacccguccuuccuggggcgguacaugagcgcccucaaccacacgaagaaguggaaguacccccaggugaacggccugaccuccaucaagugggccgacaacaacugcuaccuggcgaccgcccuccugacccugcagcagaucgagcucaaguucaacccccccgcccugcaggacgccuacuaccgcgcgcgggccggggaggccgccaacuucugcgcccugauccucgcguacugcaacaagacggugggcgagcugggcgacguccgcgagaccaugagcuaccuguuccagcacgccaaccucgacuccugcaagcgggugcugaacgucgugugcaagaccugcgggcagcagcagaccacccugaagggcguggaggccgucauguacauggggacgcucagcuacgagcaguucaagaagggcgugcagaucccgugcaccugcgggaagcaggccaccaaguaccuggugcagcaggagucccccuucgucaugaugagcgccccccccgcgcaguacgagcugaagcacggcaccuucacgugcgccuccgaguacaccggcaacuaccagugcgggcacuacaagcacaucaccagcaaggagacccucuacugcaucgacggcgcccugcugacgaagagcuccgaguacaaggggccgaucaccgacguguucuacaaggagaacagcuacaccaccacgaucaagcccgugaccuacaagcucgacggcgucgugugcaccgagaucgaccccaagcuggacaacuacuacaagaaggacaacuccuacuucaccgagcagcccaucgaccuggugccgaaccagcccuaccccaacgccagcuucgacaacuucaaguucgucugcgacaacaucaaguucgccgacgaccucaaccagcugacgggguacaagaagcccgcgucccgcgagcugaaggugaccuucuucccggaccucaacggcgacguggucgccaucgacuacaagcacuacacccccagcuucaagaagggcgccaagcugcugcacaagcccaucguguggcacgugaacaacgccaccaacaaggcgacguacaagcccaacaccuggugcauccggugccucugguccaccaagccggucgagaccagcaacuccuucgacgugcugaagagcgaggacgcccaggggauggacaaccuggccugcgaggaccucaagcccguguccgaggaggucguggagaaccccacgauccagaaggacgugcuggagugcaacgucaagaccaccgagguggugggcgacaucauccugaagcccgccaacaacagccucaagaucaccgaggaggucgggcacacggaccugauggccgcguacguggacaacuccagccugaccaucaagaagccgaacgagcucucccgcgugcugggccugaagacccucgccacccacgggcuggccgccgucaacagcgugcccugggacacgaucgccaacuacgcgaagcccuuccugaacaagguggucuccaccaccaccaacaucgugacgcgcugccucaaccgggugugcaccaacuacaugccguacuucuucacccugcugcuccagcugugcaccuucacccgcagcacgaacucccggaucaaggccagcaugcccaccaccaucgccaagaacaccgucaagagcgugggcaaguucugccuggaggccuccuucaacuaccucaagagccccaacuucuccaagcugaucaacaucaucaucugguuccugcuccugagcgugugccugggcucccucaucuacagcacggccgcgcuggggguccugauguccaaccucggcaugcccagcuacugcaccggguaccgcgagggcuaccugaacuccaccaacgugaccaucgccacguacugcaccggcagcaucccgugcuccgugugccugagcgggcucgacucccuggacaccuaccccagccuggagaccauccagaucacgaucuccagcuucaagugggaccucaccgccuucggccuggucgccgagugguuccuggccuacauccucuucacccgguucuucuacgugcuggggcuggcggccaucaugcagcucuucuucuccuacuucgccgugcacuucaucagcaacuccuggcugauguggcugaucaucaaccugguccagauggcccccaucagcgcgauggugcgcauguacaucuucuucgccagcuucuacuacguguggaaguccuacguccacgugguggacggcugcaacagcuccaccugcaugaugugcuacaagcggaaccgcgccacgcgggucgagugcaccaccaucgugaacgggguccgccggagcuucuacguguacgccaacggcggcaagggguucugcaagcuccacaacuggaacugcgugaacugcgacaccuucugcgccggcuccacguucaucagcgacgaggucgcgcgcgaccugucccugcaguucaagcggcccaucaacccgaccgaccagagcuccuacaucguggacagcgugaccgucaagaacggguccauccaccucuacuucgacaaggccggccagaagaccuacgagcgccacagccugucccacuucgugaacuucgacaaccugcgggccaacaacacgaaggggagccuccccaucaacgugaucgucuucgacggcaaguccaagugcgaggagagcuccgccaagagcgccuccguguacuacagccagcugaugugccagcccauccugcuccuggaccaggcgcuggugagcgacgucggcgacuccgccgagguggccgugaagauguucgacgccuacgucaacaccuucagcuccaccuucaacgugcccauggagaagcucaagacccugguggccacggcggaggccgagcuggccaagaacgucagccucgacaacgugcuguccaccuucaucagcgccgcgcgccagggguucguggacuccgacgucgagaccaaggacgugguggagugccugaagcucagccaccaguccgacaucgaggucaccggcgacagcugcaacaacuacaugcugacguacaacaagguggagaacaugaccccgcgggaccugggggccugcaucgacugcuccgcccgccacaucaacgcccagguggccaagagccacaacaucgcgcucaucuggaacgucaaggacuucaugucccugagcgagcagcugcggaagcagauccgcuccgccgccaagaagaacaaccuccccuucaagcugaccugcgccaccacgcgccagguggugaacgucgugaccaccaagaucgcccugaagggcgggugaggacuaguuauaagacugacuagcccgaugggccucccaacgggcccuccuccccuccuugcaccgagauuaauaaaaaaaaaaaaaaaaaaaaaaaaaaaaaaaaaaaaaaaaaaaaaaaaaaaaaaaaaaaaaaaaugcaucccccccccccccccccccccccccccccccaaaggcucuuuucagagccaccagaauu

SEQ ID NO: 21765 - RNA, 6058 nt, Artificial Sequence
  SARS-CoV-2__MT709104.1__non-structural protein 3 (NSP3) mRNA gc
aggagaaagcuuaccauggcccccaccaaggugaccuucggcgacgacacggucaucgaggugcagggguacaagagcgugaacaucaccuucgagcuggacgagcgcaucgacaagguccucaacgagaagugcuccgccuacaccguggagcugggcaccgaggugaacgaguucgcgugcgucguggccgacgccgugaucaagacgcugcagccggucagcgagcuccugaccccccuggggaucgaccucgacgagugguccauggccaccuacuaccuguucgacgagagcggcgaguucaagcuggccucccacauguacugcagcuucuacccccccgacgaggacgaggaggagggggacugcgaggaggaggaguucgagccguccacccaguacgaguacggcacggaggacgacuaccagggcaagccccucgaguucggggcgaccagcgccgcccugcagcccgaggaggagcaggaggaggacuggcuggacgacgacucccagcagaccgugggccagcaggacgggagcgaggacaaccagaccacgaccauccagaccaucguggagguccagccccagcucgagauggagcugaccccgguggugcagacgaucgaggucaacuccuucagcggcuaccugaagcucaccgacaacguguacaucaagaacgccgacaucguggaggaggcgaagaagaucaagcccaccgucguggugaacgccgccaacgucuaccugaagcacgggggcggcguggccggggcccugaacaaggcgaccaacaacgccaugcagguggaguccgacgacuacaucgccacgaacggcccccucaaggucgggggcagcugcgugcuguccggccacaaccuggccaagcacugccuccacgucguggggcccaacgugaacaagggcgaggacauccagcugcugaagagcgccuacgagaacuucaaccagcacgagguccuccuggcgccgcugcucuccgccgggaucuucggcgccgaccccauccacagccugcgggugugcguggacaccguccgcaccaacguguaccuggccguguucgacaagaaccucuacgacaagcuggucuccagcuuccuggagaugaagagcgagaagcagguggagcagaacaucgccgagauccccaaggaggaggugaagcccuucaucaccgaguccaagccgagcgucgagcagcggaagcaggacgacaagaagaucaaggcgugcguggaggaggugacgaccacccucgaggagaccaaguuccugacggagaaccugcuccuguacaucgacaucaacgggaaccugcaccccgacuccgccacccucgucagcgacaucgacaucaccuuccugaagaaggacgcccccuacaucgugggcgacgugguccaggagggcgugcugaccgccguggucauccccacgaagaaggccgggggcaccaccgagaugcucgcgaaggcccugcgcaaggugccgaccgacaacuacaucacgaccuaccccgggcagggccugaacggguacaccguggaggaggccaagaccguccucaagaagugcaaguccgccuucuacauccugcccagcaucaucuccaacgagaagcaggagauccugggcaccgugagcuggaaccuccgggagaugcuggcgcacgccgaggagacgcgcaagcugaugcccgugugcgucgagaccaaggccaucguguccaccauccagcggaaguacaagggcaucaagauccaggaggggguggucgacuacggcgcccgcuucuacuucuacaccagcaagacgaccguggccucccugaucaacacccucaacgaccugaacgagacccuggugacgaugccgcucggguacgucacccacggccugaaccuggaggaggcggcccgguacaugcgcagccucaaggugcccgccaccguguccgucagcucccccgacgccgugaccgccuacaacggguaccugacgagcuccagcaagacccccgaggagcacuucaucgagaccaucucccuggcgggcagcuacaaggacuggagcuacuccggccagagcacccagcucgggaucgaguuccugaagcggggcgacaaguccguguacuacacgagcaacccgaccaccuuccaccuggacggggaggucaucaccuucgacaaccucaagacgcugcugucccuccgcgaggugcggaccaucaagguguucaccaccgucgacaacaucaaccugcacacgcaggugguggacaugagcaugaccuacggccagcaguucggccccaccuaccuggacggggccgacgucaccaagaucaagccccacaacucccacgagggcaagacguucuacgugcucccgaacgacgacacccugcgcguggaggccuucgaguacuaccacaccaccgaccccagcuuccuggggcgguacauguccgcccucaaccacacgaagaaguggaaguacccccaggucaacggccugaccagcaucaagugggccgacaacaacugcuaccuggcgaccgcccuccugacccugcagcagaucgagcucaaguucaaccccccggcccugcaggacgccuacuaccgcgcgcgggccggggaggccgccaacuucugcgcccugauccucgcguacugcaacaagacggugggcgagcugggcgacgugcgcgagaccauguccuaccuguuccagcacgccaaccucgacagcugcaagcggguccugaacguggucugcaagaccugcgggcagcagcagaccacccugaagggcguggaggccgugauguacauggggacgcucuccuacgagcaguucaagaagggcguccagauccccugcaccugcgggaagcaggccaccaaguaccuggugcagcaggagagccccuucgugaugauguccgcccccccggcgcaguacgagcugaagcacggcaccuucacgugcgccagcgaguacaccggcaacuaccagugcgggcacuacaagcacaucaccuccaaggagacccucuacugcaucgacggcgcccugcugacgaagagcagcgaguacaaggggcccaucaccgacgucuucuacaaggagaacuccuacaccaccacgaucaagcccgugaccuacaagcucgacggcguggucugcaccgagaucgaccccaagcuggacaacuacuacaagaaggacaacagcuacuucaccgagcagccgaucgaccuggugcccaaccagcccuaccccaacgccuccuucgacaacuucaaguucgugugcgacaacaucaaguucgccgacgaccucaaccagcugacgggguacaagaagccggcgagccgcgagcugaaggucaccuucuuccccgaccucaacggcgacgugguggccaucgacuacaagcacuacacccccuccuucaagaagggcgccaagcugcugcacaagcccaucgucuggcacgugaacaacgccaccaacaaggcgacguacaagccgaacaccuggugcauccggugccucuggagcaccaagcccguggagaccuccaacagcuucgacguccugaaguccgaggacgcccaggggauggacaaccuggccugcgaggaccucaagcccgugagcgaggagguggucgagaaccccacgauccagaaggacgugcuggagugcaacgugaagaccaccgaggucgugggcgacaucauccugaagccggccaacaacucccucaagaucaccgaggagguggggcacacggaccugauggccgcguacgucgacaacagcucccugaccaucaagaagcccaacgagcucagccgcgugcugggccugaagacccucgccacccacgggcuggccgccgugaacuccguccccugggacacgaucgccaacuacgcgaagccguuccugaacaagguggugagcaccaccaccaacaucgucacgcgcugccucaaccgggugugcaccaacuacaugcccuacuucuucacccugcugcuccagcugugcaccuucacccgcuccacgaacagccggaucaaggccuccaugcccaccaccaucgccaagaacaccgugaagagcgucggcaaguucugccuggaggccagcuucaacuaccucaagucccccaacuucagcaagcugaucaacaucaucaucugguuccugcuccuguccgugugccugggcagccucaucuacuccacggccgcgcugggggugcugaugagcaaccucggcaugccguccuacugcaccggguaccgcgagggcuaccugaacagcaccaacgucaccaucgccacguacugcaccggcuccauccccugcagcgugugccuguccgggcucgacagccuggacaccuaccccucccuggagaccauccagaucacgaucagcuccuucaagugggaccucaccgccuucggccugguggccgagugguuccuggccuacauccucuucacccgguucuucuacguccuggggcuggcggccaucaugcagcucuucuucagcuacuucgccgugcacuucaucuccaacagcuggcugauguggcugaucaucaaccuggugcagauggcccccaucuccgcgaugguccgcauguacaucuucuucgccagcuucuacuacguguggaagagcuacgugcacgucguggacggcugcaacuccagcaccugcaugaugugcuacaagcggaaccgcgccacgcggguggagugcaccaccaucgucaacggggugcgccgguccuucuacgucuacgccaacggcggcaagggguucugcaagcuccacaacuggaacugcgugaacugcgacaccuucugcgccggcagcacguucaucuccgacgagguggcgcgcgaccugagccugcaguucaagcggccgaucaaccccaccgaccaguccagcuacaucgucgacuccgugaccgugaagaacgggagcauccaccucuacuucgacaaggccggccagaagaccuacgagcgccacucccugagccacuucgucaaccuggacaaccuccgggccaacaacacgaaggggucccugcccaucaacgugaucguguucgacggcaagagcaagugcgaggaguccagcgccaaguccgccagcgucuacuacucccagcugaugugccagcccauccuccugcuggaccaggcgcucgugagcgacgugggcgacagcgccgaggucgccgugaagauguucgacgccuacgugaacaccuucuccagcaccuucaacgucccgauggagaagcugaagacccugguggccacggcggaggccgagcucgccaagaacgugucccuggacaacguccugagcaccuucaucuccgccgcgcgccagggguucguggacagcgacguggagaccaaggacgucguggagugccucaagcugucccaccagagcgacaucgaggugaccggcgacuccugcaacaacuacaugcugacguacaacaaggucgagaacaugaccccccgggaccucggggccugcaucgacugcagcgcccgccacaucaacgcccagguggccaagucccacaacaucgcgcugaucuggaacgugaaggacuucaugagccuguccgagcagcuccggaagcagauccgcagcgccgccaagaagaacaaccugcccuucaagcugaccugcgccaccacgcgccaggucgugaacguggucaccaccaagaucgcccucaagggcgggugaggacuaguuauaagacugacuagcccgaugggccucccaacgggcccuccuccccuccuugcaccgagauuaauaaaaaaaaaaaaaaaaaaaaaaaaaaaaaaaaaaaaaaaaaaaaaaaaaaaaaaaaaaaaaaaaugcaucccccccccccccccccccccccccccccccaaaggcucuuuucagagccaccagaauu

SEQ ID NO: 21766 - RNA, 6058 nt, Artificial Sequence
  SARS-CoV-2__MT704012.1__non-structural protein 3 (NSP3) mRNA gc
aggagaaagcuuaccauggcccccaccaaggugaccuucggcgacgacacggucaucgaggugcagggguacaagagcgugaacaucaccuucgagcuggacgagcgcaucgacaagguccucaacgagaagugcuccgccuacaccguggagcugggcaccgaggugaacgaguucgcgugcgucguggccgacgccgugaucaagacgcugcagccggucagcgagcuccugaccccccuggggaucgaccucgacgagugguccauggccaccuacuaccuguucgacgagagcggcgaguucaagcuggccucccacauguacugcagcuucuacccccccgacgaggacgaggaggagggggacugcgaggaggaggaguucgagccguccacccaguacgaguacggcacggaggacgacuaccagggcaagccccucgaguucggggcgaccagcgccgcccugcagcccgaggaggagcaggaggaggacuggcuggacgacgacucccagcagaccgugggccagcaggacgggagcgaggacaaccagaccacgaccauccagaccaucguggagguccagccccagcucgagauggagcugaccccgguggugcagacgaucgaggucaacuccuucagcggcuaccugaagcucaccgacaacguguacaucaagaacgccgacaucguggaggaggcgaagaaggucaagcccaccgugguggucaacgccgccaacguguaccugaagcacgggggcggcguggccggggcccugaacaaggcgaccaacaacgccaugcaggucgaguccgacgacuacaucgccacgaacggcccccucaagguggggggcagcugcguccuguccggccacaaccuggccaagcacugccuccacgugguggggcccaacgucaacaagggcgaggacauccagcugcugaagagcgccuacgagaacuucaaccagcacgaggugcuccuggcgccgcugcucuccgccgggaucuucggcgccgaccccauccacagccugcgggugugcgucgacaccgugcgcaccaacguguaccuggccgucuucgacaagaaccucuacgacaagcugguguccagcuuccuggagaugaagagcgagaagcagguggagcagaagaucgccgagauccccaaggaggaggucaagcccuucaucaccgaguccaagccgagcguggagcagcggaagcaggacgacaagaagaucaaggcgugcguggaggaggucacgaccacccucgaggagaccaaguuccugacggagaaccugcuccuguacaucgacaucaacgggaaccugcaccccgacuccgccacccucgugagcgacaucgacaucaccuuccugaagaaggacgcccccuacaucgugggcgacgucgugcaggagggcgugcugaccgccgucgugauccccacgaagaaggccgggggcaccaccgagaugcucgcgaaggcccugcgcaaggugccgaccgacaacuacaucacgaccuaccccgggcagggccugaacggguacaccgucgaggaggccaagaccgugcucaagaagugcaaguccgccuucuacauccugcccagcaucaucuccaacgagaagcaggagauccugggcaccgugagcuggaaccuccgggagaugcuggcgcacgccgaggagacgcgcaagcugaugcccgucugcguggagaccaaggccaucguguccaccauccagcggaaguacaagggcaucaagauccaggagggggucguggacuacggcgcccgcuucuacuucuacaccagcaagacgaccguggccucccugaucaacacccucaacgaccugaacgagacccuggucacgaugccgcucggguacgugacccacggccugaaccuggaggaggcggcccgguacaugcgcagccucaaggugcccgccaccgucuccgugagcucccccgacgccgugaccgccuacaacggguaccugacgagcuccagcaagacccccgaggagcacuucaucgagaccaucucccuggcgggcagcuacaaggacuggagcuacuccggccagagcacccagcucgggaucgaguuccugaagcggggcgacaaguccgucuacuacacgagcaacccgaccaccuuccaccuggacggggaggugaucaccuucgacaaccucaagacgcugcugucccuccgcgaggugcggaccaucaaggucuucaccaccguggacaacaucaaccugcacacgcagguggucgacaugagcaugaccuacggccagcaguucggccccaccuaccuggacggggccgacgugaccaagaucaagccccacaacucccacgagggcaagacguucuacgugcucccgaacgacgacacccugcgcgucgaggccuucgaguacuaccacaccaccgaccccagcuuccuggggcgguacauguccgcccucaaccacacgaagaaguggaaguacccccaggugaacggccugaccagcaucaagugggccgacaacaacugcuaccuggcgaccgcccuccugacccugcagcagaucgagcucaaguucaaccccccggcccugcaggacgccuacuaccgcgcgcgggccggggaggccgccaacuucugcgcccugauccucgcguacugcaacaagacggugggcgagcugggcgacguccgcgagaccauguccuaccuguuccagcacgccaaccucgacagcugcaagcgggugcugaacgucgugugcaagaccugcgggcagcagcagaccacccugaagggcguggaggccgucauguacauggggacgcucuccuacgagcaguucaagaagggcgugcagauccccugcaccugcgggaagcaggccaccaaguaccuggugcagcaggagagccccuucgucaugauguccgcccccccggcgcaguacgagcugaagcacggcaccuucacgugcgccagcgaguacaccggcaacuaccagugcgggcacuacaagcacaucaccuccaaggagacccucuacugcaucgacggcgcccugcugacgaagagcagcgaguacaaggggcccaucaccgacguguucuacaaggagaacuccuacaccaccacgaucaagcccgugaccuacaagcucgacggcgucgugugcaccgagaucgaccccaagcuggacaacuacuacaagaaggacaacagcuacuucaccgagcagccgaucgaccuggugcccaaccagcccuaccccaacgccuccuucgacaacuucaaguucgucugcgacaacaucaaguucgccgacgaccucaaccagcugacgggguacaagaagccggcgagccgcgagcugaaggugaccuucuuccccgaccucaacggcgacguggucgccaucgacuacaagcacuacacccccuccuucaagaagggcgccaagcugcugcacaagcccaucguguggcacgugaacaacgccaccaacaaggcgacguacaagccgaacaccuggugcauccggugccucuggagcaccaagcccgucgagaccuccaacagcuucgacgugcugaaguccgaggacgcccaggggauggacaaccuggccugcgaggaccucaagcccgugagcgaggaggucguggagaaccccacgauccagaaggacgugcuggagugcaacgucaagaccaccgagguggugggcgacaucauccugaagccggccaacaacucccucaagaucaccgaggaggucgggcacacggaccugauggccgcguacguggacaacagcucccugaccaucaagaagcccaacgagcucagccgcgugcugggccugaagacccucgccacccacgggcuggccgccgucaacuccgugcccugggacacgaucgccaacuacgcgaagccguuccugaacaagguggucagcaccaccaccaacaucgugacgcgcugccucaaccgggugugcaccaacuacaugcccuacuucuucacccugcugcuccagcugugcaccuucacccgcuccacgaacagccggaucaaggccuccaugcccaccaccaucgccaagaacaccgucaagagcgugggcaaguucugccuggaggccagcuucaacuaccucaagucccccaacuucagcaagcugaucaacaucaucaucugguuccugcuccuguccgugugccugggcagccucaucuacuccacggccgcgcuggggguccugaugagcaaccucggcaugccguccuacugcaccggguaccgcgagggcuaccugaacagcaccaacgugaccaucgccacguacugcaccggcuccauccccugcagcgugugccuguccgggcucgacagccuggacaccuaccccucccuggagaccauccagaucacgaucagcuccuucaagugggaccucaccgccuucggccuggucgccgagugguuccuggccuacauccucuucacccgguucuucuacgugcuggggcuggcggccaucaugcagcucuucuucagcuacuucgccgugcacuucaucuccaacagcuggcugauguggcugaucaucaaccugguccagauggcccccaucuccgcgauggugcgcauguacaucuucuucgccagcuucuacuacguguggaagagcuacguccacgugguggacggcugcaacuccagcaccugcaugaugugcuacaagcggaaccgcgccacgcgggucgagugcaccaccaucgugaacgggguccgccgguccuucuacguguacgccaacggcggcaagggguucugcaagcuccacaacuggaacugcgugaacugcgacaccuucugcgccggcagcacguucaucuccgacgaggucgcgcgcgaccugagccugcaguucaagcggccgaucaaccccaccgaccaguccagcuacaucguggacuccgugaccgucaagaacgggagcauccaccucuacuucgacaaggccggccagaagaccuacgagcgccacucccugagccacuucgugaaccuggacaaccuccgggccaacaacacgaaggggucccugcccaucaacgugaucgucuucgacggcaagagcaagugcgaggaguccagcgccaaguccgccagcguguacuacucccagcugaugugccagcccauccuccugcuggaccaggcgcucgugagcgacgucggcgacagcgccgagguggccgugaagauguucgacgccuacgucaacaccuucuccagcaccuucaacgugccgauggagaagcugaagacccugguggccaucgcggaggccgagcucgccaagaacgucucccuggacaacgugcugagcacguucaucuccgccgcgcgccagggguucguggacagcgacgucgagaccaaggacgugguggagugccucaagcugucccaccagagcgacaucgaggucaccggcgacuccugcaacaacuacaugcugaccuacaacaagguggagaacaugacgccccgggaccucggggccugcaucgacugcagcgcccgccacaucaacgcccagguggccaagucccacaacaucgcgcugaucuggaacgucaaggacuucaugagccuguccgagcagcuccggaagcagauccgcagcgccgccaagaagaacaaccugcccuucaagcugaccugcgccaccacccgccagguggugaacgucgugacgaccaagaucgcccucaagggcgggugaggacuaguuauaagacugacuagcccgaugggccucccaacgggcccuccuccccuccuugcaccgagauuaauaaaaaaaaaaaaaaaaaaaaaaaaaaaaaaaaaaaaaaaaaaaaaaaaaaaaaaaaaaaaaaaaugcaucccccccccccccccccccccccccccccccaaaggcucuuuucagagccaccagaauu

SEQ ID NO: 21767 - RNA, 6058 nt, Artificial Sequence
  SARS-CoV-2__MT704014.1__non-structural protein 3 (NSP3) mRNA gc
aggagaaagcuuaccauggcccccaccaaggugaccuucggcgacgacacggucaucgaggugcagggguacaagagcgugaacaucaccuucgagcuggacgagcgcaucgacaagguccucaacgagaagugcuccgccuacaccguggagcugggcaccgaggugaacgaguucgcgugcgucguggccgacgccgugaucaagacgcugcagccggucagcgagcuccugaccccccuggggaucgaccucgacgagugguccauggccaccuacuaccuguucgacgagagcggcgaguucaagcuggccucccacauguacugcagcuucuacccccccgacgaggacgaggaggagggggacugcgaggaggaggaguucgagccguccacccaguacgaguacggcacggaggacgacuaccagggcaagccccucgaguucggggcgaccagcgccgcccugcagcccgaggaggagcaggaggaggacuggcuggacgacgacucccagcagaccgugggccagcaggacgggagcgaggacaaccagaccacgaccauccagaccaucguggagguccagccccagcucgagauggagcugaccccgguggugcagacgaucgaggucaacuccuucagcggcuaccugaagcucaccgacaacguguacaucaagaacgccgacaucguggaggaggcgaagaaggucaagcccaccgugguggucaacgccgccaacguguaccugaagcacgggggcggcguggccggggcccugaacaaggcgaccaacaacgccaugcaggucgaguccgacgacuacaucgccacgaacggcccccucaagguggggggcagcugcguccuguccggccacaaccuggccaagcacugccuccacgugguggggcccaacgucaacaagggcgaggacauccagcugcugaagagcgccuacgagaacuucaaccagcacgaggugcuccuggcgccgcugcucuccgccgggaucuucggcgccgaccccauccacagccugcgggugugcgucgacaccgugcgcaccaacguguaccuggccgucuucgacaagaaccucuacgacaagcugguguccagcuuccuggagaugaagagcgagaagcagguggagcagaagaucgccgagauccccaaggaggaggucaagcccuucaucaccgaguccaagccgagcguggagcagcggaagcaggacgacaagaagaucaaggcgugcguggaggaggucacgaccacccucgaggagaccaaguuccugacggagaaccugcuccuguacaucgacaucaacgggaaccugcaccccgacuccgccacccucgugagcgacaucgacaucaccuuccugaagaaggacgcccccuacaucgugggcgacgucuuccaggagggcgugcugaccgccguggucauccccacgaagaaggccgggggcaccaccgagaugcucgcgaaggcccugcgcaaggugccgaccgacaacuacaucacgaccuaccccgggcagggccugaacggguacaccguggaggaggccaagaccguccucaagaagugcaaguccgccuucuacauccugcccagcaucaucuccaacgagaagcaggagauccugggcaccgugagcuggaaccuccgggagaugcuggcgcacgccgaggagacgcgcaagcugaugcccgugugcgucgagaccaaggccaucguguccaccauccagcggaaguacaagggcaucaagauccaggaggggguggucgacuacggcgcccgcuucuacuucuacaccagcaagacgaccguggccucccugaucaacacccucaacgaccugaacgagacccuggugacgaugccgcucggguacgucacccacggccugaaccuggaggaggcggcccgguacaugcgcagccucaaggugcccgccaccguguccgucagcucccccgacgccgugaccgccuacaacggguaccugacgagcuccagcaagacccccgaggagcacuucaucgagaccaucucccuggcgggcagcuacaaggacuggagcuacuccggccagagcacccagcucgggaucgaguuccugaagcggggcgacaaguccguguacuacacgagcaacccgaccaccuuccaccuggacggggaggucaucaccuucgacaaccucaagacgcugcugucccuccgcgaggugcggaccaucaagguguucaccaccgucgacaacaucaaccugcacacgcaggugguggacaugagcaugaccuacggccagcaguucggccccaccuaccuggacggggccgacgucaccaagaucaagccccacaacucccacgagggcaagacguucuacgugcucccgaacgacgacacccugcgcguggaggccuucgaguacuaccacaccaccgaccccagcuuccuggggcgguacauguccgcccucaaccacacgaagaaguggaaguacccccaggucaacggccugaccagcaucaagugggccgacaacaacugcuaccuggcgaccgcccuccugacccugcagcagaucgagcucaaguucaaccccccggcccugcaggacgccuacuaccgcgcgcgggccggggaggccgccaacuucugcgcccugauccucgcguacugcaacaagacggugggcgagcugggcgacgugcgcgagaccauguccuaccuguuccagcacgccaaccucgacagcugcaagcggguccugaacguggucugcaagaccugcgggcagcagcagaccacccugaagggcguggaggccgugauguacauggggacgcucuccuacgagcaguucaagaagggcguccagauccccugcaccugcgggaagcaggccaccaaguaccuggugcagcaggagagccccuucgugaugauguccgcccccccggcgcaguacgagcugaagcacggcaccuucacgugcgccagcgaguacaccggcaacuaccagugcgggcacuacaagcacaucaccuccaaggagacccucuacugcaucgacggcgcccugcugacgaagagcagcgaguacaaggggcccaucaccgacgucuucuacaaggagaacuccuacaccaccacgaucaagcccgugaccuacaagcucgacggcguggucugcaccgagaucgaccccaagcuggacaacuacuacaagaaggacaacagcuacuucaccgagcagccgaucgaccuggugcccaaccagcccuaccccaacgccuccuucgacaacuucaaguucgugugcgacaacaucaaguucgccgacgaccucaaccagcugacgggguacaagaagccggcgagccgcgagcugaaggucaccuucuuccccgaccucaacggcgacgugguggccaucgacuacaagcacuacacccccuccuucaagaagggcgccaagcugcugcacaagcccaucgucuggcacgugaacaacgccaccaacaaggcgacguacaagccgaacaccuggugcauccggugccucuggagcaccaagcccguggagaccuccaacagcuucgacguccugaaguccgaggacgcccaggggauggacaaccuggccugcgaggaccucaagcccgugagcgaggagguggucgagaaccccacgauccagaaggacgugcuggagugcaacgugaagaccaccgaggucgugggcgacaucauccugaagccggccaacaacucccucaagaucaccgaggagguggggcacacggaccugauggccgcguacgucgacaacagcucccugaccaucaagaagcccaacgagcucagccgcgugcugggccugaagacccucgccacccacgggcuggccgccgugaacuccguccccugggacacgaucgccaacuacgcgaagccguuccugaacaagguggugagcaccaccaccaacaucgucacgcgcugccucaaccgggugugcaccaacuacaugcccuacuucuucacccugcugcuccagcugugcaccuucacccgcuccacgaacagccggaucaaggccuccaugcccaccaccaucgccaagaacaccgugaagagcgucggcaaguucugccuggaggccagcuucaacuaccucaagucccccaacuucagcaagcugaucaacaucaucaucugguuccugcuccuguccgugugccugggcagccucaucuacuccacggccgcgcugggggugcugaugagcaaccucggcaugccguccuacugcaccggguaccgcgagggcuaccugaacagcaccaacgucaccaucgccacguacugcaccggcuccauccccugcagcgugugccuguccgggcucgacagccuggacaccuaccccucccuggagaccauccagaucacgaucagcuccuucaagugggaccucaccgccuucggccugguggccgagugguuccuggccuacauccucuucacccgguucuucuacguccuggggcuggcggccaucaugcagcucuucuucagcuacuucgccgugcacuucaucuccaacagcuggcugauguggcugaucaucaaccuggugcagauggcccccaucuccgcgaugguccgcauguacaucuucuucgccagcuucuacuacguguggaagagcuacgugcacgucguggacggcugcaacuccagcaccugcaugaugugcuacaagcggaaccgcgccacgcggguggagugcaccaccaucgucaacggggugcgccgguccuucuacgucuacgccaacggcggcaagggguucugcaagcuccacaacuggaacugcgugaacugcgacaccuucugcgccggcagcacguucaucuccgacgagguggcgcgcgaccugagccugcaguucaagcggccgaucaaccccaccgaccaguccagcuacaucgucgacuccgugaccgugaagaacgggagcauccaccucuacuucgacaaggccggccagaagaccuacgagcgccacucccugagccacuucgucaaccuggacaaccuccgggccaacaacacgaaggggucccugcccaucaacgugaucguguucgacggcaagagcaagugcgaggaguccagcgccaaguccgccagcgucuacuacucccagcugaugugccagcccauccuccugcuggaccaggcgcucgugagcgacgugggcgacagcgccgaggucgccgugaagauguucgacgccuacgugaacaccuucuccagcaccuucaacgucccgauggagaagcugaagacccugguggccacggcggaggccgagcucgccaagaacgugucccuggacaacguccugagcaccuucaucuccgccgcgcgccagggguucguggacagcgacguggagaccaaggacgucguggagugccucaagcugucccaccagagcgacaucgaggugaccggcgacuccugcaacaacuacaugcugacguacaacaaggucgagaacaugaccccccgggaccucggggccugcaucgacugcagcgcccgccacaucaacgcccagguggccaagucccacaacaucgcgcugaucuggaacgugaaggacuucaugagccuguccgagcagcuccggaagcagauccgcagcgccgccaagaagaacaaccugcccuucaagcugaccugcgccaccacgcgccaggucgugaacguggucaccaccaagaucgcccucaagggcgggugaggacuaguuauaagacugacuagcccgaugggccucccaacgggcccuccuccccuccuugcaccgagauuaauaaaaaaaaaaaaaaaaaaaaaaaaaaaaaaaaaaaaaaaaaaaaaaaaaaaaaaaaaaaaaaaaugcaucccccccccccccccccccccccccccccccaaaggcucuuuucagagccaccagaauu

SEQ ID NO: 21768 - RNA, 6058 nt, Artificial Sequence
  SARS-CoV-2__MT704041.1__non-structural protein 3 (NSP3) mRNA gc
aggagaaagcuuaccauggcccccaccaaggugaccuucggcgacgacacggucaucgaggugcagggguacaagagcgugaacaucaccuucgagcuggacgagcgcaucgacaagguccucaacgagaagugcuccgccuacaccguggagcugggcaccgaggugaacgaguucgcgugcgucguggccgacgccgugaucaagacgcugcagccggucagcgagcuccugaccccccuggggaucgaccucgacgagugguccauggccaccuacuaccuguucgacgagagcggcgaguucaagcuggccucccacauguacugcagcuucuacccccccgacgaggacgaggaggagggggacugcgaggaggaggaguucgagccguccacccaguacgaguacggcacggaggacgacuaccagggcaagccccucgaguucggggcgaccagcgccgcccugcagcccgaggaggagcaggaggaggacuggcuggacgacgacucccagcagaccgugggccagcaggacgggagcgaggacaaccagaccacgaccauccagaccaucguggagguccagccccagcucgagauggagcugaccccgguggugcagacgaucgaggucaacuccuucagcggcuaccugaagcucaccgacaacguguacaucaagaacgccgacaucguggaggaggcgaagaaggucaagcccaccgugguggucaacgccgccaacguguaccugaagcacgggggcggcguggccggggcccugaacaaggcgaccaacaacgccaugcaggucgaguccgacgacuacaucgccacgaacggcccccucaagguggggggcagcugcguccuguccggccacaaccuggccaagcacugccuccacgugguggggcccaacgucaacaagggcgaggacauccagcugcugaagagcgccuacgagaacuucaaccagcacgaggugcuccuggcgccgcugcucuccgccgggaucuucggcgccgaccccauccacagccugcgggugugcgucgacaccgugcgcaccaacguguaccuggccgucuucgacaagaaccucuacgacaagcugguguccagcuuccuggagaugaagagcgagaagcagguggagcagaagaucgccgagauccccaaggaggaggucaagcccuucaucaccgaguccaagccgagcguggagcagcggaagcaggacgacaagaagaucaaggcgugcguggaggaggucacgaccacccucgaggagaccaaguuccugacggagaaccugcuccuguacaucgacaucaacgggaaccugcaccccgacuccgccacccucgugagcgacaucgacaucaccuuccugaagaaggacgcccccuacaucgugggcgacgucgugcaggagggcgugcugaccgccgucgugauccccacgaagaaggccgggggcaccaccgagaugcucgcgaaggcccugcgcaaggugccgaccgacaacuacaucacgaccuaccccgggcagggccugaacggguacaccgucgaggaggccaagaccgugcucaagaagugcaaguccgccuucuacauccugcccagcaucaucuccaacgagaagcaggagauccugggcaccgugagcuggaaccuccgggagaugcuggcgcacgccgaggagacgcgcaagcugaugcccgucugcguggagaccaaggccaucguguccaccauccagcggaaguacaagggcaucaagauccaggagggggucguggacuacggcgcccgcuucuacuucuacaccagcaagacgaccguggccucccugaucaacacccucaacgaccugaacgagacccuggucacgaugccgcucggguacgugacccacggccugaaccuggaggaggcggcccgguacaugcgcagccucaaggugcccgccaccgucuccgugagcucccccgacgccgugaccgccuacaacggguaccugacgagcuccagcaagacccccgaggagcacuucaucgagaccaucucccuggcgggcagcuacaaggacuggagcuacuccggccagagcacccagcucgggaucgaguuccugaagcggggcgacaaguccgucuacuacacgagcaacccgaccaccuuccaccuggacggggaggugaucaccuucgacaaccucaagacgcugcugucccuccgcgaggugcggaccaucaaggucuucaccaccguggacaacaucaaccugcacacgcagguggucgacaugagcaugaccuacggccagcaguucggccccaccuaccuggacggggccgacgugaccaagaucaagccccacaacucccacgagggcaagacguucuacgugcucccgaacgacgacacccugcgcgucgaggccuucgaguacuaccacaccaccgaccccagcuuccuggggcgguacauguccgcccucaaccacacgaagaaguggaaguacccccaggugaacggccugaccagcaucaagugggccgacaacaacugcuaccuggcgaccgcccuccugacccugcagcagaucgagcucaaguucaaccccccggcccugcaggacgccuacuaccgcgcgcgggccggggaggccgccaacuucugcgcccugauccucgcguacugcaacaagacggugggcgagcugggcgacguccgcgagaccauguccuaccuguuccagcacgccaaccucgacagcugcaagcgggugcugaacgucgugugcaagaccugcgggcagcagcagaccacccugaagggcguggaggccgucauguacauggggacgcucuccuacgagcaguucaagaagggcgugcagauccccugcaccugcgggaagcaggccaccaaguaccuggugcagcaggagagccccuucgucaugauguccgcccccccggcgcaguacgagcugaagcacggcaccuucacgugcgccagcgaguacaccggcaacuaccagugcgggcacuacaagcacaucaccuccaaggagacccucuacugcaucgacggcgcccugcugacgaagagcagcgaguacaaggggcccaucaccgacguguucuacaaggagaacuccuacaccaccacgaucaagcccgugaccuacaagcucgacggcgucgugugcaccgagaucgaccccaagcuggacaacuacuacaagaaggacaacagcuacuucaccgagcagccgaucgaccuggugcccaaccagcccuaccccaacgccuccuucgacaacuucaaguucgucugcgacaacaucaaguucgccgacgaccucaaccagcugacgggguacaagaagccggcgagccgcgagcugaaggugaccuucuuccccgaccucaacggcgacguggucgccaucgacuacaagcacuacacccccuccuucaagaagggcgccaagcugcugcacaagcccaucguguggcacgugaacaacgccaccaacaaggcgacguacaagccgaacaccuggugcauccggugccucuggagcaccaagcccgucgagaccuccaacagcuucgacgugcugaaguccgaggacgcccaggggauggacaaccuggccugcgaggaccucaagcccgugagcgaggaggucguggagaaccccacgauccagaaggacgugcuggagugcaacgucaagaccaccgagguggugggcgacaucauccugaagccggccaacaacucccucaagaucaccgaggaggucgggcacacggaccugauggccgcguacguggacaacagcucccugaccaucaagaagcccaacgagcucagccgcgugcugggccugaagacccucgccacccacgggcuggccgccgucaacuccgugcccugggacacgaucgccaacuacgcgaagccguuccugaacaagguggucagcaccaccaccaacaucgugacgcgcugccucaaccgggugugcaccaacuacaugcccuacuucuucacccugcugcuccagcugugcaccuucacccgcuccacgaacagccggaucaaggccuccaugcccaccaccaucgccaagaacaccgucaagagcgugggcaaguucugccuggaggccagcuucaacuaccucaagucccccaacuucagcaagcugaucaacaucaucaucugguuccugcuccuguccgugugccugggcagccucaucuacuccacggccgcgcuggggguccugaugagcaaccucggcaugccguccuacugcaccggguaccgcgagggcuaccugaacagcaccaacgugaccaucgccacguacugcaccggcuccauccccugcagcgugugccuguccgggcucgacagccuggacaccuaccccucccuggagaccauccagaucacgaucagcuccuucaagugggaccucaccgccuucggccuggucgccgagugguuccuggccuacauccucuucacccgguucuucuacgugcuggggcuggcggccaucaugcagcucuucuucagcuacuucgccgugcacuucaucuccaacagcuggcugauguggcugaucaucaaccugguccagauggcccccaucuccgcgauggugcgcauguacaucuucuucgccagcuucuacuacguguggaagagcuacguccacgugguggacggcugcaacuccagcaccugcaugaugugcuacaagcggaaccgcgccacgcgggucgagugcaccaccaucgugaacgggguccgccgguccuucuacguguacgccaacggcggcaagggguucugcaagcuccacaacuggaacugcgugaacugcgacaccuucugcgccggcagcacguucaucuccgacgaggucgcgcgcgaccugagccugcaguucaagcggccgaucaaccccaccgaccaguccagcuacaucguggacuccgugaccgucaagaacgggagcauccaccucuacuucgacaaggccggccagaagaccuacgagcgccacucccugagccacuucgugaaccuggacaaccuccgggccaacaacacgaaggggucccugcccaucaacgugaucgucuucgacggcaagagcaagugcgaggaguccagcgccaaguccgccagcguguacuacucccagcugaugugccagcccauccuccugcuggaccaggcgcucgugagcgacgucggcgacagcgccgaggugguggucaagauguucgacgccuacgugaacaccuucuccagcaccuucaacgugccgauggagaagcugaagacccuggucgccacggccgaggcggagcucgccaagaacgugucccuggacaacgugcugagcaccuucaucuccgccgcccgccagggguucgucgacagcgacguggagaccaaggacguggucgagugccucaagcugucccaccagagcgacaucgaggugaccggcgacuccugcaacaacuacaugcugacguacaacaagguggagaacaugaccccccgggaccucggggcgugcaucgacugcagcgcccgccacaucaacgcccaggucgccaagucccacaacaucgcccugaucuggaacgugaaggacuucaugagccuguccgagcagcuccggaagcagauccgcagcgcggccaagaagaacaaccugcccuucaagcugaccugcgccaccacgcgccagguggucaacguggugaccaccaagaucgcccucaagggcgggugaggacuaguuauaagacugacuagcccgaugggccucccaacgggcccuccuccccuccuugcaccgagauuaauaaaaaaaaaaaaaaaaaaaaaaaaaaaaaaaaaaaaaaaaaaaaaaaaaaaaaaaaaaaaaaaaugcaucccccccccccccccccccccccccccccccaaaggcucuuuucagagccaccagaauu

SEQ ID NO: 21769 - RNA, 6058 nt, Artificial Sequence
  SARS-CoV-2__MT704066.1__non-structural protein 3 (NSP3) mRNA gc
aggagaaagcuuaccauggcccccaccaaggugaccuucggcgacgacacggucaucgaggugcagggguacaagagcgugaacaucaccuucgagcuggacgagcgcaucgacaagguccucaacgagaagugcuccgccuacaccguggagcugggcaccgaggugaacgaguucgcgugcgucguggccgacgccgugaucaagacgcugcagccggucagcgagcuccugaccccccuggggaucgaccucgacgagugguccauggccaccuacuaccuguucgacgagagcggcgaguucaagcuggccucccacauguacugcagcuucuacccccccgacgaggacgaggaggagggggacugcgaggaggaggaguucgagccguccacccaguacgaguacggcacggaggacgacuaccagggcaagccccucgaguucggggcgaccagcgccgcccugcagcccgaggaggagcaggaggaggacuggcuggacgacgacucccagcagaccgugggccagcaggacgggagcgaggacaaccagaccacgaccauccagaccaucguggagguccagccccagcucgagauggagcugaccccgguggugcagacgaucgaggucaacuccuucagcggcuaccugaagcucaccgacaacguguacaucaagaacgccgacaucguggaggaggcgaagaaggucaagcccaccgugguggucaacgccgccaacguguaccugaagcacgggggcggcguggccggggcccugaacaaggcgaccaacaacgccaugcaggucgaguccgacgacuacaucgccacgaacggcccccucaagguggggggcagcugcguccuguccggccacaaccuggccaagcacugccuccacgugguggggcccaacgucaacaagggcgaggacauccagcugcugaagagcgccuacgagaacuucaaccagcacgaggugcuccuggcgccgcugcucuccgccgggaucuucggcgccgaccccauccacagccugcgggugugcgucgacaccgugcgcaccaacguguaccuggccgucuucgacaagaaccucuacgacaagcugguguccagcuuccuggagaugaagagcgagaagcagguggagcagaagaucgccgagauccccaaggaggaggucaagcccuucaucaccgaguccaagccgagcguggagcagcggaagcaggacgacaagaagaucaaggcgugcguggaggaggucacgaccacccucgaggagaccaaguuccugacggagaaccugcuccuguacaucgacaucaacgggaaccugcaccccgacuccgccacccucgugagcgacaucgacaucaccuuccugaagaaggacgcccccuacauggugggcgacgucgugcaggagggcgugcugaccgccgucgugauccccacgaagaaggccgggggcaccaccgagaugcucgcgaaggcccugcgcaaggugccgaccgacaacuacaucacgaccuaccccgggcagggccugaacggguacaccgucgaggaggccaagaccgugcucaagaagugcaaguccgccuucuacauccugcccagcaucaucuccaacgagaagcaggagauccugggcaccgugagcuggaaccuccgggagaugcuggcgcacgccgaggagacgcgcaagcugaugcccgucugcguggagaccaaggccaucguguccaccauccagcggaaguacaagggcaucaagauccaggagggggucguggacuacggcgcccgcuucuacuucuacaccagcaagacgaccguggccucccugaucaacacccucaacgaccugaacgagacccuggucacgaugccgcucggguacgugacccacggccugaaccuggaggaggcggcccgguacaugcgcagccucaaggugcccgccaccgucuccgugagcucccccgacgccgugaccgccuacaacggguaccugacgagcuccagcaagacccccgaggagcacuucaucgagaccaucucccuggcgggcagcuacaaggacuggagcuacuccggccagagcacccagcucgggaucgaguuccugaagcggggcgacaaguccgucuacuacacgagcaacccgaccaccuuccaccuggacggggaggugaucaccuucgacaaccucaagacgcugcugucccuccgcgaggugcggaccaucaaggucuucaccaccguggacaacaucaaccugcacacgcagguggucgacaugagcaugaccuacggccagcaguucggccccaccuaccuggacggggccgacgugaccaagaucaagccccacaacucccacgagggcaagacguucuacgugcucccgaacgacgacacccugcgcgucgaggccuucgaguacuaccacaccaccgaccccagcuuccuggggcgguacauguccgcccucaaccacacgaagaaguggaaguacccccaggugaacggccugaccagcaucaagugggccgacaacaacugcuaccuggcgaccgcccuccugacccugcagcagaucgagcucaaguucaaccccccggcccugcaggacgccuacuaccgcgcgcgggccggggaggccgccaacuucugcgcccugauccucgcguacugcaacaagacggugggcgagcugggcgacguccgcgagaccauguccuaccuguuccagcacgccaaccucgacagcugcaagcgggugcugaacgucgugugcaagaccugcgggcagcagcagaccacccugaagggcguggaggccgucauguacauggggacgcucuccuacgagcaguucaagaagggcgugcagauccccugcaccugcgggaagcaggccaccaaguaccuggugcagcaggagagccccuucgucaugauguccgcccccccggcgcaguacgagcugaagcacggcaccuucacgugcgccagcgaguacaccggcaacuaccagugcgggcacuacaagcacaucaccuccaaggagacccucuacugcaucgacggcgcccugcugacgaagagcagcgaguacaaggggcccaucaccgacguguucuacaaggagaacuccuacaccaccacgaucaagcccgugaccuacaagcucgacggcgucgugugcaccgagaucgaccccaagcuggacaacuacuacaagaaggacaacagcuacuucaccgagcagccgaucgaccuggugcccaaccagcccuaccccaacgccuccuucgacaacuucaaguucgucugcgacaacaucaaguucgccgacgaccucaaccagcugacgggguacaagaagccggcgagccgcgagcugaaggugaccuucuuccccgaccucaacggcgacguggucgccaucgacuacaagcacuacacccccuccuucaagaagggcgccaagcugcugcacaagcccaucguguggcacgugaacaacgccaccaacaaggcgacguacaagccgaacaccuggugcauccggugccucuggagcaccaagcccgucgagaccuccaacagcuucgacgugcugaaguccgaggacgcccaggggauggacaaccuggccugcgaggaccucaagcccgugagcgaggaggucguggagaaccccacgauccagaaggacgugcuggagugcaacgucaagaccaccgagguggugggcgacaucauccugaagccggccaacaacucccucaagaucaccgaggaggucgggcacacggaccugauggccgcguacguggacaacagcucccugaccaucaagaagcccaacgagcucagccgcgugcugggccugaagacccucgccacccacgggcuggccgccgucaacuccgugcccugggacacgaucgccaacuacgcgaagccguuccugaacaagguggucagcaccaccaccaacaucgugacgcgcugccucaaccgggugugcaccaacuacaugcccuacuucuucacccugcugcuccagcugugcaccuucacccgcuccacgaacagccggaucaaggccuccaugcccaccaccaucgccaagaacaccgucaagagcgugggcaaguucugccuggaggccagcuucaacuaccucaagucccccaacuucagcaagcugaucaacaucaucaucugguuccugcuccuguccgugugccugggcagccucaucuacuccacggccgcgcuggggguccugaugagcaaccucggcaugccguccuacugcaccggguaccgcgagggcuaccugaacagcaccaacgugaccaucgccacguacugcaccggcuccauccccugcagcgugugccuguccgggcucgacagccuggacaccuaccccucccuggagaccauccagaucacgaucagcuccuucaagugggaccucaccgccuucggccuggucgccgagugguuccuggccuacauccucuucacccgguucuucuacgugcuggggcuggcggccaucaugcagcucuucuucagcuacuucgccgugcacuucaucuccaacagcuggcugauguggcugaucaucaaccugguccagauggcccccaucuccgcgauggugcgcauguacaucuucuucgccagcuucuacuacguguggaagagcuacguccacgugguggacggcugcaacuccagcaccugcaugaugugcuacaagcggaaccgcgccacgcgggucgagugcaccaccaucgugaacgggguccgccgguccuucuacguguacgccaacggcggcaagggguucugcaagcuccacaacuggaacugcgugaacugcgacaccuucugcgccggcagcacguucaucuccgacgaggucgcgcgcgaccugagccugcaguucaagcggccgaucaaccccaccgaccaguccagcuacaucguggacuccgugaccgucaagaacgggagcauccaccucuacuucgacaaggccggccagaagaccuacgagcgccacucccugagccacuucgugaaccuggacaaccuccgggccaacaacacgaaggggucccugcccaucaacgugaucgucuucgacggcaagagcaagugcgaggaguccagcgccaaguccgccagcguguacuacucccagcugaugugccagcccauccuccugcuggaccaggcgcucgugagcgacgucggcgacagcgccgagguggccgugaagauguucgacgccuacgucaacaccuucuccagcaccuucaacgugccgauggagaagcugaagacccugguggccacggcggaggccgagcucgccaagaacgucucccuggacaacgugcugagcaccuucaucuccgccgcgcgccagggguucguggacagcgacgucgagaccaaggacgugguggagugccucaagcugucccaccagagcgacaucgaggucaccggcgacuccugcaacaacuacaugcugacguacaacaagguggagaacaugaccccccgggaccucggggccugcaucgacugcagcgcccgccacaucaacgcccagguggccaagucccacaacaucgcgcugaucuggaacgucaaggacuucaugagccuguccgagcagcuccggaagcagauccgcagcgccgccaagaagaacaaccugcccuucaagcugaccugcgccaccacgcgccagguggugaacgucgugaccaccaagaucgcccucaagggcgggugaggacuaguuauaagacugacuagcccgaugggccucccaacgggcccuccuccccuccuugcaccgagauuaauaaaaaaaaaaaaaaaaaaaaaaaaaaaaaaaaaaaaaaaaaaaaaaaaaaaaaaaaaaaaaaaaugcaucccccccccccccccccccccccccccccccaaaggcucuuuucagagccaccagaauu

SEQ ID NO: 21770 - RNA, 6058 nt, Artificial Sequence
  SARS-CoV-2__MT704088.1__non-structural protein 3 (NSP3) mRNA gc
aggagaaagcuuaccauggcccccaccaaggugaccuucggcgacgacacggucaucgaggugcagggguacaagagcgugaacaucaccuucgagcuggacgagcgcaucgacaagguccucaacgagaagugcuccgccuacaccguggagcugggcaccgaggugaacgaguucgcgugcgucguggccgacgccgugaucaagacgcugcagccggucagcgagcuccugaccccccuggggaucgaccucgacgagugguccauggccaccuacuaccuguucgacgagagcggcgaguucaagcuggccucccacauguacugcagcuucuacccccccgacgaggacgaggaggagggggacugcgaggaggaggaguucgagccguccacccaguacgaguacggcacggaggacgacuaccagggcaagccccucgaguucggggcgaccagcgccgcccugcagcccgaggaggagcaggaggaggacuggcuggacgacgacucccagcagaccgugggccagcaggacgggagcgaggacaaccagaccacgaccauccagaccaucguggagguccagccccagcucgagauggagcugaccccgguggugcagacgaucgaggucaacuccuucagcggcuaccugaagcucaccgacaacguguacaucaagaacgccgacaucguggaggaggcgaagaaggucaagcccaccgugguggucaacgccgccaacguguaccugaagcacgggggcggcguggccggggcccugaacaaggcgaccaacaacgccaugcaggucgaguccgacgacuacaucgccacgaacggcccccucaagguggggggcagcugcguccuguccggccacaaccuggccaagcacugccuccacgugguggggcccaacgucaacaagggcgaggacauccagcugcugaagagcgccuacgagaacuucaaccagcacgaggugcuccuggcgccgcugcucuccgccgggaucuucggcgccgaccccauccacagccugcgggugugcgucgacaccgugcgcaccaacguguaccuggccgucuucgacaagaaccucuacgacaagcugguguccagcuuccuggagaugaagagcgagaagcagguggagcagaagaucgccgagauccccaaggaggaggucaagcccuucaucaccgaguccaagccgagcguggagcagcggaagcaggacgacaagaagaucaaggcgugcguggaggaggucacgaccacccucgaggagaccaaguuccugacggagaaccugcuccuguacaucgacaucaacgggaaccugcaccccgacuccgccacccucgugagcgacaucgacaucaccuuccugaagaaggacgcccccuacaucgugggcgacgucgugcaggagggcgugcugaccgccgucgugauccccacgaagaaggccgggggcaccaccgagaugcucgcgaaggcccugcgcaaggugccgaccgacaacuacaucacgaccuaccccgggcagggccugaacggguacaccgucgaggaggccaagaccgugcucaagaagugcaaguccgccuucuacauccugcccagcaucaucuccaacgagaagcaggagauccugggcaccgugagcuggaaccuccgggagaugcuggcgcacgccgaggagacgcgcaagcugaugcccgucugcguggagaccaaggccaucguguccaccauccagcggaaguacaagggcaucaagauccaggagggggucguggacuacggcgcccgcuucuacuucuacaccagcaagacgaccguggccucccugaucaacacccucaacgaccugaacgagacccuggucacgaugccgcucggguacgugacccacggccugaaccuggaggaggcggcccgguacaugcgcagccucaaggugcccgccaccgucuccgugagcucccccgacgccgugaccgccuacaacggguaccugacgagcuccagcaagacccccgaggagcacuucaucgagaccaucucccuggcgggcagcuacaaggacuggagcuacuccggccagagcacccagcucgggaucgaguuccugaagcggggcgacaaguccgucuacuacacgagcaacccgaccaccuuccaccuggacggggaggugaucaccuucgacaaccucaagacgcugcugucccuccgcgaggugcggaccaucaaggucuucaccaccguggacaacaucaaccugcacacgcagguggucgacaugagcaugaccuacggccagcaguucggccccaccuaccuggacggggccgacgugaccaagaucaagccccacaacucccacgagggcaagacguucuacgugcucccgaacgacgacacccugcgcgucgaggccuucgaguacuaccacaccaccgacagcuccuuccuggggcgguacaugagcgcccucaaccacacgaagaaguggaaguacccccaggugaacggccugaccuccaucaagugggccgacaacaacugcuaccuggcgaccgcccuccugacccugcagcagaucgagcucaaguucaacccccccgcccugcaggacgccuacuaccgcgcgcgggccggggaggccgccaacuucugcgcccugauccucgcguacugcaacaagacggugggcgagcugggcgacguccgcgagaccaugagcuaccuguuccagcacgccaaccucgacuccugcaagcgggugcugaacgucgugugcaagaccugcgggcagcagcagaccacccugaagggcguggaggccgucauguacauggggacgcucagcuacgagcaguucaagaagggcgugcagaucccgugcaccugcgggaagcaggccaccaaguaccuggugcagcaggagucccccuucgucaugaugagcgccccccccgcgcaguacgagcugaagcacggcaccuucacgugcgccuccgaguacaccggcaacuaccagugcgggcacuacaagcacaucaccagcaaggagacccucuacugcaucgacggcgcccugcugacgaagagcuccgaguacaaggggccgaucaccgacguguucuacaaggagaacagcuacaccaccacgaucaagcccgugaccuacaagcucgacggcgucgugugcaccgagaucgaccccaagcuggacaacuacuacaagaaggacaacuccuacuucaccgagcagcccaucgaccuggugccgaaccagcccuaccccaacgccagcuucgacaacuucaaguucgucugcgacaacaucaaguucgccgacgaccucaaccagcugacgggguacaagaagcccgcgucccgcgagcugaaggugaccuucuucccggaccucaacggcgacguggucgccaucgacuacaagcacuacacccccagcuucaagaagggcgccaagcugcugcacaagcccaucguguggcacgugaacaacgccaccaacaaggcgacguacaagcccaacaccuggugcauccggugccucugguccaccaagccggucgagaccagcaacuccuucgacgugcugaagagcgaggacgcccaggggauggacaaccuggccugcgaggaccucaagcccguguccgaggaggucguggagaaccccacgauccagaaggacgugcuggagugcaacgucaagaccaccgagguggugggcgacaucauccugaagcccgccaacaacagccucaagaucaccgaggaggucgggcacacggaccugauggccgcguacguggacaacuccagccugaccaucaagaagccgaacgagcucucccgcgugcugggccugaagacccucgccacccacgggcuggccgccgucaacagcgugcccugggacacgaucgccaacuacgcgaagcccuuccugaacaagguggucuccaccaccaccaacaucgugacgcgcugccucaaccgggugugcaccaacuacaugccguacuucuucacccugcugcuccagcugugcaccuucacccgcagcacgaacucccggaucaaggccagcaugcccaccaccaucgccaagaacaccgucaagagcgugggcaaguucugccuggaggccuccuucaacuaccucaagagccccaacuucuccaagcugaucaacaucaucaucugguuccugcuccugagcgugugccugggcucccuccuguacagcacggccgcgcuggggguccucauguccaaccugggcaugcccagcuacugcaccggguaccgcgagggcuaccugaacuccaccaacgugaccaucgccacguacugcaccggcagcaucccgugcuccgugugccucagcgggcuggacucccuggacaccuaccccagccucgagaccauccagaucacgaucuccagcuucaagugggaccugaccgccuucggccuggucgccgagugguuccucgccuacauccuguucacccgguucuucuacgugcuggggcucgcggccaucaugcagcuguucuucuccuacuucgccgugcacuucaucagcaacuccuggcugauguggcugaucaucaaccucguccagauggcccccaucagcgcgauggugcgcauguacaucuucuucgccagcuucuacuacguguggaaguccuacguccacgugguggacggcugcaacagcuccaccugcaugaugugcuacaagcggaaccgcgccacgcgggucgagugcaccaccaucgugaacgggguccgccggagcuucuacguguacgccaacggcggcaagggguucugcaagcugcacaacuggaacugcgugaacugcgacaccuucugcgccggcuccacguucaucagcgacgaggucgcgcgcgaccugucccuccaguucaagcggcccaucaacccgaccgaccagagcuccuacaucguggacagcgugaccgucaagaacggguccauccaccuguacuucgacaaggccggccagaagaccuacgagcgccacagccugucccacuucgugaaccucgacaaccugcgggccaacaacacgaaggggagccugcccaucaacgugaucgucuucgacggcaaguccaagugcgaggagagcuccgccaagagcgccuccguguacuacagccagcucaugugccagcccauccugcugcucgaccaggcgcuggugagcgacgucggcgacuccgccgagguggccgugaagauguucgacgccuacgucaacaccuucagcuccaccuucaacgugcccauggagaagcugaagacccucguggccacggcggaggccgagcuggccaagaacgucagccuggacaacgugcucuccaccuucaucagcgccgcgcgccagggguucguggacuccgacgucgagaccaaggacgugguggagugccugaagcugagccaccaguccgacaucgaggucaccggcgacagcugcaacaacuacaugcucacguacaacaagguggagaacaugaccccgcgggaccugggggccugcaucgacugcuccgcccgccacaucaacgcccagguggccaagagccacaacaucgcgcugaucuggaacgucaaggacuucaugucccucagcgagcagcugcggaagcagauccgcuccgccgccaagaagaacaaccugcccuucaagcucaccugcgccaccacgcgccagguggugaacgucgugaccaccaagaucgcccugaagggcgggugaggacuaguuauaagacugacuagcccgaugggccucccaacgggcccuccuccccuccuugcaccgagauuaauaaaaaaaaaaaaaaaaaaaaaaaaaaaaaaaaaaaaaaaaaaaaaaaaaaaaaaaaaaaaaaaaugcaucccccccccccccccccccccccccccccccaaaggcucuuuucagagccaccagaauu

SEQ ID NO: 21771 - RNA, 6058 nt, Artificial Sequence
  SARS-CoV-2__MT704100.1__non-structural protein 3 (NSP3) mRNA gc
aggagaaagcuuaccauggcccccaccaaggugaccuucggcgacgacacggucaucgaggugcagggguacaagagcgugaacaucaccuucgagcuggacgagcgcaucgacaagguccucaacgagaagugcuccgccuacaccguggagcugggcaccgaggugaacgaguucgcgugcgucguggccgacgccgugaucaagacgcugcagccggucagcgagcuccugaccccccuggggaucgaccucgacgagugguccauggccaccuacuaccuguucgacgagagcggcgaguucaagcuggccucccacauguacugcagcuucuacccccccgacgaggacgaggaggagggggacugcgaggaggaggaguucgagccguccacccaguacgaguacggcacggaggacgacuaccagggcaagccccucgaguucggggcgaccagcgccgcccugcagcccgaggaggagcaggaggaggacuggcuggacgacgacucccagcagaccgugggccagcaggacgggagcgaggacaaccagaccacgaccauccagaccaucguggagguccagccccagcucgagauggagcugaccccgguggugcagacgaucgaggucaacuccuucagcggcuaccugaagcucaccgacaacguguacaucaagaacgccgacaucguggaggaggcgaagaaggucaagcccaccgugguggucaacgccgccaacguguaccugaagcacgggggcggcguggccggggcccugaacaaggcgaccaacaacgccaugcaggucgaguccgacgacuacaucgccacgaacggcccccucaagguggggggcagcugcguccuguccggccacaaccuggccaagcacugccuccacgugguggggcccaacgucaacaagggcgaggacauccagcugcugaagagcgccuacgagaacuucaaccagcacgaggugcuccuggcgccgcugcucuccgccgggaucuucggcgccgaccccauccacagccugcgggugugcgucgacaccgugcgcaccaacguguaccuggccgucuucgacaagaaccucuacgacaagcugguguccagcuuccuggagaugaagagcgagaagcagguggagcagaagaucgccgagauccccaaggaggaggucaagcccuucaucaccgaguccaagccgagcguggagcagcggaagcaggacgacaagaagaucaaggcgugcguggaggaggucacgaccacccucgaggagaccaaguuccugacggagaaccugcuccuguacaucgacaucaacgggaaccugcaccccgacuccgccacccucgugagcgacaucgacaucaccuuccugaagaaggacgcccccuacaucgugggcgacgucgugcaggagggcgugcugaccgccgucgugauccccacgaagaaggccgggggcaccaccgagaugcucgcgaaggcccugcgcaaggugccgaccgacaacuacaucacgaccuaccccgggcagggccugaacggguacaccgucgaggaggccaagaccgugcucaagaagugcaaguccgccuucuacauccugcccagcaucaucuccaacgagaagcaggagauccugggcaccgugagcuggaaccuccgggagaugcuggcgcacgccgaggagacgcgcaagcugaugcccgucugcguggagaccaaggccaucguguccaccauccagcggaaguacaagggcaucaagauccaggagggggucguggacuacggcgcccgcuucuacuucuacaccagcaagacgaccguggccucccugaucaacacccucaacgaccugaacgagacccuggucacgaugccgcucggguacgugacccacggccugaaccuggaggaggcggcccgguacaugcgcagccucaaggugcccgccaccgucuccgugagcucccccgacgccgugaccgccuacaacggguaccugacgagcuccagcaagacccccgaggagcacuucaucgagaccaucucccuggcgggcagcuacaaggacuggagcuacuccggccagagcacccagcucgggaucgaguuccugaagcggggcgacaaguccgucuacuacacgagcaacccgaccaccuuccaccuggacggggaggugaucaccuucgacaaccucaagacgcugcugucccuccgcgaggugcggaccaucaaggucuucaccaccguggacaacaucaaccugcacacgcagguggucgacaugagcaugaccuacggccagcaguucggccccaccuaccuggacggggccgacgugaccaagaucaagccccacaacucccacgagggcaagacguucuacgugcucccgaacgacgacacccugcgcgucgaggccuucgaguacuaccacaccaccgaccccagcuuccuggggcgguacauguccgcccucaaccacacgaagaaguggaaguacccccaggugaacggccugaccagcaucaagugggccgacaacaacugcuaccuggcgaccgcccuccugacccugcagcagaucgagcucaaguucaaccccccggcccugcaggacgccuacuaccgcgcgcgggccggggaggccgccaacuucugcgcccugauccucgcguacugcaacaagacggugggcgagcugggcgacguccgcgagaccauguccuaccuguuccagcacgccaaccucgacagcugcaagcgggugcugaacgucgugugcaagaccugcgggcagcagcagaccacccugaagggcguggaggccgucauguacauggggacgcucuccuacgagcaguucaagaagggcgugcagauccccugcaccugcgggaagcaggccaccaaguaccuggugcagcaggagagccccuucgucaugauguccgcccccccggcgcaguacgagcugaagcacggcaccuucacgugcgccagcgaguacaccggcaacuaccagugcgggcacuacaagcacaucaccuccaaggagacccucuacugcaucgacggcgcccugcugacgaagagcagcgaguacaaggggcccaucaccgacguguucuacaaggagaacuccuacaccaccacgaucaagcccgugaccuacaagcucgacggcgucgugugcaccgagaucgaccccaagcuggacaacuacuacaagaaggacaacagcuacuucaccgagcagccgaucgaccuggugcccaaccagcccuaccccaacgccuccuucgacaacuucaaguucgucugcgacaacaucaaguucgccgacgaccucaaccagcugacgggguacaagaagccggcgagccgcgagcugaaggugaccuucuuccccgaccucaacggcgacguggucgccaucgacuacaagcacuacacccccuccuucaagaagggcgccaagcugcugcacaagcccaucguguggcacgugaacaacgccaccaacaaggcgacguacaagccgaacaccuggugcauccggugccucuggagcaccaagcccgucgagaccuccaacagcuucgacgugcugaaguccgaggacgcccaggggauggacaaccuggccugcgaggaccucaagcccgugagcgaggaggucguggagaaccccacgauccagaaggacgugcuggagugcaacgucaagaccaccgagguggugggcgacaucauccugaagccggccaacaacucccucaagaucaccgaggaggucgggcacacggaccugauggccgcguacguggacaacagcucccugaccaucaagaagcccaacgagcucagccgcgugcugggccugaagacccucgccacccacgggcuggccgccgucaacuccgugcccugggacacgaucgccaacuacgcgaagccguuccugaacaagguggucagcaccaccaccaacaucgugacgcgcugccucaaccgggugugcaccaacuacaugcccuacuucuucacccugcugcuccagcugugcaccuucacccgcuccacgaacagccggaucaaggccuccaugcccaccaccaucgccaagaacaccgucaagagcgugggcaaguucugccuggaggccagcuucaacuaccucaagucccccaacuucagcaagcugaucaacaucaucaucugguuccugcuccuguccgugugccugggcagccucaucuacuccacggccgcgcuggggguccugaugagcaaccucggcaugccguccuacugcaccggguaccgcgagggcuaccugaacagcaccaacgugaccaucgccacguacugcaccggcuccauccccugcagcgugugccuguccgggcucgacagccuggacaccuaccccucccuggagaccauccagaucacgaucagcuccuucaagugggaccucaccgccuucggccuggucgccgagugguuccuggccuacauccucuucacccgguucuucuacgugcuggggcuggcggccaucaugcagcucuucuucagcuacuucgccgugcacuucaucuccaacagcuggcugauguggcugaucaucaaccugguccagauggcccccaucuccgcgauggugcgcauguacaucuucuucgccagcuucuacuacguguggaagagcuacguccacgugguggacggcugcaacuccagcaccugcaugaugugcuacaagcggaaccgcgccacgcgggucgagugcaccaccaucgugaacgggguccgccgguccuucuacguguacgccaacggcggcaagggguucugcaagcuccacaacuggaacugcgugaacugcgacaccuucugcgccggcagcacguucaucuccgacgaggucgcgcgcgaccugagccugcaguucaagcggccgaucaaccccaccgaccaguccagcuacaucguggacuccgugaccgucaagaacgggagcauccaccucuacuucgacaaggccggccagaagaccuacgagcgccacucccugagccacuucgugaaccuggacaaccuccgggccaacaacacgaaggggucccugcccaucaacgugaucgucuucgacggcaagagcaagugcgaggaguccagcgccaaguccgccagcguguacuacucccagcugaugugccagcccauccuccugcuggaccaggcgcucgugagcgacgucggcgacagcgccgagguggccgugaagauguucgacgccuacgucaacaccuucuccagcaccuucaacgugccgauggagaagcugaagacccugguggccacggcggaggccgagcucgccaagaacgucucccuggacaacgugcugagcaccuucaucuccgccgcgcgccagggguucguggacagcgacgucgagaccaaggacgugguggagugccucaagcugucccaccagagcgacaucgaggucaccggcgacuccugcaacaacuacaugcugacguacaacaagguggagaacaugaccccccgggaccucggggccugcaucgacugcagcgcccgccacaucaacacccagguggccaagucccacaacaucgcccugaucuggaacgucaaggacuucaugagccuguccgagcagcuccggaagcagauccgcagcgcggccaagaagaacaaccugcccuucaagcugaccugcgccacgacccgccagguggugaacgucgugaccaccaagaucgcccucaagggcgggugaggacuaguuauaagacugacuagcccgaugggccucccaacgggcccuccuccccuccuugcaccgagauuaauaaaaaaaaaaaaaaaaaaaaaaaaaaaaaaaaaaaaaaaaaaaaaaaaaaaaaaaaaaaaaaaaugcaucccccccccccccccccccccccccccccccaaaggcucuuuucagagccaccagaauu

SEQ ID NO: 21772 - RNA, 6058 nt, Artificial Sequence
  SARS-CoV-2__MT683408.1__non-structural protein 3 (NSP3) mRNA gc
aggagaaagcuuaccauggcccccaccaaggugaccuucggcgacgacacggucaucgaggugcagggguacaagagcgugaacaucaccuucgagcuggacgagcgcaucgacaagguccucaacgagaagugcuccgccuacaccguggagcugggcaccgaggugaacgaguucgcgugcgucguggccgacgccgugaucaagacgcugcagccggucagcgagcuccugaccccccuggggaucgaccucgacgagugguccauggccaccuacuaccuguucgacgagagcggcgaguucaagcuggccucccacauguacugcagcuucuacccccccgacgaggacgaggaggagggggacugcgaggaggaggaguucgagccguccacccaguacgaguacggcacggaggacgacuaccagggcaagccccucgaguucggggcgaccagcgccgcccugcagcccgaggaggagcaggaggaggacuggcuggacgacgacucccagcagaccgugggccagcaggacgggagcgaggacaaccagaccacgaccauccagaccaucguggagguccagccccagcucgagauggagcugaccccgguggugcagacgaucgaggucaacuccuucagcggcuaccugaagcucaccgacaacguguacaucaagaacgccgacaucguggaggaggcgaagaaggucaagcccaccgugguggucaacgccgccaacguguaccugaagcacgggggcggcguggccggggcccugaacaaggcgaccaacaacgccaugcaggucgaguccgacgacuacaucgccacgaacggcccccucaagguggggggcagcugcguccuguccggccacaaccuggccaagcacugccuccacgugguggggcccaacgucaacaagggcgaggacauccagcugcugaagagcgccuacgagaacuucaaccagcacgaggugcuccuggcgccgcugcucuccgccgggaucuucggcgccgaccccauccacagccugcgggugugcgucgacaccgugcgcaccaacguguaccuggccgucuucgacaagaaccucuacgacaagcugguguccagcuuccuggagaugaagagcgagaagcagguggagcagaagaucgccgagauccccaaggaggaggucaagcccuucaucaccgaguccaagccgagcguggagcagcggaagcaggacgacaagaagaucaaggcgugcguggaggaggucacgaccacccucgaggagaccaaguuccugacggagaaccugcuccuguacaucgacaucaacgggaaccugcaccccgacuccgccacccucgugagcgacaucgacaucaccuuccugaagaaggacgcccccuacaucgugggcgacgucgugcaggagggcgugcugaccgccgucgugauccccacgaagaaggccgggggcaccaccgagaugcucgcgaaggcccugcgcaaggugccgaccgacaacuacaucacgaccuaccccgggcagggccugaacggguacaccgucgaggaggccaagaccgugcucaagaagugcaaguccgccuucuacauccugcccagcaucaucuccaacgagaagcaggagauccugggcaccgugagcuggaaccuccgggagaugcuggcgcacgccgaggagacgcgcaagcugaugcccgucugcguggagaccaaggccaucguguccaccauccagcggaaguacaagggcaucaagauccaggagggggucguggacuacggcgcccgcuucuacuucuacaccagcaagacgaccguggccucccugaucaacacccucaacgaccugaacgagacccuggucacgaugccgcucggguacgugacccacggccugaaccuggaggaggcggcccgguacaugcgcagccucaaggugcccgccaccgucuccgugagcucccccgacgccgugaccgccuacaacggguaccugacgagcuccagcaagacccccgaggagcacuucaucgagaccaucucccuggcgggcagcuacaaggacuggagcuacuccggccagagcacccagcucgggaucgaguuccugaagcggggcgacaaguccgucuacuacacgagcaacccgaccaccuuccaccuggacggggaggugaucaccuucgacaaccucaagacgcugcugucccuccgcgaggugcggaccaucaaggucuucaccaccguggacaacaucaaccugcacacgcagguggucgacaugagcaugaccuacggccagcaguucggccccaccuaccuggacggggccgacgugaccaagaucaagccccacaacucccacgagggcaagacguucuacgugcucccgaacgacgacacccugcgcgucgaggccuucgaguacuaccacaccaccgaccccagcuuccuggggcgguacauguccgcccucaaccacacgaagaaguggaaguacccccaggugaacggccugaccagcaucaagugggccgacaacaacugcuaccuggcgaccgcccuccugacccugcagcagaucgagcucaaguucaaccccccggcccugcaggacgccuacuaccgcgcgcgggccggggaggccgccaacuucugcgcccugauccucgcguacugcaacaagacggugggcgagcugggcgacguccgcgagaccauguccuaccuguuccagcacgccaaccucgacagcugcaagcgggugcugaacgucgugugcaagaccugcgggcagcagcagaccacccugaagggcguggaggccgucauguacauggggacgcucuccuacgagcaguucaagaagggcgugcagauccccugcaccugcgggaagcaggccaccaaguaccuggugcagcaggagagccccuucgucaugauguccgcccccccggcgcaguacgagcugaagcacggcaccuucacgugcgccagcgaguacaccggcaacuaccagugcgggcacuacaagcacaucaccuccaaggagacccucuacugcaucgacggcgcccugcugacgaagagcagcgaguacaaggggcccaucaccgacguguucuacaaggagaacuccuacaccaccacgaucaagcccgugaccuacaagcucgacggcgucgugugcaccgagaucgaccccaagcuggacaacuacuacaagaaggacaacagcuacuucaccgagcagccgaucgaccuggugcccaaccagcccuaccccaacgccuccuucgacaacuucaaguucgucugcgacaacaucaaguucgccgacgaccucaaccagcugacgggguacaagaagccggcgagccgcgagcugaaggugaccuucuuccccgaccucaacggcgacguggucgccaucgacuacaagcacuacacccccuccuucaagaagggcgccaagcugcugcacaagcccaucguguggcacgugaacaacgccaccaacaaggcgacguacaagccgaacaccuggugcauccggugccucuggagcaccaagcccgucgagaccuccaacagcuucgacgugcugaaguccgaggacgcccaggggauggacaaccuggccugcgaggaccucaagcccgugagcgaggaggucguggagaaccccacgauccagaaggacgugcuggagugcaacgucaagaccaccgagguggugggcgacaucauccugaagccggccaacaacucccucaagaucaccgaggaggucgggcacacggaccugauggccgcguacguggacaacagcucccugaccaucaagaagcccaacgagcucagccgcgugcugggccugaagacccucgccacccacgggcuggccgccgucaacuccgugcccugggacacgaucgccaacuacgcgcgcccguuccugaacaagguggucagcaccaccaccaacaucgugacgcggugccucaaccgcgugugcaccaacuacaugcccuacuucuucacccugcugcuccagcugugcaccuucacccgguccacgaacagccgcaucaaggccuccaugcccaccaccaucgccaagaacaccgucaagagcgugggcaaguucugccuggaggccagcuucaacuaccucaagucccccaacuucagcaagcugaucaacaucaucaucugguuccugcuccuguccgugugccugggcagccucaucuacuccacggccgcgcuggggguccugaugagcaaccucggcaugccguccuacugcaccggguaccgggagggcuaccugaacagcaccaacgugaccaucgccacguacugcaccggcuccauccccugcagcgugugccuguccgggcucgacagccuggacaccuaccccucccuggagaccauccagaucacgaucagcuccuucaagugggaccucaccgccuucggccuggucgccgagugguuccuggccuacauccucuucacccgcuucuucuacgugcuggggcuggcggccaucaugcagcucuucuucagcuacuucgccgugcacuucaucuccaacagcuggcugauguggcugaucaucaaccugguccagauggcccccaucuccgcgauggugcggauguacaucuucuucgccagcuucuacuacguguggaagagcuacguccacgugguggacggcugcaacuccagcaccugcaugaugugcuacaagcgcaaccgggccacgcgcgucgagugcaccaccaucgugaacgggguccggcgcuccuucuacguguacgccaacggcggcaagggguucugcaagcuccacaacuggaacugcgugaacugcgacaccuucugcgccggcagcacguucaucuccgacgaggucgcgcgggaccugagccugcaguucaagcgcccgaucaaccccaccgaccaguccagcuacaucguggacuccgugaccgucaagaacgggagcauccaccucuacuucgacaaggccggccagaagaccuacgagcggcacucccugagccacuucgugaaccuggacaaccuccgcgccaacaacacgaaggggucccugcccaucaacgugaucgucuucgacggcaagagcaagugcgaggaguccagcgccaaguccgccagcguguacuacucccagcugaugugccagcccauccuccugcuggaccaggcgcucgugagcgacgucggcgacagcgccgagguggccgugaagauguucgacgccuacgucaacaccuucuccagcaccuucaacgugccgauggagaagcugaagacccugguggccacggcggaggccgagcucgccaagaacgucucccuggacaacgugcugagcaccuucaucuccgccgcgcggcagggguucguggacagcgacgucgagaccaaggacgugguggagugccucaagcugucccaccagagcgacaucgaggucaccggcgacuccugcaacaacuacaugcugacguacaacaagguggagaacaugaccccccgcgaccucggggccugcaucgacugcagcgcccggcacaucaacgcccagguggccaagucccacaacaucgcgcugaucuggaacgucaaggacuucaugagccuguccgagcagcuccgcaagcagauccgcagcgccgccaagaagaacaaccugcccuucaagcugaccugcgccaccacgcggcagguggugaacgucgugaccaccaagaucgcccucaagggcgggugaggacuaguuauaagacugacuagcccgaugggccucccaacgggcccuccuccccuccuugcaccgagauuaauaaaaaaaaaaaaaaaaaaaaaaaaaaaaaaaaaaaaaaaaaaaaaaaaaaaaaaaaaaaaaaaaugcaucccccccccccccccccccccccccccccccaaaggcucuuuucagagccaccagaauu

SEQ ID NO: 21773 - RNA, 6058 nt, Artificial Sequence
  SARS-CoV-2__MT627391.1__non-structural protein 3 (NSP3) mRNA gc
aggagaaagcuuaccauggcccccaccaaggugaccuucggcgacgacacggucaucgaggugcagggguacaagagcgugaacaucaccuucgagcuggacgagcgcaucgacaagguccucaacgagaagugcuccgccuacaccguggagcugggcaccgaggugaacgaguucgcgugcgucguggccgacgccgugaucaagacgcugcagccggucagcgagcuccugaccccccuggggaucgaccucgacgagugguccauggccaccuacuaccuguucgacgagagcggcgaguucaagcuggccucccacauguacugcagcuucuacccccccgacgaggacgaggaggagggggacugcgaggaggaggaguucgagccguccacccaguacgaguacggcacggaggacgacuaccagggcaagccccucgaguucggggcgaccagcgccgcccugcagcccgaggaggagcaggaggaggacuggcuggacgacgacucccagcagaccgugggccagcaggacgggagcgaggacaaccagaccacgaccauccagaccaucguggagguccagccccagcucgagauggagcugaccccgguggugcagacgaucgaggucaacuccuucagcggcuaccugaagcucaccgacaacguguacaucaagaacgccgacaucguggaggaggcgaagaaggucaagcccaccgugguggucaacgccgccaacguguaccugaagcacgggggcggcguggccggggcccugaacaaggcgaccaacaacgccaugcaggucgaguccgacgacuacaucgccacgaacggcccccucaagguggggggcagcugcguccuguccggccacaaccuggccaagcacugccuccacgugguggggcccaacgucaacaagggcgaggacauccagcugcugaagagcgccuacgagaacuucaaccagcacgaggugcuccuggcgccgcugcucuccgccgggaucuucggcgccgaccccauccacagccugcgggugugcgucgacaccgugcgcaccaacguguaccuggccgucuucgacaagaaccucuacgacaagcugguguccagcuuccuggagaugaagagcgagaagcagguggagcagaagaucgccgagauccccaaggaggaggucaagcccuucaucaccgaguccaagccgagcguggagcagcggaagcaggacgacaagaagaucaaggcgugcguggaggaggucacgaccacccucgaggagaccaaguuccugacggagaaccugcuccuguacaucgacaucaacgggaaccugcaccccgacuccgccacccucgugagcgacaucgacaucaccuuccugaagaaggacgcccccuacaucgugggcgacgucgugcaggagggcgugcugaccgccgucgugauccccacgaagaaggccgggggcaccaccgagaugcucgcgaaggcccugcgcaaggugccgaccgacaacuacaucacgaccuaccccgggcagggccugaacggguacaccgucgaggaggccaagaccgugcucaagaagugcaaguccgccuucuacauccugcccagcaucaucuccaacgacaagcaggagauccugggcaccgugagcuggaaccuccgggagaugcuggcgcacgccgaggagacgcgcaagcugaugcccgucugcguggagaccaaggccaucguguccaccauccagcggaaguacaagggcaucaagauccaggagggggucguggacuacggcgcccgcuucuacuucuacaccagcaagacgaccguggccucccugaucaacacccucaacgaccugaacgagacccuggucacgaugccgcucggguacgugacccacggccugaaccuggaggaggcggcccgguacaugcgcagccucaaggugcccgccaccgucuccgugagcucccccgacgccgugaccgccuacaacggguaccugacgagcuccagcaagacccccgaggagcacuucaucgagaccaucucccuggcgggcagcuacaaggacuggagcuacuccggccagagcacccagcucgggaucgaguuccugaagcggggcgacaaguccgucuacuacacgagcaacccgaccaccuuccaccuggacggggaggugaucaccuucgacaaccucaagacgcugcugucccuccgcgaggugcggaccaucaaggucuucaccaccguggacaacaucaaccugcacacgcagguggucgacaugagcaugaccuacggccagcaguucggccccaccuaccuggacggggccgacgugaccaagaucaagccccacaacucccacgagggcaagacguucuacgugcucccgaacgacgacacccugcgcgucgaggccuucgaguacuaccacaccaccgaccccagcuuccuggggcgguacauguccgcccucaaccacacgaagaaguggaaguacccccaggugaacggccugaccagcaucaagugggccgacaacaacugcuaccuggcgaccgcccuccugacccugcagcagaucgagcucaaguucaaccccccggcccugcaggacgccuacuaccgcgcgcgggccggggaggccgccaacuucugcgcccugauccucgcguacugcaacaagacggugggcgagcugggcgacguccgcgagaccauguccuaccuguuccagcacgccaaccucgacagcugcaagcgggugcugaacgucgugugcaagaccugcgggcagcagcagaccacccugaagggcguggaggccgucauguacauggggacgcucuccuacgagcaguucaagaagggcgugcagauccccugcaccugcgggaagcaggccaccaaguaccuggugcagcaggagagccccuucgucaugauguccgcccccccggcgcaguacgagcugaagcacggcaccuucacgugcgccagcgaguacaccggcaacuaccagugcgggcacuacaagcacaucaccuccaaggagacccucuacugcaucgacggcgcccugcugacgaagagcagcgaguacaaggggcccaucaccgacguguucuacaaggagaacuccuacaccaccacgaucaagcccgugaccuacaagcucgacggcgucgugugcaccgagaucgaccccaagcuggacaacuacuacaagaaggacaacagcuacuucaccgagcagccgaucgaccuggugcccaaccagcccuaccccaacgccuccuucgacaacuucaaguucgucugcgacaacaucaaguucgccgacgaccucaaccagcugacgggguacaagaagccggcgagccgcgagcugaaggugaccuucuuccccgaccucaacggcgacguggucgccaucgacuacaagcacuacacccccuccuucaagaagggcgccaagcugcugcacaagcccaucguguggcacgugaacaacgccaccaacaaggcgacguacaagccgaacaccuggugcauccggugccucuggagcaccaagcccgucgagaccuccaacagcuucgacgugcugaaguccgaggacgcccaggggauggacaaccuggccugcgaggaccucaagcccgugagcgaggaggucguggagaaccccacgauccagaaggacgugcuggagugcaacgucaagaccaccgagguggugggcgacaucauccugaagccggccaacaacucccucaagaucaccgaggaggucgggcacacggaccugauggccgcguacguggacaacagcucccugaccaucaagaagcccaacgagcucagccgcgugcugggccugaagacccucgccacccacgggcuggccgccgucaacuccgugcccugggacacgaucgccaacuacgcgaagccguuccugaacaagguggucagcaccaccaccaacaucgugacgcgcugccucaaccgggugugcaccaacuacaugcccuacuucuucacccugcugcuccagcugugcaccuucacccgcuccacgaacagccggaucaaggccuccaugcccaccaccaucgccaagaacaccgucaagagcgugggcaaguucugccuggaggccagcuucaacuaccucaagucccccaacuucagcaagcugaucaacaucaucaucugguuccugcuccuguccgugugccugggcagccucaucuacuccacggccgcgcuggggguccugaugagcaaccucggcaugccguccuacugcaccggguaccgcgagggcuaccugaacagcaccaacgugaccaucgccacguacugcaccggcuccauccccugcagcgugugccuguccgggcucgacagccuggacaccuaccccucccuggagaccauccagaucacgaucagcuccuucaagugggaccucaccgccuucggccuggucgccgagugguuccuggccuacauccucuucacccgguucuucuacgugcuggggcuggcggccaucaugcagcucuucuucagcuacuucgccgugcacuucaucuccaacagcuggcugauguggcugaucaucaaccugguccagauggcccccaucuccgcgauggugcgcauguacaucuucuucgccagcuucuacuacguguggaagagcuacguccacgugguggacggcugcaacuccagcaccugcaugaugugcuacaagcggaaccgcgccacgcgggucgagugcaccaccaucgugaacgggguccgccgguccuucuacguguacgccaacggcggcaagggguucugcaagcuccacaacuggaacugcgugaacugcgacaccuucugcgccggcagcacguucaucuccgacgaggucgcgcgcgaccugagccugcaguucaagcggccgaucaaccccaccgaccaguccagcuacaucguggacuccgugaccgucaagaacgggagcauccaccucuacuucgacaaggccggccagaagaccuacgagcgccacucccugagccacuucgugaaccuggacaaccuccgggccaacaacacgaaggggucccugcccaucaacgugaucgucuucgacggcaagagcaagugcgaggaguccagcgccaaguccgccagcguguacuacucccagcugaugugccagcccauccuccugcuggaccaggcgcucgugagcgacgucggcgacagcgccgagguggccgugaagauguucgacgccuacgucaacaccuucuccagcaccuucaacgugccgauggagaagcugaagacccugguggccacggcggaggccgagcucgccaagaacgucucccuggacaacgugcugagcaccuucaucuccgccgcgcgccagggguucguggacagcgacgucgagaccaaggacgugguggagugccucaagcugucccaccagagcgacaucgaggucaccggcgacuccugcaacaacuacaugcugacguacaacaagguggagaacaugaccccccgggaccucggggccugcaucgacugcagcgcccgccacaucaacgcccagguggccaagucccacaacaucgcgcugaucuggaacgucaaggacuucaugagccuguccgagcagcuccggaagcagauccgcagcgccgccaagaagaacaaccugcccuucaagcugaccugcgccaccacgcgccagguggugaacgucgugaccaccaagaucgcccucaagggcgggugaggacuaguuauaagacugacuagcccgaugggccucccaacgggcccuccuccccuccuugcaccgagauuaauaaaaaaaaaaaaaaaaaaaaaaaaaaaaaaaaaaaaaaaaaaaaaaaaaaaaaaaaaaaaaaaaugcaucccccccccccccccccccccccccccccccaaaggcucuuuucagagccaccagaauu

SEQ ID NO: 21774 - RNA, 6058 nt, Artificial Sequence
  SARS-CoV-2__MT627395.1__non-structural protein 3 (NSP3) mRNA gc
aggagaaagcuuaccauggcccccaccaaggugaccuucggcgacgacacggucaucgaggugcagggguacaagagcgugaacaucaccuucgagcuggacgagcgcaucgacaagguccucaacgagaagugcuccgccuacaccguggagcugggcaccgaggugaacgaguucgcgugcgucguggccgacgccgugaucaagacgcugcagccggucagcgagcuccugacccugcucgggaucgaccuggacgagugguccauggccaccuacuaccuguucgacgagagcggcgaguucaagcucgccucccacauguacugcagcuucuacccccccgacgaggacgaggaggagggggacugcgaggaggaggaguucgagcccuccacccaguacgaguacggcacggaggacgacuaccagggcaagccgcuggaguucggggcgaccagcgccgcccugcagcccgaggaggagcaggaggaggacuggcucgacgacgacucccagcagaccgugggccagcaggacgggagcgaggacaaccagaccacgaccauccagaccaucguggagguccagccccagcuggagauggagcugacccccguggugcagacgaucgaggucaacuccuucagcggcuaccucaagcugaccgacaacguguacaucaagaacgccgacaucguggaggaggcgaagaaggucaagccgaccgugguggucaacgccgccaacguguaccugaagcacgggggcggcguggccggggcccucaacaaggcgaccaacaacgccaugcaggucgaguccgacgacuacaucgccacgaacggcccccugaagguggggggcagcugcguccuguccggccacaaccucgccaagcacugccugcacgugguggggcccaacgucaacaagggcgaggacauccagcugcucaagagcgccuacgagaacuucaaccagcacgaggugcugcuggcgccccuccuguccgccgggaucuucggcgccgacccgauccacagccugcgggugugcgucgacaccgugcgcaccaacguguaccucgccgucuucgacaagaaccuguacgacaagcugguguccagcuuccucgagaugaagagcgagaagcagguggagcagaagaucgccgagauccccaaggaggaggucaagcccuucaucaccgaguccaagcccagcguggagcagcggaagcaggacgacaagaagaucaaggcgugcguggaggaggucacgaccacccuggaggagaccaaguuccugacggagaaccuccugcuguacaucgacaucaacgggaaccuccacccggacuccgccacccuggugagcgacaucgacaucaccuuccugaagaaggacgcccccuacaucgugggcgacgucgugcaggagggcgugcucaccgccgucgugauccccacgaagaaggccgggggcaccaccgagaugcuggcgaaggcccugcgcaaggugcccaccgacaacuacaucacgaccuacccggggcagggccucaacggguacaccgucgaggaggccaagaccgugcugaagaagugcaaguccgccuucuacauccugcccagcaucaucuccaacgagaagcaggagauccucggcaccgugagcuggaaccugcgggagaugcuggcgcacgccgaggagacgcgcaagcugaugcccgucugcguggagaccaaggccaucguguccaccauccagcggaaguacaagggcaucaagauccaggagggggucguggacuacggcgcccgcuucuacuucuacaccagcaagacgaccguggccucccucaucaacacccugaacgaccugaacgagacccucgucacgaugccccugggguacgugacccacggccugaaccucgaggaggcggcccgguacaugcgcagccugaaggugccggccaccgucuccgugagcucccccgacgccgugaccgccuacaacggguaccugacgagcuccagcaagacccccgaggagcacuucaucgagaccaucucccucgcgggcagcuacaaggacuggagcuacuccggccagagcacccagcuggggaucgaguuccugaagcggggcgacaaguccgucuacuacacgagcaaccccaccaccuuccaccucgacggggaggugaucaccuucgacaaccugaagacgcugcucucccugcgcgaggugcggaccaucaaggucuucaccaccguggacaacaucaaccugcacacgcagguggucgacaugagcaugaccuacggccagcaguucggcccgaccuaccucgacggggccgacgugaccaagaucaagccccacaacucccacgagggcaagacguucuacgugcugcccaacgacgacacccugcgcgucgaggccuucgaguacuaccacaccaccgacccgagcuuccucgggcgguacauguccgcccugaaccacacgaagaaguggaaguacccccaggugaacggccugaccagcaucaagugggccgacaacaacugcuaccucgcgaccgcccugcugacccuccagcagaucgagcugaaguucaacccccccgcccugcaggacgccuacuaccgcgcgcgggccggggaggccgccaacuucugcgcccucauccuggcguacugcaacaagacggugggcgagcugggcgacguccgcgagaccauguccuaccucuuccagcacgccaaccuggacagcugcaagcgggugcugaacgucgugugcaagaccugcgggcagcagcagaccacccucaagggcguggaggccgucauguacauggggacgcuguccuacgagcaguucaagaagggcgugcagaucccgugcaccugcgggaagcaggccaccaaguaccuggugcagcaggagagccccuucgucaugauguccgccccccccgcgcaguacgagcucaagcacggcaccuucacgugcgccagcgaguacaccggcaacuaccagugcgggcacuacaagcacaucaccuccaaggagacccuguacugcaucgacggcgcccugcucacgaagagcagcgaguacaaggggccgaucaccgacguguucuacaaggagaacuccuacaccaccacgaucaagcccgugaccuacaagcuggacggcgucgugugcaccgagaucgaccccaagcuggacaacuacuacaagaaggacaacagcuacuucaccgagcagcccaucgaccucgugccgaaccagcccuaccccaacgccuccuucgacaacuucaaguucgucugcgacaacaucaaguucgccgacgaccugaaccagcugacgggguacaagaagcccgcgagccgcgagcucaaggugaccuucuucccggaccugaacggcgacguggucgccaucgacuacaagcacuacacccccuccuucaagaagggcgccaagcugcuccacaagcccaucguguggcacgugaacaacgccaccaacaaggcgacguacaagcccaacaccuggugcauccggugccuguggagcaccaagccggucgagaccuccaacagcuucgacgugcugaaguccgaggacgcccaggggauggacaaccucgccugcgaggaccugaagcccgugagcgaggaggucguggagaaccccacgauccagaaggacgugcuggagugcaacgucaagaccaccgagguggugggcgacaucauccucaagcccgccaacaacucccugaagaucaccgaggaggucgggcacacggaccugauggccgcguacguggacaacagcucccucaccaucaagaagccgaacgagcugagccgcgugcugggccucaagacccuggccacccacgggcuggccgccgucaacuccgugcccugggacacgaucgccaacuacgcgaagcccuuccucaacaagguggucagcaccaccaccaacaucgugacgcgcugccugaaccgggugugcaccaacuacaugccguacuucuucacccugcuccugcagcugugcaccuucacccgcuccacgaacagccggaucaaggccuccaugcccaccaccaucgccaagaacaccgucaagagcgugggcaaguucugccucgaggccagcuucaacuaccugaagucccccaacuucagcaagcugaucaacaucaucaucugguuccuccugcuguccgugugccucggcagccugaucuacuccacggccgcgcuggggguccucaugagcaaccugggcaugcccuccuacugcaccggguaccgcgagggcuaccugaacagcaccaacgugaccaucgccacguacugcaucggcuccaucccgugcagcgugugccucuccgggcuggacagccuggacaccuaccccucccucgagaccauccagaucaccaucagcuccuucaagugggaccugacggccuucggccuggucgccgagugguuccucgccuacauccuguucacccgguucuucuacgugcuggggcucgcggccaucaugcagcuguucuucagcuacuucgccgugcacuucaucuccaacagcuggcugauguggcugaucaucaaccucguccagauggcccccaucuccgcgauggugcgcauguacaucuucuucgccagcuucuacuacguguggaagagcuacguccacgugguggacggcugcaacuccagcaccugcaugaugugcuacaagcggaaccgcgccacccgggucgagugcacgaccaucgugaacgggguccgccgguccuucuacguguacgccaacggcggcaagggguucugcaagcugcacaacuggaacugcgugaacugcgacaccuucugcgccggcagcaccuucaucuccgacgaggucgcgcgcgaccugagccuccaguucaagcggcccaucaacccgacggaccaguccagcuacaucguggacuccgugaccgucaagaacgggagcauccaccuguacuucgacaaggccggccagaagaccuacgagcgccacucccugagccacuucgugaaccucgacaaccugcgggccaacaacaccaaggggucccugcccaucaacgugaucgucuucgacggcaagagcaagugcgaggaguccagcgccaaguccgccagcguguacuacucccagcucaugugccagcccauccugcugcucgaccaggcgcuggugagcgacgucggcgacagcgccgagguggccgugaagauguucgacgccuacgucaacacguucuccagcaccuucaacgugcccauggagaagcugaagacccucguggccaccgcggaggccgagcuggccaagaacgucucccuggacaacgugcucagcacguucaucuccgccgcgcgccagggguucguggacagcgacgucgagaccaaggacgugguggagugccugaagcugucccaccagagcgacaucgaggucaccggcgacuccugcaacaacuacaugcucaccuacaacaagguggagaacaugacgccgcgggaccugggggccugcaucgacugcagcgcccgccacaucaacgcccagguggccaagucccacaacaucgcgcugaucuggaacgucaaggacuucaugagccucuccgagcagcugcggaagcagauccgcagcgccgccaagaagaacaaccugcccuucaagcucaccugcgccaccacccgccagguggugaacgucgugacgaccaagaucgcccugaagggcgggugaggacuaguuauaagacugacuagcccgaugggccucccaacgggcccuccuccccuccuugcaccgagauuaauaaaaaaaaaaaaaaaaaaaaaaaaaaaaaaaaaaaaaaaaaaaaaaaaaaaaaaaaaaaaaaaaugcaucccccccccccccccccccccccccccccccaaaggcucuuuucagagccaccagaauu

SEQ ID NO: 21775 - RNA, 6058 nt, Artificial Sequence
  SARS-CoV-2__MT678839.1__non-structural protein 3 (NSP3) mRNA gc
aggagaaagcuuaccauggcccccaccaaggugaccuucggcgacgacacggucaucgaggugcagggguacaagagcgugaacaucaccuucgagcuggacgagcgcaucgacaagguccucaacgagaagugcuccgccuacaccguggagcugggcaccgaggugaacgaguucgcgugcgucguggccgacgccgugaucaagacgcugcagccggucagcgagcuccugaccccccuggggaucgaccucgacgagugguccauggccaccuacuaccuguucgacgagagcggcgaguucaagcuggccucccacauguacugcagcuucuacccccccgacgaggacgaggaggagggggacugcgaggaggaggaguucgagccguccacccaguacgaguacggcacggaggacgacuaccagggcaagccccucgaguucggggcgaccagcgccgcccugcagcccgaggaggagcaggaggaggacuggcuggacgacgacucccagcagaccgugggccagcaggacgggagcgaggacaaccagaccacgaccauccagaccaucguggagguccagccccagcucgagauggagcugaccccgguggugcagacgaucgaggucaacuccuucagcggcuaccugaagcucaccgacaacguguacaucaagaacgccgacaucguggaggaggcgaagaaggucaagcccaccgugguggucaacgccgccaacguguaccugaagcacgggggcggcguggccggggcccugaacaaggcgaccaacaacgccaugcaggucgaguccgacgacuacaucgccacgaacggcccccucaagguggggggcagcugcguccuguccggccacaaccuggccaagcacugccuccacgugguggggcccaacgucaacaagggcgaggacauccagcugcugaagagcgccuacgagaacuucaaccagcacgaggugcuccuggcgccgcugcucuccgccgggaucuucggcgccgaccccauccacagccugcgggugugcgucgacaccgugcgcaccaacguguaccuggccgucuucgacaagaaccucuacaacaagcugguguccagcuuccuggagaugaagagcgagaagcagguggagcagaagaucgccgagauccccaaggaggaggucaagcccuucaucaccgaguccaagccgagcguggagcagcggaagcaggacgacaagaagaucaaggcgugcguggaggaggucacgaccacccucgaggagaccaaguuccugacggagaaccugcuccuguacaucgacaucaacgggaaccugcaccccgacuccgccacccucgugagcgacaucgacaucaccuuccugaagaaggacgcccccuacaucgugggcgacgucgugcaggagggcgugcugaccgccgucgugauccccacgaagaaggccgggggcaccaccgagaugcucgcgaaggcccugcgcaaggugccgaccgacaacuacaucacgaccuaccccgggcagggccugaacggguacaccgucgaggaggccaagaccgugcucaagaagugcaaguccgccuucuacauccugcccagcaucaucuccaacgagaagcaggagauccugggcaccgugagcuggaaccuccgggagaugcuggcgcacgccgaggagacgcgcaagcugaugcccgucugcguggagaccaaggccaucguguccaccauccagcggaaguacaagggcaucaagauccaggagggggucguggacuacggcgcccgcuucuacuucuacaccagcaagacgaccguggccucccugaucaacacccucaacgaccugaacgagacccuggucacgaugccgcucggguacgugacccacggccugaaccuggaggaggcggcccgguacaugcgcagccucaaggugcccgccaccgucuccgugagcucccccgacgccgugaccgccuacaacggguaccugacgagcuccagcaagacccccgaggagcacuucaucgagaccaucucccuggcgggcagcuacaaggacuggagcuacuccggccagagcacccagcucgggaucgaguuccugaagcggggcgacaaguccgucuacuacacgagcaacccgaccaccuuccaccuggacggggaggugaucaccuucgacaaccucaagacgcugcugucccuccgcgaggugcggaccaucaaggucuucaccaccguggacaacaucaaccugcacacgcagguggucggcaugagcaugaccuacggccagcaguucgggcccaccuacuucgacggcgccgacgugaccaagaucaagccccacaacucccacgaggggaagacguucuacgugcugccgaacgacgacacccuccgcgucgaggccuucgaguacuaccacaccaccgaccccagcuuccugggccgguacauguccgcccugaaccacacgaagaaguggaaguacccccaggugaacgggcucaccagcaucaagugggccgacaacaacugcuaccuggcgaccgcccugcucacccugcagcagaucgagcugaaguucaaccccccggcccuccaggacgccuacuaccgcgcgcgggccggcgaggccgccaacuucugcgcccugauccuggcguacugcaacaagacggugggcgagcucggggacguccgcgagaccauguccuaccuguuccagcacgccaaccuggacagcugcaagcgggugcucaacgucgugugcaagaccugcggccagcagcagaccacccugaaggggguggaggccgucauguacaugggcacgcuguccuacgagcaguucaagaagggggugcagauccccugcaccugcggcaagcaggccaccaaguaccucgugcagcaggagagccccuucgucaugauguccgcccccccggcgcaguacgagcugaagcacggcaccuucacgugcgccagcgaguacaccgggaacuaccagugcggccacuacaagcacaucaccuccaaggagacccuguacugcaucgacggggcccuccugacgaagagcagcgaguacaagggccccaucaccgacguguucuacaaggagaacuccuacaccaccacgaucaagcccgugaccuacaagcuggacggggucgugugcaccgagaucgaccccaagcucgacaacuacuacaagaaggacaacagcuacuucaccgagcagccgaucgaccuggugcccaaccagcccuaccccuccgccagcuucgacaacuucaaguucgucugcgacaacaucaaguucgccgacgaccugaaccagcucacgggcuacaagaagccggcgucccgcgagcugaaggugaccuucuuccccgaccugaacggcgacguggucgccaucgacuacaagcacuacacccccagcuucaagaagggggccaagcuccugcacaagcccaucguguggcacgugaacaacgccaccaacaaggcgacguacaagccgaacaccuggugcauccggugccugugguccaccaagcccgucgagaccagcaacuccuucgacgugcucaagagcgaggacgcccagggcauggacaaccuggccugcgaggaccugaagcccguguccgaggaggucguggagaaccccacgauccagaaggacgugcucgagugcaacgucaagaccaccgagguggugggggacaucauccugaagccggccaacaacagccugaagaucaccgaggaggucggccacacggaccucauggccgcguacguggacaacuccagccugaccaucaagaagcccaacgagcugucccgcgugcucgggcugaagacccuggccacccacggccucgccgccgucaacagcgugcccugggacacgaucgccaacuacgcgaagccguuccugaacaagguggucuccaccaccaccaacaucgugacgcgcugccugaaccgggugugcaccaacuacaugcccuacuucuucacccuccugcugcagcucugcaccuucacccgcagcacgaacucccggaucaaggccagcaugcccaccaccaucgccaagaacaccgucaagagcgugggcaaguucugccuggaggccuccuucaacuaccugaagagccccaacuucuccaagcucaucaacaucaucaucugguuccugcugcucagcgugugccuggggucccugaucuacagcacggccgcgcucggcguccugauguccaaccuggggaugccgagcuacugcaccggcuaccgcgagggcuaccucaacuccaccaacgugaccaucgccacguacugcaccgggagcauccccugcuccgugugccugagcggccuggacucccucgacaccuaccccagccuggagaccauccagaucacgaucuccagcuucaagugggaccugaccgccuucgggcucgucgccgagugguuccuggccuacauccuguucacccgguucuucuacgugcucggccuggcggccaucaugcagcuguucuucuccuacuucgccgugcacuucaucagcaacuccuggcucauguggcugaucaucaaccuggcccagauggcgcccaucagcgccaugguccgcauguacaucuucuucgccagcuucuacuacguguggaaguccuacgugcacgucguggacgggugcaacagcuccaccugcaugaugugcuacaagcggaaccgcgccacgcggguggagugcaccaccaucgucaacggcgugcgccggagcuucuacgucuacgccaacggcgggaagggcuucugcaagcugcacaacuggaacugcgugaacugcgacaccuucugcgcgggguccacguucaucagcgacgagguggcccgcgaccucucccugcaguucaagcggccgaucaaccccaccgaccagagcuccuacaucgucgacagcgugaccgugaagaacggcuccauccaccuguacuucgacaaggccgggcagaagaccuacgagcgccacagccucucccacuucgucaaccuggacaaccugcgggccaacaacacgaagggcagccuccccaucaacgugaucguguucgacggcaaguccaagugcgaggagagcuccgccaagagcgcguccgucuacuacagccagcugaugugccagcccauccugcuccuggaccaggcccuggugagcgacgugggggacuccgccgaggucgccgugaagauguucgacgccuacgugaacaccuucagcuccaccuucaacgucccgauggagaagcucaagacccugguggcgacggccgaggccgagcuggccaagaacgugagccucgacaacguccuguccaccuucaucagcgcggcccgccagggcuucguggacuccgacguggagaccaaggacgucguggagugccugaagcucagccaccaguccgacaucgaggugaccggggacagcugcaacaacuacaugcugacguacaacaaggucgagaacaugaccccccgggaccugggcgccugcaucgacugcuccgcccgccacaucaacgcccagguggcgaagagccacaacaucgcccucaucuggaacgugaaggacuucaugucccugagcgagcagccccggaagcagauccgcuccgccgccaagaagaacaaccugcccuucaagcucaccugcgccaccacgcgccaggucgugaacgcggugaccaccaagaucgcccugaaggggggcugaggacuaguuauaagacugacuagcccgaugggccucccaacgggcccuccuccccuccuugcaccgagauuaauaaaaaaaaaaaaaaaaaaaaaaaaaaaaaaaaaaaaaaaaaaaaaaaaaaaaaaaaaaaaaaaaugcaucccccccccccccccccccccccccccccccaaaggcucuuuucagagccaccagaauu

SEQ ID NO: 21776 - RNA, 6058 nt, Artificial Sequence
  SARS-CoV-2__MT679161.1__non-structural protein 3 (NSP3) mRNA gc
aggagaaagcuuaccauggcccccaccaaggugaccuucggcgacgacacggucaucgaggugcagggguacaagagcgugaacaucaccuucgagcuggacgagcgcaucgacaagguccucaacgagaagugcuucgccuacaccguggagcugggcaccgaggugaacgaguucgcgugcgucguggccgacgccgugaucaagacgcugcagccggucuccgagcuccugaccccccuggggaucgaccucgacgaguggagcauggccaccuacuaccuguucgacgaguccggcgaguucaagcuggccagccacauguacugcuccuucuacccccccgacgaggacgaggaggagggggacugcgaggaggaggaguucgagccgagcacccaguacgaguacggcacggaggacgacuaccagggcaagccccucgaguucggggcgaccuccgccgcccugcagcccgaggaggagcaggaggaggacuggcuggacgacgacagccagcagaccgugggccagcaggacggguccgaggacaaccagaccacgaccauccagaccaucguggagguccagccccagcucgagauggagcugaccccgguggugcagacgaucgaggucaacagcuucuccggcuaccugaagcucaccgacaacguguacaucaagaacgccgacaucguggaggaggcgaagaaggucaagcccaccgugguggucaacgccgccaacguguaccugaagcacgggggcggcguggccggggcccugaacaaggcgaccaacaacgccaugcaggucgagagcgacgacuacaucgccacgaacggcccccucaagguggggggcuccugcguccugagcggccacaaccuggccaagcacugccuccacgugguggggcccaacgucaacaagggcgaggacauccagcugcugaaguccgccuacgagaacuucaaccagcacgaggugcuccuggcgccgcugcucagcgccgggaucuucggcgccgaccccauccacucccugcgggugugcgucgacaccgugcgcaccaacguguaccuggccgucuucgacaagaaccucuacgacaagcuggugagcuccuuccuggagaugaagagcgagaagcagguggagcagaagaucgccgagauccccaaggaggaggucaagcccuucaucaccgagagcaagccguccguggagcagcggaagcaggacgacaagaagaucaaggcgugcguggaggaggucacgaccacccucgaggagaccaaguuccugacggagaaccugcuccuguacaucgacaucaacgggaaccugcaccccgacagcgccacccucguguccgacaucgacaucaccuuccugaagaaggacgcccccuacaucgugggcgacgucgugcaggagggcgugcugaccgccgucgugauccccacgaagaaggccgggggcaccaccgagaugcucgcgaaggcccugcgcaaggugccgaccgacaacuacaucacgaccuaccccgggcagggccugaacggguacaccgucgaggaggccaagaccgugcucaagaagugcaagagcgccuucuacauccugcccuccaucaucagcaacgagaagcaggagauccugggcaccguguccuggaaccuccgggagaugcuggcgcacgccgaggagacgcgcaagcugaugcccgucugcguggagaccaaggccaucgugagcaccauccagcggaaguacaagggcaucaagauccaggagggggucguggacuacggcgcccgcuucuacuucuacaccuccaagacgaccguggccagccugaucaacacccucaacgaccugaacgagacccuggucacgaugccgcucggguacgugacccacggccugaaccuggaggaggcggcccgguacaugcgcucccucaaggugcccgccaccgucagcguguccagccccgacgccgugaccgccuacaacggguaccugacguccagcuccaagacccccgaggagcacuucaucgagaccaucagccuggcgggcuccuacaaggacuggagcuacagcggccaguccacccagcucgggaucgaguuccugaagcggggcgacaagagcgucuacuacacguccaacccgaccaccuuccaccuggacggggaggugaucaccuucgacaaccucaagacgcugcugagccuccgcgaggugcggaccaucaaggucuucaccaccguggacaacaucaaccugcacacgcagguggucgacauguccaugaccuacggccagcaguucggccccaccuaccuggacggggccgacgugaccaagaucaagccccacaacagccacgagggcaagacguucuacgugcucccgaacgacgacacccugcgcgucgaggccuucgaguacuaccacaccaccgaccccuccuuccuggggcgguacaugagcgcccucaaccacacgaagaaguggaaguacccccaggugaacggccugaccuccaucaagugggccgacaacaacugcuaccuggcgaccgcccuccugacccugcagcagaucgagcucaaguucaaccccccggcccugcaggacgccuacuaccgcgcgcgggccggggaggccgccaacuucugcgcccugauccucgcguacugcaacaagacggugggcgagcugggcgacguccgcgagaccaugagcuaccuguuccagcacgccaaccucgacuccugcaagcgggugcugaacgucgugugcaagaccugcgggcagcagcagaccacccugaagggcguggaggccgucauguacauggggacgcucagcuacgagcaguucaagaagggcgugcagauccccugcaccugcgggaagcaggccaccaaguaccuggugcagcaggagucccccuucgucaugaugagcgcccccccggcgcaguacgagcugaagcacggcaccuucacgugcgccuccgaguacaccggcaacuaccagugcgggcacuacaagcacaucaccagcaaggagacccucuacugcaucgacggcgcccugcugacgaaguccagcgaguacaaggggcccaucaccgacguguucuacaaggagaacagcuacaccaccacgaucaagcccgugaccuacaagcucgacggcgucgugugcaccgagaucgaccccaagcuggacaacuacuacaagaaggacaacuccuacuucaccgagcagccgaucgaccuggugcccaaccagcccuaccccaacgccagcuucgacaacuucaaguucgucugcgacaacaucaaguucgccgacgaccucaaccagcugacgggguacaagaagccggcgucccgcgagcugaaggugaccuucuuccccgaccucaacggcgacguggucgccaucgacuacaagcacuacacccccagcuucaagaagggcgccaagcugcugcacaagcccaucguguggcacgugaacaacgccaccaacaaggcgacguacaagccgaacaccuggugcauccggugccucugguccaccaagcccgucgagaccagcaacuccuucgacgugcugaagagcgaggacgcccaggggauggacaaccuggccugcgaggaccucaagcccguguccgaggaggucguggagaaccccacgauccagaaggacgugcuggagugcaacgucaagaccaccgagguggugggcgacaucauccugaagccggccaacaacagccucaagaucaccgaggaggucgggcacacggaccugauggccgcguacguggacaacuccagccugaccaucaagaagcccaacgagcucucccgcgugcugggccugaagacccucgccacccacgggcuggccgccgucaacagcgugcccugggacacgaucgccaacuacgcgaagccguuccugaacaagguggucuccaccaccaccaacaucgugacgcgcugccucaaccgggugugcaccaacuacaugcccuacuucuucacccugcugcuccagcugugcaccuucacccgcagcacgaacucccggaucaaggccagcaugcccaccaccaucgccaagaacaccgucaaguccgugggcaaguucugccuggaggccagcuucaacuaccucaagagccccaacuucuccaagcugaucaacaucaucaucugguuccugcuccugagcgugugccugggcucccucaucuacagcacggccgcgcuggggguccugauguccaaccucggcaugccgagcuacugcaccggguaccgcgagggcuaccugaacuccaccaacgugaccaucgccacguacugcaccggcagcauccccugcuccgugugccugagcgggcucgacucccuggacaccuaccccagccuggagaccauccagaucacgaucuccagcuucaagugggaccucaccgccuucggccuggucgccgagugguuccuggccuacauccucuucacccgguucuucuacgugcuggggcuggcggccaucaugcagcucuucuucuccuacuucgccgugcacuucaucagcaacuccuggcugauguggcugaucaucaaccugguccagauggcccccaucagcgcgauggugcgcauguacaucuucuucgccuccuucuacuacguguggaagagcuacguccacgugguggacggcugcaacagcuccaccugcaugaugugcuacaagcggaaccgcgccacgcgggucgagugcaccaccaucgugaacgggguccgccggagcuucuacguguacgccaacggcggcaagggguucugcaagcuccacaacuggaacugcgugaacugcgacaccuucugcgccggcuccacguucaucagcgacgaggucgcgcgcgaccugucccugcaguucaagcggccgaucaaccccaccgaccagagcuccuacaucguggacagcgugaccgucaagaacggguccauccaccucuacuucgacaaggccggccagaagaccuacgagcgccacagccugucccacuucgugaaccuggacaaccuccgggccaacaacacgaaggggagccugcccaucaacgugaucgucuucgacggcaaguccaagugcgaggagagcuccgccaagagcgccuccguguacuacagccagcugaugugccagcccauccuccugcuggaccaggcgcucguguccgacgucggcgacagcgccgagguggccgugaagauguucgacgccuacgucaacaccuucagcuccaccuucaacgugccgauggagaagcugaagacccugguggccacggcggaggccgagcucgccaagaacgucagccuggacaacgugcuguccaccuucaucagcgccgcgcgccagggguucguggacuccgacgucgagaccaaggacgugguggagugccucaagcugagccaccaguccgacaucgaggucaccggcgacagcugcaacaacuacaugcugacguacaacaagguggagaacaugaccccccgggaccucggggccugcaucgacugcuccgcccgccacaucaacgcccagguggccaagagccacaacaucgcgcugaucuggaacgucaaggacuucaugucccugagcgagcagcuccggaagcagauccgcuccgccgccaagaagaacaaccugcccuucaagcugaccugcgccaccacgcgccagguggugaacgucgugaccaccaagaucgcccucaagggcgggugaggacuaguuauaagacugacuagcccgaugggccucccaacgggcccuccuccccuccuugcaccgagauuaauaaaaaaaaaaaaaaaaaaaaaaaaaaaaaaaaaaaaaaaaaaaaaaaaaaaaaaaaaaaaaaaaugcaucccccccccccccccccccccccccccccccaaaggcucuuuucagagccaccagaauu

SEQ ID NO: 21777 - RNA, 6058 nt, Artificial Sequence
  SARS-CoV-2__MT679198.1__non-structural protein 3 (NSP3) mRNA gc
aggagaaagcuuaccauggcccccaccaaggugaccuucggcgacgacacggucaucgaggugcagggguacaagagcgugaacaucaccuucgagcuggacgagcgcaucgacaagguccucaacgagaagugcuccgccuacaccguggagcugggcaccgaggugaacgaguucgcgugcgucguggccgacgccgugaucaagacgcugcagccggucagcgagcuccugaccccccuggggaucgaccucgacgagugguccauggccaccuacuaccuguucgacgagagcggcgaguucaagcuggccucccacauguacugcagcuucuacccccccgacgaggacgaggaggagggggacugcgaggaggaggaguucgagccguccacccaguacgaguacggcacggaggacgacuaccagggcaagccccucgaguucggggcgaccagcgccgcccugcagcccgaggaggagcaggaggaggacuggcuggacgacgacucccagcagaccgugggccagcaggacgggagcgaggacaaccagaccacgaccauccagaccaucguggagguccagccccagcucgagauggagcugaccccgguggugcagacgaucgaggucaacuccuucagcggcuaccugaagcucaccgacaacguguacaucaagaacgccgacaucguggaggaggcgaagaaggucaagcccaccgugguggucaacgccgccaacguguaccugaagcacgggggcggcguggccggggcccugaacaaggcgaccaacaacgccaugcaggucgaguccgacgacuacaucgccacgaacggcccccucaagguggggggcagcugcguccuguccggccacaaccuggccaagcacugccuccacgugguggggcccaacgucaacaagggcgaggacauccagcugcugaagagcgccuacgagaacuucaaccagcacgaggugcuccuggcgccgcugcucuccgccgggaucuucggcgccgaccccauccacagccugcgggugugcgucgacaccgugcgcaccaacguguaccuggccgucuucgacaagaaccucuacgacaagcugguguccagcuuccuggagaugaagagcgagaagcagguggagcagaagaucgccgagauccccaaggaggaggucaagcccuucaucaccgaguccaagccgagcguggagcagcggaagcaggacgacaagaagaucaaggcgugcguggaggaggucacgaccacccucgaggagaccaaguuccugacggagaaccugcuccuguacaucgacaucaacgggaaccugcaccccgacuccgccacccucgugagcgacaucgacaucaccuuccugaagaaggacgcccccuacaucgugggcgacgucgugcaggagggcgugcugaccgccgucgugauccccacgaagaaggccgggggcaccaccgagaugcucgcgaaggcccugcgcaaggugccgaccgacaacuacaucacgaccuaccccgggcagggccugaacggguacaccgucgaggaggccaagaccgugcucaagaagugcaaguccgccuucuacauccugcccagcaucaucuccaacgagaagcaggagauccugggcaccgugagcuggaaccuccgggagaugcuggcgcacgccgaggagacgcgcaagcugaugcccgucugcguggagaccaaggccaucguguccaccauccagcggaaguacaagggcaucaagauccaggagggggucguggacuacggcgcccgcuucuacuucuacaccagcaaggccacgguggcgucccugaucaacacccucaacgaccugaacgagacccuggucaccaugccgcucggguacgugacgcacggccugaaccuggaggaggccgcccgguacaugcgcagccucaaggugcccgccaccgucuccgugagcucccccgacgccgugaccgcguacaacggguaccugaccagcuccagcaagacgcccgaggagcacuucaucgagaccaucucccuggccggcagcuacaaggacuggagcuacuccggccagagcacccagcucgggaucgaguuccugaagcggggcgacaaguccgucuacuacaccagcaacccgacgaccuuccaccuggacggggaggugaucaccuucgacaaccucaagacccugcugucccuccgcgaggugcggacgaucaaggucuucaccaccguggacaacaucaaccugcacacccagguggucgacaugagcaugacguacggccagcaguucggccccaccuaccuggacggggccgacgugaccaagaucaagccccacaacucccacgagggcaagaccuucuacgugcucccgaacgacgacacgcugcgcgucgaggccuucgaguacuaccacaccaccgaccccagcuuccuggggcgguacauguccgcccucaaccacaccaagaaguggaaguacccccaggugaacggccugacgagcaucaagugggcggacaacaacugcuaccuggccaccgcccuccugacccugcagcagaucgagcucaaguucaaccccccggcccugcaggacgcguacuaccgcgcccgggccggggaggccgccaacuucugcgcgcugauccucgccuacugcaacaagaccgugggcgagcugggcgacguccgcgagacgauguccuaccuguuccagcacgccaaccucgacagcugcaagcgggugcugaacgucgugugcaagaccugcgggcagcagcagaccacccugaagggcguggaggccgucauguacauggggacccucuccuacgagcaguucaagaagggcgugcagauccccugcacgugcgggaagcaggccaccaaguaccuggugcagcaggagagccccuucgucaugauguccgcgcccccggcccaguacgagcugaagcacggcaccuucaccugcgccagcgaguacacgggcaacuaccagugcgggcacuacaagcacaucaccuccaaggagacccucuacugcaucgacggcgcccugcugaccaagagcagcgaguacaaggggcccaucacggacguguucuacaaggagaacuccuacaccaccaccaucaagcccgugacguacaagcucgacggcgucgugugcaccgagaucgaccccaagcuggacaacuacuacaagaaggacaacagcuacuucaccgagcagccgaucgaccuggugcccaaccagcccuaccccaacgccuccuucgacaacuucaaguucgucugcgacaacaucaaguucgcggacgaccucaaccagcugaccggguacaagaagccggccagccgcgagcugaaggugacguucuuccccgaccucaacggcgacguggucgccaucgacuacaagcacuacacccccuccuucaagaagggcgccaagcugcugcacaagcccaucguguggcacgugaacaacgcgaccaacaaggccaccuacaagccgaacacguggugcauccggugccucuggagcaccaagcccgucgagaccuccaacagcuucgacgugcugaaguccgaggacgcccaggggauggacaaccuggccugcgaggaccucaagcccgugagcgaggaggucguggagaaccccaccauccagaaggacgugcuggagugcaacgucaagacgaccgagguggugggcgacaucauccugaagccggccaacaacucccucaagaucaccgaggaggucgggcacaccgaccugauggcggccuacguggacaacagcucccugacgaucaagaagcccaacgagcucagccgcgugcugggccugaagacccucgccacccacgggcuggccgccgucaacuccgugcccugggacaccaucgcgaacuacgccaagccguuccugaacaagguggucagcacgaccaccaacaucgugacccgcugccucaaccgggugugcacgaacuacaugcccuacuucuucacccugcugcuccagcugugcaccuucacccgcuccaccaacagccggaucaaggccuccaugcccacgaccaucgccaagaacaccgucaagagcgugggcaaguucugccuggaggccagcuucaacuaccucaagucccccaacuucagcaagcugaucaacaucaucaucugguuccugcuccuguccgugugccugggcagccucaucuacuccaccgcggcccuggggguccugaugagcaaccucggcaugccguccuacugcacgggguaccgcgagggcuaccugaacagcaccaacgugaccaucgccaccuacugcacgggcuccauccccugcagcgugugccuguccgggcucgacagccuggacaccuaccccucccuggagaccauccagaucaccaucagcuccuucaagugggaccucacggccuucggccuggucgccgagugguuccuggcguacauccucuucacccgguucuucuacgugcuggggcuggccgccaucaugcagcucuucuucagcuacuucgccgugcacuucaucuccaacagcuggcugauguggcugaucaucaaccugguccagauggcgcccaucuccgccauggugcgcauguacaucuucuucgccagcuucuacuacguguggaagagcuacguccacgugguggacggcugcaacuccagcaccugcaugaugugcuacaagcggaaccgcgccacccgggucgagugcacgaccaucgugaacgggguccgccgguccuucuacguguacgccaacggcggcaagggguucugcaagcuccacaacuggaacugcgugaacugcgacaccuucugcgcgggcagcaccuucaucuccgacgaggucgcccgcgaccugagccugcaguucaagcggccgaucaaccccacggaccaguccagcuacaucguggacuccgugaccgucaagaacgggagcauccaccucuacuucgacaaggccggccagaagaccuacgagcgccacucccugagccacuucgugaaccuggacaaccuccgggccaacaacaccaaggggucccugcccaucaacgugaucgucuucgacggcaagagcaagugcgaggaguccagcgccaaguccgcgagcguguacuacucccagcugaugugccagcccauccuccugcuggaccaggcccucgugagcgacgucggcgacagcgccgagguggccgugaagauguucgacgccuacgucaacacguucuccagcaccuucaacgugccgauggagaagcugaagacccugguggcgaccgccgaggccgagcucgccaagaacgucucccuggacaacgugcugagcacguucaucuccgcggcccgccagggguucguggacagcgacgucgagaccaaggacgugguggagugccucaagcugucccaccagagcgacaucgaggucaccggcgacuccugcaacaacuacaugcugaccuacaacaagguggagaacaugacgccccgggaccucggggccugcaucgacugcagcgcccgccacaucaacgcccagguggcgaagucccacaacaucgcccugaucuggaacgucaaggacuucaugagccuguccgagcagcuccggaagcagauccgcagcgccgccaagaagaacaaccugcccuucaagcugaccugcgccaccacccgccagguggugaacgucgugacgaccaagaucgcgcucaagggcgggugaggacuaguuauaagacugacuagcccgaugggccucccaacgggcccuccuccccuccuugcaccgagauuaauaaaaaaaaaaaaaaaaaaaaaaaaaaaaaaaaaaaaaaaaaaaaaaaaaaaaaaaaaaaaaaaaugcaucccccccccccccccccccccccccccccccaaaggcucuuuucagagccaccagaauu

SEQ ID NO: 21778 - RNA, 6058 nt, Artificial Sequence
  SARS-CoV-2__MT680218.1__non-structural protein 3 (NSP3) mRNA gc
aggagaaagcuuaccauggcccccaccaaggugaccuucggcgacgacacggucaucgaggugcagggguacaagagcgugaacaucaccuucgagcuggacgagcgcaucgacaagguccucaacgagaagugcuccgccuacaccguggagcugggcaccgaggugaacgaguucgcgugcgucguggccgacgccgugaucaagacgcugcagccggucagcgagcuccugaccccccuggggaucgaccucgacgagugguccauggccaccuacuaccuguucgacgagagcggcgaguucaagcuggccucccacauguacugcagcuucuacccccccgacgaggacgaggaggagggggacugcgaggaggaggaguucgagccguccacccaguacgaguacggcacggaggacgacuaccagggcaagccccucgaguucggggcgaccagcgccgcccugcagcccgaggaggagcaggaggaggacuggcuggacgacgacucccagcagaccgugggccagcaggacgggagcgaggacaaccagaccacgaccauccagaccaucguggagguccagccccagcucgagauggagcugaccccgguggugcagacgaucgaggucaacuccuucagcggcuaccugaagcucaccgacaacguguacaucaagaacgccgacaucguggaggaggcgaagaaggucaagcccaccgugguggucaacgccgccaacguguaccugaagcacgggggcggcguggccggggcccugaacaaggcgaccaacaacgccaugcaggucgaguccgacgacuacaucgccacgaacggcccccucaagguggggggcagcugcguccuguccggccacaaccuggccaagcacugccuccacgugguggggcccaacgucaacaagggcgaggacauccagcugcugaagagcgccuacgagaacuucaaccagcacgaggugcuccuggcgccgcugcucuccgccgggaucuucggcgccgaccccauccacagccugcgggugugcgucgacaccgugcgcaccaacguguaccuggccgucuucgacaagaaccucuacgacaagcugguguccagcuuccuggagaugaagagcgagaagcagguggagcagaagaucgccgagauccccaaggaggaggucaagcccuucaucaccgaguccaagccgagcguggagcagcggaagcaggacgacaagaagaucaaggcgugcguggaggaggucacgaccacccucgaggagaccaaguuccugacggagaaccugcuccuguacaucgacaucaacgggaaccugcaccccgacuccgccacccucgugagcgacaucgacaucaccuuccugaagaaggacgcccccuacaucgugggcgacgucgugcaggagggcgugcugaccgccgucgugauccccacgaagaaggccgggggcaccaccgagaugcucgcgaaggcccugcgcaaggugccgaccgacaacuacaucacgaccuaccccgggcagggccugaacggguacaccgucgaggaggccaagaccgugcucaagaagugcaaguccgccuucuacauccugcccagcaucaucuccaacgagaagcaggagauccugggcaccgugagcuggaaccuccgggagaugcuggcgcacgccgaggagacgcgcaagcugaugcccgucugcguggagaccaaggccaucguguccaccauccagcggaaguacaagggcaucaagauccaggagggggucguggacuacggcgcccgcuucuacuucuacaccagcaagacgaccguggccucccugaucaacacccucaacgaccugaacgagacccuggucacgaugccgcucggguacgugacccacggccugaaccuggaggaggcggcccgguacaugcgcagccucaaggugcccgccaccgucuccgugagcucccccgacgccgugaccgccuacaacggguaccugacgagcuccagcaagacccccgaggagcacuucaucgagaccaucucccuggcgggcagcuacaaggacuggagcuacuccggccagagcacccagcucgggaucgaguuccugaagcggggcgacaaguccgucuacuacacgagcaacccgaccaccuuccaccuggacggggaggugaucaccuucgacaaccucaagacgcugcugucccuccgcgaggugcggaccaucaaggucuucaccaccguggacaacaucaaccugcacacgcagguggucgacaugagcaugaccuacggccagcaguucggccccaccuaccuggacggggccgacgugaccaagaucaagccccacaacucccacgagggcaagacguucuacgugcucccgaacgacgacacccugcgcgucgaggccuucgaguacuaccacaccaccgaccccagcuuccuggggcgguacauguccgcccucaaccacacgaagaaguggaaguacccccaggugaacggccugaccagcaucaagugggccgacaacaacugcuaccuggcgaccgcccuccugacccugcagcagaucgagcucaaguucaaccccccggcccugcaggacgccuacuaccgcgcgcgggccggggaggccgccaacuucugcgcccugauccucgcguacugcaacaagacggugggcgagcugggcgacguccgcgagaccauguccuaccuguuccagcacgccaaccucgacagcugcaagcgggugcugaacgucgugugcaagaccugcgggcagcagcagaccacccugaagggcguggaggccgucauguacauggggacgcucuccuacgagcaguucaagaagggcgugcagauccccugcaccugcgggaagcaggccaccaaguaccuggugcagcaggagagccccuucgucaugauguccgcccccccggcgcaguacgagcugaagcacggcaccuucacgugcgccagcgaguacaccggcaacuaccagugcgggcacuacaagcacaucaccuccaaggagacccucuacugcaucgacggcgcccugcugacgaagagcagcgaguacaaggggcccaucaccgacguguucuacaaggagaacuccuacaccaccacgaucaagcccgugaccuacaagcucgacggcgucgugugcaccgagaucgaccccaagcuggacaacuacuacaagaaggacaacagcuacuucaccgagcagccgaucgaccuggugcccaaccagcccuaccccaacgccuccuucgacaacuucaaguucgucugcgacaacaucaaguucgccgacgaccucaaccagcugacgggguacaagaagccggcgagccgcgagcugaaggugaccuucuuccccgaccucaacggcgacguggucgccaucgacuacaagcacuacacccccuccuucaagaagggcgccaagcugcugcacaagcccaucguguggcacgugaacaacgccaccaacaaggcgacguacaagccgaacaccuggugcauccggugccucuggagcaccaagcccgucgagaccuccaacagcuucgacgugcugaaguccgaggacgcccaggggauggacaaccuggccugcgaggaccucaagcccgugagcgaggaggucguggagaaccccacgauccagaaggacgugcuggagugcaacgucaagaccaccgagguggugggcgacaucauccugaagccggccaacaucaagaucaccgaggaggucgggcacacggaccucauggccgcguacguggacaacuccagccugaccaucaagaagcccaacgagcugucccgcgugcucggccugaagacccuggccacccacgggcucgccgccgucaacagcgugcccugggacacgaucgccaacuacgcgaagccguuccugaacaagguggucuccaccaccaccaacaucgugacgcgcugccugaaccgggugugcaccaacuacaugcccuacuucuucacccuccugcugcagcucugcaccuucacccgcagcacgaacucccggaucaaggccagcaugcccaccaccaucgccaagaacaccgucaaguccgugggcaaguucugccuggaggccagcuucaacuaccugaagagccccaacuucuccaagcucaucaacaucaucaucugguuccugcugcucagcgugugccugggcucccugaucuacagcacggccgcgcucgggguccugauguccaaccugggcaugccgagcuacugcaccggguaccgcgagggcuaccucaacuccaccaacgugaccaucgccacguacugcaccggcagcauccccugcuccgugugccugagcgggcuggacucccucgacaccuaccccagccuggagaccauccagaucacgaucuccagcuucaagugggaccugaccgccuucggccucgucgccgagugguuccuggccuacauccuguucacccgguucuucuacgugcucgggcuggcggccaucaugcagcuguucuucuccuacuucgccgugcacuucaucagcaacuccuggcucauguggcugaucaucaaccugguccagauggcccccaucagcgcgauggugcgcauguacaucuucuucgccuccuucuacuacguguggaagagcuacguccacgugguggacggcugcaacagcuccaccugcaugaugugcuacaagcggaaccgcgccacgcgggucgagugcaccaccaucgugaacgggguccgccggagcuucuacguguacgccaacggcggcaagggguucugcaagcugcacaacuggaacugcgugaacugcgacaccuucugcgccggcuccacguucaucagcgacgaggucgcgcgcgaccucucccugcaguucaagcggccgaucaaccccaccgaccagagcuccuacaucguggacagcgugaccgucaagaacggguccauccaccuguacuucgacaaggccggccagaagaccuacgagcgccacagccucucccacuucgugaaccuggacaaccugcgggccaacaacacgaaggggagccuccccaucaacgugaucgucuucgacggcaaguccaagugcgaggagagcuccgccaagagcgccuccguguacuacagccagcugaugugccagcccauccugcuccuggaccaggcgcugguguccgacgucggcgacagcgccgagguggccgugaagauguucgacgccuacgucaacaccuucagcuccaccuucaacgugccgauggagaagcucaagacccugguggccacggcggaggccgagcuggccaagaacgucagccucgacaacgugcuguccaccuucaucagcgccgcgcgccagggguucguggacuccgacgucgagaccaaggacgugguggagugccugaagcucagccaccaguccgacaucgaggucaccggcgacagcugcaacaacuacaugcugacguacaacaagguggagaacaugaccccccgggaccugggggccugcaucgacugcuccgcccgccacaucaacgcccagguggccaagagccacaacaucgcgcucaucuggaacgucaaggacuucaugucccugagcgagcagcugcggaagcagauccgcuccgccgccaagaagaacaaccuccccuucaagcugaccugcgccaccacgcgccagguggugaacgucgugaccaccaagaucgcccugaagggcgggaagaucugaggacuaguuauaagacugacuagcccgaugggccucccaacgggcccuccuccccuccuugcaccgagauuaauaaaaaaaaaaaaaaaaaaaaaaaaaaaaaaaaaaaaaaaaaaaaaaaaaaaaaaaaaaaaaaaaugcaucccccccccccccccccccccccccccccccaaaggcucuuuucagagccaccagaauu

SEQ ID NO: 21779 - RNA, 6058 nt, Artificial Sequence
  SARS-CoV-2__MT680242.1__non-structural protein 3 (NSP3) mRNA gc
aggagaaagcuuaccauggcccccaccaaggugaccuucggcgacgacacggucaucgaggugcagggguacaagagcgugaacaucaccuucgagcuggacgagcgcaucgacaagguccucaacgagaagugcuccgccuacaccguggagcugggcaccgaggugaacgaguucgcgugcgucguggccgacgccgugaucaagacgcugcagccggucagcgagcuccugaccccccuggggaucgaccucgacgagugguccauggccaccuacuaccuguucgacgagagcggcgaguucaagcuggccucccacauguacugcagcuucuacccccccgacgaggacgaggaggagggggacugcgaggaggaggaguucgagccguccacccaguacgaguacggcacggaggacgacuaccagggcaagccccucgaguucggggcgaccagcgccgcccugcagcccgaggaggagcaggaggaggacuggcuggacgacgacucccagcagaccgugggccagcaggacgggagcgaggacaaccagaccacgaccauccagaccaucguggagguccagccccagcucgagauggagcugaccccgguggugcagacgaucgaggucaacuccuucagcggcuaccugaagcucaccgacaacguguacaucaagaacgccgacaucguggaggaggcgaagaaggucaagcccaccgugguggucaacgccgccaacguguaccugaagcacgggggcggcguggccggggcccugaacaaggcgaccaacaacgccaugcaggucgaguccgacgacuacaucgccacgaacggcccccucaagguggggggcagcugcguccuguccggccacaaccuggccaagcacugccuccacgugguggggcccaacgucaacaagggcgaggacauccagcugcugaagagcgccuacgagaacuucaaccagcacgaggugcuccuggcgccgcugcucuccgccgggaucuucggcgccgaccccauccacagccugcgggugugcgucgacaccgugcgcaccaacguguaccuggccgucuucgacaagaaccucuacgacaagcugguguccagcuuccuggagaugaagagcgagaagcagguggagcagaagaucgccgagauccccaaggaggaggucaagcccuucaucaccgaguccaagccgagcguggagcagcggaagcaggacgacaagaagaucaaggcgugcguggaggaggucacgaccacccucgaggagaccaaguuccugacggagaaccugcuccuguacaucgacaucaacgggaaccugcaccccgacuccgccacccucgugagcgacaucgacaucaccuuccugaagaaggacgcccccuacaucgugggcgacgucgugcaggagggcgugcugaccgccgucgugauccccacgaagaaggccgggggcaccaccgagaugcucgcgaaggcccugcgcaaggugccgaccgacaacuacaucacgaccuaccccgggcagggccugaacggguacaccgucgaggaggccaagaccgugcucaagaagugcaaguccgccuucuacauccugcccagcaucaucuccaacgagaagcaggagauccugggcaccgugagcuggaaccuccgggagaugcuggcgcacgccgaggagacgcgcaagcugaugcccgucugcguggagaccaaggccaucguguccaccauccagcggaaguacaagggcaucaagauccaggagggggucguggacuacggcgcccgcuucuacuucuacaccagcaagacgaccguggccucccugaucaacacccucaacgaccugaacgagacccuggucacgaugccgcucggguacgugacccacggccugaaccuggaggaggcggcccgguacaugcgcuuccucaaggugcccgccaccgucagcguguccagccccgacgccgugaccgccuacaacggguaccugacguccagcuccaagacccccgaggagcacuucaucgagaccaucagccuggcgggcuccuacaaggacuggagcuacagcggccaguccacccagcucgggaucgaguuccugaagcggggcgacaagagcgucuacuacacguccaacccgaccaccuuccaccuggacggggaggugaucaccuucgacaaccucaagacgcugcugagccuccgcgaggugcggaccaucaaggucuucaccaccguggacaacaucaaccugcacacgcagguggucgacauguccaugaccuacggccagcaguucggccccaccuaccuggacggggccgacgugaccaagaucaagccccacaacagccacgagggcaagacguucuacgugcucccgaacgacgacacccugcgcgucgaggccuucgaguacuaccacaccaccgaccccuccuuccuggggcgguacaugagcgcccucaaccacacgaagaaguggaaguacccccaggugaacggccugaccuccaucaagugggccgacaacaacugcuaccuggcgaccgcccuccugacccugcagcagaucgagcucaaguucaaccccccggcccugcaggacgccuacuaccgcgcgcgggccggggaggccgccaacuucugcgcccugauccucgcguacugcaacaagacggugggcgagcugggcgacguccgcgagaccaugagcuaccuguuccagcacgccaaccucgacuccugcaagcgggugcugaacgucgugugcaagaccugcgggcagcagcagaccacccugaagggcguggaggccgucauguacauggggacgcucagcuacgagcaguucaagaagggcgugcagauccccugcaccugcgggaagcaggccaccaaguaccuggugcagcaggagucccccuucgucaugaugagcgcccccccggcgcaguacgagcugaagcacggcaccuucacgugcgccuccgaguacaccggcaacuaccagugcgggcacuacaagcacaucaccagcaaggagacccucuacugcaucgacggcgcccugcugacgaaguccagcgaguacaaggggcccaucaccgacguguucuacaaggagaacagcuacaccaccacgaucaagcccgugaccuacaagcucgacggcgucgugugcaccgagaucgaccccaagcuggacaacuacuacaagaaggacaacuccuacuucaccgagcagccgaucgaccuggugcccaaccagcccuaccccaacgccagcuucgacaacuucaaguucgucugcgacaacaucaaguucgccgacgaccucaaccagcugacgggguacaagaagccggcgucccgcgagcugaaggugaccuucuuccccgaccucaacggcgacguggucgccaucgacuacaagcacuacacccccagcuucaagaagggcgccaagcugcugcacaagcccaucguguggcacgugaacaacgccaccaacaaggcgacguacaagccgaacaccuggugcauccggugccucugguccaccaagcccgucgagaccagcaacuccuucgacgugcugaagagcgaggacgcccaggggauggacaaccuggccugcgaggaccucaagcccguguccgaggaggucguggagaaccccacgauccagaaggacgugcuggagugcaacgucaagaccaccgagguggugggcgacaucauccugaagccggccaacaacagccucaagaucaccgaggaggucgggcacacggaccugauggccgcguacguggacaacuccagccugaccaucaagaagcccaacgagcucucccgcgugcugggccugaagacccucgccacccacgggcuggccgccgucaacagcgugcccugggacacgaucgccaacuacgcgaagccguuccugaacaagguggucuccaccaccaccaacaucgugacgcgcugccucaaccgggugugcaccaacuacaugcccuacuucuucacccugcugcuccagcugugcaccuucacccgcagcacgaacucccggaucaaggccagcaugcccaccaccaucgccaagaacaccgucaaguccgugggcaaguucugccuggaggccagcuucaacuaccucaagagccccaacuucuccaagcugaucaacaucaucaucugguuccugcuccugagcgugugccugggcucccucaucuacagcacggccgcgcuggggguccugauguccaaccucggcaugccgagcuacugcaccggguaccgcgagggcuaccugaacuccaccaacgugaccaucgccacguacugcaccggcagcauccccugcuccgugugccugagcgggcucgacucccuggacaccuaccccagccuggagaccauccagaucacgaucuccagcuucaagugggaccucaccgccuucggccuggucgccgagugguuccuggccuacauccucuucacccgguucuucuacgugcuggggcuggcggccaucaugcagcucuucuucuccuacuucgccgugcacuucaucagcaacuccuggcugauguggcugaucaucaaccugguccagauggcccccaucagcgcgauggugcgcauguacaucuucuucgccuccuucuacuacguguggaagagcuacguccacgugguggacggcugcaacagcuccaccugcaugaugugcuacaagcggaaccgcgccacgcgggucgagugcaccaccaucgugaacgggguccgccggagcuucuacguguacgccaacggcggcaagggguucugcaagcuccacaacuggaacugcgugaacugcgacaccuucugcgccggcuccacguucaucagcgacgaggucgcgcgcgaccugucccugcaguucaagcggccgaucaaccccaccgaccagagcuccuacaucguggacagcgugaccgucaagaacggguccauccaccucuacuucgacaaggccggccagaagaccuacgagcgccacagccugucccacuucgugaaccuggacaaccuccgggccaacaacacgaaggggagccugcccaucaacgugaucgucuucgacggcaaguccaagugcgaggagagcuccgccaagagcgccuccguguacuacagccagcugaugugccagcccauccuccugcuggaccaggcgcucguguccgacgucggcgacagcgccgagguggccgugaagauguucgacgccuacgucaacaccuucagcuccaccuucaacgugccgauggagaagcugaagacccugguggccacggcggaggccgagcucgccaagaacgucagccuggacaacgugcuguccaccuucaucagcgccgcgcgccagggguucguggacuccgacgucgagaccaaggacgugguggagugccucaagcugagccaccaguccgacaucgaggucaccggcgacagcugcaacaacuacaugcugacguacaacaagguggagaacaugaccccccgggaccucggggccugcaucgacugcuccgcccgccacaucaacgcccagguggccaagagccacaacaucgcgcugaucuggaacgucaaggacuucaugucccugagcgagcagcuccggaagcagauccgcuccgccgccaagaagaacaaccugcccuucaagcugaccugcgccaccacgcgccagguggugaacgucgugaccaccaagaucgcccucaagggcgggugaggacuaguuauaagacugacuagcccgaugggccucccaacgggcccuccuccccuccuugcaccgagauuaauaaaaaaaaaaaaaaaaaaaaaaaaaaaaaaaaaaaaaaaaaaaaaaaaaaaaaaaaaaaaaaaaugcaucccccccccccccccccccccccccccccccaaaggcucuuuucagagccaccagaauu

SEQ ID NO: 21780 - RNA, 6058 nt, Artificial Sequence
  SARS-CoV-2__MT609918.1__non-structural protein 3 (NSP3) mRNA gc
aggagaaagcuuaccauggcccccaccaaggugaccuucggcgacgacacggucaucgaggugcagggguacaagagcgugaacaucaccuucgagcuggacgaguccaucgacaagguccucaacgagaagugcagcgccuacaccguggagcugggcaccgaggugaacgaguucgcgugcgucguggccgacgccgugaucaagacgcugcagccggucuccgagcuccugaccccccuggggaucgaccucgacgaguggagcauggccaccuacuaccuguucgacgaguccggcgaguucaagcuggccagccacauguacugcuccuucuacccccccgacgaggacgaggaggagggggacugcgaggaggaggaguucgagccgagcacccaguacgaguacggcacggaggacgacuaccagggcaagccccucgaguucggggcgaccuccgccgcccugcagcccgaggaggagcaggaggaggacuggcuggacgacgacagccagcagaccgugggccagcaggacggguccgaggacaaccagaccacgaccauccagaccaucguggagguccagccccagcucgagauggagcugaccccgguggugcagacgaucgaggucaacagcuucuccggcuaccugaagcucaccgagaacguguacaucaagaacgccgacaucguggaggaggcgaagaaggucaagcccaccgugguggucaacgccgccaacguguaccugaagcacgggggcggcguggccggggcccugaacaaggcgaccaacaacgccaugcaggucgagagcgacgacuacaucgccacgaacggcccccucaagguggggggcuccugcguccugagcggccacaaccuggccaagcacugccuccacgugguggggcccaacgucaacaagggcgaggacauccagcugcugaaguccgccuacgagaacuucaaccagcacgaggugcuccuggcgccgcugcucagcgccgggaucuucggcgccgaccccauccacucccugcgcgugugcgucgacaccgugcggaccaacguguaccuggccgucuucgacaagaaccucuacgacaagcuggugagcagcuuccuggagaugaaguccgagaagcagguggagcagaagaucgccgagauccccaaggaggaggucaagcccuucaucaccgagagcaagccguccguggagcagcgcaagcaggacgacaagaagaucaaggcgugcguggaggaggucacgaccacccucgaggagaccaaguuccugacggagaaccugcuccuguacaucgacaucaacgggaaccugcaccccgacagcgccacccucguguccgacaucgacaucaccuuccugaagaaggacgcccccuacaucgugggcgacgucgugcaggagggcgugcugaccgccgucgugauccccacgaagaaggccgggggcaccaccgagauccucgcgaaggcccugcggaaggugccgaccgacaacuacaucacgaccuaccccgggcagggccugaacggguacaccgucgaggaggccaagaccgugcucaagaagugcaagagcgccuucuacauccugcccuccaucaucagcaacgagaagcaggagauccugggcaccguguccuggaaccuccgcgagaugcuggcgcacgccgaggagacgcggaagcugaugcccgucugcguggagaccaaggccaucgugagcaccauccagcgcaaguacaagggcaucaagauccaggagggggucguggacuacggcgcccgguucuacuucuacaccuccaagacgaccguggccagccugaucaacacccucaacgaccugaacgagacccuggucacgaugccgcucggguacgugacccacggccugaaccuggaggaggcggcccgcuacaugcggucccucaaggugcccgccaccgucagcguguccagccccgacgccgugaccgccuacaacggguaccugacguccagcuccaagacccccgaggagcacuucaucgagaccaucagccuggcgggcagcuacaaggacugguccuacagcggccaguccacccagcucgggaucgaguuccugaagcgcggcgacaagagcgucuacuacacguccaacccgaccaccuuccaccuggacggggaggugaucaccuucgacaaccucaagacgcugcugagccuccgggaggugcgcaccaucaaggucuucaccaccguggacaacaucaaccugcacacgcagguggucgacauguccaugaccuacggccagcaguucggccccaccuaccuggacggggccgacgugaccaagaucaagccccacaacagccacgagggcaagacguucuacgugcucccgaacgacgacacccugcgggucgaggccuucgaguacuaccacaccaccgaccccuccuuccuggggcgcuacaugagcgcccucaaccacacgaagaaguggaaguacccccaggugaacggccugaccuccaucaagugggccgacaacaacugcuaccuggcgaccgcccuccugacccugcagcagaucgagcucaaguucaaccccccggcccugcaggacgccuacuaccgggcgcgcgccggggaggccgccaacuucugcgcccugauccucgcguacugcaacaagacggugggcgagcugggcgacguccgggagaccaugagcuaccuguuccagcacgccaaccucgacuccugcaagcgcgugcugaacgucgugugcaagaccugcgggcagcagcagaccacccugaagggcguggaggccgucauguacauggggacgcucagcuacgagcaguucaagaagggcgugcagauccccugcaccugcgggaagcaggccaccaaguaccuggugcagcaggagucccccuucgucaugaugagcgcccccccggcgcaguacgagcugaagcacggcaccuucacgugcgccuccgaguacaccggcaacuaccagugcgggcacuacaagcacaucaccagcaaggagacccucuacugcaucgacggcgcccugcugacgaagagcuccgaguacaaggggcccaucaccgacguguucuacaaggagaacagcuacaccaccacgaucaagcccgugaccuacaagcucgacggcgucgugugcaccgagaucgaccccaagcuggacaacuacuacaagaaggacaacuccuacuucaccgagcagccgaucgaccuggugcccaaccagcccuaccccaacgccagcuucgacaacuucaaguucgucugcgacaacaucaaguucgccgacgaccucaaccagcugacgggguacaagaagccggcgucccgggagcugaaggugaccuucuuccccgaccucaacggcgacguggucgccaucgacuacaagcacuacacccccagcuucaagaagggcgccaagcugcugcacaagcccaucguguggcacgugaacaacgccaccaacaaggcgacguacaagccgaacaccuggugcauccgcugccucugguccaccaagcccgucgagaccagcaacuccuucgacgugcugaagagcgaggacgcccaggggauggacaaccuggccugcgaggaccucaagcccguguccgaggaggucguggagaaccccacgauccagaaggacgugcuggagugcaacgucaagaccaccgagguggugggcgacaucauccugaagccggccaacaacagccucaagaucaccgaggaggucgggcacacggaccugauggccgcguacguggacaacuccagccugaccaucaagaagcccaacgagcucucccgggugcugggccugaagacccucgccacccacgggcuggccgccgucaacagcgugcccugggacacgaucgccaacuacgcgaagccguuccugaacaagguggucuccaccaccaccaacaucgugacgcgcugccucaaccgcgugugcaccaacuacaugcccuacuucuucacccugcugcuccagcugugcaccuucacccggagcacgaacucccgcaucaaggccagcaugcccaccaccaucgccaagaacaccgucaagagcgugggcaaguucugccuggaggccuccuucaacuaccucaagagccccaacuucuccaagcugaucaacaucaucaucugguuccugcuccugagcgugugccugggcucccucaucuacagcacggccgcgcuggggguccugauguccaaccucggcaugccgagcuacugcaccggguaccgggagggcuaccugaacuccaccaacgugaccaucgccacguacugcaccggcagcauccccugcuccgugugccugagcgggcucgacucccuggacaccuaccccagccuggagaccauccagaucacgaucuccagcuucaagugggaccucaccgccuucggccuggucgccgagugguuccuggccuacauccucuucacccgcuucuucuacgugcuggggcuggcggccaucaugcagcucuucuucuccuacuucgccgugcacuucaucagcaacuccuggcugauguggcugaucaucaaccugguccagauggcccccaucagcgcgauggugcggauguacaucuucuucgccagcuucuacuacguguggaaguccuacguccacgugguggacggcugcaacagcuccaccugcaugaugugcuacaagcgcaaccgggccacgcgcgucgagugcaccaccaucgugaacgggguccggcgcagcuucuacguguacgccaacggcggcaagggguucugcaagcuccacaacuggaacugcgugaacugcgacaccuucugcgccggcuccacguucaucagcgacgaggucgcgcgggaccugucccugcaguucaagcgcccgaucaaccccaccgaccagagcuccuacaucguggacagcgugaccgucaagaacggguccauccaccucuacuucgacaaggccggccagaagaccuacgagcggcacagccugucccacuucgugaaccuggacaaccuccgcgccaacaacacgaaggggagccugcccaucaacgugaucgucuucgacggcaaguccaagugcgaggagagcuccgccaagagcgccuccguguacuacagccagcugaugugccagcccauccuccugcuggaccaggcgcucgugagcgacgucggcgacuccgccgagguggccgugaagauguucgacgccuacgucaacaccuucagcuccaccuucaacgugccgauggagaagcugaagacccugguggccacggcggaggccgagcucgccaagaacgucagccuggacaacgugcuguccaccuucaucagcgccgcgcggcagggguucguggacuccgacgucgagaccaaggacgugguggagugccucaagcugagccaccaguccgacaucgaggucaccggcgacagcugcaacaacuacaugcugacguacaacaagguggagaacaugaccccccgcgaccucggggccugcaucgacugcuccgcccggcacaucaacgcccagguggccaagagccacaacaucgcgcugaucuggaacgucaaggacuucaugucccugagcgagcagcuccgcaagcagauccgguccgccgccaagaagaacaaccugcccuucaagcugaccugcgccaccacgcgccagguggugaacgucgugaccaccaagaucgcccucaagggcgggugaggacuaguuauaagacugacuagcccgaugggccucccaacgggcccuccuccccuccuugcaccgagauuaauaaaaaaaaaaaaaaaaaaaaaaaaaaaaaaaaaaaaaaaaaaaaaaaaaaaaaaaaaaaaaaaaugcaucccccccccccccccccccccccccccccccaaaggcucuuuucagagccaccagaauu

SEQ ID NO: 21781 - RNA, 6058 nt, Artificial Sequence
  SARS-CoV-2__MT611440.1__non-structural protein 3 (NSP3) mRNA gc
aggagaaagcuuaccauggcccccaccaaggugaccuucggcgacgacacggucaucgaggugcagggguacaagagcgugaacaucaccuucgagcuggacgagcgcaucgacaagguccucaacgagaagugcuccgccuacaccguggagcugggcaccgaggugaacgaguucgcgugcgucguggccgacgccgugaucaagacgcugcagccggucagcgagcuccugaccccccuggggaucgaccucgacgagugguccauggccaccuacuaccuguucgacgagagcggcgaguucaagcuggccucccacauguacugcagcuucuacccccccgacgaggacgaggaggagggggacugcgaggaggaggaguucgagccguccacccaguacgaguacggcacggaggacgacuaccagggcaagccccucgaguucggggcgaccagcgccgcccugcagcccgaggaggagcaggaggaggacuggcuggacgacgacucccagcagaccgugggccagcaggacgggagcgaggacaaccagaccacgaccauccagaccaucguggagguccagccccagcucgagauggagcugaccccgguggugcagacgaucgaggucaacuccuucagcggcuaccugaagcucaccgacaacguguacaucaagaacgccgacaucguggaggaggcgaagaaggucaagcccaccgugguggucaacgccgccaacguguaccugaagcacgggggcggcguggccggggcccugaacaaggcgaccaacaacgccaugcaggucgaguccgacgacuacaucgccacgaacggcccccucaagguggggggcagcugcguccuguccggccacaaccuggccaagcacugccuccacgugguggggcccaacgucaacaagggcgaggacauccagcugcugaagagcgccuacgagaacuucaaccagcacgaggugcuccuggcgccgcugcucuccgccgggaucuucggcgccgaccccauccacagccugcgggugugcgucgacaccgugcgcaccaacguguaccuggccgucuucgacaagaaccucuacgacaagcugguguccagcuuccuggagaugaagagcgagaagcagguggagcagaagaucgccgagauccccaaggaggaggucaagcccuucaucaccgaguccaagccgagcguggagcagcggaagcaggacgacaagaagaucaaggcgugcguggaggaggucacgaccacccucgaggagaucaaguuccugaccgagaaccugcuccuguacaucgacaucaacgggaaccugcaccccgacuccgccacgcucgugagcgacaucgacaucaccuuccugaagaaggacgcccccuacaucgugggcgacgucgugcaggagggcgugcugaccgccgucgugauccccaccaagaaggccgggggcacgaccgagaugcucgcgaaggcccugcgcaaggugccgaccgacaacuacaucaccacguaccccgggcagggccugaacggguacaccgucgaggaggccaagaccgugcucaagaagugcaaguccgccuucuacauccugcccagcaucaucuccaacgagaagcaggagauccugggcaccgugagcuggaaccuccgggagaugcuggcgcacgccgaggagacccgcaagcugaugcccgucugcguggagacgaaggccaucguguccaccauccagcggaaguacaagggcaucaagauccaggagggggucguggacuacggcgcccgcuucuacuucuacaccagcaagaccacgguggccucccugaucaacacccucaacgaccugaacgagacccuggucaccaugccgcucggguacgugacgcacggccugaaccuggaggaggcggcccgguacaugcgcagccucaaggugcccgccaccgucuccgugagcucccccgacgccgugaccgccuacaacggguaccugaccagcuccagcaagacgcccgaggagcacuucaucgagaccaucucccuggcgggcagcuacaaggacuggagcuacuccggccagagcacccagcucgggaucgaguuccugaagcggggcgacaaguccgucuacuacaccagcaacccgacgaccuuccaccuggacggggaggugaucaccuucgacaaccucaagacccugcugucccuccgcgaggugcggacgaucaaggucuucaccaccguggacaacaucaaccugcacacccagguggucgacaugagcaugacguacggccagcaguucggccccaccuaccuggacggggccgacgugaccaagaucaagccccacaacucccacgagggcaagaccuucuacgugcucccgaacgacgacacgcugcgcgucgaggccuucgaguacuaccacaccaccgaccccagcuuccuggggcgguacauguccgcccucaaccacaccaagaaguggaaguacccccaggugaacggccugacgagcaucaagugggccgacaacaacugcuaccuggcgaccgcccuccugacccugcagcagaucgagcucaaguucaaccccccggcccugcaggacgccuacuaccgcgcgcgggccggggaggccgccaacuucugcgcccugauccucgcguacugcaacaagaccgugggcgagcugggcgacguccgcgagacgauguccuaccuguuccagcacgccaaccucgacagcugcaagcgggugcugaacgucgugugcaagaccugcgggcagcagcagaccacccugaagggcguggaggccgucauguacauggggacccucuccuacgagcaguucaagaagggcgugcagauccccugcacgugcgggaagcaggccaccaaguaccuggugcagcaggagagccccuucgucaugauguccgcccccccggcgcaguacgagcugaagcacggcaccuucaccugcgccagcgaguacacgggcaacuaccagugcgggcacuacaagcacaucaccuccaaggagacccucuacugcaucgacggcgcccugcugaccaagagcagcgaguacaaggggcccaucacggacguguucuacaaggagaacuccuacaccaccaccaucaagcccgugacguacaagcucgacggcgucgugugcaccgagaucgaccccaagcuggacaacuacuacaagaaggacaacagcuacuucaccgagcagccgaucgaccuggugcccaaccagcccuaccccaacgccuccuucgacaacuucaaguucgucugcgacaacaucaaguucgccgacgaccucaaccagcugaccggguacaagaagccggcgagccgcgagcugaaggugacguucuuccccgaccucaacggcgacguggucgccaucgacuacaagcacuacacccccuccuucaagaagggcgccaagcugcugcacaagcccaucguguggcacgugaacaacgccaccaacaaggcgaccuacaagccgaacacguggugcauccggugccucuggagcaccaagcccgucgagaccuccaacagcuucgacgugcugaaguccgaggacgcccaggggauggacaaccuggccugcgaggaccucaagcccgugagcgaggaggucguggagaaccccaccauccagaaggacgugcuggagugcaacgucaagacgaccgagguggugggcgacaucauccugaagccggccaacaacucccucaagaucaccgaggaggucgggcacaccgaccugauggccgcguacguggacaacagcucccugacgaucaagaagcccaacgagcucagccgcgugcugggccugaagacccucgccacccacgggcuggccgccgucaacuccgugcccugggacaccaucgccaacuacgcgaagccguuccugaacaagguggucagcacgaccaccaacaucgugacccgcugccucaaccgggugugcacgaacuacaugcccuacuucuucacccugcugcuccagcugugcaccuucacccgcuccaccaacagccggaucaaggccuccaugcccacgaccaucgccaagaacaccgucaagagcgugggcaaguucugccuggaggccagcuucaacuaccucaagucccccaacuucagcaagcugaucaacaucaucaucugguuccugcuccuguccgugugccugggcagccucaucuacuccaccgccgcgcuggggguccugaugagcaaccucggcaucccguccuacugcacgggguaccgcgagggcuaccugaacagcaccaacgugaccaucgccaccuacugcacgggcuccauccccugcagcgugugccuguccgggcucgacagccuggacaccuaccccucccuggagaccauccagaucaccaucagcuccuucaagugggaccucacggccuucggccuggucgccgagugguuccuggccuacauccucuucacccgguucuucuacgugcuggggcuggcggccaucaugcagcucuucuucagcuacuucgccgugcacuucaucuccaacagcuggcugauguggcugaucaucaaccugguccagauggcccccaucuccgcgauggugcgcauguacaucuucuucgccagcuucuacuacguguggaagagcuacguccacgugguggacggcugcaacuccagcaccugcaugaugugcuacaagcggaaccgcgccacccgggucgagugcacgaccaucgugaacgggguccgccgguccuucuacguguacgccaacggcggcaagggguucugcaagcuccacaacuggaacugcgugaacugcgacaccuucugcgccggcagcaccuucaucuccgacgaggucgcgcgcgaccugagccugcaguucaagcggccgaucaaccccacggaccaguccagcuacaucguggacuccgugaccgucaagaacgggagcauccaccucuacuucgacaaggccggccagaagaccuacgagcgccacucccugagccacuucgugaaccuggacaaccuccgggccaacaacaccaaggggucccugcccaucaacgugaucgucuucgacggcaagagcaagugcgaggaguccagcgccaaguccgccagcguguacuacucccagcugaugugccagcccauccuccugcuggaccaggcgcucgugagcgacgucggcgacagcgccgagguggccgugaagauguucgacgccuacgucaacacguucuccagcaccuucaacgugccgauggagaagcugaagacccugguggccaccgcggaggccgagcucgccaagaacgucucccuggacaacgugcugagcacguucaucuccgccgcgcgccagggguucguggacagcgacgucgagaccaaggacgugguggagugccucaagcugucccaccagagcgacaucgaggucaccggcgacuccugcaacaacuacaugcugaccuacaacaagguggagaacaugacgccccgggaccucggggccugcaucgacugcagcgcccgccacaucaacgcccagguggccaagucccacaacaucgcgcugaucuggaacgucaaggacuucaugagccuguccgagcagcuccggaagcagauccgcagcgccgccaagaagaacaaccugcccuucaagcugaccugcgccaccacccgccagguggugaacgucgugacgaccaagaucgcccucaagggcgggugaggacuaguuauaagacugacuagcccgaugggccucccaacgggcccuccuccccuccuugcaccgagauuaauaaaaaaaaaaaaaaaaaaaaaaaaaaaaaaaaaaaaaaaaaaaaaaaaaaaaaaaaaaaaaaaaugcaucccccccccccccccccccccccccccccccaaaggcucuuuucagagccaccagaauu

SEQ ID NO: 21782 - RNA, 6058 nt, Artificial Sequence
  SARS-CoV-2__MT611449.1__non-structural protein 3 (NSP3) mRNA gc
aggagaaagcuuaccauggcccccaccaaggugaccuucggcgacgacacggucaucgaggugcagggguacaagagcgugaacaucaccuucgagcuggacgagcgcaucgacaagguccucaacgagaagugcuccguguacaccguggagcugggcaccgaggucaacgaguucgccugcgugguggcggacgccgucaucaagacgcugcagccggugagcgagcuccugaccccccuggggaucgaccucgacgagugguccauggccaccuacuaccuguucgacgagagcggcgaguucaagcuggccucccacauguacugcagcuucuacccccccgacgaggacgaggaggagggggacugcgaggaggaggaguucgagccguccacccaguacgaguacggcacggaggacgacuaccagggcaagccccucgaguucggggccaccagcgcggcccugcagcccgaggaggagcaggaggaggacuggcuggacgacgacucccagcagaccgugggccagcaggacgggagcgaggacaaccagaccacgaccauccagaccaucgucgaggugcagccccagcucgagauggagcugaccccggugguccagacgaucgaggugaacuccuucagcggcuaccugaagcucaccgacaacguguacaucaagaacgccgacaucgucgaggaggccaagaaggugaagcccaccguggucgugaacgcggccaacguguaccugaagcacgggggcggcgucgccggggcccugaacaaggccaccaacaacgcgaugcagguggaguccgacgacuacaucgccacgaacggcccccucaaggucgggggcagcugcgugcuguccggccacaaccuggccaagcacugccuccacguggucgggcccaacgugaacaagggcgaggacauccagcugcugaagagcgccuacgagaacuucaaccagcacgaggugcuccuggccccgcugcucuccgcggggaucuucugcgccgaccccauccacagccugcgggucugcguggacaccgugcgcaccaacgucuaccuggccguguucgacaagaaccucuacgacaagcugguguccagcuuccuggagaugaagagcgagaagcaggucgagcagaagaucgccgagauccccaaggaggaggugaagcccuucaucaccgaguccaagccgagcguggagcagcggaagcaggacgacaagaagaucaaggccugcgucgaggaggugacgaccacccucgaggagaucaaguuccugaccgagaaccugcuccuguacaucgacaucaacggcaaccugcaccccgacuccgcgacgcucgugagcgacaucgacaucaccuuccugaagaaggacgcccccuacaucgucggggacguggugcaggagggcguccugaccgccguggugauccccaccaagaaggccggcgggacgaccgagaugcucgccaaggcgcugcgcaaggucccgaccgacaacuacaucaccacguaccccggccaggggcugaacggcuacaccguggaggaggccaagaccgugcucaagaagugcaaguccgccuucuacauccugcccagcaucaucuccaacgagaagcaggagauccuggggaccgucagcuggaaccuccgggagaugcuggcccacgcggaggagacccgcaagcugaugcccgugugcguggagacgaaggccaucgucuccaccauccagcggaaguacaagggcaucaagauccaggagggcgugguggacuacggggcccgcuucuacuucuacaccagcaagaccacggucgccucccugaucaacacccucaacgaccugaacgagacccuggugaccaugccgcucggcuacgugacgcacgggcugaaccuggaggaggccgcgcgguacaugcgcagccucaagguccccgccaccguguccgugagcucccccgacgccgucaccgccuacaacggcuaccugaccagcuccagcaagacgcccgaggagcacuucaucgagaccaucucccuggccgggagcuacaaggacuggagcuacuccggccagagcacccagcucggcaucgaguuccugaagcggggggacaaguccguguacuacaccagcaacccgacgaccuuccaccuggacggcgaggugaucaccuucgacaaccucaagacccugcugucccuccgcgagguccggacgaucaagguguucaccaccguggacaacaucaaccugcacacccaggucguggacaugagcaugacguacgggcagcaguucggccccaccuaccuggacggcgcggacgugaccaagaucaagccccacaacucccacgaggggaagaccuucuacguccucccgaacgacgacacgcugcgcguggaggccuucgaguacuaccacaccaccgaccccagcuuccugggccgguacauguccgcccucaaccacaccaagaaguggaaguacccccaggugaacgggcugacgagcaucaagugggccgacaacaacugcuaccuggccaccgcgcuccugacccugcagcagaucgagcucaaguucaaccccccggcccugcaggacgccuacuaccgcgcccgggcgggcgaggccgccaacuucugcgcccugauccucgccuacugcaacaagaccgucggggagcugggcgacgugcgcgagacgauguccuaccuguuccagcacgcgaaccucgacagcugcaagcggguccugaacguggugugcaagaccugcggccagcagcagaccacccugaagggggucgaggccgugauguacaugggcacccucuccuacgagcaguucaagaagggggugcagauccccugcacgugcggcaagcaggccaccaaguaccugguccagcaggagagccccuucgugaugauguccgcccccccggcccaguacgagcugaagcacgggaccuucaccugcgcgagcgaguacacgggcaacuaccagugcggccacuacaagcacaucaccuccaaggagacccucuacugcaucgacggggcccugcugaccaagagcagcgaguacaagggccccaucacggacguguucuacaaggagaacuccuacaccaccaccaucaagcccgucacguacaagcucgacgggguggugugcaccgagaucgaccccaagcuggacaacuacuacaagaaggacaacagcuacuucaccgagcagccgaucgaccugguccccaaccagcccuaccccaacgccuccuucgacaacuucaaguucgugugcgacaacaucaaguucgccgacgaccucaaccagcugaccggcuacaagaagccggccagccgcgagcugaaggugacguucuuccccgaccucaacggggacgucguggcgaucgacuacaagcacuacacccccuccuucaagaagggcgccaagcugcugcacaagcccaucguguggcacgucaacaacgccaccaacaaggccaccuacaagccgaacacguggugcauccggugccucuggagcaccaagcccguggagaccuccaacagcuucgacgugcugaaguccgaggacgcgcagggcauggacaaccuggccugcgaggaccucaagcccgucagcgaggaggugguggagaaccccaccauccagaaggacguccuggagugcaacgugaagacgaccgagguggucggggacaucauccugaagccggccaacaacucccucaagaucaccgaggaggugggccacaccgaccugauggccgccuacguggacaacagcucccugacgaucaagaagcccaacgagcucagccgcguccuggggcugaagacccucgcgacccacggccuggccgccgugaacuccgugcccugggacaccaucgccaacuacgccaagccguuccugaacaaggucgugagcacgaccaccaacaucgugacccgcugccucaaccgggucugcacgaacuacaugcccuacuucuucacccugcugcuccagcugugcaccuucacccgcuccaccaacagccggaucaaggcguccaugcccacgaccaucgccaagaacaccgugaagagcguggggaaguucugccuggaggccagcuucaacuaccucaagucccccaacuucagcaagcugaucaacaucaucaucugguuccugcuccuguccgucugccugggcagccucaucuacuccaccgccgcccugggcgugcugaugagcaaccucgggaugccguccuacugcacgggcuaccgcgagggguaccugaacagcaccaacgugaccaucgcgaccuacugcacgggcuccauccccugcagcgucugccuguccggccucgacagccuggacaccuaccccucccuggagaccauccagaucaccaucagcuccuucaagugggaccucacggccuucgggcugguggccgagugguuccuggccuacauccucuucacccgguucuucuacgugcugggccuggccgcgaucaugcagcucuucuucagcuacuucgccguccacuucaucuccaacagcuggcugauguggcugaucaucaaccuggugcagauggcccccaucuccgccauggugcgcauguacaucuucuucgcgagcuucuacuacgucuggaagagcuacgugcacguggucgacgggugcaacuccagcaccugcaugaugugcuacaagcggaaccgcgccacccggguggagugcacgaccaucgucaacggcgugcgccgguccuucuacguguacgccaacgggggcaagggcuucugcaagcuccacaacuggaacugcgucaacugcgacaccuucugcgccgggagcaccuucaucuccgacgagguggcccgcgaccugagccugcaguucaagcggccgaucaaccccacggaccaguccagcuacaucguggacuccgucaccgugaagaacggcagcauccaccucuacuucgacaaggcggggcagaagaccuacgagcgccacucccugagccacuucgugaaccuggacaaccuccgggccaacaacaccaagggcucccugcccaucaacgucaucguguucgacgggaagagcaagugcgaggaguccagcgccaaguccgccagcguguacuacucccagcugaugugccagcccauccuccugcuggaccaggcccucgucagcgacgugggcgacagcgcggagguggccgucaagauguucgacgccuacgugaacacguucuccagcaccuucaacgugccgauggagaagcugaagacccuggucgccaccgccgaggcggagcucgccaagaacgugucccuggacaacgugcugagcacguucaucuccgccgcccgccagggcuucgucgacagcgacguggagaccaaggacguggucgagugccucaagcugucccaccagagcgacaucgaggugaccggggacuccugcaacaacuacaugcugaccuacaacaagguggagaacaugacgccccgggaccucggcgcgugcaucgacugcagcgcccgccacaucaacgcccaggucgccaagucccacaacaucgcccugaucuggaacgugaaggacuucaugagccuguccgagcagcuccggaagcagauccgcagcgcggccaagaagaacaaccugcccuucaagcugaccugcgccaccacccgccagguggucaacguggugacgaccaagaucgcccucaaggggggcugaggacuaguuauaagacugacuagcccgaugggccucccaacgggcccuccuccccuccuugcaccgagauuaauaaaaaaaaaaaaaaaaaaaaaaaaaaaaaaaaaaaaaaaaaaaaaaaaaaaaaaaaaaaaaaaaugcaucccccccccccccccccccccccccccccccaaaggcucuuuucagagccaccagaauu

SEQ ID NO: 21783 - RNA, 6058 nt, Artificial Sequence
  SARS-CoV-2__MT611444.1__non-structural protein 3 (NSP3) mRNA gc
aggagaaagcuuaccauggcccccaccaaggugaccuucggcgacgacacggucaucgaggugcagggguacaagagcgugaacaucaccuucgagcuggacgagcgcaucgacaagguccucaacgagaagugcuccgccuacaccguggagcugggcaccgaggugaacgaguucgcgugcgucguggccgacgccgugaucaagacgcugcagccggucagcgagcuccugaccccccuggggaucgaccucgacgagugguccauggccaccuacuaccuguucgacgagagcggcgaguucaagcuggccucccacauguacugcagcuucuacccccccgacgaggacgaggaggagggggacugcgaggaggaggaguucgagccguccacccaguacgaguacggcacggaggacgacuaccagggcaagccccucgaguucggggcgaccagcgccgcccugcagcccgaggaggagcaggaggaggacuggcuggacgacgacucccagcagaccgugggccagcaggacgggagcgaggacaaccagaccacgaccauccagaccaucguggagguccagccccagcucgagauggagcugaccccgguggugcagacgaucgaggucaacuccuucagcggcuaccugaagcucaccgacaacguguacaucaagaacgccgacaucguggaggaggcgaagaaggucaagcccaccgugguggucaacgccgccaacguguaccugaagcacgggggcggcguggccggggcccugaacaaggcgaccaacaacgccaugcaggucgaguccgacgacuacaucgccacgaacggcccccucaagguggggggcagcugcguccuguccggccacaaccuggccaagcacugccuccacgugguggggcccaacgucaacaagggcgaggacauccagcugcugaagagcgccuacgagaacuucaaccagcacgaggugcuccuggcgccgcugcucuccgccgggaucuucggcgccgaccccauccacagccugcgggugugcgucgacaccgugcgcaccaacguguaccuggccgucuucgacaagaaccucuacgacaagcugguguccagcuuccuggagaugaagagcgagaagcagguggagcagaagaucgccgagauccccaaggaggaggucaagcccuucaucaccgaguccaagccgagcguggagcagcggaagcaggacgacaagaagaucaaggcgugcguggaggaggucacgaccacccucgaggagaccaaguuccugacggagaaccugcuccuguacaucgacaucaacgggaaccugcaccccgacuccgccacccucgugagcgacaucgacaucaccuuccugaagaaggacgcccccuacaucgugggcgacgucgugcaggagggcgugcugaccgccgucgugauccccacgaagaaggccgggggcaccaccgagaugcucgcgaaggcccugcgcaaggugccgaccgacaacuacaucacgaccuaccccgggcagggccugaacggguacaccgucgaggaggccaagaccgugcucaagaagugcaaguccgccuucuacauccugcccagcaucaucuccaacgagaagcaggagauccugggcaccgugagcuggaaccuccgggagaugcuggcgcacgccgaggagacgcgcaagcugaugcccgucugcguggagaccaaggccaucguguccaccauccagcggaaguacaagggcaucaagauccaggagggggucguggacuacggcgcccgcuucuacuucuacaccagcaagacgaccguggccucccugaucaacacccucaacgaccugaacgagacccuggucacgaugccgcucggguacgugacccacggccugaaccuggaggaggcggcccgguacaugcgcagccucaaggugcccgccaccgucuccgugagcucccccgacgccgugaccgccuacaacggguaccugacgagcuccagcaagacccccgaggagcacuucaucgagaccaucucccuggcgggcagcuacaaggacuggagcuacuccggccagagcacccagcucgggaucgaguuccugaagcggggcgacaaguccgucuacuacacgagcaacccgaccaccuuccaccuggacggggaggugaucaccuucgacaaccucaagacgcugcugucccuccgcgaggugcggaccaucaaggucuucaccaccguggacaacaucaaccugcacacgcagguggucgacaugagcaugaccuacggccagcaguucggccccaccuaccuggacggggccgacgugaccaagaucaagccccacaacucccacgagggcaagacguucuacgugcucccgaacgacgacacccugcgcgucgaggccuucgaguacuaccacaccaccgaccccagcuuccuggggcgguacauguccgcccucaaccacacgaagaaguggaaguacccccaggugaacggccugaccagcaucaagugggccgacaacaacugcuaccuggcgaccgcccuccugacccugcagcagaucgagcucaaguucaaccccccggcccugcaggacgccuacuaccgcgcgcgggccggggaggccgccaacuucugcgcccugauccucgcguacugcaacaagacggugggcgagcugggcgacguccgcgagaccauguccuaccuguuccagcacgccaaccucgacagcugcaagcgggugcugaacgucgugugcaagaccugcgggcagcagcagaccacccugaagggcguggaggccgucauguacauggggacgcucuccuacgagcaguucaagaagggcgugcagauccccugcaccugcgggaagcaggccaccaaguaccuggugcagcaggagagccccuucgucaugauguccgcccccccggcgcaguacgagcugaagcacggcaccuucacgugcgccagcgaguacaccggcaacuaccagugcgggcacuacaagcacaucaccuccaaggagacccucuacugcaucgacggcgcccugcugacgaagagcagcgaguacaaggggcccaucaccgacguguucuacaaggagaacuccuacaccaccacgaucaagcccgugaccuacaagcucgacggcgucgugugcaccgagaucgaccccaagcuggacaacuacuacaagaaggacaacagcuacuucaccgagcagccgaucgaccuggugcccaaccagcccuaccccaacgccuccuucgacaacuucaaguucgucugcgacaacaucaaguucgccgacgaccucaaccagcugacgggguacaagaagccggcgagccgcgagcugaaggugaccuucuuccccgaccucaacggcgacguggucgccaucgacuacaagcacuacacccccuccuucaagaagggcgccaagcugcugcacaagcccaucguguggcacgugaacaacgccaccaacaaggcgacguacaagccgaacaccuggugcauccggugccucuggagcaccaagcccgucgagaccuccaacagcuucgacgugcugaaguccgaggacgcccaggggauggacaaccuggccugcgaggaccucaagcccgugagcgaggaggucguggagaaccccacgauccagaaggacgugcuggagugcaacgucaagaccaccgagguggugggcgacaucauccugaagccggccaacaacucccucaagaucaucgaggaggucgggcacaccgaccugauggccgcguacguggacaacagcucccugacgaucaagaagcccaacgagcucagccgcgugcugggccugaagacccucgccacccacgggcuggccgccgucaacuccgugcccugggacaccaucgccaacuacgcgaagccguuccugaacaagguggucagcacgaccaccaacaucgugacccgcugccucaaccgggugugcacgaacuacaugcccuacuucuucacccugcugcuccagcugugcaccuucacccgcuccaccaacagccggaucaaggccuccaugcccacgaccaucgccaagaacaccgucaagagcgugggcaaguucugccuggaggccagcuucaacuaccucaagucccccaacuucagcaagcugaucaacaucaucaucugguuccugcuccuguccgugugccugggcagccucaucuacuccaccgccgcgcuggggguccugaugagcaaccucggcaugccguccuacugcacgggguaccgcgagggcuaccugaacagcaccaacgugaccaucgccaccuacugcacgggcuccauccccugcagcgugugccuguccgggcucgacagccuggacaccuaccccucccuggagaccauccagaucaccaucagcuccuucaagugggaccucacggccuucggccuggucgccgagugguuccuggccuacauccucuucacccgguucuucuacgugcuggggcuggcggccaucaugcagcucuucuucagcuacuucgccgugcacuucaucuccaacagcuggcugauguggcugaucaucaaccugguccagauggcccccaucuccgcgauggugcgcauguacaucuucuucgccagcuucuacuacguguggaagagcuacguccacgugguggacggcugcaacuccagcaccugcaugaugugcuacaagcggaaccgcgccacccgggucgagugcacgaccaucgugaacgggguccgccgguccuucuacguguacgccaacggcggcaagggguucugcaagcuccacaacuggaacugcgugaacugcgacaccuucugcgccggcagcaccuucaucuccgacgaggucgcgcgcgaccugagccugcaguucaagcggccgaucaaccccacggaccaguccagcuacaucguggacuccgugaccgucaagaacgggagcauccaccucuacuucgacaaggccggccagaagaccuacgagcgccacucccugagccacuucgugaaccuggacaaccuccgggccaacaacaccaaggggucccugcccaucaacgugaucgucuucgacggcaagagcaagugcgaggaguccagcgccaaguccgccagcguguacuacucccagcugaugugccagcccauccuccugcuggaccaggcgcucgugagcgacgucggcgacagcgccgagguggccgugaagauguucgacgccuacgucaacacguucuccagcaccuucaacgugccgauggagaagcugaagacccugguggccaccgcggaggccgagcucgccaagaacgucucccuggacaacgugcugagcacguucaucuccgccgcgcgccagggguucguggacagcgacgucgagaccaaggacgugguggagugccucaagcuguccuaccagagcgacaucgaggucaccggcgacuccugcaacaacuacaugcugaccuacaacaagguggagaacaugacgccccgggaccucggggccugcaucgacugcagcgcccgccacaucaacgcccagguggccaagucccacaacaucgcgcugaucuggaacgucaaggacuucaugagccuguccgagcagcuccggaagcagauccgcagcgccgccaagaagaacaaccugcccuucaagcugaccugcgccaccacccgccagguggugaacgucgugacgaccaagaucgcccucaagggcgggugaggacuaguuauaagacugacuagcccgaugggccucccaacgggcccuccuccccuccuugcaccgagauuaauaaaaaaaaaaaaaaaaaaaaaaaaaaaaaaaaaaaaaaaaaaaaaaaaaaaaaaaaaaaaaaaaugcaucccccccccccccccccccccccccccccccaaaggcucuuuucagagccaccagaauu

SEQ ID NO: 21784 - RNA, 6058 nt, Artificial Sequence
  SARS-CoV-2__MT614599.1__non-structural protein 3 (NSP3) mRNA gc
aggagaaagcuuaccauggcccccaccaaggugaccuucggcgacgacacggucaucgaggugcagggguacaagagcgugaacaucaccuucgagcuggacgagcgcaucgacaagguccucaacgagaagugcuccgccuacaccguggagcugggcaccgaggugaacgaguucgcgugcgucguggccgacgccgugaucaagacgcugcagccggucagcgagcuccugaccccccuggggaucgaccucgacgagugguccauggccaccuacuaccuguucgacgagagcggcgaguucaagcuggccucccacauguacugcagcuucuacccccccgacgaggacgaggaggagggggacugcgaggaggaggaguucgagccguccacccaguacgaguacggcacggaggacgacuaccagggcaagccccucgaguucggggcgaccagcgccgcccugcagcccgaggaggagcaggaggaggacuggcuggacgacgacucccagcagaccgugggccagcaggacgggagcgaggacaaccagaccacgaccauccagaccaucguggagguccagccccagcucgagauggagcugaccccgguggugcagacgaucgaggucaacuccuucagcggcuaccugaagcucaccgacaacguguacaucaagaacgccgacaucguggaggaggcgaagaaggucaagcccaccgugguggucaacgccgccaacguguaccugaagcacgggggcggcguggccggggcccugaacaaggcgaccaacaacgccaugcaggucgaguccgacgacuacaucgccacgaacggcccccucaagguggggggcagcugcguccuguccggccacaaccuggccaagcacugccuccacgugguggggcccaacgucaacaagggcgaggacauccagcugcugaagagcgccuacgagaacuucaaccagcacgaggugcuccuggcgccgcugcucuccgccgggaucuucggcgccgaccccauccacagccugcgggugugcgucgacaccgugcgcaccaacguguaccuggccgucuucgacaagaaccucuacgacaagcugguguccagcuuccuggagaugaagagcgagaagcagguggagcagaagaucgccgagauccccaaggaggaggucaagcccuucaucaccgaguccaagccgagcguggagcagcggaagcaggacgacaagaagaucaaggcgugcguggaggaggucacgaccacccucgaggagaccaaguuccugacggagaaccugcuccuguacaucgacaucaacgggaaccugcaccccgacuccgccacccucgugagcgacaucgacaucaccuuccugaagaaggacgcccccuacaucgugggcgacgucgugcaggagggcgugcugaccgccgucgugauccccacgaagaaggccgggggcaccaccgagaugcucgcgaaggcccugcgcaaggugccgaccgacaacuacaucacgaccuaccccgggcagggccugaacggguacaccgucgaggaggccaagaccgugcucaagaagugcaaguccgccuucuacauccugcccagcaucaucuccaacgagaagcaggagauccugggcaccgugagcuggaaccuccgggagaugcuggcgcacgccgaggagacgcgcaagcugaugcccgucugcguggagaccaaggccaucguguccaccauccagcggaaguacaagggcaucaagauccaggagggggucguggacuacggcgcccgcuucuacuucuacaccagcaagacgaccguggccucccugaucaacacccucaacgaccugaacgagacccuggucacgaugccgcucggguacgugacccacggccugaaccuggaggaggcggcccgguacaugcgcagccucaaggugcccgccaccgucuccgugagcucccccgacgccgugaccgccuacaacggguaccugacgagcuccagcaagacccccgaggagcacuucaucgagaccaucucccuggcgggcagcuacaaggacuggagcuacuccggccagagcacccagcucgggaucgaguuccugaagcggggcgacaaguccgucuacuacacgagcaacccgaccaccuuccaccuggacggggaggugaucaccuucgacaaccucaagacgcugcugucccuccgcgaggugcggaccaucaaggucuucaccaccguggacaacaucaaccugcacacgcagguggucgacaugagcaugaccuacggccagcaguucggccccaccuaccuggacggggccgacgugaccaagaucaagccccacaacucccacgagggcaagacguucuacgugcucccgaacgacgacacccugcgcgucgaggccuucgaguacuaccacaccaccgaccccagcuuccuggggcgguacauguccgcccucaaccacacgaagaaguggaaguacccccaggugaacggccugaccagcaucaagugggccgacaacaacugcuaccuggcgaccgcccuccugacccugcagcagaucgagcucaaguucaaccccccggcccugcaggacgccuacuaccgcgcgcgggccggggaggccgccaacuucugcgcccugauccucgcguacugcaacaagacggugggcgagcugggcgacguccgcgagaccauguccuaccuguuccagcacgccaaccucgacagcugcaagcgggugcugaacgucgugugcaagaccugcgggcagcagcagaccacccugaagggcguggaggccgucauguacauggggacgcucuccuacgagcaguucaagaagggcgugcagauccccugcaccugcgggaagcaggccaccaaguaccuggugcagcaggagagccccuucgucaugauguccgcccccccggcgcaguacgagcugaagcacggcaccuucacgugcgccagcgaguacaccggcaacuaccagugcgggcacuacaagcacaucaccuccaaggagacccucuacugcaucgacggcgcccugcugacgaagagcagcgaguacaaggggcccaucaccgacguguucuacaaggagaacuccuacaccaccacgaucaagcccgugaccuacaagcucgacggcgucgugugcaccgagaucgaccccaagcuggacaacuacuacaagaaggacaacagcuacuucaccgagcagccgaucgaccuggugcccaaccagcccuaccccaacgccuccuucgacaacuucaaguucgucugcgacaacaucaaguucgccgacgaccucaaccagcugacgggguacaagaagccggcgagccgcgagcugaaggugaccuucuuccccgaccucaacggcgacguggucgccaucgacuacaagcacuacacccccuccuucaagaagggcgccaagcugcugcacaagcccaucguguggcacgugaacaacgccaccaacaaggcgacguacaagccgaacaccuggugcauccggugccucuggagcaccaagcccgucgagaccuccaacagcuucgacgugcugaaguccgaggacgcccaggggauggacaaccuggccugcgaggaccucaagagcguguccgaggaggucguggagaaccccacgauccagaaggacgugcuggagugcaacgucaagaccaccgagguggugggcgacaucauccugaagcccgccaacaacagccucaagaucaccgaggaggucgggcacacggaccugauggccgcguacguggacaacuccagccugaccaucaagaagccgaacgagcucucccgcgugcugggccugaagacccucgccacccacgggcuggccgccgucaacagcgugcccugggacacgaucgccaacuacgcgaagcccuuccugaacaagguggucuccaccaccaccaacaucgugacgcgcugccucaaccgggugugcaccaacuacaugccguacuucuucacccugcugcuccagcugugcaccuucacccgcagcacgaacucccggaucaaggccagcaugcccaccaccaucgccaagaacaccgucaagagcgugggcaaguucugccuggaggccuccuucaacuaccucaagagccccaacuucuccaagcugaucaacaucaucaucugguuccugcuccugagcgugugccugggcucccucaucuacagcacggccgcgcuggggguccugauguccaaccucggcaugcccagcuacugcaccggguaccgcgagggcuaccugaacuccaccaacgugaccaucgccacguacugcaccggcagcaucccgugcuccgugugccugagcgggcucgacucccuggacaccuaccccagccuggagaccauccagaucacgaucuccagcuucaagugggaccucaccgccuucggccuggucgccgagugguuccuggccuacauccucuucacccgguucuucuacgugcuggggcuggcggccaucaugcagcucuucuucuccuacuucgccgugcacuucaucagcaacuccuggcugauguggcugaucaucaaccugguccagauggcccccaucagcgcgauggugcgcauguacaucuucuucgccagcuucuacuacguguggaaguccuacguccacgugguggacggcugcaacagcuccaccugcaugaugugcuacaagcggaaccgcgccacgcgggucgagugcaccaccaucgugaacgggguccgccggagcuucuacguguacgccaacggcggcaagggguucugcaagcuccacaacuggaacugcgugaacugcgacaccuucugcgccggcuccacguucaucagcgacgaggucgcgcgcgaccugucccugcaguucaagcggcccaucaacccgaccgaccagagcuccuacaucguggacagcgugaccgucaagaacggguccauccaccucuacuucgacaaggccggccagaagaccuacgagcgccacagccugucccacuucgugaaccuggacaaccuccgggccaacaacacgaaggggagccugcccaucaacgugaucgucuucgacggcaaguccaagugcgaggagagcuccgccaagagcgccuccguguacuacagccagcugaugugccagcccauccuccugcuggaccaggcgcucgugagcgacgucggcgacuccgccgagguggccgugaagauguucgacgccuacgucaacaccuucagcuccaccuucaacgugcccauggagaagcugaagacccugguggccacggcggaggccgagcucgccaagaacgucagccuggacaacgugcuguccaccuucaucagcgccgcgcgccagggguucguggacuccgacgucgagaccaaggacgugguggagugccucaagcugagccaccaguccgacaucgaggucaccggcgacagcugcaacaacuacaugcugacguacaacaagguggagaacaugaccccgcgggaccucggggccugcaucgacugcuccgcccgccacaucaacgcccagguggccaagagccacaacaucgcgcugaucuggaacgucaaggacuucaugucccugagcgagcagcuccggaagcagauccgcuccgccgccaagaagaacaaccugcccuucaagcugaccugcgccaccacgcgccagguggugaacgucgugaccaccaagaucgcccucaagggcgggugaggacuaguuauaagacugacuagcccgaugggccucccaacgggcccuccuccccuccuugcaccgagauuaauaaaaaaaaaaaaaaaaaaaaaaaaaaaaaaaaaaaaaaaaaaaaaaaaaaaaaaaaaaaaaaaaugcaucccccccccccccccccccccccccccccccaaaggcucuuuucagagccaccagaauu

SEQ ID NO: 21785 - RNA, 6058 nt, Artificial Sequence
  SARS-CoV-2__MT675289.1__non-structural protein 3 (NSP3) mRNA gc
aggagaaagcuuaccauggcccccaccaaggugaccuucggcgacgacacggucaucgaggugcagggguacaagagcgugaacaucaccuucgagcuggacgagcgcaucgacaagguccucaacgagaagugcuccgccuacaccguggagcugggcaccgaggugaacgaguucgcgugcgucguggccgacgccgugaucaagacgcugcagccggucagcgagcuccugaccccccuggggaucgaccucgacgagugguccauggccaccuacuaccuguucgacgagagcggcgaguucaagcuggccucccacauguacugcagcuucuacccccccgacgaggacgaggaggagggggacugcgaggaggaggaguucgagccguccacccaguacgaguacggcacggaggacgacuaccagggcaagccccucgaguucggggcgaccagcgccgcccugcagcccgaggaggagcaggaggaggacuggcuggacgacgacucccagcagaccgugggccagcaggacgggagcgaggacaaccagaccacgaccauccagaccaucguggagguccagccccagcucgagauggagcugaccccgguggugcagacgaucgaggucaacuccuucagcggcuaccugaagcucaccgacaacguguacaucaagaacgccgacaucguggaggaggcgaagaaggucaagcccaccgugguggucaacgccgccaacguguaccugaagcacgggggcggcguggccggggcccugaacaaggcgaccaacaacgccaugcaggucgaguccgacgacuacaucgccacgaacggcccccucaagguggggggcagcugcguccuguccggccacaaccuggccaagcacugccuccacgugguggggcccaacgucaacaagggcgaggacauccagcugcugaagagcgccuacgagaacuucaaccagcacgaggugcuccuggcgccgcugcucuccgccgggaucuucggcgccgaccccauccacagccugcgggugugcgucgacaccgugcgcaccaacguguaccuggccgucuucgacaagaaccucuacgacaagcugguguccagcuuccuggagaugaagagcgagaagcagguggagcagaagaucgccgagauccccaaggaggaggucaagcccuucaucaccgaguccaagccgagcguggagcagcggaagcaggacgacaagaagaucaaggcgugcguggaggaggucacgaccacccucgaggagaccaaguuccugacggagaaccugcuccuguacaucgacaucaacgggaaccugcaccccgacuccgccacccucgugagcgacaucgacaucaccuuccugaagaaggacgcccccuacaucgugggcgacgucgugcaggagggcgugcugaccgccgucgugauccccacgaagaaggccgggggcaccaccgagaugcucgcgaaggcccugcgcaaggugccgaccgacuccuacaucacgaccuaccccgggcagggccugaacggguacaccgucgaggaggccaagaccgugcucaagaagugcaagagcgccuucuacauccugcccuccaucaucagcaacgagaagcaggagauccugggcaccguguccuggaaccuccgggagaugcuggcgcacgccgaggagacgcgcaagcugaugcccgucugcguggagaccaaggccaucgugagcaccauccagcggaaguacaagggcaucaagauccaggagggggucguggacuacggcgcccgcuucuacuucuacaccuccaagacgaccguggccagccugaucaacacccucaacgaccugaacgagacccuggucacgaugccgcucggguacgugacccacggccugaaccuggaggaggcggcccgguacaugcgcucccucaaggugcccgccaccgucagcguguccagccccgacgccgugaccgccuacaacggguaccugacguccagcuccaagacccccgaggagcacuucaucgagaccaucagccuggcgggcagcuacaaggacugguccuacagcggccaguccacccagcucgggaucgaguuccugaagcggggcgacaagagcgucuacuacacguccaacccgaccaccuuccaccuggacggggaggugaucaccuucgacaaccucaagacgcugcugagccuccgcgaggugcggaccaucaaggucuucaccaccguggacaacaucaaccugcacacgcagguggucgacauguccaugaccuacggccagcaguucggccccaccuaccuggacggggccgacgugaccaagaucaagccccacaacagccacgagggcaagacguucuacgugcucccgaacgacgacacccugcgcgucgaggccuucgaguacuaccacaccaccgaccccuccuuccuggggcgguacaugagcgcccucaaccacacgaagaaguggaaguacccccaggugaacggccugaccuccaucaagugggccgacaacaacugcuaccuggcgaccgcccuccugacccugcagcagaucgagcucaaguucaaccccccggcccugcaggacgccuacuaccgcgcgcgggccggggaggccgccaacuucugcgcccugauccucgcguacugcaacaagacggugggcgagcugggcgacguccgcgagaccaugagcuaccuguuccagcacgccaaccucgacuccugcaagcgggugcugaacgucgugugcaagaccugcgggcagcagcagaccacccugaagggcguggaggccgucauguacauggggacgcucagcuacgagcaguucaagaagggcgugcagauccccugcaccugcgggaagcaggccaccaaguaccuggugcagcaggagucccccuucgucaugaugagcgcccccccggcgcaguacgagcugaagcacggcaccuucacgugcgccuccgaguacaccggcaacuaccagugcgggcacuacaagcacaucaccagcaaggagacccucuacugcaucgacggcgcccugcugacgaagagcuccgaguacaaggggcccaucaccgacguguucuacaaggagaacagcuacaccaccacgaucaagcccgugaccuacaagcucgacggcgucgugugcaccgagaucgaccccaagcuggacaacuacuacaagaaggacaacuccuacuucaccgagcagccgaucgaccuggugcccaaccagcccuaccccaacgccagcuucgacaacuucaaguucgucugcgacaacaucaaguucgccgacgaccucaaccagcugacgggguacaagaagccggcgucccgcgagcugaaggugaccuucuuccccgaccucaacggcgacguggucgccaucgacuacaagcacuacacccccagcuucaagaagggcgccaagcugcugcacaagcccaucguguggcacgugaacaacgccaccaacaaggcgacguacaagccgaacaccuggugcauccggugccucugguccaccaagcccgucgagaccagcaacuccuucgacgugcugaagagcgaggacgcccaggggauggacaaccuggccugcgaggaccucaagcccguguccgaggaggucguggagaaccccacgauccagaaggacgugcuggagugcaacgucaagaccaccgagguggugggcgacaucauccugaagccggccaacaacagccucaagaucaccgaggaggucgggcacacggaccugauggccgcguacguggacaacuccagccugaccaucaagaagcccaacgagcucucccgcgugcugggccugaagacccucgccacccacgggcuggccgccgucaacagcgugcccugggacacgaucgccaacuacgcgaagccguuccugaacaagguggucuccaccaccaccaacaucgugacgcgcugccucaaccgggugugcaccaacuacaugcccuacuucuucacccugcugcuccagcugugcaccuucacccgcagcacgaacucccggaucaaggccagcaugcccaccaccaucgccaagaacaccgucaagagcgugggcaaguucugccuggaggccuccuucaacuaccucaagagccccaacuucuccaagcugaucaacaucaucaucugguuccugcuccugagcgugugccugggcucccucaucuacagcacggccgcgcuggggguccugauguccaaccucggcaugccgagcuacugcaccggguaccgcgagggcuaccugaacuccaccaacgugaccaucgccacguacugcaccggcagcauccccugcuccgugugccugagcgggcucgacucccuggacaccuaccccagccuggagaccauccagaucacgaucuccagcuucaagugggaccucaccgccuucggccuggucgccgagugguuccuggccuacauccucuucacccgguucuucuacgugcuggggcuggcggccaucaugcagcucuucuucuccuacuucgccgugcacuucaucagcaacuccuggcugauguggcugaucaucaaccugguccagauggcccccaucagcgcgauggugcgcauguacaucuucuucgccagcuucuacuacguguggaaguccuacguccacgugguggacggcugcaacagcuccaccugcaugaugugcuacaagcggaaccgcgccacgcgggucgagugcaccaccaucgugaacgggguccgccggagcuucuacguguacgccaacggcggcaagggguucugcaagcuccacaacuggaacugcgugaacugcgacaccuucugcgccggcuccacguucaucagcgacgaggucgcgcgcgaccugucccugcaguucaagcggccgaucaaccccaccgaccagagcuccuacaucguggacagcgugaccgucaagaacggguccauccaccucuacuucgacaaggccggccagaagaccuacgagcgccacagccugucccacuucgugaaccuggacaaccuccgggccaacaacacgaaggggagccugcccaucaacgugaucgucuucgacggcaaguccaagugcgaggagagcuccgccaagagcgccuccguguacuacagccagcugaugugccagcccauccuccugcuggaccaggcgcucgugagcgacgucggcgacuccgccgagguggccgugaagauguucgacgccuacgucaacaccuucagcuccaccuucaacgugccgauggagaagcugaagacccugguggccacggcggaggccgagcucgccaagaacgucagccuggacaacgugcuguccaccuucaucagcgccgcgcgccagggguucguggacuccgacgucgagaccaaggacgugguggagugccucaagcugagccaccaguccgacaucgaggucaccggcgacagcugcaacaacuacaugcugacguacaacaagguggagaacaugaccccccgggaccucggggccugcaucgacugcuccgcccgccacaucaacgcccagguggccaagagccacaacaucgcgcugaucuggaacgucaaggacuucaugucccugagcgagcagcuccggaagcagauccgcuccgccgccaagaagaacaaccugcccuucaagcugaccugcgccaccacgcgccagguggugaacgucgugaccaccaagaucgcccucaagggcgggugaggacuaguuauaagacugacuagcccgaugggccucccaacgggcccuccuccccuccuugcaccgagauuaauaaaaaaaaaaaaaaaaaaaaaaaaaaaaaaaaaaaaaaaaaaaaaaaaaaaaaaaaaaaaaaaaugcaucccccccccccccccccccccccccccccccaaaggcucuuuucagagccaccagaauu

SEQ ID NO: 21786 - RNA, 6058 nt, Artificial Sequence
  SARS-CoV-2__MT675950.1__non-structural protein 3 (NSP3) mRNA gc
aggagaaagcuuaccauggcccccaccaaggugaccuucggcgacgacacggucaucgaggugcagggguacaagagcgugaacaucaccuucgagcuggacgagcgcaucgacaagguccucaacgagaagugcuccgccuacaccguggagcugggcaccgaggugaacgaguucgcgugcgucguggccgacgccgugaucaagacgcugcagccggucagcgagcuccugaccccccuggggaucgaccucgacgagugguccauggccaccuacuaccuguucgacgagagcggcgaguucaagcuggccucccacauguacugcagcuucuacccccccgacgaggacgaggaggagggggacugcgaggaggaggaguucgagccguccacccaguacgaguacggcacggaggacgacuaccagggcaagccccucgaguucggggcgaccagcgccgcccugcagcccgaggaggagcaggaggaggacuggcuggacgacgacucccagcagaccgugggccagcaggacgggagcgaggacaaccagaccacgaccauccagaccaucguggagguccagccccagcucgagauggagcugaccccgguggugcagacgaucgaggucaacuccuucagcggcuaccugaagcucaccgacaacguguacaucaagaacgccgacaucguggaggaggcgaagaaggucaagcccaccgugguggucaacgccgccaacguguaccugaagcacgggggcggcguggccggggcccugaacaaggcgaccaacaacgccaugcaggucgaguccgacgacuacaucgccacgaacggcccccucaagguggggggcagcugcguccuguccggccacaaccuggccaagcacugccuccacgugguggggcccaacgucaacaagggcgaggacauccagcugcugaagagcgccuacgagaacuucaaccagcacgaggugcuccuggcgccgcugcucuccgccgggaucuucggcgccgaccccauccacagccugcgggugugcgucgacaccgugcgcaccaacguguaccuggccgucuucgacaagaaccucuacgacaagcugguguccagcuuccuggagaugaagagcgagaagcagguggagcagaagaucgccgagauccccaaggaggaggucaagcccuucaucaccgaguccaagccgagcguggagcagcggaagcaggacgacaagaagaucaaggcgugcguggaggaggucacgaccacccucgaggagaccaaguuccugacggagaaccugcuccuguacaucgacaucaacgggaaccugcaccccgacuccgccacccucgugagcgacaucgacaucaccuuccugaagaaggacgcccccuacaucgugggcgacgucgugcaggagggcgugcugaccgccgucgugauccccacgaagaaggccgggggcaccaccgagaugcucgcgaaggcccugcgcaaggugccgaccgacaacuacaucacgaccuaccccgggcagggccugaacggguacaccgucgaggaggccaagaccgugcucaagaagugcaaguccgccuucuacauccugcccagcaucaucuccaacgagaagcaggagauccugggcaccgugagcuggaaccuccgggagaugcuggcgcacgccgaggagacgcgcaagcugaugcccgucugcguggagaccaaggccaucguguccaccauccagcggaaguacaagggcaucaagauccaggagggggucguggacuacggcgcccgcuucuacuucuacaccagcaagacgaccguggccucccugaucaacacccucaacgaccugaacgagacccuggucacgaugccgcucggguacgugacccacggccugaaccuggaggaggcggcccgguacaugcgcagccucaaggugcccgccaccgucuccgugagcucccccgacgccgugaccgccuacaacggguaccugacgagcuccagcaagacccccgaggagcacuucaucgagaccaucucccuggcgggcagcuacaaggacuggagcuacuccggccagagcacccagcucgggaucgaguuccugaagcggggcgacaaguccgucuacuacacgagcaacccgaccaccuuccaccuggacggggaggugaucaccuucgacaaccucaagacgcugcugucccuccgcgaggugcggaccaucaaggucuucaccaccguggacaacaucaaccugcacacgcagguggucgacaugagcaugaccuacggccagcaguucggccccaccuaccuggacggggccgacgugaccaagaucaagccccacaacucccacgagggcaagacguucuacgugcucccgaacgacgacacccugcgcgucgaggccuucgaguacuaccacaccaccgaccccagcuuccuggggcgguacauguccgcccucaaccacacgaagaaguggaaguacccccaggugaacggccugaccagcaucaagugggccgacaacaacugcuaccuggcgaccgcccuccugacccugcagcagaucgagcucaaguucaaccccccggcccugcaggacgccuacuaccgcgcgcgggccggggaggccgccaacuucugcgcccugauccucgcguacugcaacaagacggugggcgagcugggcgacguccgcgagaccauguccuaccuguuccagcacgccaaccucgacagcugcaagcgggugcugaacgucgugugcaagaccugcgggcagcagcagaccacccugaagggcguggaggccgucauguacauggggacgcucuccuacgagcaguucaagaagggcgugcagauccccugcaccugcgggaagcaggccaccaaguaccuggugcagcaggagagccccuucgucaugauguccgcccccccggcgcaguacgagcugaagcacggcaccuucaucugcgccagcgaguacacgggcaacuaccagugcgggcacuacaagcacaucaccuccaaggagacccucuacugcaucgacggcgcccugcugaccaagagcagcgaguacaaggggcccaucacggacguguucuacaaggagaacuccuacaccaccaccaucaagcccgugacguacaagcucgacggcgucgugugcaccgagaucgaccccaagcuggacaacuacuacaagaaggacaacagcuacuucaccgagcagccgaucgaccuggugcccaaccagcccuaccccaacgccuccuucgacaacuucaaguucgucugcgacaacaucaaguucgccgacgaccucaaccagcugaccggguacaagaagccggcgagccgcgagcugaaggugacguucuuccccgaccucaacggcgacguggucgccaucgacuacaagcacuacacccccuccuucaagaagggcgccaagcugcugcacaagcccaucguguggcacgugaacaacgccaccaacaaggcgaccuacaagccgaacacguggugcauccggugccucuggagcaccaagcccgucgagaccuccaacagcuucgacgugcugaaguccgaggacgcccaggggauggacaaccuggccugcgaggaccucaagcccgugagcgaggaggucguggagaaccccaccauccagaaggacgugcuggagugcaacgucaagacgaccgagguggugggcgacaucauccugaagccggccaacaacucccucaagaucaccgaggaggucgggcacaccgaccugauggccgcguacguggacaacagcucccugacgaucaagaagcccaacgagcucagccgcgugcugggccugaagacccucgccacccacgggcuggccgccgucaacuccgugcccugggacaccaucgccaacuacgcgaagccguuccugaacaagguggucagcacgaccaccaacaucgugacccgcugccucaaccgggugugcacgaacuacaugcccuacuucuucacccugcugcuccagcugugcaccuucacccgcuccaccaacagccggaucaaggccuccaugcccacgaccaucgccaagaacaccgucaagagcgugggcaaguucugccuggaggccagcuucaacuaccucaagucccccaacuucagcaagcugaucaacaucaucaucugguuccugcuccuguccgugugccugggcagccucaucuacuccaccgccgcgcuggggguccugaugagcaaccucggcaugccguccuacugcacgggguaccgcgagggcuaccugaacagcaccaacgugaccaucgccaccuacugcacgggcuccauccccugcagcgugugccuguccgggcucgacagccuggacaccuaccccucccuggagaccauccagaucaccaucagcuccuucaagugggaccucacggccuucggccuggucgccgagugguuccuggccuacauccucuucacccgguucuucuacgugcuggggcuggcggccaucaugcagcucuucuucagcuacuucgccgugcacuucaucuccaacagcuggcugauguggcugaucaucaaccugguccagauggcccccaucuccgcgauggugcgcauguacaucuucuucgccagcuucuacuacguguggaagagcuacguccacgugguggacggcugcaacuccagcaccugcaugaugugcuacaagcggaaccgcgccacccgggucgagugcacgaccaucgugaacgggguccgccgguccuucuacguguacgccaacggcggcaagggguucugcaagcuccacaacuggaacugcgugaacugcgacaccuucugcgccggcagcaccuucaucuccgacgaggucgcgcgcgaccugagccugcaguucaagcggccgaucaaccccacggaccaguccagcuacaucguggacuccgugaccgucaagaacgggagcauccaccucuacuucgacaaggccggccagaagaccuacgagcgccacucccugagccacuucgugaaccuggacaaccuccgggccaacaacaccaaggggucccugcccaucaacgugaucgucuucgacggcaagagcaagugcgaggaguccagcgccaaguccgccagcguguacuacucccagcugaugugccagcccauccuccugcuggaccaggcgcucgugagcgacgucggcgacagcgccgagguggccgugaagauguucgacgccuacgucaacacguucuccagcaccuucaacgugccgauggagaagcugaagacccugguggccaccgcggaggccgagcucgccaagaacgucucccuggacaacgugcugagcacguucaucuccgccgcgcgccagggguucguggacagcgacgucgagaccaaggacgugguggagugccucaagcugucccaccagagcgacaucgaggucaccggcgacuccugcaacaacuacaugcugaccuacaacaagguggagaacaugacgccccgggaccucggggccugcaucgacugcagcgcccgccacaucaacgcccagguggccaagucccacaacaucgcgcugaucuggaacgucaaggacuucaugagccuguccgagcagcuccggaagcagauccgcagcgccgccaagaagaacaaccugcccuucaagcugaccugcgccaccacccgccagguggugaacgucgugacgaccaagaucgcccucaagggcgggugaggacuaguuauaagacugacuagcccgaugggccucccaacgggcccuccuccccuccuugcaccgagauuaauaaaaaaaaaaaaaaaaaaaaaaaaaaaaaaaaaaaaaaaaaaaaaaaaaaaaaaaaaaaaaaaaugcaucccccccccccccccccccccccccccccccaaaggcucuuuucagagccaccagaauu

SEQ ID NO: 21787 - RNA, 6058 nt, Artificial Sequence
  SARS-CoV-2__MT664106.1__non-structural protein 3 (NSP3) mRNA gc
aggagaaagcuuaccauggcccccaccaaggugaccuucggcgacgacacggucaucgaggugcagggguacaagagcgugaacaucaccuucgagcuggacgagcgcaucgacaagguccucaacgagaagugcuccgccuacaccguggagcugggcaccgaggugaacgaguucgcgugcgucguggccgacgccgugaucaagacgcugcagccggucagcgagcuccugaccccccuggggaucgaccucgacgagugguccauggccaccuacuaccuguucgacgagagcggcgaguucaagcuggccucccacauguacugcagcuucuacccccccgacgaggacgaggaggagggggacugcgaggaggaggaguucgagccguccacccaguacgaguacggcacggaggacgacuaccagggcaagccccucgaguucggggcgaccagcgccgcccugcagcccgaggaggagcaggaggaggacuggcuggacgacgacucccagcagaccgugggccagcaggacgggagcgaggacaaccagaccacgaccauccagaccaucguggagguccagccccagcucgagauggagcugaccccgguggugcagacgaucgaggucaacuccuucagcggcuaccugaagcucaccgacaacguguacaucaagaacgccgacaucguggaggaggcgaagaaggucaagcccaccgugguggucaacgccgccaacguguaccugaagcacgggggcggcguggccggggcccugaacaaggcgaccaacaacgccaugcaggucgaguccgacgacuacaucgccacgaacggcccccucaagguggggggcagcugcguccuguccggccacaaccuggccaagcacugccuccacgugguggggcccaacgucaacaagggcgaggacauccagcugcugaagagcgccuacgagaacuucaaccagcacgaggugcuccuggcgccgcugcucuccgccgggaucuucggcgccgaccccauccacagccugcgggugugcgucgacaccgugcgcaccaacguguaccuggccgucuucgacaagaaccucuacgacaagcugguguccagcuuccuggagaugaagagcgagaagcagguggagcagaagaucgccgagauccccaaggaggaggucaagcccuucaucaccgaguccaagccgagcguggagcagcggaagcaggacgacaagaagaucaaggcgugcguggaggaggucacgaccacccucgaggagaccaaguuccugacggagaaccugcuccuguacaucgacaucaacgggaaccugcaccccgacuccgccacccucgugagcgacaucgacaucaccuuccugaagaaggacgcccccuacaucgugggcgacgucgugcaggagggcgugcugaccgccgucgugauccccacgaagaaggccgggggcaccaccgagaugcucgcgaaggcccugcgcaaggugccgaccgacaacuacaucacgaccuaccccgggcagggccugaacggguacaccgucgaggaggccaagaccgugcucaagaagugcaaguccgccuucuacauccugcccagcaucaucuccaacgagaagcaggagauccugggcaccgugagcuggaaccuccgggagaugcuggcgcacgccgaggagacgcgcaagcugaugcccgucugcguggagaccaaggccaucguguccaccauccagcggaaguacaagggcaucaagauccaggagggggucguggacuacggcgcccgcuucuacuucuacaccagcaagacgaccguggccucccugaucaacacccucaacgaccugaacgagacccuggucacgaugccgcucggguacgugacccacggccugaaccuggaggaggcggcccgguacaugcgcagccucaaggugcccgccaccgucuccgugagcucccccgacgccgugaccgccuacaacggguaccugacgagcuccagcaagacccccgaggagcacuucaucgagaccaucucccuggcgggcagcuacaaggacuggagcuacuccggccagagcacccagcucgggaucgaguuccugaagcggggcgacaaguccgucuacuacacgagcaacccgaccaccuuccaccuggacggggaggugaucaccuucgacaaccucaagacgcugcugucccuccgcgaggugcggaccaucaaggucuucaccaccguggacaacaucaaccugcacacgcagguggucgacaugagcaugaccuacggccagcaguucggccccaccuaccuggacggggccgacgugaccaagaucaagccccacaacucccacgagggcaagacguucuacgugcucccgaacgacgacacccugcgcgucgaggccuucgaguacuaccacaccaccgaccccagcuuccuggggcgguacauguccgcccucaaccacacgaagaaguggaaguacccccaggugaacggccugaccagcaucaagugggccgacaacaacugcuaccuggcgaccgcccuccugacccugcagcagaucgagcucaaguucaaccccccggcccugcaggacgccuacuaccgcgcgcgggccggggaggccgccaacuucugcgcccugauccucgcguacugcaacaagacggugggcgagcugggcgacguccgcgagaccauguccuaccuguuccagcacgccaaccucgacagcugcaagcgggugcugaacgucgugugcaagaccugcgggcagcagcagaccacccugaagggcguggaggccgucauguacauggggacgcucuccuacgagcaguucaagaagggcgugcagauccccugcaccugcgggaagcaggccaccaaguaccuggugcagcaggagagccccuucgucaugauguccgcccccccggcgcaguacgagcugaagcacggcaccuucacgugcgccagcgaguacaccggcaacuaccagugcgggcacuacaagcacaucaccuccaaggagacccucuacugcaucgacggcgcccugcugacgaagagcagcgaguacaaggggcccaucaccgacguguucuacaaggagaacuccuacaccaccacgaucaagcccgugaccuacaagcucgacggcgucgugugcaccgagaucgaccccaagcuggacaacuacuacaagaaggacaacagcuacuucaccgagcagccgaucgaccuggugcccaaccagcccuaccccaacgccuccuucgacaacuucaaguucgucugcgacaacaucaaguucgccgacgaccucaaccagcugacgggguacaagaagccggcgagccgcgagcugaaggugaccuucuuccccgaccucaacggcgacguggucgccaucgacuacaagcacuacacccccuccuucaagaagggcgccaagcugcugcacaagcccaucguguggcacgugaacaacgccaccaacaaggcgacguacaagccgaacaccuggugcauccggugccucuggagcaccaagcccgucgagaccuccaacagcuucgacgugcugaaguccgagaacgcccaggggauggacaaccuggccugcgaggaccucaagcccgugagcgaggaggucguggagaaccccacgauccagaaggacgugcuggagugcaacgucaagaccaccgagguggugggcgacaucauccugaagccggccaacaacucccucaagaucaccgaggaggucgggcacacggaccugauggccgcguacguggacaacagcucccugaccaucaagaagcccaacgagcucagccgcgugcugggccugaagacccucgccacccacgggcuggccgccgucaacuccgugcccugggacacgaucgccaacuacgcgaagccguuccugaacaagguggucagcaccaccaccaacaucgugacgcgcugccucaaccgggugugcaccaacuacaugcccuacuucuucacccugcugcuccagcugugcaccuucacccgcuccacgaacagccggaucaaggccuccaugcccaccaccaucgccaagaacaccgucaagagcgugggcaaguucugccuggaggccagcuucaacuaccucaagucccccaacuucagcaagcugaucaacaucaucaucugguuccugcuccuguccgugugccugggcagccucaucuacuccacggccgcgcuggggguccugaugagcaaccucggcaugccguccuacugcaccggguaccgcgagggcuaccugaacagcaccaacgugaccaucgccacguacugcaccggcuccauccccugcagcgugugccuguccgggcucgacagccuggacaccuaccccucccuggagaccauccagaucacgaucagcuccuucaagugggaccucaccgccuucggccuggucgccgagugguuccuggccuacauccucuucacccgguucuucuacgugcuggggcuggcggccaucaugcagcucuucuucagcuacuucgccgugcacuucaucuccaacagcuggcugauguggcugaucaucaaccugguccagauggcccccaucuccgcgauggugcgcauguacaucuucuucgccagcuucuacuacguguggaagagcuacguccacgugguggacggcugcaacuccagcaccugcaugaugugcuacaagcggaaccgcgccacgcgggucgagugcaccaccaucgugaacgggguccgccgguccuucuacguguacgccaacggcggcaagggguucugcaagcuccacaacuggaacugcgugaacugcgacaccuucugcgccggcagcacguucaucuccgacgaggucgcgcgcgaccugagccugcaguucaagcggccgaucaaccccaccgaccaguccagcuacaucguggacuccgugaccgucaagaacgggagcauccaccucuacuucgacaaggccggccagaagaccuacgagcgccacucccugagccacuucgugaaccuggacaaccuccgggccaacaacacgaaggggucccugcccaucaacgugaucgucuucgacggcaagagcaagugcgaggaguccagcgccaaguccgccagcguguacuacucccagcugaugugccagcccauccuccugcuggaccaggcgcucgugagcgacgucggcgacagcgccgagguggccgugaagauguucgacgccuacgucaacaccuucuccagcaccuucaacgugccgauggagaagcugaagacccugguggccacggcggaggccgagcucgccaagaacgucucccuggacaacgugcugagcaccuucaucuccgccgcgcgccagggguucguggacagcgacgucgagaccaaggacgugguggagugccucaagcugucccaccagagcgacaucgaggucaccggcgacuccugcaacaacuacaugcugacguacaacaagguggagaacaugaccccccgggaccucggggccugcaucgacugcagcgcccgccacaucaacgcccagguggccaagucccacaacaucgcgcugaucuggaacgucaaggacuucaugagccuguccgagcagcuccggaagcagauccgcagcgccgccaagaagaacaaccugcccuucaagcugaccugcgccaccacgcgccagguggugaacgucgugaccaccaagaucgcccucaagggcgggugaggacuaguuauaagacugacuagcccgaugggccucccaacgggcccuccuccccuccuugcaccgagauuaauaaaaaaaaaaaaaaaaaaaaaaaaaaaaaaaaaaaaaaaaaaaaaaaaaaaaaaaaaaaaaaaaugcaucccccccccccccccccccccccccccccccaaaggcucuuuucagagccaccagaauu

SEQ ID NO: 21788 - RNA, 6058 nt, Artificial Sequence
  SARS-CoV-2__MT664171.1__non-structural protein 3 (NSP3) mRNA gc
aggagaaagcuuaccauggcccccaccaaggugaccuucggcgacgacacggucaucgaggugcagggguacaagagcgugaacaucaccuucgagcuggacgagcgcaucgacaagguccucaacgagaagugcuccgccuacaccguggagcugggcaccgaggugaacgaguucgcgugcgucguggccgacgccgugaucaagacgcugcagccggucagcgagcuccugaccccccuggggaucgaccucgacgagugguccauggccaccuacuaccuguucgacgagagcggcgaguucaagcuggccucccacauguacugcagcuucuacccccccgacgaggacgaggaggagggggacugcgaggaggaggaguucgagccguccacccaguacgaguacggcacggaggacgacuaccagggcaagccccucgaguucggggcgaccagcgccgcccugcagcccgaggaggagcaggaggaggacuggcuggacgacgacucccagcagaccgugggccagcaggacgggagcgaggacaaccagaccacgaccauccagaccaucguggagguccagccccagcucgagauggagcugaccccgguggugcagacgaucgaggucaacuccuucagcggcuaccugaagcucaccgacaacguguacaucaagaacgccgacaucguggaggaggcgaagaaggucaagcccaccgugguggucaacgccgccaacguguaccugaagcacgggggcggcguggccggggcccugaacaaggcgaccaacaacgccaugcaggucgaguccgacgacuacaucgccacgaacggcccccucaagguggggggcagcugcguccuguccggccacaaccuggccaagcacugccuccacgugguggggcccaacgucaacaagggcgaggacauccagcugcugaagagcgccuacgagaacuucaaccagcacgaggugcuccuggcgccgcugcucuccgccgggaucuucggcgccgaccccauccacagccugcgggugugcgucgacaccgugcgcaccaacguguaccuggccgucuucgacaagaaccucuacgacaagcugguguccagcuuccuggagaugaagagcgagaagcagguggagcagaagaucgccgagauccccaaggaggaggucaagcccuucaucaccgaguccaagccgagcguggagcagcggaagcaggacgacaagaagaucaaggcgugcguggaggaggucacgaccacccucgaggagaccaaguuccugacggagaaccugcuccuguacaucgacaucaacgggaaccugcaccccgacuccgccacccucgugagcgacaucgacaucaccuuccugaagaaggacgcccccuacaucgugggcgacgucgugcaggagggcgugcugaccgccgucgugauccccacgaagaaggccgggggcaccaccgagaugcucgcgaaggcccugcgcaaggugccgaccgacaacuacaucacgaccuaccccgggcagggccugaacggguacaccgucgaggaggccaagaccgugcucaagaagugcaaguccgccuucuacauccugcccagcaucaucuccaacgagaagcaggagauccugggcaccgugagcuggaaccuccgggagaugcuggcgcacgccgaggagacgcgcaagcugaugcccgucugcguggagaccaaggccaucguguccaccauccagcggaaguacaagggcaucaagauccaggucggggugguggacuacggcgcccgcuucuacuucuacaccagcaagacgaccgucgccucccugaucaacacccucaacgaccugaacgagacccuggugacgaugccgcucggguacgugacccacggccugaaccuggaggaggcggcccgguacaugcgcagccucaagguccccgccaccguguccgugagcucccccgacgccgucaccgccuacaacggguaccugacgagcuccagcaagacccccgaggagcacuucaucgagaccaucucccuggcgggcagcuacaaggacuggagcuacuccggccagagcacccagcucgggaucgaguuccugaagcggggcgacaaguccguguacuacacgagcaacccgaccaccuuccaccuggacggggaggugaucaccuucgacaaccucaagacgcugcugucccuccgcgagguccggaccaucaagguguucaccaccguggacaacaucaaccugcacacgcaggucguggacaugagcaugaccuacggccagcaguucggccccaccuaccuggacggggccgacgugaccaagaucaagccccacaacucccacgagggcaagacguucuacguccucccgaacgacgacacccugcgcguggaggccuucgaguacuaccacaccaccgaccccagcuuccuggggcgguacauguccgcccucaaccacacgaagaaguggaaguacccccaggugaacggccugaccagcaucaagugggccgacaacaacugcuaccuggcgaccgcccuccugacccugcagcagaucgagcucaaguucaaccccccggcccugcaggacgccuacuaccgcgcgcgggccggggaggccgccaacuucugcgcccugauccucgcguacugcaacaagacggucggcgagcugggcgacgugcgcgagaccauguccuaccuguuccagcacgccaaccucgacagcugcaagcggguccugaacguggugugcaagaccugcgggcagcagcagaccacccugaagggcgucgaggccgugauguacauggggacgcucuccuacgagcaguucaagaagggcgugcagauccccugcaccugcgggaagcaggccaccaaguaccugguccagcaggagagccccuucgugaugauguccgcccccccggcgcaguacgagcugaagcacggcaccuucacgugcgccagcgaguacaccggcaacuaccagugcgggcacuacaagcacaucaccuccaaggagacccucuacugcaucgacggcgcccugcugacgaagagcagcgaguacaaggggcccaucaccgacguguucuacaaggagaacuccuacaccaccacgaucaagcccgucaccuacaagcucgacggcguggugugcaccgagaucgaccccaagcuggacaacuacuacaagaaggacaacagcuacuucaccgagcagccgaucgaccugguccccaaccagcccuaccccaacgccuccuucgacaacuucaaguucgugugcgacaacaucaaguucgccgacgaccucaaccagcugacgggguacaagaagccggcgagccgcgagcugaaggugaccuucuuccccgaccucaacggcgacgucguggccaucgacuacaagcacuacacccccuccuucaagaagggcgccaagcugcugcacaagcccaucguguggcacgucaacaacgccaccaacaaggcgacguacaagccgaacaccuggugcauccggugccucuggagcaccaagcccguggagaccuccaacagcuucgacgugcugaaguccgaggacgcccaggggauggacaaccuggccugcgaggaccucaagcccgucagcgaggaggugguggagaaccccacgauccagaaggacguccuggagugcaacgugaagaccaccgagguggucggcgacaucauccugaagccggccaacaacucccucaagaucaccgaggagguggggcacacggaccugauggccgcguacguggacaacagcucccugaccaucaagaagcccaacgagcucagccgcguccugggccugaagacccucgccacccacgggcuggccgccgugaacuccgugcccugggacacgaucgccaacuacgcgaagccguuccugaacaaggucgugagcaccaccaccaacaucgugacgcgcugccucaaccgggucugcaccaacuacaugcccuacuucuucacccugcugcuccagcugugcaccuucacccgcuccacgaacagccggaucaaggccuccaugcccaccaccaucgccaagaacaccgugaagagcgugggcaaguucugccuggaggccagcuucaacuaccucaagucccccaacuucagcaagcugaucaacaucaucaucugguuccugcuccuguccgucugccugggcagccucaucuacuccacggccgcgcugggggugcugaugagcaaccucggcaugccguccuacugcaccggguaccgcgagggcuaccugaacagcaccaacgugaccaucgccacguacugcaccggcuccauccccugcagcgucugccuguccgggcucgacagccuggacaccuaccccucccuggagaccauccagaucacgaucagcuccuucaagugggaccucaccgccuucggccugguggccgagugguuccuggccuacauccucuucacccgguucuucuacgugcuggggcuggcggccaucaugcagcucuucuucagcuacuucgccguccacuucaucuccaacagcuggcugauguggcugaucaucaaccuggugcagauggcccccaucuccgcgauggugcgcauguacaucuucuucgccagcuucuacuacgucuggaagagcuacgugcacguggucgacggcugcaacuccagcaccugcaugaugugcuacaagcggaaccgcgccacgcggguggagugcaccaccaucgucaacggggugcgccgguccuucuacguguacgccaacggcggcaagggguucugcaagcuccacaacuggaacugcgucaacugcgacaccuucugcgccggcagcacguucaucuccgacgagguggcgcgcgaccugagccugcaguucaagcggccgaucaaccccaccgaccaguccagcuacaucguggacuccgucaccgugaagaacgggagcauccaccucuacuucgacaaggccggccagaagaccuacgagcgccacucccugagccacuucgugaaccuggacaaccuccgggccaacaacacgaaggggucccugcccaucaacgucaucguguucgacggcaagagcaagugcgaggaguccagcgccaaguccgccagcguguacuacucccagcugaugugccagcccauccuccugcuggaccaggcgcucgucagcgacgugggcgacagcgccgagguggccgucaagauguucgacgccuacgugaacaccuucuccagcaccuucaacgugccgauggagaagcugaagacccuggucgccacggcggaggccgagcucgugaagaacgugucccuggacaacguccugagcaccuucaucuccgccgcccgccagggguucguggacagcgacguggagaccaaggacgucguggagugccucaagcugucccaccagagcgacaucgaggugaccggcgacuccugcaacaacuacaugcugacguacaacaaggucgagaacaugaccccccgggaccucggggcgugcaucgacugcagcgcccgccacaucaacgcccagguggccaagucccacaacaucgcccugaucuggaacgugaaggacuucaugagccuguccgagcagcuccggaagcagauccgcagcgcggccaagaagaacaaccugcccuucaagcugaccugcgccaccacgcgccaggucgugaacguggucaccaccaagaucgcccucaagggcgggugaggacuaguuauaagacugacuagcccgaugggccucccaacgggcccuccuccccuccuugcaccgagauuaauaaaaaaaaaaaaaaaaaaaaaaaaaaaaaaaaaaaaaaaaaaaaaaaaaaaaaaaaaaaaaaaaugcaucccccccccccccccccccccccccccccccaaaggcucuuuucagagccaccagaauu

SEQ ID NO: 21789 - RNA, 6058 nt, Artificial Sequence
  SARS-CoV-2__MT666042.1__non-structural protein 3 (NSP3) mRNA gc
aggagaaagcuuaccauggcccccaccaaggugaccuucggcgacgacacggucaucgaggugcagggguacaagagcgugaacaucaccuucgagcuggacgagcgcaucgacaagguccucaacgagaagugcuccgccuacaccguggagcugggcaccgaggugaacgaguucgcgugcgucguggccgacgccgugaucaagacgcugcagccggucagcgagcuccugaccccccuggggaucgaccucgacgagugguccauggccaccuacuaccuguucgacgagagcggcgaguucaagcuggccucccacauguacugcagcuucuacccccccgacgaggacgaggaggagggggacugcgaggaggaggaguucgagccguccacccaguacgaguacggcacggaggacgacuaccagggcaagccccucgaguucggggcgaccagcgccgcccugcagcccgaggaggagcaggaggaggacuggcuggacgacgacucccagcagaccgugggccagcaggacgggagcgaggacaaccagaccacgaccauccagaccaucguggagguccagccccagcucgagauggagcugaccccgguggugcagacgaucgaggucaacuccuucagcggcuaccugaagcucaccgacaacguguacaucaagaacgccgacaucguggaggaggcgaagaaggucaagcccaccgugguggucaacgccgccaacguguaccugaagcacgggggcggcguggccggggcccugaacaaggcgaccaacaacgccaugcaggucgaguccgacgacuacaucgccacgaacggcccccucaagguggggggcagcugcguccuguccggccacaaccuggccaagcacugccuccacgugguggggcccaacgucaacaagggcgaggacauccagcugcugaagagcgccuacgagaacuucaaccagcacgaggugcuccuggcgccgcugcucuccgccgggaucuucggcgccgacagcauccacucccugcgggugugcgucgacaccgugcgcaccaacguguaccuggccgucuucgacaagaaccucuacgacaagcuggugagcagcuuccuggagaugaaguccgagaagcagguggagcagaagaucgccgagauccccaaggaggaggucaagcccuucaucaccgagagcaagcccuccguggagcagcggaagcaggacgacaagaagaucaaggcgugcguggaggaggucacgaccacccucgaggagaccaaguuccugacggagaaccugcuccuguacaucgacaucaacgggaaccugcacccggacagcgccacccucguguccgacaucgacaucaccuuccugaagaaggacgcccccuacaucgugggcgacgucgugcaggagggcgugcugaccgccgucgugauccccacgaagaaggccgggggcaccaccgagaugcucgcgaaggcccugcgcaaggugcccaccgacaacuacaucacgaccuacccggggcagggccugaacggguacaccgucgaggaggccaagaccgugcucaagaagugcaagagcgccuucuacauccugcccuccaucaucagcaacgagaagcaggagauccugggcaccguguccuggaaccuccgggagaugcuggcgcacgccgaggagacgcgcaagcugaugcccgucugcguggagaccaaggccaucgugagcaccauccagcggaaguacaagggcaucaagauccaggagggggucguggacuacggcgcccgcuucuacuucuacaccuccaagacgaccguggccagccugaucaacacccucaacgaccugaacgagacccuggucacgaugccccucggguacgugacccacggccugaaccuggaggaggcggcccgguacaugcgcucccucaaggugccggccaccgucagcguguccagccccgacgccgugaccgccuacaacggguaccugacguccagcuccaagacccccgaggagcacuucaucgagaccaucagccuggcgggcagcuacaaggacugguccuacagcggccaguccacccagcucgggaucgaguuccugaagcggggcgacaagaucgucuacuacacgagcaaccccaccaccuuccaccuggacggggaggugaucaccuucgacaaccucaagacgcugcugucccuccgcgaggugcggaccaucaaggucuucaccaccguggacaacaucaaccugcacacgcagguggucgacaugagcaugaccuacggccagcaguucggcccgaccuaccuggacggggccgacgugaccaagaucaagccccacaacucccacgagggcaagacguucuacgugcuccccaacgacuacacccugcgcgucgaggccuucgaguacuaccacaccaccgacccgagcuuccuggggcgguacauguccgcccucaaccacacgaagaaguggaaguacccccaggugaacggccugaccagcaucaagugggccgacaacaacugcuaccuggcgaccgcccuccugacccugcagcagaucgagcucaaguucaacccccccgcccugcaggacgccuacuaccgcgcgcgggccggggaggccgccaacuucugcgcccugauccucgcguacugcaacaagacggugggcgagcugggcgacguccgcgagaccauguccuaccuguuccagcacgccaaccucgacagcugcaagcgggugcugaacgucgugugcaagaccugcgggcagcagcagaccacccugaagggcguggaggccgucauguacauggggacgcucuccuacgagcaguucaagaagggcgugcagaucccgugcaccugcgggaagcaggccaccaaguaccuggugcagcaggagagccccuucgucaugauguccgccccccccgcgcaguacgagcugaagcacggcaccuucacgugcgccagcgaguacaccggcaacuaccagugcgggcacuacaagcacaucaccuccaaggagacccucuacugcaucgacggcgcccugcugacgaagagcagcgaguacaaggggccgaucaccgacguguucuacaaggagaacuccuacaccaccacgaucaagcccgugaccuacaagcucgacggcgucgugugcaccgagaucgaccccaagcuggacaacuacuacaagaaggacaacagcuacuucaccgagcagcccaucgaccuggugccgaaccagcccuaccccaacgccuccuucgacaacuucaaguucgucugcgacaacaucaaguucgccgacgaccucaaccagcugacgggguacaagaagcccgcgagccgcgagcugaaggugaccuucuucccggaccucaacggcgacguggucgccaucgacuacaagcacuacacccccuccuucaagaagggcgccaagcugcugcacaagcccaucguguggcacgugaacaacgccaccaacaaggcgacguacaagcccaacaccuggugcauccggugccucuggagcaccaagccggucgagaccuccaacagcuucgacgugcugaaguccgaggacgcccaggggauggacaaccuggccugcgaggaccucaagcccgugagcgaggaggucguggagaaccccacgauccagaaggacgugcuggagugcaacgucaagaccaccgagguggugggcgacaucauccugaagcccgccaacaacucccucaagaucaccgaggaggucgggcacacggaccugauggccgcguacguggacaacagcucccugaccaucaagaagccgaacgagcucagccgcgugcugggccugaagacccucgccacccacgggcuggccgccgucaacuccgugcccugggacacgaucgccaacuacgcgaagcccuuccugaacaagguggucagcaccaccaccaacaucgugacgcgcugccucaaccgggugugcaccaacuacaugccguacuucuucacccugcugcuccagcugugcaccuucacccgcuccacgaacagccggaucaaggccuccaugcccaccaccaucgccaagaacaccgucaagagcgugggcaaguucugccuggaggccagcuucaacuaccucaagucccccaacuucagcaagcugaucaacaucaucaucugguuccugcuccuguccgugugccugggcagccucaucuacuccacggccgcgcuggggguccugaugagcaaccucggcaugcccuccuacugcaccggguaccgcgagggcuaccugaacagcaccaacgugaccaucgccacguacugcaccggcuccaucccgugcagcgugugccuguccgggcucgacagccuggacaccuaccccucccuggagaccauccagaucacgaucagcuccuucaagugggaccucaccgccuucggccuggucgccgagugguuccuggccuacauccucuucacccgguucuucuacgugcuggggcuggcggccaucaugcagcucuucuucagcuacuucgccgugcacuucaucuccaacagcuggcugauguggcugaucaucaaccugguccagauggcccccaucuccgcgauggugcgcauguacaucuucuucgccagcuucuacuacguguggaagagcuacguccacgugguggacggcugcaacuccagcaccugcaugaugugcuacaagcggaaccgcgccacgcgggucgagugcaccaccaucgugaacgggguccgccgguccuucuacguguacgccaacggcggcaagggguucugcaagcuccacaacuggaacugcgugaacugcgacaccuucugcgccggcagcacguucaucuccgacgaggucgcgcgcgaccugagccugcaguucaagcggcccaucaacccgaccgaccaguccagcuacaucguggacuccgugaccgucaagaacgggagcauccaccucuacuucgacaaggccggccagaagaccuacgagcgccacucccugagccacuucgugaaccuggacaaccuccgggccaacaacacgaaggggucccugcccaucaacgugaucgucuucgacggcaagagcaagugcgaggaguccagcgccaaguccgccagcguguacuacucccagcugaugugccagcccauccuccugcuggaccaggcgcucgugagcgacgucggcgacagcgccgagguggccgugaagauguucgacgccuacgucaacaccuucuccagcaccuucaacgugcccauggagaagcugaagacccugguggccacggcggaggccgagcucgccaagaacgucucccuggacaacgugcugagcaccuucaucuccgccgcgcgccagggguucguggacagcgacgucgagaccaaggacgugguggagugccucaagcugucccaccagagcgacaucgaggucaccggcgacuccugcaacaacuacaugcugacguacaacaagguggagaacaugaccccgcgggaccucggggccugcaucgacugcagcgcccgccacaucaacgcccagguggccaagucccacaacaucgcgcugaucuggaacgucaaggacuucaugagccuguccgagcagcuccggaagcagauccgcagcgccgccaagaagaacaaccugcccuucaagcugaccugcgccaccacgcgccagguggugaacgucgugaccaccaagaucgcccucaagggcgggugaggacuaguuauaagacugacuagcccgaugggccucccaacgggcccuccuccccuccuugcaccgagauuaauaaaaaaaaaaaaaaaaaaaaaaaaaaaaaaaaaaaaaaaaaaaaaaaaaaaaaaaaaaaaaaaaugcaucccccccccccccccccccccccccccccccaaaggcucuuuucagagccaccagaauu

SEQ ID NO: 21790 - RNA, 6058 nt, Artificial Sequence
  SARS-CoV-2__MT666099.1__non-structural protein 3 (NSP3) mRNA gc
aggagaaagcuuaccauggcccccaccaaggugaccuucggcgacgacacggucaucgaggugcagggguacaagagcgugaacaucaccuucgagcuggacgagcgcaucgacaagguccucaacgagaagugcuccgccuacaccguggagcugggcaccgaggugaacgaguucgcgugcgucguggccgacgccgugaucaagacgcugcagccggucagcgagcuccugaccccccuggggaucgaccucgacgagugguccauggccaccuacuaccuguucgacgagagcggcgaguucaagcuggccucccacauguacugcagcuucuacccccccgacgaggacgaggaggagggggacugcgaggaggaggaguucgagccguccacccaguacgaguacggcacggaggacgacuaccagggcaagccccucgaguucggggcgaccagcgccgcccugcagcccgaggaggagcaggaggaggacuggcuggacgacgacucccagcagaccgugggccagcaggacgggagcgaggacaaccagaccacgaccauccagaccaucguggagguccagccccagcucgagauggagcugaccccgguggugcagacgaucgaggucaacuccuucagcggcuaccugaagcucaccgacaacguguacaucaagaacgccgacaucguggaggaggcgaagaaggucaagcccaccgugguggucaacgccgccaacguguaccugaagcacgggggcggcguggccggggcccugaacaaggcgaccaacaacgccaugcaggucgaguccgacgaccacaucgccacgaacggcccccucaagguggggggcagcugcguccuguccggccacaaccuggccaagcacugccuccacgugguggggcccaacgucaacaagggcgaggacauccagcugcugaagagcgccuacgagaacuucaaccagcacgaggugcuccuggcgccgcugcucuccgccgggaucuucggcgccgaccccauccacagccugcgggugugcgucgacaccgugcgcaccaacguguaccuggccgucuucgacaagaaccucuacgacaagcugguguccagcuuccuggagaugaagagcgagaagcagguggagcagaagaucgccgagauccccaaggaggaggucaagcccuucaucaccgaguccaagccgagcguggagcagcggaagcaggacgacaagaagaucaaggcgugcguggaggaggucacgaccacccucgaggagaccaaguuccugacggagaaccugcuccuguacaucgacaucaacgggaaccugcaccccgacuccgccacccucgugagcgacaucgacaucaccuuccugaagaaggacgcccccuacaucgugggcgacgucgugcaggagggcgugcugaccgccgucgugauccccacgaagaaggccgggggcaccaccgagaugcucgcgaaggcccugcgcaaggugccgaccgacaacuacaucacgaccuaccccgggcagggccugaacggguacaccgucgaggaggccaagaccgugcucaagaagugcaaguccgccuucuacauccugcccagcaucaucuccaacgagaagcaggagauccugggcaccgugagcuggaaccuccgggagaugcuggcgcacgccgaggagacgcgcaagcugaugcccgucugcguggagaccaaggccaucguguccaccauccagcggaaguacaagggcaucaagauccaggagggggucguggacuacggcgcccgcuucuacuucuacaccagcaagacgaccguggccucccugaucaacacccucaacgaccugaacgagacccuggucacgaugccgcucggguacgugacccacggccugaaccuggaggaggcggcccgguacaugcgcagccucaaggugcccgccaccgucuccgugagcucccccgacgccgugaccgccuacaacggguaccugacgagcuccagcaagacccccgaggagcacuucaucgagaccaucucccuggcgggcagcuacaaggacuggagcuacuccggccagagcacccagcucgggaucgaguuccugaagcggggcgacaaguccgucuacuacacgagcaacccgaccaccuuccaccuggacggggaggugaucaccuucgacaaccucaagacgcugcugucccuccgcgaggugcggaccaucaaggucuucaccaccguggacaacaucaaccugcacacgcagguggucgacaugagcaugaccuacggccagcaguucggccccaccuaccuggacggggccgacgugaccaagaucaagccccacaacucccacgagggcaagacguucuacgugcucccgaacgacgacacccugcgcgucgaggccuucgaguacuaccacaccaccgaccccagcuuccuggggcgguacauguccgcccucaaccacacgaagaaguggaaguacccccaggugaacggccugaccagcaucaagugggccgacaacaacugcuaccuggcgaccgcccuccugacccugcagcagaucgagcucaaguucaaccccccggcccugcaggacgccuacuaccgcgcgcgggccggggaggccgccaacuucugcgcccugauccucgcguacugcaacaagacggugggcgagcugggcgacguccgcgagaccauguccuaccuguuccagcacgccaaccucgacagcugcaagcgggugcugaacgucgugugcaagaccugcgggcagcagcagaccacccugaagggcguggaggccgucauguacauggggacgcucuccuacgagcaguucaagaagggcgugcagauccccugcaccugcgggaagcaggccaccaaguaccuggugcagcaggagagccccuucgucaugauguccgcccccccggcgcaguacgagcugaagcacggcaccuucacgugcgccagcgaguacaccggcaacuaccagugcgggcacuacaagcacaucaccuccaaggagacccucuacugcaucgacggcgcccugcugacgaagagcagcgaguacaaggggcccaucaccgacguguucuacaaggagaacuccuacaccaccacgaucaagcccgugaccuacaagcucgacggcgucgugugcaccgagaucgaccccaagcuggacaacuacuacaagaaggacaacagcuacuucaccgagcagccgaucgaccuggugcccaaccagcccuaccccaacgccuccuucgacaacuucaaguucgucugcgacaacaucaaguucgccgacgaccucaaccagcugacgggguacaagaagccggcgagccgcgagcugaaggugaccuucuuccccgaccucaacggcgacguggucgccaucgacuacaagcacuacacccccuccuucaagaagggcgccaagcugcugcacaagcccaucguguggcacgugaacaacgccaccaacaaggcgacguacaagccgaacaccuggugcauccggugccucuggagcaccaagcccgucgagaccuccaacagcuucgacgugcugaaguccgaggacgcccaggggauggacaaccuggccugcgaggaccucaagcccgugagcgaggaggucguggagaaccccacgauccagaaggacgugcuggagugcaacgucaagaccaccgagguggugggcgacaucauccugaagccggccaacaacucccucaagaucaccgaggaggucgggcacacggaccugauggccgcguacguggacaacagcucccugaccaucaagaagcccaacgagcucagccgcgugcugggccugaagacccucgccacccacgggcuggccgccgucaacuccgugcccugggacacgaucgccaacuacgcgaagccguuccugaacaagguggucagcaccaccaccaacaucgugacgcgcugccucaaccgggugugcaccaacuacaugcccuacuucuucacccugcugcuccagcugugcaccuucacccgcuccacgaacagccggaucaaggccuccaugcccaccaccaucgccaagaacaccgucaagagcgugggcaaguucugccuggaggccagcuucaacuaccucaagucccccaacuucagcaagcugaucaacaucaucaucugguuccugcuccuguccgugugccugggcagccucaucuacuccacggccgcgcuggggguccugaugagcaaccucggcaugccguccuacugcaccggguaccgcgagggcuaccugaacagcaccaacgugaccaucgccacguacugcaccggcuccauccccugcagcgugugccuguccgggcucgacagccuggacaccuaccccucccuggagaccauccagaucacgaucagcuccuucaagugggaccucaccgccuucggccuggucgccgagugguuccuggccuacauccucuucacccgguucuucuacgugcuggggcuggcggccaucaugcagcucuucuucagcuacuucgccgugcacuucaucuccaacagcuggcugauguggcugaucaucaaccugguccagauggcccccaucuccgcgauggugcgcauguacaucuucuucgccagcuucuacuacguguggaagagcuacguccacgugguggacggcugcaacuccagcaccugcaugaugugcuacaagcggaaccgcgccacgcgggucgagugcaccaccaucgugaacgggguccgccgguccuucuacguguacgccaacggcggcaagggguucugcaagcuccacaacuggaacugcgugaacugcgacaccuucugcgccggcagcacguucaucuccgacgaggucgcgcgcgaccugagccugcaguucaagcggccgaucaaccccaccgaccaguccagcuacaucguggacuccgugaccgucaagaacgggagcauccaccucuacuucgacaaggccggccagaagaccuacgagcgccacucccugagccacuucgugaaccuggacaaccuccgggccaacaacacgaaggggucccugcccaucaacgugaucgucuucgacggcaagagcaagugcgaggaguccagcgccaaguccgccagcguguacuacucccagcugaugugccagcccauccuccugcuggaccaggcgcucgugagcgacgucggcgacagcgccgagguggccgugaagauguucgacgccuacgucaacaccuucuccagcaccuucaacgugccgauggagaagcugaagacccugguggccacggcggaggccgagcucgccaagaacgucucccuggacaacgugcugagcaccuucaucuccgccgcgcgccagggguucguggacagcgacgucgagaccaaggacgugguggagugccucaagcugucccaccagagcgacaucgaggucaccggcgacuccugcaacaacuacaugcugacguacaacaagguggagaacaugaccccccgggacuucggggccugcaucgacugcagcgcccgccacaucaacgcccagguggccaagucccacaacaucgcgcucaucuggaacgucaaggacuucaugagccuguccgagcagcugcggaagcagauccgcagcgccgccaagaagaacaaccuccccuucaagcugaccugcgccaccacgcgccagguggugaacgucgugaccaccaagaucgcccugaagggcgggugaggacuaguuauaagacugacuagcccgaugggccucccaacgggcccuccuccccuccuugcaccgagauuaauaaaaaaaaaaaaaaaaaaaaaaaaaaaaaaaaaaaaaaaaaaaaaaaaaaaaaaaaaaaaaaaaugcaucccccccccccccccccccccccccccccccaaaggcucuuuucagagccaccagaauu

SEQ ID NO: 21791 - RNA, 6058 nt, Artificial Sequence
  SARS-CoV-2__MT655744.1__non-structural protein 3 (NSP3) mRNA gc
aggagaaagcuuaccauggcccccaccaaggugaccuucggcgacgacacggucaucgaggugcagggguacaagagcgugaacaucaccuucgagcuggacgagcgcaucgacaagguccucaacgagaagugcuccgccuacaccguggagcugggcaccgaggugaacgaguucgcgugcgucguggccgacgccgugaucaagacgcugcagccggucagcgagcuccugaccccccuggggaucgaccucgacgagugguccauggccaccuacuaccuguucgacgagagcggcgaguucaagcuggccucccacauguacugcagcuucuacccccccgacgaggacgaggaggagggggacugcgaggaggaggaguucgagccguccacccaguacgaguacggcacggaggacgacuaccagggcaagccccucgaguucggggcgaccagcgccgcccugcagcccgaggaggagcaggaggaggacuggcuggacgacgacucccagcagaccgugggccagcaggacgggagcgaggacaaccagaccacgaccauccagaccaucguggagguccagccccagcucgagauggagcugaccccgguggugcagacgaucgaggucaacuccuucagcggcuaccugaagcucaccgacaacguguacaucaagaacgccgacaucguggaggaggcgaagaaggucaagcccaccgugguggucaacgccgccaacguguaccugaagcacgggggcggcguggccggggcccugaacaaggcgaccaacaacgccaugcaggucgaguccgacgacuacaucgccacgaacggcccccucaagguggggggcagcugcguccuguccggccacaaccuggccaagcacugccuccacgugguggggcccaacgucaacaagggcgaggacauccagcugcugaagagcgccuacgagaacuucaaccagcacgaggugcuccuggcgccgcugcucuccgccgggaucuucggcgccgaccccauccacagccugcgggugugcgucgacaccgugcgcaccaacguguaccuggccgucuucgacaagaaccucuacgacaagcugguguccagcuuccuggagaugaagagcgagaagcagguggagcagaagaucgccgagauccccaaggaggaggucaagcccuucaucaccgaguccaagccgagcguggagcagcggaagcaggacgacaagaagaucaaggcgugcguggaggaggucacgaccacccucgaggagaccaaguuccugacggagaaccugcuccuguacaucgacaucaacgggaaccugcaccccgacuccgccacccucgugagcgacaucgacaucaccuuccugaagaaggacgcccccuacaucgugggcgacgucgugcaggagggcgugcugaccgccgucgugauccccacgaagaaggccgggggcaccaccgagaugcucgcgaaggcccugcgcaaggugccgaccgacaacuacaucacgaccuaccccgggcagggccugaacggguacaccgucgaggaggccaagaccgugcucaagaagugcaaguccgccuucuacauccugcccagcaucaucuccaacgagaagcaggagauccugggcaccgugagcuggaaccuccgggagaugcuggcgcacgccgaggagacgcgcaagcugaugcccgucugcguggagaccaaggccaucguguccaccauccagcggaaguacaagggcaucaagauccaggagggggucguggacuacggcgcccgcuucuacuucuacaccagcaagacgaccguggccucccugaucaacacccucaacgaccugaacgagacccuggucacgaugccgcucggguacgugacccacggccugaaccuggaggaggcggcccgguacaugcgcagccucaaggugcccgccaccgucuccgugagcucccccgacgccgugaccgccuacaacggguaccugacgagcuccagcaagacccccgaggagcacuucaucgagaccaucucccuggcgggcagcuacaaggacuggagcuacuccggccagagcacccagcucgggaucgaguuccugaagcggggcgacaaguccgucuacuacacgagcaacccgaccaccuuccaccuggacggggaggugaucaccuucgacaaccucaagacgcugcugucccuccgcgaggugcggaccaucaaggucuucaccaccguggacaacaucaaccugcacacgcagguggucgacaugagcaugaccuacggccagcaguucggccccaccuaccuggacggggccgacgugaccaagaucaagccccacaacucccacgagggcaagacguucuacgugcucccgaacgacgacacccugcgcgucgaggccuucgaguacuaccacaccaccgaccccagcuuccuggggcgguacauguccgcccucaaccacacgaagaaguggaaguacccccaggugaacggccugaccagcaucaagugggccgacaacaacugcuaccuggcgaccgcccuccugacccugcagcagaucgagcucaaguucaaccccccggcccugcaggacgccuacuacggggcgcgcgccggcgaggccgccaacuucugcgcccugauccucgcguacugcaacaagacggugggcgagcugggggacguccgggagaccauguccuaccuguuccagcacgccaaccucgacagcugcaagcgcgugcugaacgucgugugcaagaccugcggccagcagcagaccacccugaaggggguggaggccgucauguacaugggcacgcucuccuacgagcaguucaagaagggggugcagauccccugcaccugcggcaagcaggccaccaaguaccuggugcagcaggagagccccuucgucaugauguccgcccccccggcgcaguacgagcugaagcacggcaccuucacgugcgccagcgaguacaccgggaacuaccagugcggccacuacaagcacaucaccuccaaggagacccucuacugcaucgacggggcccugcugacgaaguucagcgaguacaagggccccaucaccgacguguucuacaaggagaacagcuacaccaccacgaucaagcccgugaccuacaagcucgacggggucgugugcaccgagaucgaccccaagcuggacaacuacuacaagaaggacaacuccuacuucaccgagcagccgaucgaccuggugcccaaccagcccuaccccaacgccagcuucgacaacuucaaguucgucugcgacaacaucaaguucgccgacgaccucaaccagcugacgggcuacaagaagccggcgucccgggagcugaaggugaccuucuuccccgaccucaacggcgacguggucgccaucgacuacaagcacuacacccccagcuucaagaagggggccaagcugcugcacaagcccaucguguggcacgugaacaacgccaccaacaaggcgacguacaagccgaacaccuggugcauccgcugccucugguccaccaagcccgucgagaccagcaacuccuucgacgugcugaagagcgaggacgcccagggcauggacaaccuggccugcgaggaccucaagcccguguccgaggaggucguggagaaccccacgauccagaaggacgugcuggagugcaacgucaagaccaccgagguggugggggacaucauccugaagccggccaacaacagccucaagaucaccgaggaggucggccacacggaccugauggccgcguacguggacaacuccagccugaccaucaagaagcccaacgagcucucccgggugcuggggcugaagacccucgccacccacggccuggccgccgucaacagcgugcccugggacacgaucgccaacuacgcgaagccguuccugaacaagguggucuccaccaccaccaacaucgugacgcgcugccucaaccgcgugugcaccaacuacaugcccuacuucuucacccugcugcuccagcugugcaccuucacccggagcacgaacucccgcaucaaggccagcaugcccaccaccaucgccaagaacaccgucaaguccgugggcaaguucugccuggaggccagcuucaacuaccucaagagccccaacuucuccaagcugaucaacaucaucaucugguuccugcuccugagcgugugccuggggucccucaucuacagcacggccgcgcugggcguccugauguccaaccucgggaugccgagcuacugcaccggcuaccgggagggcuaccugaacuccaccaacgugaccaucgccacguacugcaccgggagcauccccugcuccgugugccugagcggccucgacucccuggacaccuaccccagccuggagaccauccagaucacgaucuccagcuucaagugggaccucaccgccuucgggcuggucgccgagugguuccuggccuacauccucuucacccgcuucuucuacgugcugggccuggcggccaucaugcagcucuucuucuccuacuucgccgugcacuucaucagcaacuccuggcugauguggcugaucaucaaccugguccagauggcccccaucagcgcgauggugcggauguacaucuucuucgccuccuucuacuacguguggaagagcuacguccacgugguggacgggugcaacagcuccaccugcaugaugugcuacaagcgcaaccgggccacgcgcgucgagugcaccaccaucgugaacggcguccggcgcagcuucuacguguacgccaacggcgggaagggcuucugcaagcuccacaacuggaacugcgugaacugcgacaccuucugcgccggguccacguucaucagcgacgaggucgcgcgggaccugucccugcaguucaagcgcccgaucaaccccaccgaccagagcuccuacaucguggacagcgugaccgucaagaacggcuccauccaccucuacuucgacaaggccgggcagaagaccuacgagcggcacagccugucccacuucgugaaccuggacaaccuccgcgccaacaacacgaagggcagccugcccaucaacgugaucgucuucgacggcaaguccaagugcgaggagagcuccgccaagagcgccuccguguacuacagccagcugaugugccagcccauccuccugcuggaccaggcgcucguguccgacgucggggacagcgccgagguggccgugaagauguucgacgccuacgucaacaccuucagcuccaccuucaacgugccgauggagaagcugaagacccugguggccacggcggaggccgagcucgccaagaacgucagccuggacaacgugcuguccaccuucaucagcgccgcgcggcagggcuucguggacuccgacgucgagaccaaggacgugguggagugccucaagcugagccaccaguccgacaucgaggucaccggggacagcugcaacaacuacaugcugacguacaacaagguggagaacaugaccccccgcgaccucggcgccugcaucgacugcuccgcccggcacaucaacgcccagguggccaagagccacaacaucgcgcugaucuggaacgucaaggacuucaugucccugagcgagcagcuccgcaagcagauccgguccgccgccaagaagaacaaccugcccuucaagcugaccugcgccaccacgcgccagguggugaacgucgugaccaccaagaucgcccucaaggggggcugaggacuaguuauaagacugacuagcccgaugggccucccaacgggcccuccuccccuccuugcaccgagauuaauaaaaaaaaaaaaaaaaaaaaaaaaaaaaaaaaaaaaaaaaaaaaaaaaaaaaaaaaaaaaaaaaugcaucccccccccccccccccccccccccccccccaaaggcucuuuucagagccaccagaauu

SEQ ID NO: 21792 - RNA, 6058 nt, Artificial Sequence
  SARS-CoV-2__MT656257.1__non-structural protein 3 (NSP3) mRNA gc
aggagaaagcuuaccauggcccccaccaaggugaccuucggcgacgacacggucaucgaggugcagggguacaagagcgugaacaucaccuucgagcuggacgagcgcaucgacaagguccucaacgagaagugcuccgccuacaccguggagcugggcaccgaggugaacgaguucgcgugcgucguggccgacgccgugaucaagauccugcagccggucagcgagcuccugacgccccuggggaucgaccucgacgagugguccauggccaccuacuaccuguucgacgagagcggcgaguucaagcuggccucccacauguacugcagcuucuacccccccgacgaggacgaggaggagggggacugcgaggaggaggaguucgagccguccacccaguacgaguacggcaccgaggacgacuaccagggcaagccccucgaguucggggcgacgagcgccgcccugcagcccgaggaggagcaggaggaggacuggcuggacgacgacucccagcagaccgugggccagcaggacgggagcgaggacaaccagaccaccacgauccagaccaucguggagguccagccccagcucgagauggagcugaccccgguggugcagaccaucgaggucaacuccuucagcggcuaccugaagcucacggacaacguguacaucaagaacgccgacaucguggaggaggcgaagaaggucaagcccaccgugguggucaacgccgccaacguguaccugaagcacgggggcggcguggccggggcccugaacaaggcgaccaacaacgccaugcaggucgaguccgacgacuacaucgccaccaacggcccccucaagguggggggcagcugcguccuguccggccacaaccuggccaagcacugccuccacgugguggggcccaacgucaacaagggcgaggacauccagcugcugaagagcgccuacgagaacuucaaccagcacgaggugcuccuggcgccgcugcucuccgccgggaucuucggcgccgaccccauccacagccugcgggugugcgucgacacggugcgcaccaacguguaccuggccgucuucgacaagaaccucuacgacaagcuggugcuguccuuccucgagaugaagagcgagaagcagguggagcagaagaucgccgagauccccaaggaggaggucaagcccuucaucaccgagagcaagccguccguggagcagcggaagcaggacgacaagaagaucaaggcgugcguggaggaggucaccacgacccuggaggagaccaaguuccugaccgagaaccuccugcuguacaucgacaucaacgggaaccuccaccccgacagcgccacgcugguguccgacaucgacaucaccuuccugaagaaggacgcccccuacaucgugggcgacgucgugcaggagggcgugcucaccgccgucgugauccccaccaagaaggccgggggcacgaccgagaugcuggcgaaggcccugcgcaaggugccgaccgacaacuacaucaccacguaccccgggcagggccucaacggguacaccgucgaggaggccaagaccgugcugaagaagugcaagagcgccuucuacauccugcccuccaucaucagcaacgagaagcaggagauccucggcaccguguccuggaaccugcgggagaugcuggcgcacgccgaggagacccgcaagcugaugcccgucugcguggagacgaaggccaucgugagcaccauccagcggaaguacaagggcaucaagauccaggagggggucguggacuacggcgcccgcuucuacuucuacaccuccaagaccacgguggccagccucaucaacacccugaacgaccugaacgagacccucgucaccaugccgcugggguacgugacgcacggccugaaccucgaggaggcggcccgguacaugcgcucccugaaggugcccgccaccgucagcguguccagccccgacgccgugaccgccuacaacggguaccugaccuccagcuccaagacgcccgaggagcacuucaucgagaccaucagccucgcgggcuccuacaaggacuggagcuacagcggccaguccacccagcuggggaucgaguuccugaagcggggcgacaagagcgucuacuacaccuccaacccgacgaccuuccaccucgacggggaggugaucaccuucgacaaccugaagacccugcucagccugcgcgaggugcggacgaucaaggucuucaccaccguggacaacaucaaccugcacacccagguggucgacauguccaugacguacggccagcaguucggccccaccuaccucgacggggccgacgugaccaagaucaagccccacaacagccacgagggcaagaccuucuacgugcugccgaacgacgacacgcugcgcgucgaggccuucgaguacuaccacaccaccgaccccuccuuccucgggcgguacaugagcgcccugaaccacaccaagaaguggaaguacccccaggugaacggccugacguccaucaagugggccgacaacaacugcuaccucgcgaccgcccugcugacccuccagcagaucgagcugaaguucaaccccccggcccugcaggacgccuacuaccgcgcgcgggccggggaggccgccaacuucugcgcccucauccuggcguacugcaacaagaccgugggcgagcugggcgacguccgcgagacgaugagcuaccucuuccagcacgccaaccuggacuccugcaagcgggugcugaacgucgugugcaagaccugcgggcagcagcagaccacccucaagggcguggaggccgucauguacauggggacccugagcuacgagcaguucaagaagggcgugcagauccccugcacgugcgggaagcaggccaccaaguaccuggugcagcaggagucccccuucgucaugaugagcgcccccccggcgcaguacgagcucaagcacggcaccuucaccugcgccuccgaguacacgggcaacuaccagugcgggcacuacaagcacaucaccagcaaggagacccuguacugcaucgacggcgcccugcucaccaaguccagcgaguacaaggggcccaucacggacguguucuacaaggagaacagcuacaccaccaccaucaagcccgugacguacaagcuggacggcgucgugugcaccgagaucgaccccaaccuggacaacuacuacaagaaggacaacuccuacuucaccgagcagccgaucgaccucgugcccaaccagcccuaccccaacgccagcuucgacaacuucaaguucgucugcgacaacaucaaguucgccgacgaccugaaccagcugaccggguacaagaagccggcgucccgcgagcucaaggugacguucuuccccgaccugaacggcgacguggucgccaucgacuacaagcacuacacccccagcuucaagaagggcgccaagcugcuccacaagcccaucguguggcacgugaacaacgccaccaacaaggcgaccuacaagccgaacacguggugcauccggugccugugguccaccaagcccgucgagaccagcaacuccuucgacgugcugaagagcgaggacgcccaggggauggacaaccucgccugcgaggaccugaagcccguguccgaggaggucguggagaaccccaccauccagaaggacgugcuggagugcaacgucaagacgaccgagguggugggcgacaucauccucaagccggccaacaacagccugaagaucaccgaggaggucgggcacaccgaccugauggccgcguacguggacaacuccagccucacgaucaagaagcccaacgagcugucccgcgugcugggccucaagacccuggccacccacgggcuggccgccgucaacagcgugcccugggacaccaucgccaacuacgcgaagccguuccucaacaagguggucuccacgaccaccaacaucgugacccgcugccugaaccgggugugcacgaacuacaugcccuacuucuucacccugcuccugcagcugugcaccuucacccgcagcaccaacucccggaucaaggccagcaugcccacgaccaucgccaagaacaccgucaaguccgugggcaaguucugccucgaggccagcuucaacuaccugaagagccccaacuucuccaagcugaucaacaucaucaucugguuccuccugcugagcgugugccucggcucccugaucuacagcaccgccgcgcuggggguccucauguccaaccugggcaugccgagcuacugcacgggguaccgcgagggcuaccugaacuccaccaacgugaccaucgccaccuacugcacgggcagcauccccugcuccgugugccucagcgggcuggacucccuggacaccuaccccagccucgagaccauccagaucaccaucuccagcuucaagugggaccugacggccuucggccuggucgccgagugguuccucgccuacauccuguucacccgguucuucuacgugcuggggcucgcggccaucaugcagcuguucuucuccuacuucgccgugcacuucaucagcaacuccuggcugauguggcugaucaucaaccucguccagauggcccccaucagcgcgauggugcgcauguacaucuucuucgccuccuucuacuacguguggaagagcuacguccacgugguggacggcugcaacagcuccaccugcaugaugugcuacaagcggaaccgcgccacccgggucgagugcacgaccaucgugaacgggguccgccggagcuucuacguguacgccaacggcggcaagggguucugcaagcugcacaacuggaacugcgugaacugcgacaccuucugcgccggcuccaccuucaucagcgacgaggucgcgcgcgaccugucccuccaguucaagcggccgaucaaccccacggaccagagcuccuacaucguggacagcgugaccgucaagaacggguccauccaccuguacuucgacaaggccggccagaagaccuacgagcgccacagccugucccacuucgugaaccucgacaaccugcgggccaacaacaccaaggggagccugcccaucaacgugaucgucuucgacggcaaguccaagugcgaggagagcuccgccaagagcgccuccguguacuacagccagcucaugugccagcccauccugcugcucgaccaggcgcugguguccgacgucggcgacagcgccgagguggccgugaagauguucgacgccuacgucaacacguucagcuccaccuucaacgugccgauggagaagcugaagacccucguggccaccgcggaggccgagcuggccaagaacgucagccuggacaacgugcucuccacguucaucagcgccgcgcgccagggguucguggacuccgacgucgagaccaaggacgugguggagugccugaagcugagccaccaguccgacaucgaggucaccggcgacagcugcaacaacuacaugcucaccuacaacaagguggagaacaugacgccccgggaccugggggccugcaucgacugcuccgcccgccacaucaacgcccagguggccaagagccacaacaucgcgcugaucuggaacgucaaggacuucaugucccucagcgagcagcugcggaagcagauccgcuccgccgccaagaagaacaaccugcccuucaagcucaccugcgccaccacccgccagguggugaacgucgugacgaccaagaucgcccugaagggcgggugaggacuaguuauaagacugacuagcccgaugggccucccaacgggcccuccuccccuccuugcaccgagauuaauaaaaaaaaaaaaaaaaaaaaaaaaaaaaaaaaaaaaaaaaaaaaaaaaaaaaaaaaaaaaaaaaugcaucccccccccccccccccccccccccccccccaaaggcucuuuucagagccaccagaauu

SEQ ID NO: 21793 - RNA, 6058 nt, Artificial Sequence
  SARS-CoV-2__MT657958.1__non-structural protein 3 (NSP3) mRNA gc
aggagaaagcuuaccauggcccccaccaaggugaccuucggcgacgacacggucaucgaggugcagggguacaagagcgugaacaucaccuucgagcuggacgagcgcaucgacaagguccucaacgagaagugcuccgccuacaccguggagcugggcaccgaggugaacgaguucgcgugcgucguggccgacgccgugaucaagacgcugcagccggucagcgagcuccugaccccccuggggaucgaccucgacgagugguccauggccaccuacuaccuguucgacgagagcggcgaguucaagcuggccucccacauguacugcagcuucuacccccccgacgaggacgaggaggagggggacugcgaggaggaggaguucgagccguccacccaguacgaguacggcacggaggacgacuaccagggcaagccccucgaguucggggcgaccagcgccgcccugcagcccgaggaggagcaggaggaggacuggcuggacgacgacucccagcagaccgugggccggcaggacgggagcgaggacaaccagaccacgaccauccagaccaucguggagguccagccccagcucgagauggagcugaccccgguggugcagacgaucgaggucaacuccuucagcggcuaccugaagcucaccgacaacguguacaucaagaacgccgacaucguggaggaggcgaagaaggucaagcccaccgugguggucaacgccgccaacguguaccugaagcacgggggcggcguggccggggcccugaacaaggcgaccaacaacgccaugcaggucgaguccgacgacuacaucgccacgaacggcccccucaagguggggggcagcugcguccuguccggccacaaccuggccaagcacugccuccacgugguggggcccaacgucaacaagggcgaggacauccagcugcugaagagcgccuacgagaacuucaaccagcacgaggugcuccuggcgccgcugcucuccgccgggaucuucggcgccgaccccauccacagccugcgcgugugcgucgacaccgugcggaccaacguguaccuggccgucuucgacaagaaccucuacgacaagcugguguccagcuuccuggagaugaagagcgagaagcagguggagcagaagaucgccgagauccccaaggaggaggucaagcccuucaucaccgaguccaagccgagcguggagcagcgcaagcaggacgacaagaagaucaaggcgugcguggaggaggucacgaccacccucgaggagaccaaguuccugacggagaaccugcuccuguacaucgacaucaacgggaaccugcaccccgacuccgccacccucgugagcgacaucgacaucaccuuccugaagaaggacgcccccuacaucgugggcgacgucgugcaggagggcgugcugaccgccgucgugauccccacgaagaaggccgggggcaccaccgagaugcucgcgaaggcccugcggaaggugccgaccgacaacuacaucacgaccuaccccgggcagggccugaacggguacaccgucgaggaggccaagaccgugcucaagaagugcaaguccgccuucuacauccugcccagcaucaucuccaacgagaagcaggagauccugggcaccgugagcuggaaccuccgcgagaugcuggcgcacgccgaggagacgcggaagcugaugcccgucugcguggagaccaaggccaucguguccaccauccagcgcaaguacaagggcaucaagauccaggagggggucguggacuacggcgcccgguucuacuucuacaccagcaagacgaccguggccucccugaucaacacccucaacgaccugaacgagacccuggucacgaugccgcucggguacgugacccacggccugaaccuggaggaggcggcccgcuacaugcggagccucaaggugcccgccaccgucuccgugagcucccccgacgccgugaccgccuacaacggguaccugacgagcuccagcaagacccccgaggagcacuucaucgagaccaucucccuggcgggcagcuacaaggacuggagcuacuccggccagagcacccagcucgggaucgaguuccugaagcgcggcgacaaguccgucuacuacacgagcaacccgaccaccuuccaccuggacggggaggugaucaccuucgacaaccucaagacgcugcugucccuccgggaggugcgcaccaucaaggucuucaccaccguggacaacaucaaccugcacacgcagguggucgacaugagcaugaccuacggccagcaguucggccccaccuaccuggacggggccgacgugaccaagaucaagccccacaacucccacgagggcaagacguucuacgugcucccgaacgacgacacccugcgggucgaggccuucgaguacuaccacaccaccgaccccagcuuccuggggcgcuacauguccgcccucaaccacacgaagaaguggaaguacccccaggugaacggccugaccagcaucaagugggccgacaacaacugcuaccuggcgaccgcccuccugacccugcagcagaucgagcucaaguucaaccccccggcccugcaggacgccuacuaccgggcgcgcgccggggaggccgccaacuucugcgcccugauccucgcguacugcaacaagacggugggcgagcugggcgacguccgggagaccauguccuaccuguuccagcacgccaaccucgacagcugcaagcgcgugcugaacgucgugugcaagaccugcgggcagcagcagaccacccugaagggcguggaggccgucauguacauggggacgcucuccuacgagcaguucaagaagggcgugcagauccccugcaccugcgggaagcaggccaccaaguaccuggugcagcaggagagccccuucgucaugauguccgcccccccggcgcaguacgagcugaagcacggcaccuucacgugcgccagcgaguacaccggcaacuaccagugcgggcacuacaagcacaucaccuccaaggagacccucuacugcaucgacggcgcccugcugacgaagagcagcgaguacaaggggcccaucaccgacguguucuacaaggagaacuccuacaccaccacgaucaagcccgugaccuacaagcucgacggcgucgugugcaccgagaucgaccccaagcuggacaacuacuacaagaaggacaacagcuacuucaccgagcagccgaucgaccuggugcccaaccagcccuaccccaacgccuccuucgacaacuucaaguucgucugcgacaacaucaaguucgccgacgaccucaaccagcugacgggguacaagaagccggcgagccgggagcugaaggugaccuucuuccccgaccucaacggcgacguggucgccaucgacuacaagcacuacacccccuccuucaagaagggcgccaagcugcugcacaagcccaucguguggcacgugaacaacgccaccaacaaggcgacguacaagccgaacaccuggugcauccgcugccucuggagcaccaagcccgucgagaccuccaacagcuucgacgugcugaaguccgaggacgcccaggggauggacaaccuggccugcgaggaccucaagcccgugagcgaggaggucguggagaaccccacgauccagaaggacgugcuggagugcaacgucaagaccaccgagguggugggcgacaucauccugaagccggccaacaacucccucaagaucaccgaggaggucgggcacacggaccugauggccgcguacguggacaacagcucccugaccaucaagaagcccaacgagcucagccgcgugcugggccugaagacccucgccacccacgggcuggccgccgucaacuccgugcccugggacacgaucgccaacuacgcgaagccguuccugaacaagguggucagcaccaccaccaacaucgugacgcggugccucaaccgcgugugcaccaacuacaugcccuacuucuucacccugcugcuccagcugugcaccuucacccgguccacgaacagccgcaucaaggccuccaugcccaccaccaucgccaagaacaccgucaagagcgugggcaaguucugccuggaggccagcuucaacuaccucaagucccccaacuucagcaagcugaucaacaucaucaucugguuccugcuccuguccgugugccugggcagccucaucuacuccacggccgcgcuggggguccugaugagcaaccucggcaugccguccuacugcaccggguaccgggagggcuaccugaacagcaccaacgugaccaucgccacguacugcaccggcuccauccccugcagcgugugccuguccgggcucgacagccuggacaccuaccccucccuggagaccauccagaucacgaucagcuccuucaagugggaccucaccgccuucggccuggucgccgagugguuccuggccuacauccucuucacccgcuucuucuacgugcuggggcuggcggccaucaugcagcucuucuucagcuacuucgccgugcacuucaucuccaacagcuggcugauguggcugaucaucaaccugguccagauggcccccaucuccgcgauggugcggauguacaucuucuucgccagcuucuacuacguguggaagagcuacguccacgugguggacggcugcaacuccagcaccugcaugaugugcuacaagcgcaaccgggccacgcgcgucgagugcaccaccaucgugaacgggguccggcgcuccuucuacguguacgccaacggcggcaagggguucugcaagcuccacaacuggaacugcgugaacugcgacaccuucugcgccggcagcacguucaucuccgacgaggucgcgcgggaccugagccugcaguucaagcgcccgaucaaccccaccgaccaguccagcuacaucguggacuccgugaccgucaagaacgggagcauccaccucuacuucgacaaggccggccagaagaccuacgagcggcacucccugagccacuucgugaaccuggacaaccuccgcgccaacaacacgaaggggucccugcccaucaacgugaucgucuucgacggcaagagcaagugcgaggaguccagcgccaaguccgccagcguguacuacucccagcugaugugccagcccauccuccugcuggaccaggcgcucgugagcgacgucggcgacagcgccgagguggccgugaagauguucgacgccuacgucaacaccuucuccagcaccuucaacgugccgauggagaagcugaagacccugguggccacggcggaggccgagcucgccaagaacgucucccuggacaacgugcugagcaccuucaucuccgccgcgcggcagggguucguggacagcgacgucgagaccaaggacgugguggagugccucaagcugucccaccagagcgacaucgaggucaccggcgacuccugcaacaacuacaugcugacguacaacaagguggagaacaugaccccccgcgaccucggggccugcaucgacugcagcgcccggcacaucaacgcccagguggccaagucccacaacaucgcgcugaucuggaacgucaaggacuucaugagccuguccgagcagcuccgcaagcagauccgcagcgccgccaagaagaacaaccugcccuucaagcugaccugcgccaccacgcggcagguggugaacgucgugaccaccaagaucgcccucaagggcgggugaggacuaguuauaagacugacuagcccgaugggccucccaacgggcccuccuccccuccuugcaccgagauuaauaaaaaaaaaaaaaaaaaaaaaaaaaaaaaaaaaaaaaaaaaaaaaaaaaaaaaaaaaaaaaaaaugcaucccccccccccccccccccccccccccccccaaaggcucuuuucagagccaccagaauu

SEQ ID NO: 21794 - RNA, 6058 nt, Artificial Sequence
  SARS-CoV-2__MT646054.1__non-structural protein 3 (NSP3) mRNA gc
aggagaaagcuuaccauggcccccaccaaggugaccuucggcgacgacacggucaucgaggugcagggguacaagagcgugaacaucaccuucgagcuggacgagcgcaucgacaagguccucaacgagaagugcuccgccuacaccguggagcugggcaccgaggugaacgaguucgcgugcgucguggccgacgccgugaucaagacgcugcagccggucagcgagcuccugaccccccuggggaucgaccucgacgagugguccauggccaccuacuaccuguucgacgagagcggcgaguucaagcuggccucccacauguacugcagcuucuacccccccgacgaggacgaggaggagggggacugcgaggaggaggaguucgagccguccacccaguacgaguacggcacggaggacgacuaccagggcaagccccucgaguucggggcgaccagcgccgcccugcagcccgaggaggagcaggaggaggacuggcuggacgacgacucccagcagaccgugggccagcaggacgggagcgaggacaaccagaccacgaccauccagaccaucguggagguccagccccagcucgagauggagcugaccccgguggugcagacgaucgaggucaacuccuucagcggcuaccugaagcucaccgacaacguguacaucaagaacgccgacaucguggaggaggcgaagaaggucaagcccaccgugguggucaacgccgccaacguguaccugaagcacgggggcggcguggccggggcccugaacaaggcgaccaacaacgccaugcaggucgaguccgacgacuacaucgccacgaacggcccccucaagguggggggcagcugcguccuguccggccacaaccuggccaagcacugccuccacgugguggggcccaacgucaacaagggcgaggacauccagcugcugaagagcgccuacgagaacuucaaccagcacgaggugcuccuggcgccgcugcucuccgccgggaucuucggcgccgaccccauccacagccugcgggugugcgucgacaccgugcgcaccaacguguaccuggccgucuucgacaagaaccucuacgacaagcugguguccagcuuccuggagaugaagagcgagaagcagguggagcagaagaucgccgagauccccaaggaggaggucaagcccuucaucaccgaguccaagccgagcguggagcagcggaagcaggacgacaagaagaucaaggcgugcguggaggaggucacgaccacccucgaggagaccaaguuccugacggagaaccugcuccuguacaucgacaucaacgggaaccugcaccccgacuccgccacccucgugagcgacaucgacaucaccuuccugaagaaggacgcccccuacaucgugggcgacgucgugcaggagggcgugcugaccgccgucgugauccccacgaagaaggccgggggcaccaccgagaugcucgcgaaggcccugcgcaaggugccgaccgacaacuacaucacgaccuaccccgggcagggccugaacggguacaccgucgaggaggccaagaccgugcucaagaagugcaaguccgccuucuacauccugcccagcaucaucuccaacgagaagcaggagauccugggcaccgugagcuggaaccuccgggagaugcuggcgcacgccgaggagacgcgcaagcugaugcccgucugcguggagaccaaggccaucguguccaccauccagcggaaguacaagggcaucaagauccaggagggggucguggacuacggcgcccgcuucuacuucuacaccagcaagacgaccguggccucccugaucaacacccucaacgaccugcacgagacccuggucacgaugccgcucggguacgugacccacggccugaaccuggaggaggcggcccgguacaugcgcagccucaaggugcccgccaccgucuccgugagcucccccgacgccgugaccgccuacaacggguaccugacgagcuccagcaagacccccgaggagcacuucaucgagaccaucucccuggcgggcagcuacaaggacuggagcuacuccggccagagcacccagcucgggaucgaguuccugaagcggggcgacaaguccgucuacuacacgagcaacccgaccaccuuccaccuggacggggaggugaucaccuucgacaaccucaagacgcugcugucccuccgcgaggugcggaccaucaaggucuucaccaccguggacaacaucaaccugcacacgcagguggucgacaugagcaugaccuacggccagcaguucggccccaccuaccuggacggggccgacgugaccaagaucaagccccacaacucccacgagggcaagacguucuacgugcucccgaacgacgacacccugcgcgucgaggccuucgaguacuaccacaccaccgaccccagcuuccuggggcgguacauguccgcccucaaccacacgaagaaguggaaguacccccaggugaacggccugaccagcaucaagugggccgacaacaacugcuaccuggcgaccgcccuccugacccugcagcagaucgagcucaaguucaaccccccggcccugcaggacgccuacuaccgcgcgcgggccggggaggccgccaacuucugcgcccugauccucgcguacugcaacaagacggugggcgagcugggcgacguccgcgagaccauguccuaccuguuccagcacgccaaccucgacagcugcaagcgggugcugaacgucgugugcaagaccugcgggcagcagcagaccacccugaagggcguggaggccgucauguacauggggacgcucuccuacgagcaguucaagaagggcgugcagauccccugcaccugcgggaagcaggccaccaaguaccuggugcagcaggagagccccuucgucaugauguccgcccccccggcgcaguacgagcugaagcacggcaccuucacgugcgccagcgaguacaccggcaacuaccagugcgggcacuacaagcacaucaccuccaaggagacccucuacugcaucgacggcgcccugcugacgaagagcagcgaguacaaggggcccaucaccgacguguucuacaaggagaacuccuacaccaccacgaucaagcccgugaccuacaagcucgacggcgucgugugcaccgagaucgaccccaagcuggacaacuacuacaagaaggacaacagcuacuucaccgagcagccgaucgaccuggugcccaaccagcccuaccccaacgccuccuucgacaacuucaaguucgucugcgacaacaucaaguucgccgacgaccucaaccagcugacgggguacaagaagccggcgagccgcgagcugaaggugaccuucuuccccgaccucaacggcgacguggucgccaucgacuacaagcacuacacccccuccuucaagaagggcgccaagcugcugcacaagcccaucguguggcacgugaacaacgccaccaacaaggcgacguacaagccgaacaccuggugcauccggugccucuggagcaccaagcccgucgagaccuccaacagcuucgacgugcugaaguccgaggacgcccaggggauggacaaccuggccugcgaggaccucaagcccgugagcgaggaggucguggagaaccccacgauccagaaggacgugcuggagugcaacgucaagaccaccgagguggugggcgacaucauccugaagccggccaacaacucccucaagaucaccgaggaggucgggcacacggaccugauggccgcguacguggacaacagcucccugaccaucaagaagcccaacgagcucagccgcgugcugggccugaagacccucgccacccacgggcuggccgccgucaacuccgugcccugggacacgaucgccaacuacgcgaagccguuccugaacaagguggucagcaccaccaccaacaucgugacgcgcugccucaaccgggugugcaccaacuacaugcccuacuucuucacccugcugcuccagcugugcaccuucacccgcuccacgaacagccggaucaaggccuccaugcccaccaccaucgccaagaacaccgucaagagcgugggcaaguucugccuggaggccagcuucaacuaccucaagucccccaacuucagcaagcugaucaacaucaucaucugguuccugcuccuguccgugugccugggcagccucaucuacuccacggccgcgcuggggguccugaugagcaaccucggcaugccguccuacugcaccggguaccgcgagggcuaccugaacagcaccaacgugaccaucgccacguacugcaccggcuccauccccugcagcgugugccuguccgggcucgacagccuggacaccuaccccucccuggagaccauccagaucacgaucagcuccuucaagugggaccucaccgccuucggccuggucgccgagugguuccuggccuacauccucuucacccgguucuucuacgugcuggggcuggcggccaucaugcagcucuucuucagcuacuucgccgugcacuucaucuccaacagcuggcugauguggcugaucaucaaccugguccagauggcccccaucuccgcgauggugcgcauguacaucuucuucgccagcuucuacuacguguggaagagcuacguccacgugguggacggcugcaacuccagcaccugcaugaugugcuacaagcggaaccgcgccacgcgggucgagugcaccaccaucgugaacgggguccgccgguccuucuacguguacgccaacggcggcaagggguucugcaagcuccacaacuggaacugcgugaacugcgacaccuucugcgccggcagcacguucaucuccgacgaggucgcgcgcgaccugagccugcaguucaagcggccgaucaaccccaccgaccaguccagcuacaucguggacuccgugaccgucaagaacgggagcauccaccucuacuucgacaaggccggccagaagaccuacgagcgccacucccugagccacuucgugaaccuggacaaccuccgggccaacaacacgaaggggucccugcccaucaacgugaucgucuucgacggcaagagcaagugcgaggaguccagcgccaaguccgccagcguguacuacucccagcugaugugccagcccauccuccugcuggaccaggcgcucgugagcgacgucggcgacagcgccgagguggccgugaagauguucgacgccuacgucaacaccuucuccagcaccuucaacgugccgauggagaagcugaagacccugguggccacggcggaggccgagcucgccaagaacgucucccuggacaacgugcugagcaccuucaucuccgccgcgcgccagggguucguggacagcgacgucgagaccaaggacgugguggagugccucaagcugucccaccagagcgacaucgaggucaccggcgacuccugcaacaacuacaugcugacguacaacaagguggagaacaugaccccccgggaccucggggccugcaucgacugcagcgcccgccacaucaacgcccagguggccaagucccacaacaucgcgcugaucuggaacgucaaggacuucaugagccuguccgagcagcuccggaagcagauccgcagcgccgccaagaagaacaaccugcccuucaagcugaccugcgccaccacgcgccagguggugaacgucgugaccaccaagaucgcccucaagggcgggugaggacuaguuauaagacugacuagcccgaugggccucccaacgggcccuccuccccuccuugcaccgagauuaauaaaaaaaaaaaaaaaaaaaaaaaaaaaaaaaaaaaaaaaaaaaaaaaaaaaaaaaaaaaaaaaaugcaucccccccccccccccccccccccccccccccaaaggcucuuuucagagccaccagaauu

SEQ ID NO: 21795 - RNA, 6058 nt, Artificial Sequence
  SARS-CoV-2__MT646073.1__non-structural protein 3 (NSP3) mRNA gc
aggagaaagcuuaccauggcccccaccaaggugaccuucggcgacgacacggucaucgaggugcagggguacaagagcgugaacaucaccuucgagcuggacgagcgcaucgacaagguccucaacgagaagugcuccgccuacaccguggagcugggcaccgaggugaacgaguucgcgugcgucguggccgacgccgugaucaagacgcugcagccggucagcgagcuccugaccccccuggggaucgaccucgacgagugguccauggccaccuacuaccuguucgacgagagcggcgaguucaagcuggccucccacauguacugcagcuucuacccccccgacgaggacgaggaggagggggacugcgaggaggaggaguucgagccguccacccaguacgaguacggcacggaggacgacuaccagggcaagccccucgaguucggggcgaccagcgccgcccugcagcccgaggaggagcaggaggaggacuggcuggacgacgacucccagcagaccgugggccagcaggacgggagcgaggacaaccagaccacgaccauccagaccaucguggagguccagccccagcucgagauggagcugaccccgguggugcagacgaucgaggucaacuccuucagcggcuaccugaagcucaccgacaacguguacaucaagaacgccgacaucguggaggaggcgaagaaggucaagcccaccgugguggucaacgccgccaacguguaccugaagcacgggggcggcguggccggggcccugaacaaggcgaccaacaacgccaugcaggucgaguccgacgacuacaucgccacgaacggcccccucaagguggggggcagcugcguccuguccggccacaaccuggccaagcacugccuccacgugguggggcccaacgucaacaagggcgaggacauccagcugcugaagagcgccuacgagaacuucaaccagcacgaggugcuccuggcgccgcugcucuccgccgggaucuucggcgccgaccccauccacagccugcgggugugcgucgacaccgugcgcaccaacguguaccuggccgucuucgacaagaaccucuacgacaagcugguguccagcuuccuggagaugaagagcgagaagcagguggagcagaagaucgccgagauccccaaggaggaggucaagcccuucaucaccgaguccaagccgagcguggagcagcggaagcaggacgacaagaagaucaaggcgugcguggaggaggucacgaccacccucgaggagaccaaguuccugacggagaaccugcuccuguacaucgacaucaacgggaaccugcaccccgacuccgccacccucgugagcgacaucgacaucaccuuccugaagaaggacgcccccuacaucgugggcgacgucgugcaggagggcgugcugaccgccgucgugauccccacgaagaaggccgggggcaccaccgagaugcucgcgaaggcccugcgcaaggugccgaccgacaacuacaucacgaccuaccccgggcagggccugaacggguacaccgucgaggaggccaagaccgugcucaagaagugcaaguccgccuucuacauccugcccagcaucaucuccaacgagaagcaggagauccugggcaccgugagcuggaaccuccgggagaugcuggcgcacgccgaggagacgcgcaagcugaugcccgucugcguggagaccaaggccaucguguccaccauccagcggaaguacaagggcaucaagauccaggacggggucguggacuacggcgcccgcuucuacuucuacaccagcaagacgaccguggccucccugaucaacacccucaacgaccugaacgagacccuggucacgaugccgcucggguacgugacccacggccugaaccuggaggaggcggcccgguacaugcgcagccucaaggugcccgccaccgucuccgugagcucccccgacgccgugaccgccuacaacggguaccugacgagcuccagcaagacccccgaggagcacuucaucgagaccaucucccuggcgggcagcuacaaggacuggagcuacuccggccagagcacccagcucgggaucgaguuccugaagcggggcgacaaguccgucuacuacacgagcaacccgaccaccuuccaccuggacggggaggugaucaccuucgacaaccucaagacgcugcugucccuccgcgaggugcggaccaucaaggucuucaccaccguggacaacaucaaccugcacacgcagguggucgacaugagcaugaccuacggccagcaguucggccccaccuaccuggacggggccgacgugaccaagaucaagccccacaacucccacgagggcaagacguucuacgugcucccgaacgacgacacccugcgcgucgaggccuucgaguacuaccacaccaccgaccccagcuuccuggggcgguacauguccgcccucaaccacacgaagaaguggaaguacccccaggugaacggccugaccagcaucaagugggccgacaacaacugcuaccuggcgaccgcccuccugacccugcagcagaucgagcucaaguucaaccccccggcccugcaggacgccuacuaccgcgcgcgggccggggaggccgccaacuucugcgcccugauccucgcguacugcaacaagacggugggcgagcugggcgacguccgcgagaccauguccuaccuguuccagcacgccaaccucgacagcugcaagcgggugcugaacgucgugugcaagaccugcgggcagcagcagaccacccugaagggcguggaggccgucauguacauggggacgcucuccuacgagcaguucaagaagggcgugcagauccccugcaccugcgggaagcaggccaccaaguaccuggugcagcaggagagccccuucgucaugauguccgcccccccggcgcaguacgagcugaagcacggcaccuucacgugcgccagcgaguacaccggcaacuaccagugcgggcacuacaagcacaucaccuccaaggagacccucuacugcaucgacggcgcccugcugacgaagagcagcgaguacaaggggcccaucaccgacguguucuacaaggagaacuccuacaccaccacgaucaagcccgugaccuacaagcucgacggcgucgugugcaccgagaucgaccccaagcuggacaacuacuacaagaaggacaacagcuacuucaccgagcagccgaucgaccuggugcccaaccagcccuaccccaacgccuccuucgacaacuucaaguucgucugcgacaacaucaaguucgccgacgaccucaaccagcugacgggguacaagaagccggcgagccgcgagcugaaggugaccuucuuccccgaccucaacggcgacguggucgccaucgacuacaagcacuacacccccuccuucaagaagggcgccaagcugcugcacaagcccaucguguggcacgugaacaacgccaccaacaaggcgacguacaagccgaacaccuggugcauccggugccucuggagcaccaagcccgucgagaccuccaacagcuucgacgugcugaaguccgaggacgcccaggggauggacaaccuggccugcgaggaccucaagcccgugagcgaggaggucguggagaaccccacgauccagaaggacgugcuggagugcaacgucaagaccaccgagguggugggcgacaucauccugaagccggccaacaacucccucaagaucaccgaggaggucgggcacacggaccugauggccgcguacguggacaacagcucccugaccaucaagaagcccaacgagcucagccgcgugcugggccugaagacccucgccacccacgggcuggccgccgucaacuccgugcccugggacacgaucgccaacuacgcgaagccguuccugaacaagguggucagcaccaccaccaacaucgugacgcgcugccucaaccgggugugcaccaacuacaugcccuacuucuucacccugcugcuccagcugugcaccuucacccgcuccacgaacagccggaucaaggccuccaugcccaccaccaucgccaagaacaccgucaagagcgugggcaaguucugccuggaggccagcuucaacuaccucaagucccccaacuucagcaagcugaucaacaucaucaucugguuccugcuccuguccgugugccugggcagccucaucuacuccacggccgcgcuggggguccugaugagcaaccucggcaugccguccuacugcaccggguaccgcgagggcuaccugaacagcaccaacgugaccaucgccacguacugcaccggcuccauccccugcagcgugugccuguccgggcucgacagccuggacaccuaccccucccuggagaccauccagaucacgaucagcuccuucaagugggaccucaccgccuucggccuggucgccgagugguuccuggccuacauccucuucacccgguucuucuacgugcuggggcuggcggccaucaugcagcucuucuucagcuacuucgccgugcacuucaucuccaacagcuggcugauguggcugaucaucaaccugguccagauggcccccaucuccgcgauggugcgcauguacaucuucuucgccagcuucuacuacguguggaagagcuacguccacgugguggacggcugcaacuccagcaccugcaugaugugcuacaagcggaaccgcgccacgcgggucgagugcaccaccaucgugaacgggguccgccgguccuucuacguguacgccaacggcggcaagggguucugcaagcuccacaacuggaacugcgugaacugcgacaccuucugcgccggcagcacguucaucuccgacgaggucgcgcgcgaccugagccugcaguucaagcggccgaucaaccccaccgaccaguccagcuacaucguggacuccgugaccgucaagaacgggagcauccaccucuacuucgacaaggccggccagaagaccuacgagcgccacucccugagccacuucgugaaccuggacaaccuccgggccaacaacacgaaggggucccugcccaucaacgugaucgucuucgacggcaagagcaagugcgaggaguccagcgccaaguccgccagcguguacuacucccagcugaugugccagcccauccuccugcuggaccaggcgcucgugagcgacgucggcgacagcgccgagguggccgugaagauguucgacgccuacgucaacaccuucuccagcaccuucaacgugccgauggagaagcugaagacccugguggccacggcggaggccgagcucgccaagaacgucucccuggacaacgugcugagcaccuucaucuccgccgcgcgccagggguucguggacagcgacgucgagaccaaggacgugguggagugccucaagcugucccaccagagcgacaucgaggucaccggcgacuccugcaacaacuacaugcugacguacaacaagguggagaacaugaccccccgggaccucggggccugcaucgacugcagcgcccgccacaucaacgcccagguggccaagucccacaacaucgcgcugaucuggaacgucaaggacuucaugagccuguccgagcagcuccggaagcagauccgcagcgccgccaagaagaacaaccugcccuucaagcugaccugcgccaccacgcgccagguggugaacgucgugaccaccaagaucgcccucaagggcgggugaggacuaguuauaagacugacuagcccgaugggccucccaacgggcccuccuccccuccuugcaccgagauuaauaaaaaaaaaaaaaaaaaaaaaaaaaaaaaaaaaaaaaaaaaaaaaaaaaaaaaaaaaaaaaaaaugcaucccccccccccccccccccccccccccccccaaaggcucuuuucagagccaccagaauu

SEQ ID NO: 21796 - RNA, 6058 nt, Artificial Sequence
  SARS-CoV-2__MT641485.1__non-structural protein 3 (NSP3) mRNA gc
aggagaaagcuuaccauggcccccaccaaggugaccuucggcgacgacacggucaucgaggugcagggguacaagagcgugaacaucaccuucgagcuggacgagcgcaucgacaagguccucaacgagaagugcuccgccuacaccguggagcugggcaccgaggugaacgaguucgcgugcgucguggccgacgccgugaucaagacgcugcagccggucagcgagcuccugaccccccuggggaucgaccucgacgagugguccauggccaccuacuaccuguucgacgagagcggcgaguucaagcuggccucccacauguacugcagcuucuacccccccgacgaggacgaggaggagggggacugcgaggaggaggaguucgagccguccacccaguacgaguacggcacggaggacgacuaccagggcaagccccucgaguucggggcgaccagcgccgcccugcagcccgaggaggagcaggaggaggacuggcuggacgacgacucccagcagaccgugggccagcaggacgggagcgaggacaaccagaccacgaccauccagaccaucguggagguccagccccagcucgagauggagcugaccccgguggugcagacgaucgaggucaacuccuucagcggcuaccugaagcucaccgacaacguguacaucaagaacgccgacaucguggaggaggcgaagaaggucaagcccaccgugguggucaacgccgccaacguguaccugaagcacgggggcggcguggccggggcccugaacaaggcgaccaacaacgccaugcaggucgaguccgacgacuacaucgccacgaacggcccccucaagguggggggcagcugcguccuguccggccacaaccuggccaagcacugccuccacgugguggggcccaacgucaacaagggcgaggacauccagcugcugaagagcgccuacgagaacuucaaccagcacgaggugcuccuggcgccgcugcucuccgccgggaucuucggcgccgaccccauccacagccugcgggugugcgucgacaccgugcgcaccaacguguaccuggccgucuucgacaagaaccucuacgacaagcugguguccagcuuccuggagaugaagagcgagaagcagguggagcagaagaucgccgagauccccaaggaggaggucaagcccuucaucaccgaguccaagccgagcguggagcagcggaagcaggacgacaacaagaucaaggcgugcguggaggaggucacgaccacccucgaggagaccaaguuccugacggagaaccugcuccuguacaucgacaucaacgggaaccugcaccccgacuccgccacccucgugagcgacaucgacaucaccuuccugaagaaggacgcccccuacaucgugggcgacgucgugcaggagggcgugcugaccgccgucgugauccccacgaagaaggccgggggcaccaccgagaugcucgcgaaggcccugcgcaaggugccgaccgacaacuacaucacgaccuaccccgggcagggccugaacggguacaccgucgaggaggccaagaccgugcucaagaagugcaaguccgccuucuacauccugcccagcaucaucuccaacgagaagcaggagauccugggcaccgugagcuggaaccuccgggagaugcuggcgcacgccgaggagacgcgcaagcugaugcccgucugcguggagaccaaggccaucguguccaccauccagcggaaguacaagggcaucaagauccaggagggggucguggacuacggcgcccgcuucuacuucuacaccagcaagacgaccguggccucccugaucaacacccucaacgaccugaacgagacccuggucacgaugccgcucggguacgugacccacggccugaaccuggaggaggcggcccgguacaugcgcagccucaaggugcccgccaccgucuccgugagcucccccgacgccgugaccgccuacaacggguaccugacgagcuccagcaagacccccgaggagcacuucaucgagaccaucucccuggcgggcagcuacaaggacuggagcuacuccggccagagcacccagcucgggaucgaguuccugaagcggggcgacaaguccgucuacuacacgagcaacccgaccaccuuccaccuggacggggaggugaucaccuucgacaaccucaagacgcugcugucccuccgcgaggugcggaccaucaaggucuucaccaccguggacaacaucaaccugcacacgcagguggucgacaugagcaugaccuacggccagcaguucggccccaccuaccuggacggggccgacgugaccaagaucaagccccacaacucccacgagggcaagacguucuacgugcucccgaacgacgacacccugcgcgucgaggccuucgaguacuaccacaccaccgaccccagcuuccuggggcgguacauguccgcccucaaccacacgaagaaguggaaguacccccaggugaacggccugaccagcaucaagugggccgacaacaacugcuaccuggcgaccgcccuccugacccugcagcagaucgagcucaaguucaaccccccggcccugcaggacgccuacuaccgcgcgcgggccggggaggccgccaacuucugcgcccugauccucgcguacugcaacaagacggugggcgagcugggcgacguccgcgagaccauguccuaccuguuccagcacgccaaccucgacagcugcaagcgggugcugaacgucgugugcaagaccugcgggcagcagcagaccacccugaagggcguggaggccgucauguacauggggacgcucuccuacgagcaguucaagaagggcgugcagauccccugcaccugcgggaagcaggccaccaaguaccuggugcagcaggagagccccuucgucaugauguccgcccccccggcgcaguacgagcugaagcacggcaccuucacgugcgccagcgaguacaccggcaacuaccagugcgggcacuacaagcacaucaccuccaaggagacccucuacugcaucgacggcgcccugcugacgaagagcagcgaguacaaggggcccaucaccgacguguucuacaaggagaacuccuacaccaccacgaucaagcccgugaccuacaagcucgacggcgucgugugcaccgagaucgaccccaagcuggacaacuacuacaagaaggacaacagcuacuucaccgagcagccgaucgaccuggugcccaaccagcccuaccccaacgccuccuucgacaacuucaaguucgucugcgacaacaucaaguucgccgacgaccucaaccagcugacgggguacaagaagccggcgagccgcgagcugaaggugaccuucuuccccgaccucaacggcgacguggucgccaucgacuacaagcacuacacccccuccuucaagaagggcgccaagcugcugcacaagcccaucguguggcacgugaacaacgccaccaacaaggcgacguacaagccgaacaccuggugcauccggugccucuggagcaccaagcccgucgagaccuccaacagcuucgacgugcugaaguccgaggacgcccaggggauggacaaccuggccugcgaggaccucaagcccgugagcgaggaggucguggagaaccccacgauccagaaggacgugcuggagugcaacgucaagaccaccgagguggugggcgacaucauccugaagccggccaacaacucccucaagaucaccgaggaggucgggcacacggaccugauggccgcguacguggacaacagcucccugaccaucaagaagcccaacgagcucagccgcgugcugggccugaagacccucgccacccacgggcuggccgccgucaacuccgugcccugggacacgaucgccaacuacgcgaagccguuccugaacaagguggucagcaccaccaccaacaucgugacgcgcugccucaaccgggugugcaccaacuacaugcccuacuucuucacccugcugcuccagcugugcaccuucacccgcuccacgaacagccggaucaaggccuccaugcccaccaccaucgccaagaacaccgucaagagcgugggcaaguucugccuggaggccagcuucaacuaccucaagucccccaacuucagcaagcugaucaacaucaucaucugguuccugcuccuguccgugugccugggcagccucaucuacuccacggccgcgcuggggguccugaugagcaaccucggcaugccguccuacugcaccggguaccgcgagggcuaccugaacagcaccaacgugaccaucgccacguacugcaccggcuccauccccugcagcgugugccuguccgggcucgacagccuggacaccuaccccucccuggagaccauccagaucacgaucagcuccuucaagugggaccucaccgccuucggccuggucgccgagugguuccuggccuacauccucuucacccgguucuucuacgugcuggggcuggcggccaucaugcagcucuucuucagcuacuucgccgugcacuucaucuccaacagcuggcugauguggcugaucaucaaccugguccagauggcccccaucuccgcgauggugcgcauguacaucuucuucgccagcuucuacuacguguggaagagcuacguccacgugguggacggcugcaacuccagcaccugcaugaugugcuacaagcggaaccgcgccacgcgggucgagugcaccaccaucgugaacgggguccgcaaguccuucuacguguacgccaacggcggcaagggguucugcaagcuccacaacuggaacugcgugaacugcgacaccuucugcgccggcagcacguucaucuccgacgaggucgcgcgggaccugagccugcaguucaagcgcccgaucaaccccaccgaccaguccagcuacaucguggacuccgugaccgucaagaacgggagcauccaccucuacuucgacaaggccggccagaagaccuacgagcggcacucccugagccacuucgugaaccuggacaaccuccgcgccaacaacacgaaggggucccugcccaucaacgugaucgucuucgacggcaagagcaagugcgaggaguccagcgccaaguccgccagcguguacuacucccagcugaugugccagcccauccuccugcuggaccaggcgcucgugagcgacgucggcgacagcgccgagguggccgugaagauguucgacgccuacgucaacaccuucuccagcaccuucaacgugccgauggagaagcugaagacccugguggccacggcggaggccgagcucgccaagaacgucucccuggacaacgugcugagcaccuucaucuccgccgcgcggcagggguucguggacagcgacgucgagaccaaggacgugguggagugccucaagcugucccaccagagcgacaucgaggucaccggcgacuccugcaacaacuacaugcugacguacaacaagguggagaacaugaccccccgcgaccucggggccugcaucgacugcagcgcccggcacaucaacgcccagguggccaagucccacaacaucgcgcugaucuggaacgucaaggacuucaugagccuguccgagcagcuccgcaagcagauccggagcgccgccaagaagaacaaccugcccuucaagcugaccugcgccaccacgcgccagguggugaacgucgugaccaccaagaucgcccucaagggcgggugaggacuaguuauaagacugacuagcccgaugggccucccaacgggcccuccuccccuccuugcaccgagauuaauaaaaaaaaaaaaaaaaaaaaaaaaaaaaaaaaaaaaaaaaaaaaaaaaaaaaaaaaaaaaaaaaugcaucccccccccccccccccccccccccccccccaaaggcucuuuucagagccaccagaauu

SEQ ID NO: 21797 - RNA, 6058 nt, Artificial Sequence
  SARS-CoV-2__MT641489.1__non-structural protein 3 (NSP3) mRNA gc
aggagaaagcuuaccauggcccccaccaaggugaccuucggcgacgacacggucaucgaggugcagggguacaagagcgugaacaucaccuucgagcuggacgagcgcaucgacaagguccucaacgagaagugcuccgccuacaccguggagcugggcaccgaggugaacgaguucgcgugcgucguggccgacgccgugaucaagacgcugcagccggucagcgagcuccugaccccccuggggaucgaccucgacgagugguccauggccaccuacuaccuguucgacgagagcggcgaguucaagcuggccucccacauguacugcagcuucuacccccccgacgaggacgaggaggagggggacugcgaggaggaggaguucgagccguccacccaguacgaguacggcacggaggacgacuaccagggcaagccccucgaguucggggcgaccagcgccgcccugcagcccgaggaggagcaggaggaggacuggcuggacgacgacucccagcagaccgugggccagcaggacgggagcgaggacaaccagaccacgaccauccagaccaucguggagguccagccccagcucgagauggagaucaccccgguggugcagacgaucgaggucaacuccuucagcggcuaccugaagcugaccgacaacguguacaucaagaacgccgacaucguggaggaggcgaagaaggucaagcccaccgugguggucaacgccgccaacguguaccucaagcacgggggcggcguggccggggcccugaacaaggcgaccaacaacgccaugcaggucgaguccgacgacuacaucgccacgaacggcccccugaagguggggggcagcugcguccucuccggccacaaccuggccaagcacugccugcacgugguggggcccaacgucaacaagggcgaggacauccagcuccugaagagcgccuacgagaacuucaaccagcacgaggugcugcucgcgccgcugcuguccgccgggaucuucggcgccgaccccauccacagccuccgggugugcgucgacaccgugcgcaccaacguguaccuggccgucuucgacaagaaccuguacgacaagcucguguccagcuuccuggagaugaagagcgagaagcagguggagcagaagaucgccgagauccccaaggaggaggucaagcccuucaucaccgaguccaagccgagcguggagcagcggaagcaggacgacaagaagaucaaggcgugcguggaggaggucacgaccacccuggaggagaccaaguuccucacgcugaaccugcuccuguacaucgacaucaacgggaaccugcaccccgacuccgccacccucgugagcgacaucgacaucaccuuccugaagaaggacgcccccuacaucgugggcgacgucgugcaggagggcgugcugaccgccgucgugauccccacgaagaaggccgggggcaccaccgagaugcucgcgaaggcccugcgcaaggugccgaccgacaacuacaucacgaccuaccccgggcagggccugaacggguacaccgucgaggaggccaagaccgugcucaagaagugcaaguccgccuucuacauccugcccagcaucaucuccaacgagaagcaggagauccugggcaccgugagcuggaaccuccgggagaugcuggcgcacgccgaggagacgcgcaagcugaugcccgucugcguggagaccaaggccaucguguccaccauccagcggaaguacaagggcaucaagauccaggagggggucguggacuacggcgcccgcuucuacuucuacaccagcaagacgaccguggccucccugaucaacacccucaacgaccugaacgagacccuggucacgaugccgcucggguacgugacccacggccugaaccuggaggaggcggcccgguacaugcgcagccucaaggugcccgccaccgucuccgugagcucccccgacgccgugaccgccuacaacggguaccugacgagcuccagcaagacccccgaggagcacuucaucgagaccaucucccuggcgggcagcuacaaggacuggagcuacuccggccagagcacccagcucgggaucgaguuccugaagcggggcgacaaguccgucuacuacacgagcaacccgaccaccuuccaccuggacggggaggugaucaccuucgacaaccucaagacgcugcugucccuccgcgaggugcggaccaucaaggucuucaccaccguggacaacaucaaccugcacacgcagguggucgacaugagcaugaccuacggccagcaguucggccccaccuaccuggacggggccgacgugaccaagaucaagccccacaacucccacgagggcaagacguucuacgugcucccgaacgacgacacccugcgcgucgaggccuucgaguacuaccacaccaccgaccccagcuuccuggggcgguacauguccgcccucaaccacacgaagaaguggaaguacccccaggugaacggccugaccagcaucaagugggccgacaacaacugcuaccuggcgaccgcccuccugacccugcagcagaucgagcucaaguucaaccccccggcccugcaggacgccuacuaccgcgcgcgggccggggaggccgccaacuucugcgcccugauccucgcguacugcaacaagacggugggcgagcugggcgacguccgcgagaccauguccuaccuguuccagcacgccaaccucgacagcugcaagcgggugcugaacgucgugugcaagaccugcgggcagcagcagaccacccugaagggcguggaggccgucauguacauggggacgcucuccuacgagcaguucaagaagggcgugcagauccccugcaccugcgggaagcaggccaccaaguaccuggugcagcaggagagccccuucgucaugauguccgcccccccggcgcaguacgagcugaagcacggcaccuucacgugcgccagcgaguacaccggcaacuaccagugcgggcacuacaagcacaucaccuccaaggagacccucuacugcaucgacggcgcccugcugacgaagagcagcgaguacaaggggcccaucaccgacguguucuacaaggagaacuccuacaccaccacgaucaagcccgugaccuacaagcucgacggcgucgugugcaccgagaucgaccccaagcuggacaacuacuacaagaaggacaacagcuacuucaccgagcagccgaucgaccuggugcccaaccagcccuaccccaacgccuccuucgacaacuucaaguucgucugcgacaacaucaaguucgccgacgaccucaaccagcugacgggguacaagaagccggcgagccgcgagcugaaggugaccuucuuccccgaccucaacggcgacguggucgccaucgacuacaagcacuacacccccuccuucaagaagggcgccaagcugcugcacaagcccaucguguggcacgugaacaacgccaccaacaaggcgacguacaagccgaacaccuggugcauccggugccucuggagcaccaagcccgucgagaccuccaacagcuucgacgugcugaaguccgaggacgcccaggggauggacaaccuggccugcgaggaccucaagcccgugagcgaggaggucguggagaaccccacgauccagaaggacgugcuggagugcaacgucaagaccaccgagguggugggcgacaucauccugaagccggccaacaacucccucaagaucaccgaggaggucgggcacacggaccugauggccgcguacguggacaacagcucccugaccaucaagaagcccaacgagcucagccgcgugcugggccugaagacccucgccacccacgggcuggccgccgucaacuccgugcccugggacacgaucgccaacuacgcgaagccguuccugaacaagguggucagcaccaccaccaacaucgugacgcgcugccucaaccgggugugcaccaacuacaugcccuacuucuucacccugcugcuccagcugugcaccuucacccgcuccacgaacagccggaucaaggccuccaugcccaccaccaucgccaagaacaccgucaagagcgugggcaaguucugccuggaggccagcuucaacuaccucaagucccccaacuucagcaagcugaucaacaucaucaucugguuccugcuccuguccgugugccugggcagccucaucuacuccacggccgcgcuggggguccugaugagcaaccucggcaugccguccuacugcaccggguaccgcgagggcuaccugaacagcaccaacgugaccaucgccacguacugcaccggcuccauccccugcagcgugugccuguccgggcucgacagccuggacaccuaccccucccuggagaccauccagaucacgaucagcuccuucaagugggaccucaccgccuucggccuggucgccgagugguuccuggccuacauccucuucacccgguucuucuacgugcuggggcuggcggccaucaugcagcucuucuucagcuacuucgccgugcacuucaucuccaacagcuggcugauguggcugaucaucaaccugguccagauggcccccaucuccgcgauggugcgcauguacaucuucuucgccagcuucuacuacguguggaagagcuacguccacgugguggacggcugcaacuccagcaccugcaugaugugcuacaagcggaaccgcgccacgcgggucgagugcaccaccaucgugaacgggguccgccgguccuucuacguguacgccaacggcggcaagggguucugcaagcuccacaacuggaacugcgugaacugcgacaccuucugcgccggcagcacguucaucuccgacgaggucgcgcgcgaccugagccugcaguucaagcggccgaucaaccccaccgaccaguccagcuacaucguggacuccgugaccgucaagaacgggagcauccaccucuacuucgacaaggccggccagaagaccuacgagcgccacucccugagccacuucgugaaccuggacaaccuccgggccaacaacacgaaggggucccugcccaucaacgugaucgucuucgacggcaagagcaagugcgaggaguccagcgccaaguccgccagcguguacuacucccagcugaugugccagcccauccuccugcuggaccaggcgcucgugagcgacgucggcgacagcgccgagguggccgugaagauguucgacgccuacgucaacaccuucuccagcaccuucaacgugccgauggagaagcugaagacccugguggccacggcggaggccgagcucgccaagaacgucucccuggacaacgugcugagcaccuucaucuccgccgcgcgccagggguucguggacagcgacgucgagaccaaggacgugguggagugccucaagcugucccaccagagcgacaucgaggucaccggcgacuccugcaacaacuacaugcugacguacaacaagguggagaacaugaccccccgggaccucggggccugcaucgacugcagcgcccgccacaucaacgcccagguggccaagucccacaacaucgcgcugaucuggaacgucaaggacuucaugagccuguccgagcagcuccggaagcagauccgcagcgccgccaagaagaacaaccugcccuucaagcugaccugcgccaccacgcgccagguggugaacgucgugaccaccaagaucgcccucaagggcgggugaggacuaguuauaagacugacuagcccgaugggccucccaacgggcccuccuccccuccuugcaccgagauuaauaaaaaaaaaaaaaaaaaaaaaaaaaaaaaaaaaaaaaaaaaaaaaaaaaaaaaaaaaaaaaaaaugcaucccccccccccccccccccccccccccccccaaaggcucuuuucagagccaccagaauu

SEQ ID NO: 21798 - RNA, 6058 nt, Artificial Sequence
  SARS-CoV-2__MT641492.1__non-structural protein 3 (NSP3) mRNA gc
aggagaaagcuuaccauggcccccaccaaggugaccuucggcgacgacacggucaucgaggugcagggguacaagagcgugaacaucaccuucgagcuggacgagcgcaucgacaagguccucaacgagaagugcuccgccuacaccguggagcugggcaccgaggugaacgaguucgcgugcgucguggccgacgccgugaucaagacgcugcagccggucagcgagcuccugaccccccuggggaucgaccucgacgagugguccauggccaccuacuaccuguucgacgagagcggcgaguucaagcuggccucccacauguacugcagcuucuacccccccgacgaggacgaggaggagggggacugcgaggaggaggaguucgagccguccacccaguacgaguacggcacggaggacgacuaccagggcaagccccucgaguucggggcgaccagcgccgcccugcagcccgaggaggagcaggaggaggacuggcuggacgacgacucccagcagaccgugggccagcaggacgggagcgaggacaaccagaccacgaccauccagaccaucguggagguccagccccagcucgagauggagcugaccccgguggugcagacgaucgaggucaacuccuucagcggcuaccugaagcucaccgacaacguguacaucaagaacgccgacaucguggaggaggcgaagaaggucaagcccaccgugguggucaacgccgccaacguguaccugaagcacgggggcggcguggccggggcccugaacaaggcgaccaacaacgccaugcaggucgaguccgacgacuacaucgccacgaacggcccccucaagguggggggcagcugcguccuguccggccacaaccuggccaagcacugccuccacgugguggggcccaacgucaacaagggcgaggacauccagcugcugaagagcgccuacgagaacuucaaccagcacgaggugcuccuggcgccgcugcucuccgccgggaucuucggcgccgaccccauccacagccugcgggugugcgucgacaccgugcgcaccaacguguaccuggccgucuucgacaagaaccucuacgacaagcugguguccagcuuccuggagaugaagagcgagaagcagguggagcagaagaucgccgagauccccaaggaggaggucaagcccuucaucaccgaguccaagccgagcguggagcagcggaagcaggacgacaagaagaucaaggcgugcguggaggaggucacgaccacccucgaggagaccaaguuccugacggagaaccugcuccuguacaucgacaucaacgggaaccugcaccccgacuccgccacccucgugagcgacaucgacaucaccuuccugaagaaggacgcccccuacaucgugggcgacgucgugcaggagggcgugcugaccgccgucgugauccccacgaagaaggccgggggcaccaccgagaugcucgcgaaggcccugcgcaaggugccgaccgacaacuacaucacgaccuaccccgggcagggccugaacggguacaccgucgaggaggccaagaccgugcucaagaagugcaaguccgccuucuacauccugcccagcaucaucuccaacgagaagcaggagauccugggcaccgugagcuggaaccuccgggagaugcuggcgcacgccgaggagacgcgcaagcugaugcccgucugcguggagaccaaggccaucguguccaccauccagcggaaguacaagggcaucaagauccaggagggggucguggacuacggcgcccgcuucuacuucuacaccagcaagacgaccguggccucccugaucaacacccucaacgaccugaacgagacccuggucacgaugccgcucggguacgugacccacggccugaaccuggaggaggcggcccgguacaugcgcagccucaaggugcccgccaccgucuccgugagcucccccgacgccgugaccgccuacaacggguaccugacgagcuccagcaagacccccgaggagcacuucaucgagaccaucucccuggcgggcagcuacaaggacuggagcuacuccggccagagcacccagcucgggaucgaguuccugaagcggggcgacaaguccgucuacuacacgagcaacccgaccaccuuccaccuggacggggaggugaucaccuucgacaaccucaagacgcugcugucccuccgcgaggugcggaccaucaaggucuucaccaccguggacaacaucaaccugcacacgcagguggucgacaugagcaugaccuacggccagcaguucggccccaccuaccuggacggggccgacgugaccaagaucaagccccacaacucccacgagggcaagacguucuacgugcucccgaacgacgacacccugcgcgucgaggccuucgaguacuaccacaccaccgaccccagcuuccuggggcgguacauguccgcccucaaccacacgaagaaguggaaguacccccaggugaacggccugaccagcaucaagugggccgacaacaacugcuaccuggcgaccgcccuccugacccugcagcagaucgagcucaaguucaaccccccggcccugcaggacgccuacuaccgcgcgcgggccggggaggccgccaacuucugcgcccugauccucgcguacugcaacaagacggugggcgagcugggcgacguccgcgagaccauguccuaccuguuccagcacgccaaccucgacagcugcaagcgggugcugaacgucgugugcaagaccugcgggcagcagcagaccacccugaagggcguggaggccgucauguacauggggacgcucuccuacgagcaguucaagaagggcgugcagauccccugcaccugcgggaagcaggccaccaaguaccuggugcagcaggagagccccuucgucaugauguccgcccccccggcgcaguacgagcugaagcacggcaccuucacgugcgccagcgaguacaccggcaacuaccagugcgggcacuacaagcacaucaccuccaaggagacccucuacugcaucgacggcgcccugcugacgaagagcagcgaguacaaggggcccaucaccgacguguucuacaaggagaacuccuacaccaccacgaucaagcccgugaccuacaagcucgacggcgucgugugcaccgagaucgaccccaagcuggacaacuacuacaagaaggacaacagcuacuucaccgagcagccgaucgaccuggugcccaaccagcccuaccccaacgccuccuucgacaacuucaaguucgucugcgacaacaucaaguucgccgacgaccucaaccagcugacgggguacaagaagccggcgagccgcgagcugaaggugaccuucuuccccgaccucaacggcgacguggucgccaucgacuacaagcacuacacccccuccuucaagaagggcgccaagcugcugcacaagcccaucguguggcacgugaacaacgccaccaacaaggcgacguacaagccgaacaccuggugcauccggugccucuggagcaccaagcccgucgagaccuccaacagcuucgacgugcugaaguccgaggacgcccaggggauggacaaccuggccugcgaggaccucaagcccgugagcgaggaggucguggagaaccccacgauccagaaggacgugcuggagugcaacgucaagaccaccgagguggugggcgacaucauccugaagccggccaacaacucccucaagaucaccgaggaggucgggcacacggaccugauggccgcguacguggacaacagcucccugaccaucaagaagcccaacgagcucagccgcgugcugggccugaagacccucgccacccacgggcuggccgccgucaacuccgugcccugggacacgaucgccaacuacgcgaagccguuccugaacaagguggucagcaccaccaccaacaucgugacgcgcugccucaaccgggugugcaccaacuacaugcccuacuucuucacccugaugcugcagcucugcaccuucacccgcuccacgaacagccggaucaaggccuccaugcccaccaccaucgccaagaacaccgucaagagcgugggcaaguucugccuggaggccagcuucaacuaccugaagucccccaacuucagcaagcucaucaacaucaucaucugguuccugcugcucuccgugugccugggcagccugaucuacuccacggccgcgcucgggguccugaugagcaaccugggcaugccguccuacugcaccggguaccgcgagggcuaccucaacagcaccaacgugaccaucgccacguacugcaccggcuccauccccugcagcgugugccuguccgggcuggacagccucgacaccuaccccucccuggagaccauccagaucacgaucagcuccuucaagugggaccugaccgccuucggccucgucgccgagugguuccuggccuacauccuguucacccgguucuucuacgugcucgggcuggcggccaucaugcagcuguucuucagcuacuucgccgugcacuucaucuccaacagcuggcucauguggcugaucaucaaccugguccagauggcccccaucuccgcgauggugcgcauguacaucuucuucgccagcuucuacuacguguggaagagcuacguccacgugguggacggcugcaacuccagcaccugcaugaugugcuacaagcggaaccgcgccacgcgggucgagugcaccaccaucgugaacgggguccgccgguccuucuacguguacgccaacggcggcaagggguucugcaagcugcacaacuggaacugcgugaacugcgacaccuucugcgccggcagcacguucaucuccgacgaggucgcgcgcgaccucagccugcaguucaagcggccgaucaaccccaccgaccaguccagcuacaucguggacuccgugaccgucaagaacgggagcauccaccuguacuucgacaaggccggccagaagaccuacgagcgccacucccucagccacuucgugaaccuggacaaccugcgggccaacaacacgaaggggucccuccccaucaacgugaucgucuucgacggcaagagcaagugcgaggaguccagcgccaaguccgccagcguguacuacucccagcugaugugccagcccauccugcuccuggaccaggcgcuggugagcgacgucggcgacagcgccgagguggccgugaagauguucgacgccuacgucaacaccuucuccagcaccuucaacgugccgauggagaagcucaagacccugguggccacggcggaggccgagcuggccaagaacgucucccucgacaacgugcugagcaccuucaucuccgccgcgcgccagggguucguggacagcgacgucgagaccaaggacgugguggagugccugaagcucucccaccagagcgacaucgaggucaccggcgacuccugcaacaacuacaugcugacguacaacaagguggagaacaugaccccccgggaccugggggccugcaucgacugcagcgcccgccacaucaacgcccagguggccaagucccacaacaucgcgcucaucuggaacgucaaggacuucaugagccuguccgagcagcugcggaagcagauccgcagcgccgccaagaagaacaaccuccccuucaagcugaccugcgccaccacgcgccagguggugaacgucgugaccaccaagaucgcccugaagggcgggugaggacuaguuauaagacugacuagcccgaugggccucccaacgggcccuccuccccuccuugcaccgagauuaauaaaaaaaaaaaaaaaaaaaaaaaaaaaaaaaaaaaaaaaaaaaaaaaaaaaaaaaaaaaaaaaaugcaucccccccccccccccccccccccccccccccaaaggcucuuuucagagccaccagaauu

SEQ ID NO: 21799 - RNA, 6058 nt, Artificial Sequence
  SARS-CoV-2__MT641496.1__non-structural protein 3 (NSP3) mRNA gc
aggagaaagcuuaccauggcccccaccaaggugaccuucggcgacgacacggucaucgaggugcagggguacaagagcgugaacaucaccuucgagcuggacgagcgcaucgacaagguccucaacgagaagugcuccgccuacaccguggagcugggcaccgaggugaacgaguucgcgugcgucguggccgacgccgugaucaagacgcugcagccggucagcgagcuccugaccccccuggggaucgaccucgacgagugguccauggccaccuacuaccuguucgacgagagcggcgaguucaagcuggccucccacauguacugcagcuucuacccccccgacgaggacgaggaggagggggacugcgaggaggaggaguucgagccguccacccaguacgaguacggcacggaggacgacuaccagggcaagccccucgaguucggggcgaccagcgccgcccugcagcccgaggaggagcaggaggaggacuggcuggacgacgacucccagcagaccgugggccagcaggacgggagcgaggacaaccagaccacgaccauccagaccaucguggagguccagccccagcucgagauggagcugaccccgguggugcagacgaucgaggucaacuccuucagcggcuaccugaagcucaccgacaacguguacaucaagaacgccgacaucguggaggaggcgaagaaggucaagcccaccgugguggucaacgccgccaacguguaccugaagcacgggggcggcguggccggggcccugaacaaggcgaccaacaacgccaugcaggucgaguccgacgacuacaucgccacgaacggcccccucaagguggggggcagcugcguccuguccggccacaaccuggccaagcacugccuccacgugguggggcccaacgucaacaagggcgaggacauccagcugcugaagagcgccuacgagaacuucaaccagcacgaggugcuccuggcgccgcugcucuccgccgggaucuucggcgccgaccccauccacagccugcgggugugcgucgacaccgugcgcaccaacguguaccuggccgucuucgacaagaaccucuacgacaagcugguguccagcuuccuggagaugaagagcgagaagcagguggagcagaagaucgccgagauccccaaggaggaggucaagcccuucaucaccgaguccaagccgagcguggagcagcggaagcaggacgacaagaagaucaaggcgugcguggaggaggucacgaccacccucgaggagaccaaguuccugacggagaaccugcuccuguacaucgacaucaacgggaaccugcaccccgacuccgccacccucgugagcgacaucgacaucaccuuccugaagaaggacgcccccuacaucgugggcgacgucgugcaggagggcgugcugaccgccgucgugauccccacgaagaaggccgggggcaccaccgagaugcucgcgaaggcccugcgcaaggugccgaccgacaacuacaucacgaccuaccccgggcagggccugaacggguacaccgucgaggaggccaagaccgugcucaagaagugcaaguccgccuucuacauccugcccagcaucaucuccaacgagaagcaggagauccugggcaccgugagcuggaaccuccgggagaugcuggcgcacgccgaggagacgcgcaagcugaugcccgucugcguggagaccaaggccaucguguccaccauccagcggaaguacaagggcaucaagauccaggagggggucguggacuacggcgcccgcuucuacuucuacaccagcaagacgaccguggccucccugaucaacacccucaacgaccugaacgagacccuggucacgaugccgcucggguacgugacccacggccugaaccuggaggaggcggcccgguacaugcgcagccucaaggugcccgccaccgucuccgugagcucccccgacgccgugaccgccuacaacggguaccugacgagcuccagcaagacccccgaggagcacuucaucgagaccaucucccuggcgggcagcuacaaggacuggagcuacuccggccagagcacccagcucgggaucgaguuccugaagcggggcgacaaguccgucuacuacacgagcaacccgaccaccuuccaccuggacggggaggugaucaccuucgacaaccucaagacgcugcugucccuccgcgaggugcggaccaucaaggucuucaccaccguggacaacaucaaccugcacacgcagguggucgacaugagcaugaccuacggccagcaguucggccccaccuaccuggacggggccgacgugaccaagaucaagccccacaacucccacgagggcaagacguucuacgugcucccgaacgacgacacccugcgcgucgaggccuucgaguacuaccacaccaccgaccccagcuuccuggggcgguacauguccgcccucaaccacacgaagaaguggaaguacccccaggugaacggccugaccagcaucaagugggccgacaacaacugcuaccuggcgaccgcccuccugacccugcagcagaucgagcucaaguucaaccccccggcccugcaggacgccuacuaccgcgcgcgggccggggaggccgccaacuucugcgcccugauccucgcguacugcaacaagacggugggcgagcugggcgacguccgcgagaccauguccuaccuguuccagcacgccaaccucgacagcugcaagcgggugcugaacgucgugugcaagaccugcgggcagcagcagaccacccugaagggcguggaggccgucauguacauggggacgcucuccuacgagcaguucaagaagggcgugcagauccccugcaccugcgggaagcaggccaccaaguaccuggugcagcaggagagccccuucgucaugauguccgcccccccggcgcaguacgagcugaagcacggcaccuucacgugcgccagcgaguacaccggcaacuaccagugcgggcacuacaagcacaucaccuccaaggagacccucuacugcaucgacggcgcccugcugacgaagagcagcgaguacaaggggcccaucaccgacguguucuacaaggagaacuccuacaccaccacgaucaagcccgugaccuacaagcucgacggcgucgugugcaccgagaucgaccccaagcuggacaacuacuacaagaaggacaacagcuacuucaccgagcagccgaucgaccuggugcccaaccagcccuaccccaacgccuccuucgacaacuucaaguucgucugcgacaacaucaaguucgccgacgaccucaaccagcugacgggguacaagaagccggcgagccgcgagcugaaggugaccuucuuccccgaccucaacggcgacguggucgccaucgacuacaagcacuacacccccuccuucaagaagggcgccaagcugcugcacaagcccaucguguggcacgugaacaacgccaccaacaaggcgacguacaagccgaacaccuggugcauccggugccucuggagcaccaagcccgucgagaccuccaacagcuucgacgugcugaaguccgaggacgcccaggggauggacaaccuggccugcgaggaccucaagcccgugagcgaggaggucguggagaaccccacgauccagaaggacgugcuggagugcaacgucaagaccaccgagguggugggcgacaucauccugaagccggccaacaacucccucaagaucaccgaggaggucgggcacacggaccugauggccgcguacguggacaacagcucccugaccaucaagaagcccaacgagcucagccgcgugcugggccugaagacccucgccacccacgggcuggccgccgucaacuccgugcccugggacacgaucgccaacuacgcgaagccguuccugaacaagguggucagcaccaccaccaacaucgugacgcgcugccucaaccgggugugcaccaacuacaugcccuacuucuucacccugcugcuccagcugugcaccuucacccgcuccacgaacagccggaucaaggccuccaugcccaccaccaucgccaagaacaccgucaagagcgugggcaaguucugccuggaggccagcuucaacuaccucaagucccccaacuucagcaagcugaucaacaucaucaucugguuccugcuccuguccgugugccugggcagccucaucuacuccacggccgcgcuggggguccugaugagcaaccucggcaugccguccuacugcaccggguaccgcgagggcuaccugaacagcaccaacgugaccaucgccacguacugcaccggcuccauccccugcagcgugugccuguccgggcucgacagccuggacaccuaccccucccuggagaccauccagaucacgaucagcuccuucaagugggaccucaccgccuucggccuggucgccgagugguuccuggccuacauccucuucacccgguucuucuacgugcuggggcuggcggccaucaugcagcucuucuucagcuacuucgccgugcacuucaucuccaacagcuggcugauguggcugaucaucaaccugguccagauggcccccaucuccgcgauggugcgcauguacaucuucuucgccagcuucuacuacguguggaagagcuacguccacgugguggacggcugcaacuccagcaccugcaugaugugcuacaagcggaaccgcgccacgcgggucgagugcaccaccaucgugaacgggguccgccgguccuucuacguguacgccaacggcggcaagggguucugcaagcuccacaacuggaacugcgugaacugcgacaccuucugcgccggcagcacguucaucuccgacgaggucgcgcgcgaccugagccugcaguucaagcggccgaucaaccccaccgaccaguccagcuacaucguggacuccgugaccgucaacaacgggagcauccaccucuacuucgacaaggccggccagaagaccuacgagcgccacucccugagccacuucgugaaccuggacaaccuccgggccaacaacacgaaggggucccugcccaucaacgugaucgucuucgacggcaagagcaagugcgaggaguccagcgccaaguccgccagcguguacuacucccagcugaugugccagcccauccuccugcuggaccaggcgcucgugagcgacgucggcgacagcgccgagguggccgugaagauguucgacgccuacgucaacaccuucuccagcaccuucaacgugccgauggagaagcugaagacccugguggccacggcggaggccgagcucgccaagaacgucucccuggacaacgugcugagcaccuucaucuccgccgcgcgccagggguucguggacagcgacgucgagaccaaggacgugguggagugccucaagcugucccaccagagcgacaucgaggucaccggcgacuccugcaacaacuacaugcugacguacaacaagguggagaacaugaccccccgggaccucggggccugcaucgacugcagcgcccgccacaucaacgcccagguggccaagucccacaacaucgcgcugaucuggaacgucaaggacuucaugagccuguccgagcagcuccggaagcagauccgcagcgccgccaagaagaacaaccugcccuucaagcugaccugcgccaccacgcgccagguggugaacgucgugaccaccaagaucgcccucaagggcgggugaggacuaguuauaagacugacuagcccgaugggccucccaacgggcccuccuccccuccuugcaccgagauuaauaaaaaaaaaaaaaaaaaaaaaaaaaaaaaaaaaaaaaaaaaaaaaaaaaaaaaaaaaaaaaaaaugcaucccccccccccccccccccccccccccccccaaaggcucuuuucagagccaccagaauu

SEQ ID NO: 21800 - RNA, 6058 nt, Artificial Sequence
  SARS-CoV-2__MT641501.1__non-structural protein 3 (NSP3) mRNA gc
aggagaaagcuuaccauggcccccaccaaggugaccuucggcgacgacacggucaucgaggugcagggguacaagagcgugaacaucaccuucgagcuggacgagcgcaucgacaagguccucaacgagaagugcuccgccuacaccguggagcugggcaccgaggugaacgaguucgcgugcgucguggccgacgccgugaucaagacgcugcagccggucagcgagcuccugaccccccuggggaucgaccucgacgagugguccauggccaccuacuaccuguucgacgagagcggcgaguucaagcuggccucccacauguacugcagcuucuacccccccgacgaggacgaggaggagggggacugcgaggaggaggaguucgagccguccacccaguacgaguacggcacggaggacgacuaccagggcaagccccucgaguucggggcgaccagcgccgcccugcagcccgaggaggagcaggaggaggacuggcuggacgacgacucccagcagaccgugggccagcaggacgggagcgaggacaaccagaccacgaccauccagaccaucguggagguccagccccagcucgagauggagcugaccccgguggugcagacgaucgaggucaacuccuucagcggcuaccugaagcucaccgacaacguguacaucaagaacgccgacaucguggaggaggcgaagaaggucaagcccaccgugguggucaacgccgccaacguguaccugaagcacgggggcggcguggccggggcccugaacaaggcgaccaacaacgccaugcaggucgaguccgacgacuacaucgccacgaacggcccccucaagguggggggcagcugcguccuguccggccacaaccuggccaagcacugccuccacgugguggggcccaacgucaacaagggcgaggacauccagcugcugaagagcgccuacgagaacuucaaccagcacgaggugcuccuggcgccgcugcucuccgccgggaucuucggcgccgaccccauccacagccugcgggugugcgucgacaccgugcgcaccaacguguaccuggccgucuucgacaagaaccucuacgacaagcugguguccagcuuccuggagaugaagagcgagaagcagguggagcagaagaucgccgagauccccaaggaggaggucaagcccuucaucaccgaguccaagccgagcguggagcagcggaagcaggacgacaagaagaucaaggcgugcguggaggaggucacgaccacccucgaggagaccaaguuccugacggagaaccugcuccuguacaucgacaucaacgggaaccugcaccccgacuccgccacccucgugagcgacaucgacaucaccuuccugaagaaggacgcccccuacaucgugggcgacgucgugcaggagggcgugcugaccgccgucgugauccccacgaagaaggccgggggcaccaccgagaugcucgcgaaggcccugcgcaaggugccgaccgacaacuacaucacgaccuaccccgggcagggccugaacggguacaccgucgaggaggccaagaccgugcucaagaagugcaaguccgccuucuacauccugcccagcaucaucuccaacgagaagcaggagauccugggcaccgugagcuggaaccuccgggagaugcuggcgcacgccgaggagacgcgcaagcugaugcccgucugcguggagaccaaggccaucguguccaccauccagcggaaguacaagggcaucaagauccaggagggggucguggacuacggcgcccgcuucuacuucuacaccagcaagacgaccguggccucccugaucaacacccucaacgaccugaacgagacccuggucacgaugccgcucggguacgugacccacggccugaaccuggaggaggcggcccgguacaugcgcagccucaaggugcccgccaccgucuccgugagcucccccgacgccgugaccgccuacaacggguaccugacgagcuccagcaagacccccgaggagcacuucaucgagaccaucucccuggcgggcagcuacaaggacuggagcuacuccggccagagcacccagcucgggaucgaguuccugaagcggggcgacaaguccgucuacuacacgagcaacccgaccaccuuccaccuggacggggaggugaucaccuucgacaaccucaagacgcugcugucccuccgcgaggugcggaccaucaaggucuucaccaccguggacaacaucaaccugcacacgcagguggucgacaugagcaugaccuacggccagcaguucggccccaccuaccuggacggggccgacgugaccaagaucaagccccacaacucccacgagggcaagacguucuacgugcucccgaacgacgacacccugcgcgucgaggccuucgaguacuaccacaccaccgaccccagcuuccuggggcgguacauguccgcccucaaccacacgaagaaguggaaguacccccaggugaacggccugaccagcaucaagugggccgacaacaacugcuaccuggcgaccgcccuccugacccugcagcagaucgagcucaaguucaaccccccggcccugcaggacgccuacuaccgcgcgcgggccggggaggccgccaacuucugcgcccugauccucgcguacugcaacaagacggugggcgagcugggcgacguccgcgagaccauguccuaccuguuccagcacgccaaccucgacagcugcaagcgggugcugaacgucgugugcaagaccugcgggcagcagcagaccacccugaagggcguggaggccgucauguacauggggacgcucuccuacgagcaguucaagaagggcgugcagauccccugcaccugcgggaagcaggccaccaaguaccuggugcagcaggagagccccuucgucaugauguccgcccccccggcgcaguacgagcugaagcacggcaccuucaucugcgccagcgaguacacgggcaacuaccagugcgggcacuacaagcacaucaccuccaaggagacccucuacugcaucgacggcgcccugcugaccaagagcagcgaguacaaggggcccaucacggacguguucuacaaggagaacuccuacaccaccaccaucaagcccgugacguacaagcucgacggcgucgugugcaccgagaucgaccccaagcuggacaacuacuacaagaaggacaacagcuacuucaccgagcagccgaucgaccuggugcccaaccagcccuaccccaacgccuccuucgacaacuucaaguucgucugcgacaacaucaaguucgccgacgaccucaaccagcugaccggguacaagaagccggcgagccgcgagcugaaggugacguucuuccccgaccucaacggcgacguggucgccaucgacuacaagcacuacacccccuccuucaagaagggcgccaagcugcugcacaagcccaucguguggcacgugaacaacgccaccaacaaggcgaccuacaagccgaacacguggugcauccggugccucuggagcaccaagcccgucgagaccuccaacagcuucgacgugcugaaguccgaggacgcccaggggauggacaaccuggccugcgaggaccucaagcccgugagcgaggaggucguggagaaccccaccauccagaaggacgugcuggagugcaacgucaagacgaccgagguggugggcgacaucauccugaagccggccaacaacucccucaagaucaccgaggaggucgggcacaccgaccugauggccgcguacguggacaacagcucccugacgaucaagaagcccaacgagcucagccgcgugcugggccugaagacccucgccacccacgggcuggccgccgucaacuccgugcccugggacaccaucgccaacuacgcgcgcccguuccugaacaagguggucagcacgaccaccaacaucgugacccggugccucaaccgcgugugcacgaacuacaugcccuacuucuucacccugcugcuccagcugugcaccuucacccgguccaccaacagccgcaucaaggccuccaugcccacgaccaucgccaagaacaccgucaagagcgugggcaaguucugccuggaggccagcuucaacuaccucaagucccccaacuucagcaagcugaucaacaucaucaucugguuccugcuccuguccgugugccugggcagccucaucuacuccaccgccgcgcuggggguccugaugagcaaccucggcaugccguccuacugcacgggguaccgggagggcuaccugaacagcaccaacgugaccaucgccaccuacugcacgggcuccauccccugcagcgugugccuguccgggcucgacagccuggacaccuaccccucccuggagaccauccagaucaccaucagcuccuucaagugggaccucacggccuucggccuggucgccgagugguuccuggccuacauccucuucacccgcuucuucuacgugcuggggcuggcggccaucaugcagcucuucuucagcuacuucgccgugcacuucaucuccaacagcuggcugauguggcugaucaucaaccugguccagauggcccccaucuccgcgauggugcggauguacaucuucuucgccagcuucuacuacguguggaagagcuacguccacgugguggacggcugcaacuccagcaccugcaugaugugcuacaagcgcaaccgggccacccgcgucgagugcacgaccaucgugaacgggguccggcgcuccuucuacguguacgccaacggcggcaagggguucugcaagcuccacaacuggaacugcgugaacugcgacaccuucugcgccggcagcaccuucaucuccgacgaggucgcgcgggaccugagccugcaguucaagcgcccgaucaaccccacggaccaguccagcuacaucguggacuccgugaccgucaagaacgggagcauccaccucuacuucgacaaggccggccagaagaccuacgagcggcacucccugagccacuucgugaaccuggacaaccuccgcgccaacaacaccaaggggucccugcccaucaacgugaucgucuucgacggcaagagcaagugcgaggaguccagcgccaaguccgccagcguguacuacucccagcugaugugccagcccauccuccugcuggaccaggcgcucgugagcgacgucggcgacagcgccgagguggccgugaagauguucgacgccuacgucaacacguucuccagcaccuucaacgugccgauggagaagcugaagacccugguggccaccgcggaggccgagcucgccaagaacgucucccuggacaacgugcugagcacguucaucuccgccgcgcggcagggguucguggacagcgacgucgagaccaaggacgugguggagugccucaagcugucccaccagagcgacaucgaggucaccggcgacuccugcaacaacuacaugcugaccuacaacaagguggagaacaugacgccccgcgaccucggggccugcaucgacugcagcgcccggcacaucaacgcccagguggccaagucccacaacaucgcgcugaucuggaacgucaaggacuucaugagccuguccgagcagcuccgcaagcagauccgcagcgccgccaagaagaacaaccugcccuucaagcugaccugcgccaccacccggcagguggugaacgucgugacgaccaagaucgcccucaagggcgggugaggacuaguuauaagacugacuagcccgaugggccucccaacgggcccuccuccccuccuugcaccgagauuaauaaaaaaaaaaaaaaaaaaaaaaaaaaaaaaaaaaaaaaaaaaaaaaaaaaaaaaaaaaaaaaaaugcaucccccccccccccccccccccccccccccccaaaggcucuuuucagagccaccagaauu

SEQ ID NO: 21801 - RNA, 6058 nt, Artificial Sequence
  SARS-CoV-2__MT641511.1__non-structural protein 3 (NSP3) mRNA gc
aggagaaagcuuaccauggcccccaccaaggugaccuucggcgacgacacggucaucgaggugcagggguacaagagcgugaacaucaccuucgagcuggacgagcgcaucgacaagguccucaacgagaagugcuccgccuacaccguggagcugggcaccgaggugaacgaguucgcgugcgucguggccgacgccgugaucaagacgcugcagccggucagcgagcuccugaccccccuggggaucgaccucgacgagugguccauggccaccuacuaccuguucgacgagagcggcgaguucaagcuggccucccacauguacugcagcuucuacccccccgacgaggacgaggaggagggggacugcgaggaggaggaguucgagccguccacccaguacgaguacggcacggaggacgacuaccagggcaagccccucgaguucggggcgaccagcgccgcccugcagcccgaggaggagcaggaggaggacuggcuggacgacgacucccagcagaccgugggccagcaggacgggagcgaggacaaccagaccacgaccauccagaccaucguggagguccagccccagcucgagauggagcugaccccgguggugcagacgaucgaggucaacuccuucagcggcuaccugaagcucaccgacaacguguacaucaagaacgccgacaucguggaggaggcgaagaaggucaagcccaccgugguggucaacgccgccaacguguaccugaagcacgggggcggcguggccggggcccugaacaaggcgaccaacaacgccaugcaggucgaguccgacgacuacaucgccacgaacggcccccucaagguggggggcagcugcguccuguccggccacaaccuggccaagcacugccuccacgugguggggcccaacgucaacaagggcgaggacauccagcugcugaagagcgccuacgagaacuucaaccagcacgaggugcuccuggcgccgcugcucuccgccgggaucuucggcgccgaccccauccacagccugcgggugugcgucgacaccgugcgcaccaacguguaccuggccgucuucgacaagaaccucuacgacaagcugguguccagcuuccuggagaugaagagcgagaagcagguggagcagaagaucgccgagauccccaaggaggaggucaagcccuucaucaccgaguccaagccgagcguggagcagcggaagcaggacgacaagaagaucaaggcgugcguggaggaggucacgaccacccucgaggagaccaaguuccugacggagaaccugcuccuguacaucgacaucaacgggaaccugcaccccgacuccgccacccucgugagcgacaucgacaucaccuuccugaagaaggacgcccccuacaucgugggcgacgucgugcaggagggcgugcugaccgccgucgugauccccacgaagaaggccgggggcaccaccgagaugcucgcgaaggcccugcgcaaggugccgaccgacaacuacaucacgaccuaccccgggcagggccugaacggguacaccgucgaggaggccaagaccgugcucaagaagugcaaguccgccuucuacauccugcccagcaucaucuccaacgagaagcaggagauccugggcaccgugagcuggaaccuccgggagaugcuggcgcacgccgaggagacgcgcaagcugaugcccgucugcguggagaccaaggccaucguguccaccauccagcggaaguacaagggcaucaagauccaggagggggucguggacuacggcgcccgcuucuacuucuacaccagcaagacgaccguggccucccugaucaacacccucaacgaccugaacgagacccuggucacgaugccgcucggguacgugacccacggccugaaccuggaggaggcggcccgguacaugcgcagccucaaggugcccgccaccgucuccgugagcucccccgacgccgugaccgccuacaacggguaccugacgagcuccagcaagacccccgaggagcacuucaucgagaccaucucccuggcgggcagcuacaaggacuggagcuacuccggccagagcacccagcucgggaucgaguuccugaagcggggcgacaaguccgucuacuacacgagcaacccgaccaccuuccaccuggacggggaggugaucaccuucgacaaccucaagacgcugcugucccuccgcgaggugcggaccaucaaggucuucaccaccguggacaacaucaaccugcacacgcagguggucgacaugagcaugaccuacggccagcaguucggccccaccuaccuggacggggccgacgugaccaagaucaagccccacaacucccacgagggcaagacguucuacgugcucccgaacgacgacacccugcgcgucgaggccuucgaguacuaccacaccaccgaccccagcuuccuggggcgguacauguccgcccucaaccacacgaagaaguggaaguacccccaggugaacggccugaccagcaucaagugggccgacaacaacugcuaccuggcgaccgcccuccugacccugcagcagaucgagcucaaguucaaccccccggcccugcaggacgccuacuaccgcgcgcgggccggggaggccgccaacuucugcgcccugauccucgcguacugcaacaagacggugggcgagcugggcgacguccgcgagaccauguccuaccuguuccagcacgccaaccucgacagcugcaagcgggugcugaacgucgugugcaagaccugcgggcagcagcagaccacccugaagggcguggaggccgucauguacauggggacgcucuccuacgagcaguucaagaagggcgugcagauccccugcaccugcgggaagcaggccaccaaguaccuggugcagcaggagagccccuucgucaugauguccgcccccccggcgcaguacgagcugaagcacggcaccuucacgugcgccagcgaguacaccggcaacuaccagugcgggcacuacaagcacaucaccuccaaggagacccucuacugcaucgacggcgcccugcugacgaagagcagcgaguacaaggggcccaucaccgacguguucuacaaggagaacuccuacaccaccacgaucaagcccgugaccuacaagcucgacggcgucgugugcaccgagaucgaccccaagcuggacaacuacuacaagaaggacaacagcuacuucaccgagcagccgaucgaccuggugcccaaccagcccuaccccaacgccuccuucgacaacuucaaguucgucugcgacaacaucaaguucgccgacgaccucaaccagcugacgggguacaagaagccggcgagccgcgagcugaaggugaccuucuuccccgaccucaacggcgacguggucgccaucgacuacaagcacuacacccccuccuucaagaagggcgccaagcugcugcacaagcccaucguguggcacgugaacaacgccaccaacaaggcgacguacaagccgaacaccuggugcauccggugccucuggagcaccaagcccgucgagaccuccaacagcuucgacgugcugaaguccgaggacgcccaggggauggacaaccuggccugcgaggaccucaagcccgugagcgaggaggucguggagaaccccacgauccagaaggacgugcuggagugcaacgucaagaccaccgagguggugggcgacaucauccugaagccggccaacaacucccucaagaucaccgaggaggucgggcacacggaccugauggccgcguacguggacaacagcucccugaccaucaagaagcccaacgagcucagccgcgugcugggccugaagacccucgccacccacgggcuggccgccgucaacuccgugcccugggacacgaucgccaacuacgcgaagccguuccugaacaagguggucagcaccaccaccaacaucgugacgcgcugccucaaccgggugugcaccaacuacaugcccuacuucuucacccugcugcuccagcugugcaccuucacccgcuccacgaacagccggaucaaggccuccaugcccaccaccaucgccaagaacaccgucaagagcgugggcaaguucugccuggaggccagcuucaacuaccucaagucccccaacuucagcaagcugaucaacaucaucaucugguuccugcuccuguccgugugccugggcagccucaucuacuccacggccgcgcuggggguccugaugagcaaccucggcaugccguccuacugcaccggguaccgcgagggcuaccugaacagcaccaacgugaccaucgccacguacugcaccggcuccauccccugcagcgugugccuguccgggcucgacagccuggacaccuaccccucccuggagaccauccagaucacgaucagcuccuucaagugggaccucaccgccuucggccuggucgccgagugguuccuggccuacauccucuucacccgguucuucuacgugcuggggcuggcggccaucaugcagcucuucuucagcuacuucgccgugcacuucaucuccaacagcuggcugauguggcugaucaucaaccugguccagauggcccccaucuccgcgauggugcgcauguacaucuucuucgccagcuucuacuacguguggaagagcuacguccacgugguggacggcugcaacuccagcaccugcaugaugugcuacaagcggaaccgcgccacgcgggucgagugcaccaccaucgugaacgggguccgccgguccuucuacguguacgccaacggcggcaagggguucugcaagcuccacaacuggaacugcgugaacugcgacaccuucugcgccggcagcacguucaucuccgacgaggucgcgcgcgaccugagccugcaguucaagcggccgaucaaccccaccgaccaguccagcuacaucguggacuccgugaccgucaagaacgggagcauccaccucuacuucgacaaggccggccagaagaccuacgagcgccacucccugagccacuucgugaaccuggacaaccuccgggccaacuccacgaaggggagccugcccaucaacgugaucgucuucgacggcaaguccaagugcgaggagagcuccgccaagagcgccuccguguacuacagccagcugaugugccagcccauccuccugcuggaccaggcgcucgugagcgacgucggcgacuccgccgagguggccgugaagauguucgacgccuacgucaacaccuucagcuccaccuucaacgugccgauggagaagcugaagacccugguggccacggcggaggccgagcucgccaagaacgucagccuggacaacgugcuguccaccuucaucagcgccgcgcgccagggguucguggacuccgacgucgagaccaaggacgugguggagugccucaagcugagccaccaguccgacaucgaggucaccggcgacagcugcaacaacuacaugcugacguacaacaagguggagaacaugaccccccgggaccucggggccugcaucgacugcuccgcccgccacaucaacgcccagguggccaagagccacaacaucgcgcugaucuggaacgucaaggacuucaugucccugagcgagcagcuccggaagcagauccgcuccgccgccaagaagaacaaccugcccuucaagcugaccugcgccaccacgcgccagguggugaacgucgugaccaccaagaucgcccucaagggcgggugaggacuaguuauaagacugacuagcccgaugggccucccaacgggcccuccuccccuccuugcaccgagauuaauaaaaaaaaaaaaaaaaaaaaaaaaaaaaaaaaaaaaaaaaaaaaaaaaaaaaaaaaaaaaaaaaugcaucccccccccccccccccccccccccccccccaaaggcucuuuucagagccaccagaauu

SEQ ID NO: 21802 - RNA, 6058 nt, Artificial Sequence
  SARS-CoV-2__MT641518.1__non-structural protein 3 (NSP3) mRNA gc
aggagaaagcuuaccauggcccccaccaaggugaccuucggcgacgacacggucaucgaggugcagggguacaagagcgugaacaucaccuucgagcuggacgagcgcaucgacaagguccucaacgagaagugcuccgccuacaccguggagcugggcaccgaggugaacgaguucgcgugcgucguggccgacgccgugaucaagacgcugcagccggucagcgagcuccugaccccccuggggaucgaccucgacgagugguccauggccaccuacuaccuguucgacgagagcggcgaguucaagcuggccucccacauguacugcagcuucuacccccccgacgaggacgaggaggagggggacugcgaggaggaggaguucgagccguccacccaguacgaguacggcacggaggacgacuaccagggcaagccccucgaguucggggcgaccagcgccgcccugcagcccgaggaggagcaggaggaggacuggcuggacgacgacucccagcagaccgugggccagcaggacgggagcgaggacaaccagaccacgaccauccagaccaucguggagguccagccccagcucgagauggagcugaccccgguggugcagacgaucgaggucaacuccuucagcggcuaccugaagcucaccgacaacguguacaucaagaacgccgacaucguggaggaggcgaagaaggucaagcccaccgugguggucaacgccgccaacguguaccugaagcacgggggcggcguggccggggcccugaacaaggcgaccaacaacgccaugcaggucgaguccgacgacuacaucgccacgaacggcccccucaagguggggggcagcugcguccuguccggccacaaccuggccaagcacugccuccacgugguggggcccaacgucaacaagggcgaggacauccagcugcugaagagcgccuacgagaacuucaaccagcacgaggugcuccuggcgccgcugcucuccgccgggaucuucggcgccgaccccauccacagccugcgggugugcgucgacaccgugcgcaccaacguguaccuggccgucuucgacaagaaccucuacgacaagcugguguccagcuuccuggagaugaagagcgagaagcagguggagcagaagaucgccgagauccccaaggaggaggucaagcccuucaucaccgaguccaagccgagcguggagcagcggaagcaggacgacaagaagaucaaggcgugcguggaggaggucacgaccacccucgaggagaccaaguuccugacggagaaccugcuccuguacaucgacaucaacgggaaccugcaccccgacuccgccacccucgugagcgacaucgacaucaccuuccugaagaaggacgcccccuacaucgugggcgacgucgugcaggagggcgugcugaccgccgucgugauccccacgaagaaggccgggggcaccaccgagaugcucgcgaaggcccugcgcaaggugccgaccgacaacuacaucacgaccuaccccgggcagggccugaacggguacaccgucgaggaggccaagaccgugcucaagaagugcaaguccgccuucuacauccugcccagcaucaucuccaacgagaagcaggagauccugggcaccgugagcuggaaccuccgggagaugcuggcgcacgccgaggagacgcgcaagcugaugcccgucugcguggagaccaaggccaucguguccaccauccagcggaaguacaagggcaucaagauccaggagggggucguggacuacggcgcccgcuucuacuucuacaccagcaagacgaccguggccucccugaucaacacccucaacgaccugaacgagacccuggucacgaugccgcucggguacgugacccacggccugaaccuggaggaggcggcccgguacaugcgcagccucaaggugcccgccaccgucuccgugagcucccccgacgccgugaccgccuacaacggguaccugacgagcuccagcaagacccccgaggagcacuucaucgagaccaucucccuggcgggcagcuacaaggacuggagcuacuccggccagagcacccagcucgggaucgaguuccugaagcggggcgacaaguccgucuacuacacgagcaacccgaccaccuuccaccuggacggggaggugaucaccuucgacaaccucaagacgcugcugucccuccgcgaggugcggaccaucaaggucuucaccaccguggacaacaucaaccugcacacgcagguggucgacaugagcaugaccuacggccagcaguucggccccaccuaccuggacggggccgacgugaccaagaucaagccccacaacucccacgagggcaagacguucuacgugcucccgaacgacgacacccugcgcgucgaggccuucgaguacuaccacaccaccgaccccagcuuccuggggcgguacauguccgcccucaaccacacgaagaaguggaaguacccccaggugaacggccugaccagcaucaagugggccgacaacaacugcuaccuggcgaccgcccuccugacccugcagcagaucgagcucaaguucaaccccccggcccugcaggacgccuacuaccgcgcgcgggccggggaggccgccaacuucugcgcccugauccucgcguacugcaacaagacggugggcgagcugggcgacguccgcgagaccauguccuaccuguuccagcacgccaaccucgacagcugcaagcgggugcugaacgucgugugcaagaccugcgggcagcagcagaccacccugaagggcguggaggccgucauguacauggggacgcucuccuacgagcaguucaagaagggcgugcagauccccugcaccugcgggaagcaggccaccaaguaccuggugcagcaggagagccccuucgucaugauguccgcccccccggcgcaguacgagcugaagcacggcaccuucacgugcgccagcgaguacaccggcaacuaccagugcgggcacuacaagcacaucaccuccaaggagacccucuacugcaucgacggcgcccugcugacgaagagcagcgaguacaaggggcccaucaccgacguguucuacaaggagaacuccuacaccaccacgaucaagcccgugaccuacaagcucgacggcgucgugugcaccgagaucgaccccaagcuggacaacuacuacaagaaggacaacagcuacuucaccgagcagccgaucgaccuggugcccaaccagcccuaccccaacgccuccuucgacaacuucaaguucgucugcgacaacaucaaguucgccgacgaccucaaccagcugacgggguacaagaagccggcgagccgcgagcugaaggugaccuucuuccccgaccucaacggcgacguggucgccaucgacuacaagcacuacacccccuccuucaagaagggcgccaagcugcugcacaagcccaucguguggcacgugaacaacgccaccaacaaggcgacguacaagccgaacaccuggugcauccggugccucuggagcaccaagcccgucgagaccuccaacagcuucgacgugcugaaguccgaggacgcccaggggauggacaaccuggccugcgaggaccucaagcccgugagcgaggaggucguggagaaccccacgauccagaaggacgugcuggagugcaacgucaagaccaccgagguggugggcgacaucauccugaagccggccaacaacucccucaagaucaccgaggaggucgggcacacggaccugauggccgcguacguggacaacagcucccugaccaucaagaagcccaacgagcucagccgcgugcugggccugaagacccucgccacccacgggcuggccgccgucaacuccgugcccugggacacgaucgccaacuacgcgaagccguuccugaacaagguggucagcaccaccaccaacaucgugacgcgcugccucaaccgggugugcaccaacuacaugcccuacuucuucacccugcugcuccagcugugcaccuucacccgcuccacgaacagccggaucaaggccuccaugcccaccaccaucgccaagaacaccgucaagagcgugggcaaguucugccuggaggccagcuucaacuaccucaagucccccaacuucagcaagcugaucaacaucaucaucugguuccugcuccuguccgugugccugggcagccucaucuacuccacggccgcgcuggggguccugaugagcaaccucggcaugccguccuacugcaccggguaccgcgagggcuaccugaacagcaccaacgugaccaucgccacguacugcaccggcuccauccccugcagcgugugccuguccgggcucgacagccuggacaccuaccccucccuggagaccauccagaucacgaucagcuccuucaagugggaccucaccgccuucggccuggucgccgagugguuccuggccuacauccucuucacccgguucuucuacgugcuggggcuggcggccaucaugcagcucuucuucagcuacuucgccgugcacuucaucuccaacagcuggcugauguggcugaucaucaaccugguccagauggcccccaucuccgcgauggugcgcauguacaucuucuucgccagcuucuacuacguguggaagagcuacguccacgugguggacggcugcaacuccagcaccugcaugaugugcuacaagcggaaccgcgccacgcgggucgagugcaccaccaucgugaacgggguccgccgguccuucuacguguacgccaacggcggcaagggguucugcaagcuccacaacuggaacugcgugaacugcgacaccuucugcgccggcagcacguucaucuccgacgaggucgcgcgcgaccugagccugcaguucaagcggccgaucaaccccaccgaccaguccagcuacaucguggacuccgugaccgucaagaacgggagcauccaccucuacuucgacaaggccggccagaagaccuacgagcgccacucccugagccacuucgugaaccuggacaaccuccgggccaacaacacgaaggggucccugcccaucaacgugaucgucuucgacggcaagagcaagugcgaggaguccagcgccaaguccgccagcguguacuacucccagcugaugugccagcccauccuccugcuggaccaggcgcucgugagcgacgucggcgacagcgccgagguggccgugaagauguucgacgccuacgucaacaccuucuccagcaccuucaacgugccgauggagaagcugaagacccugguggccacggcggaggccgagcucgccaagaacgucucccuggacaacgugcugagcaccuucaucuccgccgcgcgccagggguucguggacagcgacgucgagaccaaggacgugguggagugccucaagcugucccaccaguucgacaucgaggucaccggcgacagcugcaacaacuacaugcugacguacaacaagguggagaacaugaccccccgggaccucggggccugcaucgacugcuccgcccgccacaucaacgcccagguggccaagagccacaacaucgcgcugaucuggaacgucaaggacuucaugucccugagcgagcagcuccggaagcagauccgcuccgccgccaagaagaacaaccugcccuucaagcugaccugcgccaccacgcgccagguggugaacgucgugaccaccaagaucgcccucaagggcgggugaggacuaguuauaagacugacuagcccgaugggccucccaacgggcccuccuccccuccuugcaccgagauuaauaaaaaaaaaaaaaaaaaaaaaaaaaaaaaaaaaaaaaaaaaaaaaaaaaaaaaaaaaaaaaaaaugcaucccccccccccccccccccccccccccccccaaaggcucuuuucagagccaccagaauu

SEQ ID NO: 21803 - RNA, 6058 nt, Artificial Sequence
  SARS-CoV-2__MT641645.1__non-structural protein 3 (NSP3) mRNA gc
aggagaaagcuuaccauggcccccaccaaggugaccuucggcgacgacacggucaucgaggugcagggguacaagagcgugaacaucaccuucgagcuggacgagcgcaucgacaagguccucaacgagaagugcuccgccuacaccguggagcugggcaccgaggugaacgaguucgcgugcgucguggccgacgccgugaucaagacgcugcagccggucagcgagcuccugaccccccuggggaucgaccucgacgagugguccauggccaccuacuaccuguucgacgagagcggcgaguucaagcuggccucccacauguacugcagcuucuacccccccgacgaggacgaggaggagggggacugcgaggaggaggaguucgagccguccauccaguacgaguacggcaccgaggacgacuaccagggcaagccccucgaguucggggcgacgagcgccgcccugcagcccgaggaggagcaggaggaggacuggcuggacgacgacucccagcagaccgugggccagcaggacgggagcgaggacaaccagaccaccacgauccagaccaucguggagguccagccccagcucgagauggagcugaccccgguggugcagaccaucgaggucaacuccuucagcggcuaccugaagcucacggacaacguguacaucaagaacgccgacaucguggaggaggcgaagaaggucaagcccaccgugguggucaacgccgccaacguguaccugaagcacgggggcggcguggccggggcccugaacaaggcgaccaacaacgccaugcaggucgaguccgacgacuacaucgccaccaacggcccccucaagguggggggcagcugcguccuguccggccacaaccuggccaagcacugccuccacgugguggggcccaacgucaacaagggcgaggacauccagcugcugaagagcgccuacgagaacuucaaccagcacgaggugcuccuggcgccgcugcucuccgccgggaucuucggcgccgaccccauccacagccugcgggugugcgucgacacggugcgcaccaacguguaccuggccgucuucgacaagaaccucuacgacaagcugguguccagcuuccuggagaugaagagcgagaagcagguggagcagaagaucgccgagauccccaaggaggaggucaagcccuucaucaccgaguccaagccgagcguggagcagcggaagcaggacgacaagaagaucaaggcgugcguggaggaggucaccacgacccucgaggagaccaaguuccugaccgagaaccugcuccuguacaucgacaucaacgggaaccugcaccccgacuccgccacgcucgugagcgacaucgacaucaccuuccugaagaaggacgcccccuacaucgugggcgacgucgugcaggagggcgugcugaccgccgucgugauccccaccaagaaggccgggggcacgaccgagaugcucgcgaaggcccugcgcaaggugccgaccgacaacuacaucaccacguaccccgggcagggccugaacggguacaccgucgaggaggccaagaccgugcucaagaagugcaaguccgccuucuacauccugcccagcaucaucuccaacgagaagcaggagauccugggcaccgugagcuggaaccuccgggagaugcuggcgcacgccgaggagacccgcaagcugaugcccgucugcguggagacgaaggccaucguguccaccauccagcggaaguacaagggcaucaagauccaggagggggucguggacuacggcgcccgcuucuacuucuacaccagcaagaccacgguggccucccugaucaacacccucaacgaccugaacgagacccuggucaccaugccgcucggguacgugacgcacggccugaaccuggaggaggcggcccgguacaugcgcagccucaaggugcccgccaccgucuccgugagcucccccgacgccgugaccgccuacaacggguaccugaccagcuccagcaagacgcccgaggagcacuucaucgagaccaucucccuggcgggcagcuacaaggacuggagcuacuccggccagagcacccagcucgggaucgaguuccugaagcggggcgacaaguccgucuacuacaccagcaacccgacgaccuuccaccuggacggggaggugaucaccuucgacaaccucaagacccugcugucccuccgcgaggugcggacgaucaaggucuucaccaccguggacaacaucaaccugcacacccagguggucgacaugagcaugacguacggccagcaguucggccccaccuaccuggacggggccgacgugaccaagaucaagccccacaacucccacgagggcaagaccuucuacgugcucccgaacgacgacacgcugcgcgucgaggccuucgaguacuaccacaccaccgaccccagcuuccuggggcgguacauguccgcccucaaccacaccaagaaguggaaguacccccaggugaacggccugacgagcaucaagugggccgacaacaacugcuaccuggcgaccgcccuccugacccugcagcagaucgagcucaaguucaaccccccggcccugcaggacgccuacuaccgcgcgcgggccggggaggccgccaacuucugcgcccugauccucgcguacugcaacaagaccgugggcgagcugggcgacguccgcgagacgauguccuaccuguuccagcacgccaaccucgacagcugcaagcgggugcugaacgucgugugcaagaccugcgggcagcagcagaccacccugaagggcguggaggccgucauguacauggggacccucuccuacgagcaguucaagaagggcgugcagauccccugcacgugcgggaagcaggccaccaaguaccuggugcagcaggagagccccuucgucaugauguccgcccccccggcgcaguacgagcugaagcacggcaccuucaccugcgccagcgaguacacgggcaacuaccagugcgggcacuacaagcacaucaccuccaaggagacccucuacugcaucgacggcgcccugcugaccaagagcagcgaguacaaggggcccaucacggacguguucuacaaggagaacuccuacaccaccaccaucaagcccgugacguacaagcucgacggcgucgugugcaccgagaucgaccccaagcuggacaacuacuacaagaaggacaacagcuacuucaccgagcagccgaucgaccuggugcccaaccagcccuaccccaacgccuccuucgacaacuucaaguucgucugcgacaacaucaaguucgccgacgaccucaaccagcugaccggguacaagaagccggcgagccgcgagcugaaggugacguucuuccccgaccucaacggcgacguggucgccaucgacuacaagcacuacacccccuccuucaagaagggcgccaagcugcugcacaagcccaucguguggcacgugaacaacgccaccaacaaggcgaccuacaagccgaacacguggugcauccggugccucuggagcaccaagcccgucgagaccuccaacagcuucgacgugcugaaguccgaggacgcccaggggauggacaaccuggccugcgaggaccucaagcccgugagcgaggaggucguggagaaccccaccauccagaaggacgugcuggagugcaacgucaagacgaccgagguggugggcgacaucauccugaagccggccaacaacucccucaagaucaccgaggaggucgggcacaccgaccugauggccgcguacguggacaacagcucccugacgaucaagaagcccaacgagcucagccgcgugcugggccugaagacccucgccacccacgggcuggccgccgucaacuccgugcccugggacaccaucgccaacuacgcgaagccguuccugaacaagguggucagcacgaccaccaacaucgugacccgcugccucaaccgggugugcacgaacuacaugcccuacuucuucacccugcugcuccagcugugcaccuucacccgcuccaccaacagccggaucaaggccuccaugcccacgaccaucgccaagaacaccgucaagagcgugggcaaguucugccuggaggccagcuucaacuaccucaagucccccaacuucagcaagcugaucaacaucaucaucugguuccugcuccuguccgugugccugggcagccucaucuacuccaccgccgcgcuggggguccugaugagcaaccucggcaugccguccuacugcacgggguaccgcgagggcuaccugaacagcaccaacgugaccaucgccaccuacugcacgggcuccauccccugcagcgugugccuguccgggcucgacagccuggacaccuaccccucccuggagaccauccagaucaccaucagcuccuucaagugggaccucacggccuucggccuggucgccgagugguuccuggccuacauccucuucacccgguucuucuacgugcuggggcuggcggccaucaugcagcucuucuucagcuacuucgccgugcacuucaucuccaacagcuggcugauguggcugaucaucaaccugguccagauggcccccaucuccgcgauggugcgcauguacaucuucuucgccagcuucuacuacguguggaagagcuacguccacgugguggacggcugcaacuccagcaccugcaugaugugcuacaagcggaaccgcgccacccgggucgagugcacgaccaucgugaacgggguccgccgguccuucuacguguacgccaacggcggcaagggguucugcaagcuccacaacuggaacugcgugaacugcgacaccuucugcgccggcagcaccuucaucuccgacgaggucgcgcgcgaccugagccugcaguucaagcggccgaucaaccccacggaccaguccagcuacaucguggacuccgugaccgucaagaacgggagcauccaccucuacuucgacaaggccggccagaagaccuacgagcgccacucccugagccacuucgugaaccuggacaaccuccgggccaacaacaccaaggggucccugcccaucaacgugaucgucuucgacggcaagagcaagugcgaggaguccagcgccaaguccgccagcguguacuacucccagcugaugugccagcccauccuccugcuggaccaggcgcucgugagcgacgucggcgacagcgccgagguggccgugaagauguucgacgccuacgucaacacguucuccagcaccuucaacgugccgauggagaagcugaagacccugguggccaccgcggaggccgagcucgccaagaacgucucccuggacaacgugcugagcacguucaucuccgccgcgcgccagggguucguggacagcgacgucgagaccaaggacgugguggagugccucaagcugucccaccagagcgacaucgaggucaccggcgacuccugcaacaacuacaugcugaccuacaacaagguggagaacaugacgccccgggaccucggggccugcaucgacugcagcgcccgccacaucaacgcccagguggccaagucccacaacaucgcgcugaucuggaacgucaaggacuucaugagccuguccgagcagcuccggaagcagauccgcagcgccgccaagaagaacaaccugcccuucaagcugaccugcgccaccacccgccagguggugaacgucgugacgaccaagaucgcccucaagggcgggugaggacuaguuauaagacugacuagcccgaugggccucccaacgggcccuccuccccuccuugcaccgagauuaauaaaaaaaaaaaaaaaaaaaaaaaaaaaaaaaaaaaaaaaaaaaaaaaaaaaaaaaaaaaaaaaaugcaucccccccccccccccccccccccccccccccaaaggcucuuuucagagccaccagaauu

SEQ ID NO: 21804 - RNA, 6058 nt, Artificial Sequence
  SARS-CoV-2__MT641656.1__non-structural protein 3 (NSP3) mRNA gc
aggagaaagcuuaccauggcccccaccaaggugaccuucggcgacgacacggucaucgaggugcagggguacaagagcgugaacaucaccuucgagcuggacgagcgcaucgacaagguccucaacgagaagugcuccgccuacaccguggagcugggcaccgaggugaacgaguucgcgugcgucguggccgacgccgugaucaagacgcugcagccggucagcgagcuccugaccccccuggggaucgaccucgacgagugguccauggccaccuacuaccuguucgacgagagcggcgaguucaagcuggccucccacauguacugcagcuucuacccccccgacgaggacgaggaggagggggacugcgaggaggaggaguucgagccguccacccaguacgaguacggcacggaggacgacuaccagggcaagccccucgaguucggggcgaccagcgccgcccugcagcccgaggaggagcaggaggaggacuggcuggacgacgacucccagcagaccgugggccagcaggacgggagcgaggacaaccagaccacgaccauccagaccaucguggagguccagccccagcucgagauggagcugaccccgguggugcagacgaucgaggucaacuccuucagcggcuaccugaagcucaccgacaacguguacaucaagaacgccgacaucguggaggaggcgaagaaggucaagcccaccgugguggucaacgccgccaacguguaccugaagcacgggggcggcguggccggggcccugaacaaggcgaccaacaacgccaugcaggucgaguccgacgacuacaucgccacgaacggcccccucaagguggggggcagcugcguccuguccggccacaaccuggccaagcacugccuccacgugguggggcccaacgucaacaagggcgaggacauccagcugcugaagagcgccuacgagaacuucaaccagcacgaggugcuccuggcgccgcugcucuccgccgggaucuucggcgccgaccccauccacagccugcgggugugcgucgacaccgugcgcaccaacguguaccuggccgucuucgacaagaaccucuacgacaagcugguguccagcuuccuggagaugaagagcgagaagcagguggagcagaagaucgccgagauccccaaggaggaggucaagcccuucaucaccgaguccaagccgagcguggagcagcggaagcaggacgacaagaagaucaaggcgugcguggaggaggucacgaccacccucgaggagaccaaguuccugacggagaaccugcuccuguacaucgacaucaacgggaaccugcaccccgacuccgccacccucgugagcgacaucgacaucaccuuccugaagaaggacgcccccuacaucgugggcgacgucgugcaggagggcgugcugaccgccgucgugauccccacgaagaaggccgggggcaccaccgagaugcucgcgaaggcccugcgcaaggugccgaccgacaacuacaucacgaccuaccccgggcagggccugaacggguacaccgucgaggaggccaagaccgugcucaagaagugcaaguccgccuucuacauccugcccagcaucaucuccaacgagaagcaggagauccugggcaccgugagcuggaaccuccgggagaugcuggcgcacgccgaggagacgcgcaagcugaugcccgucugcguggagaccaaggccaucguguccaccauccagcggaaguacaagggcaucaagauccaggagggggucguggacuacggcgcccgcuucuacuucuacaccagcaagacgaccguggucucccugaucaacacccucaacgaccugaacgagacccuggugacgaugccgcucggguacgugacccacggccugaaccuggaggaggccgcgcgguacaugcgcagccucaagguccccgccaccguguccgugagcucccccgacgccgucaccgccuacaacggguaccugacgagcuccagcaagacccccgaggagcacuucaucgagaccaucucccuggccggcagcuacaaggacuggagcuacuccggccagagcacccagcucgggaucgaguuccugaagcggggcgacaaguccguguacuacacgagcaacccgaccaccuuccaccuggacggggaggugaucaccuucgacaaccucaagacgcugcugucccuccgcgagguccggaccaucaagguguucaccaccguggacaacaucaaccugcacacgcaggucguggacaugagcaugaccuacggccagcaguucggccccaccuaccuggacggggcggacgugaccaagaucaagccccacaacucccacgagggcaagacguucuacguccucccgaacgacgacacccugcgcguggaggccuucgaguacuaccacaccaccgaccccagcuuccuggggcgguacauguccgcccucaaccacacgaagaaguggaaguacccccaggugaacggccugaccagcaucaagugggccgacaacaacugcuaccuggccaccgcgcuccugacccugcagcagaucgagcucaaguucaaccccccggcccugcaggacgccuacuaccgcgcccgggcgggggaggccgccaacuucugcgcccugauccucgccuacugcaacaagacggucggcgagcugggcgacgugcgcgagaccauguccuaccuguuccagcacgcgaaccucgacagcugcaagcggguccugaacguggugugcaagaccugcgggcagcagcagaccacccugaagggcgucgaggccgugauguacauggggacgcucuccuacgagcaguucaagaagggcgugcagauccccugcaccugcgggaagcaggccaccaaguaccugguccagcaggagagccccuucgugaugauguccgcccccccggcccaguacgagcugaagcacggcaccuucacgugcgcgagcgaguacaccggcaacuaccagugcgggcacuacaagcacaucaccuccaaggagacccucuacugcaucgacggcgcccugcugacgaagagcagcgaguacaaggggcccaucaccgacguguucuacaaggagaacuccuacaccaccacgaucaagcccgucaccuacaagcucgacggcguggugugcaccgagaucgaccccaagcuggacaacuacuacaagaaggacaacagcuacuucaccgagcagccgaucgaccugguccccaaccagcccuaccccaacgccuccuucgacaacuucaaguucgugugcgacaacaucaaguucgccgacgaccucaaccagcugacgggguacaagaagccggccagccgcgagcugaaggugaccuucuuccccgaccucaacggcgacgucguggcgaucgacuacaagcacuacacccccuccuucaagaagggcgccaagcugcugcacaagcccaucguguggcacgucaacaacgccaccaacaaggccacguacaagccgaacaccuggugcauccggugccucuggagcaccaagcccguggagaccuccaacagcuucgacgugcugaaguccgaggacgcgcaggggauggacaaccuggccugcgaggaccucaagcccgucagcgaggaggugguggagaaccccacgauccagaaggacguccuggagugcaacgugaagaccaccgagguggucggcgacaucauccugaagccggccaacaacucccucaagaucaccgaggagguggggcacacggaccugauggccgccuacguggacaacagcucccugaccaucaagaagcccaacgagcucagccgcguccugggccugaagacccucgcgacccacgggcuggccgccgugaacuccgugcccugggacacgaucgccaacuacgccaagccguuccugaacaaggucgugagcaccaccaccaacaucgugacgcgcugccucaaccgggucugcaccaacuacaugcccuacuucuucacccugcugcuccagcugugcaccuucacccgcuccacgaacagccggaucaaggcguccaugcccaccaccaucgccaagaacaccgugaagagcgugggcaaguucugccuggaggccagcuucaacuaccucaagucccccaacuucagcaagcugaucaacaucaucaucugguuccugcuccuguccgucugccugggcagccucaucuacuccacggccgcccugggggugcugaugagcaaccucggcaugccguccuacugcaccggguaccgcgagggcuaccugaacagcaccaacgugaccaucgcgacguacugcaccggcuccauccccugcagcgucugccuguccgggcucgacagccuggacaccuaccccucccuggagaccauccagaucacgaucagcuccuucaagugggaccucaccgccuucggccugguggccgagugguuccuggccuacauccucuucacccgguucuucuacgugcuggggcuggccgcgaucaugcagcucuucuucagcuacuucgccguccacuucaucuccaacagcuggcugauguggcugaucaucaaccuggugcagauggcccccaucuccgccauggugcgcauguacaucuucuucgcgagcuucuacuacgucuggaagagcuacgugcacguggucgacggcugcaacuccagcaccugcaugaugugcuacaagcggaaccgcgccacgcggguggagugcaccaccaucgucaacggggugcgccgguccuucuacguguacgccaacggcggcaagggguucugcaagcuccacaacuggaacugcgucaacugcgacaccuucugcgccggcagcacguucaucuccgacgagguggcccgcgaccugagccugcaguucaagcggccgaucaaccccaccgaccaguccagcuacaucguggacuccgucaccgugaagaacgggagcauccaccucuacuucgacaaggcgggccagaagaccuacgagcgccacucccugagccacuucgugaaccuggacaaccuccgggccaacaacacgaaggggucccugcccaucaacgucaucguguucgacggcaagagcaagugcgaggaguccagcgccaaguccgccagcguguacuacucccagcugaugugccagcccauccuccugcuggaccaggcccucgucagcgacgugggcgacagcgcggagguggccgucaagauguucgacgccuacgugaacaccuucuccagcaccuucaacgugccgauggagaagcugaagacccuggucgccacggccgaggcggagcucgccaagaacgugucccuggacaacgugcugagcaccuucaucuccgccgcccgccagggguucgucgacagcgacguggagaccaaggacguggucgagugccucaagcugucccaccagagcgacaucgaggugaccggcgacuccugcaacaacuacaugcugacguacaacaagguggagaacaugaccccccgggaccucggggcgugcaucgacugcagcgcccgccacaucaacgcccaggucgccaagucccacaacaucgcccugaucuggaacgugaaggacuucaugagccuguccgagcagcuccggaagcagauccgcagcgcggccaagaagaacaaccugcccuucaagcugaccugcgccaccacgcgccagguggucaacguggugaccaccaagaucgcccucaagggcgggugaggacuaguuauaagacugacuagcccgaugggccucccaacgggcccuccuccccuccuugcaccgagauuaauaaaaaaaaaaaaaaaaaaaaaaaaaaaaaaaaaaaaaaaaaaaaaaaaaaaaaaaaaaaaaaaaugcaucccccccccccccccccccccccccccccccaaaggcucuuuucagagccaccagaauu

SEQ ID NO: 21805 - RNA, 6058 nt, Artificial Sequence
  SARS-CoV-2__MT641665.1__non-structural protein 3 (NSP3) mRNA gc
aggagaaagcuuaccauggcccccaccaaggugaccuucggcgacgacacggucaucgaggugcagggguacaagagcgugaacaucaccuucgagcuggacgagcgcaucgacaagguccucaacgagaagugcuccgccuacaccguggagcugggcaccgaggugaacgaguucgcgugcgucguggccgacgccgugaucaagacgcugcagccggucagcgagcuccugaccccccuggggaucgaccucgacgagugguccauggccaccuacuaccuguucgacgagagcggcgaguucaagcuggccucccacauguacugcagcuucuacccccccgacgaggacgaggaggagggggacugcgaggaggaggaguucgagccgcucacccaguacgaguacggcacggaggacgacuaccagggcaagccccuggaguucggggcgaccuccgccgcccugcagcccgaggaggagcaggaggaggacuggcucgacgacgacagccagcagaccgugggccagcaggacggguccgaggacaaccagaccacgaccauccagaccaucguggagguccagccccagcuggagauggagcugaccccgguggugcagacgaucgaggucaacagcuucuccggcuaccucaagcugaccgacaacguguacaucaagaacgccgacaucguggaggaggcgaagaaggucaagcccaccgugguggucaacgccgccaacguguaccugaagcacgggggcggcguggccggggcccucaacaaggcgaccaacaacgccaugcaggucgagagcgacgacuacaucgccacgaacggcccccugaagguggucggguccugcgugcugagcggccacaaccucgccaagcacugccugcacguggucggccccaacgugaacaagggggaggacauccagcugcucaaguccgccuacgagaacuucaaccagcacgaggugcugcuggcgccgcuccugagcgccggcaucuucggggccgaccccauccacucccugcgggucugcguggacaccgugcgcaccaacgucuaccucgccguguucgacaagaaccuguacgacaagcuggugagcuccuuccucgagaugaagagcgagaagcaggucgagcagaagaucgccgagauccccaaggaggaggugaagcccuucaucaccgagagcaagccguccguggagcagcggaagcaggacgacaagaagaucaaggcgugcgucgaggaggugacgaccacccuggaggagaccaaguuccugacggagaaccuccugcuguacaucgacaucaacggcaaccuccaccccgacagcgccacccugguguccgacaucgacaucaccuuccugaagaaggacgcccccuacaucgucggggacguggugcaggagggcguccucaccgccguggugauccccacgaagaaggccggcgggaccaccgagaugcuggcgaaggcccugcgcaaggucccgaccgacaacuacaucacgaccuaccccggccaggggcucaacggcuacaccguggaggaggccaagaccgugcugaagaagugcaagagcgccuucuacauccugcccuccaucaucagcaacgagaagcaggagauccucgggaccgucuccuggaaccugcgggagaugcuggcgcacgccgaggagacgcgcaagcugaugcccgugugcguggagaccaaggccaucgucagcaccauccagcggaaguacaagggcaucaagauccaggagggcgugguggacuacggggcccgcuucuacuucuacaccuccaagacgaccgucgccagccucaucaacacccugaacgaccugaacgagacccucgugacgaugccgcugggcuacgugacccacgggcugaaccucgaggaggcggcccgguacaugcgcucccugaagguccccgccaccgugagcguguccagccccgacgccgucaccgccuacaacggcuaccugacguccagcuccaagacccccgaggagcacuucaucgagaccaucagccucgcgggguccuacaaggacuggagcuacagcggccaguccacccagcugggcaucgaguuccugaagcggggggacaagagcguguacuacacguccaacccgaccaccuuccaccucgacggcgaggugaucaccuucgacaaccugaagacgcugcucagccugcgcgagguccggaccaucaagguguucaccaccguggacaacaucaaccugcacacgcaggucguggacauguccaugaccuacgggcagcaguucggccccaccuaccucgacggcgccgacgugaccaagaucaagccccacaacagccacgaggggaagacguucuacguccugccgaacgacgacacccugcgcguggaggccuucgaguacuaccacaccaccgaccccuccuuccucggccgguacaugagcgcccugaaccacacgaagaaguggaaguacccccaggugaacgggcugaccuccaucaagugggccgacaacaacugcuaccucgcgaccgcccugcugacccuccagcagaucgagcugaaguucaaccccccggcccugcaggacgccuacuaccgcgcgcgggccggcgaggccgccaacuucugcgcccucauccuggcguacugcaacaagacggucggggagcugggcgacgugcgcgagaccaugagcuaccucuuccagcacgccaaccuggacuccugcaagcggguccugaacguggugugcaagaccugcggccagcagcagaccacccucaagggggucgaggccgugauguacaugggcacgcugagcuacgagcaguucaagaagggggugcagauccccugcaccugcggcaagcaggccaccaaguaccugguccagcaggagucccccuucgugaugaugagcgcccccccggcgcaguacgagcucaagcacgggaccuucacgugcgccuccgaguacaccggcaacuaccagugcggccacuacaagcacaucaccagcaaggagacccuguacugcaucgacggggcccugcucacgaaguccagcgaguacaagggccccaucaccgacguguucuacaaggagaacagcuacaccaccacgaucaagcccgucaccuacaagcuggacgggguggugugcaccgagaucgaccccaagcuggacaacuacuacaagaaggacaacuccuacuucaccgagcagccgaucgaccucguccccaaccagcccuaccccaacgccagcuucgacaacuucaaguucgugugcgacaacaucaaguucgccgacgaccugaaccagcugacgggcuacaagaagccggcgucccgcgagcucaaggugaccuucuuccccgaccugaacggggacgucguggccaucgacuacaagcacuacacccccagcuucaagaagggcgccaagcugcuccacaagcccaucguguggcacgucaacaacgccaccaacaaggcgacguacaagccgaacaccuggugcauccggugccugugguccaccaagcccguggagaccagcaacuccuucgacgugcugaagagcgaggacgcccagggcauggacaaccucgccugcgaggaccugaagcccgucuccgaggaggugguggagaaccccacgauccagaaggacguccuggagugcaacgugaagaccaccgagguggucggggacaucauccucaagccggccaacaacagccugaagaucaccgaggaggugggccacacggaccugauggccgcguacguggacaacuccagccucaccaucaagaagcccaacgagcugucccgcguccuggggcucaagacccuggccacccacggccuggccgccgugaacagcgugcccugggacacgaucgccaacuacgcgaagccguuccucaacaaggucguguccaccaccaccaacaucgugacgcgcugccugaaccgggucugcaccaacuacaugcccuacuucuucacccugcuccugcagcugugcaccuucacccgcagcacgaacucccggaucaaggccagcaugcccaccaccaucgccaagaacaccgugaaguccguggggaaguucugccucgaggccagcuucaacuaccugaagagccccaacuucuccaagcugaucaacaucaucaucugguuccuccugcugagcgucugccucggcucccugaucuacagcacggccgcgcugggcgugcucauguccaaccuggggaugccgagcuacugcaccggcuaccgcgagggguaccugaacuccaccaacgugaccaucgccacguacugcaccggcagcauccccugcuccgucugccucagcggccuggacucccuggacaccuaccccagccucgagaccauccagaucacgaucuccagcuucaagugggaccugaccgccuucgggcugguggccgagugguuccucgccuacauccuguucacccgguucuucuacgugcugggccucgcggccaucaugcagcuguucuucuccuacuucgccguccacuucaucagcaacuccuggcugauguggcugaucaucaaccucgugcagauggcccccaucagcgcgauggugcgcauguacaucuucuucgccuccuucuacuacgucuggaagagcuacgugcacguggucgacgggugcaacagcuccaccugcaugaugugcuacaagcggaaccgcgccacgcggguggagugcaccaccaucgucaacggcgugcgccggagcuucuacguguacgccaacgggggcaagggcuucugcaagcugcacaacuggaacugcgucaacugcgacaccuucugcgccggguccacguucaucagcgacgagguggcgcgcgaccugucccuccaguucaagcggccgaucaaccccaccgaccagagcuccuacaucguggacagcgucaccgugaagaacggcuccauccaccuguacuucgacaaggccgggcagaagaccuacgagcgccacagccugucccacuucgugaaccucgacaaccugcgggccaacaacacgaagggcagccugcccaucaacgucaucguguucgacgggaaguccaagugcgaggagagcuccgccaagagcgccuccguguacuacagccagcucaugugccagcccauccugcugcucgaccaggcgcuggucuccgacgugggcgacagcgccgagguggccgucaagauguucgacgccuacgugaacaccuucagcuccaccuucaacgugccgauggagaagcugaagacccucgucgccacggcggaggccgagcuggccaagaacgugagccuggacaacgugcucuccaccuucaucagcgccgcgcgccagggcuucgucgacuccgacguggagaccaaggacguggucgagugccugaagcugagccaccaguccgacaucgaggugaccggggacagcugcaacaacuacaugcucacguacaacaagguggagaacaugaccccccgggaccugggcgccugcaucgacugcuccgcccgccacaucaacgcccaggucgccaagagccacaacaucgcgcugaucuggaacgugaaggacuucaugucccucagcgagcagcugcggaagcagauccgcuccgccgccaagaagaacaaccugcccuucaagcucaccugcgccaccacgcgccagguggucaacguggugaccaccaagaucgcccugaaggggggcugaggacuaguuauaagacugacuagcccgaugggccucccaacgggcccuccuccccuccuugcaccgagauuaauaaaaaaaaaaaaaaaaaaaaaaaaaaaaaaaaaaaaaaaaaaaaaaaaaaaaaaaaaaaaaaaaugcaucccccccccccccccccccccccccccccccaaaggcucuuuucagagccaccagaauu

SEQ ID NO: 21806 - RNA, 6058 nt, Artificial Sequence
  SARS-CoV-2__MT641667.1__non-structural protein 3 (NSP3) mRNA gc
aggagaaagcuuaccauggcccccaccaaggugaccuucggcgacgacacggucaucgaggugcagggguacaagagcgugaacaucaccuucgagcuggacgagcgcaucgacaagguccucaacgagaagugcuccgccuacaccguggagcugggcaccgaggugaacgaguucgcgugcgucguggccgacgccgugaucaagacgcugcagccggucagcgagcuccugaccccccuggggaucgaccucgacgagugguccauggccaccuacuaccuguucgacgagagcggcgaguucaagcuggccucccacauguacugcagcuucuacccccccgacgaggacgaggaggagggggacugcgaggaggaggaguucgagccguccacccaguacgaguacggcacggaggacgacuaccagggcaagccccucgaguucggggcgaccagcgccgcccugcagcccgaggaggagcaggaggaggacuggcuggacgacgacucccagcagaccgugggccagcaggacgggagcgaggacaaccagaccacgaccauccagaccaucguggagguccagccccagcucgagauggagcugaccccgguggugcagacgaucgaggucaacuccuucagcggcuaccugaagcucaccgacaacguguacaucaagaacgccgacaucguggaggaggcgaagaaggucaagcccaccgugguggucaacgccgccaacguguaccugaagcacgggggcggcguggccggggcccugaacaaggcgaccaacaacgccaugcaggucgaguccgacgacuacaucgccacgaacggcccccucaagguggucgggagcugcgugcuguccggccacaaccuggccaagcacugccuccacguggucggccccaacgugaacaagggggaggacauccagcugcugaagagcgccuacgagaacuucaaccagcacgaggugcuccuggcgccgcugcucuccgccggcaucuucggggccgaccccauccacagccugcgggucugcguggacaccgugcgcaccaacgucuaccuggccguguucgacaagaaccucuacgacaagcugguguccagcuuccuggagaugaagagcgagaagcaggucgagcagaagaucgccgagauccccaaggaggaggugaagcccuucaucaccgaguccaagccgagcguggagcagcggaagcaggacgacaagaagaucaaggcgugcgucgaggaggugacgaccacccucgaggagaccaaguuccugacggagaaccugcuccuguacaucgacaucaacggcaaccugcaccccgacuccgccacccucgugagcgacaucgacaucaccuuccugaagaaggacgcccccuacaucgucggggacguggugcaggagggcguccugaccgccguggugauccccacgaagaaggccggcgggaccaccgagaugcucgcgaaggcccugcgcaaggucccgaccgacaacuacaucacgaccuaccccggccaggggcugaacggcuacaccguggaggaggccaagaccgugcucaagaagugcaaguccgccuucuacauccugcccagcaucaucuccaacgagaagcaggagauccuggggaccgucagcuggaaccuccgggagaugcuggcgcacgccgaggagacgcgcaagcugaugcccgugugcguggagaccaaggccaucgucuccaccauccagcggaaguacaagggcaucaagauccaggagggcgugguggacuacggggcccgcuucuacuucuacaccagcaagacgaccgucgccucccugaucaacacccucaacgaccugaacgagacccuggugacgaugccgcucggcuacgugacccacgggcugaaccuggaggaggcggcccgguacaugcgcagccucaagguccccgccaccguguccgugagcucccccgacgccgucaccgccuacaacggcuaccugacgagcuccagcaagacccccgaggagcacuucaucgagaccaucucccuggcggggagcuacaaggacuggagcuacuccggccagagcacccagcucggcaucgaguuccugaagcggggggacaaguccguguacuacacgagcaacccgaccaccuuccaccuggacggcgaggugaucaccuucgacaaccucaagacgcugcugucccuccgcgagguccggaccaucaagguguucaccaccguggacaacaucaaccugcacacgcaggucguggacaugagcaugaccuacgggcagcaguucggccccaccuaccuggacggcgccgacgugaccaagaucaagccccacaacucccacgaggggaagacguucuacguccucccgaacgacgacacccugcgcguggaggccuucgaguacuaccacaccaccgaccccagcuuccugggccgguacauguccgcccucaaccacacgaagaaguggaaguacccccaggugaacgggcugaccagcaucaagugggccgacaacaacugcuaccuggcgaccgcccuccugacccugcagcagaucgagcucaaguucaaccccccggcccugcaggacgccuacuaccgcgcgcgggccggcgaggccgccaacuucugcgcccugauccucgcguacugcaacaagacggucggggagcugggcgacgugcgcgagaccauguccuaccuguuccagcacgccaaccucgacagcugcaagcggguccugaacguggugugcaagaccugcggccagcagcagaccacccugaagggggucgaggccgugauguacaugggcacgcucuccuacgagcaguucaagaagggggugcagauccccugcaccugcggcaagcaggccaccaaguaccugguccagcaggagagccccuucgugaugauguccgcccccccggcgcaguacgagcugaagcacgggaccuucacgugcgccagcgaguacaccggcaacuaccagugcggccacuacaagcacaucaccuccaaggagacccucuacugcaucgacggggcccugcugacgaagagcagcgaguacaagggccccaucaccgacguguucuacaaggagaacuccuacaccaccacgaucaagcccgucaccuacaagcucgacgggguggugugcaccgagaucgaccccaagcuggacaacuacuacaagaaggacaacagcuacuucaccgagcagccgaucgaccugguccccaaccagcccuaccccaacgccuccuucgacaacuucaaguucgugugcgacaacaucaaguucgccgacgaccucaaccagcugacgggcuacaagaagccggcgagccgcgagcugaaggugaccuucuuccccgaccucaacggggacgucguggccaucgacuacaagcacuacacccccuccuucaagaagggcgccaagcugcugcacaagcccaucguguggcacgucaacaacgccaccaacaaggcgacguacaagccgaacaccuggugcauccggugccucuggagcaccaagcccguggagaccuccaacagcuucgacgugcugaaguccgaggacgcccagggcauggacaaccuggccugcgaggaccucaagcccgucagcgaggaggugguggagaaccccacgauccagaaggacguccuggagugcaacgugaagaccaccgagguggucggggacaucauccugaagccggccaacaacucccucaagaucaccgaggaggugggccacacggaccugauggccgcguacguggacaacagcucccugaccaucaagaagcccaacgagcucagccgcguccuggggcugaagacccucgccacccacggccuggccgccgugaacuccgugcccugggacacgaucgccaacuacgcgaagccguuccugaacaaggucgugagcaccaccaccaacaucgugacgcgcugccucaaccgggucugcaccaacuacaugcccuacuucuucacccugcugcuccagcugugcaccuucacccgcuccacgaacagccggaucaaggccuccaugcccaccaccaucgccaagaacaccgugaagagcguggggaaguucugccuggaggccagcuucaacuaccucaagucccccaacuucagcaagcugaucaacaucaucaucugguuccugcuccuguccgucugccugggcagccucaucuacuccacggccgcgcugggcgugcugaugagcaaccucgggaugccguccuacugcaccggcuaccgcgagggguaccugaacagcaccaacgugaccaucgccacguacugcaccggcuccauccccugcagcgucugccuguccggccucgacagccuggacaccuaccccucccuggagaccauccagaucacgaucagcuccuucaagugggaccucaccgccuucgggcugguggccgagugguuccuggccuacauccucuucacccgguucuucuacgugcugggccuggcggccaucaugcagcucuucuucagcuacuucgccguccacuucaucuccaacagcuggcugauguggcugaucaucaaccuggugcagauggcccccaucuccgcgauggugcgcauguacaucuucuucgccagcuucuacuacgucuggaagagcuacgugcacguggucgacgggugcaacuccagcaccugcaugaugugcuacaagcggaaccgcgccacgcggguggagugcaccaccaucgucaacggcgugcgccgguccuucuacguguacgccaacgggggcaagggcuucugcaagcuccacaacuggaacugcgucaacugcgacaccuucugcgccgggagcacguucaucuccgacgagguggcgcgcgaccugagccugcaguucaagcggccgaucaaccccaccgaccaguccagcuacaucguggacuccgucaccgugaagaacggcagcauccaccucuacuucgacaaggccgggcagaagaccuacgagcgccacucccugagccacuucgugaaccuggacaaccuccgggccaacaacacgaagggcucccugcccaucaacgucaucguguucgacgggaagagcaagugcgaggaguccagcgccaaguccgccagcguguacuacucccagcugaugugccagcccauccuccugcuggaccaggcgcucgucagcgacgugggcgacagcgccgagguggccgucaagauguucgacgccuacgugaacaccuucuccagcaccuucaacgugccgauggagaagcugaagacccuggucgccacggcggaggccgagcucgccaagaacgugucccuggacaacgugcugagcaccuucaucuccgccgcgcgccagggcuucgucgacagcgacguggagaccaaggacguggucgagugccucaagcugucccaccagagcgacaucgaggugaccggggacuccugcaacaacuacaugcugacguacaacaagguggagaacaugaccccccgggaccucggcgccugcaucgacugcagcgcccgccacaucaacgcccaggucgccaagucccacaacaucgcgcugaucuggaacgugaaggacuucaugagccuguccgagcagcuccggaagcagauccgcagcgccgccaagaagaacaaccugcccuucaagcugaccugcgccaccacgcgccagguggucaacguggugaccaccaagaucgcccucaaggggggcugaggacuaguuauaagacugacuagcccgaugggccucccaacgggcccuccuccccuccuugcaccgagauuaauaaaaaaaaaaaaaaaaaaaaaaaaaaaaaaaaaaaaaaaaaaaaaaaaaaaaaaaaaaaaaaaaugcaucccccccccccccccccccccccccccccccaaaggcucuuuucagagccaccagaauu

SEQ ID NO: 21807 - RNA, 6058 nt, Artificial Sequence
  SARS-CoV-2__MT641676.1__non-structural protein 3 (NSP3) mRNA gc
aggagaaagcuuaccauggcccccaccaaggugaccuucggcgacgacacggucaucgaggugcagggguacaagagcgugaacaucaccuucgagcuggacgagcgcaucgacaagguccucaacgagaagugcuccgccuacaccguggagcugggcaccgaggugaacgaguucgcgugcgucguggccgacgccgugaucaagacgcugcagccggucagcgagcuccugaccccccuggggaucgaccucgacgagugguccauggccaccuacuaccuguucgacgagagcggcgaguucaagcuggccucccacauguacugcagcuucuacccccccgacgaggacgaggaggagggggacugcgaggaggaggaguucgagccguccacccaguacgaguacggcacggaggacgacuaccagggcaagccccucgaguucggggcgaccagcgccgcccugcagcccgaggaggagcaggaggaggacuggcuggacgacgacucccagcagaccgugggccagcaggacgggagcgaggacaaccagaccacgaccauccagaccaucguggagguccagccccagcucgagauggagcugaccccgguggugcagacgaucgaggucaacuccuucagcggcuaccugaagcucaccgacaacguguacaucaagaacgccgacaucguggaggaggcgaagaaggucaagcccaccgugguggucaacgccgccaacguguaccugaagcacgggggcggcguggccggggcccugaacaaggcgaccaacaacgccaugcaggucgaguccgacgacuacaucgccacgaacggcccccucaagguggucgggagcugcgugcuguccggccacaaccuggccaagcacugccuccacguggucggccccaacgugaacaagggggaggacauccagcugcugaagagcgccuacgagaacuucaaccagcacgaggugcuccuggcgccgcugcucuccgccggcaucuucggggccgaccccauccacagccugcgggucugcguggacaccgugcgcaccaacgucuaccuggccguguucgacaagaaccucuacgacaagcugguguccagcuuccuggagaugaagagcgagaagcaggucgagcagaagaucgccgagauccccaaggaggaggugaagcccuucaucaccgaguccaagccgagcguggagcagcggaagcaggacgacaagaagaucaaggcgugcgucgaggaggugacgaccacccucgaggagaccaaguuccugacggagaaccugcuccuguacaucgacaucaacggcaaccugcaccccgacuccgccacccucgugagcgacaucgacaucaccuuccugaagaaggacgcccccuacaucgucggggacguggugcaggagggcguccugaccgccguggugauccccacgaagaaggccggcgggaccaccgagaugcucgcgaaggcccugcgcaaggucccgaccgacaacuacaucacgaccuaccccggccaggggcugaacggcuacaccguggaggaggccaagaccgugcucaagaagugcaaguccgccuucuacauccugcccagcaucaucuccaacgagaagcaggagauccuggggaccgucagcuggaaccuccgggagaugcuggcgcacgccgaggagacgcgcaagcugaugcccgugugcguggagaccaaggccaucgucuccaccauccagcggaaguacaagggcaucaagauccaggagggcgugguggacuacggggcccgcuucuacuucuacaccagcaagacgaccgucgccucccugaucaacacccucaacgaccugaacgagacccuggugacgaugccgcucggcuacgugacccacgggcugaaccuggaggaggcggcccgguacaugcgcagccucaagguccccgccaccguguccgugagcucccccgacgccgucaccgccuacaacggcuaccugacgagcuccagcaagacccccgaggagcacuucaucgagaccaucucccuggcggggagcuacaaggacuggagcuacuccggccagagcacccagcucggcaucgaguuccugaagcggggggacaaguccguguacuacacgagcaacccgaccaccuuccaccuggacggcgaggugaucaccuucgacaaccucaagacgcugcugucccuccgcgagguccggaccaucaagguguucaccaccguggacaacaucaaccugcacacgcaggucguggacaugagcaugaccuacgggcagcaguucggccccaccuaccuggacggcgccgacgugaccaagaucaagccccacaacucccacgaggggaagacguucuacguccucccgaacgacgacacccugcgcguggaggccuucgaguacuaccacaccaccgaccccagcuuccugggccgguacauguccgcccucaaccacacgaagaaguggaaguacccccaggugaacgggcugaccagcaucaagugggccgacaacaacugcuaccuggcgaccgcccuccugacccugcagcagaucgagcucaaguucaaccccccggcccugcaggacgccuacuaccgcgcgcgggccggcgaggccgccaacuucugcgcccugauccucgcguacugcaacaagacggucggggagcugggcgacgugcgcgagaccauguccuaccuguuccagcacgccaaccucgacagcugcaagcggguccugaacguggugugcaagaccugcggccagcagcagaccacccugaagggggucgaggccgugauguacaugggcacgcucuccuacgagcaguucaagaagggggugcagauccccugcaccugcggcaagcaggccaccaaguaccugguccagcaggagagccccuucgugaugauguccgcccccccggcgcaguacgagcugaagcacgggaccuucacgugcgccagcgaguacaccggcaacuaccagugcggccacuacaagcacaucaccuccaaggagacccucuacugcaucgacggggcccugcugacgaagagcagcgaguacaagggccccaucaccgacguguucuacaaggagaacuccuacaccaccacgaucaagcccgucaccuacaagcucgacgggguggugugcaccgagaucgaccccaagcuggacaacuacuacaagaaggacaacagcuacuucaccgagcagccgaucgaccugguccccaaccagcccuaccccaacgccuccuucgacaacuucaaguucgugugcgacaacaucaaguucgccgacgaccucaaccagcugacgggcuacaagaagccggcgagccgcgagcugaaggugaccuucuuccccgaccucaacggggacgucguggccaucgacuacaagcacuacacccccuccuucaagaagggcgccaagcugcugcacaagcccaucguguggcacgucaacaacgccaccaacaaggcgacguacaagccgaacaccuggugcauccggugccucuggagcaagaagcccguggagaccuccaacagcuucgacgugcugaaguccgaggacgcccagggcauggacaaccuggccugcgaggaccucaagcccgucagcgaggaggugguggagaaccccaccauccagaaggacguccuggagugcaacgugaagacgaccgagguggucggggacaucauccugaagccggccaacaacucccucaagaucaccgaggaggugggccacaccgaccugauggccgcguacguggacaacagcucccugacgaucaagaagcccaacgagcucagccgcguccuggggcugaagacccucgccacccacggccuggccgccgugaacuccgugcccugggacaccaucgccaacuacgcgaagccguuccugaacaaggucgugagcacgaccaccaacaucgugacccgcugccucaaccgggucugcacgaacuacaugcccuacuucuucacccugcugcuccagcugugcaccuucacccgcuccaccaacagccggaucaaggccuccaugcccacgaccaucgccaagaacaccgugaagagcguggggaaguucugccuggaggccagcuucaacuaccucaagucccccaacuucagcaagcugaucaacaucaucaucugguuccugcuccuguccgucugccugggcagccucaucuacuccaccgccgcgcugggcgugcugaugagcaaccucgggaugccguccuacugcacgggcuaccgcgagggguaccugaacagcaccaacgugaccaucgccaccuacugcacgggcuccauccccugcagcgucugccuguccggccucgacagccuggacaccuaccccucccuggagaccauccagaucaccaucagcuccuucaagugggaccucacggccuucgggcugguggccgagugguuccuggccuacauccucuucacccgguucuucuacgugcugggccuggcggccaucaugcagcucuucuucagcuacuucgccguccacuucaucuccaacagcuggcugauguggcugaucaucaaccuggugcagauggcccccaucuccgcgauggugcgcauguacaucuucuucgccagcuucuacuacgucuggaagagcuacgugcacguggucgacgggugcaacuccagcaccugcaugaugugcuacaagcggaaccgcgccacccggguggagugcacgaccaucgucaacggcgugcgccgguccuucuacguguacgccaacgggggcaagggcuucugcaagcuccacaacuggaacugcgucaacugcgacaccuucugcgccgggagcaccuucaucuccgacgagguggcgcgcgaccugagccugcaguucaagcggccgaucaaccccacggaccaguccagcuacaucguggacuccgucaccgugaagaacggcagcauccaccucuacuucgacaaggccgggcagaagaccuacgagcgccacucccugagccacuucgugaaccuggacaaccuccgggccaacaacaccaagggcucccugcccaucaacgucaucguguucgacgggaagagcaagugcgaggaguccagcgccaaguccgccagcguguacuacucccagcugaugugccagcccauccuccugcuggaccaggcgcucgucagcgacgugggcgacagcgccgagguggccgucaagauguucgacgccuacgugaacacguucuccagcaccuucaacgugccgauggagaagcugaagacccuggucgccaccgcggaggccgagcucgccaagaacgugucccuggacaacgugcugagcacguucaucuccgccgcgcgccagggcuucgucgacagcgacguggagaccaaggacguggucgagugccucaagcugucccaccagagcgacaucgaggugaccggggacuccugcaacaacuacaugcugaccuacaacaagguggagaacaugacgccccgggaccucggcgccugcaucgacugcagcgcccgccacaucaacgcccaggucgccaagucccacaacaucgcgcugaucuggaacgugaaggacuucaugagccuguccgagcagcuccggaagcagauccgcagcgccgccaagaagaacaaccugcccuucaagcugaccugcgccaccacccgccagguggucaacguggugacgaccaagaucgcccucaaggggggcugaggacuaguuauaagacugacuagcccgaugggccucccaacgggcccuccuccccuccuugcaccgagauuaauaaaaaaaaaaaaaaaaaaaaaaaaaaaaaaaaaaaaaaaaaaaaaaaaaaaaaaaaaaaaaaaaugcaucccccccccccccccccccccccccccccccaaaggcucuuuucagagccaccagaauu

SEQ ID NO: 21808 - RNA, 6058 nt, Artificial Sequence
  SARS-CoV-2__MT641692.1__non-structural protein 3 (NSP3) mRNA gc
aggagaaagcuuaccauggcccccaccaaggugaccuucggcgacgacacggucaucgaggugcagggguacaagagcgugaacaucaccuucgagcuggacgagcgcaucgacaagguccucaacgagaagugcuccgccuacaccguggagcugggcaccgaggugaacgaguucgcgugcgucguggccgacgccgugaucaagacgcugcagccggucagcgagcuccugaccccccuggggaucgaccucgacgagugguccauggccaccuacuaccuguucgacgagagcggcgacuucaagcuggccucccacauguacugcagcuucuacccccccgacgaggacgaggaggagggggacugcgaggaggaggaguucgagccguccacccaguacgaguacggcacggaggacgacuaccagggcaagccccucgaguucggggcgaccagcgccgcccugcagcccgaggaggagcaggaggaggacuggcuggacgacgacucccagcagaccgugggccagcaggacgggagcgaggacaaccagaccacgaccauccagaccaucguggagguccagccccagcucgagauggagcugaccccgguggugcagacgaucgaggucaacuccuucagcggcuaccugaagcucaccgacaacguguacaucaagaacgccgacaucguggaggaggcgaagaaggucaagcccaccgugguggucaacgccgccaacguguaccugaagcacgggggcggcguggccggggcccugaacaaggcgaccaacaacgccaugcaggucgaguccgacgacuacaucgccacgaacggcccccucaagguggucgggagcugcgugcuguccggccacaaccuggccaagcacugccuccacguggucggccccaacgugaacaagggggaggacauccagcugcugaagagcgccuacgagaacuucaaccagcacgaggugcuccuggcgccgcugcucuccgccggcaucuucggggccgaccccauccacagccugcgggucugcguggacaccgugcgcaccaacgucuaccuggccguguucgacaagaaccucuacgacaagcugguguccagcuuccuggagaugaagagcgagaagcaggucgagcagaagaucgccgagauccccaaggaggaggugaagcccuucaucaccgaguccaagccgagcguggagcagcggaagcaggacgacaagaagaucaaggcgugcgucgaggaggugacgaccacccucgaggagaccaaguuccugacggagaaccugcuccuguacaucgacaucaacggcaaccugcaccccgacuccgccacccucgugagcgacaucgacaucaccuuccugaagaaggacgcccccuacaucgucggggacguggugcaggagggcguccugaccgccguggugauccccacgaagaaggccggcgggaccaccgagaugcucgcgaaggcccugcgcaaggucccgaccgacaacuacaucacgaccuaccccggccaggggcugaacggcuacaccguggaggaggccaagaccgugcucaagaagugcaaguccgccuucuacauccugcccagcaucaucuccaacgagaagcaggagauccuggggaccgucagcuggaaccuccgggagaugcuggcgcacgccgaggagacgcgcaagcugaugcccgugugcguggagaccaaggccaucgucuccaccauccagcggaaguacaagggcaucaagauccaggagggcgugguggacuacggggcccgcuucuacuucuacaccagcaagacgaccgucgccucccugaucaacacccucaacgaccugaacgagacccuggugacgaugccgcucggcuacgugacccacgggcugaaccuggaggaggcggcccgguacaugcgcagccucaagguccccgccaccguguccgugagcucccccgacgccgucaccgccuacaacggcuaccugacgagcuccagcaagacccccgaggagcacuucaucgagaccaucucccuggcggggagcuacaaggacuggagcuacuccggccagagcacccagcucggcaucgaguuccugaagcggggggacaaguccguguacuacacgagcaacccgaccaccuuccaccuggacggcgaggugaucaccuucgacaaccucaagacgcugcugucccuccgcgagguccggaccaucaagguguucaccaccguggacaacaucaaccugcacacgcaggucguggacaugagcaugaccuacgggcagcaguucggccccaccuaccuggacggcgccgacgugaccaagaucaagccccacaacucccacgaggggaagacguucuacguccucccgaacgacgacacccugcgcguggaggccuucgaguacuaccacaccaccgaccccagcuuccugggccgguacauguccgcccucaaccacacgaagaaguggaaguacccccaggugaacgggcugaccagcaucaagugggccgacaacaacugcuaccuggcgaccgcccuccugacccugcagcagaucgagcucaaguucaaccccccggcccugcaggacgccuacuaccgcgcgcgggccggcgaggccgccaacuucugcgcccugauccucgcguacugcaacaagacggucggggagcugggcgacgugcgcgagaccauguccuaccuguuccagcacgccaaccucgacagcugcaagcggguccugaacguggugugcaagaccugcggccagcagcagaccacccugaagggggucgaggccgugauguacaugggcacgcucuccuacgagcaguucaagaagggggugcagauccccugcaccugcggcaagcaggccaccaaguaccugguccagcaggagagccccuucgugaugauguccgcccccccggcgcaguacgagcugaagcacgggaccuucacgugcgccagcgaguacaccggcaacuaccagugcggccacuacaagcacaucaccuccaaggagacccucuacugcaucgacggggcccugcugacgaagagcagcgaguacaagggccccaucaccgacguguucuacaaggagaacuccuacaccaccacgaucaagcccgucaccuacaagcucgacgggguggugugcaccgagaucgaccccaagcuggacaacuacuacaagaaggacaacagcuacuucaccgagcagccgaucgaccugguccccaaccagcccuaccccaacgccuccuucgacaacuucaaguucgugugcgacaacaucaaguucgccgacgaccucaaccagcugacgggcuacaagaagccggcgagccgcgagcugaaggugaccuucuuccccgaccucaacggggacgucguggccaucgacuacaagcacuacacccccuccuucaagaagggcgccaagcugcugcacaagcccaucguguggcacgucaacaacgccaccaacaaggcgacguacaagccgaacaccuggugcauccggugccucuggagcaccaagcccguggagaccuccaacagcuucgacgugcugaaguccgaggacgcccagggcauggacaaccuggccugcgaggaccucaagcccgucagcgaggaggugguggagaaccccacgauccagaaggacguccuggagugcaacgugaagaccaccgagguggucggggacaucauccugaagccggccaacaacucccucaagaucaccgaggaggugggccacacggaccugauggccgcguacguggacaacagcucccugaccaucaagaagcccaacgagcucagccgcguccuggggcugaagacccucgccacccacggccuggccgccgugaacuccgugcccugggacacgaucgccaacuacgcgaagccguuccugaacaaggucgugagcaccaccaccaacaucgugacgcgcugccucaaccgggucugcaccaacuacaugcccuacuucuucacccugcugcuccagcugugcaccuucacccgcuccacgaacagccggaucaaggccuccaugcccaccaccaucgccaagaacaccgugaagagcguggggaaguucugccuggaggccagcuucaacuaccucaagucccccaacuucagcaagcugaucaacaucaucaucugguuccugcuccuguccgucugccugggcagccucaucuacuccacggccgcgcugggcgugcugaugagcaaccucgggaugccguccuacugcaccggcuaccgcgagggguaccugaacagcaccaacgugaccaucgccacguacugcaccggcuccauccccugcagcgucugccuguccggccucgacagccuggacaccuaccccucccuggagaccauccagaucacgaucagcuccuucaagugggaccucaccgccuucgggcugguggccgagugguuccuggccuacauccucuucacccgguucuucuacgugcugggccuggcggccaucaugcagcucuucuucagcuacuucgccguccacuucaucuccaacagcuggcugauguggcugaucaucaaccuggugcagauggcccccaucuccgcgauggugcgcauguacaucuucuucgccagcuucuacuacgucuggaagagcuacgugcacguggucgacgggugcaacuccagcaccugcaugaugugcuacaagcggaaccgcgccacgcggguggagugcaccaccaucgucaacggcgugcgccgguccuucuacguguacgccaacgggggcaagggcuucugcaagcuccacaacuggaacugcgucaacugcgacaccuucugcgccgggagcacguucaucuccgacgagguggcgcgcgaccugagccugcaguucaagcggccgaucaaccccaccgaccaguccagcuacaucguggacuccgucaccgugaagaacggcagcauccaccucuacuucgacaaggccgggcagaagaccuacgagcgccacucccugagccacuucgugaaccuggacaaccuccgggccaacaacacgaagggcucccugcccaucaacgucaucguguucgacgggaagagcaagugcgaggaguccagcgccaaguccgccagcguguacuacucccagcugaugugccagcccauccuccugcuggaccaggcgcucgucagcgacgugggcgacagcgccgagguggccgucaagauguucgacgccuacgugaacaccuucuccagcaccuucaacgugccgauggagaagcugaagacccuguucgccacggcggaggccgagcucgccaagaacgucucccuggacaacgugcugagcaccuucaucuccgccgcgcgccagggcuucguggacagcgacgucgagaccaaggacgugguggagugccucaagcugucccaccagagcgacaucgaggucaccggggacuccugcaacaacuacaugcugacguacaacaagguggagaacaugaccccccgggaccucggcgccugcaucgacugcagcgcccgccacaucaacgcccagguggccaagucccacaacaucgcgcugaucuggaacgucaaggacuucaugagccuguccgagcagcuccggaagcagauccgcagcgccgccaagaagaacaaccugcccuucaagcugaccugcgccaccacgcgccagguggugaacgucgugaccaccaagaucgcccucaaggggggcugaggacuaguuauaagacugacuagcccgaugggccucccaacgggcccuccuccccuccuugcaccgagauuaauaaaaaaaaaaaaaaaaaaaaaaaaaaaaaaaaaaaaaaaaaaaaaaaaaaaaaaaaaaaaaaaaugcaucccccccccccccccccccccccccccccccaaaggcucuuuucagagccaccagaauu

SEQ ID NO: 21809 - RNA, 6058 nt, Artificial Sequence
  SARS-CoV-2__MT641693.1__non-structural protein 3 (NSP3) mRNA gc
aggagaaagcuuaccauggcccccaccaaggugaccuucggcgacgacacggucaucgaggugcagggguacaagagcgugaacaucaccuucgagcuggacgagcgcaucgacaagguccucaacgagaagugcuccgccuacaccguggagcugggcaccgaggugaacgaguucgcgugcgucguggccgacgccgugaucaagacgcugcagccggucagcgagcuccugaccccccuggggaucgaccucgacgagugguccauggccaccuacuaccuguucgacgagagcggcgaguucaagcuggccucccacauguacugcagcuucuacccccccgacgaggacgaggaggagggggacugcgaggaggaggaguucgagccguccacccaguacgaguacggcacggaggacgacuaccagggcaagccccucgaguucggggcgaccagcgccgcccugcagcccgaggaggagcaggaggaggacuggcuggacgacgacucccagcagaccgugggccagcaggacgggagcgaggacaaccagaccacgaccauccagaccaucguggagguccagccccagcucgagauggagcugaccccgguggugcagacgaucgaggucaacuccuucagcggcuaccugaagcucaccgacaacguguacaucaagaacgccgacaucguggaggaggcgaagaaggucaagcccaccgugguggucaacgccgccaacguguaccugaagcacgggggcggcguggccggggcccugaacaaggcgaccaacaacgccaugcaggucgaguccgacgacuacaucgccacgaacggcccccucaagguggucgggagcugcgugcuguccggccacaaccuggccaagcacugccuccacguggucggccccaacgugaacaagggggaggacauccagcugcugaagagcgccuacgagaacuucaaccagcacgaggugcuccuggcgccgcugcucuccgccggcaucuucggggccgaccccauccacagccugcgggucugcguggacaccgugcgcaccaacgucuaccuggccguguucgacaagaaccucuacgacaagcugguguccagcuuccuggagaugaagagcgagaagcaggucgagcagaagaucgccgagauccccaaggaggaggugaagcccuucaucaccgaguccaagccgagcguggagcagcggaagcaggacgacaagaagaucaaggcgugcgucgaggaggugacgaccacccucgaggagaccaaguuccugacggagaaccugcuccuguacaucgacaucaacggcaaccugcaccccgacuccgccacccucgugagcgacaucgacaucaccuuccugaagaaggacgcccccuacaucgucggggacguggugcaggagggcguccugaccgccguggugauccccacgaagaaggccggcgggaccaccgagaugcucgcgaaggcccugcgcaaggucccgaccgacaacuacaucacgaccuaccccggccaggggcugaacggcuacaccguggaggaggccaagaccgugcucaagaagugcaaguccgccuucuacauccugcccagcaucaucuccaacgagaagcaggagauccuggggaccgucagcuggaaccuccgggagaugcuggcgcacgccgaggagacgcgcaagcugaugcccgugugcguggagaccaaggccaucgucuccaccauccagcggaaguacaagggcaucaagauccaggagggcgugguggacuacggggcccgcuucuacuucuacaccagcaagacgaccgucgccucccugaucaacacccucaacgaccugaacgagacccuggugacgaugccgcucggcuacgugacccacgggcugaaccuggaggaggcggcccgguacaugcgcagccucaagguccccgccaccguguccgugagcucccccgacgccgucaccgccuacaacggcuaccugacgagcuccagcaagacccccgaggagcacuucaucgagaccaucucccuggcggggagcuacaaggacuggagcuacuccggccagagcacccagcucggcaucgaguuccugaagcggggggacaaguccguguacuacacgagcaacccgaccaccuuccaccuggacggcgaggugaucaccuucgacaaccucaagacgcugcugucccuccgcgagguccggaccaucaagguguucaccaccguggacaacaucaaccugcacacgcaggucguggacaugagcaugaccuacgggcagcaguucggccccaccuaccuggacggcgccgacgugaccaagaucaagccccacaacucccacgaggggaagacguucuacguccucccgaacgacgacacccugcgcguggaggccuucgaguacuaccacaccaccgaccccagcuuccugggccgguacauguccgcccucaaccacacgaagaaguggaaguacccccaggugaacgggcugaccagcaucaagugggccgacaacaacugcuaccuggcgaccgcccuccugacccugcagcagaucgagcucaaguucaaccccccggcccugcaggacgccuacuaccgcgcgcgggccggcgaggccgccaacuucugcgcccugauccucgcguacugcaacaagacggucggggagcugggcgacgugcgcgagaccauguccuaccuguuccagcacgccaaccucgacagcugcaagcggguccugaacguggugugcaagaccugcggccagcagcagaccacccugaagggggucgaggccgugauguacaugggcacgcucuccuacgagcaguucaagaagggggugcagauccccugcaccugcggcaagcaggccaccaaguaccugguccagcaggagagccccuucgugaugauguccgcccccccggcgcaguacgagcugaagcacgggaccuucacgugcgccagcgaguacaccggcaacuaccagugcggccacuacaagcacaucaccuccaaggagacccucuacugcaucgacggggcccugcugacgaagagcagcgaguacaagggccccaucaccgacguguucuacaaggagaacuccuacaccaccacgaucaagcccgucaccuacaagcucgacgggguggugugcaccgagaucgaccccaagcuggacaacuacuacaagaaggacaacagcuacuucaccgagcagccgaucgaccugguccccaaccagcccuaccccaacgccuccuucgacaacuucaaguucgugugcgacaacaucaaguucgccgacgaccucaaccagcugacgggcuacaagaagccggcgagccgcgagcugaaggugaccuucuuccccgaccucaacggggacgucguggccaucgacuacaagcacuacacccccuccuucaagaagggcgccaagcugcugcacaagcccaucguguggcacgucaacaacgccaccaacaaggcgacguacaagccgaacaccuggugcauccggugccucuggagcaccaagcccguggagaccuccaacagcuucgacgugcugaaguccgaggacgcccagggcauggacaaccuggccugcgaggaccucaagcccgucagcgaggaggugguggagaaccccacgauccagaaggacguccuggagugcaacgugaagaccaccgagguggucggggacaucauccugaagccggccaacaacucccucaagaucaccgaggaggugggccacacggaccugauggccgcguacguggacaacagcucccugaccaucaagaagcccaacgagcucagccgcguccuggggcugaagacccucgccacccacggccuggccgccgugaacuccgugcccugggacacgaucgccaacuacgcgaagccguuccugaacaaggucgugagcaccaccaccaacaucgugacgcgcugccucaaccgggucugcaccaacuacaugcccuacuucuucacccugcugcuccagcugugcaccuucacccgcuccacgaacagccggaucaaggccuccaugcccaccaccaucgccaagaacaccgugaagagcguggggaaguucugccuggaggccagcuucaacuaccucaagucccccaacuucuucaagcugaucaacaucaucaucugguuccugcuccugagcgucugccugggcucccucaucuacagcacggccgcgcugggcgugcugauguccaaccucgggaugccgagcuacugcaccggcuaccgcgagggguaccugaacuccaccaacgugaccaucgccacguacugcaccggcagcauccccugcuccgucugccugagcggccucgacucccuggacaccuaccccagccuggagaccauccagaucacgaucuccagcuucaagugggaccucaccgccuucgggcugguggccgagugguuccuggccuacauccucuucacccgguucuucuacgugcugggccuggcggccaucaugcagcucuucuucuccuacuucgccguccacuucaucagcaacuccuggcugauguggcugaucaucaaccuggugcagauggcccccaucagcgcgauggugcgcauguacaucuucuucgccuccuucuacuacgucuggaagagcuacgugcacguggucgacgggugcaacagcuccaccugcaugaugugcuacaagcggaaccgcgccacgcggguggagugcaccaccaucgucaacggcgugcgccggagcuucuacguguacgccaacgggggcaagggcuucugcaagcuccacaacuggaacugcgucaacugcgacaccuucugcgccggguccacguucaucagcgacgagguggcgcgcgaccugucccugcaguucaagcggccgaucaaccccaccgaccagagcuccuacaucguggacagcgucaccgugaagaacggcuccauccaccucuacuucgacaaggccgggcagaagaccuacgagcgccacagccugucccacuucgugaaccuggacaaccuccgggccaacaacacgaagggcagccugcccaucaacgucaucguguucgacgggaaguccaagugcgaggagagcuccgccaagagcgccuccguguacuacagccagcugaugugccagcccauccuccugcuggaccaggcgcucgucuccgacgugggcgacagcgccgagguggccgucaagauguucgacgccuacgugaacaccuucagcuccaccuucaacgugccgauggagaagcugaagacccuggucgccacggcggaggccgagcucgccaagaacgugagccuggacaacgugcuguccaccuucaucagcgccgcgcgccagggcuucgucgacuccgacguggagaccaaggacguggucgagugccucaagcugagccaccaguccgacaucgaggugaccggggacagcugcaacaacuacaugcugacguacaacaagguggagaacaugaccccccgggaccucggcgccugcaucgacugcuccgcccgccacaucaacgcccaggucgccaagagccacaacaucgcgcugaucuggaacgugaaggacuucaugucccugagcgagcagcuccggaagcagauccgcuccgccgccaagaagaacaaccugcccuucaagcugaccugcgccaccacgcgccagguggucaacguggugaccaccaagaucgcccucaaggggggcugaggacuaguuauaagacugacuagcccgaugggccucccaacgggcccuccuccccuccuugcaccgagauuaauaaaaaaaaaaaaaaaaaaaaaaaaaaaaaaaaaaaaaaaaaaaaaaaaaaaaaaaaaaaaaaaaugcaucccccccccccccccccccccccccccccccaaaggcucuuuucagagccaccagaauu

SEQ ID NO: 21810 - RNA, 6058 nt, Artificial Sequence
  SARS-CoV-2__MT641740.1__non-structural protein 3 (NSP3) mRNA gc
aggagaaagcuuaccauggcccccaccaaggugaccuucggcgacgacacggucaucgaggugcagggguacaagagcgugaacaucaccuucgagcuggacgagcgcaucgacaagguccucaacgagaagugcuccgccuacaccguggagcugggcaccgaggugaacgaguucgcgugcgucguggccgacgccgugaucaagacgcugcagccggucagcgagcuccugaccccccuggggaucgaccucgacgagugguccauggccaccuacuaccuguucgacgagagcggcgaguucaagcuggccucccacauguacugcagcuucuacccccccgacgaggacgaggaggagggggacugcgaggaggaggaguucgagccguccacccaguacgaguacggcacggaggacgacuaccagggcaagccccucgaguucggggcgaccagcgccgcccugcagcuggaggaggagcaggaggaggacuggcucgacgacgacucccagcagaccgugggccagcaggacgggagcgaggacaaccagaccacgaccauccagaccaucguggagguccagccccagcuggagauggagcugacccccguggugcagacgaucgaggucaacuccuucagcggcuaccucaagcugaccgacaacguguacaucaagaacgccgacaucguggaggaggcgaagaaggucaagccgaccgugguggucaacgccgccaacguguaccugaagcacgggggcggcguggccggggcccucaacaaggcgaccaacaacgccaugcaggucgaguccgacgacuacaucgccacgaacggcccccugaagguggggggcagcugcguccuguccggccacaaccucgccaagcacugccugcacgugguggggcccaacgucaacaagggcgaggacauccagcugcucaagagcgccuacgagaacuucaaccagcacgaggugcugcuggcgccccuccuguccgccgggaucuucggcgccgacccgauccacagccugcgggugugcgucgacaccgugcgcaccaacguguaccucgccgucuucgacaagaaccuguacgacaagcugguguccagcuuccucgagaugaagagcgagaagcagguggagcagaagaucgccgagauccccaaggaggaggucaagcccuucaucaccgaguccaagcccagcguggagcagcggaagcaggacgacaagaagaucaaggcgugcguggaggaggucacgaccacccuggaggagaccaaguuccugacggagaaccuccugcuguacaucgacaucaacgggaaccuccacccggacuccgccacccuggugagcgacaucgacaucaccuuccugaagaaggacgcccccuacaucgugggcgacgucgugcaggagggcgugcucaccgccgucgugauccccacgaagaaggccgggggcaccaccgagaugcuggcgaaggcccugcgcaaggugcccaccgacaacuacaucacgaccuacccggggcagggccucaacggguacaccgucgaggaggccaagaccgugcugaagaagugcaaguccgccuucuacauccugcccagcaucaucuccaacgagaagcaggagauccucggcaccgugagcuggaaccugcgggagaugcuggcgcacgccgaggagacgcgcaagcugaugcccgucugcguggagaccaaggccaucguguccaccauccagcggaaguacaagggcaucaagauccaggagggggucguggacuacggcgcccgcuucuacuucuacaccagcaagacgaccguggccucccucaucaacacccugaacgaccugaacgagacccucgucacgaugccccugggguacgugacccacggccugaaccucgaggaggcggcccgguacaugcgcagccugaaggugccggccaccgucuccgugagcucccccgacgccgugaccgccuacaacggguaccugacgagcuccagcaagacccccgaggagcacuucaucgagaccaucucccucgcgggcagcuacaaggacuggagcuacuccggccagagcacccagcuggggaucgaguuccugaagcggggcgacaaguccgucuacuacacgagcaaccccaccaccuuccaccucgacggggaggugaucaccuucgacaaccugaagacgcugcucucccugcgcgaggugcggaccaucaaggucuucaccaccguggacaacaucaaccugcacacgcagguggucgacaugagcaugaccuacggccagcaguucggcccgaccuaccucgacggggccgacgugaccaagaucaagccccacaacucccacgagggcaagacguucuacgugcugcccaacgacgacacccugcgcgucgaggccuucgaguacuaccacaccaccgacccgagcuuccucgggcgguacauguccgcccugaaccacacgaagaaguggaaguacccccaggugaacggccugaccagcaucaagugggccgacaacaacugcuaccucgcgaccgcccugcugacccuccagcagaucgagcugaaguucaacccccccgcccugcaggacgccuacuaccgcgcgcgggccggggaggccgccaacuucugcgcccucauccuggcguacugcaacaagacggugggcgagcugggcgacguccgcgagaccauguccuaccucuuccagcacgccaaccuggacagcugcaagcgggugcugaacgucgugugcaagaccugcgggcagcagcagaccacccucaagggcguggaggccgucauguacauggggacgcuguccuacgagcaguucaagaagggcgugcagaucccgugcaccugcgggaagcaggccaccaaguaccuggugcagcaggagagccccuucgucaugauguccgccccccccgcgcaguacgagcucaagcacggcaccuucacgugcgccagcgaguacaccggcaacuaccagugcgggcacuacaagcacaucaccuccaaggagacccuguacugcaucgacggcgcccugcucacgaagagcagcgaguacaaggggccgaucaccgacguguucuacaaggagaacuccuacaccaccacgaucaagcccgugaccuacaagcuggacggcgucgugugcaccgagaucgaccccaagcuggacaacuacuacaagaaggacaacagcuacuucaccgagcagcccaucgaccucgugccgaaccagcccuaccccaacgccuccuucgacaacuucaaguucgucugcgacaacaucaaguucgccgacgaccugaaccagcugacgggguacaagaagcccgcgagccgcgagcucaaggugaccuucuucccggaccugaacggcgacguggucgccaucgacuacaagcacuacacccccuccuucaagaagggcgccaagcugcuccacaagcccaucguguggcacgugaacaacgccaccaacaaggcgacguacaagcccaacaucuggugcauccggugccuguggagcaccaagccggucgagaccuccaacagcuucgacgugcugaaguccgaggacgcccaggggauggacaaccucgccugcgaggaccugaagcccgugagcgaggaggucguggagaaccccaccauccagaaggacgugcuggagugcaacgucaagacgaccgagguggugggcgacaucauccucaagcccgccaacaacucccugaagaucaccgaggaggucgggcacaccgaccugauggccgcguacguggacaacagcucccucacgaucaagaagccgaacgagcugagccgcgugcugggccucaagacccuggccacccacgggcuggccgccgucaacuccgugcccugggacaccaucgccaacuacgcgaagcccuuccucaacaagguggucagcacgaccaccaacaucgugacccgcugccugaaccgggugugcacgaacuacaugccguacuucuucacccugcuccugcagcugugcaccuucacccgcuccaccaacagccggaucaaggccuccaugcccacgaccaucgccaagaacaccgucaagagcgugggcaaguucugccucgaggccagcuucaacuaccugaagucccccaacuucagcaagcugaucaacaucaucaucugguuccuccugcuguccgugugccucggcagccugaucuacuccaccgccgcgcuggggguccucaugagcaaccugggcaugcccuccuacugcacgggguaccgcgagggcuaccugaacagcaccaacgugaccaucgccaccuacugcacgggcuccaucccgugcagcgugugccucuccgggcuggacagccuggacaccuaccccucccucgagaccauccagaucaccaucagcuccuucaagugggaccugacggccuucggccuggucgccgagugguuccucgccuacauccuguucacccgguucuucuacgugcuggggcucgcggccaucaugcagcuguucuucagcuacuucgccgugcacuucaucuccaacagcuggcugauguggcugaucaucaaccucguccagauggcccccaucuccgcgauggugcgcauguacaucuucuucgccagcuucuacuacguguggaagagcuacguccacgugguggacggcugcaacuccagcaccugcaugaugugcuacaagcggaaccgcgccacccgggucgagugcacgaccaucgugaacgggguccgccgguccuucuacguguacgccaacggcggcaagggguucugcaagcugcacaacuggaacugcgugaacugcgacaccuucugcgccggcagcaccuucaucuccgacgaggucgcgcgcgaccugagccuccaguucaagcggcccaucaacccgacggaccaguccagcuacaucguggacuccgugaccgucaagaacgggagcauccaccuguacuucgacaaggccggccagaagaccuacgagcgccacucccugagccacuucgugaaccucgacaaccugcgggccaacaacaccaaggggucccugcccaucaacgugaucgucuucgacggcaagagcaagugcgaggaguccagcgccaaguccgccagcguguacuacucccagcucaugugccagcccauccugcugcucgaccaggcgcuggugagcgacgucggcgacagcgccgagguggccgugaagauguucgacgccuacgucaacacguucuccagcaccuucaacgugcccauggagaagcugaagacccucguggccaccgcggaggccgagcuggccaagaacgucucccuggacaacgugcucagcacguucaucuccgccgcgcgccagggguucguggacagcgacgucgagaccaaggacgugguggagugccugaagcugucccaccagagcgacaucgaggucaccggcgacuccugcaacaacuacaugcucaccuacaacaagguggagaacaugacgccgcgggaccugggggccugcaucgacugcagcgcccgccacaucaacgcccagguggccaagucccacaacaucgcgcugaucuggaacgucaaggacuucaugagccucuccgagcagcugcggaagcagauccgcagcgccgccaagaagaacaaccugcccuucaagcucaccugcgccaccacccgccagguggugaacgucgugacgaccaagaucgcccugaagggcgggugaggacuaguuauaagacugacuagcccgaugggccucccaacgggcccuccuccccuccuugcaccgagauuaauaaaaaaaaaaaaaaaaaaaaaaaaaaaaaaaaaaaaaaaaaaaaaaaaaaaaaaaaaaaaaaaaugcaucccccccccccccccccccccccccccccccaaaggcucuuuucagagccaccagaauu

SEQ ID NO: 21811 - RNA, 6058 nt, Artificial Sequence
  SARS-CoV-2__MT641767.1__non-structural protein 3 (NSP3) mRNA gc
aggagaaagcuuaccauggcccccaccaaggugaccuucggcgacgacacggucaucgaggugcagggguacaagagcgugaacaucaccuucgagcuggacgagcgcaucgacaagguccucaacgagaagugcuccgccuacaccguggagcugggcaccgaggugaacgaguucgcgugcgucguggccgacgccgugaucaagacgcugcagccggucagcgagcuccugaccccccuggggaucgaccucgacgagugguccauggccaccuacuaccuguucgacgagagcggcgaguucaagcuggccucccacauguacugcagcuucuacccccccgacgaggacgaggaggagggggacugcgaggaggaggaguucgagccguccacccaguacgaguacggcacggaggacgacuaccagggcaagccccucgaguucggggcgaccagcgccgcccugcagcccgaggaggagcaggaggaggacuggcuggacgacgacucccagcagaccgugggccagcaggacgggagcgaggacaaccagaccacgaccauccagaccaucguggagguccagccccagcucgagauggagcugaccccgguggugcagacgaucgaggucaacuccuucagcggcuaccugaagcucaccgacaacguguacaucaagaacgccgacaucguggaggaggcgaagaaggucaagcccaccgugguggucaacgccgccaacguguaccugaagcacgggggcggcguggccggggcccugaacaaggcgaccaacaacgccaugcaggucgaguccgacgacuacaucgccacgaacggcccccucaagguggggggcagcugcguccuguccggccacaaccuggccaagcacugccuccacgugguggggcccaacgucaacaagggcgaggacauccagcugcugaagagcgccuacgagaacuucaaccagcacgaggugcuccuggcgccgcugcucuccgccgggaucuucggcgccgaccccauccacagccugcgggugugcgucgacaccgugcgcaccaacguguaccuggccgucuucgacaagaaccucuacgacaagcugguguccagcuuccuggagaugaagagcgagaagcagguggagcagaagaucgccgagauccccaaggaggaggucaagcccuucaucaccgaguccaagccgagcguggagcagcggaagcaggacgacaagaagaucaaggcgugcguggaggaggucacgaccacccucgaggagaccaaguuccugacggagaaccugcuccuguacaucgacaucaacgggaaccugcaccccgacuccgccacccucgugagcgacaucgacaucaccuuccugaagaaggacgcccccuacaucgugggcgacgucgugcaggagggcgugcugaccgccgucgugauccccacgaagaaggccgggggcaccaccgagaugcucgcgaaggcccugcgcaaggugccgaccgacaacuacaucacgaccuaccccgggcagggccugaacggguacaccgucgaggaggccaagaccgugcucaagaagugcaaguccgccuucuacauccugcccagcaucaucuccaacgagaagcaggagauccugggcaccgugagcuggaaccuccgggagaugcuggcgcacgccgaggagacgcgcaagcugaugcccgucugcguggagaccaaggccaucguguccaccauccagcggaaguacaagggcaucaagauccaggagggggucguggacuacggcgcccgcuucuacuucuacaccagcaagacgaccguggccucccugaucaacacccucaacgaccugaacgagacccuggucacgaugccgcucggguacgugacccacggccugaaccuggaggaggcggcccgguacaugcgcagccucaaggugcccgccaccgucuccgugagcucccccgacgccgugaccgccuacaacggguaccugacgagcuccagcaagacccccgaggagcacuucaucgagaccaucucccuggcgggcagcuacaaggacuggagcuacuccggccagagcacccagcucgggaucgaguuccugaagcggggcgacaaguccgucuacuacacgagcaacccgaccaccuuccaccuggacggggaggugaucaccuucgacaaccucaagacgcugcugucccuccgcgaggugcggaccaucaaggucuucaccaccguggacaacaucaaccugcacacgcagguggucgacaugagcaugaccuacggccagcaguucggccccaccuaccuggacggggccgacgugaccaagaucaagccccacaacucccacgagggcaagacguucuacgugcucccgaacgacgacacccugcgcgucgaggccuucgaguacuaccacaccaccgaccccagcuuccuggggcgguacauguccgcccucaaccacacgaagaaguggaaguacccccaggugaacggccugaccagcaucaagugggccgacaacaacugcuaccuggcgaccgcccuccugacccugcagcagaucgagcucaaguucaaccccccggcccugcaggacgccuacuaccgcgcgcgggccggggaggccgccaacuucugcgcccugauccucgcguacugcaacaagacggugggcgagcugggcgacguccgcgagaccauguccuaccuguuccagcacgccaaccucgacagcugcaagcgggugcugaacgucgugugcaagaccugcgggcagcagcagaucacccugaagggcguggaggccgucauguacauggggacccucuccuacgagcaguucaagaagggcgugcagauccccugcacgugcgggaagcaggccaccaaguaccuggugcagcaggagagccccuucgucaugauguccgcccccccggcgcaguacgagcugaagcacggcaccuucaccugcgccagcgaguacacgggcaacuaccagugcgggcacuacaagcacaucaccuccaaggagacccucuacugcaucgacggcgcccugcugaccaagagcagcgaguacaaggggcccaucacggacguguucuacaaggagaacuccuacaccaccaccaucaagcccgugacguacaagcucgacggcgucgugugcaccgagaucgaccccaagcuggacaacuacuacaagaaggacaacagcuacuucaccgagcagccgaucgaccuggugcccaaccagcccuaccccaacgccuccuucgacaacuucaaguucgucugcgacaacaucaaguucgccgacgaccucaaccagcugaccggguacaagaagccggcgagccgcgagcugaaggugacguucuuccccgaccucaacggcgacguggucgccaucgacuacaagcacuacacccccuccuucaagaagggcgccaagcugcugcacaagcccaucguguggcacgugaacaacgccaccaacaaggcgaccuacaagccgaacacguggugcauccggugccucuggagcaagaagcccgucgagaccuccaacagcuucgacgugcugaaguccgaggacgcccaggggauggacaaccuggccugcgaggaccucaagcccgugagcgaggaggucguggagaaccccaccauccagaaggacgugcuggagugcaacgucaagaccacggagguggugggcgacaucauccugaagccggccaacaacucccucaagaucaccgaggaggucgggcacaccgaccugauggccgcguacguggacaacagcucccugaccaucaagaagcccaacgagcucagccgcgugcugggccugaagacgcucgccacccacgggcuggccgccgucaacuccgugcccugggacaccaucgccaacuacgcgaagccguuccugaacaagguggucagcaccacgaccaacaucgugacccgcugccucaaccgggugugcaccaacuacaugcccuacuucuucacgcugcugcuccagcugugcaccuucacccgcuccaccaacagccggaucaaggccuccaugcccaccacgaucgccaagaacaccgucaagagcgugggcaaguucugccuggaggccagcuucaacuaccucaagucccccaacuucagcaagcugaucaacaucaucaucugguuccugcuccuguccgugugccugggcagccucaucuacuccaccgccgcgcuggggguccugaugagcaaccucggcaugccguccuacugcaccggguaccgcgagggcuaccugaacagcacgaacgugaccaucgccaccuacugcaccggcuccauccccugcagcgugugccuguccgggcucgacagccuggacacguaccccucccuggagaccauccagaucaccaucagcuccuucaagugggaccucaccgccuucggccuggucgccgagugguuccuggccuacauccucuucacgcgguucuucuacgugcuggggcuggcggccaucaugcagcucuucuucagcuacuucgccgugcacuucaucuccaacagcuggcugauguggcugaucaucaaccugguccagauggcccccaucuccgcgauggugcgcauguacaucuucuucgccagcuucuacuacguguggaagagcuacguccacgugguggacggcugcaacuccagcaccugcaugaugugcuacaagcggaaccgcgccacccgggucgagugcaccacgaucgugaacgggguccgccgguccuucuacguguacgccaacggcggcaagggguucugcaagcuccacaacuggaacugcgugaacugcgacaccuucugcgccggcagcaccuucaucuccgacgaggucgcgcgcgaccugagccugcaguucaagcggccgaucaaccccaccgaccaguccagcuacaucguggacuccgugacggucaagaacgggagcauccaccucuacuucgacaaggccggccagaagaccuacgagcgccacucccugagccacuucgugaaccuggacaaccuccgggccaacaacaccaaggggucccugcccaucaacgugaucgucuucgacggcaagagcaagugcgaggaguccagcgccaaguccgccagcguguacuacucccagcugaugugccagcccauccuccugcuggaccaggcgcucgugagcgacgucggcgacagcgccgagguggccgugaagauguucgacgccuacgucaacaccuucuccagcacguucaacgugccgauggagaagcugaagacccugguggccaccgcggaggccgagcucgccaagaacgucucccuggacaacgugcugagcaccuucaucuccgccgcgcgccagggguucguggacagcgacgucgagacgaaggacgugguggagugccucaagcugucccaccagagcgacaucgaggucaccggcgacuccugcaacaacuacaugcugaccuacaacaagguggagaacaugaccccccgggaccucggggccugcaucgacugcagcgcccgccacaucaacgcccagguggccaagucccacaacaucgcgcugaucuggaacgucaaggacuucaugagccuguccgagcagcuccggaagcagauccgcagcgccgccaagaagaacaaccugcccuucaagcugacgugcgccaccacccgccagguggugaacgucgugaccacgaagaucgcccucaagggcgggugaggacuaguuauaagacugacuagcccgaugggccucccaacgggcccuccuccccuccuugcaccgagauuaauaaaaaaaaaaaaaaaaaaaaaaaaaaaaaaaaaaaaaaaaaaaaaaaaaaaaaaaaaaaaaaaaugcaucccccccccccccccccccccccccccccccaaaggcucuuuucagagccaccagaauu

SEQ ID NO: 21812 - RNA, 6058 nt, Artificial Sequence
  SARS-CoV-2__MT642085.1__non-structural protein 3 (NSP3) mRNA gc
aggagaaagcuuaccauggcccccaccaaggugaccuucggcgacgacacggucaucgaggugcagggguacaagagcgugaacaucaccuucgagcuggacgagcgcaucgacaagguccucaacgagaagugcuccgccuacaccguggagcugggcaccgaggugaacgaguucgcgugcgucguggccgacgccgugaucaagacgcugcagccggucagcgagcuccugaccccccuggggaucgaccucgacgagugguccauggccaccuacuaccuguucgacgagagcggcgaguucaagcuggccucccacauguacugcagcuucuacccccccgacgaggacgaggaggagggggacugcgaggaggaggaguucgagccguccacccaguacgaguacggcacggaggacgacuaccagggcaagccccucgaguucggggcgaccagcgccgcccugcagcccgaggaggagcaggaggaggacuggcuggacgacgacucccagcagaccgugggccagcaggacgggagcgaggacaaccagaccacgaccauccagaccaucguggagguccagccccagcucgagauggagcugaccccgguggugcagacgaucgaggucaacuccuucagcggcuaccugaagcucaccgacaacguguacaucaagaacgccgacaucguggaggaggcgaagaaggucaagcccaccgugguggucaacgccgccaacguguaccugaagcacgggggcggcguggccggggcccugaacaaggcgaccaacaacgccaugcaggucgaguccgacgacuacaucgccacgaacggcccccucaagguggggggcagcugcguccuguccggccacaaccuggccaagcacugccuccacgugguggggcccaacgucaacaagggcgaggacauccagcugcugaagagcgccuacgagaacuucaaccagcacgaggugcuccuggcgccgcugcucuccgccgggaucuucggcgccgaccccauccacagccugcgggugugcgucgacaccgugcgcaccaacguguaccuggccgucuucgacaagaaccucuacgacaagcugguguccagcuuccuggagaugaagagcgagaagcagguggagcagaagaucgccgagauccccaaggaggaggucaagcccuucaucaccgaguccaagccgagcguggagcagcggaagcaggacgacaagaagaucaaggcgugcguggaggaggucacgaccacccucgaggagaccaaguuccugacggagaaccugcuccuguacaucgacaucaacgggaaccugcaccccgacuccgccacccucgugagcgacaucgacaucaccuuccugaagaaggacgcccccuacaucgugggcgacgucgugcaggagggcgugcugaccgccgucgugauccccacgaagaaggccgggggcaccaccgagaugcucgcgaaggcccugcgcaaggugccgaccgacaacuacaucacgaccuaccccgggcagggccugaacggguacaccgucgaggaggccaagaccgugcucaagaagugcaaguccgccuucuacauccugcccagcaucaucuccaacgagaagcaggagauccugggcaccgugagcuggaaccuccgggagaugcuggcgcacgccgaggagacgcgcaagcugaugcccgucugcguggagaccaaggccaucguguccaccauccagcggaaguacaagggcaucaagauccaggagggggucguggacuacggcgcccgcuucuacuucuacaccagcaagacgaccguggccucccugaucaacacccucaacgaccugaacgagacccuggucacgaugccgcucggguacgugacccacggccugaaccuggaggaggcggcccgguacaugcgcagccucaaggugcccgccaccgucuccgugagcucccccgacgccgugaccgccuacaacggguaccugacgagcuccagcaagacccccgaggagcacuucaucgagaccaucucccuggcgggcagcuacaaggacuggagcuacuccggccagagcacccagcucgggaucgaguuccugaagcggggcgacaaguccgucuacuacacgagcaacccgaccaccuuccaccuggacggggaggugaucaccuucgacaaccucaagacgcugcugucccuccgcgaggugcggaccaucaaggucuucaccaccguggacaacaucaaccugcacacgcagguggucgacaugagcaugaccuacggccagcaguucggccccaccuaccuggacggggccgacgugaccaagaucaagccccacaacucccacgagggcaagacguucuacgugcucccgaacgacgacacccugcgcgucgaggccuucgaguacuaccacaccaccgaccccagcuuccuggggcgguacauguccgcccucaaccacacgaagaaguggaaguacccccaggugaacggccugaccagcaucaagugggccgacaacaacugcuaccuggcgaccgcccuccugacccugcagcagaucgagcucaaguucaaccccccggcccugcaggacgccuacuaccgcgcgcgggccggggaggccgccaacuucugcgcccugauccucgcguacugcaacaagacggugggcgagcugggcgacguccgcgagaccauguccuaccuguuccagcacgccaaccucgacagcugcaagcgggugcugaacgucgugugcaagaccugcgggcagcagcagaccacccugaagggcguggaggccgucauguacauggggacgcucuccuacgagcaguucaagaagggcgugcagauccccugcaccugcgggaagcaggccaccaaguaccuggugcagcaggagagccccuucgucaugauguccgcccccccggcgcaguacgagcugaagcacggcaccuucacgugcgccagcgaguacaccggcaacuaccagugcgggcacuacaagcacaucaccuccaaggagacccucuacugcaucgacggcgcccugcugacgaagagcagcgaguacaaggggcccaucaccgacguguucuacaaggagaacuccuacaccaccacgaucaagcccgugaccuacaagcucgacggcgucgugugcaccgagaucgaccccaagcuggacaacuacuacaagaaggacaacagcuacuucaccgagcagccgaucgaccuggugcccaaccagcccuaccccaacgccuccuucgacaacuucaaguucgucugcgacaacaucaaguucgccgacgaccucaaccagcugacgggguacaagaagccggcgagccgcgagcugaaggugaccuucuuccccgaccucaacggcgacguggucgccaucgacuacaagcacuacacccccuccuucaagaagggcgccaagcugcugcacaagcccaucguguggcacgugaacaacgccaccaacaaggcgacguacaagccgaacaccuggugcauccggugccucuggagcaccaagcccgucgagaccuccaacagcuucgacgugcugaaguccgaggacgcccaggggauggacaaccuggccugcgaggaccucaagcccgugagcgaggaggucguggagaaccccacgauccagaaggacgugcuggagugcaacgucaagaccaccgagguggugggcgacaucauccugaagccggccaacaacucccucaagaucaccgaggaggucgggcacacggaccugauggccgcguacguggacaacagcucccugaccaucaagaagcccaacgagcucagccgcgugcugggccugaagacccucgccacccacgggcuggccgccgucaacuccgugcccugggacacgaucgccaacuacgcgaagccguuccugaaccgcguggucagcaccaccaccaacaucgugacgcggugccucaaccgcgugugcaccaacuacaugcccuacuucuucacccugcugcuccagcugugcaccuucacccgguccacgaacagccgcaucaaggccuccaugcccaccaccaucgccaagaacaccgucaagagcgugggcaaguucugccuggaggccagcuucaacuaccucaagucccccaacuucagcaagcugaucaacaucaucaucugguuccugcuccuguccgugugccugggcagccucaucuacuccacggccgcgcuggggguccugaugagcaaccucggcaugccguccuacugcaccggguaccgggagggcuaccugaacagcaccaacgugaccaucgccacguacugcaccggcuccauccccugcagcgugugccuguccgggcucgacagccuggacaccuaccccucccuggagaccauccagaucacgaucagcuccuucaagugggaccucaccgccuucggccuggucgccgagugguuccuggccuacauccucuucacccgcuucuucuacgugcuggggcuggcggccaucaugcagcucuucuucagcuacuucgccgugcacuucaucuccaacagcuggcugauguggcugaucaucaaccugguccagauggcccccaucuccgcgauggugcggauguacaucuucuucgccagcuucuacuacguguggaagagcuacguccacgugguggacggcugcaacuccagcaccugcaugaugugcuacaagcgcaaccgggccacgcgcgucgagugcaccaccaucgugaacgggguccggcgcuccuucuacguguacgccaacggcggcaagggguucugcaagcuccacaacuggaacugcgugaacugcgacaccuucugcgccggcagcacguucaucuccgacgaggucgcgcgggaccugagccugcaguucaagcgcccgaucaaccccaccgaccaguccagcuacaucguggacuccgugaccgucaagaacgggagcauccaccucuacuucgacaaggccggccagaagaccuacgagcggcacucccugagccacuucgugaaccuggacaaccuccgcgccaacaacacgaaggggucccugcccaucaacgugaucgucuucgacggcaagagcaagugcgaggaguccagcgccaaguccgccagcguguacuacucccagcugaugugccagcccauccuccugcuggaccaggcgcucgugagcgacgucggcgacagcgccgagguggccgugaagauguucgacgccuacgucaacaccuucuccagcaccuucaacgugccgauggagaagcugaagacccugguggccacggcggaggccgagcucgccaagaacgucucccuggacaacgugcugagcaccuucaucuccgccgcgcggcagggguucguggacagcgacgucgagaccaaggacgugguggagugccucaagcugucccaccagagcgacaucgaggucaccggcgacuccugcaacaacuacaugcugacguacaacaagguggagaacaugaccccccgcgaccucggggccugcaucgacugcagcgcccggcacaucaacgcccagguggccaagucccacaacaucgcgcugaucuggaacgucaaggacuucaugagccuguccgagcagcuccgcaagcagauccgcagcgccgccaagaagaacaaccugcccuucaagcugaccugcgccaccacgcggcagguggugaacgucgugaccaccaagaucgcccucaagggcgggugaggacuaguuauaagacugacuagcccgaugggccucccaacgggcccuccuccccuccuugcaccgagauuaauaaaaaaaaaaaaaaaaaaaaaaaaaaaaaaaaaaaaaaaaaaaaaaaaaaaaaaaaaaaaaaaaugcaucccccccccccccccccccccccccccccccaaaggcucuuuucagagccaccagaauu

SEQ ID NO: 21813 - RNA, 6058 nt, Artificial Sequence
  SARS-CoV-2__MT642087.1__non-structural protein 3 (NSP3) mRNA gc
aggagaaagcuuaccauggcccccaccaaggugaccuucggcgacgacacggucaucgaggugcagggguacaagagcgugaacaucaccuucgagcuggacgagcgcaucgacaagguccucaacgagaagugcuccgccuacaccguggagcugggcaccgaggugaacgaguucgcgugcgucguggccgacgccgugaucaagacgcugcagccggucagcgagcuccugaccccccuggggaucgaccucgacgagugguccauggccaccuacuaccuguucgacgagagcggcgaguucaagcuggccucccacauguacugcagcuucuacccccccgacgaggacgaggaggagggggacugcgaggaggaggaguucgagccgcucacccaguacgaguacggcacggaggacgacuaccagggcaagccccuggaguucggggcgaccuccgccgcccugcagcccgaggaggagcaggaggaggacuggcucgacgacgacagccagcagaccgugggccagcaggacggguccgaggacaaccagaccacgaccauccagaccaucguggagguccagccccagcuggagauggagcugaccccgguggugcagacgaucgaggucaacagcuucuccggcuaccucaagcugaccgacaacguguacaucaagaacgccgacaucguggaggaggcgaagaaggucaagcccaccgugguggucaacgccgccaacguguaccugaagcacgggggcggcguggccggggcccucaacaaggcgaccaacaacgccaugcaggucgagagcgacgacuacaucgccacgaacggcccccugaagguggggggcuccugcguccugagcggccacaaccucgccaagcacugccugcacgugguggggcccaacgucaacaagggcgaggacauccagcugcucaaguccgccuacgagaacuucaaccagcacgaggugcugcuggcgccgcuccugagcgccgggaucuucggcgccgaccccauccacucccugcgggugugcgucgacaccgugcgcaccaacguguaccucgccgucuucgacaagaaccuguacgacaagcuggugagcuccuuccucgagaugaagagcgagaagcagguggagcagaagaucgccgagauccccaaggaggaggucaagcccuucaucaccgagagcaagccguccguggagcagcggaagcaggacgacaagaagaucaaggcgugcguggaggaggucacgaccacccuggaggagaccaaguuccugacggagaaccuccugcuguacaucgacaucaacgggaaccuccaccccgacagcgccacccugguguccgacaucgacaucaccuuccugaagaaggacgcccccuacaucgugggcgacgucgugcaggagggcgugcucaccgccgucgugauccccacgaagaaggccgggggcaccaccgagaugcuggcgaaggcccugcgcaaggugccgaccgacaacuacaucacgaccuaccccgggcagggccucaacggguacaccgucgaggaggccaagaccgugcugaagaagugcaagagcgccuucuacauccugcccuccaucaucagcaacgagaagcaggagauccucggcaccguguccuggaaccugcgggagaugcuggcgcacgccgaggagacgcgcaagcugaugcccgucugcguggagaccaaggccaucgugagcaccauccagcggaaguacaagggcaucaagauccaggagggggucguggacuacggcgcccgcuucuacuucuacaccuccaagacgaccguggccagccucaucaacacccugaacgaccugaacgagacccucgucacgaugccgcugggguacgugacccacggccugaaccucgaggaggcggcccgguacaugcgcucccugaaggugcccgccaccgucagcguguccagccccgacgccgugaccgccuacaacggguaccugacguccagcuccaagacccccgaggagcacuucaucgagaccaucagccucgcgggcuccuacaaggacuggagcuacagcggccaguccacccagcuggggaucgaguuccugaagcggggcgacaagagcgucuacuacacguccaacccgaccaccuuccaccucgacggggaggugaucaccuucgacaaccugaagacgcugcucagccugcgcgaggugcggaccaucaaggucuucaccaccguggacaacaucaaccugcacacgcagguggucgacauguccaugaucuacggccagcaguucggccccaccuaccucgacggggccgacgugaccaagaucaagccccacaacagccacgagggcaagaccuucuacgugcugccgaacgacgacacgcugcgcgucgaggccuucgaguacuaccacaccaccgaccccuccuuccucgggcgguacaugagcgcccugaaccacaccaagaaguggaaguacccccaggugaacggccugacguccaucaagugggccgacaacaacugcuaccucgcgaccgcccugcugacccuccagcagaucgagcugaaguucaaccccccggcccugcaggacgccuacuaccgcgcgcgggccggggaggccgccaacuucugcgcccucauccuggcguacugcaacaagaccgugggcgagcugggcgacguccgcgagacgaugagcuaccucuuccagcacgccaaccuggacuccugcaagcgggugcugaacgucgugugcaagaccugcgggcagcagcagaccacccucaagggcguggaggccgucauguacauggggacccugagcuacgagcaguucaagaagggcgugcagauccccugcacgugcgggaagcaggccaccaaguaccuggugcagcaggagucccccuucgucaugaugagcgcccccccggcgcaguacgagcucaagcacggcaccuucaccugcgccuccgaguacacgggcaacuaccagugcgggcacuacaagcacaucaccagcaaggagacccuguacugcaucgacggcgcccugcucaccaaguccagcgaguacaaggggcccaucacggacguguucuacaaggagaacagcuacaccaccaccaucaagcccgugacguacaagcuggacggcgucgugugcaccgagaucgaccccaagcuggacaacuacuacaagaaggacaacuccuacuucaccgagcagccgaucgaccucgugcccaaccagcccuaccccaacgccagcuucgacaacuucaaguucgucugcgacaacaucaaguucgccgacgaccugaaccagcugaccggguacaagaagccggcgucccgcgagcucaaggugacguucuuccccgaccugaacggcgacguggucgccaucgacuacaagcacuacacccccagcuucaagaagggcgccaagcugcuccacaagcccaucguguggcacgugaacaacgccaccaacaaggcgaccuacaagccgaacacguggugcauccggugccugugguccaccaagcccgucgagaccagcaacuccuucgacgugcugaagagcgaggacgcccaggggauggacaaccucgccugcgaggaccugaagcccguguccgaggaggucguggagaaccccaccauccagaaggacgugcuggagugcaacgucaagacgaccgagguggugggcgacaucauccucaagccggccaacaacagccugaagaucaccgaggaggucgggcacaccgaccugauggccgcguacguggacaacuccagccucacgaucaagaagcccaacgagcugucccgcgugcugggccucaagacccuggccacccacgggcuggccgccgucaacagcgugcccugggacaccaucgccaacuacgcgaagccguuccucaacaagguggucuccacgaccaccaacaucgugacccgcugccugaaccgggugugcacgaacuacaugcccuacuucuucacccugcuccugcagcugugcaccuucacccgcagcaccaacucccggaucaaggccagcaugcccacgaccaucgccaagaacaccgucaaguccgugggcaaguucugccucgaggccagcuucaacuaccugaagagccccaacuucuccaagcugaucaacaucaucaucugguuccuccugcugagcgugugccucggcucccugaucuacagcaccgccgcgcuggggguccucauguccaaccugggcaugccgagcuacugcacgggguaccgcgagggcuaccugaacuccaccaacgugaccaucgccaccuacugcacgggcagcauccccugcuccgugugccucagcgggcuggacucccuggacaccuaccccagccucgagaccauccagaucaccaucuccagcuucaagugggaccugacggccuucggccuggucgccgagugguuccucgccuacauccuguucacccgguucuucuacgugcuggggcucgcggccaucaugcagcuguucuucuccuacuucgccgugcacuucaucagcaacuccuggcugauguggcugaucaucaaccucguccagauggcccccaucagcgcgauggugcgcauguacaucuucuucgccuccuucuacuacguguggaagagcuacguccacgugguggacggcugcaacagcuccaccugcaugaugugcuacaagcggaaccgcgccacccgggucgagugcacgaccaucgugaacgggguccgccggagcuucuacguguacgccaacggcggcaagggguucugcaagcugcacaacuggaacugcgugaacugcgacaccuucugcgccggcuccaccuucaucagcgacgaggucgcgcgcgaccugucccuccaguucaagcggccgaucaaccccacggaccagagcuccuacaucguggacagcgugaccgucaagaacggguccauccaccuguacuucgacaaggccggccagaagaccuacgagcgccacagccugucccacuucgugaaccucgacaaccugcgggccaacaacaccaaggggagccugcccaucaacgugaucgucuucgacggcaaguccaagugcgaggagagcuccgccaagagcgccuccguguacuacagccagcucaugugccagcccauccugcugcucgaccaggcgcugguguccgacgucggcgacagcgccgagguggccgugaagauguucgacgccuacgucaacacguucagcuccaccuucaacgugccgauggagaagcugaagacccucguggccaccgcggaggccgagcuggccaagaacgucagccuggacaacgugcucuccacguucaucagcgccgcgcgccagggguucguggacuccgacgucgagaccaaggacgugguggagugccugaagcugagccaccaguccgacaucgaggucaccggcgacagcugcaacaacuacaugcucaccuacaacaagguggagaacaugacgccccgggaccugggggccugcaucgacugcuccgcccgccacaucaacgcccagguggccaagagccacaacaucgcgcugaucuggaacgucaaggacuucaugucccucagcgagcagcugcggaagcagauccgcuccgccgccaagaagaacaaccugcccuucaagcucaccugcgccaccacccgccagguggugaacgucgugacgaccaagaucgcccugaagggcgggugaggacuaguuauaagacugacuagcccgaugggccucccaacgggcccuccuccccuccuugcaccgagauuaauaaaaaaaaaaaaaaaaaaaaaaaaaaaaaaaaaaaaaaaaaaaaaaaaaaaaaaaaaaaaaaaaugcaucccccccccccccccccccccccccccccccaaaggcucuuuucagagccaccagaauu

SEQ ID NO: 21814 - RNA, 6058 nt, Artificial Sequence
  SARS-CoV-2__MT642093.1__non-structural protein 3 (NSP3) mRNA gc
aggagaaagcuuaccauggcccccaccaaggugaccuucggcgacgacacggucaucgaggugcagggguacaagagcgugaacaucaccuucgagcuggacgagcgcaucgacaagguccucaacgagaagugcuccgccuacaccguggagcugggcaccgaggugaacgaguucgcgugcgucguggccgacgccgugaucaagacgcugcagccggucagcgagcuccugaccccccuggggaucgaccucgacgagugguccauggccaccuacuaccuguucgacgagagcggcgaguucaagcuggccucccacauguacugcagcuucuacccccccgacgaggacgaggaggagggggacugcgaggaggaggaguucgagccguccacccaguacgaguacggcacggaggacgacuaccagggcaagccccucgaguucggggcgaccagcgccgcccugcagcccgaggaggagcaggaggaggacuggcuggacgacgacucccagcagaccgugggccagcaggacgggagcgaggacaaccagaccacgaccauccagaccaucguggagguccagccccagcucgagauggagcugaccccgguggugcagacgaucgaggucaacuccuucagcggcuaccugaagcucaccgacaacguguacaucaagaacgccgacaucguggaggaggcgaagaaggucaagcccaccgugguggucaacgccgccaacguguaccugaagcacgggggcggcguggccggggcccugaacaaggcgaccaacaacgccaugcaggucgaguccgacgacuacaucgccacgaacggcccccucaagguggggggcagcugcguccuguccggccacaaccuggccaagcacugccuccacgugguggggcccaacgucaacaagggcgaggacauccagcugcugaagagcgccuacgagaacuucaaccagcacgaggugcuccuggcgccgcugcucuccgccgggaucuucggcgccgaccccauccacagccugcgggugugcgucgacaccgugcgcaccaacguguaccuggccgucuucgacaagaaccucuacgacaagcugguguccagcuuccuggagaugaagagcgagaagcagguggagcagaagaucgccgagauccccaaggaggaggucaagcccuucaucaccgaguccaagccgagcguggagcagcggaagcaggacgacaagaagaucaaggcgugcguggaggaggucacgaccacccucgaggagaccaaguuccugacggagaaccugcuccuguacaucgacaucaacgggaaccugcaccccgacuccgccacccucgugagcgacaucgacaucaccuuccugaagaaggacgcccccuacaucgugggcgacgucgugcaggagggcgugcugaccgccgucgugauccccacgaagaaggccgggggcaccaccgagaugcucgcgaaggcccugcgcaaggugccgaccgacaacuacaucacgaccuaccccgggcagggccugaacggguacaccgucgaggaggccaagaccgugcucaagaagugcaaguccgccuucuacauccugcccagcaucaucuccaacgagaagcaggagauccugggcaccgugagcuggaaccuccgggagaugcuggcgcacgccgaggagacgcgcaagcugaugcccgucugcguggagaccaaggccaucguguccaccauccagcggaaguacaagggcaucaagauccaggagggggucguggacuacggcgcccgcuucuacuucuacaccagcaagacgaccguggccucccugaucaacacccucaacgaccugaacgagacccuggucacgaugccgcucggguacgugacccacggccugaaccuggaggaggcggcccgguacaugcgcagccucaaggugcccgccaccgucuccgugagcucccccgacgccgugaccgccuacaacggguaccugacgagcuccagcaagacccccgaggagcacuucaucgagaccaucucccuggcgggcagcuacaaggacugguucuacagcggccaguccacccagcucgggaucgaguuccugaagcggggcgacaagagcgucuacuacacguccaacccgaccaccuuccaccuggacggggaggugaucaccuucgacaaccucaagacgcugcugagccuccgcgaggugcggaccaucaaggucuucaccaccguggacaacaucaaccugcacacgcagguggucgacauguccaugaccuacggccagcaguucggccccaccuaccuggacggggccgacgugaccaagaucaagccccacaacagccacgagggcaagacguucuacgugcucccgaacgacgacacccugcgcgucgaggccuucgaguacuaccacaccaccgaccccuccuuccuggggcgguacaugagcgcccucaaccacacgaagaaguggaaguacccccaggugaacggccugaccuccaucaagugggccgacaacaacugcuaccuggcgaccgcccuccugacccugcagcagaucgagcucaaguucaaccccccggcccugcaggacgccuacuaccgcgcgcgggccggggaggccgccaacuucugcgcccugauccucgcguacugcaacaagacggugggcgagcugggcgacguccgcgagaccaugagcuaccuguuccagcacgccaaccucgacuccugcaagcgggugcugaacgucgugugcaagaccugcgggcagcagcagaccacccugaagggcguggaggccgucauguacauggggacgcucagcuacgagcaguucaagaagggcgugcagauccccugcaccugcgggaagcaggccaccaaguaccuggugcagcaggagucccccuucgucaugaugagcgcccccccggcgcaguacgagcugaagcacggcaccuucacgugcgccuccgaguacaccggcaacuaccagugcgggcacuacaagcacaucaccagcaaggagacccucuacugcaucgacggcgcccugcugacgaaguccagcgaguacaaggggcccaucaccgacguguucuacaaggagaacagcuacaccaccacgaucaagcccgugaccuacaagcucgacggcgucgugugcaccgagaucgaccccaagcuggacaacuacuacaagaaggacaacuccuacuucaccgagcagccgaucgaccuggugcccaaccagcccuaccccaacgccagcuucgacaacuucaaguucgucugcgacaacaucaaguucgccgacgaccucaaccagcugacgggguacaagaagccggcgucccgcgagcugaaggugaccuucuuccccgaccucaacggcgacguggucgccaucgacuacaagcacuacacccccagcuucaagaagggcgccaagcugcugcacaagcccaucguguggcacgugaacaacgccaccaacaaggcgacguacaagccgaacaccuggugcauccggugccucugguccaccaagcccgucgagaccagcaacuccuucgacgugcugaagagcgaggacgcccaggggauggacaaccuggccugcgaggaccucaagcccguguccgaggaggucguggagaaccccacgauccagaaggacgugcuggagugcaacgucaagaccaccgagguggugggcgacaucauccugaagccggccaacaacagccucaagaucaccgaggaggucgggcacacggaccugauggccgcguacguggacaacuccagccugaccaucaagaagcccaacgagcucucccgcgugcugggccugaagacccucgccacccacgggcuggccgccgucaacagcgugcccugggacacgaucgccaacuacgcgaagccguuccugaacaagguggucuccaccaccaccaacaucgugacgcgcugccucaaccgggugugcaccaacuacaugcccuacuucuucacccugcugcuccagcugugcaccuucacccgcagcacgaacucccggaucaaggccagcaugcccaccaccaucgccaagaacaccgucaaguccgugggcaaguucugccuggaggccagcuucaacuaccucaagagccccaacuucuccaagcugaucaacaucaucaucugguuccugcuccugagcgugugccugggcucccucaucuacagcacggccgcgcuggggguccugauguccaaccucggcaugccgagcuacugcaccggguaccgcgagggcuaccugaacuccaccaacgugaccaucgccacguacugcaccggcagcauccccugcuccgugugccugagcgggcucgacucccuggacaccuaccccagccuggagaccauccagaucacgaucuccagcuucaagugggaccucaccgccuucggccuggucgccgagugguuccuggccuacauccucuucacccgguucuucuacgugcuggggcuggcggccaucaugcagcucuucuucuccuacuucgccgugcacuucaucagcaacuccuggcugauguggcugaucaucaaccugguccagauggcccccaucagcgcgauggugcgcauguacaucuucuucgccuccuucuacuacguguggaagagcuacguccacgugguggacggcugcaacagcuccaccugcaugaugugcuacaagcggaaccgcgccacgcgggucgagugcaccaccaucgugaacgggguccgccggagcuucuacguguacgccaacggcggcaagggguucugcaagcuccacaacuggaacugcgugaacugcgacaccuucugcgccggcuccacguucaucagcgacgaggucgcgcgcgaccugucccugcaguucaagcggccgaucaaccccaccgaccagagcuccuacaucguggacagcgugaccgucaagaacggguccauccaccucuacuucgacaaggccggccagaagaccuacgagcgccacagccugucccacuucgugaaccuggacaaccuccgggccaacaacacgaaggggagccugcccaucaacgugaucgucuucgacggcaaguccaagugcgaggagagcuccgccaagagcgccuccguguacuacagccagcugaugugccagcccauccuccugcuggaccaggcgcucguguccgacgucggcgacagcgccgagguggccgugaagauguucgacgccuacgucaacaccuucagcuccaccuucaacgugccgauggagaagcugaagacccugguggccacggcggaggccgagcucgccaagaacgucagccuggacaacgugcuguccaccuucaucagcgccgcgcgccagggguucguggacuccgacgucgagaccaaggacgugguggagugccucaagcugagccaccaguccgacaucgaggucaccggcgacagcugcaacaacuacaugcugacguacaacaagguggagaacaugaccccccgggaccucggggccugcaucgacugcuccgcccgccacaucaacgcccagguggccaagagccacaacaucgcgcugaucuggaacgucaaggacuucaugucccugagcgagcagcuccggaagcagauccgcuccgccgccaagaagaacaaccugcccuucaagcugaccugcgccaccacgcgccagguggugaacgucgugaccaccaagaucgcccucaagggcgggugaggacuaguuauaagacugacuagcccgaugggccucccaacgggcccuccuccccuccuugcaccgagauuaauaaaaaaaaaaaaaaaaaaaaaaaaaaaaaaaaaaaaaaaaaaaaaaaaaaaaaaaaaaaaaaaaugcaucccccccccccccccccccccccccccccccaaaggcucuuuucagagccaccagaauu

SEQ ID NO: 21815 - RNA, 6058 nt, Artificial Sequence
  SARS-CoV-2__MT642111.1__non-structural protein 3 (NSP3) mRNA gc
aggagaaagcuuaccauggcccccaccaaggugaccuucggcgacgacacggucaucgaggugcagggguacaagagcgugaacaucaccuucgagcuggacgagcgcaucgacaagguccucaacgagaagugcuccgccuacaccguggagcugggcaccgaggugaacgaguucgcgugcgucguggccgacgccgugaucaagacgcugcagccggucagcgagcuccugaccccccuggggaucgaccucgacgagugguccauggccaccuacuaccuguucgacgagagcggcgaguucaagcuggccucccacauguacugcagcuucuacccccccgacgaggacgaggaggagggggacugcgaggaggaggaguucgagccguccacccaguacgaguacggcacggaggacgacuaccagggcaagccccucgaguucggggcgaccagcgccgcccugcagcccgaggaggagcaggaggaggacuggcuggacgacgacucccagcagaccgugggccagcaggacgggagcgaggacaaccagaccacgaccauccagaccaucguggagguccagccccagcucgagauggagcugaccccgguggugcagacgaucgaggucaacuccuucagcggcuaccugaagcucaccgacaacguguacaucaagaacgccgacaucguggaggaggcgaagaaggucaagcccaccgugguggucaacgccgccaacguguaccugaagcacgggggcggcguggccggggcccugaacaaggcgaccaacaacgccaugcaggucgaguccgacgacuacaucgccacgaacggcccccucaagguggggggcagcugcguccuguccggccacaaccuggccaagcacugccuccacgugguggggcccaacgucaacaagggcgaggacauccagcugcugaagagcgccuacgagaacuucaaccagcacgaggugcuccuggcgccgcugcucuccgccgggaucuucggcgccgaccccauccacagccugcgggugugcgucgacaccgugcgcaccaacguguaccuggccgucuucgacaagaaccucuacgacaagcugguguccagcuuccuggagaugaagagcgagaagcagguggagcagaagaucgccgagauccccaaggaggaggucaagcccuucaucaccgaguccaagccgagcguggagcagcggaagcaggacgacaagaagaucaaggcgugcguggaggaggucacgaccacccucgaggagaccaaguuccugacggagaaccugcuccuguacaucgacaucaacgggaaccugcaccccgacuccgccacccucgugagcgacaucgacaucaccuuccugaagaaggacgcccccuacaucgugggcgacgucgugcaggagggcgugcugaccgccgucgugauccccacgaagaaggccgggggcaccaccgagaugcucgcgaaggcccugcgcaaggugccgaccgacaacuacaucacgaccuaccccgggcagggccugaacggguacaccgucgaggaggccaagaccgugcucaagaagugcaaguccgccuucuacauccugcccagcaucaucuccaacgagaagcaggagauccugggcaccgugagcuggaaccuccgggagaugcuggcgcacgccgaggagacgcgcaagcugaugcccgucugcguggagaccaaggccaucguguccaccauccagcggaaguacaagggcaucaagauccaggagggggucguggacuacggcgcccgcuucuacuucuacaccagcaagacgaccguggccucccugaucaacacccucaacgaccugaacgagacccuggucacgaugccgcucggguacgugacccacggccugaaccuggaggaggcggcccgguacaugcgcagccucaaggugcccgccaccgucuccgugagcucccccgacgccgugaccgccuacaacggguaccugacgagcuccagcaagacccccgaggagcacuucaucgagaccaucucccuggcgggcagcuacaaggacuggagcuacuccggccagagcacccagcucgggaucgaguuccugaagcggggcgacaaguccgucuacuacacgagcaacuccaccaccuuccaccuggacggggaggugaucaccuucgacaaccucaagacgcugcugagccuccgcgaggugcggaccaucaaggucuucaccaccguggacaacaucaaccugcacacgcagguggucgacauguccaugaccuacggccagcaguucggcccgaccuaccuggacggggccgacgugaccaagaucaagccccacaacagccacgagggcaagacguucuacgugcuccccaacgacgacacccugcgcgucgaggccuucgaguacuaccacaccaccgacccguccuuccuggggcgguacaugagcgcccucaaccacacgaagaaguggaaguacccccaggugaacggccugaccuccaucaagugggccgacaacaacugcuaccuggcgaccgcccuccugacccugcagcagaucgagcucaaguucaacccccccgcccugcaggacgccuacuaccgcgcgcgggccggggaggccgccaacuucugcgcccugauccucgcguacugcaacaagacggugggcgagcugggcgacguccgcgagaccaugagcuaccuguuccagcacgccaaccucgacuccugcaagcgggugcugaacgucgugugcaagaccugcgggcagcagcagaccacccugaagggcguggaggccgucauguacauggggacgcucagcuacgagcaguucaagaagggcgugcagaucccgugcaccugcgggaagcaggccaccaaguaccuggugcagcaggagucccccuucgucaugaugagcgccccccccgcgcaguacgagcugaagcacggcaccuucacgugcgccuccgaguacaccggcaacuaccagugcgggcacuacaagcacaucaccagcaaggagacccucuacugcaucgacggcgcccugcugacgaagagcuccgaguacaaggggccgaucaccgacguguucuacaaggagaacagcuacaccaccacgaucaagcccgugaccuacaagcucgacggcgucgugugcaccgagaucgaccccaagcuggacaacuacuacaagaaggacaacuccuacuucaccgagcagcccaucgaccuggugccgaaccagcccuaccccaacgccagcuucgacaacuucaaguucgucugcgacaacaucaaguucgccgacgaccucaaccagcugacgggguacaagaagcccgcgucccgcgagcugaaggugaccuucuucccggaccucaacggcgacguggucgccaucgacuacaagcacuacacccccagcuucaagaagggcgccaagcugcugcacaagcccaucguguggcacgugaacaacgccaccaacaaggcgacguacaagcccaacaccuggugcauccggugccucugguccaccaagccggucgagaccagcaacuccuucgacgugcugaagagcgaggacgcccaggggauggacaaccuggccugcgaggaccucaagcccguguccgaggaggucguggagaaccccacgauccagaaggacgugcuggagugcaacgucaagaccaccgagguggugggcgacaucauccugaagcccgccaacaacagccucaagaucaccgaggaggucgggcacacggaccugauggccgcguacguggacaacuccagccugaccaucaagaagccgaacgagcucucccgcgugcugggccugaagacccucgccacccacgggcuggccgccgucaacagcgugcccugggacacgaucgccaacuacgcgaagcccuuccugaacaagguggucuccaccaccaccaacaucgugacgcgcugccucaaccgggugugcaccaacuacaugccguacuucuucacccugcugcuccagcugugcaccuucacccgcagcacgaacucccggaucaaggccagcaugcccaccaccaucgccaagaacaccgucaagagcgugggcaaguucugccuggaggccuccuucaacuaccucaagagccccaacuucuccaagcugaucaacaucaucaucugguuccugcuccugagcgugugccugggcucccucaucuacagcacggccgcgcuggggguccugauguccaaccucggcaugcccagcuacugcaccggguaccgcgagggcuaccugaacuccaccaacgugaccaucgccacguacugcaccggcagcaucccgugcuccgugugccugagcgggcucgacucccuggacaccuaccccagccuggagaccauccagaucacgaucuccagcuucaagugggaccucaccgccuucggccuggucgccgagugguuccuggccuacauccucuucacccgguucuucuacgugcuggggcuggcggccaucaugcagcucuucuucuccuacuucgccgugcacuucaucagcaacuccuggcugauguggcugaucaucaaccugguccagauggcccccaucagcgcgauggugcgcauguacaucuucuucgccagcuucuacuacguguggaaguccuacguccacgugguggacggcugcaacagcuccaccugcaugaugugcuacaagcggaaccgcgccacgcgggucgagugcaccaccaucgugaacgggguccgccggagcuucuacguguacgccaacggcggcaagggguucugcaagcuccacaacuggaacugcgugaacugcgacaccuucugcgccggcuccacguucaucagcgacgaggucgcgcgcgaccugucccugcaguucaagcggcccaucaacccgaccgaccagagcuccuacaucguggacagcgugaccgucaagaacggguccauccaccucuacuucgacaaggccggccagaagaccuacgagcgccacagccugucccacuucgugaaccuggacaaccuccgggccaacaacacgaaggggagccugcccaucaacgugaucgucuucgacggcaaguccaagugcgaggagagcuccgccaagagcgccuccguguacuacagccagcugaugugccagcccauccuccugcuggaccaggcgcucgugagcgacgucggcgacuccgccgagguggccgugaagauguucgacgccuacgucaacaccuucagcuccaccuucaacgugcccauggagaagcugaagacccugguggccacggcggaggccgagcucgccaagaacgucagccuggacaacgugcuguccaccuucaucagcgccgcgcgccagggguucguggacuccgacgucgagaccaaggacgugguggagugccucaagcugagccaccaguccgacaucgaggucaccggcgacagcugcaacaacuacaugcugacguacaacaagguggagaacaugaccccgcgggaccucggggccugcaucgacugcuccgcccgccacaucaacgcccagguggccaagagccacaacaucgcgcugaucuggaacgucaaggacuucaugucccugagcgagcagcuccggaagcagauccgcuccgccgccaagaagaacaaccugcccuucaagcugaccugcgccaccacgcgccagguggugaacgucgugaccaccaagaucgcccucaagggcgggugaggacuaguuauaagacugacuagcccgaugggccucccaacgggcccuccuccccuccuugcaccgagauuaauaaaaaaaaaaaaaaaaaaaaaaaaaaaaaaaaaaaaaaaaaaaaaaaaaaaaaaaaaaaaaaaaugcaucccccccccccccccccccccccccccccccaaaggcucuuuucagagccaccagaauu

SEQ ID NO: 21816 - RNA, 6058 nt, Artificial Sequence
  SARS-CoV-2__MT642138.1__non-structural protein 3 (NSP3) mRNA gc
aggagaaagcuuaccauggcccccaccaaggugaccuucggcgacgacacggucaucgaggugcagggguacaagagcgugaacaucaccuucgagcuggacgagcgcaucgacaagguccucaacgagaagugcuccgccuacaccguggagcugggcaccgaggugaacgaguucgcgugcgucguggccgacgccgugaucaagacgcugcagccggucagcgagcuccugaccccccuggggaucgaccucgacgagugguccauggccaccuacuaccuguucgacgagagcggcgaguucaagcuggccucccacauguacugcagcuucuacccccccgacgaggacgaggaggagggggacugcgaggaggaggaguucgagccguccacccaguacgaguacggcacggaggacgacuaccagggcaagccccucgaguucggggcgaccagcgccgcccugcagcccgaggaggagcaggaggaggacuggcuggacgacgacucccagcagaccgugggccagcaggacgggagcgaggacaaccagaccacgaccauccagaccaucguggagguccagccccagcucgagauggagcugaccccgguggugcagacgaucgaggucaacuccuucagcggcuaccugaagcucaccgacaacguguacaucaagaacgccgacaucguggaggaggcgaagaaggucaagcccaccgugguggucaacgccgccaacguguaccugaagcacgggggcggcguggccggggcccugaacaaggcgaccaacaacgccaugcaggucgaguccgacgacuacaucgccacgaacggcccccucaagguggggggcagcugcguccuguccggccacaaccuggccaagcacugccuccacgugguggggcccaacgucaacaagggcgaggacauccagcugcugaagagcgccuacgagaacuucaaccagcacgaggugcuccuggcgccgcugcucuccgccgggaucuucggcgccgaccccauccacagccugcgggugugcgucgacaccgugcgcaccaacguguaccuggccgucuucgacaagaaccucuacgacaagcugguguccagcuuccuggagaugaagagcgagaagcagguggagcagaagaucgccgagauccccaaggaggaggucaagcccuucaucaccgaguccaagccgagcguggagcagcggaagcaggacgacaagaagaucaaggcgugcguggaggaggucacgaccacccucgaggagaccaaguuccugacggagaaccugcuccuguacaucgacaucaacgggaaccugcaccccgacuccgccacccucgugagcgacaucgacaucaccuuccugaagaaggacgcccccuacaucgugggcgacgucgugcaggagggcgugcugaccgccgucgugauccccacgaagaaggccgggggcaccaccgagaugcucgcgaaggcccugcgcaaggugccgaccgacaacuacaucacgaccuaccccgggcagggccugaacggguacaccgucgaggaggccaagaccgugcucaagaagugcaaguccgccuucuacauccugcccagcaucaucuccaacgagaagcaggagauccugggcaccgugagcuggaaccuccgggagaugcuggcgcacgccgaggagacgcgcaagcugaugcccgucugcguggagaccaaggccaucguguccaccauccagcggaaguacaagggcaucaagauccaggagggggucguggacuacggcgcccgcuucuacuucuacaccagcaagacgaccguggccucccugaucaacacccucaacgaccugaacgagacccuggucacgaugccgcucggguacgugacccacggccugaaccuggaggaggcggcccgguacaugcgcagccucaaggugcccgccaccgucuccgugagcucccccgacgccgugaccgccuacaacggguaccugacgagcuccagcaagacccccgaggagcgguucaucgagaccaucucccuggcgggcagcuacaaggacuggagcuacuccggccagagcacccagcucgggaucgaguuccugaagcgcggcgacaaguccgucuacuacacgagcaacccgaccaccuuccaccuggacggggaggugaucaccuucgacaaccucaagacgcugcugucccuccgggaggugcgcaccaucaaggucuucaccaccguggacaacaucaaccugcacacgcagguggucgacaugagcaugaccuacggccagcaguucggccccaccuaccuggacggggccgacgugaccaagaucaagccccacaacucccacgagggcaagacguucuacgugcucccgaacgacgacacccugcgggucgaggccuucgaguacuaccacaccaccgaccccagcuuccuggggcgcuacauguccgcccucaaccacacgaagaaguggaaguacccccaggugaacggccugaccagcaucaagugggccgacaacaacugcuaccuggcgaccgcccuccugacccugcagcagaucgagcucaaguucaaccccccggcccugcaggacgccuacuaccgggcgcgcgccggggaggccgccaacuucugcgcccugauccucgcguacugcaacaagacggugggcgagcugggcgacguccgggagaccauguccuaccuguuccagcacgccaaccucgacagcugcaagcgcgugcugaacgucgugugcaagaccugcgggcagcagcagaccacccugaagggcguggaggccgucauguacauggggacgcucuccuacgagcaguucaagaagggcgugcagauccccugcaccugcgggaagcaggccaccaaguaccuggugcagcaggagagccccuucgucaugauguccgcccccccggcgcaguacgagcugaagcacggcaccuucacgugcgccagcgaguacaccggcaacuaccagugcgggcacuacaagcacaucaccuccaaggagacccucuacugcaucgacggcgcccugcugacgaagagcagcgaguacaaggggcccaucaccgacguguucuacaaggagaacuccuacaccaccacgaucaagcccgugaccuacaagcucgacggcgucgugugcaccgagaucgaccccaagcuggacaacuacuacaagaaggacaacagcuacuucaccgagcagccgaucgaccuggugcccaaccagcccuaccccaacgccuccuucgacaacuucaaguucgucugcgacaacaucaaguucgccgacgaccucaaccagcugacgggguacaagaagccggcgagccgggagcugaaggugaccuucuuccccgaccucaacggcgacguggucgccaucgacuacaagcacuacacccccuccuucaagaagggcgccaagcugcugcacaagcccaucguguggcacgugaacaacgccaccaacaaggcgacguacaagccgaacaccuggugcauccgcugccucuggagcaccaagcccgucgagaccuccaacagcuucgacgugcugaaguccgaggacgcccaggggauggacaaccuggccugcgaggaccucaagcccgugagcgaggaggucguggagaaccccacgauccagaaggacgugcuggagugcaacgucaagaccaccgagguggugggcgacaucauccugaagccggccaacaacucccucaagaucaccgaggaggucgggcacacggaccugauggccgcguacguggacaacagcucccugaccaucaagaagcccaacgagcucagccgcgugcugggccugaagacccucgccacccacgggcuggccgccgucaacuccgugcccugggacacgaucgccaacuacgcgaagccguuccugaacaagguggucagcaccaccaccaacaucgugacgcggugccucaaccgcgugugcaccaacuacaugcccuacuucuucacccugcugcuccagcugugcaccuucacccgguccacgaacagccgcaucaaggccuccaugcccaccaccaucgccaagaacaccgucaagagcgugggcaaguucugccuggaggccagcuucaacuaccucaagucccccaacuucagcaagcugaucaacaucaucaucugguuccugcuccuguccgugugccugggcagccucaucuacuccacggccgcgcuggggguccugaugagcaaccucggcaugccguccuacugcaccggguaccgggagggcuaccugaacagcaccaacgugaccaucgccacguacugcaccggcuccauccccugcagcgugugccuguccgggcucgacagccuggacaccuaccccucccuggagaccauccagaucacgaucagcuccuucaagugggaccucaccgccuucggccuggucgccgagugguuccuggccuacauccucuucacccgcuucuucuacgugcuggggcuggcggccaucaugcagcucuucuucagcuacuucgccgugcacuucaucuccaacagcuggcugauguggcugaucaucaaccugguccagauggcccccaucuccgcgauggugcggauguacaucuucuucgccagcuucuacuacguguggaagagcuacguccacgugguggacggcugcaacuccagcaccugcaugaugugcuacaagcgcaaccgggccacgcgcgucgagugcaccaccaucgugaacgggguccggcgcuccuucuacguguacgccaacggcggcaagggguucugcaagcuccacaacuggaacugcgugaacugcgacaccuucugcgccggcagcacguucaucuccgacgaggucgcgcgggaccugagccugcaguucaagcgcccgaucaaccccaccgaccaguccagcuacaucguggacuccgugaccgucaagaacgggagcauccaccucuacuucgacaaggccggccagaagaccuacgagcggcacucccugagccacuucgugaaccuggacaaccuccgcgccaacaacacgaaggggucccugcccaucaacgugaucgucuucgacggcaagagcaagugcgaggaguccagcgccaaguccgccagcguguacuacucccagcugaugugccagcccauccuccugcuggaccaggcgcucgugagcgacgucggcgacagcgccgagguggccgugaagauguucgacgccuacgucaacaccuucuccagcaccuucaacgugccgauggagaagcugaagacccugguggccacggcggaggccgagcucgccaagaacgucucccuggacaacgugcugagcaccuucaucuccgccgcgcggcagggguucguggacagcgacgucgagaccaaggacgugguggagugccucaagcugucccaccagagcgacaucgaggucaccggcgacuccugcaacaacuacaugcugacguacaacaagguggagaacaugaccccccgcgaccucggggccugcaucgacugcagcgcccggcacaucaacgcccagguggccaagucccacaacaucgcgcugaucuggaacgucaaggacuucaugagccuguccgagcagcuccgcaagcagauccgcagcgccgccaagaagaacaaccugcccuucaagcugaccugcgccaccacgcggcagguggugaacgucgugaccaccaagaucgcccucaagggcgggugaggacuaguuauaagacugacuagcccgaugggccucccaacgggcccuccuccccuccuugcaccgagauuaauaaaaaaaaaaaaaaaaaaaaaaaaaaaaaaaaaaaaaaaaaaaaaaaaaaaaaaaaaaaaaaaaugcaucccccccccccccccccccccccccccccccaaaggcucuuuucagagccaccagaauu

SEQ ID NO: 21817 - RNA, 6058 nt, Artificial Sequence
  SARS-CoV-2__MT642144.1__non-structural protein 3 (NSP3) mRNA gc
aggagaaagcuuaccauggcccccaccaaggugaccuucggcgacgacacggucaucgaggugcagggguacaagagcgugaacaucaccuucgagcuggacgagcgcaucgacaagguccucaacgagaagugcuccgccuacaccguggagcugggcaccgaggugaacgaguucgcgugcgucguggccgacgccgugaucaagacgcugcagccggucagcgagcuccugaccccccuggggaucgaccucgacgagugguccauggccaccuacuaccuguucgacgagagcggcgaguucaagcuggccucccacauguacugcagcuucuacccccccgacgaggacgaggaggagggggacugcgaggaggaggaguucgagccguccacccaguacgaguacggcacggaggacgacuaccagggcaagccccucgaguucggggcgaccagcgccgcccugcagcccgaggaggagcaggaggaggacuggcuggacgacgacucccagcagaccgugggccagcaggacgggagcgaggacaaccagaccacgaccauccagaccaucguggagguccagccccagcucgagaccgagcugacgccgguggugcagaccaucgaggucaacuccuucagcggcuaccugaagcucaccgacaacguguacaucaagaacgccgacaucguggaggaggcgaagaaggucaagcccaccgugguggucaacgccgccaacguguaccugaagcacgggggcggcguggccggggcccugaacaaggcgacgaacaacgccaugcaggucgaguccgacgacuacaucgccaccaacggcccccucaagguggggggcagcugcguccuguccggccacaaccuggccaagcacugccuccacgugguggggcccaacgucaacaagggcgaggacauccagcugcugaagagcgccuacgagaacuucaaccagcacgaggugcuccuggcgccgcugcucuccgccgggaucuucggcgccgaccccauccacagccugcgggugugcgucgacaccgugcgcaccaacguguaccuggccgucuucgacaagaaccucuacgacaagcugguguccagcuuccuggagaugaagagcgagaagcagguggagcagaagaucgccgagauccccaaggaggaggucaagcccuucaucacggaguccaagccgagcguggagcagcggaagcaggacgacaagaagaucaaggcgugcguggaggaggucaccaccacccucgaggagacgaaguuccugaccgagaaccugcuccuguacaucgacaucaacgggaaccugcaccccgacuccgccacccucgugagcgacaucgacaucaccuuccugaagaaggacgcccccuacaucgugggcgacgucgugcaggagggcgugcugacggccgucgugauccccaccaagaaggccgggggcaccaccgagaugcucgcgaaggcccugcgcaaggugccgacggacaacuacaucaccaccuaccccgggcagggccugaacggguacaccgucgaggaggccaagaccgugcucaagaagugcaaguccgccuucuacauccugcccagcaucaucuccaacgagaagcaggagauccugggcacggugagcuggaaccuccgggagaugcuggcgcacgccgaggagacccgcaagcugaugcccgucugcguggagaccaaggccaucguguccaccauccagcggaaguacaagggcaucaagauccaggagggggucguggacuacggcgcccgcuucuacuucuacacgagcaagaccaccguggccucccugaucaacacccucaacgaccugaacgagacgcuggucaccaugccgcucggguacgugacccacggccugaaccuggaggaggcggcccgguacaugcgcagccucaaggugcccgccaccgucuccgugagcucccccgacgccgugacggccuacaacggguaccugaccagcuccagcaagacccccgaggagcgguucaucgagaccaucucccuggcgggcagcuacaaggacuggagcuacuccggccagagcacgcagcucgggaucgaguuccugaagcgcggcgacaaguccgucuacuacaccagcaacccgaccaccuuccaccuggacggggaggugaucacguucgacaaccucaagacccugcugucccuccgggaggugcgcaccaucaaggucuucaccacgguggacaacaucaaccugcacacccagguggucgacaugagcaugaccuacggccagcaguucggccccaccuaccuggacggggccgacgugacgaagaucaagccccacaacucccacgagggcaagaccuucuacgugcucccgaacgacgacacccugcgggucgaggccuucgaguacuaccacaccacggaccccagcuuccuggggcgcuacauguccgcccucaaccacaccaagaaguggaaguacccccaggugaacggccugaccagcaucaagugggccgacaacaacugcuaccuggcgaccgcccuccugacgcugcagcagaucgagcucaaguucaaccccccggcccugcaggacgccuacuaccgggcgcgcgccggggaggccgccaacuucugcgcccugauccucgcguacugcaacaagaccgugggcgagcugggcgacguccgggagaccauguccuaccuguuccagcacgccaaccucgacagcugcaagcgcgugcugaacgucgugugcaagaccugcgggcagcagcagaccacgcugaagggcguggaggccgucauguacauggggacccucuccuacgagcaguucaagaagggcgugcagauccccugcaccugcgggaagcaggccaccaaguaccuggugcagcaggagagccccuucgucaugauguccgcccccccggcgcaguacgagcugaagcacggcacguucaccugcgccagcgaguacaccggcaacuaccagugcgggcacuacaagcacaucaccuccaaggagacgcucuacugcaucgacggcgcccugcugaccaagagcagcgaguacaaggggcccaucaccgacguguucuacaaggagaacuccuacaccacgaccaucaagcccgugaccuacaagcucgacggcgucgugugcaccgagaucgaccccaagcuggacaacuacuacaagaaggacaacagcuacuucacggagcagccgaucgaccuggugcccaaccagcccuaccccaacgccuccuucgacaacuucaaguucgucugcgacaacaucaaguucgccgacgaccucaaccagcugaccggguacaagaagccggcgagccgggagcugaaggugaccuucuuccccgaccucaacggcgacguggucgccaucgacuacaagcacuacacccccuccuucaagaagggcgccaagcugcugcacaagcccaucguguggcacgugaacaacgccacgaacaaggcgaccuacaagccgaacaccuggugcauccgcugccucuggagcaccaagcccgucgagacguccaacagcuucgacgugcugaaguccgaggacgcccaggggauggacaaccuggccugcgaggaccucaagcccgugagcgaggaggucguggagaaccccaccauccagaaggacgugcuggagugcaacgucaagaccaccgagguggugggcgacaucauccugaagccggccaacaacucccucaagaucacggaggaggucgggcacaccgaccugauggccgcguacguggacaacagcucccugaccaucaagaagcccaacgagcucagccgcgugcugggccugaagacccucgccacgcacgggcuggccgccgucaacuccgugcccugggacaccaucgccaacuacgcgaagccguuccugaacaagguggucagcaccaccacgaacaucgugacccggugccucaaccgcgugugcaccaacuacaugcccuacuucuucacccugcugcuccagcugugcaccuucacgcgguccaccaacagccgcaucaaggccuccaugcccaccaccaucgccaagaacacggucaagagcgugggcaaguucugccuggaggccagcuucaacuaccucaagucccccaacuucagcaagcugaucaacaucaucaucugguuccugcuccuguccgugugccugggcagccucaucuacuccaccgccgcgcuggggguccugaugagcaaccucggcaugccguccuacugcaccggguaccgggagggcuaccugaacagcaccaacgugacgaucgccaccuacugcaccggcuccauccccugcagcgugugccuguccgggcucgacagccuggacaccuaccccucccuggagacgauccagaucaccaucagcuccuucaagugggaccucaccgccuucggccuggucgccgagugguuccuggccuacauccucuucacccgcuucuucuacgugcuggggcuggcggccaucaugcagcucuucuucagcuacuucgccgugcacuucaucuccaacagcuggcugauguggcugaucaucaaccugguccagauggcccccaucuccgcgauggugcggauguacaucuucuucgccagcuucuacuacguguggaagagcuacguccacgugguggacggcugcaacuccagcacgugcaugaugugcuacaagcgcaaccgggccacccgcgucgagugcaccaccaucgugaacgggguccggcgcuccuucuacguguacgccaacggcggcaagggguucugcaagcuccacaacuggaacugcgugaacugcgacacguucugcgccggcagcaccuucaucuccgacgaggucgcgcgggaccugagccugcaguucaagcgcccgaucaaccccaccgaccaguccagcuacaucguggacuccgugaccgucaagaacgggagcauccaccucuacuucgacaaggccggccagaagacguacgagcggcacucccugagccacuucgugaaccuggacaaccuccgcgccaacaacaccaaggggucccugcccaucaacgugaucgucuucgacggcaagagcaagugcgaggaguccagcgccaaguccgccagcguguacuacucccagcugaugugccagcccauccuccugcuggaccaggcgcucgugagcgacgucggcgacagcgccgagguggccgugaagauguucgacgccuacgucaacaccuucuccagcaccuucaacgugccgauggagaagcugaagacgcugguggccaccgcggaggccgagcucgccaagaacgucucccuggacaacgugcugagcaccuucaucuccgccgcgcggcagggguucguggacagcgacgucgagaccaaggacgugguggagugccucaagcugucccaccagagcgacaucgaggucacgggcgacuccugcaacaacuacaugcugaccuacaacaagguggagaacaugaccccccgcgaccucggggccugcaucgacugcagcgcccggcacaucaacgcccagguggccaagucccacaacaucgcgcugaucuggaacgucaaggacuucaugagccuguccgagcagcuccgcaagcagauccgcagcgccgccaagaagaacaaccugcccuucaagcugaccugcgccacgacccggcagguggugaacgucgugaccaccaagaucgcccucaagggcgggugaggacuaguuauaagacugacuagcccgaugggccucccaacgggcccuccuccccuccuugcaccgagauuaauaaaaaaaaaaaaaaaaaaaaaaaaaaaaaaaaaaaaaaaaaaaaaaaaaaaaaaaaaaaaaaaaugcaucccccccccccccccccccccccccccccccaaaggcucuuuucagagccaccagaauu

SEQ ID NO: 21818 - RNA, 6058 nt, Artificial Sequence
  SARS-CoV-2__MT642158.1__non-structural protein 3 (NSP3) mRNA gc
aggagaaagcuuaccauggcccccaccaaggugaccuucggcgacgacacggucaucgaggugcagggguacaagagcgugaacaucaccuucgagcuggacgagcgcaucgacaagguccucaacgagaagugcuccgccuacaccguggagcugggcaccgaggugaacgaguucgcgugcgucguggccgacgccgugaucaagacgcugcagccggucagcgagcuccugaccccccuggggaucgaccucgacgagugguccauggccaccuacuaccuguucgacgagagcggcgaguucaagcuggccucccacauguacugcagcuucuacccccccgacgaggacgaggaggagggggacugcgaggaggaggaguucgagccguccacccaguacgaguacggcacggaggacgacuaccagggcaagccccucgaguucggggcgaccagcgccgcccugcagcccgaggaggagcaggaggaggacuggcuggacgacgacucccagcagaccgugggccagcaggacgggagcgaggacaaccagaccacgaccauccagaccaucguggagguccagccccagcucgagauggagcugaccccgguggugcagacgaucgaggucaacuccuucagcggcuaccugaagcucaccgacaacguguacaucaagaacgccgacaucguggaggaggcgaagaaggucaagcccaccgugguggucaacgccgccaacguguaccugaagcacgggggcggcguggccggggcccugaacaaggcgaccaacaacgccaugcaggucgaguccgacgacuacaucgccacgaacggcccccucaagguggggggcagcugcguccuguccggccacaaccuggccaagcacugccuccacgugguggggcccaacgucaacaagggcgaggacauccagcugcugaagagcgccuacgagaacuucaaccagcacgaggugcuccuggcgccgcugcucuccgccgggaucuucggcgccgaccccauccacagccugcgggugugcgucgacaccgugcgcaccaacguguaccuggccgucuucgacaagaaccucuacgacaagcugguguccagcuuccuggagaugaagagcgagaagcagguggagcagaagaucgccgagauccccaaggaggaggucaagcccuucaucaccgaguccaagccgagcguggagcagcggaagcaggacgacaagaagaucaaggcgugcguggaggaggucacgaccacccucgaggagaccaaguuccugacggagaaccugcuccuguacaucgacaucaacgggaaccugcaccccgacuccgccacccucgugagcgacaucgacaucaccuuccugaagaaggacgcccccuacaucgugggcgacgucgugcaggagggcgugcugaccgccgucgugauccccacgaagaaggccgggggcaccaccgagaugcucgcgaaggcccugcgcaaggugccgaccgacaacuacaucacgaccuaccccgggcagggccugaacggguacaccgucgaggaggccaagaccgugcucaagaagugcaaguccgccuucuacauccugcccagcaucaucuccaacgagaagcaggagauccugggcaccgugagcuggaaccuccgggagaugcuggcgcacgccgaggagacgcgcaagcugaugcccgucugcguggagaccaaggccaucguguccaccauccagcggaaguacaagggcaucaagauccaggagggggucguggacuacggcgcccgcuucuacuucuacaccagcaagacgaccguggccucccugaucaacacccucaacgaccugaacgagacccuggucacgaugccgcucggguacgugacccacggccugaaccuggaggaggcggcccgguacaugcgcagccucaaggugcccgccaccgucuccgugagcucccccgacgccgugaccgccuacaacggguaccugacgagcuccagcaagacccccgaggagcacuucaucgagaccaucucccuggcgggcagcuacaaggacuggagcuacuccggccagagcacccagcucgggaucgaguuccugaagcggggcgacaaguccgucuacuacacgagcaacccgaccaccuuccaccuggacggggaggugaucaccuucgacaaccucaagacgcugcugucccuccgcgaggugcggaccaucaaggucuucaccaccguggacaacaucaaccugcacacgcagguggucgacaugagcaugaccuacggccagcaguucggccccaccuaccuggacggggccgacgugaccaagaucaagccccacaacucccacgagggcaagacguucuacgugcucccgaacgacgacacccugcgcgucgaggccuucgaguacuaccacaccaccgaccccagcuuccuggggcgguacauguccgcccucaaccacacgaagaaguggaaguacccccaggugaacggccugaccagcaucaagugggccgacaacaacugcuaccuggcgaccgcccuccugacccugcagcagaucgagcucaaguucaaccccccggcccugcaggacgccuacuaccgcgcgcgggccggggaggccgccaacuucugcgcccugauccucgcguacugcaacaagacggugggcgagcugggcgacguccgcgagaccauguccuaccuguuccagcacgccaaccucgacagcugcaagcgggugcugaacgucgugugcaagaccugcgggcagcagcagaccacccugaagggcguggaggccgucauguacauggggacgcucuccuacgagcaguucaagaagggcgugcagauccccugcaccugcgggaagcaggccaccaaguaccuggugcagcaggagagccccuucgucaugauguccgcccccccggcgcaguacgagcugaagcacggcaccuucacgugcgccagcgaguacaccggcaacuaccagugcgggcacuacaagcacaucaccuccaaggagacccucuacugcaucgacggcgcccugcugacgaagagcagcgaguacaaggggcccaucaccgacguguucuacaaggagaacuccuacaccaccacgaucaagcccgugaccuacaagcucgacggcgucgugugcaccgagaucgaccccaagcuggacaacuacuacaagaaggacaacagcuacuucaccgagcagccgaucgaccuggugcccaaccagcccuaccccaacgccuccuucgacaacuucaaguucgucugcgacaacaucaaguucgccgacgaccucaaccagcugacgggguacaagaagccggcgagccgcgagcugaaggugaccuucuuccccgaccucaacggcgacguggucgccaucgacuacaagcacuacacccccuccuucaagaagggcgccaagcugcugcacaagcccaucguguggcacgugaacaacgccaccaacaaggcgacguacaagccgaacaccuggugcauccggugccucuggagcaccaagcccgucgagaccuccaacagcuucgacgugcugaaguccgaggacgcccaggggauggacaaccuggccugcgaggaccucaagcccgugagcgaggaggucguggagaaccccacgauccagaaggacgugcuggagugcaacgucaagaccaccgagguggugggcgacaucauccugaagccggccaacaacucccucaagaucaccgaggaggucgggcacacggaccugauggccgcguacguggacaacagcucccugaccaucaagaagcccaacgagcucagccgcgugcugggccugaagacccucgccacccacgggcuggccgccgucaacuccgugcccugggacacgaucgccaacuacgcgaagccguuccugaacaagguggucagcaccaccaccaacaucgugacgcgcugccucaaccgggugugcaccaacuacaugcccuacuucuucacccugcugcuccagcugugcaccuucacccgcuccacgaacagccggaucaaggccuccaugcccaccaccaucgccaagaacaccgucaagagcgugggcaaguucugccuggaggccagcuucaacuaccucaagucccccaacuucagcaagcugaucaacaucaucaucugguuccugcuccuguccgugugccugggcagccucaucuacuccacggccgcgcuggggguccugaugagcaaccucggcaugccguccagcugcaccggguaccgcgagggcuaccugaacuccaccaacgugaccaucgccacguacugcaccggcagcauccccugcuccgugugccugagcgggcucgacucccuggacaccuaccccagccuggagaccauccagaucacgaucuccagcuucaagugggaccucaccgccuucggccuggucgccgagugguuccuggccuacauccucuucacccgguucuucuacgugcuggggcuggcggccaucaugcagcucuucuucuccuacuucgccgugcacuucaucagcaacuccuggcugauguggcugaucaucaaccugguccagauggcccccaucagcgcgauggugcgcauguacaucuucuucgccagcuucuacuacguguggaaguccuacguccacgugguggacggcugcaacagcuccaccugcaugaugugcuacaagcggaaccgcgccacgcgggucgagugcaccaccaucgugaacgggguccgccggagcuucuacguguacgccaacggcggcaagggguucugcaagcuccacaacuggaacugcgugaacugcgacaccuucugcgccggcuccacguucaucagcgacgaggucgcgcgcgaccugucccugcaguucaagcggccgaucaaccccaccgaccagagcuccuacaucguggacagcgugaccgucaagaacggguccauccaccucuacuucgacaaggccggccagaagaccuacgagcgccacagccugucccacuucgugaaccuggacaaccuccgggccaacaacacgaaggggagccugcccaucaacgugaucgucuucgacggcaaguccaagugcgaggagagcuccgccaagagcgccuccguguacuacagccagcugaugugccagcccauccuccugcuggaccaggcgcucgugagcgacgucggcgacuccgccgagguggccgugaagauguucgacgccuacgucaacaccuucagcuccaccuucaacgugccgauggagaagcugaagacccugguggccacggcggaggccgagcucgccaagaacgucagccuggacaacgugcuguccaccuucaucagcgccgcgcgccagggguucguggacuccgacgucgagaccaaggacgugguggagugccucaagcugagccaccaguccgacaucgaggucaccggcgacagcugcaacaacuacaugcugacguacaacaagguggagaacaugaccccccgggaccucggggccugcaucgacugcuccgcccgccacaucaacgcccagguggccaagagccacaacaucgcgcugaucuggaacgucaaggacuucaugucccugagcgagcagcuccggaagcagauccgcuccgccgccaagaagaacaaccugcccuucaagcugaccugcgccaccacgcgccagguggugaacgucgugaccaccaagaucgcccucaagggcgggugaggacuaguuauaagacugacuagcccgaugggccucccaacgggcccuccuccccuccuugcaccgagauuaauaaaaaaaaaaaaaaaaaaaaaaaaaaaaaaaaaaaaaaaaaaaaaaaaaaaaaaaaaaaaaaaaugcaucccccccccccccccccccccccccccccccaaaggcucuuuucagagccaccagaauu

SEQ ID NO: 21819 - RNA, 6058 nt, Artificial Sequence
  SARS-CoV-2__MT642161.1__non-structural protein 3 (NSP3) mRNA gc
aggagaaagcuuaccauggcccccaccaaggugaccuucggcgacgacacggucaucgaggugcagggguacaagagcgugaacaucaccuucgagcuggacgagcgcaucgacaagguccucaacgagaagugcuccgccuacaccguggagcugggcaccgaggugaacgaguucgcgugcgucguggccgacgccgugaucaagacgcugcagccggucagcgagcuccugaccccccuggggaucgaccucgacgagugguccauggccaccuacuaccuguucgacgagagcggcgaguucaagcuggccucccacauguacugcagcuucuacccccccgacgaggacgaggaggagggggacugcgaggaggaggaguucgagccguccacccaguacgaguacggcacggaggacgacuaccagggcaagccccucgaguucggggcgaccagcgccgcccugcagcccgaggaggagcaggaggaggacuggcuggacgacgacucccagcagaccgugggccagcaggacgggagcgaggacaaccagaccacgaccauccagaccaucguggagguccagccccagcucgagauggagcugaccccgguggugcagacgaucgaggucaacuccuucagcggcuaccugaagcucaccgacaacguguacaucaagaacgccgacaucguggaggaggcgaagaaggucaagcccaccgugguggucaacgccgccaacguguaccugaagcacgggggcggcguggccggggcccugaacaaggcgaccaacaacgccaugcaggucgaguccgacgacuacaucgccacgaacggcccccucaagguggggggcagcugcguccuguccggccacaaccuggccaagcacugccuccacgugguggggcccaacgucaacaagggcgaggacauccagcugcugaagagcgccuacgagaacuucaaccagcacgaggugcuccuggcgccgcugcucuccgccgggaucuucggcgccgaccccauccacagccugcgggugugcgucgacaccgugcgcaccaacguguaccuggccgucuucgacaagaaccucuacgacaagcugguguccagcuuccuggagaugaagagcgagaagcagguggagcagaagaucgccgagauccccaaggaggaggucaagcccuucaucaccgaguccaagccgagcguggagcagcggaagcaggacgacaagaagaucaaggcgugcguggaggaggucacgaccacccucgaggagaccaaguuccugacggagaaccugcuccuguacaucgacaucaacgggaaccugcaccccgacuccgccacccucgugagcgacaucgacaucaccuuccugaagaaggacgcccccuacaucgugggcgacgucgugcaggagggcgugcugaccgccgucgugauccccacgaagaaggccgggggcaccaccgagaugcucgcgaaggcccugcgcaaggugccgaccgacaacuacaucacgaccuaccccgggcagggccugaacggguacaccgucgaggaggccaagaccgugcucaagaagugcaaguccgccuucuacauccugcccagcaucaucuccaacgagaagcaggagauccugggcaccgugagcuggaaccuccgggagaugcuggcgcacgccgaggagacgcgcaagcugaugcccgucugcguggagaccaaggccaucguguccaccauccagcggaaguacaagggcaucaagauccaggagggggucguggacuacggcgcccgcuucuacuucuacaccagcaagacgaccguggccucccugaucaacacccucaacgaccugaacgagacccuggucacgaugccgcucggguacgugacccacggccugaaccuggaggaggcggcccgguacaugcgcagccucaaggugcccgccaccgucuccgugagcucccccgacgccgugaccgccuacaacggguaccugacgagcuccagcaagacccccgaggagcacuucaucgagaccaucucccuggcgggcagcuacaaggacuggagcuacuccggccagagcacccagcucgggaucgaguuccugaagcggggcgacaaguccgucuacuacacgagcaacccgaccaccuuccaccuggacggggaggugaucaccuucgacaaccucaagacgcugcugucccuccgcgaggugcggaccaucaaggucuucaccaccguggacaacaucaaccugcacacgcagguggucgacaugagcaugaccuacggccagcaguucggccccaccuaccuggacggggccgacgugaccaagaucaagccccacaacucccacgagggcaagacguucuacgugcucccgaacgacgacacccugcgcgucgaggccuucgaguacuaccacaccaccgaccccagcuuccuggggcgguacauguccgcccucaaccacacgaagaaguggaaguacccccaggugaacggccugaccagcaucaagugggccgacaacaacugcuaccuggcgaccgcccuccugacccugcagcagaucgagcucaaguucaaccccccggcccugcaggacgccuacuaccgcgcgcgggccggggaggccgccaacuucugcgcccugauccucgcguacugcaacaagacggugggcgagcugggcgacguccgcgagaccauguccuaccuguuccagcacgccaaccucgacagcugcaagcgggugcugaacgucgugugcaagaccugcgggcagcagcagaccacccugaagggcguggaggccgucauguacauggggacgcucuccuacgagcaguucaagaagggcgugcagauccccugcaccugcgggaagcaggccaccaaguaccuggugcagcaggagagccccuucgucaugauguccgcccccccggcgcaguacgagcugaagcacggcaccuucacgugcgccagcgaguacaccggcaacuaccagugcgggcacuacaagcacaucaccuccaaggagacccucuacugcaucgacggcgcccugcugacgaagagcagcgaguacaaggggcccaucaccgacguguucuacaaggagaacuccuacaccaccacgaucaagcccgugaccuacaagcucgacggcgucgugugcaccgagaucgaccccaagcuggacaacuacuacaagaaggacaacagcuacuucaccgagcagccgaucgaccuggugcccaaccagcccuaccccaacgccuccuucgacaacuucaaguucgucugcgacaacaucaaguucgccgacgaccucaaccagcugacgggguacaagaagccggcgagccgcgagcugaaggugaccuucuuccccgaccucaacggcgacguggucgccaucgacuacaagcacuacacccccuccuucaagaagggcgccaagcugcugcacaagcccaucguguggcacgugaacaacgccaccaacaaggcgacguacaagccgaacaccuggugcauccggugccucuggagcaccaagcccgucgagaccuccaacagcuucgacgugcugaaguccgaggacgcccaggggauggacaaccuggccugcgaggaccucaagcccgugagcgaggaggucguggagaaccccacgauccagaaggacgugcuggagugcaacgucaagaccaccgagguggugggcgacaucauccugaagccggccaacaacucccucaagaucaccgaggaggucgggcacacggaccugauggccgcguacguggacaacagcucccugaccaucaagaagcccaacgagcucagccgcgugcugggccugaagacccucgccacccacgggcuggccgccgucaacuccgugcccugggacacgaucgccaacuacgcgaagccguuccugaacaagguggucagcaccaccaccaacaucgugacgcgcugccucaaccgggugugcaccaacuacaugcccuacuucuucacccugcugcuccagcugugcaccuucacccgcuccacgaacagccggaucaaggccuccaugcccaccaccaucgccaagaacaccgucaagagcgugggcaaguucugccuggaggccagcuucaacuaccucaagucccccaacuucagcaagcugaucaacaucaucaucugguuccugcuccuguccgugugccugggcagccucaucuacuccacggccgcgcuggggguccugaugagcaaccucggcaugccguccuacugcaccggguaccgcgagggcuaccugaacagcaccaacgugaccaucgccacguacugcaccggcuccauccccugcagcgugugccuguccgggcucgacagccuggacaccuaccccucccuggagaccauccagaucacgaucagcuccuucaagugggaccucaccgccuucggccuggucgccgagugguuccuggccuacauccucuucacccgguucuucuacgugcuggggcuggcggccaucaugcagcucuucuucagcuacuucgccgugcacuucaucuccaacagcuggcugauguggcugaucaucaaccugguccagauggcccccaucuccgcgauggugcgcauguacaucuucuucgccagcuucuacuacguguggaagagcuacguccacgugguggacggcugcaacuccagcaccugcaugaugugcuacaagcggaaccgcgccacgcgggucgagugcaccaccaucgugaacgggguccgccgguccuucuacguguacgccaacggcggcaagggguucugcaagcuccacaacuggaacugcgugaacugcgacaccuucugcgccggcagcacguucaucuccgacgaggucgcgcgcgaccugagccugcaguucaagcggccgaucaaccccaccgaccaguccagcuacaucguggacuccgugaccgucaagaacgggagcauccaccucuacuucgacaaggccggccagaagaccuacgagcgccacucccugagccacuucgugaaccuguacaaccuccgggccaacaacacgaaggggucccugcccaucaacgugaucgucuucgacggcaagagcaagugcgaggaguccagcgccaaguccgccagcguguacuacucccagcugaugugccagcccauccuccugcuggaccaggcgcucgugagcgacgucggcgacagcgccgagguggccgugaagauguucgacgccuacgucaacaccuucuccagcaccuucaacgugccgauggagaagcugaagacccugguggccacggcggaggccgagcucgccaagaacgucucccuggacaacgugcugagcaccuucaucuccgccgcgcgccagggguucguggacagcgacgucgagaccaaggacgugguggagugccucaagcugucccaccagagcgacaucgaggucaccggcgacuccugcaacaacuacaugcugacguacaacaagguggagaacaugaccccccgggaccucggggccugcaucgacugcagcgcccgccacaucaacgcccagguggccaagucccacaacaucgcgcugaucuggaacgucaaggacuucaugagccuguccgagcagcuccggaagcagauccgcagcgccgccaagaagaacaaccugcccuucaagcugaccugcgccaccacgcgccagguggugaacgucgugaccaccaagaucgcccucaagggcgggugaggacuaguuauaagacugacuagcccgaugggccucccaacgggcccuccuccccuccuugcaccgagauuaauaaaaaaaaaaaaaaaaaaaaaaaaaaaaaaaaaaaaaaaaaaaaaaaaaaaaaaaaaaaaaaaaugcaucccccccccccccccccccccccccccccccaaaggcucuuuucagagccaccagaauu

SEQ ID NO: 21820 - RNA, 6058 nt, Artificial Sequence
  SARS-CoV-2__MT642173.1__non-structural protein 3 (NSP3) mRNA gc
aggagaaagcuuaccauggcccccaccaaggugaccuucggcgacgacacggucaucgaggugcagggguacaagagcgugaacaucaccuucgagcuggacgagcgcaucgacaagguccucaacgagaagugcuccgccuacaccguggagcugggcaccgaggugaacgaguucgcgugcgucguggccgacgccgugaucaagacgcugcagccggucagcgagcuccugaccccccuggggaucgaccucgacgagugguccauggccaccuacuaccuguucgacgagagcggcgaguucaagcuggccucccacauguacugcagcuucuacccccccgacgaggacgaggaggagggggacugcgaggaggaggaguucgagccguccacccaguacgaguacggcacggaggacgacuaccagggcaagccccucgaguucggggcgaccagcgccgcccugcagcccgaggaggagcaggaggaggacuggcuggacgacgacucccagcagaccgugggccagcaggacgggagcgaggacaaccagaccacgaccauccagaccaucguggagguccagccccagcucgagauggagcugaccccgguggugcagacgaucgaggucaacuccuucagcggcuaccugaagcucaccgacaacguguacaucaagaacgccgacaucguggaggaggcgaagaaggucaagcccaccgugguggucaacgccgccaacguguaccugaagcacgggggcggcguggccggggcccugaacaaggcgaccaacaacgccaugcaggucgaguccgacgacuacaucgccacgaacggcccccucaagguggggggcagcugcguccuguccggccacaaccuggccaagcacugccuccacgugguggggcccaacgucaacaagggcgaggacauccagcugcugaagagcgccuacgagaacuucaaccagcacgaggugcuccuggcgccgcugcucuccgccgggaucuucggcgccgaccccauccacagccugcgggugugcgucgacaccgugcgcaccaacguguaccuggccgucuucgacaagaaccucuacgacaagcugguguccagcuuccuggagaugaagagcgagaagcagguggagcagaagaucgccgagauccccaaggaggaggucaagcccuucaucaccgaguccaagccgagcguggagcagcggaagcaggacgacaagaagaucaaggcgugcguggaggaggucacgaccacccucgaggagaccaaguuccugacggagaaccugcuccuguacaucgacaucaacgggaaccugcaccccgacuccgccacccucgugagcgacaucgacaucaccuuccugaagaaggacgcccccuacaucgugggcgacgucgugcaggagggcgugcugaccgccgucgugauccccacgaagaaggccgggggcaccaccgagaugcucgcgaaggcccugcgcaaggugccgaccgacaacuacaucacgaccuaccccgggcagggccugaacggguacaccgucgaggaggccaagaccgugcucaagaagugcaaguccgccuucuacauccugcccagcaucaucuccaacgagaagcaggagauccugggcaccgugagcuggaaccuccgggagaugcuggcgcacgccgaggagacgcgcaagcugaugcccgucugcguggagaccaaggccaucguguccaccauccagcggaaguacaagggcaucaagauccaggagggggucguggacuacggcgcccgcuucuacuucuacaccagcaagacgaccguggccucccugaucaacacccucaacgaccugaacgagacccuggucacgaugccgcucggguacgugacccacggccugaaccuggaggaggcggcccgguacaugcgcagccucaaggugcccgccaccgucuccgugagcucccccgacgccgugaccgccuacaacggguaccugacgagcuccagcaagacccccgaggagcacuucaucgagaccaucucccuggcgggcagcuacaaggacuggagcuacuccggccagagcacccagcucgggaucgaguuccugaagcggggcgacaaguccgucuacuacacgagcaacccgaccaccuuccaccuggacggggaggugaucaccuucgacaaccucaagacgcugcugucccuccgcgaggugcggaccaucaaggucuucaccaccguggacaacaucaaccugcacacgcagguggucgacaugagcaugaccuacggccagcaguucggccccaccuaccuggacggggccgacgugaccaagaucaagccccacaacucccacgagggcaagacguucuacgugcucccgaacgacgacacccugcgcgucgaggccuucgaguacuaccacaccaccgaccccagcuuccuggggcgguacauguccgcccucaaccacacgaagaaguggaaguacccccaggugaacggccugaccagcaucaagugggccgacaacaacugcuaccuggcgaccgcccuccugacccugcagcagaucgagcucaaguucaaccccccggcccugcaggacgccuacuaccgcgcgcgggccggggaggccgccaacuucugcgcccugauccucgcguacugcaacaagacggugggcgagcugggcgacguccgcgagaccauguccuaccuguuccagcacgccaaccucgacagcugcaagcgggugcugaacgucgugugcaagaccugcgggcagcagcagaccacccugaagggcguggaggccgucauguacauggggacgcucuccuacgagcaguucaagaagggcgugcagauccccugcaccugcgggaagcaggccaccaaguaccuggugcagcaggagagccccuucgucaugauguccgcccccccggcgcaguacgagcugaagcacggcaccuucacgugcgccagcgaguacaccggcaacuaccagugcgggcacuacaagcacaucaccuccaaggagacccucuacugcaucgacggcgcccugcugacgaagagcagcgaguacaaggggcccaucaccgacguguucuacaaggagaacuccuacaccaccacgaucaagcccgugaccuacaagcucgacggcgucgugugcaccgagaucgaccccaagcuggacaacuacuacaagaaggacaacagcuacuucaccgagcagccgaucgaccuggugcccaaccagcccuaccccaacgccuccuucgacaacuucaaguucgucugcgacaacaucaaguucgccgacgaccucaaccagcugacgggguacaagaagccggcgagccgcgagcugaaggugaccuucuuccccgaccucaacggcgacguggucgccaucgacuacaagcacuacacccccuccuucaagaagggcgccaagcugcugcacaagcccaucguguggcacgugaacaacgccaccaacaaggcgacguacaagccgaacaccuggugcauccggugccucuggagcaccaagcccgucgagaccuccaacagcuucgacgugcugaaguccgaggacgcccaggggauggacaaccuggccugcgaggaccucaagcccgugagcgaggaggucguggagaaccccacgauccagaaggacgugcuggagugcaacgucaagaccaccgagguggugggcgacaucauccugaagccggccaacaacucccucaagaucaccgaggaggucgggcacacggaccugauggccgcguacguggacaacagcucccugaccauccgcaagcccaacgagcucagccgcgugcugggccugaagacccucgccacccacgggcuggccgccgucaacuccgugcccugggacacgaucgccaacuacgcgaagccguuccugaacaagguggucagcaccaccaccaacaucgugacgcggugccucaaccgcgugugcaccaacuacaugcccuacuucuucacccugcugcuccagcugugcaccuucacccgguccacgaacagccgcaucaaggccuccaugcccaccaccaucgccaagaacaccgucaagagcgugggcaaguucugccuggaggccagcuucaacuaccucaagucccccaacuucagcaagcugaucaacaucaucaucugguuccugcuccuguccgugugccugggcagccucaucuacuccacggccgcgcuggggguccugaugagcaaccucggcaugccguccuacugcaccggguaccgggagggcuaccugaacagcaccaacgugaccaucgccacguacugcaccggcuccauccccugcagcgugugccuguccgggcucgacagccuggacaccuaccccucccuggagaccauccagaucacgaucagcuccuucaagugggaccucaccgccuucggccuggucgccgagugguuccuggccuacauccucuucacccgcuucuucuacgugcuggggcuggcggccaucaugcagcucuucuucagcuacuucgccgugcacuucaucuccaacagcuggcugauguggcugaucaucaaccugguccagauggcccccaucuccgcgauggugcggauguacaucuucuucgccagcuucuacuacguguggaagagcuacguccacgugguggacggcugcaacuccagcaccugcaugaugugcuacaagcgcaaccgggccacgcgcgucgagugcaccaccaucgugaacgggguccggcgcuccuucuacguguacgccaacggcggcaagggguucugcaagcuccacaacuggaacugcgugaacugcgacaccuucugcgccggcagcacguucaucuccgacgaggucgcgcgggaccugagccugcaguucaagcgcccgaucaaccccaccgaccaguccagcuacaucguggacuccgugaccgucaagaacgggagcauccaccucuacuucgacaaggccggccagaagaccuacgagcggcacucccugagccacuucgugaaccuggacaaccuccgcgccaacaacacgaaggggucccugcccaucaacgugaucgucuucgacggcaagagcaagugcgaggaguccagcgccaaguccgccagcguguacuacucccagcugaugugccagcccauccuccugcuggaccaggcgcucgugagcgacgucggcgacagcgccgagguggccgugaagauguucgacgccuacgucaacaccuucuccagcaccuucaacgugccgauggagaagcugaagacccugguggccacggcggaggccgagcucgccaagaacgucucccuggacaacgugcugagcaccuucaucuccgccgcgcggcagggguucguggacagcgacgucgagaccaaggacgugguggagugccucaagcugucccaccagagcgacaucgaggucaccggcgacuccugcaacaacuacaugcugacguacaacaagguggagaacaugaccccccgcgaccucggggccugcaucgacugcagcgcccggcacaucaacgcccagguggccaagucccacaacaucgcgcugaucuggaacgucaaggacuucaugagccuguccgagcagcuccgcaagcagauccgcagcgccgccaagaagaacaaccugcccuucaagcugaccugcgccaccacgcggcagguggugaacgucgugaccaccaagaucgcccucaagggcgggugaggacuaguuauaagacugacuagcccgaugggccucccaacgggcccuccuccccuccuugcaccgagauuaauaaaaaaaaaaaaaaaaaaaaaaaaaaaaaaaaaaaaaaaaaaaaaaaaaaaaaaaaaaaaaaaaugcaucccccccccccccccccccccccccccccccaaaggcucuuuucagagccaccagaauu

SEQ ID NO: 21821 - RNA, 6058 nt, Artificial Sequence
  SARS-CoV-2__MT642178.1__non-structural protein 3 (NSP3) mRNA gc
aggagaaagcuuaccauggcccccaccaaggugaccuucggcgacgacacggucaucgaggugcagggguacaagagcgugaacaucaccuucgagcuggacgagcgcaucgacaagguccucaacgagaagugcuccgccuacaccguggagcugggcaccgaggugaacgaguucgcgugcgucguggccgacgccgugaucaagacgcugcagccggucagcgagcuccugaccccccuggggaucgaccucgacgagugguccauggccaccuacuaccuguucgacgagagcggcgaguucaagcuggccucccacauguacugcagcuucuacccccccgacgaggacgaggaggagggggacugcgaggaggaggaguucgagccguccacccaguacgaguacggcacggaggacgacuaccagggcaagccccucgaguucggggcgaccagcgccgcccugcagcccgaggaggagcaggaggaggacuggcuggacgacgacucccagcagaccgugggccagcaggacgggagcgaggacaaccagaccacgaccauccagaccaucguggagguccagccccagcucgagauggagcugaccccgguggugcagacgaucgaggucaacuccuucagcggcuaccugaagcucaccgacaacguguacaucaagaacgccgacaucguggaggaggcgaagaaggucaagcccaccgugguggucaacgccgccaacguguaccugaagcacgggggcggcguggccggggcccugaacaaggcgaccaacaacgccaugcaggucgaguccgacgacuacaucgccacgaacggcccccucaagguggggggcagcugcguccuguccggccacaaccuggccaagcacugccuccacgugguggggcccaacgucaacaagggcgaggacauccagcugcugaagagcgccuacgagaacuucaaccagcacgaggugcuccuggcgccgcugcucuccgccgggaucuucggcgccgaccccauccacagccugcgggugugcgucgacaccgugcgcaccaacguguaccuggccgucuucgacaagaaccucuacgacaagcugguguccagcuuccuggagaugaagagcgagaagcagguggagcagaagaucgccgagauccccaaggaggaggucaagcccuucaucaccgaguccaagccgagcguggagcagcggaagcaggacgacaagaagaucaaggcgugcguggaggaggucacgaccauccucgaggagaccaaguuccugaccgagaaccugcuccuguacaucgacaucaacgggaaccugcaccccgacuccgccacgcucgugagcgacaucgacaucaccuuccugaagaaggacgcccccuacaucgugggcgacgucgugcaggagggcgugcugaccgccgucgugauccccaccaagaaggccgggggcacgaccgagaugcucgcgaaggcccugcgcaaggugccgaccgacaacuacaucaccacguaccccgggcagggccugaacggguacaccgucgaggaggccaagaccgugcucaagaagugcaaguccgccuucuacauccugcccagcaucaucuccaacgagaagcaggagauccugggcaccgugagcuggaaccuccgggagaugcuggcgcacgccgaggagacccgcaagcugaugcccgucugcguggagacgaaggccaucguguccaccauccagcggaaguacaagggcaucaagauccaggagggggucguggacuacggcgcccgcuucuacuucuacaccagcaagaccacgguggccucccugaucaacacccucaacgaccugaacgagacccuggucaccaugccgcucggguacgugacgcacggccugaaccuggaggaggcggcccgguacaugcgcagccucaaggugcccgccaccgucuccgugagcucccccgacgccgugaccgccuacaacggguaccugaccagcuccagcaagacgcccgaggagcacuucaucgagaccaucucccuggcgggcagcuacaaggacuggagcuacuccggccagagcacccagcucgggaucgaguuccugaagcggggcgacaaguccgucuacuacaccagcaacccgacgaccuuccaccuggacggggaggugaucaccuucgacaaccucaagacccugcugucccuccgcgaggugcggacgaucaaggucuucaccaccguggacaacaucaaccugcacacccagguggucgacaugagcaugacguacggccagcaguucggccccaccuaccuggacggggccgacgugaccaagaucaagccccacaacucccacgagggcaagaccuucuacgugcucccgaacgacgacacgcugcgcgucgaggccuucgaguacuaccacaccaccgaccccagcuuccuggggcgguacauguccgcccucaaccacaccaagaaguggaaguacccccaggugaacggccugacgagcaucaagugggccgacaacaacugcuaccuggcgaccgcccuccugacccugcagcagaucgagcucaaguucaaccccccggcccugcaggacgccuacuaccgcgcgcgggccggggaggccgccaacuucugcgcccugauccucgcguacugcaacaagaccgugggcgagcugggcgacguccgcgagacgauguccuaccuguuccagcacgccaaccucgacagcugcaagcgggugcugaacgucgugugcaagaccugcgggcagcugcagaccacccucaagggcguggaggccgucauguacauggggacccuguccuacgagcaguucaagaagggcgugcagauccccugcacgugcgggaagcaggccaccaaguaccuggugcagcaggagagccccuucgucaugauguccgcccccccggcgcaguacgagcucaagcacggcaccuucaccugcgccagcgaguacacgggcaacuaccagugcgggcacuacaagcacaucaccuccaaggagacccuguacugcaucgacggcgcccugcucaccaagagcagcgaguacaaggggcccaucacggacguguucuacaaggagaacuccuacaccaccaccaucaagcccgugacguacaagcuggacggcgucgugugcaccgagaucgaccccaagcuggacaacuacuacaagaaggacaacagcuacuucaccgagcagccgaucgaccucgugcccaaccagcccuaccccaacgccuccuucgacaacuucaaguucgucugcgacaacaucaaguucgccgacgaccugaaccagcugaccggguacaagaagccggcgagccgcgagcucaaggugacguucuuccccgaccugaacggcgacguggucgccaucgacuacaagcacuacacccccuccuucaagaagggcgccaagcugcuccacaagcccaucguguggcacgugaacaacgccaccaacaaggcgaccuacaagccgaacacguggugcauccggugccuguggagcaccaagcccgucgagaccuccaacagcuucgacgugcugaaguccgaggacgcccaggggauggacaaccucgccugcgaggaccugaagcccgugagcgaggaggucguggagaaccccaccauccagaaggacgugcuggagugcaacgucaagacgaccgagguggugggcgacaucauccucaagccggccaacaacucccugaagaucaccgaggaggucgggcacaccgaccugauggccgcguacguggacaacagcucccucacgaucaagaagcccaacgagcugagccgcgugcugggccucaagacccuggccacccacgggcuggccgccgucaacuccgugcccugggacaccaucgccaacuacgcgaagccguuccucaacaagguggucagcacgaccaccaacaucgugacccgcugccugaaccgggugugcacgaacuacaugcccuacuucuucacccugcuccugcagcugugcaccuucacccgcuccaccaacagccggaucaaggccuccaugcccacgaccaucgccaagaacaccgucaagagcgugggcaaguucugccucgaggccagcuucaacuaccugaagucccccaacuucagcaagcugaucaacaucaucaucugguuccuccugcuguccgugugccucggcagccugaucuacuccaccgccgcgcuggggguccucaugagcaaccugggcaugccguccuacugcacgggguaccgcgagggcuaccugaacagcaccaacgugaccaucgccaccuacugcacgggcuccauccccugcagcgugugccucuccgggcuggacagccuggacaccuaccccucccucgagaccauccagaucaccaucagcuccuucaagugggaccugacggccuucggccuggucgccgagugguuccucgccuacauccuguucacccgguucuucuacgugcuggggcucgcggccaucaugcagcuguucuucagcuacuucgccgugcacuucaucuccaacagcuggcugauguggcugaucaucaaccucguccagauggcccccaucuccgcgauggugcgcauguacaucuucuucgccagcuucuacuacguguggaagagcuacguccacgugguggacggcugcaacuccagcaccugcaugaugugcuacaagcggaaccgcgccacccgggucgagugcacgaccaucgugaacgggguccgccgguccuucuacguguacgccaacggcggcaagggguucugcaagcugcacaacuggaacugcgugaacugcgacaccuucugcgccggcagcaccuucaucuccgacgaggucgcgcgcgaccugagccuccaguucaagcggccgaucaaccccacggaccaguccagcuacaucguggacuccgugaccgucaagaacgggagcauccaccuguacuucgacaaggccggccagaagaccuacgagcgccacucccugagccacuucgugaaccucgacaaccugcgggccaacaacaccaaggggucccugcccaucaacgugaucgucuucgacggcaagagcaagugcgaggaguccagcgccaaguccgccagcguguacuacucccagcucaugugccagcccauccugcugcucgaccaggcgcuggugagcgacgucggcgacagcgccgagguggccgugaagauguucgacgccuacgucaacacguucuccagcaccuucaacgugccgauggagaagcugaagacccucguggccaccgcggaggccgagcuggccaagaacgucucccuggacaacgugcucagcacguucaucuccgccgcgcgccagggguucguggacagcgacgucgagaccaaggacgugguggagugccugaagcugucccaccagagcgacaucgaggucaccggcgacuccugcaacaacuacaugcucaccuacaacaagguggagaacaugacgccccgggaccugggggccugcaucgacugcagcgcccgccacaucaacgcccagguggccaagucccacaacaucgcgcugaucuggaacgucaaggacuucaugagccucuccgagcagcugcggaagcagauccgcagcgccgccaagaagaacaaccugcccuucaagcucaccugcgccaccacccgccagguggugaacgucgugacgaccaagaucgcccugaagggcgggugaggacuaguuauaagacugacuagcccgaugggccucccaacgggcccuccuccccuccuugcaccgagauuaauaaaaaaaaaaaaaaaaaaaaaaaaaaaaaaaaaaaaaaaaaaaaaaaaaaaaaaaaaaaaaaaaugcaucccccccccccccccccccccccccccccccaaaggcucuuuucagagccaccagaauu

SEQ ID NO: 21822 - RNA, 6058 nt, Artificial Sequence
  SARS-CoV-2__MT642270.1__non-structural protein 3 (NSP3) mRNA gc
aggagaaagcuuaccauggcccccaccaaggugaccuucggcgacgacacggucaucgaggugcagggguacaagagcgugaacaucaccuucgagcuggacgagcgcaucgacaagguccucaacgagaagugcuccgccuacaccguggagcugggcaccgaggugaacgaguucgcgugcgucguggccgacgccgugaucaagacgcugcagccggucagcgagcuccugaccccccuggggaucgaccucgacgagugguccauggccaccuacuaccuguucgacgagagcggcgaguucaagcuggccucccacauguacugcagcuucuacccccccgacgaggacgaggaggagggggacugcgaggaggaggaguucgagccguccacccaguacgaguacggcacggaggacgacuaccagggcaagccccucgaguucggggcgaccagcgccgcccugcagcccgaggaggagcaggaggaggacuggcuggacgacgacucccagcagaccgugggccagcaggacgggagcgaggacaaccagaccacgaccauccagaccaucguggagguccagccccagcucgagauggagcugaccccgguggugcagacgaucgaggucaacuccuucagcggcuaccugaagcucaccgacaacguguacaucaagaacgccgacaucguggaggaggcgaagaaggucaagcccaccgugguggucaacgccgccaacguguaccugaagcacgggggcggcguggccggggcccugaacaaggcgaccaacaacgccaugcaggucgaguccgacgacuacaucgccacgaacggcccccucaagguggggggcagcugcguccuguccggccacaaccuggccaagcacugccuccacgugguggggcccaacgucaacaagggcgaggacauccagcugcugaagagcgccuacgagaacuucaaccagcacgaggugcuccuggcgccgcugcucuccgccgggaucuucggcgccgaccccauccacagccugcgggugugcgucgacaccgugcgcaccaacguguaccuggccgucuucgacaagaaccucuacgacaagcugguguccagcuuccuggagaugaagagcgagaagcagguggagcagaagaucgccgagauccccaaggaggaggucaagcccuucaucaccgaguccaagccgagcguggagcagcggaagcaggacgacaagaagaucaaggcgugcguggaggaggucacgaccacccucgaggagaccaaguuccugacggagaaccugcuccuguacaucgacaucaacgggaaccugcaccccgacuccgccacccucgugagcgacaucgacaucaccuuccugaagaaggacgcccccuacaucgugggcgacgucgugcaggagggcgugcugaccgccgucgugauccccacgaagaaggccgggggcaccaccgagaugcucgcgaaggcccugcgcaaggugccgaccgacaacuacaucacgaccuaccccgggcagggccugaacggguacaccgucgaggaggccaagaccgugcucaagaagugcaaguccgccuucuacauccugcccagcaucaucuccaacgagaagcaggagauccugggcaccgugagcuggaaccuccgggagaugcuggcgcacgccgaggagacgcgcaagcugaugcccgucugcguggagaccaaggccaucguguccaccauccagcggaaguacaagggcaucaagauccaggagggggucguggacuacggcgcccgcuucuacuucuacaccagcaagacgaccguggccucccugaucaacacccucaacgaccugaacgagacccuggucacgaugccgcucggguacgugacccacggccugaaccuggaggaggcggcccgguacaugcgcagccucaaggugcccgccaccgucuccgugagcucccccgacgccgugaccgccuacaacggguaccugacgagcuccagcaagacccccgaggagcacuucaucgagaccaucucccuggcgggcagcuacaaggacuggagcuacuccggccagagcacccagcucgggaucgaguuccugaagcggggcgacaaguccgucuacuacacgagcaacccgaccaccuuccaccuggacggggaggugaucaccuucgacaaccucaagacgcugcugucccuccgcgaggugcggaccaucaaggucuucaccaccguggacaacaucaaccugcacacgcagguggucgacaugagcaugaccuacggccagcaguucggccccaccuaccuggacggggccgacgugaccaagaucaagccccacaacucccacgagggcaagacguucuacgugcucccgaacgacgacacccugcgcgucgaggccuucgaguacuaccacaccaccgaccccagcuuccuggggcgguacauguccgcccucaaccacacgaagaaguggaaguacccccaggugaacggccugaccagcaucaagugggccgacaacaacugcuaccuggcgaccgcccuccugacccugcagcagaucgagcucaaguucaaccccccggcccugcaggacgccuacuaccgcgcgcgggccggggaggccgccaacuucugcgcccugauccucgcguacugcaacaagacggugggcgagcugggcgacguccgcgagaccauguccuaccuguuccagcacgccaaccucgacagcugcaagcgggugcugaacgucgugugcaagaccugcgggcagcagcagaccacccugaagggcguggaggccgucauguacauggggacgcucuccuacgagcaguucaagaagggcgugcagauccccugcaccugcgggaagcaggccaccaaguaccuggugcagcaggagagccccuucgucaugauguccgcccccccggcgcaguacgagcugaagcacggcaccuucacgugcgccagcgaguacaccggcaacuaccagugcgggcacuacaagcacaucaccuccaaggagacccucuacugcaucgacggcgcccugcugacgaagagcagcgaguacaaggggcccaucaccgacguguucuacaaggagaacuccuacaccaccacgaucaagcccgugaccuacaagcucgacggcgucgugugcaccgagaucgaccccaagcuggacaacuacuacaagaaggacaacagcuacuucaccgagcagccgaucgaccuggugcccaaccagcccuaccccaacgccuccuucgacaacuucaaguucgucugcgacaacaucaaguucgccgacgaccucaaccagcugacgggguacaagaagccggcgagccgcgagcugaaggugaccuucuuccccgaccucaacggcgacguggucgccaucgacuacaagcacuacacccccuccuucaagaagggcgccaagcugcugcacaagcccaucguguggcacgugaacaacgccaccaacaaggcgacguacaagccgaacaccuggugcauccggugccucuggagcaccaagcccgucgagaccuccaacagcuucgacgugcugaaguccgaggacgcccaggggauggacaaccuggccugcgaggaccucaagcccgugagcgaggaggucguggagaaccccacgauccagaaggacgugcuggagugcaacgucaagaccaccgagguggugggcgacaucauccugaagccggccaacaacucccucaagaucaccgaggaggucgggcacacggaccugauggccgcguacguggacaacagcucccugaccaucaagaagcccaacgagcucagccgcgugcugggccugaagacccucgccacccacgggcuggccgccgucaacuccgugcccugggacacgaucgccaacuacgcgaagccguuccugaacaagguggucagcaccaccaccaacaucgugacgcgcugccucaaccgggugugcaccaacuacaugcccuacuucuucacccugcugcuccagcugugcaccuucacccgcuccacgaacagccggaucaaggccuccaugcccaccaccaucgccaagaacaccgucaagagcgugggcaaguucugccuggaggccagcuucaacuaccucaagucccccaacuucagcaagcugaucaacaucaucaucugguuccugcuccuguccgugugccugggcagccucaucuacuccacggccgcgcuggggguccugaugagcaaccucggcaugccguccuacugcaccggguaccgcgagggcuaccugaacagcaccaacgugaccaucgccacguacugcaccggcuccauccccugcagcgugugccuguccgggcucgacagccuggacaccuaccccucccuggagaccauccagaucacgaucagcuccuucaagugggaccucaccgccuucggccuggucgccgagugguuccuggccuacauccucuucacccgguucuucuacgugcuggggcuggcggccaucaugcagcucuucuucagcuacuucgccgugcacuucaucuccaacagcuggcugauguggcugaucaucaaccugguccagauggcccccaucuccgcgauggugcgcauguacaucuucuucgccagcuucuacuacguguggaagagcuacguccacgugguggacggcugcaacuccagcaccugcaugaugugcuacaagcggaaccgcgccacgcgggucgagugcaccaccaucgugaacgggguccgccgguccuucuacguguacgccaacggcggcaagggguucugcaagcuccacaacuggaacugcgugaacugcgacaccuucugcgccggcagcacguucaucuccgacgaggucgcgcgcgaccugagccugcaguucaagcggccgaucaaccccaccgaccaguccagcuacaucguggacuccgugaccgucaagaacgggagcauccaccucuacuucgacaaggccggccagaagaccuacgagcgccacucccugagccacuucgugaaccuggacaaccuccgggccaacaacacgaaggggucccugcccaucaacgugaucgucuucgacggcaagagcaagugcgaggaguccagcgccaaguccgccagcguguacuacucccagcugaugugccagcccauccuccugcuggaccaggcgcucgugagcgacgucggcgacagcgccgagguggccgugaagauguucgacgccuacgucaacaccuucuccagcaccuucaacgugccgauggagaagcugaagacccugguggccacggcggaggccgagcucgccaagaacgucucccuggacaacgugcugagcaccuucaucuccgccgcgcgccagggguucguggacagcgacgucgagaccaaggacgugguggagugccucaagcugucccaccagagcgacaucgaggucaccggcgacuccugcaacaacuacaugcugacguacaacaagguggagaacaugaccccccgggaccucggggccugcaucgacugcagcgugcgccacaucaacgcccaggucgccaagucccacaacaucgcccugaucuggaacgugaaggacuucaugagccuguccgagcagcuccggaagcagauccgcagcgcggccaagaagaacaaccugcccuucaagcugaccugcgccaccacgcgccagguggucaacguggugaccaccaagaucgcccucaagggcgggugaggacuaguuauaagacugacuagcccgaugggccucccaacgggcccuccuccccuccuugcaccgagauuaauaaaaaaaaaaaaaaaaaaaaaaaaaaaaaaaaaaaaaaaaaaaaaaaaaaaaaaaaaaaaaaaaugcaucccccccccccccccccccccccccccccccaaaggcucuuuucagagccaccagaauu

SEQ ID NO: 21823 - RNA, 6058 nt, Artificial Sequence
  SARS-CoV-2__MT642356.1__non-structural protein 3 (NSP3) mRNA gc
aggagaaagcuuaccauggcccccaccaaggugaccuucggcgacgacacggucaucgaggugcagggguacaagagcgugaacaucaccuucgagcuggacgagcgcaucgacaagguccucaacgagaagugcuccaccuacaccguggagcugggcacggaggugaacgaguucgccugcgucguggcggacgccgugaucaagacccugcagccggucagcgagcuccugaccccccuggggaucgaccucgacgagugguccauggccaccuacuaccuguucgacgagagcggcgaguucaagcuggccucccacauguacugcagcuucuacccccccgacgaggacgaggaggagggggacugcgaggaggaggaguucgagccguccacgcaguacgaguacggcaccgaggacgacuaccagggcaagccccucgaguucggggccaccagcgcggcccugcagcccgaggaggagcaggaggaggacuggcuggacgacgacucccagcagaccgugggccagcaggacgggagcgaggacaaccagacgaccaccauccagaccaucguggagguccagccccagcucgagauggagcugacgccgguggugcagaccaucgaggucaacuccuucagcggcuaccugaagcucaccgacaacguguacaucaagaacgccgacaucguggaggaggccaagaaggucaagcccaccgugguggucaacgcggccaacguguaccugaagcacgggggcggcguggccggggcccugaacaaggccacgaacaacgcgaugcaggucgaguccgacgacuacaucgccaccaacggcccccucaagguggggggcagcugcguccuguccggccacaaccuggccaagcacugccuccacgugguggggcccaacgucaacaagggcgaggacauccagcugcugaagagcgccuacgagaacuucaaccagcacgaggugcuccuggccccgcugcucuccgcggggaucuucggcgccgaccccauccacagccugcgggugugcgucgacaccgugcgcaccaacguguaccuggccgucuucgacaagaaccucuacgacaagcugguguccagcuuccuggagaugaagagcgagaagcagguggagcagaagaucgccgagauccccaaggaggaggucaagcccuucaucacggaguccaagccgagcguggagcagcggaagcaggacgacaagaagaucaaggccugcguggaggaggucaccaccacccucgaggagacgaaguuccugaccgagaaccugcuccuguacaucgacaucaacgggaaccugcaccccgacuccgcgacccucgugagcgacaucgacaucaccuuccugaagaaggacgcccccuacaucgugggcgacgucgugcaggagggcgugcugacggccgucgugauccccaccaagaaggccgggggcaccaccgagaugcucgccaaggcgcugcgcaaggugccgacggacaacuacaucaccaccuaccccgggcagggccugaacggguacaccgucgaggaggccaagaccgugcucaagaagugcaaguccgccuucuacauccugcccagcaucaucuccaacgagaagcaggagauccugggcacggugagcuggaaccuccgggagaugcuggcccacgcggaggagacccgcaagcugaugcccgucugcguggagaccaaggccaucguguccaccauccagcggaaguacaagggcaucaagauccaggagggggucguggacuacggcgcccgcuucuacuucuacacgagcaagaccaccguggccucccugaucaacacccucaacgaccugaacgagacgcuggucaccaugccgcucggguacgugacccacggccugaaccuggaggaggccgcgcgguacaugcgcagccucaaggugcccgccaccgucuccgugagcucccccgacgccgugacggccuacaacggguaccugaccagcuccagcaagacccccgaggagcacuucaucgagaccaucucccuggccggcagcuacaaggacuggagcuacuccggccagagcacgcagcucgggaucgaguuccugaagcggggcgacaaguccgucuacuacaccagcaacccgaccaccuuccaccuggacggggaggugaucacguucgacaaccucaagacccugcugucccuccgcgaggugcggaccaucaaggucuucaccacgguggacaacaucaaccugcacacccagguggucgacaugagcaugaccuacggccagcaguucggccccaccuaccuggacggggcggacgugacgaagaucaagccccacaacucccacgagggcaagaccuucuacgugcucccgaacgacgacacccugcgcgucgaggccuucgaguacuaccacaccacggaccccagcuuccuggggcgguacauguccgcccucaaccacaccaagaaguggaaguacccccaggugaacggccugaccagcaucaagugggccgacaacaacugcuaccuggccaccgcgcuccugacgcugcagcagaucgagcucaaguucaaccccccggcccugcaggacgccuacuaccgcgcccgggcgggggaggccgccaacuucugcgcccugauccucgccuacugcaacaagaccgugggcgagcugggcgacguccgcgagaccauguccuaccuguuccagcacgcgaaccucgacagcugcaagcgggugcugaacgucgugugcaagaccugcgggcagcagcagaccacgcugaagggcguggaggccgucauguacauggggacccucuccuacgagcaguucaagaagggcgugcagauccccugcaccugcgggaagcaggccaccaaguaccuggugcagcaggagagccccuucgucaugauguccgcccccccggcccaguacgagcugaagcacggcacguucaccugcgcgagcgaguacaccggcaacuaccagugcgggcacuacaagcacaucaccuccaaggagacgcucuacugcaucgacggcgcccugcugaccaagagcagcgaguacaaggggcccaucaccgacguguucuacaaggagaacuccuacaccacgaccaucaagcccgugaccuacaagcucgacggcgucgugugcaccgagaucgaccccaagcuggacaacuacuacaagaaggacaacagcuacuucacggagcagccgaucgaccuggugcccaaccagcccuaccccaacgccuccuucgacaacuucaaguucgucugcgacaacaucaaguucgccgacgaccucaaccagcugaccggguacaagaagccggccagccgcgagcugaaggugaccuucuuccccgaccucaacggcgacguggucgcgaucgacuacaagcacuacacccccuccuucaagaagggcgccaagcugcugcacaagcccaucguguggcacgugaacaacgccacgaacaaggccaccuacaagccgaacaccuggugcauccggugccucuggagcaccaagcccgucgagacguccaacagcuucgacgugcugaaguccgaggacgcgcaggggauggacaaccuggccugcgaggaccucaagcccgugagcgaggaggucguggagaaccccaccauccagaaggacgugcuggagugcaacgucaagaccaccgagguggugggcgacaucauccugaagccggccaacaacucccucaagaucacggaggaggucgggcacaccgaccugauggccgccuacguggacaacagcucccugaccaucaagaagcccaacgagcucagccgcgugcugggccugaagacccucgcgacgcacgggcuggccgccgucaacuccgugcccugggacaccaucgccaacuacgccaagccguuccugaacaagguggucagcaccaccacgaacaucgugacccgcugccucaaccgggugugcaccaacuacaugcccuacuucuucacccugcugcuccagcugugcaccuucacgcgcuccaccaacagccggaucaaggcguccaugcccaccaccaucgccaagaacacggucaagagcgugggcaaguucugccuggaggccagcuucaacuaccucaagucccccaacuucagcaagcugaucaacaucaucaucugguuccugcuccuguccgugugccugggcagccucaucuacuccaccgccgcccuggggguccugaugagcaaccucggcaugccguccuacugcaccggguaccgcgagggcuaccugaacagcaccaacgugacgaucgcgaccuacugcaccggcuccauccccugcagcgugugccuguccgggcucgacagccuggacaccuaccccucccuggagacgauccagaucaccaucagcuccuucaagugggaccucaccgccuucggccuggucgccgagugguuccuggccuacauccucuucacccgguucuucuacgugcuggggcuggccgcgaucaugcagcucuucuucagcuacuucgccgugcacuucaucuccaacagcuggcugauguggcugaucaucaaccugguccagauggcccccaucuccgccauggugcgcauguacaucuucuucgcgagcuucuacuacguguggaagagcuacguccacgugguggacggcugcaacuccagcacgugcaugaugugcuacaagcggaaccgcgccacccgggucgagugcaccaccaucgugaacgggguccgccgguccuucuacguguacgccaacggcggcaagggguucugcaagcuccacaacuggaacugcgugaacugcgacacguucugcgccggcagcaccuucaucuccgacgaggucgcccgcgaccugagccugcaguucaagcggccgaucaaccccaccgaccaguccagcuacaucguggacuccgugaccgucaagaacgggagcauccaccucuacuucgacaaggcgggccagaagacguacgagcgccacucccugagccacuucgugaaccuggacaaccuccgggccaacaacaccaaggggucccugcccaucaacgugaucgucuucgacggcaagagcaagugcgaggaguccagcgccaaguccgccagcguguacuacucccagcugaugugccagcccauccuccugcuggaccaggcccucgugagcgacgucggcgacagcgcggagguggccgugaagauguucgacgccuacgucaacaccuucuccagcaccuucaacgugccgauggagaagcugaagacgcugguggccaccgccgaggcggagcucgccaagaacgucucccuggacaacgugcugagcaccuucaucuccgccgcccgccagggguucguggacagcgacgucgagaccaaggacgugguggagugccucaagcugucccaccagagcgacaucgaggucacgggcgacuccugcaacaacuacaugcugaccuacaacaagguggagaacaugaccccccgggaccucggggcgugcaucgacugcagcgcccgccacaucaacgcccagguggccaagucccacaacaucgcccugaucuggaacgucaaggacuucaugagccuguccgagcagcuccggaagcagauccgcagcgcggccaagaagaacaaccugcccuucaagcugaccugcgccacgacccgccagguggugaacgucgugaccaccaagaucgcccucaagggcgggugaggacuaguuauaagacugacuagcccgaugggccucccaacgggcccuccuccccuccuugcaccgagauuaauaaaaaaaaaaaaaaaaaaaaaaaaaaaaaaaaaaaaaaaaaaaaaaaaaaaaaaaaaaaaaaaaugcaucccccccccccccccccccccccccccccccaaaggcucuuuucagagccaccagaauu

SEQ ID NO: 21824 - RNA, 6058 nt, Artificial Sequence
  SARS-CoV-2__MT642365.1__non-structural protein 3 (NSP3) mRNA gc
aggagaaagcuuaccauggcccccaccaaggugaccuucggcgacgacacggucaucgaggugcagggguacaagagcgugaacaucaccuucgagcuggacgagcgcaucgacaagguccucaacgagaagugcuccgccuacaccguggagcugggcaccgaggugaacgaguucgcgugcgucguggccgacgccgugaucaagacgcugcagccggucagcgagcuccugaccccccuggggaucgaccucgacgagugguccauggccaccuacuaccuguucgacgagagcggcgaguucaagcuggccucccacauguacugcagcuucuacccccccgacgaggacgaggaggagggggacugcgaggaggaggaguucgagccguccacccaguacgaguacggcacggaggacgacuaccagggcaagccccucgaguucggggcgaccagcgccgcccugcagcccgaggaggagcaggaggaggacuggcuggacgacgacucccagcagaccgugggccagcaggacgggagcgaggacaaccagaccacgaccauccagaccaucguggagguccagccccagcucgagauggagcugaccccgguggugcagacgaucgaggucaacuccuucagcggcuaccugaagcucaccgacaacguguacaucaagaacgccgacaucguggaggaggcgaagaaggucaagcccaccgugguggucaacgccgccaacguguaccugaagcacgggggcggcguggccggggcccugaacaaggcgaccaacaacgccaugcaggucgaguccgacgacuacaucgccacgaacggcccccucaagguggggggcagcugcguccuguccggccacaaccuggccaagcacugccuccacgugguggggcccaacgucaacaagggcgaggacauccagcugcugaagagcgccuacgagaacuucaaccagcacgaggugcuccuggcgccgcugcucuccgccgggaucuucggcgccgaccccauccacagccugcgggugugcgucgacaccgugcgcaccaacguguaccuggccgucuucgacaagaaccucuacgacaagcugguguccagcuuccuggagaugaagagcgagaagcagguggagcagaagaucgccgagauccccaaggaggaggucaagcccuucaucaccgaguccaagccgagcguggagcagcggaagcaggacgacaagaagaucaaggcgugcguggaggaggucacgaccacccucgaggagaccaaguuccugacggagaaccugcuccuguacaucgacaucaacgggaaccugcaccccgacuccgccacccucgugagcgacaucgacaucaccuuccugaagaaggacgcccccuacaucgugggcgacgucgugcaggagggcgugcugaccgccgucgugauccccacgaagaaggccgggggcaccaccgagaugcucgcgaaggcccugcgcaaggugccgaccgacaacuacaucacgaccuaccccgggcagggccugaacggguacaccgucgaggaggccaagaccgugcucaagaagugcaaguccgccuucuacauccugcccagcaucaucuccaacgagaagcaggagauccugggcaccgugagcuggaaccuccgggagaugcuggcgcacgccgaggagacgcgcaagcugaugcccgucugcguggagaccaaggccaucguguccaccauccagcggaaguacaagggcaucaagauccaggagggggucguggacuacggcgcccgcuucuacuucuacaccagcaagacgaccguggccucccugaucaacacccucaacgaccugaacgagacccuggucacgaugccgcucggguacgugacccacggccugaaccuggaggaggcggcccgguacaugcgcagccucaaggugcccgccaccgucuccgugagcucccccgacgccgugaccgccuacaacggguaccugacgagcuccagcaagacccccgaggagcacuucaucgagaccaucucccuggcgggcagcuacaaggacuggagcuacuccggccagagcacccagcucgggaucgaguuccugaagcggggcgacaaguccgucuacuacacgagcaacccgaccaccuuccaccuggacggggaggugaucaccuucgacaaccucaagacgcugcugucccuccgcgaggugcggaccaucaaggucuucaccaccguggacaacaucaaccugcacacgcagguggucgacaugagcaugaccuacggccagcaguucggccccaccuaccuggacggggccgacgugaccaagaucaagccccacaacucccacgagggcaagacguucuacgugcucccgaacgacgacacccugcgcaucgaggccuucgaguacuaccacaccaccgaccccagcuuccuggggcgguacauguccgcccucaaccacacgaagaaguggaaguacccccaggucaacggccugaccagcaucaagugggccgacaacaacugcuaccuggcgaccgcccuccugacccugcagcagaucgagcucaaguucaaccccccggcccugcaggacgccuacuaccgcgcgcgggccggggaggccgccaacuucugcgcccugauccucgcguacugcaacaagacggugggcgagcugggcgacgugcgcgagaccauguccuaccuguuccagcacgccaaccucgacagcugcaagcggguccugaacguggucugcaagaccugcgggcagcagcagaccacccugaagggcguggaggccgugauguacauggggacgcucuccuacgagcaguucaagaagggcguccagauccccugcaccugcgggaagcaggccaccaaguaccuggugcagcaggagagccccuucgugaugauguccgcccccccggcgcaguacgagcugaagcacggcaccuucacgugcgccagcgaguacaccggcaacuaccagugcgggcacuacaagcacaucaccuccaaggagacccucuacugcaucgacggcgcccugcugacgaagagcagcgaguacaaggggcccaucaccgacgucuucuacaaggagaacuccuacaccaccacgaucaagcccgugaccuacaagcucgacggcguggucugcaccgagaucgaccccaagcuggacaacuacuacaagaaggacaacagcuacuucaccgagcagccgaucgaccuggugcccaaccagcccuaccccaacgccuccuucgacaacuucaaguucgugugcgacaacaucaaguucgccgacgaccucaaccagcugacgggguacaagaagccggcgagccgcgagcugaaggucaccuucuuccccgaccucaacggcgacgugguggccaucgacuacaagcacuacacccccuccuucaagaagggcgccaagcugcugcacaagcccaucgucuggcacgugaacaacgccaccaacaaggcgacguacaagccgaacaccuggugcauccggugccucuggagcaccaagcccguggagaccuccaacagcuucgacguccugaaguccgaggacgcccaggggauggacaaccuggccugcgaggaccucaagcccgugagcgaggagguggucgagaaccccacgauccagaaggacgugcuggagugcaacgugaagaccaccgaggucgugggcgacaucauccugaagccggccaacaacucccucaagaucaccgaggagguggggcacacggaccugauggccgcguacgucgacaacagcucccugaccaucaagaagcccaacgagcucagccgcgugcugggccugaagacccucgccacccacgggcuggccgccgugaacuccguccccugggacacgaucgccaacuacgcgaagccguuccugaacaagguggugagcaccaccaccaacaucgucacgcgcugccucaaccgggugugcaccaacuacaugcccuacuucuucacccugcugcuccagcugugcaccuucacccgcuccacgaacagccggaucaaggccuccaugcccaccaccaucgccaagaacaccgugaagagcgucggcaaguucugccuggaggccagcuucaacuaccucaagucccccaacuucagcaagcugaucaacaucaucaucugguuccugcuccuguccgugugccugggcagccucaucuacuccacggccgcgcugggggugcugaugagcaaccucggcaugccguccuacugcaccggguaccgcgagggcuaccugaacagcaccaacgucaccaucgccacguacugcaccggcuccauccccugcagcgugugccuguccgggcucgacagccuggacaccuaccccucccuggagaccauccagaucacgaucagcuccuucaagugggaccucaccgccuucggccugguggccgagugguuccuggccuacauccucuucacccgguucuucuacguccuggggcuggcggccaucaugcagcucuucuucagcuacuucgccgugcacuucaucuccaacagcuggcugauguggcugaucaucaaccuggugcagauggcccccaucuccgcgaugguccgcauguacaucuucuucgccagcuucuacuacguguggaagagcuacgugcacgucguggacggcugcaacuccagcaccugcaugaugugcuacaagcggaaccgcgccacgcggguggagugcaccaccaucgucaacggggugcgccgguccuucuacgucuacgccaacggcggcaagggguucugcaagcuccacaacuggaacugcgugaacugcgacaccuucugcgccggcagcacguucaucuccgacgagguggcgcgcgaccugagccugcaguucaagcggccgaucaaccccaccgaccaguccagcuacaucgucgacuccgugaccgugaagaacgggagcauccaccucuacuucgacaaggccggccagaagaccuacgagcgccacucccugagccacuucgucaaccuggacaaccuccgggccaacaacacgaaggggucccugcccaucaacgugaucguguucgacggcaagagcaagugcgaggaguccagcgccaaguccgccagcgucuacuacucccagcugaugugccagcccauccuccugcuggaccaggcgcucgugagcgacgugggcgacagcgccgaggucgccgugaagauguucgacgccuacgugaacaccuucuccagcaccuucaacgucccgauggagaagcugaagacccugguggccacggcggaggccgagcucgccaagaacgugucccuggacaacguccugagcaccuucaucuccgccgcgcgccagggguucguggacagcgacguggagaccaaggacgucguggagugccucaagcugucccaccagagcgacaucgaggugaccggcgacuccugcaacaacuacaugcugacguacaacaaggucgagaacaugaccccccgggaccucggggccugcaucgacugcagcgcccgccacaucaacgcccagguggccaagucccacaacaucgcgcugaucuggaacgugaaggacuucaugagccuguccgagcagcuccggaagcagauccgcagcgccgccaagaagaacaaccugcccuucaagcugaccugcgccaccacgcgccaggucgugaacguggucaccaccaagaucgcccucaagggcgggugaggacuaguuauaagacugacuagcccgaugggccucccaacgggcccuccuccccuccuugcaccgagauuaauaaaaaaaaaaaaaaaaaaaaaaaaaaaaaaaaaaaaaaaaaaaaaaaaaaaaaaaaaaaaaaaaugcaucccccccccccccccccccccccccccccccaaaggcucuuuucagagccaccagaauu

SEQ ID NO: 21825 - RNA, 6058 nt, Artificial Sequence
  SARS-CoV-2__MT642428.1__non-structural protein 3 (NSP3) mRNA gc
aggagaaagcuuaccauggcccccaccaaggugaccuucggcgacgacacggucaucgaggugcagggguacaagagcgugaacaucaccuucgagcuggacgagcgcaucgacaagguccucaacgagaagugcuccgccuacaccguggagcugggcaccgaggugaacgaguucgcgugcgucguggccgacgccgugaucaagacgcugcagccggucagcgagcuccugaccccccuggggaucgaccucgacgagugguccauggccaccuacuaccuguucgacgagagcggcgaguucaagcuggccucccacauguacugcagcuucuacccccccgacgaggacgaggaggagggggacugcgaggaggaggaguucgagccguccacccaguacgaguacggcacggaggacgacuaccagggcaagccccucgaguucggggcgaccagcgccgcccugcagcccgaggaggagcaggaggaggacuggcuggacgacgacucccagcagaccgugggccagcaggacgggagcgaggacaaccagaccacgaccauccagaccaucguggagguccagccccagcucgagauggagcugaccccgguggugcagacgaucgaggucaacuccuucagcggcuaccugaagcucaccgacaacguguacaucaagaacgccgacaucguggaggaggcgaagaaggucaagcccaccgugguggucaacgccgccaacguguaccugaagcacgggggcggcguggccggggcccugaacaaggcgaccaacaacgccaugcaggucgaguccgacgacuacaucgccacgaacggcccccucaagguggggggcagcugcguccuguccggccacaaccuggccaagcacugccuccacgugguggggcccaacgucaacaagggcgaggacauccagcugcugaagagcgccuacgagaacuucaaccagcacgaggugcuccuggcgccgcugcucuccgccgggaucuucggcgccgaccccauccacagccugcgggugugcgucgacaccgugcgcaccaacguguaccuggccgucuucgacaagaaccucuacgacaagcugguguccagcuuccuggagaugaagagcgagaagcagguggagcagaagaucgccgagauccccaaggaggaggucaagcccuucaucaccgaguccaagccgagcguggagcagcggaagcaggacgacaagaagaucaaggcgugcguggaggaggucacgaccacccucgaggagaccaaguuccugacggagaaccugcuccuguacaucgacaucaacgggaaccugcaccccgacuccgccacccucgugagcgacaucgacaucaccuuccugaagaaggacgcccccuacaucgugggcgacgucgugcaggagggcgugcugaccgccgucgugauccccacgaagaaggccgggggcaccaccgagaugcucgcgaaggcccugcgcaaggugccgaccgacaacuacaucacgaccuaccccgggcagggccugaacggguacaccgucgaggaggccaagaccgugcucaagaagugcaaguccgccuucuacauccugcccagcaucaucuccaacgagaagcaggagauccugggcaccgugagcuggaaccuccgggagaugcuggcgcacgccgaggagacgcgcaagcugaugcccgucugcguggagaccaaggccaucguguccaccauccagcggaaguacaagggcaucaagauccaggagggggucguggacuacggcgcccgcuucuacuucuacaccagcaagacgaccguggccucccugaucaacacccucaacgaccugaacgagacccuggucacgaugccgcucggguacgugacccacggccugaaccuggaggaggcggcccgguacaugcgcagccucaaggugcccgccaccgucuccgugagcucccccgacgccgugaccgccuacaacggguaccugacgagcuccagcaagacccccgaggagcacuucaucgagaccaucucccuggcgggcagcuacaaggacuggagcuacuccggccagagcacccagcucgggaucgaguuccugaagcggggcgacaaguccgucuacuacacgagcaacccgaccaccuuccaccuggacggggaggugaucaccuucgacaaccucaagacgcugcugucccuccgcgaggugcggaccaucaaggucuucaccaccguggacaacaucaaccugcacacgcagguggucgacaugagcaugaccuacggccagcaguucggccccaccuaccuggacggggccgacgugaccaagaucaagccccacaacucccacgagggcaagacguucuacgugcucccgaacgacgacacccugcgcgucgaggccuucgaguacuaccacaccaccgaccccagcuuccuggggcgguacauguccgcccucaaccacacgaagaaguggaaguacccccaggugaacggccugaccagcaucaagugggccgacaacaacugcuaccuggcgaccgcccuccugacccugcagcagaucgagcucaaguucaaccccccggcccugcaggacgccuacuaccgcgcgcgggccggggaggccgccaacuucugcgcccugauccucgcguacugcaacaagacggugggcgagcugggcgacguccgcgagaccauguccuaccuguuccagcacgccaaccucgacagcugcaagcgggugcugaacgucgugugcaagaccugcgggcagcagcagaccacccugaagggcguggaggccgucauguacauggggacgcucuccuacgagcaguucaagaagggcgugcagauccccugcaccugcgggaagcaggccaccaaguaccuggugcagcaggagagccccuucgucaugauguccgcccccccggcgcaguacgagcugaagcacggcaccuucacgugcgccagcgaguacaccggcaacuaccagugcgggcacuacaagcacaucaccuccaaggagacccucuacugcaucgacggcgcccugcugacgaagagcagcgaguacaaggggcccaucaccgacguguucuacaaggagaacuccuacaccaccacgaucaagcccgugaccuacaagcucgacggcgucgugugcaccgagaucgaccccaagcuggacaacuacuacaagaaggacaacagcuacuucaccgagcagccgaucgaccuggugcccaaccagcccuaccccaacgccuccuucgacaacuucaaguucgucugcgacaacaucaaguucgccgacgaccucaaccagcugacgggguacaagaagccggcgagccgcgagcugaaggugaccuucuuccccgaccucaacggcgacguggucgccaucgacuacaagcacuacacccccuccuucaagaagggcgccaagcugcugcacaagcccaucguguggcacgugaacaacgccaccaacaaggcgacguacaagccgaacaucuggugcauccggugccucuggagcaccaagcccgucgagaccuccaacagcuucgacgugcugaaguccgaggacgcccaggggauggacaaccuggccugcgaggaccucaagcccgugagcgaggaggucguggagaaccccaccauccagaaggacgugcuggagugcaacgucaagacgaccgagguggugggcgacaucauccugaagccggccaacaacucccucaagaucaccgaggaggucgggcacaccgaccugauggccgcguacguggacaacagcucccugacgaucaagaagcccaacgagcucagccgcgugcugggccugaagacccucgccacccacgggcuggccgccgucaacuccgugcccugggacaccaucgccaacuacgcgaagccguuccugaacaagguggucagcacgaccaccaacaucgugacccgcugccucaaccgggugugcacgaacuacaugcccuacuucuucacccugcugcuccagcugugcaccuucacccgcuccaccaacagccggaucaaggccuccaugcccacgaccaucgccaagaacaccgucaagagcgugggcaaguucugccuggaggccagcuucaacuaccucaagucccccaacuucagcaagcugaucaacaucaucaucugguuccugcuccuguccgugugccugggcagccucaucuacuccaccgccgcgcuggggguccugaugagcaaccucggcaugccguccuacugcacgggguaccgcgagggcuaccugaacagcaccaacgugaccaucgccaccuacugcacgggcuccauccccugcagcgugugccuguccgggcucgacagccuggacaccuaccccucccuggagaccauccagaucaccaucagcuccuucaagugggaccucacggccuucggccuggucgccgagugguuccuggccuacauccucuucacccgguucuucuacgugcuggggcuggcggccaucaugcagcucuucuucagcuacuucgccgugcacuucaucuccaacagcuggcugauguggcugaucaucaaccugguccagauggcccccaucuccgcgauggugcgcauguacaucuucuucgccagcuucuacuacguguggaagagcuacguccacgugguggacggcugcaacuccagcaccugcaugaugugcuacaagcggaaccgcgccacccgggucgagugcacgaccaucgugaacgggguccgccgguccuucuacguguacgccaacggcggcaagggguucugcaagcuccacaacuggaacugcgugaacugcgacaccuucugcgccggcagcaccuucaucuccgacgaggucgcgcgcgaccugagccugcaguucaagcggccgaucaaccccacggaccaguccagcuacaucguggacuccgugaccgucaagaacgggagcauccaccucuacuucgacaaggccggccagaagaccuacgagcgccacucccugagccacuucgugaaccuggacaaccuccgggccaacaacaccaaggggucccugcccaucaacgugaucgucuucgacggcaagagcaagugcgaggaguccagcgccaaguccgccagcguguacuacucccagcugaugugccagcccauccuccugcuggaccaggcgcucgugagcgacgucggcgacagcgccgagguggccgugaagauguucgacgccuacgucaacacguucuccagcaccuucaacgugccgauggagaagcugaagacccugguggccaccgcggaggccgagcucgccaagaacgucucccuggacaacgugcugagcacguucaucuccgccgcgcgccagggguucguggacagcgacgucgagaucaaggacgugguggagugccucaagcugucccaccagagcgacaucgaggucaccggcgacuccugcaacaacuacaugcugaccuacaacaagguggagaacaugaccccccgggaccucggggccugcaucgacugcagcgcccgccacaucaacgcccagguggccaagucccacaacaucgcgcugaucuggaacgucaaggacuucaugagccuguccgagcagcuccggaagcagauccgcagcgccgccaagaagaacaaccugcccuucaagcugacgugcgccaccacccgccagguggugaacgucgugaccacgaagaucgcccucaagggcgggugaggacuaguuauaagacugacuagcccgaugggccucccaacgggcccuccuccccuccuugcaccgagauuaauaaaaaaaaaaaaaaaaaaaaaaaaaaaaaaaaaaaaaaaaaaaaaaaaaaaaaaaaaaaaaaaaugcaucccccccccccccccccccccccccccccccaaaggcucuuuucagagccaccagaauu

SEQ ID NO: 21826 - RNA, 6058 nt, Artificial Sequence
  SARS-CoV-2__MT635408.1__non-structural protein 3 (NSP3) mRNA gc
aggagaaagcuuaccauggcccccaccaaggugaccuucggcgacgacacggucaucgaggugcagggguacaagagcgugaacaucaccuucgagcuggacgagcgcaucgacaagguccucaacgagaagugcuccgccuacaccguggagcugggcaccgaggugaacgaguucgcgugcgucguggccgacgccgugaucaagacgcugcagccggucagcgagcuccugaccccccuggggaucgaccucgacgagugguccauggccaccuacuaccuguucgacgagagcggcgaguucaagcuggccucccacauguacugcagcuucuacccccccgacgaggacgaggaggagggggacugcgaggaggaggaguucgagccguccacccaguacgaguacggcacggaggacgacuaccagggcaagccccucgaguucggggcgaccagcgccgcccugcagcccgaggaggagcaggaggaggacuggcuggacgacgacucccagcagaccgugggccagcaggacgggagcgaggacaaccagaccacgaccauccagaccaucguggagguccagccccagcucgagauggagcugaccccgguggugcagacgaucgaggucaacuccuucagcggcuaccugaagcucaccgacaacguguacaucaagaacgccgacaucguggaggaggcgaagaaggucaagcccaccgugguggucaacgccgccaacguguaccugaagcacgggggcggcguggccggggcccugaacaaggcgaccaacaacgccaugcaggucgaguccgacgacuacaucgccacgaacggcccccucaagguggggggcagcugcguccuguccggccacaaccuggccaagcacugccuccacgugguggggcccaacgucaacaagggcgacgacauccagcugcugaagagcgccuacgagaacuucaaccagcacgaggugcuccuggcgccgcugcucuccgccgggaucuucggcgccgaccccauccacagccugcgggugugcgucgacaccgugcgcaccaacguguaccuggccgucuucgacaagaaccucuacgacaagcugguguccagcuuccuggagaugaagagcgagaagcagguggagcagaagaucgccgagauccccaaggaggaggucaagcccuucaucaccgaguccaagccgagcguggagcagcggaagcaggacgacaagaagaucaaggcgugcguggaggaggucacgaccacccucgaggagaccaaguuccugacggagaaccugcuccuguacaucgacaucaacgggaaccugcaccccgacuccgccacccucgugagcgacaucgacaucaccuuccugaagaaggacgcccccuacaucgugggcgacgucgugcaggagggcgugcugaccgccgucgugauccccacgaagaaggccgggggcaccaccgagaugcucgcgaaggcccugcgcaaggugccgaccgacaacuacaucacgaccuaccccgggcagggccugaacggguacaccgucgaggaggccaagaccgugcucaagaagugcaaguccgccuucuacauccugcccagcaucaucuccaacgagaagcaggagauccugggcaccgugagcuggaaccuccgggagaugcuggcgcacgccgaggagacgcgcaagcugaugcccgucugcguggagaccaaggccaucguguccaccauccagcggaaguacaagggcaucaagauccaggagggggucguggacuacggcgcccgcuucuacuucuacaccagcaagacgaccguggccucccugaucaacacccucaacgaccugaacgagacccuggucacgaugccgcucggguacgugacccacggccugaaccuggaggaggcggcccgguacaugcgcagccucaaggugcccgccaccgucuccgugagcucccccgacgccgugaccgccuacaacggguaccugacgagcuccagcaagacccccgaggagcacuucaucgagaccaucucccuggcgggcagcuacaaggacuggagcuacuccggccagagcacccagcucgggaucgaguuccugaagcggggcgacaaguccgucuacuacacgagcaacccgaccaccuuccaccuggacggggaggugaucaccuucgacaaccucaagacgcugcugucccuccgcgaggugcggaccaucaaggucuucaccaccguggacaacaucaaccugcacacgcagguggucgacaugagcaugaccuacggccagcaguucggccccaccuaccuggacggggccgacgugaccaagaucaagccccacaacucccacgagggcaagacguucuacgugcucccgaacgacgacacccugcgcgucgaggccuucgaguacuaccacaccaccgaccccagcuuccuggggcgguacauguccgcccucaaccacacgaagaaguggaaguacccccaggugaacggccugaccagcaucaagugggccgacaacaacugcuaccuggcgaccgcccuccugacccugcagcagaucgagcucaaguucaaccccccggcccugcaggacgccuacuaccgcgcgcgggccggggaggccgccaacuucugcgcccugauccucgcguacugcaacaagacggugggcgagcugggcgacguccgcgagaccauguccuaccuguuccagcacgccaaccucgacagcugcaagcgggugcugaacgucgugugcaagaccugcgggcagcagcagaccacccugaagggcguggaggccgucauguacauggggacgcucuccuacgagcaguucaagaagggcgugcagauccccugcaccugcgggaagcaggccaccaaguaccuggugcagcaggagagccccuucgucaugauguccgcccccccggcgcaguacgagcugaagcacggcaccuucacgugcgccagcgaguacaccggcaacuaccagugcgggcacuacaagcacaucaccuccaaggagacccucuacugcaucgacggcgcccugcugacgaagagcagcgaguacaaggggcccaucaccgacguguucuacaaggagaacuccuacaccaccacgaucaagcccgugaccuacaagcucgacggcgucgugugcaccgagaucgaccccaagcuggacaacuacuacaagaaggacaacagcuacuucaccgagcagccgaucgaccuggugcccaaccagcccuaccccaacgccuccuucgacaacuucaaguucgucugcgacaacaucaaguucgccgacgaccucaaccagcugacgggguacaagaagccggcgagccgcgagcugaaggugaccuucuuccccgaccucaacggcgacguggucgccaucgacuacaagcacuacacccccuccuucaagaagggcgccaagcugcugcacaagcccaucguguggcacgugaacaacgccaccaacaaggcgacguacaagccgaacaccuggugcauccggugccucuggagcaccaagcccgucgagaccuccaacagcuucgacgugcugaaguccgaggacgcccaggggauggacaaccuggccugcgaggaccucaagcccgugagcgaggaggucguggagaaccccacgauccagaaggacgugcuggagugcaacgucaagaccaccgagguggugggcgacaucauccugaagccggccaacaacucccucaagaucaccgaggaggucgggcacacggaccugauggccgcguacguggacaacagcucccugaccaucaagaagcccaacgagcucagccgcgugcugggccugaagacccucgccacccacgggcuggccgccgucaacuccgugcccugggacacgaucgccaacuacgcgaagccguuccugaacaagguggucagcaccaccaccaacaucgugacgcgcugccucaaccgggugugcaccaacuacaugcccuacuucuucacccugcugcuccagcugugcaccuucacccgcuccacgaacagccggaucaaggccuccaugcccaccaccaucgccaagaacaccgucaagagcgugggcaaguucugccuggaggccagcuucaacuaccucaagucccccaacuucagcaagcugaucaacaucaucaucugguuccugcuccuguccgugugccugggcagccucaucuacuccacggccgcgcuggggguccugaugagcaaccucggcaugccguccuacugcaccggguaccgcgagggcuaccugaacagcaccaacgugaccaucgccacguacugcaccggcuccauccccugcagcgugugccuguccgggcucgacagccuggacaccuaccccucccuggagaccauccagaucacgaucagcuccuucaagugggaccucaccgccuucggccuggucgccgagugguuccuggccuacauccucuucacccgguucuucuacgugcuggggcuggcggccaucaugcagcucuucuucagcuacuucgccgugcacuucaucuccaacagcuggcugauguggcugaucaucaaccugguccagauggcccccaucuccgcgauggugcgcauguacaucuucuucgccagcuucuacuacguguggaagagcuacguccacgugguggacggcugcaacuccagcaccugcaugaugugcuacaagcggaaccgcgccacgcgggucgagugcaccaccaucgugaacgggguccgccgguccuucuacguguacgccaacggcggcaagggguucugcaagcuccacaacuggaacugcgugaacugcgacaccuucugcgccggcagcacguucaucuccgacgaggucgcgcgcgaccugagccugcaguucaagcggccgaucaaccccaccgaccaguccagcuacaucguggacuccgugaccgucaagaacgggagcauccaccucuacuucgacaaggccggccagaagaccuacgagcgccacucccugagccacuucgugaaccuggacaaccuccgggccaacaacacgaaggggucccugcccaucaacgugaucgucuucgacggcaagagcaagugcgaggaguccagcgccaaguccgccagcguguacuacucccagcugaugugccagcccauccuccugcuggaccaggcgcucgugagcgacgucggcgacagcgccgagguggccgugaagauguucgacgccuacgucaacaccuucuccagcaccuucaacgugccgauggagaagcugaagacccugguggccacggcggaggccgagcucgccaagaacgucucccuggacaacgugcugagcaccuucaucuccgccgcgcgccagggguucguggacagcgacgucgagaccaaggacgugguggagugccucaagcugucccaccagagcgacaucgaggucaccggcgacuccugcaacaacuacaugcugacguacaacaagguggagaacaugaccccccgggaccucggggccugcaucgacugcagcgcccgccacaucaacgcccagguggccaagucccacaacaucgcgcugaucuggaacgucaaggacuucaugagccuguccgagcagcuccggaagcagauccgcagcgccgccaagaagaacaaccugcccuucaagcugaccugcgccaccacgcgccagguggugaacgucgugaccaccaagaucgcccucaagggcgggugaggacuaguuauaagacugacuagcccgaugggccucccaacgggcccuccuccccuccuugcaccgagauuaauaaaaaaaaaaaaaaaaaaaaaaaaaaaaaaaaaaaaaaaaaaaaaaaaaaaaaaaaaaaaaaaaugcaucccccccccccccccccccccccccccccccaaaggcucuuuucagagccaccagaauu

SEQ ID NO: 21827 - RNA, 6058 nt, Artificial Sequence
  SARS-CoV-2__MT635648.1__non-structural protein 3 (NSP3) mRNA gc
aggagaaagcuuaccauggcccccaccaaggugaccuucggcgacgacacggucaucgaggugcagggguacaagagcgugaacaucaccuucgagcuggacgagcgcaucgacaagguccucaacgagaagugcuccgccuacaccguggagcugggcaccgaggugaacgaguucgcgugcgucguggccgacgccgugaucaagacgcugcagccggucagcgagcuccugaccccccuggggaucgaccucgacgagugguccauggccaccuacuaccuguucgacgagagcggcgaguucaagcuggccucccacauguacugcagcuucuacccccccgacgaggacgaggaggagggggacugcgaggaggaggaguucgagccguccacccaguacgaguacggcacggaggacgacuaccagggcaagccccucgaguucggggcgaccagcgccgcccugcagcccgaggaggagcaggaggaggacuggcuggacgacgacucccagcagaccgugggccagcaggacgggagcgaggacaaccagaccacgaccauccagaccaucguggagguccagccccagcucgagauggagcugaccccgguggugcagacgaucgaggucaacuccuucagcggcuaccugaagcucaccgacaacguguacaucaagaacgccgacaucguggaggaggcgaagaaggucaagcccaccgugguggucaacgccgccaacguguaccugaagcacgggggcggcguggccggggcccugaacaaggcgaccaacaacgccaugcaggucgaguccgacgacuacaucgccacgaacggcccccucaagguggggggcagcugcguccuguccggccacaaccuggccaagcacugccuccacgugguggggcccaacgucaacaagggcgaggacauccagcugcugaagagcgccuacgagaacuucaaccagcacgaggugcuccuggcgccgcugcucuccgccgggaucuucggcgccgaccccauccacagccugcgggugugcgucgacaccgugcgcaccaacguguaccuggccgucuucgacaagaaccucuacgacaagcugguguccagcuuccuggagaugaagagcgagaagcagguggagcagaagaucgccgagauccccaaggaggaggucaagcccuucaucaccgaguccaagccgagcguggagcagcggaagcaggacgacaagaagaucaaggcgugcguggaggaggucacgaccacccucgaggagaccaaguuccugacggagaaccugcuccuguacaucgacaucaacgggaaccugcaccccgacuccgccacccucgugagcgacaucgacaucaccuuccugaagaaggacgcccccuacaucgugggcgacgucgugcaggagggcgugcugaccgccgucgugauccccacgaagaaggccgggggcaccaccgagaugcucgcgaaggcccugcgcaaggugccgaaggacaacuacaucaccacguaccccgggcagggccugaacggguacaccgucgaggaggccaagaccgugcucaagaagugcaaguccgccuucuacauccugcccagcaucaucuccaacgagaagcaggagauccugggcaccgugagcuggaaccuccgggagaugcuggcgcacgccgaggagacccgcaagcugaugcccgucugcguggagacgaaggccaucguguccaccauccagcggaaguacaagggcaucaagauccaggagggggucguggacuacggcgcccgcuucuacuucuacaccagcaagaccacgguggccucccugaucaacacccucaacgaccugaacgagacccuggucaccaugccgcucggguacgugacgcacggccugaaccuggaggaggcggcccgguacaugcgcagccucaaggugcccgccaccgucuccgugagcucccccgacgccgugaccgccuacaacggguaccugaccagcuccagcaagacgcccgaggagcacuucaucgagaccaucucccuggcgggcagcuacaaggacuggagcuacuccggccagagcacccagcucgggaucgaguuccugaagcggggcgacaaguccgucuacuacaccagcaacccgacgaccuuccaccuggacggggaggugaucaccuucgacaaccucaagacccugcugucccuccgcgaggugcggacgaucaaggucuucaccaccguggacaacaucaaccugcacacccagguggucgacaugagcaugacguacggccagcaguucggccccaccuaccuggacggggccgacgugaccaagaucaagccccacaacucccacgagggcaagaccuucuacgugcucccgaacgacgacacgcugcgcgucgaggccuucgaguacuaccacaccaccgaccccagcuuccuggggcgguacauguccgcccucaaccacaccaagaaguggaaguacccccaggugaacggccugacgagcaucaagugggccgacaacaacugcuaccuggcgaccgcccuccugacccugcagcagaucgagcucaaguucaaccccccggcccugcaggacgccuacuaccgcgcgcgggccggggaggccgccaacuucugcgcccugauccucgcguacugcaacaagaccgugggcgagcugggcgacguccgcgagacgauguccuaccuguuccagcacgccaaccucgacagcugcaagcgggugcugaacgucgugugcaagaccugcgggcagcagcagaccacccugaagggcguggaggccgucauguacauggggacccucuccuacgagcaguucaagaagggcgugcagauccccugcacgugcgggaagcaggccaccaaguaccuggugcagcaggagagccccuucgucaugauguccgcccccccggcgcaguacgagcugaagcacggcaccuucaccugcgccagcgaguacacgggcaacuaccagugcgggcacuacaagcacaucaccuccaaggagacccucuacugcaucgacggcgcccugcugaccaagagcagcgaguacaaggggcccaucacggacguguucuacaaggagaacuccuacaccaccaccaucaagcccgugacguacaagcucgacggcgucgugugcaccgagaucgaccccaagcuggacaacuacuacaagaaggacaacagcuacuucaccgagcagccgaucgaccuggugcccaaccagcccuaccccaacgccuccuucgacaacuucaaguucgucugcgacaacaucaaguucgccgacgaccucaaccagcugaccggguacaagaagccggcgagccgcgagcugaaggugacguucuuccccgaccucaacggcgacguggucgccaucgacuacaagcacuacacccccuccuucaagaagggcgccaagcugcugcacaagcccaucguguggcacgugaacaacgccaccaacaaggcgaccuacaagccgaacacguggugcauccggugccucuggagcaccaagcccgucgagaccuccaacagcuucgacgugcugaaguccgaggacgcccaggggauggacaaccuggccugcgaggaccucaagcccgugagcgaggaggucguggagaaccccaccauccagaaggacgugcuggagugcaacgucaagacgaccgagguggugggcgacaucauccugaagccggccaacaacucccucaagaucaccgaggaggucgggcacaccgaccugauggccgcguacguggacaacagcucccugacgaucaagaagcccaacgagcucagccgcgugcugggccugaagacccucgccacccacgggcuggccgccgucaacuccgugcccugggacaccaucgccaacuacgcgaagccguuccugaacaagguggucagcacgaccaccaacaucgugacccgcugccucaaccgggugugcacgaacuacaugcccuacuucuucacccugcugcuccagcugugcaccuucacccgcuccaccaacagccggaucaaggccuccaugcccacgaccaucgccaagaacaccgucaagagcgugggcaaguucugccuggaggccagcuucaacuaccucaagucccccaacuucagcaagcugaucaacaucaucaucugguuccugcuccuguccgugugccugggcagccucaucuacuccaccgccgcgcuggggguccugaugagcaaccucggcaugccguccuacugcacgggguaccgcgagggcuaccugaacagcaccaacgugaccaucgccaccuacugcacgggcuccauccccugcagcgugugccuguccgggcucgacagccuggacaccuaccccucccuggagaccauccagaucaccaucagcuccuucaagugggaccucacggccuucggccuggucgccgagugguuccuggccuacauccucuucacccgguucuucuacgugcuggggcuggcggccaucaugcagcucuucuucagcuacuucgccgugcacuucaucuccaacagcuggcugauguggcugaucaucaaccugguccagauggcccccaucuccgcgauggugcgcauguacaucuucuucgccagcuucuacuacguguggaagagcuacguccacgugguggacggcugcaacuccagcaccugcaugaugugcuacaagcggaaccgcgccacccgggucgagugcacgaccaucgugaacgggguccgccgguccuucuacguguacgccaacggcggcaagggguucugcaagcuccacaacuggaacugcgugaacugcgacaccuucugcgccggcagcaccuucaucuccgacgaggucgcgcgcgaccugagccugcaguucaagcggccgaucaaccccacggaccaguccagcuacaucguggacuccgugaccgucaagaacgggagcauccaccucuacuucgacaaggccggccagaagaccuacgagcgccacucccugagccacuucgugaaccuggacaaccuccgggccaacaacaccaaggggucccugcccaucaacgugaucgucuucgacggcaagagcaagugcgaggaguccagcgccaaguccgccagcguguacuacucccagcugaugugccagcccauccuccugcuggaccaggcgcucgugagcgacgucggcgacagcgccgagguggccgugaagauguucgacgccuacgucaacacguucuccagcaccuucaacgugccgauggagaagcugaagacccugguggccaccgcggaggccgagcucgccaagaacgucucccuggacaacgugcugagcacguucaucuccgccgcgcgccagggguucguggacagcgacgucgagaccaaggacgugguggagugccucaagcugucccaccagagcgacaucgaggucaccggcgacuccugcaacaacuacaugcugaccuacaacaagguggagaacaugacgccccgggaccucggggccugcaucgacugcagcgcccgccacaucaacgcccagguggccaagucccacaacaucgcgcugaucuggaacgucaaggacuucaugagccuguccgagcagcuccggaagcagauccgcagcgccgccaagaagaacaaccugcccuucaagcugaccugcgccaccacccgccagguggugaacgucgugacgaccaagaucgcccucaagggcgggugaggacuaguuauaagacugacuagcccgaugggccucccaacgggcccuccuccccuccuugcaccgagauuaauaaaaaaaaaaaaaaaaaaaaaaaaaaaaaaaaaaaaaaaaaaaaaaaaaaaaaaaaaaaaaaaaugcaucccccccccccccccccccccccccccccccaaaggcucuuuucagagccaccagaauu

SEQ ID NO: 21828 - RNA, 6058 nt, Artificial Sequence
  SARS-CoV-2__MT627263.1__non-structural protein 3 (NSP3) mRNA gc
aggagaaagcuuaccauggcccccaccaaggugaccuucggcgacgacacggucaucgaggugcagggguacaagagcgugaacaucaccuucgagcuggacgagcgcaucgacaagguccucaacgagaagugcuccgccuacaccguggagcugggcaccgaggugaacgaguucgcgugcgucguggccgacgccgugaucaagacgcugcagccggucagcgagcuccugaccccccuggggaucgaccucgacgagugguccauggccaccuacuaccuguucgacgagagcggcgaguucaagcuggccucccacauguacugcagcuucuacccccccgacgaggacgaggaggagggggacugcgaggaggaggaguucgagccguccacccaguacgaguacggcacggaggacgacuaccagggcaagccccucgaguucggggcgaccagcgccgcccugcagcccgaggaggagcaggaggaggacuggcuggacgacgacucccagcagaccgugggccagcaggacgggagcgaggacaaccagaccacgaccauccagaccaucguggagguccagccccagcucgagauggagcugaccccgguggugcagacgaucgaggucaacuccuucagcggcuaccugaagcucaccgacaacguguacaucaagaacgccgacaucguggaggaggcgaagaaggucaagcccaccgugguggucaacgccgccaacguguaccugaagcacgggggcggcguggccggggcccugaacaaggcgaccaacaacgccaugcaggucgaguccgacgacuacaucgccacgaacggcccccucaagguggggggcagcugcguccuguccggccacaaccuggccaagcacugccuccacgugguggggcccaacgucaacaagggcgaggacauccagcugcugaagagcgccuacgagaacuucaaccagcacgaggugcuccuggcgccgcugcucuccgccgggaucuucggcgccgaccccauccacagccugcgggugugcgucgacaccgugcgcaccaacguguaccuggccgucuucgacaagaaccucuacgacaagcugguguccagcuuccuggagaugaagagcgagaagcagguggagcagaagaucgccgagauccccaaggaggaggucaagcccuucaucaccgaguccaagccgagcguggagcagcggaagcaggacgacaagaagaucaaggcgugcguggaggaggucacgaccacccucgaggagaccaaguuccugacggagaaccugcuccuguacaucgacaucaacgggaaccugcaccccgacuccgccacccucgugagcgacaucgacaucaccuuccugaagaaggacgcccccuacaucgugggcgacgucgugcaggagggcgugcugaccgccgucgugauccccacgaagaaggccgggggcaccaccgagaugcucgcgaaggcccugcgcaaggugccgaccgacaacuacaucacgaccuaccccgggcagggccugaacggguacaccgucgaggaggccaagaccgugcucaagaagugcaaguccgccuucuacauccugcccagcaucaucuccaacgagaagcaggagauccugggcaccgugagcuggaaccuccgggagaugcuggcgcacgccgaggagacgcgcaagcugaugcccgucugcguggagaccaaggccaucguguccaccauccagcggaaguacaagggcauccgcauccaggagggggucguggacuacggcgcccgguucuacuucuacaccagcaagacgaccguggccucccugaucaacacccucaacgaccugaacgagacccuggucacgaugccgcucggguacgugacccacggccugaaccuggaggaggcggcccgcuacaugcggagccucaaggugcccgccaccgucuccgugagcucccccgacgccgugaccgccuacaacggguaccugacgagcuccagcaagacccccgaggagcacuucaucgagaccaucucccuggcgggcagcuacaaggacuggagcuacuccggccagagcacccagcucgggaucgaguuccugaagcgcggcgacaaguccgucuacuacacgagcaacccgaccaccuuccaccuggacggggaggugaucaccuucgacaaccucaagacgcugcugucccuccgggaggugcgcaccaucaaggucuucaccaccguggacaacaucaaccugcacacgcagguggucgacaugagcaugaccuacggccagcaguucggccccaccuaccuggacggggccgacgugaccaagaucaagccccacaacucccacgagggcaagacguucuacgugcucccgaacgacgacacccugcgggucgaggccuucgaguacuaccacaccaccgaccccagcuuccuggggcgcuacauguccgcccucaaccacacgaagaaguggaaguacccccaggugaacggccugaccagcaucaagugggccgacaacaacugcuaccuggcgaccgcccuccugacccugcagcagaucgagcucaaguucaaccccccggcccugcaggacgccuacuaccgggcgcgcgccggggaggccgccaacuucugcgcccugauccucgcguacugcaacaagacggugggcgagcugggcgacguccgggagaccauguccuaccuguuccagcacgccaaccucgacagcugcaagcgcgugcugaacgucgugugcaagaccugcgggcagcagcagaccacccugaagggcguggaggccgucauguacauggggacgcucuccuacgagcaguucaagaagggcgugcagauccccugcaccugcgggaagcaggccaccaaguaccuggugcagcaggagagccccuucgucaugauguccgcccccccggcgcaguacgagcugaagcacggcaccuucacgugcgccagcgaguacaccggcaacuaccagugcgggcacuacaagcacaucaccuccaaggagacccucuacugcaucgacggcgcccugcugacgaagagcagcgaguacaaggggcccaucaccgacguguucuacaaggagaacuccuacaccaccacgaucaagcccgugaccuacaagcucgacggcgucgugugcaccgagaucgaccccaagcuggacaacuacuacaagaaggacaacagcuacuucaccgagcagccgaucgaccuggugcccaaccagcccuaccccaacgccuccuucgacaacuucaaguucgucugcgacaacaucaaguucgccgacgaccucaaccagcugacgggguacaagaagccggcgagccgggagcugaaggugaccuucuuccccgaccucaacggcgacguggucgccaucgacuacaagcacuacacccccuccuucaagaagggcgccaagcugcugcacaagcccaucguguggcacgugaacaacgccaccaacaaggcgacguacaagccgaacaccuggugcauccgcugccucuggagcaccaagcccgucgagaccuccaacagcuucgacgugcugaaguccgaggacgcccaggggauggacaaccuggccugcgaggaccucaagcccgugagcgaggaggucguggagaaccccacgauccagaaggacgugcuggagugcaacgucaagaccaccgagguggugggcgacaucauccugaagccggccaacaacucccucaagaucaccgaggaggucgggcacacggaccugauggccgcguacguggacaacagcucccugaccaucaagaagcccaacgagcucagccgcgugcugggccugaagacccucgccacccacgggcuggccgccgucaacuccgugcccugggacacgaucgccaacuacgcgaagccguuccugaacaagguggucagcaccaccaccaacaucgugacgcggugccucaaccgcgugugcaccaacuacaugcccuacuucuucacccugcugcuccagcugugcaccuucacccgguccacgaacagccgcaucaaggccuccaugcccaccaccaucgccaagaacaccgucaagagcgugggcaaguucugccuggaggccagcuucaacuaccucaagucccccaacuucagcaagcugaucaacaucaucaucugguuccugcuccuguccgugugccugggcagccucaucuacuccacggccgcgcuggggguccugaugagcaaccucggcaugccguccuacugcaccggguaccgggagggcuaccugaacagcaccaacgugaccaucgccacguacugcaccggcuccauccccugcagcgugugccuguccgggcucgacagccuggacaccuaccccucccuggagaccauccagaucacgaucagcuccuucaagugggaccucaccgccuucggccuggucgccgagugguuccuggccuacauccucuucacccgcuucuucuacgugcuggggcuggcggccaucaugcagcucuucuucagcuacuucgccgugcacuucaucuccaacagcuggcugauguggcugaucaucaaccugguccagauggcccccaucuccgcgauggugcggauguacaucuucuucgccagcuucuacuacguguggaagagcuacguccacgugguggacggcugcaacuccagcaccugcaugaugugcuacaagcgcaaccgggccacgcgcgucgagugcaccaccaucgugaacgggguccggcgcuccuucuacguguacgccaacggcggcaagggguucugcaagcuccacaacuggaacugcgugaacugcgacaccuucugcgccggcagcacguucaucuccgacgaggucgcgcgggaccugagccugcaguucaagcgcccgaucaaccccaccgaccaguccagcuacaucguggacuccgugaccgucaagaacgggagcauccaccucuacuucgacaaggccggccagaagaccuacgagcggcacucccugagccacuucgugaaccuggacaaccuccgcgccaacaacacgaaggggucccugcccaucaacgugaucgucuucgacggcaagagcaagugcgaggaguccagcgccaaguccgccagcguguacuacucccagcugaugugccagcccauccuccugcuggaccaggcgcucgugagcgacgucggcgacagcgccgagguggccgugaagauguucgacgccuacgucaacaccuucuccagcaccuucaacgugccgauggagaagcugaagacccugguggccacggcggaggccgagcucgccaagaacgucucccuggacaacgugcugagcaccuucaucuccgccgcgcggcagggguucguggacagcgacgucgagaccaaggacgugguggagugccucaagcugucccaccagagcgacaucgaggucaccggcgacuccugcaacaacuacaugcugacguacaacaagguggagaacaugaccccccgcgaccucggggccugcaucgacugcagcgcccggcacaucaacgcccagguggccaagucccacaacaucgcgcugaucuggaacgucaaggacuucaugagccuguccgagcagcuccgcaagcagauccgcagcgccgccaagaagaacaaccugcccuucaagcugaccugcgccaccacgcggcagguggugaacgucgugaccaccaagaucgcccucaagggcgggugaggacuaguuauaagacugacuagcccgaugggccucccaacgggcccuccuccccuccuugcaccgagauuaauaaaaaaaaaaaaaaaaaaaaaaaaaaaaaaaaaaaaaaaaaaaaaaaaaaaaaaaaaaaaaaaaugcaucccccccccccccccccccccccccccccccaaaggcucuuuucagagccaccagaauu

SEQ ID NO: 21829 - RNA, 6058 nt, Artificial Sequence
  SARS-CoV-2__MT627414.1__non-structural protein 3 (NSP3) mRNA gc
aggagaaagcuuaccauggcccccaccaaggugaccuucggcgacgacacggucaucgaggugcagggguacaagagcgugaacaucaccuucgagcuggacgagcgcaucgacaagguccucaacgagaagugcuccgccuacaccguggagcugggcaccgaggugaacgaguucgcgugcgucguggccgacgccgugaucaagacgcugcagccggucagcgagcuccugaccccccuggggaucgaccucgacgagugguccauggccaccuacuaccuguucgacgagagcggcgaguucaagcuggccucccacauguacugcagcuucuacccccccgacgaggacgaggaggagggggacugcgaggaggaggaguucgagccguccacccaguacgaguacggcacggaggacgacuaccagggcaagccccucgaguucggggcgaccagcgccgcccugcagcccgaggaggagcaggaggaggacuggcuggacgacgacucccagcagaccgugggccagcaggacgggagcgaggacaaccagaccacgaccauccagaccaucguggagguccagccccagcucgagauggagcugaccccgguggugcagacgaucgaggucaacuccuucagcggcuaccugaagcucaccgacaacguguacaucaagaacgccgacaucguggaggaggcgaagaaggucaagcccaccgugguggucaacgccgccaacguguaccugaagcacgggggcggcguggccggggcccugaacaaggcgaccaacaacgccaugcaggucgaguccgacgacuacaucgccacgaacggcccccucaagguggggggcagcugcguccuguccggccacaaccuggccaagcacugccuccacgugguggggcccaacgucaacaagggcgaggacauccagcugcugaagagcgccuacgagaacuucaaccagcacgaggugcuccuggcgccgcugcucuccgccgggaucuucggcgccgaccccauccacagccugcgggugugcgucgacaccgugcgcaccaacguguaccuggccgucuucgacaagaaccucuacgacaagcugguguccagcuuccuggagaugaagagcgagaagcagguggagcagaagaucgccgagauccccaaggaggaggucaagcccuucaucaccgaguccaagccgagcguggagcagcggaagcaggacgacaagaagaucaaggcgugcguggaggaggucacgaccacccucgaggagaccaaguuccugacggagaaccugcuccuguacaucgacaucaacgggaaccugcaccccgacuccgccacccucgugagcgacaucgacaucaccuuccugaagaaggacgccuccuacaucgugggcgacgucgugcaggagggcgugcugaccgccgucgugauccccacgaagaaggccgggggcaccaccgagaugcucgcgaaggcccugcgcaaggugcccaccgacaacuacaucacgaccuacccggggcagggccugaacggguacaccgucgaggaggccaagaccgugcucaagaagugcaagagcgccuucuacauccugcccuccaucaucagcaacgagaagcaggagauccugggcaccguguccuggaaccuccgggagaugcuggcgcacgccgaggagacgcgcaagcugaugcccgucugcguggagaccaaggccaucgugagcaccauccagcggaaguacaagggcaucaagauccaggagggggucguggacuacggcgcccgcuucuacuucuacaccuccaagacgaccguggccagccugaucaacacccucaacgaccugaacgagacccuggucacgaugccccucggguacgugacccacggccugaaccuggaggaggcggcccgguacaugcgcucccucaaggugccggccaccgucagcguguccagccccgacgccgugaccgccuacaacggguaccugacguccagcuccaagacccccgaggagcacuucaucgagaccaucagccuggcgggcagcuacaaggacugguccuacagcggccaguccacccagcucgggaucgaguuccugaagcggggcgacaagagcgucuacuacacguccaaccccaccaccuuccaccuggacggggaggugaucaccuucgacaaccucaagacgcugcugagccuccgcgaggugcggaccaucaaggucuucaccaccguggacaacaucaaccugcacacgcagguggucgacauguccaugaccuacggccagcaguucggcccgaccuaccuggacggggccgacgugaccaagaucaagccccacaacagccacgagggcaagacguucuacgugcuccccaacgacgacacccugcgcgucgaggccuucgaguacuaccacaccaccgacccguccuuccuggggcgguacaugagcgcccucaaccacacgaagaaguggaaguacccccaggugaacggccugaccuccaucaagugggccgacaacaacugcuaccuggcgaccgcccuccugacccugcagcagaucgagcucaaguucaacccccccgcccugcaggacgccuacuaccgcgcgcgggccggggaggccgccaacuucugcgcccugauccucgcguacugcaacaagacggugggcgagcugggcgacguccgcgagaccaugagcuaccuguuccagcacgccaaccucgacuccugcaagcgggugcugaacgucgugugcaagaccugcgggcagcagcagaccacccugaagggcguggaggccgucauguacauggggacgcucagcuacgagcaguucaagaagggcgugcagaucccgugcaccugcgggaagcaggccaccaaguaccuggugcagcaggagucccccuucgucaugaugagcgccccccccgcgcaguacgagcugaagcacggcaccuucacgugcgccuccgaguacaccggcaacuaccagugcgggcacuacaagcacaucaccagcaaggagacccucuacugcaucgacggcgcccugcugacgaagagcuccgaguacaaggggccgaucaccgacguguucuacaaggagaacagcuacaccaccacgaucaagcccgugaccuacaagcucgacggcgucgugugcaccgagaucgaccccaagcuggacaacuacuacaagaaggacaacuccuacuucaccgagcagcccaucgaccuggugccgaaccagcccuaccccaacgccagcuucgacaacuucaaguucgucugcgacaacaucaaguucgccgacgaccucaaccagcugacgggguacaagaagcccgcgucccgcgagcugaaggugaccuucuucccggaccucaacggcgacguggucgccaucgacuacaagcacuacacccccagcuucaagaagggcgccaagcugcugcacaagcccaucguguggcacgugaacaacgccaccaacaaggcgacguacaagcccaacaccuggugcauccggugccucugguccaccaagccggucgagaccagcaacuccuucgacgugcugaagagcgaggacgcccaggggauggacaaccuggccugcgaggaccucaagcccguguccgaggaggucguggagaaccccacgauccagaaggacgugcuggagugcaacgucaagaccaccgagguggugggcgacaucauccugaagcccgccaacaacagccucaagaucaccgaggaggucgggcacacggaccugauggccgcguacguggacaacuccagccugaccaucaagaagccgaacgagcucucccgcgugcugggccugaagacccucgccacccacgggcuggccgccgucaacagcgugcccugggacacgaucgccaacuacgcgaagcccuuccugaacaagguggucuccaccaccaccaacaucgugacgcgcugccucaaccgggugugcaccaacuacaugccguacuucuucacccugcugcuccagcugugcaccuucacccgcagcacgaacucccggaucaaggccagcaugcccaccaccaucgccaagaacaccgucaagagcgugggcaaguucugccuggaggccuccuucaacuaccucaagagccccaacuucuccaagcugaucaacaucaucaucugguuccugcuccugagcgugugccugggcucccucaucuacagcacggccgcgcuggggguccugauguccaaccucggcaugcccagcuacugcaccggguaccgcgagggcuaccugaacuccaccaacgugaccaucgccacguacugcaccggcagcaucccgugcuccgugugccugagcgggcucgacucccuggacaccuaccccagccuggagaccauccagaucacgaucuccagcuucaagugggaccucaccgccuucggccuggucgccgagugguuccuggccuacauccucuucacccgguucuucuacgugcuggggcuggcggccaucaugcagcucuucuucuccuacuucgccgugcacuucaucagcaacuccuggcugauguggcugaucaucaaccugguccagauggcccccaucagcgcgauggugcgcauguacaucuucuucgccagcuucuacuacguguggaaguccuacguccacgugguggacggcugcaacagcuccaccugcaugaugugcuacaagcggaaccgcgccacgcgggucgagugcaccaccaucgugaacgggguccgccggagcuucuacguguacgccaacggcggcaagggguucugcaagcuccacaacuggaacugcgugaacugcgacaccuucugcgccggcuccacguucaucagcgacgaggucgcgcgcgaccugucccugcaguucaagcggcccaucaacccgaccgaccagagcuccuacaucguggacagcgugaccgucaagaacggguccauccaccucuacuucgacaaggccggccagaagaccuacgagcgccacagccugucccacuucgugaaccuggacaaccuccgggccaacaacacgaaggggagccugcccaucaacgugaucgucuucgacggcaaguccaagugcgaggagagcuccgccaagagcgccuccguguacuacagccagcugaugugccagcccauccuccugcuggaccaggcgcucgugagcgacgucggcgacuccgccgagguggccgugaagauguucgacgccuacgucaacaccuucagcuccaccuucaacgugcccauggagaagcugaagacccugguggccacggcggaggccgagcucgccaagaacgucagccuggacaacgugcuguccaccuucaucagcgccgcgcgccagggguucguggacuccgacgucgagaccaaggacgugguggagugccucaagcugagccaccaguccgacaucgaggucaccggcgacagcugcaacaacuacaugcugacguacaacaagguggagaacaugaccccgcgggaccucggggccugcaucgacugcuccgcccgccacaucaacgcccagguggccaagagccacaacaucgcgcugaucuggaacgucaaggacuucaugucccugagcgagcagcuccggaagcagauccgcuccgccgccaagaagaacaaccugcccuucaagcugaccugcgccaccacgcgccagguggugaacgucgugaccaccaagaucgcccucaagggcgggugaggacuaguuauaagacugacuagcccgaugggccucccaacgggcccuccuccccuccuugcaccgagauuaauaaaaaaaaaaaaaaaaaaaaaaaaaaaaaaaaaaaaaaaaaaaaaaaaaaaaaaaaaaaaaaaaugcaucccccccccccccccccccccccccccccccaaaggcucuuuucagagccaccagaauu

SEQ ID NO: 21830 - RNA, 6058 nt, Artificial Sequence
  SARS-CoV-2__MT627437.1__non-structural protein 3 (NSP3) mRNA gc
aggagaaagcuuaccauggcccccaccaaggugaccuucggcgacgacacggucaucgaggugcagggguacaagagcgugaacaucaccuucgagcuggacgagcgcaucgacaagguccucaacgagaagugcuccgccuacaccguggagcugggcaccgaggugaacgaguucgcgugcgucguggccgacgccgugaucaagacgcugcagccggucagcgagcuccugaccccccuggggaucgaccucgacgagugguccauggccaccuacuaccuguucgacgagagcggcgaguucaagcuggccucccacauguacugcagcuucuacccccccgacgaggacgaggaggagggggacugcgaggaggaggaguucgagccguccacccaguacgaguacggcacggaggacgacuaccagggcaagccccucgaguucggggcgaccagcgccgcccugcagcccgaggaggagcaggaggaggacuggcuggacgacgacucccagcagaccgugggccagcaggacgggagcgaggacaaccagaccacgaccauccagaccaucguggagguccagccccagcucgagauggagcugaccccgguggugcagacgaucgaggucaacuccuucagcggcuaccugaagcucaccgacaacguguacaucaagaacgccgacaucguggaggaggcgaagaaggucaagcccaccgugguggucaacgccgccaacguguaccugaagcacgggggcggcguggccggggcccugaacaaggcgaccaacaacgccaugcaggucgaguccgacgacuacaucgccacgaacggcccccucaagguggggggcagcugcguccuguccggccacaaccuggccaagcacugccuccacgugguggggcccaacgucaacaagggcgaggacauccagcugcugaagagcgccuacgagaacuucaaccagcacgaggugcuccuggcgccgcugcucuccgccgggaucuucggcgccgaccccauccacagccugcgggugugcgucgacaccgugcgcaccaacguguaccuggccgucuucgacaagaaccucuacgacaagcugguguccagcuuccuggagaugaagagcgagaagcagguggagcagaagaucgccgagauccccaaggaggaggucaagcccuucaucaccgaguccaagccgagcguggagcagcggaagcaggacgacaagaagaucaaggcgugcguggaggaggucacgaccacccucgaggagaccaaguuccugacggagaaccugcuccuguacaucgacaucaacgggaaccugcaccccgacuccgccacccucgugagcgacaucgacaucaccuuccugaagaaggacgcccccuacaucgugggcgacgucgugcaggagggcgugcugaccgccgucgugauccccacgaagaaggccgggggcaccaccgagaugcucgcgaaggcccugcgcaaggugccgaccgacaacuacaucacgaccuaccccgggcagggccugaacggguacaccgucgaggaggccaagaccgugcucaagaagugcaaguccgccuucuacauccugcccagcaucaucuccaacgagaagcaggagauccugggcaccgugagcuggaaccuccgggagaugcuggcgcacgccgaggagacgcgcaagcugaugcccgucugcguggagaccaaggccaucguguccaccauccagcggaaguacaagggcaucaagauccaggagggggucguggacuacggcgcccgcuucuacuucuacaccagcaagacgaccguggccucccugaucaacacccucaacgaccugagcgagacccuggucacgaugccgcucggguacgugacccacggccugaaccuggaggaggcggcccgguacaugcgcucccucaaggugcccgccaccgucagcguguccagccccgacgccgugaccgccuacaacggguaccugacguccagcuccaagacccccgaggagcacuucaucgagaccaucagccuggcgggcagcuacaaggacugguccuacagcggccaguccacccagcucgggaucgaguuccugaagcggggcgacaagagcgucuacuacacguccaacccgaccaccuuccaccuggacggggaggugaucaccuucgacaaccucaagacgcugcugagccuccgcgaggugcggaccaucaaggucuucaccaccguggacaacaucaaccugcacacgcagguggucgacauguccaugaccuacggccagcaguucggccccaccuaccuggacggggccgacgugaccaagaucaagccccacaacagccacgagggcaagacguucuacgugcucccgaacgacgacacccugcgcgucgaggccuucgaguacuaccacaccaccgaccccuccuuccuggggcgguacaugagcgcccucaaccacacgaagaaguggaaguacccccaggugaacggccugaccuccaucaagugggccgacaacaacugcuaccuggcgaccgcccuccugacccugcagcagaucgagcucaaguucaaccccccggcccugcaggacgccuacuaccgcgcgcgggccggggaggccgccaacuucugcgcccugauccucgcguacugcaacaagacggugggcgagcugggcgacguccgcgagaccaugagcuaccuguuccagcacgccaaccucgacuccugcaagcgggugcugaacgucgugugcaagaccugcgggcagcagcagaccacccugaagggcguggaggccgucauguacauggggacgcucagcuacgagcaguucaagaagggcgugcagauccccugcaccugcgggaagcaggccaccaaguaccuggugcagcaggagucccccuucgucaugaugagcgcccccccggcgcaguacgagcugaagcacggcaccuucacgugcgccuccgaguacaccggcaacuaccagugcgggcacuacaagcacaucaccagcaaggagacccucuacugcaucgacggcgcccugcugacgaagagcuccgaguacaaggggcccaucaccgacguguucuacaaggagaacagcuacaccaccacgaucaagcccgugaccuacaagcucgacggcgucgugugcaccgagaucgaccccaagcuggacaacuacuacaagaaggacaacuccuacuucaccgagcagccgaucgaccuggugcccaaccagcccuaccccaacgccagcuucgacaacuucaaguucgucugcgacaacaucaaguucgccgacgaccucaaccagcugacgggguacaagaagccggcgucccgcgagcugaaggugaccuucuuccccgaccucaacggcgacguggucgccaucgacuacaagcacuacacccccagcuucaagaagggcgccaagcugcugcacaagcccaucguguggcacgugaacaacgccaccaacaaggcgacguacaagccgaacaccuggugcauccggugccucugguccaccaagcccgucgagaccagcaacuccuucgacgugcugaagagcgaggacgcccaggggauggacaaccuggccugcgaggaccucaagcccguguccgaggaggucguggagaaccccacgauccagaaggacgugcuggagugcaacgucaagaccaccgagguggugggcgacaucauccugaagccggccaacaacagccucaagaucaccgaggaggucgggcacacggaccugauggccgcguacguggacaacuccagccugaccaucaagaagcccaacgagcucucccgcgugcugggccugaagacccucgccacccacgggcuggccgccgucaacagcgugcccugggacacgaucgccaacuacgcgaagccguuccugaacaagguggucuccaccaccaccaacaucgugacgcgcugccucaaccgggugugcaccaacuacaugcccuacuucuucacccugcugcuccagcugugcaccuucacccgcagcacgaacucccggaucaaggccagcaugcccaccaccaucgccaagaacaccgucaagagcgugggcaaguucugccuggaggccuccuucaacuaccucaagagccccaacuucuccaagcugaucaacaucaucaucugguuccugcuccugagcgugugccugggcucccucaucuacagcacggccgcgcuggggguccugauguccaaccucggcaugccgagcuacugcaccggguaccgcgagggcuaccugaacuccaccaacgugaccaucgccacguacugcaccggcagcauccccugcuccgugugccugagcgggcucgacucccuggacaccuaccccagccuggagaccauccagaucacgaucuccagcuucaagugggaccucaccgccuucggccuggucgccgagugguuccuggccuacauccucuucacccgguucuucuacgugcuggggcuggcggccaucaugcagcucuucuucuccuacuucgccgugcacuucaucagcaacuccuggcugauguggcugaucaucaaccugguccagauggcccccaucagcgcgauggugcgcauguacaucuucuucgccagcuucuacuacguguggaaguccuacguccacgugguggacggcugcaacagcuccaccugcaugaugugcuacaagcggaaccgcgccacgcgggucgagugcaccaccaucgugaacgggguccgccggagcuucuacguguacgccaacggcggcaagggguucugcaagcuccacaacuggaacugcgugaacugcgacaccuucugcgccggcuccacguucaucagcgacgaggucgcgcgcgaccugucccugcaguucaagcggccgaucaaccccaccgaccagagcuccuacaucguggacagcgugaccgucaagaacggguccauccaccucuacuucgacaaggccggccagaagaccuacgagcgccacagccugucccacuucgugaaccuggacaaccuccgggccaacaacacgaaggggagccugcccaucaacgugaucgucuucgacggcaaguccaagugcgaggagagcuccgccaagagcgccuccguguacuacagccagcugaugugccagcccauccuccugcuggaccaggcgcucgugagcgacgucggcgacuccgccgagguggccgugaagauguucgacgccuacgucaacaccuucagcuccaccuucaacgugccgauggagaagcugaagacccugguggccacggcggaggccgagcucgccaagaacgucagccuggacaacgugcuguccaccuucaucagcgccgcgcgccagggguucguggacuccgacgucgagaccaaggacgugguggagugccucaagcugagccaccaguccgacaucgaggucaccggcgacagcugcaacaacuacaugcugacguacaacaagguggagaacaugaccccccgggaccucggggccugcaucgacugcuccgcccgccacaucaacgcccagguggccaagagccacaacaucgcgcugaucuggaacgucaaggacuucaugucccugagcgagcagcuccggaagcagauccgcuccgccgccaagaagaacaaccugcccuucaagcugaccugcgccaccacgcgccagguggugaacgucgugaccaccaagaucgcccucaagggcgggugaggacuaguuauaagacugacuagcccgaugggccucccaacgggcccuccuccccuccuugcaccgagauuaauaaaaaaaaaaaaaaaaaaaaaaaaaaaaaaaaaaaaaaaaaaaaaaaaaaaaaaaaaaaaaaaaugcaucccccccccccccccccccccccccccccccaaaggcucuuuucagagccaccagaauu

SEQ ID NO: 21831 - RNA, 6058 nt, Artificial Sequence
  SARS-CoV-2__MT627748.1__non-structural protein 3 (NSP3) mRNA gc
aggagaaagcuuaccauggcccccaccaaggugaccuucggcgacgacacggucaucgaggugcagggguacaagagcgugaacaucaccuucgagcuggacgagcgcaucgacaagguccucaacgagaagugcuccgccuacaccguggagcugggcaccgaggugaacgaguucgcgugcgucguggccgacgccgugaucaagacgcugcagccggucagcgagcuccugaccccccuggggaucgaccucgacgagugguccauggccaccuacuaccuguucgacgagagcggcgaguucaagcuggccucccacauguacugcagcuucuacccccccgacgaggacgaggaggagggggacugcgaggaggaggaguucgagccguccacccaguacgaguacggcacggaggacgacuaccagggcaagccccucgaguucggggcgaccagcgccgcccugcagcccgaggaggagcaggaggaggacuggcuggacgacgacucccagcagaccgugggccagcaggacgggagcgaggacaaccagaccacgaccauccagaccaucguggagguccagccccagcucgagauggagcugaccccgguggugcagacgaucgaggucaacuccuucagcggcuaccugaagcucaccgacaacguguacaucaagaacgccgacaucguggaggaggcgaagaaggucaagcccaccgugguggucaacgccgccaacguguaccugaagcacgggggcggcguggccggggcccugaacaaggcgaccaacaacgccaugcaggucgaguccgacgacuacaucgccacgaacggcccccucaagguggggggcagcugcguccuguccggccacaaccuggccaagcacugccuccacgugguggggcccaacgucaacaagggcgaggacauccagcugcugaagagcgccuacgagaacuucaaccagcacgaggugcuccuggcgccgcugcucuccgccgggaucuucggcgccgaccccauccacagccugcgggugugcgucgacaccgugcgcaccaacguguaccuggccgucuucgacaagaaccucuacgacaagcugguguccagcuuccuggagaugaagagcgagaagcagguggagcagaagaucgccgagauccccaaggaggaggucaagcccuucaucaccgaguccaagccgagcguggagcagcggaagcaggacgacaagaagaucaaggcgugcguggaggaggucacgaccacccucgaggagaccaaguuccugacggagaaccugcuccuguacaucgacaucaacgggaaccugcaccccgacuccgccacccucgugagcgacaucgacaucaccuuccugaagaaggacgcccccuacaucgugggcgacgucgugcaggagggcgugcugaccgccgucgugauccccacgaagaaggccgggggcaccaccgagaugcucgcgaaggcccugcgcaaggugccgaccgacaacuacaucacgaccuaccccgggcagggccugaacggguacaccgucgaggaggccaagaccgugcucaagaagugcaaguccgccuucuacauccugcccagcaucaucuccaacgagaagcaggagauccugggcaccgugagcuggaaccuccgggagaugcuggcgcacgccgaggagacgcgcaagcugaugcccgucugcguggagaccaaggccaucguguccaccauccagcggaaguacaagggcaucaagauccaggagggggucguggacuacggcgcccgcuucuacuucuacaccagcaagacgaccguggccucccugaucaacacccucaacgaccugaacgagacccuggucacgaugccgcucggguacgugacccacggccugaaccuggaggaggcggcccgguacaugcgcagccucaaggugcccgccaccgucuccgugagcucccccgacgccgugaccgccuacaacggguaccugacgagcuccagcaagacccccgaggagcacuucaucgagaccaucucccuggcgggcagcuacaaggacuggagcuacuccggccagagcacccagcucgggaucgaguuccugaagcggggcgacaaguccgucuacuacacgagcaacccgaccaccuuccaccuggacggggaggugaucaccuucgacaaccucaagacgcugcugucccuccgcgaggugcggaccaucaaggucuucaccaccguggacaacaucaaccugcacacgcagguggucgacaugagcaugaccuacggccagcaguucggccccaccuaccuggacggggccgacgugaccaagaucaagccccacaacucccacgagggcaagacguucuacgugcucccgaacgacgacacccugcgcgucgaggccuucgaguacuaccacaccaccgaccccagcuuccuggggcgguacauguccgcccucaaccacacgaagaaguggaaguacccccaggugaacggccugaccagcaucaagugggccgacaacaacugcuaccuggcgaccgcccuccugacccugcagcagaucgagcucaaguucaaccccccggcccugcaggacgccuacuaccgcgcgcgggccggggaggccgccaacuucugcgcccugauccucgcguacugcaacaagacggugggcgagcugggcgacguccgcgagaccauguccuaccuguuccagcacgccaaccucgacagcugcaagcgggugcugaacgucgugugcaagaccugcgggcagcagcagaccacccugaagggcguggaggccgucauguacauggggacgcucuccuacgagcaguucaagaagggcgugcagauccccugcaccugcgggaagcaggccaccaaguaccuggugcagcaggagagccccuucgucaugauguccgcccccccggcgcaguacgagcugaaguacggcaccuucacgugcgccagcgaguacaccggcaacuaccagugcgggcacuacaagcacaucaccuccaaggagacccucuacugcaucgacggcgcccugcugacgaagagcagcgaguacaaggggcccaucaccgacguguucuacaaggagaacuccuacaccaccacgaucaagcccgugaccuacaagcucgacggcgucgugugcaccgagaucgaccccaagcuggacaacuacuacaagaaggacaacagcuacuucaccgagcagccgaucgaccuggugcccaaccagcccuaccccaacgccuccuucgacaacuucaaguucgucugcgacaacaucaaguucgccgacgaccucaaccagcugacgggguacaagaagccggcgagccgcgagcugaaggugaccuucuuccccgaccucaacggcgacguggucgccaucgacuacaagcacuacacccccuccuucaagaagggcgccaagcugcugcacaagcccaucguguggcacgugaacaacgccaccaacaaggcgacguacaagccgaacaccuggugcauccggugccucuggagcaccaagcccgucgagaccuccaacagcuucgacgugcugaaguccgaggacgcccaggggauggacaaccuggccugcgaggaccucaagcccgugagcgaggaggucguggagaaccccacgauccagaaggacgugcuggagugcaacgucaagaccaccgagguggugggcgacaucauccugaagccggccaacaacucccucaagaucaccgaggaggucgggcacacggaccugauggccgcguacguggacaacagcucccugaccaucaagaagcccaacgagcucagccgcgugcugggccugaagacccucgccacccacgggcuggccgccgucaacuccgugcccugggacacgaucgccaacuacgcgaagccguuccugaacaagguggucagcaccaccaccaacaucgugacgcgcugccucaaccgggugugcaccaacuacaugcccuacuucuucacccugcugcuccagcugugcaccuucacccgcuccacgaacagccggaucaaggccuccaugcccaccaccaucgccaagaacaccgucaagagcgugggcaaguucugccuggaggccagcuucaacuaccucaagucccccaacuucagcaagcugaucaacaucaucaucugguuccugcuccuguccgugugccugggcagccucaucuacuccacggccgcgcuggggguccugaugagcaaccucggcaugccguccuacugcaccggguaccgcgagggcuaccugaacagcaccaacgugaccaucgccacguacugcaccggcuccauccccugcagcgugugccuguccgggcucgacagccuggacaccuaccccucccuggagaccauccagaucacgaucagcuccuucaagugggaccucaccgccuucggccuggucgccgagugguuccuggccuacauccucuucacccgguucuucuacgugcuggggcuggcggccaucaugcagcucuucuucagcuacuucgccgugcacuucaucuccaacagcuggcugauguggcugaucaucaaccugguccagauggcccccaucuccgcgauggugcgcauguacaucuucuucgccagcuucuacuacguguggaagagcuacguccacgugguggacggcugcaacuccagcaccugcaugaugugcuacaagcggaaccgcgccacgcgggucgagugcaccaccaucgugaacgggguccgccgguccuucuacguguacgccaacggcggcaagggguucugcaagcuccacaacuggaacugcgugaacugcgacaccuucugcgccggcagcacguucaucuccgacgaggucgcgcgcgaccugagccugcaguucaagcggccgaucaaccccaccgaccaguccagcuacaucguggacuccgugaccgucaagaacgggagcauccaccucuacuucgacaaggccggccagaagaccuacgagcgccacucccugagccacuucgugaaccuggacaaccuccgggccaacaacacgaaggggucccugcccaucaacgugaucgucuucgacggcaagagcaagugcgaggaguccagcgccaaguccgccagcguguacuacucccagcugaugugccagcccauccuccugcuggaccaggcgcucgugagcgacgucggcgacagcgccgagguggccgugaagauguucgacgccuacgucaacaccuucuccagcaccuucaacgugccgauggagaagcugaagacccugguggccacggcggaggccgagcucgccaagaacgucucccuggacaacgugcugagcaccuucaucuccgccgcgcgccagggguucguggacagcgacgucgagaccaaggacgugguggagugccucaagcugucccaccagagcgacaucgaggucaccggcgacuccugcaacaacuacaugcugacguacaacaagguggagaacaugaccccccgggaccucggggccugcaucgacugcagcgcccgccacaucaacgcccagguggccaagucccacaacaucgcgcugaucuggaacgucaaggacuucaugagccuguccgagcagcuccggaagcagauccgcagcgccgccaagaagaacaaccugcccuucaagcugaccugcgccaccacgcgccagguggugaacgucgugaccaccaagaucgcccucaagggcgggugaggacuaguuauaagacugacuagcccgaugggccucccaacgggcccuccuccccuccuugcaccgagauuaauaaaaaaaaaaaaaaaaaaaaaaaaaaaaaaaaaaaaaaaaaaaaaaaaaaaaaaaaaaaaaaaaugcaucccccccccccccccccccccccccccccccaaaggcucuuuucagagccaccagaauu

SEQ ID NO: 21832 - RNA, 6058 nt, Artificial Sequence
  SARS-CoV-2__MT627757.1__non-structural protein 3 (NSP3) mRNA gc
aggagaaagcuuaccauggcccccaccaaggugaccuucggcgacgacacggucaucgaggugcagggguacaagagcgugaacaucaccuucgagcuggacgagcgcaucgacaagguccucaacgagaagugcuccgccuacaccguggagcugggcaccgaggugaacgaguucgcgugcgucguggccgacgccgugaucaagacgcugcagccggucagcgagcuccugaccccccuggggaucgaccucgacgagugguccauggccaccuacuaccuguucgacgagagcggcgaguucaagcuggccucccacauguacugcagcuucuacccccccgacgaggacgaggaggagggggacugcgaggaggaggaguucgagccguccacccaguacgaguacggcacggaggacgacuaccagggcaagccccucgaguucggggcgaccagcgccgcccugcagcccgaggaggagcaggaggaggacuggcuggacgacgacucccagcagaccguggugcagcaggacggcagcgaggacaaccagaccacgaccauccagaccaucgucgaggugcagccccagcucgagauggagcugaccccggugguccagacgaucgaggugaacuccuucagcggguaccugaagcucaccgacaacguguacaucaagaacgccgacaucgucgaggaggcgaagaaggugaagcccaccguggucgugaacgccgccaacguguaccugaagcacggcgggggcgucgccggcgcccugaacaaggcgaccaacaacgccaugcagguggaguccgacgacuacaucgccacgaacgggccccucaaggucggcgggagcugcgugcuguccggccacaaccuggccaagcacugccuccacguggucggccccaacgugaacaagggggaggacauccagcugcugaagagcgccuacgagaacuucaaccagcacgaggugcuccuggcgccgcugcucuccgccggcaucuucggggccgaccccauccacagccugcgggucugcguggacaccgugcgcaccaacgucuaccuggccguguucgacaagaaccucuacgacaagcugguguccagcuuccuggagaugaagagcgagaagcaggucgagcagaagaucgccgagauccccaaggaggaggugaagcccuucaucaccgaguccaagccgagcguggagcagcggaagcaggacgacaagaagaucaaggcgugcgucgaggaggugacgaccacccucgaggagaccaaguuccugacggagaaccugcuccuguacaucgacaucaacggcaaccugcaccccgacuccgccacccucgugagcgacaucgacaucaccuuccugaagaaggacgcccccuacaucgucggggacguggugcaggagggcguccugaccgccguggugauccccacgaagaaggccggcgggaccaccgagaugcucgcgaaggcccugcgcaaggucccgaccgacaacuacaucacgaccuaccccggccaggggcugaacggcuacaccguggaggaggccaagaccgugcucaagaagugcaaguccgccuucuacauccugcccagcaucaucuccaacgagaagcaggagauccuggggaccgucagcuggaaccuccgggagaugcuggcgcacgccgaggagacgcgcaagcugaugcccgugugcguggagaccaaggccaucgucuccaccauccagcggaaguacaagggcaucaagauccaggagggcgugguggacuacggggcccgcuucuacuucuacaccagcaagacgaccgucgccucccugaucaacacccucaacgaccugaacgagacccuggugacgaugccgcucggcuacgugacccacgggcugaaccuggaggaggcggcccgguacaugcgcagccucaagguccccgccaccguguccgugagcucccccgacgccgucaccgccuacaacggcuaccugacgagcuccagcaagacccccgaggagcacuucaucgagaccaucucccuggcggggagcuacaaggacuggagcuacuccggccagagcacccagcucggcaucgaguuccugaagcggggggacaaguccguguacuacacgagcaacccgaccaccuuccaccuggacggcgaggugaucaccuucgacaaccucaagacgcugcugucccuccgcgagguccggaccaucaagguguucaccaccguggacaacaucaaccugcacacgcaggucguggacaugagcaugaccuacgggcagcaguucggccccaccuaccuggacggcgccgacgugaccaagaucaagccccacaacucccacgaggggaagacguucuacguccucccgaacgacgacacccugcgcguggaggccuucgaguacuaccacaccaccgaccccagcuuccugggccgguacauguccgcccucaaccacacgaagaaguggaaguacccccaggugaacgggcugaccagcaucaagugggccgacaacaacugcuaccuggcgaccgcccuccugacccugcagcagaucgagcucaaguucaaccccccggcccugcaggacgccuacuaccgcgcgcgggccggcgaggccgccaacuucugcgcccugauccucgcguacugcaacaagacggucggggagcugggcgacgugcgcgagaccauguccuaccuguuccagcacgccaaccucgacagcugcaagcggguccugaacguggugugcaagaccugcggccagcagcagaccacccugaagggggucgaggccgugauguacaugggcacgcucuccuacgagcaguucaagaagggggugcagauccccugcaccugcggcaagcaggccaccaaguaccugguccagcaggagagccccuucgugaugauguccgcccccccggcgcaguacgagcugaagcacgggaccuucacgugcgccagcgaguacaccggcaacuaccagugcggccacuacaagcacaucaccuccaaggagacccucuacugcaucgacggggcccugcugacgaagagcagcgaguacaagggccccaucaccgacguguucuacaaggagaacuccuacaccaccacgaucaagcccgucaccuacaagcucgacgggguggugugcaccgagaucgaccccaagcuggacaacuacuacaagaaggacaacagcuacuucaccgagcagccgaucgaccugguccccaaccagcccuaccccaacgccuccuucgacaacuucaaguucgugugcgacaacaucaaguucgccgacgaccucaaccagcugacgggcuacaagaagccggcgagccgcgagcugaaggugaccuucuuccccgaccucaacggggacgucguggccaucgacuacaagcacuacacccccuccuucaagaagggcgccaagcugcugcacaagcccaucguguggcacgucaacaacgccaccaacaaggcgacguacaagccgaacaccuggugcauccggugccucuggagcaccaagcccguggagaccuccaacagcuucgacgugcugaaguccgaggacgcccagggcauggacaaccuggccugcgaggaccucaagcccgucagcgaggaggugguggagaaccccacgauccagaaggacguccuggagugcaacgugaagaccaccgagguggucggggacaucauccugaagccggccaacaacucccucaagaucaccgaggaggugggccacacggaccugauggccgcguacguggacaacagcucccugaccaucaagaagcccaacgagcucagccgcguccuggggcugaagacccucgccacccacggccuggccgccgugaacuccgugcccugggacacgaucgccaacuacgcgaagccguuccugaacaaggucgugagcaccaccaccaacaucgugacgcgcugccucaaccgggucugcaccaacuacaugcccuacuucuucacccugcugcuccagcugugcaccuucacccgcuccacgaacagccggaucaaggccuccaugcccaccaccaucgccaagaacaccgugaagagcguggggaaguucugccuggaggccagcuucaacuaccucaagucccccaacuucagcaagcugaucaacaucaucaucugguuccugcuccuguccgucugccugggcagccucaucuacuccacggccgcgcugggcgugcugaugagcaaccucgggaugccguccuacugcaccggcuaccgcgagggguaccugaacagcaccaacgugaccaucgccacguacugcaccggcuccauccccugcagcgucugccuguccggccucgacagccuggacaccuaccccucccuggagaccauccagaucacgaucagcuccuucaagugggaccucaccgccuucgggcugguggccgagugguuccuggccuacauccucuucacccgguucuucuacgugcugggccuggcggccaucaugcagcucuucuucagcuacuucgccguccacuucaucuccaacagcuggcugauguggcugaucaucaaccuggugcagauggcccccaucuccgcgauggugcgcauguacaucuucuucgccagcuucuacuacgucuggaagagcuacgugcacguggucgacgggugcaacuccagcaccugcaugaugugcuacaagcggaaccgcgccacgcggguggagugcaccaccaucgucaacggcgugcgccgguccuucuacguguacgccaacgggggcaagggcuucugcaagcuccacaacuggaacugcgucaacugcgacaccuucugcgccgggagcacguucaucuccgacgagguggcgcgcgaccugagccugcaguucaagcggccgaucaaccccaccgaccaguccagcuacaucguggacuccgucaccgugaagaacggcagcauccaccucuacuucgacaaggccgggcagaagaccuacgagcgccacucccugagccacuucgugaaccuggacaaccuccgggccaacaacacgaagggcucccugcccaucaacgucaucguguucgacgggaagagcaagugcgaggaguccagcgccaaguccgccagcguguacuacucccagcugaugugccagcccauccuccugcuggaccaggcgcucgucagcgacgugggcgacagcgccgagguggccgucaagauguucgacgccuacgugaacaccuucuccagcaccuucaacgugccgauggagaagcugaagacccuggucgccacggcggaggccgagcucgccaagaacgugucccuggacaacgugcugagcaccuucaucuccgccgcgcgccagggcuucgucgacagcgacguggagaccaaggacguggucgagugccucaagcugucccaccagagcgacaucgaggugaccggggacuccugcaacaacuacaugcugacguacaacaagguggagaacaugaccccccgggaccucggcgccugcaucgacugcagcgcccgccacaucaacgcccaggucgccaagucccacaacaucgcgcugaucuggaacgugaaggacuucaugagccuguccgagcagcuccggaagcagauccgcagcgccgccaagaagaacaaccugcccuucaagcugaccugcgccaccacgcgccagguggucaacguggugaccaccaagaucgcccucaaggggggcugaggacuaguuauaagacugacuagcccgaugggccucccaacgggcccuccuccccuccuugcaccgagauuaauaaaaaaaaaaaaaaaaaaaaaaaaaaaaaaaaaaaaaaaaaaaaaaaaaaaaaaaaaaaaaaaaugcaucccccccccccccccccccccccccccccccaaaggcucuuuucagagccaccagaauu

SEQ ID NO: 21833 - RNA, 6058 nt, Artificial Sequence
  SARS-CoV-2__MT628061.1__non-structural protein 3 (NSP3) mRNA gc
aggagaaagcuuaccauggcccccaccaaggugaccuucggcgacgacacggucaucgaggugcagggguacaagagcgugaacaucaccuucgagcuggacgagcgcaucgacaagguccucaacgagaagugcuccgccuacaccguggagcugggcaccgaggugaacgaguucgcgugcgucguggccgacgccgugaucaagacgcugcagccggucagcgagcuccugaccccccuggggaucgaccucgacgagugguccauggccaccuacuaccuguucgacgagagcggcgaguucaagcuggccucccacauguacugcagcuucuacccccccgacgaggacgaggaggagggggacugcgaggaggaggaguucgagccguccacccaguacgaguacggcacggaggacgacuaccagggcaagccccucgaguucggggcgaccagcgccgcccugcagcccgaggaggagcaggaggaggacuggcuggacgacgacucccagcagaccgugggccagcaggacgggagcgaggacaaccagaccacgaccauccagaccaucguggagguccagccccagcucgagauggagcugaccccgguggugcagacgaucgaggucaacuccuucagcggcuaccugaagcucaccgacaacguguacaucaagaacgccgacaucguggaggaggcgaagaaggucaagcccaccgugguggucaacgccgccaacguguaccugaagcacgggggcggcguggccggggcccugaacaaggcgaccaacaacgccaugcaggucgaguccgacgacuacaucgccacgaacggcccccucaagguggggggcagcugcguccuguccggccacaaccuggccaagcacugccuccacgugguggggcccaacgucaacaagggcgaggacauccagcugcugaagagcgccuacgagaacuucaaccagcacgaggugcuccuggcgccgcugcucuccgccgggaucuucggcgccgaccccauccacagccugcgggugugcgucgacaccgugcgcaccaacguguaccuggccgucuucgacaagaaccucuacgacaagcugguguccagcuuccuggagaugaagagcgagaagcagguggagcagaagaucgccgagauccccaaggaggaggucaagcccuucaucaccgaguccaagccgagcguggagcagcggaagcaggacgacaagaagaucaaggcgugcguggaggaggucacgaccacccucgaggagaccaaguuccugacggagaaccugcuccuguacaucgacaucaacgggaaccugcaccccgacuccgccacccucgugagcgacaucgacaucaccuuccugaagaaggacgcccccuacaucgugggcgacgucgugcaggagggcgugcugaccgccgucgugauccccacgaagaaggccgggggcaccaccgagaugcucgcgaaggcccugcgcaaggugccgaccgacaacuacaucacgaccuaccccgggcagggccugaacggguacaccgucgaggaggccaagaccgugcucaagaagugcaaguccgccuucuacauccugcccagcaucaucuccaacgagaagcaggagauccugggcaccgugagcuggaaccuccgggagaugcuggcgcacgccgaggagacgcgcaagcugaugcccgucugcguggagaccaaggccaucguguccaccauccagcggaaguacaagggcaucaagauccaggagggggucguggacuacggcgcccgcuucuacuucuacaccagcaagacgaccguggccucccugaucaacacccucaacgaccugaacgagacccuggucacgaugccgcucggguacgugacccacggccugaaccuggaggaggcggcccgguacaugcgcagccucaaggugcccgccaccgucuccgugagcucccccgacgccgugaccgccuacaacggguaccugacgagcuccagcaagacccccgaggagcacuucaucgagaccaucucccuggcgggcagcuacaaggacuggagcuacuccggccagagcacccagcucgggaucgaguuccugaagcggggcgacaaguccgucuacuacacgagcaacccgaccaccuuccaccuggacggggaggugaucaccuucgacaaccucaagacgcugcugucccuccgcgaggugcggaccaucaaggucuucaccaccguggacaacaucaaccugcacacgcagguggucgacaugagcaugaccuacggccagcaguucggccccaccuaccuggacggggccgacgugaccaagaucaagccccacaacucccacgagggcaagacguucuacgugcucccgaacgacgacacccugcgcgucgaggccuucgaguacuaccacaccaccgaccccagcuuccuggggcgguacauguccgcccucaaccacacgaagaaguggaaguacccccaggugaacggccugaccagcaucaagugggccgacaacaacugcuaccuggcgaccgcccuccugacccugcagcagaucgagcucaaguucaaccccccggcccugcaggacgccuacuaccgcgcgcgggccggggaggccgccaacuucugcgcccugauccucgcguacugcaacaagacggugggcgagcugggcgacguccgcgagaccauguccuaccuguuccagcacgccaaccucgacagcugcaagcgggugcugaacgucgugugcaagaccugcgggcagcagcagaccacccugaagggcguggaggccgucauguacauggggacgcucuccuacgagcaguucaagaagggcgugcagauccccugcaccugcgggaagcaggccaccaaguaccuggugcagcaggagagccccuucgucaugauguccgcccccccggcgcaguacgagcugaagcacggcaccuucacgugcgccagcgaguacaccggcaacuaccagugcgggcacuacaagcacaucaccuccaaggagacccucuacugcaucgacggcgcccugcugacgaagagcagcgaguacaaggggcccaucaccgacguguucuacaaggagaacuccuacaccaccacgaucaagcccgugaccuacaagcucgacggcgucgugugcaccgagaucgaccccaagcuggacaacuacuacaagaaggacaacagcuacuucaccgagcagccgaucgaccuggugcccaaccagcccuaccccaacgccuccuucgacaacuucaaguucgucugcgacaacaucaaguucgccgacgaccucaaccagcugacgggguacaagaagccggcgagccgcgagcugaaggugaccuucuuccccgaccucaacggcgacguggucgccaucgacuacaagcacuacacccccuccuucaagaagggcgccaagcugcugcacaagcccaucguguggcacgugaacaacgccaccaacaaggcgacguacaagccgaacaccuggugcauccggugccucuggagcaccaagcccgucgagaccuccaacagcuucgacgugcugaaguccgaggacgcccaggggauggacaaccuggccugcgaggaccucaagcccgugagcgaggaggucguggagaaccccacgauccagaaggacgugcuggagugcaacgucaagaccaccgagguggugggcgacaucauccugaagccggccaacaacucccucaagaucaccgaggaggucgggcacacggaccugauggccgcguacguggacaacagcucccugaccaucaagaagcccaacgagcucagccgcgugcugggccugaagacccucgccacccacgggcuggccgccgucaacuccgugcccugggacacgaucgccaacuacgcgaagccguuccugaacaagguggucagcaccaccaccaacaucgugacgcgcugccucaaccgggugugcaccaacuacaugcccuacuucuucacccugcugcuccagcugugcaccuucacccgcuccacgaacagccggaucaaggccuccaugcccaccaccaucgccaagaacaccgucaagagcgugggcaaguucugccuggaggccagcuucaacuaccucaagucccccaacuucagcaagcugaucaacaucaucaucugguuccugcuccuguccgugugccugggcagccucaucuacuccacggccgcgcuggggguccugaugagcaaccucggcaugccguucuacugcaccggguaccgcgagggcuaccugaacuccaccaacgugaccaucgccacguacugcaccggcagcauccccugcuccgugugccugagcgggcucgacucccuggacaccuaccccagccuggagaccauccagaucacgaucuccagcuucaagugggaccucaccgccuucggccuggucgccgagugguuccuggccuacauccucuucacccgguucuucuacgugcuggggcuggcggccaucaugcagcucuucuucuccuacuucgccgugcacuucaucagcaacuccuggcugauguggcugaucaucaaccugguccagauggcccccaucagcgcgauggugcgcauguacaucuucuucgccuccuucuacuacguguggaagagcuacguccacgugguggacggcugcaacagcuccaccugcaugaugugcuacaagcggaaccgcgccacgcgggucgagugcaccaccaucgugaacgggguccgccggagcuucuacguguacgccaacggcggcaagggguucugcaagcuccacaacuggaacugcgugaacugcgacaccuucugcgccggcuccacguucaucagcgacgaggucgcgcgcgaccugucccugcaguucaagcggccgaucaaccccaccgaccagagcuccuacaucguggacagcgugaccgucaagaacggguccauccaccucuacuucgacaaggccggccagaagaccuacgagcgccacagccugucccacuucgugaaccuggacaaccuccgggccaacaacacgaaggggagccugcccaucaacgugaucgucuucgacggcaaguccaagugcgaggagagcuccgccaagagcgccuccguguacuacagccagcugaugugccagcccauccuccugcuggaccaggcgcucguguccgacgucggcgacagcgccgagguggccgugaagauguucgacgccuacgucaacaccuucagcuccaccuucaacgugccgauggagaagcugaagacccugguggccacggcggaggccgagcucgccaagaacgucagccuggacaacgugcuguccaccuucaucagcgccgcgcgccagggguucguggacuccgacgucgagaccaaggacgugguggagugccucaagcugagccaccaguccgacaucgaggucaccggcgacagcugcaacaacuacaugcugacguacaacaagguggagaacaugaccccccgggaccucggggccugcaucgacugcuccgcccgccacaucaacgcccagguggccaagagccacaacaucgcgcugaucuggaacgucaaggacuucaugucccugagcgagcagcuccggaagcagauccgcuccgccgccaagaagaacaaccugcccuucaagcugaccugcgccaccacgcgccagguggugaacgucgugaccaccaagaucgcccucaagggcgggugaggacuaguuauaagacugacuagcccgaugggccucccaacgggcccuccuccccuccuugcaccgagauuaauaaaaaaaaaaaaaaaaaaaaaaaaaaaaaaaaaaaaaaaaaaaaaaaaaaaaaaaaaaaaaaaaugcaucccccccccccccccccccccccccccccccaaaggcucuuuucagagccaccagaauu

SEQ ID NO: 21834 - RNA, 6058 nt, Artificial Sequence
  SARS-CoV-2__MT628098.1__non-structural protein 3 (NSP3) mRNA gc
aggagaaagcuuaccauggcccccaccaaggugaccuucggcgacgacacggucaucgaggugcagggguacaagagcgugaacaucaccuucgagcuggacgagcgcaucgacaagguccucaacgagaagugcuccgccuacaccguggagcugggcaccgaggugaacgaguucgcgugcgucguggccgacgccgugaucaagacgcugcagccggucagcgagcuccugaccccccuggggaucgaccucgacgagugguccauggccaccuacuaccuguucgacgagagcggcgaguucaagcuggccucccacauguacugcagcuucuacccccccgacgaggacgaggaggagggggacugcgaggaggaggaguucgagccguccacccaguacgaguacggcacggaggacgacuaccagggcaagccccucgaguucggggcgaccagcgccgcccugcagcccgaggaggagcaggaggaggacuggcuggacgacgacucccagcagaccgugggccagcaggacgggagcgaggacaaccagaccacgaccauccagaccaucguggagguccagccccagcucgagauggagcugaccccgguggugcagacgaucgaggucaacuccuucagcggcuaccugaagcucaccgacaacguguacaucaagaacgccgacaucguggaggaggcgaagaaggucaagcccaccgugguggucaacgccgccaacguguaccugaagcacgggggcggcguggccggggcccugaacaaggcgaccaacaacgccaugcaggucgaguccgacgacuacaucgccacgaacggcccccucaagguggggggcagcugcguccuguccggccacaaccuggccaagcacugccuccacgugguggggcccaacgucaacaagggcgaggacauccagcugcugaagagcgccuacgagaacuucaaccagcacgaggugcuccuggcgccgcugcucuccgccgggaucuucggcgccgaccccauccacagccugcgggugugcgucgacaccgugcgcaccaacguguaccuggccgucuucgacaagaaccucuacgacaagcugguguccagcuuccuggagaugaagagcgagaagcagguggagcagaagaucgccgagauccccaaggaggaggucaagcccuucaucaccgaguccaagccgagcguggagcagcggaagcaggacgacaagaagaucaaggcgugcguggaggaggucacgaccacccucgaggagaccaaguuccugacggagaaccugcuccuguacaucgacaucaacgggaaccugcaccccgacuccgccacccucgugagcgacaucgacaucaccuuccugaagaaggacgcccccuacaucgugggcgacgucgugcaggagggcgugcugaccgccgucgugauccccacgaagaaggccgggggcaccaccgagaugcucgcgaaggcccugcgcaaggugccgaccgacaacuacaucacgaccuaccccgggcagggccugaacggguacaccgucgaggaggccaagaccgugcucaagaagugcaaguccgccuucuacauccugcccagcaucaucuccaacgagaagcaggagauccugggcaccgugagcuggaaccuccgggagaugcuggcgcacgccgaggagacgcgcaagcugaugcccgucugcguggagaccaaggccaucguguccaccauccagcggaaguacaagggcaucaagauccaggagggggucguggacuacggcgcccgcuucuacuucuacaccagcaagacgaccguggccucccugaucaacacccucaacgaccugaacgagacccuggucacgaugccgcucggguacgugacccacggccugaaccuggaggaggcggcccgguacaugcgcagccucaaggugcccgccaccgucuccgugagcucccccgacgccgugaccgccuacaacggguaccugacgagcuccagcaagacccccgaggagcacuucaucgagaccaucucccuggcgggcagcuacaaggacuggagcuacuccggccagagcacccagcucgggaucgaguuccugaagcggggcgacaaguccgucuacuacacgagcaacccgaccaccuuccaccuggacggggaggugaucaccuucgacaaccucaagacgcugcugucccuccgcgaggugcggaccaucaaggucuucaccaccguggacaacaucaaccugcacacgcagguggucgacaugagcaugaccuacggccagcaguucggccccaccuaccuggacggggccgacgugaccaagaucaagccccacaacucccacgagggcaagacguucuacgugcucccgaacgacgacacccugcgcgucgaggccuucgaguacuaccacaccaccgaccccagcuuccuggggcgguacauguccgcccucaaccacacgaagaaguggaaguacccccaggugaacggccugaccagcaucaagugggccgacaacaacugcuaccuggcgaccgcccuccugacccugcagcagaucgagcucaaguucaaccccccggcccugcaggacgccuacuaccgcgcgcgggccggggaggccgccaacuucugcgcccugauccucgcguacugcaacaagacggugggcgagcugggcgacguccgcgagaccauguccuaccuguuccagcacgccaaccucgacagcugcaagcgggugcugaacgucgugugcaagaccugcgggcagcagcagaccacccugaagggcguggaggccgucauguacauggggacgcucuccuacgagcaguucaagaagggcgugcagauccccugcaccugcgggaagcaggccaccaaguaccuggugcagcaggagagccccuucgucaugauguccgcccccccggcgcaguacgagcugaagcacggcaccuucacgugcgccagcgaguacaccggcaacuaccagugcgggcacuacaagcacaucaccuccaaggagacccucuacugcaucgacggcgcccugcugacgaagagcagcgaguacaaggggcccaucaccgacguguucuacaaggagaacuccuacaccaccacgaucaagcccgugaccuacaagcucgacggcgucgugugcaccgagaucgaccccaagcuggacaacuacuacaagaaggacaacagcuacuucaccgagcagccgaucgaccuggugcccaaccagcccuaccccaacgccuccuucgacaacuucaaguucgucugcgacaacaucaaguucgccgacgaccucaaccagcugacgggguacaagaagccggcgagccgcgagcugaaggugaccuucuuccccgaccucaacggcgacguggucgccaucgacuacaagcacuacacccccuccuucaagaagggcgccaagcugcugcacaagcccaucguguggcacgugaacaacgccaccaacaaggcgacguacaagccgaacaccuggugcauccggugccucuggagcaccaagcccgucgagaccuccaacagcuucgacgugcugaaguccgaggacgcccaggggauggacaaccuggccugcgaggaccucaagcccgugagcgaggaggucguggagaaccccacgauccagaaggacgugcuggagugcaacgucaagaccaccgagguggugggcgacaucauccugaagccggccaacaacucccucaagaucaccgaggaggucgggcacacggaccugauggccgcguacguggacaacagcucccugaccaucaagaagcccaacgagcucagccgcgugcugggccugaagacccucgccacccacgggcuggccgccgucaacuccgugcccugggacacgaucgccaacuacgcgaagccguuccugaacaagguggucagcaccaccaccaacaucgugacgcgcugccucaaccgggugugcaccaacuacaugcccuacuucuucacccugcugcuccagcugugcaccuucacccgcuccacgaacagccggaucaaggccuccaugcccaccaccaucgccaagaacaccgucaagagcgugggcaaguucugccuggaggccagcuucaacuaccucaagucccccaacuucagcaagcugaucaacaucaucaucugguuccugcuccuguccgugugccugggcagccucaucuacuccacggccgcgcuggggguccugaugagcaaccucggcaugccguccuacugcaccggguaccgcgagggcuaccugaacagcaccaacgugaccaucgccacguacugcaccggcuccauccccugcagcgugugccuguccgggcucgacagccuggacaccuaccccucccuggagaccauccagaucacgaucagcuccuucaagugggaccucaccgccuucggccuggucgccgagugguuccuggccuacauccucuucacccgguucuucuacgugcuggggcuggcggccaucaugcagcucuucuucagcuacuucgccgugcacuucaucuccaacagcuggcugauguggcugaucaucaaccugguccagauggcccccaucuccgcgauggugcgcauguacaucuucuucgccagcuucuacuacguguggaagagcuacguccacgugguggacggcugcaacuccagcaccugcaugaugugcuacaagcggaaccgcgccacgcgggucgagugcaccaccaucgugaacgggguccgccgguccuucuacguguacgccaacggcggcaagggguucugcaagcuccacaacuggaacugcgugaacugcgacaccuucugcgccggcagcacguucaucuccgacgaggucgcgcgcgaccugagccugcaguucaagcggccgaucaaccccaccgaccaguccagcuacaucguggacuccgugaccgucaagaacgggagcauccaccucuacuucgacaaggccggccagaagaccuacgagcgccacucccugagccacuucgugaaccuggacaaccuccgggccaacaacacgaaggggucccugcccaucaacgugaucgucuucgacggcaagagcaagugcgaggaguccagcgccaaguccgccagcguguacuacucccagcugaugugccagcccauccuccugcuggaccaggcgcucgugagcgacgucggcgacagcgccgagguggccgugaagauguucgacgccuacgucaacaccuucuccagcaccuucaacgugccgauggagaagcugaagacccugguggccacggcggaggccgagcucgccaagaacgucucccuggacaacgugcugagcaccuucaucuccgccgcgcgccagggguucguggacagcgacgucgagaccaaggacgugguggagugccucaagcugucccaccagagcgacaucgaggucaccggcgacuccugcaacaacuacaugcugacguacaacaagguggagaacaugaccccccgggaccucggggccugcaucgacugcagcgcccgccacaucaacgcccagguggccaagucccacaacaucgcgcugaucuggaacgucaaggacuucaugagccuguccgagcagcuccggaagcagauccgcagcgccgccaagaagaacaaccugcccuucaagcugaccugcgccaccacgcgccagguggugaacgucaucaccaccaagaucgcccucaagggcgggugaggacuaguuauaagacugacuagcccgaugggccucccaacgggcccuccuccccuccuugcaccgagauuaauaaaaaaaaaaaaaaaaaaaaaaaaaaaaaaaaaaaaaaaaaaaaaaaaaaaaaaaaaaaaaaaaugcaucccccccccccccccccccccccccccccccaaaggcucuuuucagagccaccagaauu

SEQ ID NO: 21835 - RNA, 6058 nt, Artificial Sequence
  SARS-CoV-2__MT628104.1__non-structural protein 3 (NSP3) mRNA gc
aggagaaagcuuaccauggcccccaccaaggugaccuucggcgacgacacggucaucgaggugcagggguacaagagcgugaacaucaccuucgagcuggacgagcgcaucgacaagguccucaacgagaagugcuccgccuacaccguggagcugggcaccgaggugaacgaguucgcgugcgucguggccgacgccgugaucaagacgcugcagccggucagcgagcuccugaccccccuggggaucgaccucgacgagugguccauggccaccuacuaccuguucgacgagagcggcgaguucaagcuggccucccacauguacugcagcuucuacccccccgacgaggacgaggaggagggggacugcgaggaggaggaguucgagccguccacccaguacgaguacggcacggaggacgacuaccagggcaagccccucgaguucggggcgaccagcgccgcccugcagcccgaggaggagcaggaggaggacuggcuggacgacgacucccagcagaccgugggccagcaggacgggagcgaggacaaccagaccacgaccauccagaccaucguggagguccagccccagcucgagauggagcugaccccgguggugcagacgaucgaggucaacuccuucagcggcuaccugaagcucaccgacaacguguacaucaagaacgccgacaucguggaggaggcgaagaaggucaagcccaccgugguggucaacgccgccaacguguaccugaagcacgggggcggcguggccggggcccugaacaaggcgaccaacaacgccaugcaggucgaguccgacgacuacaucgccacgaacggcccccucaagguggggggcagcugcguccuguccggccacaaccuggccaagcacugccuccacgugguggggcccaacgucaacaagggcgaggacauccagcugcugaagagcgccuacgagaacuucaaccagcacgaggugcuccuggcgccgcugcucuccgccgggaucuucggcgccgaccccauccacagccugcgggugugcgucgacaccgugcgcaccaacguguaccuggccgucuucgacaagaaccucuacgacaagcugguguccagcuuccuggagaugaagagcgagaagcagguggagcagaagaucgccgagauccccaaggaggaggucaagcccuucaucaccgaguccaagccgagcguggagcagcggaagcaggacgacaagaagaucaaggcgugcguggaggaggucacgaccacccucgaggagaccaaguuccugacggagaaccugcuccuguacaucgacaucaacgggaaccugcaccccgacuccgccacccucgugagcgacaucgacaucaccuuccugaagaaggacgcccccuacaucgugggcgacgucgugcaggagggcgugcugaccgccgucgugauccccacgaagaaggccgggggcaccaccgagaugcucgcgaaggcccugcgcaaggugccgaccgacaacuacaucacgaccuaccccgggcagggccugaacggguacaccgucgaggaggccaagaccgugcucaagaagugcaaguccgccuucuacauccugcccagcaucaucuccaacgagaagcaggagauccugggcaccgugagcuggaaccuccgggagaugcuggcgcacgccgaggagacgcgcaagcugaugcccgucugcguggagaccaaggccaucguguccaccauccagcggaaguacaagggcaucaagauccaggagggggucguggacuacggcgcccgcuucuacuucuacaccagcaagacgaccguggccucccugaucaacacccucaacgaccugaacgagacccuggucacgaugccgcucggguacgugacccacggccugaaccuggaggaggcggcccgguacaugcgcagccucaaggugcccgccaccgucuccgugagcucccccgacgccgugaccgccuacaacggguaccugacgagcuccagcaagacccccgaggagcacuucaucgagaucaucucccuggcgggcagcuacaaggacuggagcuacuccggccagagcacccagcucgggaucgaguuccugaagcggggcgacaaguccgucuacuacaccagcaacccgacgaccuuccaccuggacggggaggugaucaccuucgacaaccucaagacccugcugucccuccgcgaggugcggacgaucaaggucuucaccaccguggacaacaucaaccugcacacccagguggucgacaugagcaugacguacggccagcaguucggccccaccuaccuggacggggccgacgugaccaagaucaagccccacaacucccacgagggcaagaccuucuacgugcucccgaacgacgacacgcugcgcgucgaggccuucgaguacuaccacaccaccgaccccagcuuccuggggcgguacauguccgcccucaaccacaccaagaaguggaaguacccccaggugaacggccugacgagcaucaagugggccgacaacaacugcuaccuggcgaccgcccuccugacccugcagcagaucgagcucaaguucaaccccccggcccugcaggacgccuacuaccgcgcgcgggccggggaggccgccaacuucugcgcccugauccucgcguacugcaacaagaccgugggcgagcugggcgacguccgcgagacgauguccuaccuguuccagcacgccaaccucgacagcugcaagcgggugcugaacgucgugugcaagaccugcgggcagcagcagaccacccugaagggcguggaggccgucauguacauggggacccucuccuacgagcaguucaagaagggcgugcagauccccugcacgugcgggaagcaggccaccaaguaccuggugcagcaggagagccccuucgucaugauguccgcccccccggcgcaguacgagcugaagcacggcaccuucaccugcgccagcgaguacacgggcaacuaccagugcgggcacuacaagcacaucaccuccaaggagacccucuacugcaucgacggcgcccugcugaccaagagcagcgaguacaaggggcccaucacggacguguucuacaaggagaacuccuacaccaccaccaucaagcccgugacguacaagcucgacggcgucgugugcaccgagaucgaccccaagcuggacaacuacuacaagaaggacaacagcuacuucaccgagcagccgaucgaccuggugcccaaccagcccuaccccaacgccuccuucgacaacuucaaguucgucugcgacaacaucaaguucgccgacgaccucaaccagcugaccggguacaagaagccggcgagccgcgagcugaaggugacguucuuccccgaccucaacggcgacguggucgccaucgacuacaagcacuacacccccuccuucaagaagggcgccaagcugcugcacaagcccaucguguggcacgugaacaacgccaccaacaaggcgaccuacaagccgaacacguggugcauccggugccucuggagcaccaagcccgucgagaccuccaacagcuucgacgugcugaaguccgaggacgcccaggggaugggcaaccuggccugcgaggaccucaagcccgugagcgaggaggucguggagaaccccaccauccagaaggacgugcuggagugcaacgucaagacgaccgagguggugggggacaucauccugaagccggccaacaacucccucaagaucaccgaggaggucggccacaccgaccugauggccgcguacguggacaacagcucccugacgaucaagaagcccaacgagcucagccgcgugcuggggcugaagacccucgccauccacggccuggccgccgucaacuccgugcccugggacaccaucgccaacuacgcgaagccguuccugaacaagguggucagcaccacgaccaacaucgugacccgcugccucaaccgggugugcaccaacuacaugcccuacuucuucacgcugcugcuccagcugugcaccuucacccgcuccaccaacagccggaucaaggccuccaugcccaccacgaucgccaagaacaccgucaagagcgugggcaaguucugccuggaggccagcuucaacuaccucaagucccccaacuucagcaagcugaucaacaucaucaucugguuccugcuccuguccgugugccuggggagccucaucuacuccaccgccgcgcugggcguccugaugagcaaccucgggaugccguccuacugcaccggcuaccgcgagggcuaccugaacagcacgaacgugaccaucgccaccuacugcaccggguccauccccugcagcgugugccuguccggccucgacagccuggacacguaccccucccuggagaccauccagaucaccaucagcuccuucaagugggaccucaccgccuucgggcuggucgccgagugguuccuggccuacauccucuucacgcgguucuucuacgugcugggccuggcggccaucaugcagcucuucuucagcuacuucgccgugcacuucaucuccaacagcuggcugauguggcugaucaucaaccugguccagauggcccccaucuccgcgauggugcgcauguacaucuucuucgccagcuucuacuacguguggaagagcuacguccacgugguggacgggugcaacuccagcaccugcaugaugugcuacaagcggaaccgcgccacccgggucgagugcaccacgaucgugaacggcguccgccgguccuucuacguguacgccaacggcgggaagggcuucugcaagcuccacaacuggaacugcgugaacugcgacaccuucugcgccgggagcaccuucaucuccgacgaggucgcgcgcgaccugagccugcaguucaagcggccgaucaaccccaccgaccaguccagcuacaucguggacuccgugacggucaagaacggcagcauccaccucuacuucgacaaggccgggcagaagaccuacgagcgccacucccugagccacuucgugaaccuggacaaccuccgggccaacaacaccaagggcucccugcccaucaacgugaucgucuucgacggcaagagcaagugcgaggaguccagcgccaaguccgccagcguguacuacucccagcugaugugccagcccauccuccugcuggaccaggcgcucgugagcgacgucggggacagcgccgagguggccgugaagauguucgacgccuacgucaacaccuucuccagcacguucaacgugccgauggagaagcugaagacccugguggccaccgcggaggccgagcucgccaagaacgucucccuggacaacgugcugagcaccuucaucuccgccgcgcgccagggcuucguggacagcgacgucgagacgaaggacgugguggagugccucaagcugucccaccagagcgacaucgaggucaccggggacuccugcaacaacuacaugcugaccuacaacaagguggagaacaugaccccccgggaccucggcgccugcaucgacugcagcgcccgccacaucaacgcccagguggccaagucccacaacaucgcgcugaucuggaacgucaaggacuucaugagccuguccgagcagcuccggaagcagauccgcagcgccgccaagaagaacaaccugcccuucaagcugacgugcgccaccacccgccagguggugaacgucgugaccacgaagaucgcccucaaggggggcugaggacuaguuauaagacugacuagcccgaugggccucccaacgggcccuccuccccuccuugcaccgagauuaauaaaaaaaaaaaaaaaaaaaaaaaaaaaaaaaaaaaaaaaaaaaaaaaaaaaaaaaaaaaaaaaaugcaucccccccccccccccccccccccccccccccaaaggcucuuuucagagccaccagaauu

SEQ ID NO: 21836 - RNA, 6058 nt, Artificial Sequence
  SARS-CoV-2__MT628127.1__non-structural protein 3 (NSP3) mRNA gc
aggagaaagcuuaccauggcccccaccaaggugaccuucggcgacgacacggucaucgaggugcagggguacaagagcgugaacaucaccuucgagcuggacgagcgcaucgacaagguccucaacgagaagugcuccgccuacaccguggagcugggcaccgaggugaacgaguucgcgugcgucguggccgacgccgugaucaagacgcugcagccggucagcgagcuccugaccccccuggggaucgaccucgacgagugguccauggccaccuacuaccuguucgacgagagcggcgaguucaagcuggccucccacauguacugcagcuucuacccccccgacgaggacgaggaggagggggacugcgaggaggaggaguucgagccguccacccaguacgaguacggcacggaggacgacuaccagggcaagccccucgaguucggggcgaccagcgccgcccugcagcccgaggaggagcaggaggaggacuggcuggacgacgacucccagcagaccgugggccagcaggacgggagcgaggacaaccagaccacgaccauccagaccaucguggagguccagccccagcucgagauggagcugaccccgguggugcagacgaucgaggucaacuccuucagcggcuaccugaagcucaccgacaacguguacaucaagaacgccgacaucguggaggaggcgaagaaggucaagcccaccgugguggucaacgccgccaacguguaccugaagcacgggggcggcguggccggggcccugaacaaggcgaccaacaacgccaugcaggucgaguccgacgacuacaucgccacgaacggcccccucaagguggggggcagcugcguccuguccggccacaaccuggccaagcacugccuccacgugguggggcccaacgucaacaagggcgaggacauccagcugcugaagagcgccuacgagaacuucaaccagcacgaggugcuccuggcgccgcugcucuccgccgggaucuucggcgccgaccccauccacagccugcgggugugcgucgacaccgugcgcaccaacguguaccuggccgucuucgacaagaaccucuacgacaagcugguguccagcuuccuggagaugaagagcgagaagcagguggagcagaagaucgccgagauccccaaggaggaggucaagcccuucaucaccgaguccaagccgagcguggagcagcggaagcaggacgacaagaagaucaaggcgugcguggaggaggucacgaccacccucgaggagaccaaguuccugacggagaaccugcuccuguacaucgacaucaacgggaaccugcaccccgacuccgccacccucgugagcgacaucgacaucaccuuccugaagaaggacgcccccuacaucgugggcgacgucgugcaggagggcgugcugaccgccgucgugauccccacgaagaaggccgggggcaccaccgagaugcucgcgaaggcccugcgcaaggugccgaccgacaacuacaucacgaccuaccccgggcagggccugaacggguacaccgucgaggaggccaagaccgugcucaagaagugcaaguccgccuucuacauccugcccagcaucaucuccaacgagaagcaggagauccugggcaccgugagcuggaaccuccgggagaugcuggcgcacgccgaggagacgcgcaagcugaugcccgucugcguggagaccaaggccaucguguccaccauccagcggaaguacaagggcaucaagauccaggagggggucguggacuacggcgcccgcuucuacuucuacaccagcaagacgaccguggccucccugaucaacacccucaacgaccugaacgagacccuggucacgaugccgcucggguacgugacccacggccugaaccuggaggaggcggcccgguacaugcgcagccucaaggugcccgccaccgucuccgugagcucccccgacgccgugaccgccuacaacggguaccugacgagcuccagcaagacccccgaggagcacuucaucgagaccaucucccuggcgggcagcuacaaggacuggagcuacuccggccagagcacccagcucgggaucgaguuccugaagcggggcgacaaguccgucuacuacacgagcaacccgaccaccuuccaccuggacggggaggugaucaccuucgacaaccucaagacgcugcugucccuccgcgaggugcggaccaucaaggucuucaccaccguggacaacaucaaccugcacacgcagguggucgacaugagcaugaccuacggccagcaguucggccccaccuaccuggacggggccgacgugaccaagaucaagccccacaacucccacgagggcaagacguucuacgugcucccgaacgacgacacccugcgcgucgaggccuucgaguacuaccacaccaccgaccccagcuuccuggggcgguacauguccgcccucaaccacacgaagaaguggaaguacccccaggugaacggccugaccagcaucaagugggccgacaacaacugcuaccuggcgaccgcccuccugacccugcagcagaucgagcucaaguucaaccccccggcccugcaggacgccuacuaccgcgcgcgggccggggaggccgccaacuucugcgcccugauccucgcguacugcaacaagacggugggcgagcugggcgacguccgcgagaccauguccuaccuguuccagcacgccaaccucgacagcugcaagcgggugcugaacgucgugugcaagaccugcgggcagcagcagaccacccugaagggcguggaggccgucauguacauggggacgcucuccuacgagcaguucaagaagggcgugcagauccccugcaccugcgggaagcaggccaccaaguaccuggugcagcaggagagccccuucgucaugauguccgcccccccggcgcaguacgagcugaagcacggcaccuucacgugcgccagcgaguacaccggcaacuaccagugcgggcacuacaagcacaucaccuccaaggagacccucuacugcaucgacggcgcccugcugacgaagagcagcgaguacaaggggcccaucaccgacguguucuacaaggagaacuccuacaccaccacgaucaagcccgugaccuacaagcucgacggcgucgugugcaccgagaucgaccccaagcuggacaacuacuacaagaaggacaacagcuacuucaccgagcagccgaucgaccuggugcccaaccagcccuaccccaacgccuccuucgacaacuucaaguucgucugcgacaacaucaaguucgccgacgaccucaaccagcugacgggguacaagaagccggcgagccgcgagcugaaggugaccuucuuccccgaccucaacggcgacguggucgccaucgacuacaagcacuacacccccuccuucaagaagggcgccaagcugcugcacaagcccaucguguggcacgugaacaacgccaccaacaaggcgacguacaagccgaacaccuggugcauccggugccucuggagcaccaagcccgucgagaccuccaacagcuucgacgugcugaaguccgaggacgcccaggggauggacaaccuggccugcgaggaccuccagcccgugagcgaggaggucguggagaaccccacgauccagaaggacgugcuggagugcaacgucaagaccaccgagguggugggcgacaucauccugaagccggccaacaacucccucaagaucaccgaggaggucgggcacacggaccugauggccgcguacguggacaacagcucccugaccaucaagaagcccaacgagcucagccgcgugcugggccugaagacccucgccacccacgggcuggccgccgucaacuccgugcccugggacacgaucgccaacuacgcgaagccguuccugaacaagguggucagcaccaccaccaacaucgugacgcgcugccucaaccgggugugcaccaacuacaugcccuacuucuucacccugcugcuccagcugugcaccuucacccgcuccacgaacagccggaucaaggccuccaugcccaccaccaucgccaagaacaccgucaagagcgugggcaaguucugccuggaggccagcuucaacuaccucaagucccccaacuucagcaagcugaucaacaucaucaucugguuccugcuccuguccgugugccugggcagccucaucuacuccacggccgcgcuggggguccugaugagcaaccucggcaugccguccuacugcaccggguaccgcgagggcuaccugaacagcaccaacgugaccaucgccacguacugcaccggcuccauccccugcagcgugugccuguccgggcucgacagccuggacaccuaccccucccuggagaccauccagaucacgaucagcuccuucaagugggaccucaccgccuucggccuggucgccgagugguuccuggccuacauccucuucacccgguucuucuacgugcuggggcuggcggccaucaugcagcucuucuucagcuacuucgccgugcacuucaucuccaacagcuggcugauguggcugaucaucaaccugguccagauggcccccaucuccgcgauggugcgcauguacaucuucuucgccagcuucuacuacguguggaagagcuacguccacgugguggacggcugcaacuccagcaccugcaugaugugcuacaagcggaaccgcgccacgcgggucgagugcaccaccaucgugaacgggguccgccgguccuucuacguguacgccaacggcggcaagggguucugcaagcuccacaacuggaacugcgugaacugcgacaccuucugcgccggcagcacguucaucuccgacgaggucgcgcgcgaccugagccugcaguucaagcggccgaucaaccccaccgaccaguccagcuacaucguggacuccgugaccgucaagaacgggagcauccaccucuacuucgacaaggccggccagaagaccuacgagcgccacucccugagccacuucgugaaccuggacaaccuccgggccaacaacacgaaggggucccugcccaucaacgugaucgucuucgacggcaagagcaagugcgaggaguccagcgccaaguccgccagcguguacuacucccagcugaugugccagcccauccuccugcuggaccaggcgcucgugagcgacgucggcgacagcgccgagguggccgugaagauguucgacgccuacgucaacaccuucuccagcaccuucaacgugccgauggagaagcugaagacccugguggccacggcggaggccgagcucgccaagaacgucucccuggacaacgugcugagcaccuucaucuccgccgcgcgccagggguucguggacagcgacgucgagaccaaggacgugguggagugccucaagcugucccaccagagcgacaucgaggucaccggcgacuccugcaacaacuacaugcugacguacaacaagguggagaacaugaccccccgggaccucggggccugcaucgacugcagcgcccgccacaucaacgcccagguggccaagucccacaacaucgcgcugaucuggaacgucaaggacuucaugagccuguccgagcagcuccggaagcagauccgcagcgccgccaagaagaacaaccugcccuucaagcugaccugcgccaccacgcgccagguggugaacgucgugaccaccaagaucgcccucaagggcgggugaggacuaguuauaagacugacuagcccgaugggccucccaacgggcccuccuccccuccuugcaccgagauuaauaaaaaaaaaaaaaaaaaaaaaaaaaaaaaaaaaaaaaaaaaaaaaaaaaaaaaaaaaaaaaaaaugcaucccccccccccccccccccccccccccccccaaaggcucuuuucagagccaccagaauu

SEQ ID NO: 21837 - RNA, 6058 nt, Artificial Sequence
  SARS-CoV-2__MT628152.1__non-structural protein 3 (NSP3) mRNA gc
aggagaaagcuuaccauggcccccaccaaggugaccuucggcgacgacacggucaucgaggugcagggguacaagagcgugaacaucaccuucgagcuggacgagcgcaucgacaagguccucaacgagaagugcuccgccuacaccguggagcugggcaccgaggugaacgaguucgcgugcgucguggccgacgccgugaucaagacgcugcagccggucagcgagcuccugaccccccuggggaucgaccucgacgagugguccauggccaccuacuaccuguucgacgagagcggcgaguucaagcuggccucccacauguacugcagcuucuacccccccgacgaggacgaggaggagggggacugcgaggaggaggaguucgagccguccacccaguacgaguacggcacggaggacgacuaccagggcaagccccucgaguucggggcgaccagcgccgcccugcagcccgaggaggagcaggaggaggacuggcuggacgacgacucccagcagaccgugggccagcaggacgggagcgaggacaaccagaccacgaccauccagaccaucguggagguccagccccagcucgagauggagcugaccccgguggugcagacgaucgaggucaacuccuucagcggcuaccugaagcucaccgacaacguguacaucaagaacgccgacaucguggaggaggcgaagaaggucaagcccaccgugguggucaacgccgccaacguguaccugaagcacgggggcggcguggccggggcccugaacaaggcgaccaacaacgccaugcaggucgaguccgacgacuacaucgccacgaacggcccccucaagguggggggcagcugcguccuguccggccacaaccuggccaagcacugccuccacgugguggggcccaacgucaacaagggcgaggacauccagcugcugaagagcgccuacgagaacuucaaccagcacgaggugcuccuggcgccgcugcucuccgccgggaucuucggcgccgaccccauccacagccugcgggugugcgucgacaccgugcgcaccaacguguaccuggccgucuucgacaagaaccucuacgacaagcugguguccagcuuccuggagaugaagagcgagaagcagguggagcagaagaucgccgagauccccaaggaggaggucaagcccuucaucaccgaguccaagccgagcguggagcagcggaagcaggacgacaagaagaucaaggcgugcguggaggaggucacgaccacccucgaggagaccaaguuccugacggagaaccugcuccuguacaucgacaucaacgggaaccugcaccccgacuccgccacccucgugagcgacaucgacaucaccuuccugaagaaggacgcccccuacaucgugggcgacgucgugcaggagggcgugcugaccgccgucgugauccccacgaagaaggccgggggcaccaccgagaugcucgcgaaggcccugcgcaaggugccgaccgacaacuacaucacgaccuaccccgggcagggccugaacggguacaccgucgaggaggccaagaccgugcucaagaagugcaaguccgccuucuacauccugcccagcaucaucuccaacgagaagcaggagauccugggcaccgugagcuggaaccuccgggagaugcuggcgcacgccgaggagacgcgcaagcugaugcccgucugcguggagaccaaggccaucguguccaccauccagcggaaguacaagggcaucaagauccaggagggggucguggacuacggcgcccgcuucuacuucuacaccagcaagacgaccguggccucccugaucaacacccucaacgaccugaacgagacccuggucacgaugccgcucggguacgugacccacggccugaaccuggaggaggcggcccgguacaugcgcagccucaaggugcccgccaccgucuccgugagcucccccgacgccgugaccgccuacaacggguaccugacgagcuccagcaagacccccgaggagcacuucaucgagaccaucucccuggcgggcagcuacaaggacuggagcuacuccggccagagcacccagcucgggaucgaguuccugaagcggggcgacaaguccgucuacuacacgagcaacccgaccaccuuccaccuggacggggaggugaucaccuucgacaaccucaagacgcugcugucccuccgcgaggugcggaccaucaaggucuucaccaccguggacaacaucaaccugcacacgcagguggucgacaugagcaugaccuacggccagcaguucggccccaccuaccuggacggggccgacgugaccaagaucaagccccacaacucccacgagggcaagacguucuacgugcucccgaacgacgacacccugcgcgucgaggccuucgaguacuaccacaccaccgaccccagcuuccuggggcgguacauguccgcccucaaccacacgaagaaguggaaguacccccaggugaacggccugaccagcaucaagugggccgacaacaacugcuaccuggcgaccgcccuccugacccugcagcagaucgagcucaaguucaaccccccggcccugcaggacgccuacuaccgcgcgcgggccggggaggccgccaacuucugcgcccugauccucgcguacugcaacaagacggugggcgagcugggcgacguccgcgagaccauguccuaccuguuccagcacgccaaccucgacagcugcaagcgggugcugaacgucgugugcaagaccugcgggcagcagcagaccacccugaagggcguggaggccgucauguacauggggacgcucuccuacgagcaguucaagaagggcgugcagauccccugcaccugcgggaagcaggccaccaaguaccuggugcagcaggagagccccuucgucaugauguccgcccccccggcgcaguacgagcugaagcacggcaccuucacgugcgccagcgaguacaccggcaacuaccagugcgggcacuacaagcacaucaccuccaaggagacccucuacugcaucgacggcgcccugcugacgaagagcagcgaguacaaggggcccaucaccgacguguucuacaaggagaacuccuacaccaccacgaucaagcccgugaccuacaagcucgacggcgucgugugcaccgagaucgaccccaagcuggacaacuacuacaagaaggacaacagcuacuucaccgagcagccgaucgaccugguguccaaccagcccuaccccaacgccagcuucgacaacuucaaguucgucugcgacaacaucaaguucgccgacgaccucaaccagcugacgggguacaagaagcccgcgucccgcgagcugaaggugaccuucuucccggaccucaacggcgacguggucgccaucgacuacaagcacuacacccccagcuucaagaagggcgccaagcugcugcacaagcccaucguguggcacgugaacaacgccaccaacaaggcgacguacaagcccaacaccuggugcauccggugccucugguccaccaagccggucgagaccagcaacuccuucgacgugcugaagagcgaggacgcccaggggauggacaaccuggccugcgaggaccucaagcccguguccgaggaggucguggagaaccccacgauccagaaggacgugcuggagugcaacgucaagaccaccgagguggugggcgacaucauccugaagcccgccaacaacagccucaagaucaccgaggaggucgggcacacggaccugauggccgcguacguggacaacuccagccugaccaucaagaagccgaacgagcucucccgcgugcugggccugaagacccucgccacccacgggcuggccgccgucaacagcgugcccugggacacgaucgccaacuacgcgaagcccuuccugaacaagguggucuccaccaccaccaacaucgugacgcgcugccucaaccgggugugcaccaacuacaugccguacuucuucacccugcugcuccagcugugcaccuucacccgcagcacgaacucccggaucaaggccagcaugcccaccaccaucgccaagaacaccgucaagagcgugggcaaguucugccuggaggccuccuucaacuaccucaagagccccaacuucuccaagcugaucaacaucaucaucugguuccugcuccugagcgugugccugggcucccucaucuacagcacggccgcgcuggggguccugauguccaaccucggcaugcccagcuacugcaccggguaccgcgagggcuaccugaacuccaccaacgugaccaucgccacguacugcaccggcagcaucccgugcuccgugugccugagcgggcucgacucccuggacaccuaccccagccuggagaccauccagaucacgaucuccagcuucaagugggaccucaccgccuucggccuggucgccgagugguuccuggccuacauccucuucacccgguucuucuacgugcuggggcuggcggccaucaugcagcucuucuucuccuacuucgccgugcacuucaucagcaacuccuggcugauguggcugaucaucaaccugguccagauggcccccaucagcgcgauggugcgcauguacaucuucuucgccagcuucuacuacguguggaaguccuacguccacgugguggacggcugcaacagcuccaccugcaugaugugcuacaagcggaaccgcgccacgcgggucgagugcaccaccaucgugaacgggguccgccggagcuucuacguguacgccaacggcggcaagggguucugcaagcuccacaacuggaacugcgugaacugcgacaccuucugcgccggcuccacguucaucagcgacgaggucgcgcgcgaccugucccugcaguucaagcggcccaucaacccgaccgaccagagcuccuacaucguggacagcgugaccgucaagaacggguccauccaccucuacuucgacaaggccggccagaagaccuacgagcgccacagccugucccacuucgugaaccuggacaaccuccgggccaacaacacgaaggggagccugcccaucaacgugaucgucuucgacggcaaguccaagugcgaggagagcuccgccaagagcgccuccguguacuacagccagcugaugugccagcccauccuccugcuggaccaggcgcucgugagcgacgucggcgacuccgccgagguggccgugaagauguucgacgccuacgucaacaccuucagcuccaccuucaacgugcccauggagaagcugaagacccugguggccacggcggaggccgagcucgccaagaacgucagccuggacaacgugcuguccaccuucaucagcgccgcgcgccagggguucguggacuccgacgucgagaccaaggacgugguggagugccucaagcugagccaccaguccgacaucgaggucaccggcgacagcugcaacaacuacaugcugacguacaacaagguggagaacaugaccccgcgggaccucggggccugcaucgacugcuccgcccgccacaucaacgcccagguggccaagagccacaacaucgcgcugaucuggaacgucaaggacuucaugucccugagcgagcagcuccggaagcagauccgcuccgccgccaagaagaacaaccugcccuucaagcugaccugcgccaccacgcgccagguggugaacgucgugaccaccaagaucgcccucaagggcgggugaggacuaguuauaagacugacuagcccgaugggccucccaacgggcccuccuccccuccuugcaccgagauuaauaaaaaaaaaaaaaaaaaaaaaaaaaaaaaaaaaaaaaaaaaaaaaaaaaaaaaaaaaaaaaaaaugcaucccccccccccccccccccccccccccccccaaaggcucuuuucagagccaccagaauu

SEQ ID NO: 21838 - RNA, 6058 nt, Artificial Sequence
  SARS-CoV-2__MT628204.1__non-structural protein 3 (NSP3) mRNA gc
aggagaaagcuuaccauggcccccaccaaggugaccuucggcgacgacacggucaucgaggugcagggguacaagagcgugaacaucaccuucgagcuggacgagcgcaucgacaagguccucaacgagaagugcuccgccuacaccguggagcugggcaccgaggugaacgaguucgcgugcgucguggccgacgccgugaucaagacgcugcagccggucagcgagcuccugaccccccuggggaucgaccucgacgagugguccauggccaucuacuaccuguucgacgagagcggcgaguucaagcuggccucccacauguacugcagcuucuacccccccgacgaggacgaggaggagggggacugcgaggaggaggaguucgagccguccacccaguacgaguacggcaccgaggacgacuaccagggcaagccccucgaguucggggcgacgagcgccgcccugcagcccgaggaggagcaggaggaggacuggcuggacgacgacucccagcagaccgugggccagcaggacgggagcgaggacaaccagaccaccacgauccagaccaucguggagguccagccccagcucgagauggagcugaccccgguggugcagaccaucgaggucaacuccuucagcggcuaccugaagcucacggacaacguguacaucaagaacgccgacaucguggaggaggcgaagaaggucaagcccaccgugguggucaacgccgccaacguguaccugaagcacgggggcggcguggccggggcccugaacaaggcgaccaacaacgccaugcaggucgaguccgacgacuacaucgccaccaacggcccccucaagguggggggcagcugcguccuguccggccacaaccuggccaagcacugccuccacgugguggggcccaacgucaacaagggcgaggacauccagcugcugaagagcgccuacgagaacuucaaccagcacgaggugcuccuggcgccgcugcucuccgccgggaucuucggcgccgaccccauccacagccugcgggugugcgucgacacggugcgcaccaacguguaccuggccgucuucgacaagaaccucuacgacaagcugguguccagcuuccuggagaugaagagcgagaagcagguggagcagaagaucgccgagauccccaaggaggaggucaagcccuucaucaccgaguccaagccgagcguggagcagcggaagcaggacgacaagaagaucaaggcgugcguggaggaggucaccacgacccucgaggagaccaaguuccugaccgagaaccugcuccuguacaucgacaucaacgggaaccugcaccccgacuccgccacgcucgugagcgacaucgacaucaccuuccugaagaaggacgcccccuacaucgugggcgacgucgugcaggagggcgugcugaccgccgucgugauccccaccaagaaggccgggggcacgaccgagaugcucgcgaaggcccugcgcaaggugccgaccgacaacuacaucaccacguaccccgggcagggccugaacggguacaccgucgaggaggccaagaccgugcucaagaagugcaaguccgccuucuacauccugcccagcaucaucuccaacgagaagcaggagauccugggcaccgugagcuggaaccuccgggagaugcuggcgcacgccgaggagacccgcaagcugaugcccgucugcguggagacgaaggccaucguguccaccauccagcggaaguacaagggcaucaagauccaggagggggucguggacuacggcgcccgcuucuacuucuacaccagcaagaccacgguggccucccugaucaacacccucaacgaccugaacgagacccuggucaccaugccgcucggguacgugacgcacggccugaaccuggaggaggcggcccgguacaugcgcagccucaaggugcccgccaccgucuccgugagcucccccgacgccgugaccgccuacaacggguaccugaccagcuccagcaagacgcccgaggagcacuucaucgagaccaucucccuggcgggcagcuacaaggacuggagcuacuccggccagagcacccagcucgggaucgaguuccugaagcggggcgacaaguccgucuacuacaccagcaacccgacgaccuuccaccuggacggggaggugaucaccuucgacaaccucaagacccugcugucccuccgcgaggugcggacgaucaaggucuucaccaccguggacaacaucaaccugcacacccagguggucgacaugagcaugacguacggccagcaguucggccccaccuaccuggacggggccgacgugaccaagaucaagccccacaacucccacgagggcaagaccuucuacgugcucccgaacgacgacacgcugcgcgucgaggccuucgaguacuaccacaccaccgaccccagcuuccuggggcgguacauguccgcccucaaccacaccaagaaguggaaguacccccaggugaacggccugacgagcaucaagugggccgacaacaacugcuaccuggcgaccgcccuccugacccugcagcagaucgagcucaaguucaaccccccggcccugcaggacgccuacuaccgcgcgcgggccggggaggccgccaacuucugcgcccugauccucgcguacugcaacaagaccgugggcgagcugggcgacguccgcgagacgauguccuaccuguuccagcacgccaaccucgacagcugcaagcgggugcugaacgucgugugcaagaccugcgggcagcagcagaccacccugaagggcguggaggccgucauguacauggggacccucuccuacgagcaguucaagaagggcgugcagauccccugcacgugcgggaagcaggccaccaaguaccuggugcagcaggagagccccuucgucaugauguccgcccccccggcgcaguacgagcugaagcacggcaccuucaccugcgccagcgaguacacgggcaacuaccagugcgggcacuacaagcacaucaccuccaaggagacccucuacugcaucgacggcgcccugcugaccaagagcagcgaguacaaggggcccaucacggacguguucuacaaggagaacuccuacaccaccaccaucaagcccgugacguacaagcucgacggcgucgugugcaccgagaucgaccccaagcuggacaacuacuacaagaaggacaacagcuacuucaccgagcagccgaucgaccuggugcccaaccagcccuaccccaacgccuccuucgacaacuucaaguucgucugcgacaacaucaaguucgccgacgaccucaaccagcugaccggguacaagaagccggcgagccgcgagcugaaggugacguucuuccccgaccucaacggcgacguggucgccaucgacuacaagcacuacacccccuccuucaagaagggcgccaagcugcugcacaagcccaucguguggcacgugaacaacgccaccaacaaggcgaccuacaagccgaacacguggugcauccggugccucuggagcaccaagcccgucgagaccuccaacagcuucgacgugcugaaguccgaggacgcccaggggauggacaaccuggccugcgaggaccucaagcccgugagcgaggaggucguggagaaccccaccauccagaaggacgugcuggagugcaacgucaagacgaccgagguggugggcgacaucauccugaagccggccaacaacucccucaagaucaccgaggaggucgggcacaccgaccugauggccgcguacguggacaacagcucccugacgaucaagaagcccaacgagcucagccgcgugcugggccugaagacccucgccacccacgggcuggccgccgucaacuccgugcccugggacaccaucgccaacuacgcgaagccguuccugaacaagguggucagcacgaccaccaacaucgugacccgcugccucaaccgggugugcacgaacuacaugcccuacuucuucacccugcugcuccagcugugcaccuucacccgcuccaccaacagccggaucaaggccuccaugcccacgaccaucgccaagaacaccgucaagagcgugggcaaguucugccuggaggccagcuucaacuaccucaagucccccaacuucagcaagcugaucaacaucaucaucugguuccugcuccuguccgugugccugggcagccucaucuacuccaccgccgcgcuggggguccugaugagcaaccucggcaugccguccuacugcacgggguaccgcgagggcuaccugaacagcaccaacgugaccaucgccaccuacugcacgggcuccauccccugcagcgugugccuguccgggcucgacagccuggacaccuaccccucccuggagaccauccagaucaccaucagcuccuucaagugggaccucacggccuucggccuggucgccgagugguuccuggccuacauccucuucacccgguucuucuacgugcuggggcuggcggccaucaugcagcucuucuucagcuacuucgccgugcacuucaucuccaacagcuggcugauguggcugaucaucaaccugguccagauggcccccaucuccgcgauggugcgcauguacaucuucuucgccagcuucuacuacguguggaagagcuacguccacgugguggacggcugcaacuccagcaccugcaugaugugcuacaagcggaaccgcgccacccgggucgagugcacgaccaucgugaacgggguccgccgguccuucuacguguacgccaacggcggcaagggguucugcaagcuccacaacuggaacugcgugaacugcgacaccuucugcgccggcagcaccuucaucuccgacgaggucgcgcgcgaccugagccugcaguucaagcggccgaucaaccccacggaccaguccagcuacaucguggacuccgugaccgucaagaacgggagcauccaccucuacuucgacaaggccggccagaagaccuacgagcgccacucccugagccacuucgugaaccuggacaaccuccgggccaacaacaccaaggggucccugcccaucaacgugaucgucuucgacggcaagagcaagugcgaggaguccagcgccaaguccgccagcguguacuacucccagcugaugugccagcccauccuccugcuggaccaggcgcucgugagcgacgucggcgacagcgccgagguggccgugaagauguucgacgccuacgucaacacguucuccagcaccuucaacgugccgauggagaagcugaagacccugguggccaccgcggaggccgagcucgccaagaacgucucccuggacaacgugcugagcacguucaucuccgccgcgcgccagggguucguggacagcgacgucgagaccaaggacgugguggagugccucaagcugucccaccagagcgacaucgaggucaccggcgacuccugcaacaacuacaugcugaccuacaacaagguggagaacaugacgccccgggaccucggggccugcaucgacugcagcgcccgccacaucaacgcccagguggccaagucccacaacaucgcgcugaucuggaacgucaaggacuucaugagccuguccgagcagcuccggaagcagauccgcagcgccgccaagaagaacaaccugcccuucaagcugaccugcgccaccacccgccagguggugaacgucgugacgaccaagaucgcccucaagggcgggugaggacuaguuauaagacugacuagcccgaugggccucccaacgggcccuccuccccuccuugcaccgagauuaauaaaaaaaaaaaaaaaaaaaaaaaaaaaaaaaaaaaaaaaaaaaaaaaaaaaaaaaaaaaaaaaaugcaucccccccccccccccccccccccccccccccaaaggcucuuuucagagccaccagaauu

SEQ ID NO: 21839 - RNA, 6058 nt, Artificial Sequence
  SARS-CoV-2__MT628215.1__non-structural protein 3 (NSP3) mRNA gc
aggagaaagcuuaccauggcccccaccaaggugaccuucggcgacgacacggucaucgaggugcagggguacaagagcgugaacaucaccuucgagcuggacgagcgcaucgacaagguccucaacgagaagugcuccgccuacaccguggagcugggcaccgaggugaacgaguucgcgugcgucguggccgacgccgugaucaagacgcugcagccggucagcgagcuccugaccccccuggggaucgaccucgacgagugguccauggccaccuacuaccuguucgacgagagcggcgaguucaagcuggccucccacauguacugcagcuucuacccccccgacgaggacgaggaggagggggacugcgaggaggaggaguucgagccguccacccaguacgaguacggcacggaggacgacuaccagggcaagccccucgaguucggggcgaccagcgccgcccugcagcccgaggaggagcaggaggaggacuggcuggacgacgacucccagcagaccgugggccagcaggacgggagcgaggacaaccagaccacgaccauccagaccaucguggagguccagccccagcucgagauggagcugaccccgguggugcagacgaucgaggucaacuccuucagcggcuaccugaagcucaccgacaacguguacaucaagaacgccgacaucguggaggaggcgaagaaggucaagcccaccgugguggucaacgccgccaacguguaccugaagcacgggggcggcguggccggggcccugaacaaggcgaccaacaacgccaugcaggucgaguccgacgacuacaucgccacgaacggcccccucaagguggggggcagcugcguccuguccggccacaaccuggccaagcacugccuccacgugguggggcccaacgucaacaagggcgaggacauccagcugcugaagagcgccuacgagaacuucaaccagcacgaggugcuccuggcgccgcugcucuccgccgggaucuucggcgccgaccccauccacagccugcgggugugcgucgacaccgugcgcaccaacguguaccuggccgucuucgacaagaaccucuacgacaagcugguguccagcuuccuggagaugaagagcgagaagcagguggagcagaagaucgccgagauccccaaggaggaggucaagcccuucaucaccgaguccaagccgagcguggagcagcggaagcaggacgacaagaagaucaaggcgugcguggaggaggucacgaccacccucgaggagaccaaguuccugacggagaaccugcuccuguacaucgacaucaacgggaaccugcaccccgacuccgccacccucgugagcgacaucgacaucaccuuccugaagaaggacgcccccuacaucgugggcgacgucgugcaggagggcgugcugaccgccgucgugauccccacgaagaaggccgggggcaccaccgagaugcucgcgaaggcccugcgcaaggugccgaccgacaacuacaucacgaccuaccccgggcagggccugaacggguacaccgucgaggaggccaagaccgugcucaagaagugcaaguccgccuucuacauccugcccagcaucaucuccaacgagaagcaggagauccugggcaccgugagcuggaaccuccgggagaugcuggcgcacgccgaggagacgcgcaagcugaugcccgucugcguggagaccaaggccaucguguccaccauccagcggaaguacaagggcaucaagauccaggagggggucguggacuacggcgcccgcuucuacuucuacaccagcaagacgaccguggccucccugaucaacacccucaacgaccugaacgagacccuggucacgaugccgcucggguacgugacccacggccugaaccuggaggaggcggcccgguacaugcgcagccucaaggugcccgccaccgucuccgugagcucccccgacgccgugaccgccuacaacggguaccugacgagcuccagcaagacccccgaggagcacuucaucgagaccaucucccuggcgggcagcuacaaggacuggagcuacuccggccagagcacccagcucgggaucgaguuccugaagcggggcgacaaguccgucuacuacacgagcaacccgaccaccuuccaccuggacggggaggugaucaccuucgacaaccucaagacgcugcugucccuccgcgaggugcggaccaucaaggucuucaccaccguggacaacaucaaccugcacacgcagguggucgacaugagcaugaccuacggccagcaguucggccccaccuaccuggacggggccgacgugaccaagaucaagccccacaacucccacgagggcaagacguucuacgugcucccgaacgacgacacccugcgcgucgaggccuucgaguacuaccacaccaccgaccccagcuuccuggggcgguacauguccgcccucaaccacacgaagaaguggaaguacccccaggugaacggccugaccagcaucaagugggccgacaacaacugcuaccuggcgaccgcccuccugacccugcagcagaucgagcucaaguucaaccccccggcccugcaggacgccuacuaccgcgcgcgggccggggaggccgccaacuucugcgcccugauccucgcguacugcaacaagacggugggcgagcugggcgacguccgcgagaccauguccuaccuguuccagcacgccaaccucgacagcugcaagcgggugcugaacgucgugugcaagaccugcgggcagcagcagaccacccugaagggcguggaggccgucauguacauggggacgcucuccuacgagcaguucaagaagggcgugcagauccccugcaccugcgggaagcaggccaccaaguaccuggugcagcaggagagccccuucgucaugauguccgcccccccggcgcaguacgagcugaagcacggcaccuucacgugcgccagcgaguacaccggcaacuaccagugcgggcacuacaagcacaucaccuccaaggagacccucuacugcaucgacggcgcccugcugacgaagagcagcgaguacaaggggcccaucaccgacguguucuacaaggagaacuccuacaccaccacgaucaagcccgugaccuacaagcucgacggcgucgugugcaccgagaucgaccccaagcuggacaacuacuacaagaaggacaacagcuacuucaccgagcagccgaucgaccuggugcccaaccagcccuaccccaacgccuccuucgacaacuucaaguucgucugcgacaacaucaaguucgccgacgaccucaaccagcugacgggguacaagaagccggcgagccgcgagcugaaggugaccuucuuccccgaccucaacggcgacguggucgccaucgacuacaagcacuacacccccuccuucaagaagggcgccaagcugcugcacaagcccaucguguggcacgugaacaacagcaccaacaaggccacguacaagccgaacaccuggugcauccggugccucugguccaccaagcccgucgagaccagcaacuccuucgacgugcugaagagcgaggacgcgcaggggauggacaaccuggccugcgaggaccucaagcccguguccgaggaggucguggagaaccccacgauccagaaggacgugcuggagugcaacgucaagaccaccgagguggugggcgacaucauccugaagccggccaacaacagccucaagaucaccgaggaggucgggcacacggaccugauggccgccuacguggacaacuccagccugaccaucaagaagcccaacgagcucucccgcgugcugggccugaagacccucgcgacccacgggcuggccgccgucaacagcgugcccugggacacgaucgccaacuacgccaagccguuccugaacaagguggucuccaccaccaccaacaucgugacgcgcugccucaaccgggugugcaccaacuacaugcccuacuucuucacccugcugcuccagcugugcaccuucacccgcagcacgaacucccggaucaaggcgagcaugcccaccaccaucgccaagaacaccgucaagagcgugggcaaguucugccuggaggccuccuucaacuaccucaagagccccaacuucuccaagcugaucaacaucaucaucugguuccugcuccugagcgugugccugggcucccucaucuacagcacggccgcccuggggguccugauguccaaccucggcaugccgagcuacugcaccggguaccgcgagggcuaccugaacuccaccaacgugaccaucgcgacguacugcaccggcagcauccccugcuccgugugccugagcgggcucgacucccuggacaccuaccccagccuggagaccauccagaucacgaucuccagcuucaagugggaccucaccgccuucggccuggucgccgagugguuccuggccuacauccucuucacccgguucuucuacgugcuggggcuggccgcgaucaugcagcucuucuucuccuacuucgccgugcacuucaucagcaacuccuggcugauguggcugaucaucaaccugguccagauggcccccaucagcgccauggugcgcauguacaucuucuucgcgagcuucuacuacguguggaaguccuacguccacgugguggacggcugcaacagcuccaccugcaugaugugcuacaagcggaaccgcgccacgcgggucgagugcaccaccaucgugaacgggguccgccggagcuucuacguguacgccaacggcggcaagggguucugcaagcuccacaacuggaacugcgugaacugcgacaccuucugcgccggcuccacguucaucagcgacgaggucgcccgcgaccugucccugcaguucaagcggccgaucaaccccaccgaccagagcuccuacaucguggacagcgugaccgucaagaacggguccauccaccucuacuucgacaaggcgggccagaagaccuacgagcgccacagccugucccacuucgugaaccuggacaaccuccgggccaacaacacgaaggggagccugcccaucaacgugaucgucuucgacggcaaguccaagugcgaggagagcuccgccaagagcgccuccguguacuacagccagcugaugugccagcccauccuccugcuggaccaggcccucgugagcgacgucggcgacuccgcggagguggccgugaagauguucgacgccuacgucaacaccuucagcuccaccuucaacgugccgauggagaagcugaagacccugguggccacggccgaggcggagcucgccaagaacgucagccuggacaacgugcuguccaccuucaucagcgccgcccgccagggguucguggacuccgacgucgagaccaaggacgugguggagugccucaagcugagccaccaguccgacaucgaggucaccggcgacagcugcaacaacuacaugcugacguacaacaagguggagaacaugaccccccgggaccucggggcgugcaucgacugcuccgcccgccacaucaacgcccagguggccaagagccacaacaucgcccugaucuggaacgucaaggacuucaugucccugagcgagcagcuccggaagcagauccgcuccgcggccaagaagaacaaccugcccuucaagcugaccugcgccaccacgcgccagguggugaacgucgugaccaccaagaucgcccucaagggcgggugaggacuaguuauaagacugacuagcccgaugggccucccaacgggcccuccuccccuccuugcaccgagauuaauaaaaaaaaaaaaaaaaaaaaaaaaaaaaaaaaaaaaaaaaaaaaaaaaaaaaaaaaaaaaaaaaugcaucccccccccccccccccccccccccccccccaaaggcucuuuucagagccaccagaauu

SEQ ID NO: 21840 - RNA, 6058 nt, Artificial Sequence
  SARS-CoV-2__MT628218.1__non-structural protein 3 (NSP3) mRNA gc
aggagaaagcuuaccauggcccccaccaaggugaccuucggcgacgacacggucaucgaggugcagggguacaagagcgugaacaucaccuucgagcuggacgagcgcaucgacaagguccucaacgagaagugcuccgccuacaccguggagcugggcaccgaggugaacgaguucgcgugcgucguggccgacgccgugaucaagacgcugcagccggucagcgagcuccugaccccccuggggaucgaccucgacgagugguccauggccaccuacuaccuguucgacgagagcggcgaguucaagcuggccucccacauguacugcagcuucuacccccccgacgaggacgaggaggagggggacugcgaggaggaggaguucgagccguccacccaguacgaguacggcacggaggacgacuaccagggcaagccccucgaguucggggcgaccagcgccgcccugcagcccgaggaggagcaggaggaggacuggcuggacgacgacucccagcagaccgugggccagcaggacgggagcgaggacaaccagaccacgaccauccagaccaucguggagguccagccccagcucgagauggagcugaccccgguggugcagacgaucgaggucaacuccuucagcggcuaccugaagcucaccgacaacguguacaucaagaacgccgacaucguggaggaggcgaagaaggucaagcccaccgugguggucaacgccgccaacguguaccugaagcacgggggcggcguggccggggcccugaacaaggcgaccaacaacgccaugcaggucgaguccgacgacuacaucgccacgaacggcccccucaagguggggggcagcugcguccuguccggccacaaccuggccaagcacugccuccacgugguggggcccaacgucaacaagggcgaggacauccagcugcugaagagcgccuacgagaacuucaaccagcacgaggugcuccuggcgccgcugcucuccgccgggaucuucggcgccgaccccauccacagccugcgggugugcgucgacaccgugcgcaccaacguguaccuggccgucuucgacaagaaccucuacgacaagcugguguccagcuuccuggagaugaagagcgagaagcagguggagcagaagaucgccgagauccccaaggaggaggucaagcccuucaucaccgaguccaagccgagcguggagcagcggaagcaggacgacaagaagaucaaggcgugcguggaggaggucacgaccacccucgaggagaccaaguuccugacggagaaccugcuccuguacaucgacaucaacgggaaccugcaccccgacuccgccacccucgugagcgacaucgacaucaccuuccugaagaaggacgcccccuacaucgugggcgacgucgugcaggagggcgugcugaccgccgucgugauccccacgaagaaggccgggggcaccaccgagaugcucgcgaaggcccugcgcaaggugccgaccgacaacuacaucacgaccuaccccgggcagggccugaacggguacaccgucgaggaggccaagaccgugcucaagaagugcaaguccgccuucuacauccugcccagcaucaucuccaacgagaagcaggagauccugggcaccgugagcuggaaccuccgggagaugcuggcgcacgccgaggagacgcgcaagcugaugcccgucugcguggagaccaaggccaucguguccaccauccagcggaaguacaagggcaucaagauccaggagggggucguggacuacggcgcccgcuucuacuucuacaccagcaagacgaccguggccucccugaucaacacccucaacgaccugaacgagacccuggucacgaugccgcucggguacgugacccacagccugaaccuggaggaggcggcccgguacaugcgcucccucaaggugcccgccaccgucagcguguccagccccgacgccgugaccgccuacaacggcuaccugacguccagcuccaagacccccgaggagcacuucaucgagaccaucagccuggcggggagcuacaaggacugguccuacagcggccaguccacccagcucggcaucgaguuccugaagcggggggacaagagcgucuacuacacguccaacccgaccaccuuccaccuggacggcgaggugaucaccuucgacaaccucaagacgcugcugagccuccgcgaggugcggaccaucaaggucuucaccaccguggacaacaucaaccugcacacgcagguggucgacauguccaugaccuacgggcagcaguucggccccaccuaccuggacggcgccgacgugaccaagaucaagccccacaacagccacgaggggaagacguucuacgugcucccgaacgacgacacccugcgcgucgaggccuucgaguacuaccacaccaccgaccccuccuuccugggccgguacaugagcgcccucaaccacacgaagaaguggaaguacccccaggugaacgggcugaccuccaucaagugggccgacaacaacugcuaccuggcgaccgcccuccugacccugcagcagaucgagcucaaguucaaccccccggcccugcaggacgccuacuaccgcgcgcgggccggcgaggccgccaacuucugcgcccugauccucgcguacugcaacaagacggugggggagcugggcgacguccgcgagaccaugagcuaccuguuccagcacgccaaccucgacuccugcaagcgggugcugaacgucgugugcaagaccugcggccagcagcagaccacccugaaggggguggaggccgucauguacaugggcacgcucagcuacgagcaguucaagaagggggugcagauccccugcaccugcggcaagcaggccaccaaguaccuggugcagcaggagucccccuucgucaugaugagcgcccccccggcgcaguacgagcugaagcacgggaccuucacgugcgccuccgaguacaccggcaacuaccagugcggccacuacaagcacaucaccagcaaggagacccucuacugcaucgacggggcccugcugacgaagagcuccgaguacaagggccccaucaccgacguguucuacaaggagaacagcuacaccaccacgaucaagcccgugaccuacaagcucgacggggucgugugcaccgagaucgaccccaagcuggacaacuacuacaagaaggacaacuccuacuucaccgagcagccgaucgaccuggugcccaaccagcccuaccccaacgccagcuucgacaacuucaaguucgucugcgacaacaucaaguucgccgacgaccucaaccagcugacgggcuacaagaagccggcgucccgcgagcugaaggugaccuucuuccccgaccucaacggggacguggucgccaucgacuacaagcacuacacccccagcuucaagaagggcgccaagcugcugcacaagcccaucguguggcacgugaacaacgccaccaacaaggcgacguacaagccgaacaccuggugcauccggugccucugguccaccaagcccgucgagaccagcaacuccuucgacgugcugaagagcgaggacgcccagggcauggacaaccuggccugcgaggaccucaagcccguguccgaggaggucguggagaaccccacgauccagaaggacgugcuggagugcaacgucaagaccaccgagguggugggggacaucauccugaagccggccaacaacagccucaagaucaccgaggaggucggccacacggaccugauggccgcguacguggacaacuccagccugaccaucaagaagcccaacgagcucucccgcgugcuggggcugaagacccucgccacccacggccuggccgccgucaacagcgugcccugggacacgaucgccaacuacgcgaagccguuccugaacaagguggucuccaccaccaccaacaucgugacgcgcugccucaaccgggugugcaccaacuacaugcccuacuucuucacccugcugcuccagcugugcaccuucacccgcagcacgaacucccggaucaaggccagcaugcccaccaccaucgccaagaacaccgucaagagcguggggaaguucugccuggaggccuccuucaacuaccucaagagccccaacuucuccaagcugaucaacaucaucaucugguuccugcuccugagcgugugccugggcucccucaucuacagcacggccgcgcugggcguccugauguccaaccucgggaugccgagcuacugcaccggcuaccgcgagggguaccugaacuccaccaacgugaccaucgccacguacugcaccggcagcauccccugcuccgugugccugagcggccucgacucccuggacaccuaccccagccuggagaccauccagaucacgaucuccagcuucaagugggaccucaccgccuucgggcuggucgccgagugguuccuggccuacauccucuucacccgguucuucuacgugcugggccuggcggccaucaugcagcucuucuucuccuacuucgccgugcacuucaucagcaacuccuggcugauguggcugaucaucaaccugguccagauggcccccaucagcgcgauggugcgcauguacaucuucuucgccagcuucuacuacguguggaaguccuacguccacgugguggacgggugcaacagcuccaccugcaugaugugcuacaagcggaaccgcgccacgcgggucgagugcaccaccaucgugaacggcguccgccggagcuucuacguguacgccaacgggggcaagggcuucugcaagcuccacaacuggaacugcgugaacugcgacaccuucugcgccggguccacguucaucagcgacgaggucgcgcgcgaccugucccugcaguucaagcggccgaucaaccccaccgaccagagcuccuacaucguggacagcgugaccgucaagaacggcuccauccaccucuacuucgacaaggccgggcagaagaccuacgagcgccacagccugucccacuucgugaaccuggacaaccuccgggccaacaacacgaagggcagccugcccaucaacgugaucgucuucgacgggaaguccaagugcgaggagagcuccgccaagagcgccuccguguacuacagccagcugaugugccagcccauccuccugcuggaccaggcgcucgugagcgacgucggcgacuccgccgagguggccgugaagauguucgacgccuacgucaacaccuucagcuccaccuucaacgugccgauggagaagcugaagacccugguggccacggcggaggccgagcucgccaagaacgucagccuggacaacgugcuguccaccuucaucagcgccgcgcgccagggcuucguggacuccgacgucgagaccaaggacgugguggagugccucaagcugagccaccaguccgacaucgaggucaccggggacagcugcaacaacuacaugcugacguacaacaagguggagaacaugaccccccgggaccucggcgccugcaucgacugcuccgcccgccacaucaacgcccagguggccaagagccacaacaucgcgcugaucuggaacgucaaggacuucaugucccugagcgagcagcuccggaagcagauccgcuccgccgccaagaagaacaaccugcccuucaagcugaccugcgccaccacgcgccagguggugaacgucgugaccaccaagaucgcccucaaggggggcugaggacuaguuauaagacugacuagcccgaugggccucccaacgggcccuccuccccuccuugcaccgagauuaauaaaaaaaaaaaaaaaaaaaaaaaaaaaaaaaaaaaaaaaaaaaaaaaaaaaaaaaaaaaaaaaaugcaucccccccccccccccccccccccccccccccaaaggcucuuuucagagccaccagaauu

SEQ ID NO: 21841 - RNA, 6058 nt, Artificial Sequence
  SARS-CoV-2__MT628230.1__non-structural protein 3 (NSP3) mRNA gc
aggagaaagcuuaccauggcccccaccaaggugaccuucggcgacgacacggucaucgaggugcagggguacaagagcgugaacaucaccuucgagcuggacgagcgcaucgacaagguccucaacgagaagugcuccgccuacaccguggagcugggcaccgaggugaacgaguucgcgugcgucguggccgacgccgugaucaagacgcugcagccggucagcgagcuccugaccccccuggggaucgaccucgacgagugguccauggccaccuacuaccuguucgacgagagcggcgaguucaagcuggccucccacauguacugcagcuucuacccccccgacgaggacgaggaggagggggacugcgaggaggaggaguucgagccguccacccaguacgaguacggcacggaggacgacuaccagggcaagccccucgaguucggggcgaccagcgccgcccugcagcccgaggaggagcaggaggaggacuggcuggacgacgacucccagcagaccgugggccagcaggacgggagcgaggacaaccagaccacgaccauccagaccaucguggagguccagccccagcucgagauggagcugaccccgguggugcagacgaucgaggucaacuccuucagcggcuaccugaagcucaccgacaacguguacaucaagaacgccgacaucguggaggaggcgaagaaggucaagcccaccgugguggucaacgccgccaacguguaccugaagcacgggggcggcguggccggggcccugaacaaggcgaccaacaacgccaugcaggucgaguccgacgacuacaucgccacgaacggcccccucaagguggggggcagcugcguccuguccggccacaaccuggccaagcacugccuccacgugguggggcccaacgucaacaagggcgaggacauccagcugcugaagagcgccuacgagaacuucaaccagcacgaggugcuccuggcgccgcugcucuccgccgggaucuucggcgccgaccccauccacagccugcgggugugcgucgacaccgugcgcaccaacguguaccuggccgucuucgacaagaaccucuacgacaagcugguguccagcuuccuggagaugaagagcgagaagcagguggagcagaagaucgccgagauccccaaggaggaggucaagcccuucaucaccgaguccaagccgagcguggagcagcggaagcaggacgacaagaagaucaaggcgugcguggaggaggucacgaccacccucgaggagaccaaguuccugacggagaaccugcuccuguacaucgacaucaacgggaaccugcaccccgacuccgccacccucgugagcgacaucgacaucaccuuccugaagaaggacgcccccuacaucgugggcgacgucgugcaggagggcgugcugaccgccgucgugauccccacgaagaaggccgggggcaccaccgagaugcucgcgaaggcccugcgcaaggugccgaccgacaacuacaucacgaccuaccccgggcagggccugaacggguacaccgucgaggaggccaagaccgugcucaagaagugcaaguccgccuucuacauccugcccagcaucaucuccaacgagaagcaggagauccugggcaccgugagcuggaaccuccgggagaugcuggcgcacgccgaggagacgcgcaagcugaugcccgucugcguggagaccaaggccaucguguccaccauccagcggaaguacaagggcaucaagauccaggagggggucguggacuacggcgcccgcuucuacuucuacaccagcaagacgaccguggccucccugaucaacacccucaacgaccugaacgagacccuggucacgaugccgcucggguacgugacccacggccugaaccuggaggaggcggcccgguacaugcgcagccucaaggugcccgccaccgucuccgugagcucccccgacgccgugaccgccuacaacggguaccugacgagcuccagcaagacccccgaggagcacuucaucgagaucaucucccuggcgggcagcuacaaggacuggagcuacuccggccagagcacccagcucgggaucgaguuccugaagcggggcgacaaguccgucuacuacaccagcaacccgacgaccuuccaccuggacggggaggugaucaccuucgacaaccucaagacccugcugucccuccgcgaggugcggacgaucaaggucuucaccaccguggacaacaucaaccugcacacccagguggucgacaugagcaugacguacggccagcaguucggccccaccuaccuggacggggccgacgugaccaagaucaagccccacaacucccacgagggcaagaccuucuacgugcucccgaacgacgacacgcugcgcgucgaggccuucgaguacuaccacaccaccgaccccagcuuccuggggcgguacauguccgcccucaaccacaccaagaaguggaaguacccccaggugaacggccugacgagcaucaagugggccgacaacaacugcuaccuggcgaccgcccuccugacccugcagcagaucgagcucaaguucaaccccccggcccugcaggacgccuacuaccgcgcgcgggccggggaggccgccaacuucugcgcccugauccucgcguacugcaacaagaccgugggcgagcugggcgacguccgcgagacgauguccuaccuguuccagcacgccaaccucgacagcugcaagcgggugcugaacgucgugugcaagaccugcgggcagcagcagaccacccugaagggcguggaggccgucauguacauggggacccucuccuacgagcaguucaagaagggcgugcagauccccugcacgugcgggaagcaggccaccaaguaccuggugcagcaggagagccccuucgucaugauguccgcccccccggcgcaguacgagcugaagcacggcaccuucaccugcgccagcgaguacacgggcaacuaccagugcgggcacuacaagcacaucaccuccaaggagacccucuacugcaucgacggcgcccugcugaccaagagcagcgaguacaaggggcccaucacggacguguucuacaaggagaacuccuacaccaccaccaucaagcccgugacguacaagcucgacggcgucgugugcaccgagaucgaccccaagcuggacaacuacuacaagaaggacaacagcuacuucaccgagcagccgaucgaccuggugcccaaccagcccuaccccaacgccuccuucgacaacuucaaguucgucugcgacaacaucaaguucgccgacgaccucaaccagcugaccggguacaagaagccggcgagccgcgagcugaaggugacguucuuccccgaccucaacggcgacguggucgccaucgacuacaagcacuacacccccuccuucaagaagggcgccaagcugcugcacaagcccaucguguggcacgugaacaacgccaccaacaaggcgaccuacaagccgaacacguggugcauccggugccucuggagcaccaagcccgucgagaccuccaacagcuucgacgugcugaaguccgaggacgcccaggggauggacaaccuggccugcgaggaccucaagcccgugagcgaggaggucguggagaaccccaccauccagaaggacgugcuggagugcaacgucaagacgaccgagguggugggcgacaucauccugaagccggccaacaacucccucaagaucaccgaggaggucgggcacaccgaccugauggccgcguacguggacaacagcucccugacgaucaagaagcccaacgagcucagccgcgugcugggccugaagacccucgccacccacgggcuggccgccgucaacuccgugcccugggacaccaucgccaacuacgcgaagccguuccugaacaagguggucagcacgaccaccaacaucgugacccgcugccucaaccgggugugcacgaacuacaugcccuacuucuucacccugcugcuccagcugugcaccuucacccgcuccaccaacagccggaucaaggccuccaugcccacgaccaucgccaagagcaccgucaagagcgugggcaaguucugccuggaggccuccuucaacuaccucaagagccccaacuucuccaagcugaucaacaucaucaucugguuccugcuccugagcgugugccugggcucccucaucuacagcaccgccgcgcuggggguccugauguccaaccucggcaugccgagcuacugcacgggguaccgcgagggcuaccugaacuccaccaacgugaccaucgccaccuacugcacgggcagcauccccugcuccgugugccugagcgggcucgacucccuggacaccuaccccagccuggagaccauccagaucaccaucuccagcuucaagugggaccucacggccuucggccuggucgccgagugguuccuggccuacauccucuucacccgguucuucuacgugcuggggcuggcggccaucaugcagcucuucuucuccuacuucgccgugcacuucaucagcaacuccuggcugauguggcugaucaucaaccugguccagauggcccccaucagcgcgauggugcgcauguacaucuucuucgccagcuucuacuacguguggaaguccuacguccacgugguggacggcugcaacagcuccaccugcaugaugugcuacaagcggaaccgcgccacccgggucgagugcacgaccaucgugaacgggguccgccggagcuucuacguguacgccaacggcggcaagggguucugcaagcuccacaacuggaacugcgugaacugcgacaccuucugcgccggcuccaccuucaucagcgacgaggucgcgcgcgaccugucccugcaguucaagcggccgaucaaccccacggaccagagcuccuacaucguggacagcgugaccgucaagaacggguccauccaccucuacuucgacaaggccggccagaagaccuacgagcgccacagccugucccacuucgugaaccuggacaaccuccgggccaacaacaccaaggggagccugcccaucaacgugaucgucuucgacggcaaguccaagugcgaggagagcuccgccaagagcgccuccguguacuacagccagcugaugugccagcccauccuccugcuggaccaggcgcucgugagcgacgucggcgacuccgccgagguggccgugaagauguucgacgccuacgucaacacguucagcuccaccuucaacgugccgauggagaagcugaagacccugguggccaccgcggaggccgagcucgccaagaacgucagccuggacaacgugcuguccacguucaucagcgccgcgcgccagggguucguggacuccgacgucgagaccaaggacgugguggagugccucaagcugagccaccaguccgacaucgaggucaccggcgacagcugcaacaacuacaugcugaccuacaacaagguggagaacaugacgccccgggaccucggggccugcaucgacugcuccgcccgccacaucaacgcccagguggccaagagccacaacaucgcgcugaucuggaacgucaaggacuucaugucccugagcgagcagcuccggaagcagauccgcuccgccgccaagaagaacaaccugcccuucaagcugaccugcgccaccacccgccagguggugaacgucgugacgaccaagaucgcccucaagggcgggugaggacuaguuauaagacugacuagcccgaugggccucccaacgggcccuccuccccuccuugcaccgagauuaauaaaaaaaaaaaaaaaaaaaaaaaaaaaaaaaaaaaaaaaaaaaaaaaaaaaaaaaaaaaaaaaaugcaucccccccccccccccccccccccccccccccaaaggcucuuuucagagccaccagaauu

SEQ ID NO: 21842 - RNA, 6058 nt, Artificial Sequence
  SARS-CoV-2__MT628231.1__non-structural protein 3 (NSP3) mRNA gc
aggagaaagcuuaccauggcccccaccaaggugaccuucggcgacgacacggucaucgaggugcagggguacaagagcgugaacaucaccuucgagcuggacgagcgcaucgacaagguccucaacgagaagugcuccgccuacaccguggagcugggcaccgaggugaacgaguucgcgugcgucguggccgacgccgugaucaagacgcugcagccggucagcgagcuccugaccccccuggggaucgaccucgacgagugguccauggccaccuacuaccuguucgacgagagcggcgaguucaagcuggccucccacauguacugcagcuucuacccccccgacgaggacgaggaggagggggacugcgaggaggaggaguucgagccguccacccaguacgaguacggcacggaggacgacuaccagggcaagccccucgaguucggggcgaccagcgccgcccugcagcccgaggaggagcaggaggaggacuggcuggacgacgacucccagcagaccgugggccagcaggacgggagcgaggacaaccagaccacgaccauccagaccaucguggagguccagccccagcucgagauggagcugaccccgguggugcagacgaucgaggucaacuccuucagcggcuaccugaagcucaccgacaacguguacaucaagaacgccgacaucguggaggaggcgaagaaggucaagcccaccgugguggucaacgccgccaacguguaccugaagcacgggggcggcguggccggggcccugaacaaggcgaccaacaacgccaugcaggucgaguccgacgacuacaucgccacgaacggcccccucaagguggggggcagcugcguccuguccggccacaaccuggccaagcacugccuccacgugguggggcccaacgucaacaagggcgaggacauccagcugcugaagagcgccuacgagaacuucaaccagcacgaggugcuccuggcgccgcugcucuccgccgggaucuucggcgccgaccccauccacagccugcgggugugcgucgacaccgugcgcaccaacguguaccuggccgucuucgacaagaaccucuacgacaagcugguguccagcuuccuggagaugaagagcgagaagcagguggagcagaagaucgccgagauccccaaggaggaggucaagcccuucaucaccgaguccaagccgagcguggagcagcggaagcaggacgacaagaagaucaaggcgugcguggaggaggucacgaccacccucgaggagaccaaguuccugacggagaaccugcuccuguacaucgacaucaacgggaaccugcaccccgacuccgccacccucgugagcgacaucgacaucaccuuccugaagaaggacgcccccuacaucgugggcgacgucgugcaggagggcgugcugaccgccgucgugauccccacgaagaaggccgggggcaccaccgagaugcucgcgaaggcccugcgcaaggugccgaccgacaacuacaucacgaccuaccccgggcagggccugaacggguacaccgucgaggaggccaagaccgugcucaagaagugcaaguccgccuucuacauccugcccagcaucaucuccaacgagaagcaggagauccugggcaccgugagcuggaaccuccgggagaugcuggcgcacgccgaggagacgcgcaagcugaugcccgucugcguggagaccaaggccaucguguccaccauccagcggaaguacaagggcaucaagauccaggagggggucguggacuacggcgcccgcuucuacuucuacaccagcaagacgaccguggccucccugaucaacacccucaacgaccugaacgagacccuggucacgaugccgcucggguacgugacccacggccugaaccuggaggaggcggcccgguacaugcgcagccucaaggugcccgccaccgucuccgugagcucccccgacgccgugaccgccuacaacggguaccugacgagcuccagcaagacccccgaggagcacuucaucgagaucaucucccuggcgggcagcuacaaggacuggagcuacuccggccagagcacccagcucgggaucgaguuccugaagcggggcgacaaguccgucuacuacaccagcaacccgacgaccuuccaccuggacggggaggugaucaccuucgacaaccucaagacccugcugucccuccgcgaggugcggacgaucaaggucuucaccaccguggacaacaucaaccugcacacccagguggucgacaugagcaugacguacggccagcaguucggccccaccuaccuggacggggccgacgugaccaagaucaagccccacaacucccacgagggcaagaccuucuacgugcucccgaacgacgacacgcugcgcgucgaggccuucgaguacuaccacaccaccgaccccagcuuccuggggcgguacauguccgcccucaaccacaccaagaaguggaaguacccccaggugaacggccugacgagcaucaagugggccgacaacaacugcuaccuggcgaccgcccuccugacccugcagcagaucgagcucaaguucaaccccccggcccugcaggacgccuacuaccgcgcgcgggccggggaggccgccaacuucugcgcccugauccucgcguacugcaacaagaccgugggcgagcugggcgacguccgcgagacgauguccuaccuguuccagcacgccaaccucgacagcugcaagcgggugcugaacgucgugugcaagaccugcgggcagcagcagaccacccugaagggcguggaggccgucauguacauggggacccucuccuacgagcaguucaagaagggcgugcagauccccugcacgugcgggaagcaggccaccaaguaccuggugcagcaggagagccccuucgucaugauguccgcccccccggcgcaguacgagcugaagcacggcaccuucaccugcgccagcgaguacacgggcaacuaccagugcgggcacuacaagcacaucaccuccaaggagacccucuacugcaucgacggcgcccugcugaccaagagcagcgaguacaaggggcccaucacggacguguucuacaaggagaacuccuacaccaccaccaucaagcccgugacguacaagcucgacggcgucgugugcaccgagaucgaccccaagcuggacaacuacuacaagaaggacaacagcuacuucaccgagcagccgaucgaccuggugcccaaccagcccuaccccaacgccuccuucgacaacuucaaguucgucugcgacaacaucaaguucgccgacgaccucaaccagcugaccggguacaagaagccggcgagccgcgagcugaaggugacguucuuccccgaccucaacggcgacguggucgccaucgacuacaagcacuacacccccuccuucaagaagggcgccaagcugcugcacaagcccaucguguggcacgugaacaacgccaccaacaaggcgaccuacaagccgaacacguggugcauccggugccucuggagcaccaagcccgucgagaccuccaacagcuucgacgugcugaaguccgaggacgcccaggggauggacaaccuggccugcgaggaccucaagcccgugagcgaggaggucguggagaaccccaccauccagaaggacgugcuggagugcaacgucaagacgaccgagguggugggcgacaucauccugaagccggccaacaacucccucaagaucaccgaggaggucgggcacaccgaccugauggccgcguacguggacaacagcucccugacgaucaagaagcccaacgagcucagccgcgugcugggccugaagacccucgccacccacgggcuggccgccgucaacuccgugcccugggacaccaucgccaacuacgcgaagccguuccugaacaagguggucagcacgaccaccaacaucgugacccgcugccucaaccgggugugcacgaacuacaugcccuacuucuucacccugcugcuccagcugugcaccuucacccgcuccaccaacagccggaucaaggccuccaugcccacgaccaucgccaagaacaccgucaagagcgugggcaaguucugccuggaggccagcuucaacuaccucaagucccccaacuucagcaagcugaucaacaucaucaucugguuccugcuccuguccgugugccugggcagccucaucuacuccaccgccgcgcuggggguccugaugagcaaccucggcaugccguccuacugcacgggguaccgcgagggcuaccugaacagcaccaacgugaccaucgccaccuacugcacgggcuccauccccugcagcgugugccuguccgggcucgacagccuggacaccuaccccucccuggagaccauccagaucaccaucagcuccuucaagugggaccucacggccuucggccuggucgccgagugguuccuggccuacauccucuucacccgguucuucuacgugcuggggcuggcggccaucaugcagcucuucuucagcuacuucgccgugcacuucaucuccaacagcuggcugauguggcugaucaucaaccugguccagauggcccccaucuccgcgauggugcgcauguacaucuucuucgccagcuucuacuacguguggaagagcuacguccacgugguggacggcugcaacuccagcaccugcaugaugugcuacaagcggaaccgcgccacccgggucgagugcacgaccaucgugaacgggguccgccgguccuucuacguguacgccaacggcggcaagggguucugcaagcuccacaacuggaacugcgugaacugcgacaccuucugcgccggcagcaccuucaucuccgacgaggucgcgcgcgaccugagccugcaguucaagcggccgaucaaccccacggaccaguccagcuacaucguggacuccgugaccgucaagaacgggagcauccaccucuacuucgacaaggccggccagaagaccuacgagcgccacucccugagccacuucgugaaccuggacaaccuccgggccaacaacaccaaggggucccugcccaucaacgugaucgucuucgacggcaagagcaagugcgaggaguccagcgccaaguccgccagcguguacuacucccagcugaugugccagcccauccuccugcuggaccaggcgcucgugagcgacgucggcgacagcgccgagguggccgugaagauguucgacgccuacgucaacacguucuccagcaccuucaacgugccgauggagaagcugaagacccugguggccaccgcggaggccgagcucgccaagaacgucucccuggacaacgugcugagcacguucaucuccgccgcgcgccagggguucguggacagcgacgucgagaccaaggacgugguggagugccucaagcugucccaccagagcgacaucgaggucaccggcgacuccugcaacaacuacaugcugaccuacaacaagguggagaacaugacgccccgggaccucggggccugcaucgacugcagcgcccgccacaucaacgcccagguggccaagucccacaacaucgcgcugaucuggaacgucaaggacuucaugagccuguccgagcagcuccggaagcagauccgcagcgccgccaagaagaacaaccugcccuucaagcugaccugcgccaccacccgccagguggugaacgucgugacgaccaagaucgcccucaagggcgggugaggacuaguuauaagacugacuagcccgaugggccucccaacgggcccuccuccccuccuugcaccgagauuaauaaaaaaaaaaaaaaaaaaaaaaaaaaaaaaaaaaaaaaaaaaaaaaaaaaaaaaaaaaaaaaaaugcaucccccccccccccccccccccccccccccccaaaggcucuuuucagagccaccagaauu

SEQ ID NO: 21843 - RNA, 6058 nt, Artificial Sequence
  SARS-CoV-2__MT628273.1__non-structural protein 3 (NSP3) mRNA gc
aggagaaagcuuaccauggcccccaccaaggugaccuucggcgacgacacggucaucgaggugcagggguacaagagcgugaacaucaccuucgagcuggacgagcgcaucgacaagguccucaacgagaagugcuccgccuacaccguggagcugggcaccgaggugaacgaguucgcgugcgucguggccgacgccgugaucaagacgcugcagccggucagcgagcuccugaccccccuggggaucgaccucgacgagugguccauggccaccuacuaccuguucgacgagagcggcgaguucaagcuggccucccacauguacugcagcuucuacccccccgacgaggacgaggaggagggggacugcgaggaggaggaguucgagccguccacccaguacgaguacggcacggaggacgacuaccagggcaagccccucgaguucggggcgaccagcgccgcccugcagcccgaggaggagcaggaggaggacuggcuggacgacgacucccagcagaccgugggccagcaggacgggagcgaggacaaccagaccacgaccauccagaccaucguggagguccagccccagcucgagauggagcugaccccgguggugcagacgaucgaggucaacuccuucagcggcuaccugaagcucaccgacaacguguacaucaagaacgccgacaucguggaggaggcgaagaaggucaagcccaccgugguggucaacgccgccaacguguaccugaagcacgggggcggcguggccggggcccugaacaaggcgaccaacaacgccaugcaggucgaguccgacgacuacaucgccacgaacggcccccucaagguggggggcagcugcguccuguccggccacaaccuggccaagcacugccuccacgugguggggcccaacgucaacaagggcgaggacauccagcugcugaagagcgccuacgagaacuucaaccagcacgaggugcuccuggcgccgcugcucuccgccgggaucuucggcgccgaccccauccacagccugcgggugugcgucgacaccgugcgcaccaacguguaccuggccgucuucgacaagaaccucuacgacaagcugguguccagcuuccuggagaugaagagcgagaagcagguggagcagaagaucgccgagauccccaaggaggaggucaagcccuucaucaccgaguccaagccgagcguggagcagcggaagcaggacgacaagaagaucaaggcgugcguggaggaggucacgaccacccucgaggagaccaaguuccugacggagaaccugcuccuguacaucgacaucaacgggaaccugcaccccgacuccgccacccucgugagcgacaucgacaucaccuuccugaagaaggacgcccccuacaucgugggcgacgucgugcaggagggcgugcugaccgccgucgugauccccacgaagaaggccgggggcaccaccgagaugcucgcgaaggcccugcgcaaggugccgaccgacaacuacaucacgaccuaccccgggcagggccugaacggguacaccgucgaggaggccaagaccgugcucaagaagugcaaguccgccuucuacauccugcccagcaucaucuccaacgagaagcaggagauccugggcaccgugagcuggaaccuccgggagaugcuggcgcacgccgaggagacgcgcaagcugaugcccgucugcguggagaccaaggccaucguguccaccauccagcggaaguacaagggcaucaagauccaggagggggucguggacuacggcgcccgcuucuacuucuacaccagcaagacgaccguggccucccugaucaacacccucaacgaccugaacgagacccuggucacgaugccgcucggguacgugacccacggccugaaccuggaggaggcggcccgguacaugcgcagccucaaggugcccgccaccgucuccgugagcucccccgacgccgugaccgccuacaacggguaccugacgagcuccagcaagacccccgaggagcacuucaucgagaccaucucccuggcgggcagcuacaaggacuggagcuacuccggccagagcacccagcucgggaucgaguuccugaagcggggcgacaaguccgucuacuacacgagcaacccgaccaccuuccaccuggacggggaggugaucaccuucgacaaccucaagacgcugcugucccuccgcgaggugcggaccaucaaggucuucaccaccguggacaacaucaaccugcacacgcagguggucgacaugagcaugaccuacggccagcaguucggccccaccuaccuggacggggccgacgugaccaagaucaagccccacaacucccacgagggcaagacguucuacgugcucccgaacgacgacacccugcgcgucgaggccuucgaguacuaccacaccaccgaccccagcuuccuggggcgguacauguccgcccucaaccacacgaagaaguggaaguacccccaggugaacggccugaccagcaucaagugggccgacaacaacugcuaccuggcgaccgcccuccugacccugcagcagaucgagcucaaguucaaccccccggcccugcaggacgccuacuaccgcgcgcgggccggggaggccgccaacuucugcgcccugauccucgcguacugcaacaagacggugggcgagcugggcgacguccgcgagaccauguccuaccuguuccagcacgccaaccucgacagcugcaagcgggugcugaacgucgugugcaagaccugcgggcagcagcagaccacccugaagggcguggaggccgucauguacauggggacgcucuccuacgagcaguucaagaagggcgugcagauccccugcaccugcgggaagcaggccaccaaguaccuggugcagcaggagagccccuucgucaugauguccgcccccccggcgcaguacgagcugaagcacggcaccuucacgugcgccagcgaguacaccggcaacuaccagugcgggcacuacaagcacaucaccuccaaggagacccucuacugcaucgacggcgcccugcugacgaagagcagcgaguacaaggggcccaucaccgacguguucuacaaggagaacuccuacaccaccacgaucaagcccgugaccuacaagcucgacggcgucgugugcaccgagaucgaccccaagcuggacaacuacuacaagaaggacaacagcuacuucaccgagcagccgaucgaccuggugcccaaccagcccuaccccaacgccuccuucgacaacuucaaguucgucugcgacaacaucaaguucgccgacgaccucaaccagcugacgggguacaagaagccggcgagccgcgagcugaaggugaccuucuuccccgaccucaacggcgacguggucgccaucgacuacaagcacuacacccccuccuucaagaagggcgccaagcugcugcacaagcccaucguguggcacgugaacaacgccaccaacaaggcgacguacaagccgaacaccuggugcauccggugccucuggagcaccaagcccgucgagaccuccaacagcuucgacgugcugaaguccgaggacgcccgcgggauggacaaccuggccugcgaggaccucaagcccgugagcgaggaggucguggagaaccccacgauccagaaggacgugcuggagugcaacgucaagaccaccgagguggugggcgacaucauccugaagccggccaacaacucccucaagaucaccgaggaggucgggcacacggaccugauggccgcguacguggacaacagcucccugaccaucaagaagcccaacgagcucagccgcgugcugggccugaagacccucgccacccacgggcuggccgccgucaacuccgugcccugggacacgaucgccaacuacgcgaagccguuccugaacaagguggucagcaccaccaccaacaucgugacgcggugccucaaccgcgugugcaccaacuacaugcccuacuucuucacccugcugcuccagcugugcaccuucacccgguccacgaacagccgcaucaaggccuccaugcccaccaccaucgccaagaacaccgucaagagcgugggcaaguucugccuggaggccagcuucaacuaccucaagucccccaacuucagcaagcugaucaacaucaucaucugguuccugcuccuguccgugugccugggcagccucaucuacuccacggccgcgcuggggguccugaugagcaaccucggcaugccguccuacugcaccggguaccgggagggcuaccugaacagcaccaacgugaccaucgccacguacugcaccggcuccauccccugcagcgugugccuguccgggcucgacagccuggacaccuaccccucccuggagaccauccagaucacgaucagcuccuucaagugggaccucaccgccuucggccuggucgccgagugguuccuggccuacauccucuucacccgcuucuucuacgugcuggggcuggcggccaucaugcagcucuucuucagcuacuucgccgugcacuucaucuccaacagcuggcugauguggcugaucaucaaccugguccagauggcccccaucuccgcgauggugcggauguacaucuucuucgccagcuucuacuacguguggaagagcuacguccacgugguggacggcugcaacuccagcaccugcaugaugugcuacaagcgcaaccgggccacgcgcgucgagugcaccaccaucgugaacgggguccggcgcuccuucuacguguacgccaacggcggcaagggguucugcaagcuccacaacuggaacugcgugaacugcgacaccuucugcgccggcagcacguucaucuccgacgaggucgcgcgggaccugagccugcaguucaagcgcccgaucaaccccaccgaccaguccagcuacaucguggacuccgugaccgucaagaacgggagcauccaccucuacuucgacaaggccggccagaagaccuacgagcggcacucccugagccacuucgugaaccuggacaaccuccgcgccaacaacacgaaggggucccugcccaucaacgugaucgucuucgacggcaagagcaagugcgaggaguccagcgccaaguccgccagcguguacuacucccagcugaugugccagcccauccuccugcuggaccaggcgcucgugagcgacgucggcgacagcgccgagguggccgugaagauguucgacgccuacgucaacaccuucuccagcaccuucaacgugccgauggagaagcugaagacccugguggccacggcggaggccgagcucgccaagaacgucucccuggacaacgugcugagcaccuucaucuccgccgcgcggcagggguucguggacagcgacgucgagaccaaggacgugguggagugccucaagcugucccaccagagcgacaucgaggucaccggcgacuccugcaacaacuacaugcugacguacaacaagguggagaacaugaccccccgcgaccucggggccugcaucgacugcagcgcccggcacaucaacgcccagguggccaagucccacaacaucgcgcugaucuggaacgucaaggacuucaugagccuguccgagcagcuccgcaagcagauccgcagcgccgccaagaagaacaaccugcccuucaagcugaccugcgccaccacgcggcagguggugaacgucgugaccaccaagaucgcccucaagggcgggugaggacuaguuauaagacugacuagcccgaugggccucccaacgggcccuccuccccuccuugcaccgagauuaauaaaaaaaaaaaaaaaaaaaaaaaaaaaaaaaaaaaaaaaaaaaaaaaaaaaaaaaaaaaaaaaaugcaucccccccccccccccccccccccccccccccaaaggcucuuuucagagccaccagaauu

SEQ ID NO: 21844 - RNA, 6058 nt, Artificial Sequence
  SARS-CoV-2__MT632495.1__non-structural protein 3 (NSP3) mRNA gc
aggagaaagcuuaccauggcccccaccaaggugaccuucggcgacgacacggucaucgaggugcagggguacaagagcgugaacaucaccuucgagcuggacgagcgcaucgacaagguccucaacgagaagugcuccgccuacaccguggagcugggcaccgaggugaacgaguucgcgugcgucguggccgacgccgugaucaagacgcugcagccggucagcgagcuccugaccccccuggggaucgaccucgacgagugguccauggccaccuacuaccuguucgacgagagcggcgaguucaagcuggccucccacauguacugcagcuucuacccccccgacgaggacgaggaggagggggacugcgaggaggaggaguucgagccguccacccaguacgaguacggcacggaggacgacuaccagggcaagccccucgaguucggggcgaccagcgccgcccugcagcccgaggaggagcaggaggaggacuggcuggacgacgacucccagcagaccgugggccagcaggacgggagcgaggacaaccagaccacgaccauccagaccaucguggagguccagccccagcucgagauggagcugaccccgguggugcagacgaucgaggucaacuccuucagcggcuaccugaagcucaccgacaacguguacaucaagaacgccgacaucguggaggaggcgaagaaggucaagcccaccgugguggucaacgccgccaacguguaccugaagcacgggggcggcguggccggggcccugaacaaggcgaccaacaacgccaugcaggucgaguccgacgacuacaucgccacgaacggcccccucaagguggggggcagcugcguccuguccggccacaacuucgccaagcacugccugcacgugguggggcccaacgucaacaagggcgaggacauccagcuccugaagagcgccuacgagaacuucaaccagcacgaggugcugcucgcgccgcugcuguccgccgggaucuucggcgccgaccccauccacagccuccgggugugcgucgacaccgugcgcaccaacguguaccuggccgucuucgacaagaaccuguacgacaagcucguguccagcuuccuggagaugaagagcgagaagcagguggagcagaagaucgccgagauccccaaggaggaggucaagcccuucaucaccgaguccaagccgagcguggagcagcggaagcaggacgacaagaagaucaaggcgugcguggaggaggucacgaccacccuggaggagaccaaguuccucacggagaaccugcugcucuacaucgacaucaacgggaaccugcaccccgacuccgccacccuggugagcgacaucgacaucaccuuccucaagaaggacgcccccuacaucgugggcgacgucgugcaggagggcgugcugaccgccgucgugauccccacgaagaaggccgggggcaccaccgagaugcuggcgaaggcccuccgcaaggugccgaccgacaacuacaucacgaccuaccccgggcagggccugaacggguacaccgucgaggaggccaagaccgugcugaagaagugcaaguccgccuucuacauccuccccagcaucaucuccaacgagaagcaggagauccugggcaccgugagcuggaaccugcgggagaugcucgcgcacgccgaggagacgcgcaagcugaugcccgucugcguggagaccaaggccaucguguccaccauccagcggaaguacaagggcaucaagauccaggagggggucguggacuacggcgcccgcuucuacuucuacaccagcaagacgaccguggccucccugaucaacacccugaacgaccucaacgagacccuggucacgaugccgcugggguacgugacccacggccucaaccuggaggaggcggcccgguacaugcgcagccugaaggugcccgucaccguguccgugagcucccccgacgccgucaccgccuacaacggguaccucacgagcuccagcaagacccccgaggagcacuucaucgagaccaucucccuggccggcagcuacaaggacuggagcuacuccggccagagcacccagcuggggaucgaguuccucaagcggggcgacaaguccguguacuacacgagcaacccgaccaccuuccaccuggacggggaggugaucaccuucgacaaccugaagacgcuccugucccugcgcgagguccggaccaucaagguguucaccaccguggacaacaucaaccuccacacgcaggucguggacaugagcaugaccuacggccagcaguucggccccaccuaccuggacggggcggacgugaccaagaucaagccccacaacucccacgagggcaagacguucuacguccugccgaacgacgacacccuccgcguggaggccuucgaguacuaccacaccaccgaccccagcuuccuggggcgguacauguccgcccugaaccacacgaagaaguggaaguacccccaggugaacggccucaccagcaucaagugggccgacaacaacugcuaccuggccaccgcgcugcucacccugcagcagaucgagcugaaguucaaccccccggcccuccaggacgccuacuaccgcgcccgggcgggggaggccgccaacuucugcgcccugauccuggccuacugcaacaagacggucggcgagcucggcgacgugcgcgagaccauguccuaccuguuccagcacgcgaaccuggacagcugcaagcggguccucaacguggugugcaagaccugcgggcagcagcagaccacccugaagggcgucgaggccgugauguacauggggacgcuguccuacgagcaguucaagaagggcgugcagauccccugcaccugcgggaagcaggccaccaaguaccucguccagcaggagagccccuucgugaugauguccgcccccccggcccaguacgagcugaagcacggcaccuucacgugcgcgagcgaguacaccggcaacuaccagugcgggcacuacaagcacaucaccuccaaggagacccuguacugcaucgacggcgcccuccugacgaagagcagcgaguacaaggggcccaucaccgacguguucuacaaggagaacuccuacaccaccacgaucaagcccgucaccuacaagcuggacggcguggugugcaccgagaucgaccccaagcucgacaacuacuacaagaaggacaacagcuacuucaccgagcagccgaucgaccugguccccaaccagcccuaccccaacgccuccuucgacaacuucaaguucgugugcgacaacaucaaguucgccgacgaccugaaccagcucacgggguacaagaagccggccagccgcgagcugaaggugaccuucuuccccgaccugaacggcgacgucguggcgaucgacuacaagcacuacacccccuccuucaagaagggcgccaagcuccugcacaagcccaucguguggcacgucaacaacgccaccaacaaggccacguacaagccgaacaccuggugcauccggugccuguggagcaccaagcccguggagaccuccaacagcuucgacgugcucaaguccgaggacgcgcaggggauggacaaccuggccugcgaggaccugaagcccgucagcgaggaggugguggagaaccccacgauccagaaggacguccucgagugcaacgugaagaccaccgagguggucggcgacaucauccugaagccggccaacaacucccugaagaucaccgaggagguggggcacacggaccucauggccgccuacguggacaacagcucccugaccaucaagaagcccaacgagcugagccgcguccucggccugaagacccuggcgacccacgggcucgccgccgugaacuccgugcccugggacacgaucgccaacuacgccaagccguuccugaacaaggucgugagcaccaccaccaacaucgugacgcgcugccugaaccgggucugcaccaacuacaugcccuacuucuucacccuccugcugcagcucugcaccuucacccgcuccacgaacagccggaucaaggcguccaugcccaccaccaucgccaagaacaccgugaagagcgugggcaaguucugccuggaggccagcuucaacuaccugaagucccccaacuucagcaagcucaucaacaucaucaucugguuccugcugcucuccgucugccugggcagccugaucuacuccacggccgcccucggggugcugaugagcaaccugggcaugccguccuacugcaccggguaccgcgagggcuaccucaacagcaccaacgugaccaucgcgacguacugcaccggcuccauccccugcagcgucugccuguccgggcuggacagccucgacaccuaccccucccuggagaccauccagaucacgaucagcuccuucaagugggaccugaccgccuucggccucguggccgagugguuccuggccuacauccuguucacccgguucuucuacgugcucgggcuggccgcgaucaugcagcuguucuucagcuacuucgccguccacuucaucuccaacagcuggcucauguggcugaucaucaaccuggugcagauggcccccaucuccgccauggugcgcauguacaucuucuucgcgagcuucuacuacgucuggaagagcuacgugcacguggucgacggcugcaacuccagcaccugcaugaugugcuacaagcggaaccgcgccacgcggguggagugcaccaccaucgucaacggggugcgccgguccuucuacguguacgccaacggcggcaagggguucugcaagcugcacaacuggaacugcgucaacugcgacaccuucugcgccggcagcacguucaucuccgacgagguggcccgcgaccucagccugcaguucaagcggccgaucaaccccaccgaccaguccagcuacaucguggacuccgucaccgugaagaacgggagcauccaccuguacuucgacaaggcgggccagaagaccuacgagcgccacucccucagccacuucgugaaccuggacaaccugcgggccaacaacacgaaggggucccuccccaucaacgucaucguguucgacggcaagagcaagugcgaggaguccagcgccaaguccgccagcguguacuacucccagcugaugugccagcccauccugcuccuggaccaggcccuggucagcgacgugggcgacagcgcggagguggccgucaagauguucgacgccuacgugaacaccuucuccagcaccuucaacgugccgauggagaagcucaagacccuggucgccacggccgaggcggagcuggccaagaacgugucccucgacaacgugcugagcaccuucaucuccgccgcccgccagggguucgucgacagcgacguggagaccaaggacguggucgagugccugaagcucucccaccagagcgacaucgaggugaccggcgacuccugcaacaacuacaugcugacguacaacaagguggagaacaugaccccccgggaccugggggcgugcaucgacugcagcgcccgccacaucaacgcccaggucgccaagucccacaacaucgcccucaucuggaacgugaaggacuucaugagccuguccgagcagcugcggaagcagauccgcagcgcggccaagaagaacaaccuccccuucaagcugaccugcgccaccacgcgccagguggucaacguggugaccaccaagaucgcccugaagggcgggugaggacuaguuauaagacugacuagcccgaugggccucccaacgggcccuccuccccuccuugcaccgagauuaauaaaaaaaaaaaaaaaaaaaaaaaaaaaaaaaaaaaaaaaaaaaaaaaaaaaaaaaaaaaaaaaaugcaucccccccccccccccccccccccccccccccaaaggcucuuuucagagccaccagaauu

SEQ ID NO: 21845 - RNA, 6058 nt, Artificial Sequence
  SARS-CoV-2__MT632503.1__non-structural protein 3 (NSP3) mRNA gc
aggagaaagcuuaccauggcccccaccaaggugaccuucggcgacgacacggucaucgaggugcagggguacaagagcgugaacaucaccuucgagcuggacgagcgcaucgacaagguccucaacgagaagugcuccgccuacaccguggagcugggcaccgaggugaacgaguucgcgugcgucguggccgacgccgugaucaagacgcugcagccggucagcgagcuccugaccccccuggggaucgaccucgacgagugguccauggccaccuacuaccuguucgacgagagcggcgaguucaagcuggccucccacauguacugcagcuucuacccccccgacgaggacgaggaggagggggacugcgaggaggaggaguucgagccguccacccaguacgaguacggcacggaggacgacuaccagggcaagccccucgaguucggggcgaccagcgccgcccugcagcccgaggaggagcaggaggaggacuggcuggacgacgacucccagcagaccgugggccagcaggacgggagcgaggacaaccagaccacgaccauccagaccaucguggagguccagccccagcucgagauggagcugaccccgguggugcagacgaucgaggucaacuccuucagcggcuaccugaagcucaccgacaacguguacaucaagaacgccgacaucguggaggaggcgaagaaggucaagcccaccgugguggucaacgccgccaacguguaccugaagcacgggggcggcguggccggggcccugaacaaggcgaccaacaacgccaugcaggucgaguccgacgacuacaucgccacgaacggcccccucaagguggggggcagcugcguccuguccggccacaaccuggccaagcacugccuccacgugguggggcccaacgucaacaagggcgaggacauccagcugcugaagagcgccuacgagaacuucaaccagcacgaggugcuccuggcgccgcugcucuccgccgggaucuucggcgccgaccccauccacagccugcgggugugcgucgacaccgugcgcaccaacguguaccuggccgucuucgacaagaaccucuacgacaagcugguguccagcuuccuggagaugaagagcgagaagcagguggagcagaagaucgccgagauccccaaggaggaggucaagcccuucaucaccgaguccaagccgagcguggagcagcggaagcaggacgacaagaagaucaaggcgugcguggaggaggucacgaccacccucgaggagaccaaguuccugacggagaaccugcuccuguacaucgacaucaacgggaaccugcaccccgacuccgccacccucgugagcgacaucgacaucaccuuccugaagaaggacgcccccuacaucgugggcgacgucgugcaggagggcgugcugaccgccgucgugauccccacgaagaaggccgggggcaccaccgagaugcucgcgaaggcccugcgcaaggugccgaccgacaacuacaucacgaccuaccccgggcagggccugaacggguacaccgucgaggaggccaagaccgugcucaagaagugcaaguccgccuucuacauccugcccagcaucaucuccaacgagaagcaggagauccugggcaccgugagcuggaaccuccgggagaugcuggcgcacgccgaggagacgcgcaagcugaugcccgucugcguggagaccaaggccaucguguccaccauccagcggaaguacaagggcaucaagauccaggagggggucguggacuacggcgcccgcuucuacuucuacaccagcaagacgaccguggccucccugaucaacacccucaacgaccugaacgagacccuggucacgaugccgcucggguacgugacccacggccugaaccuggaggaggcggcccgguacaugcgcagccucaaggugcccgccaccgucuccgugagcucccccgacgccgugaccgccuacaacggguaccugacgagcuccagcaagacccccgaggagcacuucaucgagaccaucucccuggcgggcagcuacaaggacuggagcuacuccggccagagcacccagcucgggaucgaguuccugaagcggggcgacaaguccgucuacuacacgagcaacccgaccaccuuccaccuggacggggaggugaucaccuucgacaaccucaagacgcugcugucccuccgcgaggugcggaccaucaaggucuucaccaccguggacaacaucaaccugcacacgcagguggucgacaugagcaugaccuacggccagcaguucggccccaccuaccuggacggggccgacgugaccaagaucaagccccacaacucccacgagggcaagacguucuacgugcucccgaacgacgacacccugcgcgucgaggccuucgaguacuaccacaccaccgaccccagcuuccuggggcgguacauguccgcccucaaccacacgaagaaguggaaguacccccaggugaacggccugaccagcaucaagugggccgacaacaacugcuaccuggcgaccgcccuccugacccugcagcagaucgagcucaaguucaaccccccggcccugcaggacgccuacuaccgcgcgcgggccggggaggccgccaacuucugcgcccugauccucgcguacugcaacaagacggugggcgagcugggcgacguccgcgagaccauguccuaccuguuccagcacgccaaccucgacagcugcaagcgggugcugaacgucgugugcaagaccugcgggcagcagcagaccacccugaagggcguggaggccgucauguacauggggacgcucuccuacgagcaguucaagaagggcgugcagauccccugcaccugcgggaagcaggccaccaaguaccuggugcagcaggagagccccuucgucaugauguccgcccccccggcgcaguacgagcugaagcacggcaccuucacgugcgccagcgaguacaccggcaacuaccagugcgggcacuacaagcacaucaccuccaaggagacccucuacugcaucgacggcgcccugcugacgaagagcagcgaguacaaggggcccaucaccgacguguucuacaaggagaacuccuacaccaccacgaucaagcccgugaccuacaagcucgacggcgucgugugcaccgagaucgaccccaagcuggacaacuacuacaagaaggacaacagcuacuucaccgagcagccgaucgaccuggugcccaaccagcccuaccccaacgccuccuucgacaacuucaaguucgucugcgacaacaucaaguucgccgacgaccucaaccagcugacgggguacaagaagccggcgagccgcgagcugaaggugaccuucuuccccgaccucaacggcgacguggucgccaucgacuacaagcacuacacccccuccuucaagaagggcgccaagcugcugcacaagcccaucguguggcacgugaacaacgccaccaacaaggcgacguacaagccgaacaccuggugcauccggugccucuggagcaccaagcccgucgagaccuccaacagcuucgacgugcugaaguccgaggacgcccaggggauggacaaccuggccugcgaggaccucaagcccgugagcgaggaggucguggagaaccccacgauccagaaggacgugcuggagugcaacgucaagaccaccgagguggugggcgacaucauccugaagccggccaacaacucccucaagaucaccgaggaggucgggcacacggaccugauggccgcguacguggacaacagcucccugaccaucaagaagcccaacgagcucagccgcgugcugggccugaagacccucgccacccacgggcuggccgccgucaacuccgugcccugggacacgaucgccaacuacgcgaagccguuccugaacaagguggucagcaccaccaccaacaucgugacgcgcugccucaaccgggugugcaccaacuacaugcccuacuucuucacccugcugcuccagcugugcaccuucacccgcuccacgaacagccggaucaaggccuccaugcccaccaccaucgccaagaacaccgucaagagcgugggcaaguucugccuggaggccagcuucaacuaccucaagucccccaacuucagcaagcugaucaacaucaucaucugguuccugcuccuguccgugugccugggcagccucaucuacuccacggccgcgcuggggguccugaugagcaaccucggcaugccguccuacugcaccggguaccgcgagggcuaccugaacagcaccaacgugaccaucgccacguacugcaccggcuccauccccugcagcgugugccuguccgggcucgacagccuggacaccuaccccucccuggagaccauccagaucacgaucagcuccuucaagugggaccucaccgccuucggccuggucgccgagugguuccuggccuacauccucuucacccgguucuucuacgugcuggggcuggcggccaucaugcagcucuucuucagcuacuucgccgugcacuucaucuccaacagcuggcugauguggcugaucaucaaccugguccagauggcccccaucuccgcgauggugcgcauguacaucuucuucgccagcuucuacuacguguggaagagcuacguccacgugguggacggcugcaacuccagcaccugcaugaugugcuacaagcggaaccgcgccacgcgggucgagugcaccaccaucgugaacgggguccgccgguccuucuacguguacgccaacggcggcaagggguucugcaagcuccacaacuggaacugcgugaacugcgacaccuucugcgccggcagcacguucaucuccgacgaggucgcgcgcgaccugagccugcaguucaagcggccgaucaaccccaccgaccaguccagcuacaucguggacuccgugaccgucaagaacgggagcauccaccucuacuucgacaaggccggccagaagaccuacgagcgccacucccugagccacuucgugaaccuggacaaccuccgggccaacaacacgaaggggucccugcccaucaacgugaucgucuucgacggcaagagcaagugcgaggaguccagcgccaaguccgccagcguguacuacucccagcugaugugccagcccauccuccugcuggaccaggcgcucgugagcgacgucggcgacagcgccgagguggccgugaagauguucgacgccuacgucaacaccuucuccagcaccuucaacgugccgauggagaagcugaagacccugguggccacggcggaggccgagcucgccaagaacgucucccuggacaacgugcugagcaucuucaucuccgccgcgcgccagggguucguggacagcgacgucgagaccaaggacgugguggagugccucaagcugucccaccagagcgacaucgaggucaccggcgacuccugcaacaacuacaugcugaccuacaacaagguggagaacaugacgccccgggaccucggggccugcaucgacugcagcgcccgccacaucaacgcccagguggccaagucccacaacaucgcgcugaucuggaacgucaaggacuucaugagccuguccgagcagcuccggaagcagauccgcagcgccgccaagaagaacaaccugcccuucaagcugaccugcgccaccacccgccagguggugaacgucgugacgaccaagaucgcccucaagggcgggugaggacuaguuauaagacugacuagcccgaugggccucccaacgggcccuccuccccuccuugcaccgagauuaauaaaaaaaaaaaaaaaaaaaaaaaaaaaaaaaaaaaaaaaaaaaaaaaaaaaaaaaaaaaaaaaaugcaucccccccccccccccccccccccccccccccaaaggcucuuuucagagccaccagaauu

SEQ ID NO: 21846 - RNA, 6058 nt, Artificial Sequence
  SARS-CoV-2__MT632621.1__non-structural protein 3 (NSP3) mRNA gc
aggagaaagcuuaccauggcccccaccaaggugaccuucggcgacgacacggucaucgaggugcagggguacaagagcgugaacaucaccuucgagcuggacgagcgcaucgacaagguccucaacgagaagugcuccgccuacaccguggagcugggcaccgaggugaacgaguucgcgugcgucguggccgacgccgugaucaagacgcugcagccggucagcgagcuccugaccccccuggggaucgaccucgacgagugguccauggccaccuacuaccuguucgacgagagcggcgaguucaagcuggccucccacauguacugcagcuucuacccccccgacgaggacgaggaggagggggacugcgaggaggaggaguucgagccguccacccaguacgaguacggcacggaggacgacuaccagggcaagccccucgaguucggggcgaccagcgccgcccugcagcccgaggaggagcaggaggaggacuggcuggacgacgacucccagcagaccgugggccagcaggacgggagcgaggacaaccagaccacgaccauccagaccaucguggagguccagccccagcucgagauggagcugaccccgguggugcagacgaucgaggucaacuccuucagcggcuaccugaagcucaccgacaacguguacaucaagaacgccgacaucguggaggaggcgaagaaggucaagcccaccgugguggucaacgccgccaacguguaccugaagcacgggggcggcguggccggggcccugaccaaggcgacgaacaacgccaugcaggucgaguccgacgacuacaucgccaccaacggcccccucaagguggggggcagcugcguccuguccggccacaaccuggccaagcacugccuccacgugguggggcccaacgucaacaagggcgaggacauccagcugcugaagagcgccuacgagaacuucaaccagcacgaggugcuccuggcgccgcugcucuccgccgggaucuucggcgccgaccccauccacagccugcgggugugcgucgacaccgugcgcaccaacguguaccuggccgucuucgacaagaaccucuacgacaagcugguguccagcuuccuggagaugaagagcgagaagcagguggagcagaagaucgccgagauccccaaggaggaggucaagcccuucaucacggaguccaagccgagcguggagcagcggaagcaggacgacaagaagaucaaggcgugcguggaggaggucaccaccacccucgaggagacgaaguuccugaccgagaaccugcuccuguacaucgacaucaacgggaaccugcaccccgacuccgccacccucgugagcgacaucgacaucaccuuccugaagaaggacgcccccuacaucgugggcgacgucgugcaggagggcgugcugacggccgucgugauccccaccaagaaggccgggggcaccaccgagaugcucgcgaaggcccugcgcaaggugccgacggacaacuacaucaccaccuaccccgggcagggccugaacggguacaccgucgaggaggccaagaccgugcucaagaagugcaaguccgccuucuacauccugcccagcaucaucuccaacgagaagcaggagauccugggcacggugagcuggaaccuccgggagaugcuggcgcacgccgaggagacccgcaagcugaugcccgucugcguggagaccaaggccaucguguccaccauccagcggaaguacaagggcaucaagauccaggagggggucguggacuacggcgcccgcuucuacuucuacacgagcaagaccaccguggccucccugaucaacacccucaacgaccugaacgagacgcuggucaccaugccgcucggguacgugacccacggccugaaccuggaggaggcggcccgguacaugcgcagccucaaggugcccgccaccgucuccgugagcucccccgacgccgugacggccuacaacggguaccugaccagcuccagcaagacccccgaggagcacuucaucgagaccaucucccuggcgggcagcuacaaggacuggagcuacuccggccagagcacgcagcucgggaucgaguuccugaagcggggcgacaaguccgucuacuacaccagcaacccgaccaccuuccaccuggacggggaggugaucacguucgacaaccucaagacccugcugucccuccgcgaggugcggaccaucaaggucuucaccacgguggacaacaucaaccugcacacccagguggucgacaugagcaugaccuacggccagcaguucggccccaccuaccuggacggggccgacgugacgaagaucaagccccacaacucccacgagggcaagaccuucuacgugcucccgaacgacgacacccugcgcgucgaggccuucgaguacuaccacaccacggaccccagcuuccuggggcgguacauguccgcccucaaccacaccaagaaguggaaguacccccaggugaacggccugaccagcaucaagugggccgacaacaacugcuaccuggcgaccgcccuccugacgcugcagcagaucgagcucaaguucaaccccccggcccugcaggacgccuacuaccgcgcgcgggccggggaggccgccaacuucugcgcccugauccucgcguacugcaacaagaccgugggcgagcugggcgacguccgcgagaccauguccuaccuguuccagcacgccaaccucgacagcugcaagcgggugcugaacgucgugugcaagaccugcgggcagcagcagaccacgcugaagggcguggaggccgucauguacauggggacccucuccuacgagcaguucaagaagggcgugcagauccccugcaccugcgggaagcaggccaccaaguaccuggugcagcaggagagccccuucgucaugauguccgcccccccggcgcaguacgagcugaagcacggcacguucaccugcgccagcgaguacaccggcaacuaccagugcgggcacuacaagcacaucaccuccaaggagacgcucuacugcaucgacggcgcccugcugaccaagagcagcgaguacaaggggcccaucaccgacguguucuacaaggagaacuccuacaccacgaccaucaagcccgugaccuacaagcucgacggcgucgugugcaccgagaucgaccccaagcuggacaacuacuacaagaaggacaacagcuacuucacggagcagccgaucgaccuggugcccaaccagcccuaccccaacgccuccuucgacaacuucaaguucgucugcgacaacaucaaguucgccgacgaccucaaccagcugaccggguacaagaagccggcgagccgcgagcugaaggugaccuucuuccccgaccucaacggcgacguggucgccaucgacuacaagcacuacacccccuccuucaagaagggcgccaagcugcugcacaagcccaucguguggcacgugaacaacgccacgaacaaggcgaccuacaagccgaacaccuggugcauccggugccucuggagcaccaagcccgucgagacguccaacagcuucgacgugcugaaguccgaggacgcccaggggauggacaaccuggccugcgaggaccucaagcccgugagcgaggaggucguggagaaccccaccauccagaaggacgugcuggagugcaacgucaagaccaccgagguggugggcgacaucauccugaagccggccaacaacucccucaagaucacggaggaggucgggcacaccgaccugauggccgcguacguggacaacagcucccugaccaucaagaagcccaacgagcucagccgcgugcugggccugaagacccucgccacgcacgggcuggccgccgucaacuccgugcccugggacaccaucgccaacuacgcgaagccguuccugaacaagguggucagcaccaccacgaacaucgugacccgcugccucaaccgggugugcaccaacuacaugcccuacuucuucacccugcugcuccagcugugcaccuucacgcgcuccaccaacagccggaucaaggccuccaugcccaccaccaucgccaagaacacggucaagagcgugggcaaguucugccuggaggccagcuucaacuaccucaagucccccaacuucagcaagcugaucaacaucaucaucugguuccugcuccuguccgugugccugggcagccucaucuacuccaccgccgcgcuggggguccugaugagcaaccucggcaugccguccuacugcaccggguaccgcgagggcuaccugaacagcaccaacgugacgaucgccaccuacugcaccggcuccauccccugcagcgugugccuguccgggcucgacagccuggacaccuaccccucccuggagacgauccagaucaccaucagcuccuucaagugggaccucaccgccuucggccuggucgccgagugguuccuggccuacauccucuucacccgguucuucuacgugcuggggcuggcggccaucaugcagcucuucuucagcuacuucgccgugcacuucaucuccaacagcuggcugauguggcugaucaucaaccugguccagauggcccccaucuccgcgauggugcgcauguacaucuucuucgccagcuucuacuacguguggaagagcuacguccacgugguggacggcugcaacuccagcacgugcaugaugugcuacaagcggaaccgcgccacccgggucgagugcaccaccaucgugaacgggguccgccgguccuucuacguguacgccaacggcggcaagggguucugcaagcuccacaacuggaacugcgugaacugcgacacguucugcgccggcagcaccuucaucuccgacgaggucgcgcgcgaccugagccugcaguucaagcggccgaucaaccccaccgaccaguccagcuacaucguggacuccgugaccgucaagaacgggagcauccaccucuacuucgacaaggccggccagaagacguacgagcgccacucccugagccacuucgugaaccuggacaaccuccgggccaacaacaccaaggggucccugcccaucaacgugaucgucuucgacggcaagagcaagugcgaggaguccagcgccaaguccgccagcguguacuacucccagcugaugugccagcccauccuccugcuggaccaggcgcucgugagcgacgucggcgacagcgccgagguggccgugaagauguucgacgccuacgucaacaccuucuccagcaccuucaacgugccgauggagaagcugaagacgcugguggccaccgcggaggccgagcucgccaagaacgucucccuggacaacgugcugagcaccuucaucuccgccgcgcgccagggguucguggacagcgacgucgagaccaaggacgugguggagugccucaagcugucccaccagagcgacaucgaggucacgggcgacuccugcaacaacuacaugcugaccuacaacaagguggagaacaugaccccccgggaccucggggccugcaucgacugcagcgcccgccacaucaacgcccagguggccaagucccacaacaucgcgcugaucuggaacgucaaggacuucaugagccuguccgagcagcuccggaagcagauccgcagcgccgccaagaagaacaaccugcccuucaagcugaccugcgccacgacccgccagguggugaacgucgugaccaccaagaucgcccucaagggcgggugaggacuaguuauaagacugacuagcccgaugggccucccaacgggcccuccuccccuccuugcaccgagauuaauaaaaaaaaaaaaaaaaaaaaaaaaaaaaaaaaaaaaaaaaaaaaaaaaaaaaaaaaaaaaaaaaugcaucccccccccccccccccccccccccccccccaaaggcucuuuucagagccaccagaauu

SEQ ID NO: 21847 - RNA, 6058 nt, Artificial Sequence
  SARS-CoV-2__MT632626.1__non-structural protein 3 (NSP3) mRNA gc
aggagaaagcuuaccauggcccccaccaaggugaccuucggcgacgacacggucaucgaggugcagggguacaagagcgugaacaucaccuucgagcuggacgagcgcaucgacaagguccucaacgagaagugcuccgccuacaccguggagcugggcaccgaggugaacgaguucgcgugcgucguggccgacgccgugaucaagacgcugcagccggucagcgagcuccugaccccccuggggaucgaccucgacgagugguccauggccaccuacuaccuguucgacgagagcggcgaguucaagcuggccucccacauguacugcagcuucuacccccccgacgaggacgaggaggagggggacugcgaggaggaggaguucgagccguccacccaguacgaguacggcacggaggacgacuaccagggcaagccccucgaguucggggcgaccagcgccgcccugcagcccgaggaggagcaggaggaggacuggcuggacgacgacucccagcagaccgugggccagcaggacgggagcgaggacaaccagaccacgaccauccagaccaucguggagguccagccccagcucgagauggagcugaccccgguggugcagacgaucgaggucaacuccuucagcggcuaccugaagcucaccgacaacguguacaucaagaacgccgacaucguggaggaggcgaagaaggucaagcccaccgugguggucaacgccgccaacguguaccugaagcacgggggcggcguggccggggcccugaacaaggcgaccaacaacgccaugcaggucgaguccgacgacuacaucgccacgaacggcccccucaagguggggggcagcugcguccuguccggccacaaccuggccaagcacugccuccacgugguggggcccaacgucaacaagggcgaggacauccagcugcugaagagcgccuacgagaacuucaaccagcacgaggugcuccuggcgccgcugcucuccgccgggaucuucggcgccgaccccauccacagccugcgggugugcgucgacaccgugcgcaccaacguguaccuggccgucuucgacaagaaccucuacgacaagcugguguccagcuuccuggagaugaagagcgagaagcagguggagcagaagaucgccgagauccccaaggaggaggucaagcccuucaucaccgaguccaagccgagcguggagcagcggaagcaggacgacaagaagaucaaggcgugcguggaggaggucacgaccacccucgaggagaccaaguuccugacggagaaccugcuccuguacaucgacaucaacgggaaccugcaccccgacuccgccacccucgugagcgacaucgacgugaccuuccugaagaaggacgcccccuacaucgucggcgacguggugcaggagggcguccugaccgccguggugauccccacgaagaaggccgggggcaccaccgagaugcucgcgaaggcccugcgcaaggucccgaccgacaacuacaucacgaccuaccccgggcagggccugaacggguacaccguggaggaggccaagaccgugcucaagaagugcaaguccgccuucuacauccugcccagcaucaucuccaacgagaagcaggagauccugggcaccgucagcuggaaccuccgggagaugcuggcgcacgccgaggagacgcgcaagcugaugcccgugugcguggagaccaaggccaucgucuccaccauccagcggaaguacaagggcaucaagauccaggagggggugguggacuacggcgcccgcuucuacuucuacaccagcaagacgaccgucgccucccugaucaacacccucaacgaccugaacgagacccuggugacgaugccgcucggguacgugacccacggccugaaccuggaggaggcggcccgguacaugcgcagccucaagguccccgccaccguguccgugagcucccccgacgccgucaccgccuacaacggguaccugacgagcuccagcaagacccccgaggagcacuucaucgagaccaucucccuggcgggcagcuacaaggacuggagcuacuccggccagagcacccagcucgggaucgaguuccugaagcggggcgacaaguccguguacuacacgagcaacccgaccaccuuccaccuggacggggaggugaucaccuucgacaaccucaagacgcugcugucccuccgcgagguccggaccaucaagguguucaccaccguggacaacaucaaccugcacacgcaggucguggacaugagcaugaccuacggccagcaguucggccccaccuaccuggacggggccgacgugaccaagaucaagccccacaacucccacgagggcaagacguucuacguccucccgaacgacgacacccugcgcguggaggccuucgaguacuaccacaccaccgaccccagcuuccuggggcgguacauguccgcccucaaccacacgaagaaguggaaguacccccaggugaacggccugaccagcaucaagugggccgacaacaacugcuaccuggcgaccgcccuccugacccugcagcagaucgagcucaaguucaaccccccggcccugcaggacgccuacuaccgcgcgcgggccggggaggccgccaacuucugcgcccugauccucgcguacugcaacaagacggucggcgagcugggcgacgugcgcgagaccauguccuaccuguuccagcacgccaaccucgacagcugcaagcggguccugaacguggugugcaagaccugcgggcagcagcagaccacccugaagggcgucgaggccgugauguacauggggacgcucuccuacgagcaguucaagaagggcgugcagauccccugcaccugcgggaagcaggccaccaaguaccugguccagcaggagagccccuucgugaugauguccgcccccccggcgcaguacgagcugaagcacggcaccuucacgugcgccagcgaguacaccggcaacuaccagugcgggcacuacaagcacaucaccuccaaggagacccucuacugcaucgacggcgcccugcugacgaagagcagcgaguacaaggggcccaucaccgacguguucuacaaggagaacuccuacaccaccacgaucaagcccgucaccuacaagcucgacggcguggugugcaccgagaucgaccccaagcuggacaacuacuacaagaaggacaacagcuacuucaccgagcagccgaucgaccugguccccaaccagcccuaccccaacgccuccuucgacaacuucaaguucgugugcgacaacaucaaguucgccgacgaccucaaccagcugacgggguacaagaagccggcgagccgcgagcugaaggugaccuucuuccccgaccucaacggcgacgucguggccaucgacuacaagcacuacacccccuccuucaagaagggcgccaagcugcugcacaagcccaucguguggcacgucaacaacgccaccaacaaggcgacguacaagccgaacaccuggugcauccggugccucuggagcaccaagcccguggagaccuccaacagcuucgacgugcugaaguccgaggacgcccaggggauggacaaccuggccugcgaggaccucaagcccgucagcgaggaggugguggagaaccccacgauccagaaggacguccuggagugcaacgugaagaccaccgagguggucggcgacaucauccugaagccggccaacaacucccucaagaucaccgaggagguggggcacacggaccugauggccgcguacguggacaacagcucccugaccaucaagaagcccaacgagcucagccgcguccugggccugaagacccucgccacccacgggcuggccgccgugaacuccgugcccugggacacgaucgccaacuacgcgaagccguuccugaacaaggucgugagcaccaccaccaacaucgugacgcgcugccucaaccgggucugcaccaacuacaugcccuacuucuucacccugcugcuccagcugugcaccuucacccgcuccacgaacagccggaucaaggccuccaugcccaccaccaucgccaagaacaccgugaagagcgugggcaaguucugccuggaggccagcuucaacuaccucaagucccccaacuucagcaagcugaucaacaucaucaucugguuccugcuccuguccgucugccugggcagccucaucuacuccacggccgcgcugggggugcugaugagcaaccucggcaugccguccuacugcaccggguaccgcgagggcuaccugaacagcaccaacgugaccaucgccacguacugcaccggcuccauccccugcagcgucugccuguccgggcucgacagccuggacaccuaccccucccuggagaccauccagaucacgaucagcuccuucaagugggaccucaccgccuucggccugguggccgagugguuccuggccuacauccucuucacccgguucuucuacgugcuggggcuggcggccaucaugcagcucuucuucagcuacuucgccguccacuucaucuccaacagcuggcugauguggcugaucaucaaccuggugcagauggcccccaucuccgcgauggugcgcauguacaucuucuucgccagcuucuacuacgucuggaagagcuacgugcacguggucgacggcugcaacuccagcaccugcaugaugugcuacaagcggaaccgcgccacgcggguggagugcaccaccaucgucaacggggugcgccgguccuucuacguguacgccaacggcggcaagggguucugcaagcuccacaacuggaacugcgucaacugcgacaccuucugcgccggcagcacguucaucuccgacgagguggcgcgcgaccugagccugcaguucaagcggccgaucaaccccaccgaccaguccagcuacaucguggacuccgucaccgugaagaacgggagcauccaccucuacuucgacaaggccggccagaagaccuacgagcgccacucccugagccacuucgugaaccuggacaaccuccgggccaacaacacgaaggggucccugcccaucaacgucaucguguucgacggcaagagcaagugcgaggaguccagcgccaaguccgccagcguguacuacucccagcugaugugccagcccauccuccugcuggaccaggcgcucgucagcgacgugggcgacagcgccgagguggccgucaagauguucgacgccuacgugaacaccuucuccagcaccuucaacgugccgauggagaagcugaagacccuggucgccacggcggaggccgagcucgccaagaacgugucccuggacaacgugcugagcaccuucaucuccgccgcgcgccagggguucgucgacagcgacguggagaccaaggacguggucgagugccucaagcugucccaccagagcgacaucgaggugaccggcgacuccugcaacaacuacaugcugacguacaacaagguggagaacaugaccccccgggaccucggggccugcaucgacugcagcgcccgccacaucaacgcccaggucgccaagucccacaacaucgcgcugaucuggaacgugaaggacuucaugagccuguccgagcagcuccggaagcagauccgcagcgccgccaagaagaacaaccugcccuucaagcugaccugcgccaccacgcgccagguggucaacguggugaccaccaagaucgcccucaagggcgggugaggacuaguuauaagacugacuagcccgaugggccucccaacgggcccuccuccccuccuugcaccgagauuaauaaaaaaaaaaaaaaaaaaaaaaaaaaaaaaaaaaaaaaaaaaaaaaaaaaaaaaaaaaaaaaaaugcaucccccccccccccccccccccccccccccccaaaggcucuuuucagagccaccagaauu

SEQ ID NO: 21848 - RNA, 6058 nt, Artificial Sequence
  SARS-CoV-2__MT632766.1__non-structural protein 3 (NSP3) mRNA gc
aggagaaagcuuaccauggcccccaccaaggugaccuucggcgacgacacggucaucgaggugcagggguacaagagcgugaacaucaccuucgagcuggacgagcgcaucgacaagguccucaacgagaagugcuccgccuacaccguggagcugggcaccgaggugaacgaguucgcgugcgucguggccgacgccgugaucaagacgcugcagccggucagcgagcuccugaccccccuggggaucgaccucgacgagugguccauggccaccuacuaccuguucgacgagagcggcgaguucaagcuggccucccacauguacugcagcuucuacccccccgacgaggacgaggaggagggggacugcgaggaggaggaguucgagccguccacccaguacgaguacggcacggaggacgacuaccagggcaagccccucgaguucggggcgaccagcgccgcccugcagcccgaggaggagcaggaggaggacuggcuggacgacgacucccagcagaccgugggccagcaggacgggagcgaggacaaccagaccacgaccauccagaccaucguggagguccagccccagcucgagauggagcugaccccgguggugcagacgaucgaggucaacuccuucagcggcuaccugaagcucaccgacaacguguacaucaagaacgccgacaucguggaggaggcgaagaaggucaagcccaccgugguggucaacgccgccaacguguaccugaagcacgggggcggcguggccggggcccugaacaaggcgaccaacaacgccaugcaggucgaguccgacgacuacaucgccacgaacggcccccucaagguggggggcagcugcguccuguccggccacaaccuggccaagcacugccuccacgugguggggcccaacgucaacaagggcgaggacauccagcugcugaagagcgccuacgagaacuucaaccagcacgaggugcuccuggcgccgcugcucuccgccgggaucuucggcgccgaccccauccacagccugcgggugugcgucgacaccgugcgcaccaacguguaccuggccgucuucgacaagaaccucuacgacaagcugguguccagcuuccuggagaugaagagcgagaagcagguggagcagaagaucgccgagauccccaaggaggaggucaagcccuucaucaccgaguccaagccgagcguggagcagcggaagcaggacgacaagaagaucaaggcgugcguggaggaggucacgaccacccucgaggagaccaaguuccugacggagaaccugcuccuguacaucgacaucaacgggaaccugcaccccgacuccgccacccucgugagcgacaucgacaucaccuuccugaagaaggacgcccccuacaucgugggcgacgucgugcaggagggcgugcugaccgccgucgugauccccacgaagaaggccgggggcaccaccgagaugcucgcgaaggcccugcgcaaggugccgaccgacaacuacaucacgaccuaccccgggcagggccugaacggguacaccgucgaggaggccaagaccgugcucaagaagugcaaguccgccuucuacauccugcccagcaucaucuccaacgagaagcaggagauccugggcaccgugagcuggaaccuccgggagaugcuggcgcacgccgaggagacgcgcaagcugaugcccgucugcguggagaccaaggccaucguguccaccauccagcggaaguacaagggcaucaagauccaggagggggucguggacuacggcgcccgcuucuacuucuacaccagcaagacgaccguggccucccugaucaacacccucaacgaccugaacgagacccuggucacgaugccgcucggguacgugacccacggccugaaccuggaggaggcggcccgguacaugcgcagccucaaggugcccgccaccgucuccgugagcucccccgacgccgugaccgccuacaacggguaccugacgagcuccagcaagacccccgaggagcacuucaucgagaccaucucccuggcgggcagcuacaaggacuggagcuacuccggccagagcacccagcucgggaucgaguuccugaagcggggcgacaaguccgucuacuacacgagcaacccgaccaccuuccaccuggacggggaggugaucaccuucgacaaccucaagacgcugcugucccuccgcgaggugcggaccaucaaggucuucaccaccguggacaacaucaaccugcacacgcagguggucgacaugagcaugaccuacggccagcaguucggccccaccuaccuggacggggccgacgugaccaagaucaagccccacaacucccacgagggcaagacguucuacgugcucccgaacgacgacacccugcgcgucgaggccuucgaguacuaccacaccaccgaccccagcuuccuggggcgguacauguccgcccucaaccacacgaagaaguggaaguacccccaggugaacggccugaccagcaucaagugggccgacaacaacugcuaccuggcgaccgugcuccugacccugcagcagaucgagcucaaguucaaccccccggcccugcaggacgccuacuaccgcgcccgggcgggggaggccgccaacuucugcgcccugauccucgccuacugcaacaagacggucggcgagcugggcgacgugcgcgagaccauguccuaccuguuccagcacgcgaaccucgacagcugcaagcggguccugaacguggugugcaagaccugcgggcagcagcagaccacccugaagggcgucgaggccgugauguacauggggacgcucuccuacgagcaguucaagaagggcgugcagauccccugcaccugcgggaagcaggccaccaaguaccugguccagcaggagagccccuucgugaugauguccgcccccccggcccaguacgagcugaagcacggcaccuucacgugcgcgagcgaguacaccggcaacuaccagugcgggcacuacaagcacaucaccuccaaggagacccucuacugcaucgacggcgcccugcugacgaagagcagcgaguacaaggggcccaucaccgacguguucuacaaggagaacuccuacaccaccacgaucaagcccgucaccuacaagcucgacggcguggugugcaccgagaucgaccccaagcuggacaacuacuacaagaaggacaacagcuacuucaccgagcagccgaucgaccugguccccaaccagcccuaccccaacgccuccuucgacaacuucaaguucgugugcgacaacaucaaguucgccgacgaccucaaccagcugacgggguacaagaagccggccagccgcgagcugaaggugaccuucuuccccgaccucaacggcgacgucguggcgaucgacuacaagcacuacacccccuccuucaagaagggcgccaagcugcugcacaagcccaucguguggcacgucaacaacgccaccaacaaggccacguacaagccgaacaccuggugcauccggugccucuggagcaccaagcccguggagaccuccaacagcuucgacgugcugaaguccgaggacgcgcaggggauggacaaccuggccugcgaggaccucaagcccgucagcgaggaggugguggagaaccccacgauccagaaggacguccuggagugcaacgugaagaccaccgagguggucggcgacaucauccugaagccggccaacaacucccucaagaucaccgaggagguggggcacacggaccugauggccgccuacguggacaacagcucccugaccaucaagaagcccaacgagcucagccgcguccugggccugaagacccucgcgacccacgggcuggccgccgugaacuccgugcccugggacacgaucgccaacuacgcccgcccguuccugaacaaggucgugagcaccaccaccaacaucgugacgcggugccucaaccgcgucugcaccaacuacaugcccuacuucuucacccugcugcuccagcugugcaccuucacccgguccacgaacagccgcaucaaggcguccaugcccaccaccaucgccaagaacaccgugaagagcgugggcaaguucugccuggaggccagcuucaacuaccucaagucccccaacuucagcaagcugaucaacaucaucaucugguuccugcuccuguccgucugccugggcagccucaucuacuccacggccgcccugggggugcugaugagcaaccucggcaugccguccuacugcaccggguaccgggagggcuaccugaacagcaccaacgugaccaucgcgacguacugcaccggcuccauccccugcagcgucugccuguccgggcucgacagccuggacaccuaccccucccuggagaccauccagaucacgaucagcuccuucaagugggaccucaccgccuucggccugguggccgagugguuccuggccuacauccucuucacccgcuucuucuacgugcuggggcuggccgcgaucaugcagcucuucuucagcuacuucgccguccacuucaucuccaacagcuggcugauguggcugaucaucaaccuggugcagauggcccccaucuccgccauggugcggauguacaucuucuucgcgagcuucuacuacgucuggaagagcuacgugcacguggucgacggcugcaacuccagcaccugcaugaugugcuacaagcgcaaccgggccacgcgcguggagugcaccaccaucgucaacggggugcggcgcuccuucuacguguacgccaacggcggcaagggguucugcaagcuccacaacuggaacugcgucaacugcgacaccuucugcgccggcagcacguucaucuccgacgagguggcccgggaccugagccugcaguucaagcgcccgaucaaccccaccgaccaguccagcuacaucguggacuccgucaccgugaagaacgggagcauccaccucuacuucgacaaggcgggccagaagaccuacgagcggcacucccugagccacuucgugaaccuggacaaccuccgcgccaacaacacgaaggggucccugcccaucaacgucaucguguucgacggcaagagcaagugcgaggaguccagcgccaaguccgccagcguguacuacucccagcugaugugccagcccauccuccugcuggaccaggcccucgucagcgacgugggcgacagcgcggagguggccgucaagauguucgacgccuacgugaacaccuucuccagcaccuucaacgugccgauggagaagcugaagacccuggucgccacggccgaggcggagcucgccaagaacgugucccuggacaacgugcugagcaccuucaucuccgccgcccggcagggguucgucgacagcgacguggagaccaaggacguggucgagugccucaagcugucccaccagagcgacaucgaggugaccggcgacuccugcaacaacuacaugcugacguacaacaagguggagaacaugaccccccgcgaccucggggcgugcaucgacugcagcgcccggcacaucaacgcccaggucgccaagucccacaacaucgcccugaucuggaacgugaaggacuucaugagccuguccgagcagcuccgcaagcagauccgcagcgcggccaagaagaacaaccugcccuucaagcugaccugcgccaccacgcggcagguggucaacguggugaccaccaagaucgcccucaagggcgggugaggacuaguuauaagacugacuagcccgaugggccucccaacgggcccuccuccccuccuugcaccgagauuaauaaaaaaaaaaaaaaaaaaaaaaaaaaaaaaaaaaaaaaaaaaaaaaaaaaaaaaaaaaaaaaaaugcaucccccccccccccccccccccccccccccccaaaggcucuuuucagagccaccagaauu

SEQ ID NO: 21849 - RNA, 6058 nt, Artificial Sequence
  SARS-CoV-2__MT632776.1__non-structural protein 3 (NSP3) mRNA gc
aggagaaagcuuaccauggcccccaccaaggugaccuucggcgacgacacggucaucgaggugcagggguacaagagcgugaacaucaccuucgagcuggacgagcgcaucgacaagguccucaacgagaagugcuccgccuacaccguggagcugggcaccgaggugaacgaguucgcgugcgucguggccgacgccgugaucaagacgcugcagccggucagcgagcuccugaccccccuggggaucgaccucgacgagugguccauggccaccuacuaccuguucgacgagagcggcgaguucaagcuggccucccacauguacugcagcuucuacccccccgacgaggacgaggaggagggggacugcgaggaggaggaguucgagccguccacccaguacgaguacggcacggaggacgacuaccagggcaagccccucgaguucggggcgaccagcgccgcccugcagcuggaggaggagcaggaggaggacuggcucgacgacgacucccagcagaccgugggccagcaggacgggagcgaggacaaccagaccacgaccauccagaccaucguggagguccagccccagcuggagauggagcugacccccguggugcagacgaucgaggucaacuccuucagcggcuaccucaagcugaccgacaacguguacaucaagaacgccgacguggucgaggaggcgaagaaggugaagccgaccguggucgugaacgccgccaacguguaccugaagcacgggggcggcgucgccggggcccucaacaaggcgaccaacaacgccaugcagguggaguccgacgacuacaucgccacgaacggcccccugaaggucgggggcagcugcgugcuguccggccacaaccucgccaagcacugccugcacguggucgggcccaacgugaacaagggcgaggacauccagcugcucaagagcgccuacgagaacuucaaccagcacgaggugcugcuggcgccccuccuguccgccgggaucuucggcgccgacccgauccacagccugcgggucugcguggacaccgugcgcaccaacgucuaccucgccguguucgacaagaaccuguacgacaagcugguguccagcuuccucgagaugaagagcgagaagcaggucgagcagaagaucgccgagauccccaaggaggaggugaagcccuucaucaccgaguccaagcccagcguggagcagcggaagcaggacgacaagaagaucaaggcgugcgucgaggaggugacgaccacccuggaggagaccaaguuccugacggagaaccuccugcuguacaucgacaucaacgggaaccuccacccggacuccgccacccuggugagcgacaucgacaucaccuuccugaagaaggacgcccccuacaucgucggcgacguggugcaggagggcguccucaccgccguggugauccccacgaagaaggccgggggcaccaccgagaugcuggcgaaggcccugcgcaagguccccaccgacaacuacaucacgaccuacccggggcagggccucaacggguacaccguggaggaggccaagaccgugcugaagaagugcaaguccgccuucuacauccugcccagcaucaucuccaacgagaagcaggagauccucggcaccgucagcuggaaccugcgggagaugcuggcgcacgccgaggagacgcgcaagcugaugcccgugugcguggagaccaaggccaucgucuccaccauccagcggaaguacaagggcaucaagauccaggagggggugguggacuacggcgcccgcuucuacuucuacaccagcaagacgaccgucgccucccucaucaacacccugaacgaccugaacgagacccucgugacgaugccccugggguacgugacccacggccugaaccucgaggaggcggcccgguacaugcgcagccugaaggucccggccaccguguccgugagcucccccgacgccgucaccgccuacaacggguaccugacgagcuccagcaagacccccgaggagcacuucaucgagaccaucucccucgcgggcagcuacaaggacuggagcuacuccggccagagcacccagcuggggaucgaguuccugaagcggggcgacaaguccguguacuacacgagcaaccccaccaccuuccaccucgacggggaggugaucaccuucgacaaccugaagacgcugcucucccugcgcgagguccggaccaucaagguguucaccaccguggacaacaucaaccugcacacgcaggucguggacaugagcaugaccuacggccagcaguucggcccgaccuaccucgacggggccgacgugaccaagaucaagccccacaacucccacgagggcaagacguucuacguccugcccaacgacgacacccugcgcguggaggccuucgaguacuaccacaccaccgacccgagcuuccucgggcgguacauguccgcccugaaccacacgaagaaguggaaguacccccaggugaacggccugaccagcaucaagugggccgacaacaacugcuaccucgcgaccgcccugcugacccuccagcagaucgagcugaaguucaacccccccgcccugcaggacgccuacuaccgcgcgcgggccggggaggccgccaacuucugcgcccucauccuggcguacugcaacaagacggucggcgagcugggcgacgugcgcgagaccauguccuaccucuuccagcacgccaaccuggacagcugcaagcggguccugaacguggugugcaagaccugcgggcagcagcagaccacccucaagggcgucgaggccgugauguacauggggacgcuguccuacgagcaguucaagaagggcgugcagaucccgugcaccugcgggaagcaggccaccaaguaccugguccagcaggagagccccuucgugaugauguccgccccccccgcgcaguacgagcucaagcacggcaccuucacgugcgccagcgaguacaccggcaacuaccagugcgggcacuacaagcacaucaccuccaaggagacccuguacugcaucgacggcgcccugcucacgaagagcagcgaguacaaggggccgaucaccgacguguucuacaaggagaacuccuacaccaccacgaucaagcccgucaccuacaagcuggacggcguggugugcaccgagaucgaccccaagcuggacaacuacuacaagaaggacaacagcuacuucaccgagcagcccaucgaccucgucccgaaccagcccuaccccaacgccuccuucgacaacuucaaguucgugugcgacaacaucaaguucgccgacgaccugaaccagcugacgggguacaagaagcccgcgagccgcgagcucaaggugaccuucuucccggaccugaacggcgacgucguggccaucgacuacaagcacuacacccccuccuucaagaagggcgccaagcugcuccacaagcccaucguguggcacgucaacaacgccaccaacaaggcgacguacaagcccaacaccuggugcauccggugccuguggagcaccaagccgguggagaccuccaacagcuucgacgugcugaaguccgaggacgcccaggggauggacaaccucgccugcgaggaccugaagcccgucagcgaggaggugguggagaaccccacgauccagaaggacguccuggagugcaacgugaagaccaccgagguggucggcgacaucauccucaagcccgccaacaacucccugaagaucaccgaggagguggggcacacggaccugauggccgcguacguggacaacagcucccucaccaucaagaagccgaacgagcugagccgcguccugggccucaagacccuggccacccacgggcuggccgccgugaacuccgugcccugggacacgaucgccaacuacgcgaagcccuuccucaacaaggucgugagcaccaccaccaacaucgugacgcgcugccugaaccgggucugcaccaacuacaugccguacuucuucacccugcuccugcagcugugcaccuucacccgcuccacgaacagccggaucaaggccuccaugcccaccaccaucgccaagaacaccgugaagagcgugggcaaguucugccucgaggccagcuucaacuaccugaagucccccaacuucagcaagcugaucaacaucaucaucugguuccuccugcuguccgucugccucggcagccugaucuacuccacggccgcgcugggggugcucaugagcaaccugggcaugcccuccuacugcaccggguaccgcgagggcuaccugaacagcaccaacgugaccaucgccacguacugcaccggcuccaucccgugcagcgucugccucuccgggcuggacagccuggacaccuaccccucccucgagaccauccagaucacgaucagcuccuucaagugggaccugaccgccuucggccugguggccgagugguuccucgccuacauccuguucacccgguucuucuacgugcuggggcucgcggccaucaugcagcuguucuucagcuacuucgccguccacuucaucuccaacagcuggcugauguggcugaucaucaaccucgugcagauggcccccaucuccgcgauggugcgcauguacaucuucuucgccagcuucuacuacgucuggaagagcuacgugcacguggucgacggcugcaacuccagcaccugcaugaugugcuacaagcggaaccgcgccacgcggguggagugcaccaccaucgucaacggggugcgccgguccuucuacguguacgccaacggcggcaagggguucugcaagcugcacaacuggaacugcgucaacugcgacaccuucugcgccggcagcacguucaucuccgacgagguggcgcgcgaccugagccuccaguucaagcggcccaucaacccgaccgaccaguccagcuacaucguggacuccgucaccgugaagaacgggagcauccaccuguacuucgacaaggccggccagaagaccuacgagcgccacucccugagccacuucgugaaccucgacaaccugcgggccaacaacacgaaggggucccugcccaucaacgucaucguguucgacggcaagagcaagugcgaggaguccagcgccaaguccgccagcguguacuacucccagcucaugugccagcccauccugcugcucgaccaggcgcuggucagcgacgugggcgacagcgccgagguggccgucaagauguucgacgccuacgugaacaccuucuccagcaccuucaacgugcccauggagaagcugaagacccucgucgccacggcggaggccgagcuggccaagaacgugucccuggacaacgugcucagcaccuucaucuccgccgcgcgccagggguucgucgacagcgacguggagaccaaggacguggucgagugccugaagcugucccaccagagcgacaucgaggugaccggcgacuccugcaacaacuacaugcucacguacaacaagguggagaacaugaccccgcgggaccugggggccugcaucgacugcagcgcccgccacaucaacgcccaggucgccaagucccacaacaucgcgcugaucuggaacgugaaggacuucaugagccucuccgagcagcugcggaagcagauccgcagcgccgccaagaagaacaaccugcccuucaagcucaccugcgccaccacgcgccagguggucaacguggugaccaccaagaucgcccugaagggcgggugaggacuaguuauaagacugacuagcccgaugggccucccaacgggcccuccuccccuccuugcaccgagauuaauaaaaaaaaaaaaaaaaaaaaaaaaaaaaaaaaaaaaaaaaaaaaaaaaaaaaaaaaaaaaaaaaugcaucccccccccccccccccccccccccccccccaaaggcucuuuucagagccaccagaauu

SEQ ID NO: 21850 - RNA, 6058 nt, Artificial Sequence
  SARS-CoV-2__MT632780.1__non-structural protein 3 (NSP3) mRNA gc
aggagaaagcuuaccauggcccccaccaaggugaccuucggcgacgacacggucaucgaggugcagggguacaagagcgugaacaucaccuucgagcuggacgagcgcaucgacaagguccucaacgagaagugcuccgccuacaccguggagcugggcaccgaggugaacgaguucgcgugcgucguggccgacgccgugaucaagacgcugcagccggucagcgagcuccugaccccccuggggaucgaccucgacgagugguccauggccaccuacuaccuguucgacgagagcggcgaguucaagcuggccucccacauguacugcagcuucuacccccccgacgaggacgaggaggagggggacugcgaggaggaggaguucgagccguccacccaguacgaguacggcacggaggacgacuaccagggcaagccccucgaguucggggcgaccagcgccgcccugcagcccgaggaggagcaggaggaggacuggcuggacgacgacucccagcagaccgugggccagcaggacgggagcgaggacaaccagaccacgaccauccagaccaucguggagguccagccccagcucgagauggagcugaccccgguggugcagacgaucgaggucaacuccuucagcggcuaccugaagcucaccgacaacguguacaucaagaacgccgacaucguggaggaggcgaagaaggucaagcccaccgugguggucaacgccgccaacguguaccugaagcacgggggcggcguggccggggcccugaacaaggcgaccaacaacgccaugcaggucgaguccgacgacuacaucgccacgaacggcccccucaagguggggggcagcugcguccuguccggccacaaccuggccaagcacugccuccacgugguggggcccaacgucaacaagggcgaggacauccagcugcugaagagcgccuacgagaacuucaaccagcacgaggugcuccuggcgccgcugcucuccgccgggaucuucggcgccgaccccauccacagccugcgggugugcgucgacaccgugcgcaccaacguguaccuggccgucuucgacaagaaccucuacgacaagcugguguccagcuuccuggagaugaagagcgagaagcagguggagcagaagaucgccgagauccccaaggaggaggucaagcccuucaucaccgaguccaagccgagcguggagcagcggaagcaggacgacaagaagaucaaggcgugcguggaggaggucacgaccacccucgaggagaccaaguuccugacggagaaccugcuccuguacaucgacaucaacgggaaccugcaccccgacuccgccacccucgugagcgacaucgacaucaccuuccugaagaaggacgcccccuacaucgugggcgacgucgugcaggagggcgugcugaccgccgucgugauccccacgaagaaggccgggggcaccaccgagaugcucgcgaaggcccugcgcaaggugccgaccgacaacuacaucacgaccuaccccgggcagggccugaacggguacaccgucgaggaggccaagaccgugcucaagaagugcaaguccgccuucuacauccugcccagcaucaucuccaacgagaagcaggagauccugggcaccgugagcuggaaccuccgggagaugcuggcgcacgccgaggagacgcgcaagcugaugcccgucugcguggagaccaaggccaucguguccaccauccagcggaaguacaagggcaucaagauccaggagggggucguggacuacggcgcccgcuucuacuucuacaccagcaagacgaccguggccucccugaucaacacccucaacgaccugaacgagacccuggucacgaugccgcucggguacgugacccacggccugaaccuggaggaggcggcccgguacaugcgcagccucaaggugcccgccaccgucuccgugagcucccccgacgccgugaccgccuacaacggguaccugacgagcuccagcaagacccccgaggagcacuucaucgagaccaucucccuggcgggcagcuacaaggacuggagcuacuccggccagagcacccagcucgggaucgaguuccugaagcggggcgacaaguccgucuacuacacgagcaacccgaccaccuuccaccuggacggggaggugaucaccuucgacaaccucaagacgcugcugucccuccgcgaggugcggaccaucaaggucuucaccaccguggacaacaucaaccugcacacgcagguggucgacaugagcaugaccuacggccagcaguucggccccaccuaccuggacggggccgacgugaccaagaucaagccccacaacucccacgagggcaagacguucuacgugcucccgaacgacgacacccugcgcgucgaggccuucgaguacuaccacaccaccgaccccagcuuccuggggcgguacauguccgcccucaaccacacgaagaaguggaaguacccccaggugaacggccugaccagcaucaagugggccgacaacaacugcuaccuggcgaccgcccuccugacccugcagcagaucgagcucaaguucaaccccccggcccugcaggacgccuacuaccgcgcgcgggccggggaggccgccaacuucugcgcccugauccucgcguacugcaacaagacggugggcgagcugggcgacguccgcgagaccauguccuaccuguuccagcacgccaaccucgacagcugcaagcgggugcugaacgucgugugcaagaccugcgggcagcagcagaccacccugaagggcguggaggccgucauguacauggggacgcucuccuacgagcaguucaagaagggcgugcagauccccugcaccugcgggaagcaggccaccaaguaccuggugcagcaggagagccccuucgucaugauguccgcccccccggcgcaguacgagcugaagcacggcaccuucacgugcgccagcgaguacaccggcaacuaccagugcgggcacuacaagcacaucaccuccaaggagacccucuacugcaucgacggcgcccugcugacgaagagcagcgaguacaaggggcccaucaccgacguguucuacaaggagaacuccuacaccaccacgaucaagcccgugaccuacaagcucgacggcgucgugugcaccgagaucgaccccaagcuggacaacuacuacaagaaggacaacagcuacuucaccgagcagccgaucgaccuggugcccaaccagcccuaccccaacgccuccuucgacaacuucaaguucgucugcgacaacaucaaguucgccgacgaccucaaccagcugacgggguacaagaagccggcgagccgcgagcugaaggugaccuucuuccccgaccucaacggcgacguggucgccaucgacuacaagcacuacacccccuccuucaagaagggcgccaagcugcugcacaagcccaucguguggcacgugaacaacgccaccaacaaggcgacguacaagccgaacaccuggugcauccggugccucuggagcaccaagcccgucgagaccuccaacagcuucgacgugcugaaguccgaggacgcccaggggauggacaaccuggccugcgaggaccucaagcccgugagcgaggaggucguggagaaccccacgauccagaaggacgugcuggagugcaacgucaagaccaccgagguggugggcgacaucauccugaagccggccaacaacucccucaagaucaccgaggaggucgggcacacggaccugauggccgcguacguggacaacagcucccugaccaucaagaagcccaacgagcucagccgcgugcugggccugaagacccucgccacccacgggcuggccgccgucaacuccgugcccugggacacgaucgccaacuacgcgaagccguuccugaacaagguggucagcaccaccaccaacaucgugacgcgcugccucaaccgggugugcaccaacuacaugcccuacuucuucacccugcugcuccagcugugcaccuucacccgcuccacgaacagccggaucaaggccuccaugcccaccaccaucgccaagaacaccgucaagagcgugggcaaguucugccuggaggccagcuucaacuaccucaagucccccaacuucagcaagcugaucaacaucaucaucugguuccugcuccuguccgugugccugggcagccucaucuacuccacggccgcgcuggggguccugaugagcaaccucggcaugccguccuacugcaccggguaccgcgagggcuaccugaacagcaccaacgugaccaucgccacguacugcaccggcuccauccccugcagcgugugccuguccgggcucgacagccuggacaccuaccccucccuggagaccauccagaucacgaucagcuccuucaagugggaccucaccgccuucggccuggucgccgagugguuccuggccuacauccucuucacccgguucuucuacgugcuggggcuggcggccaucaugcagcucuucuucagcuacuucgccgugcacuucaucuccaacagcuggcugauguggcugaucaucaaccugguccagauggcccccaucuccgcgauggugcgcauguacaucuucuucgccagcuucuacuacguguggaagagcuacguccacgugguggacggcugcaacuccagcaccugcaugaugugcuacaagcggaaccgcgccacgcgggucgagugcaccaccaucgugaacgggguccgcaaguccuucuacguguacgccaacggcggcaagggguucugcaagcuccacaacuggaacugcgugaacugcgacaccuucugcgccggcagcacguucaucuccgacgaggucgcgcgggaccugagccugcaguucaagcgcccgaucaaccccaccgaccaguccagcuacaucguggacuccgugaccgucaagaacgggagcauccaccucuacuucgacaaggccggccagaagaccuacgagcggcacucccugagccacuucgugaaccuggacaaccuccgcgccaacaacacgaaggggucccugcccaucaacgugaucgucuucgacggcaagagcaagugcgaggaguccagcgccaaguccgccagcguguacuacucccagcugaugugccagcccauccuccugcuggaccaggcgcucgugagcgacgucggcgacagcgccgagguggccgugaagauguucgacgccuacgucaacaccuucuccagcaccuucaacgugccgauggagaagcugaagacccugguggccacggcggaggccgagcucgccaagaacgucucccuggacaacgugcugagcaccuucaucuccgccgcgcggcagggguucguggacagcgacgucgagaccaaggacgugguggagugccucaagcugucccaccagagcgacaucgaggucaccggcgacuccugcaacaacuacaugcugacguacaacaagguggagaacaugaccccccgcgaccucggggccugcaucgacugcagcgcccggcacaucaacgcccagguggccaagucccacaacaucgcgcugaucuggaacgucaaggacuucaugagccuguccgagcagcuccgcaagcagauccggagcgccgccaagaagaacaaccugcccuucaagcugaccugcgccaccacgcgccagguggugaacgucgugaccaccaagaucgcccucaagggcgggugaggacuaguuauaagacugacuagcccgaugggccucccaacgggcccuccuccccuccuugcaccgagauuaauaaaaaaaaaaaaaaaaaaaaaaaaaaaaaaaaaaaaaaaaaaaaaaaaaaaaaaaaaaaaaaaaugcaucccccccccccccccccccccccccccccccaaaggcucuuuucagagccaccagaauu

SEQ ID NO: 21851 - RNA, 6058 nt, Artificial Sequence
  SARS-CoV-2__MT632793.1__non-structural protein 3 (NSP3) mRNA gc
aggagaaagcuuaccauggcccccaccaaggugaccuucggcgacgacacggucaucgaggugcagggguacaagagcgugaacaucaccuucgagcuggacgagcgcaucgacaagguccucaacgagaagugcuccgccuacaccguggagcugggcaccgaggugaacgaguucgcgugcgucguggccgacgccgugaucaagacgcugcagccggucagcgagcuccugaccccccuggggaucgaccucgacgagugguccauggccaccuacuaccuguucgacgagagcggcgaguucaagcuggccucccacauguacugcagcuucuacccccccgacgaggacgaggaggagggggacugcgaggaggaggaguucgagccguccacccaguacgaguacggcacggaggacgacuaccagggcaagccccucgaguucggggcgaccagcgccgcccugcagcccgaggaggagcaggaggaggacuggcuggacgacgacucccagcagaccgugggccagcaggacgggagcgaggacaaccagaccacgaccauccagaccaucguggagguccagccccagcucgagauggagcugaccccgguggugcagacgaucgaggucaacuccuucagcggcuaccugaagcucaccgacaacguguacaucaagaacgccgacaucguggaggaggcgaagaaggucaagcccaccgugguggucaacgccgccaacguguaccugaagcacgggggcggcguggccggggcccugaacaaggcgaccaacaacgccaugcaggucgaguccgacgacuacaucgccacgaacggcccccucaagguggggggcagcugcguccuguccggccacaaccuggccaagcacugccuccacgugguggggcccaacgucaacaagggcgaggacauccagcugcugaagagcgccuacgagaacuucaaccagcacgaggugcuccuggcgccgcugcucuccgccgggaucuucggcgccgaccccauccacagccugcgggugugcgucgacaccgugcgcaccaacguguaccuggccgucuucgacaagaaccucuacgacaagcugguguccagcuuccuggagaugaagagcgagaagcagguggagcagaagaucgccgagauccccaaggaggaggucaagcccuucaucaccgaguccaagccgagcguggagcagcggaagcaggacgacaagaagaucaaggcgugcguggaggaggucacgaccacccucgaggagaccaaguuccugacggagaaccugcuccuguacaucgacaucaacgggaaccugcaccccgacuccgccacccucgugagcgacaucgacaucaccuuccugaagaaggacgcccccuacaucgugggcgacgucgugcaggagggcgugcugaccgccgucgugauccccacgaagaaggccgggggcaccaccgagaugcucgcgaaggcccugcgcaaggugccgaccgacaacuacaucacgaccuaccccgggcagggccugaacggguacaccgucgaggaggccaagaccgugcucaagaagugcaaguccgccuucuacauccugcccagcaucaucuccaacgagaagcaggagauccugggcaccgugagcuggaaccuccgggagaugcuggcgcacgccgaggagacgcgcaagcugaugcccgucugcguggagaccaaggccaucguguccaccauccagcggaaguacaagggcaucaagauccaggagggggucguggacuacggcgcccgcuucuacuucuacaccagcaagacgaccguggccucccugaucaacacccucaacgaccugaacgagacccuggucacgaugccgcucggguacgugacccacggccugaaccuggaggaggcggcccgguacaugcgcagccucaaggugcccgccaccgucuccgugagcucccccgacgccgugaccgccuacaacggguaccugacgagcuccagcaagacccccgaggagcacuucaucgagaccaucucccuggcgggcagcuacaaggacuggagcuacuccggccagagcacccagcucgggaucgaguuccugaagcggggcgacaaguccgucuacuacacgagcaacccgaccaccuuccaccuggacggggaggugaucaccuucgacaaccucaagacgcugcugucccuccgcgaggugcggaccaucaaggucuucaccaccguggacaacaucaaccugcacacgcagguggucgacaugagcaugaccuacggccagcaguucggccccaccuaccuggacggggccgacgugaccaagaucaagccccacaacucccacgagggcaagacguucuacgugcucccgaacgacgacacccugcgcgucgaggccuucgaguacuaccacaccaccgaccccagcuuccuggggcgguacauguccgcccucaaccacacgaagaaguggaaguacccccaggugaacggccugaccagcaucaagugggccgacaacaacugcuaccuggcgaccgcccuccugacccugcagcagaucgagcucaaguucaaccccccggcccugcaggacgccuacuaccgcgcgcgggccggggaggccgccaacuucugcgcccugauccucgcguacugcaacaagacggugggcgagcugggcgacguccgcgagaccauguccuaccuguuccagcacgccaaccucgacagcugcaagcgggugcugaacgucgugugcaagaccugcgggcagcagcagaccacccugaagggcguggaggccgucauguacauggggacgcucuccuacgagcaguucaagaagggcgugcagauccccugcaccugcgggaagcaggccaccaaguaccuggugcagcaggagagccccuucgucaugauguccgcccccccggcgcaguacgagcugaagcacggcaccuucacgugcgccagcgaguacaccggcaacuaccagugcgggcacuacaagcacaucaucuccaaggagacccucuacugcaucgacggcgcccugcugaccaagagcagcgaguacaaggggcccaucacggacguguucuacaaggagaacuccuacaccaccaccaucaagcccgugacguacaagcucgacggcgucgugugcaccgagaucgaccccaagcuggacaacuacuacaagaaggacaacagcuacuucaccgagcagccgaucgaccuggugcccaaccagcccuaccccaacgccuccuucgacaacuucaaguucgucugcgacaacaucaaguucgccgacgaccucaaccagcugaccggguacaagaagccggcgagccgcgagcugaaggugacguucuuccccgaccucaacggcgacguggucgccaucgacuacaagcacuacacccccuccuucaagaagggcgccaagcugcugcacaagcccaucguguggcacgugaacaacgccaccaacaaggcgaccuacaagccgaacacguggugcauccggugccucuggagcaccaagcccgucgagaccuccaacagcuucgacgugcugaaguccgaggacgcccaggggauggacaaccuggccugcgaggaccucaagcccgugagcgaggaggucguggagaaccccaccauccagaaggacgugcuggagugcaacgucaagacgaccgagguggugggcgacaucauccugaagccggccaacaacucccucaagaucaccgaggaggucgggcacaccgaccugauggccgcguacguggacaacagcucccugacgaucaagaagcccaacgagcucagccgcgugcugggccugaagacccucgccacccacgggcuggccgccgucaacuccgugcccugggacaccaucgccaacuacgcgaagccguuccugaacaagguggucagcacgaccaccaacaucgugacccgcugccucaaccgggugugcacgaacuacaugcccuacuucuucacccugcugcuccagcugugcaccuucacccgcuccaccaacagccggaucaaggccuccaugcccacgaccaucgccaagaacaccgucaagagcgugggcaaguucugccuggaggccagcuucaacuaccucaagucccccaacuucagcaagcugaucaacaucaucaucugguuccugcuccuguccgugugccugggcagccucaucuacuccaccgccgcgcuggggguccugaugagcaaccucggcaugccguccuacugcacgggguaccgcgagggcuaccugaacagcaccaacgugaccaucgccaccuacugcacgggcuccauccccugcagcgugugccuguccgggcucgacagccuggacaccuaccccucccuggagaccauccagaucaccaucagcuccuucaagugggaccucacggccuucggccuggucgccgagugguuccuggccuacauccucuucacccgguucuucuacgugcuggggcuggcggccaucaugcagcucuucuucagcuacuucgccgugcacuucaucuccaacagcuggcugauguggcugaucaucaaccugguccagauggcccccaucuccgcgauggugcgcauguacaucuucuucgccagcuucuacuacguguggaagagcuacguccacgugguggacggcugcaacuccagcaccugcaugaugugcuacaagcggaaccgcgccacccgggucgagugcacgaccaucgugaacgggguccgccgguccuucuacguguacgccaacggcggcaagggguucugcaagcuccacaacuggaacugcgugaacugcgacaccuucugcgccggcagcaccuucaucuccgacgaggucgcgcgcgaccugagccugcaguucaagcggccgaucaaccccacggaccaguccagcuacaucguggacuccgugaccgucaagaacgggagcauccaccucuacuucgacaaggccggccagaagaccuacgagcgccacucccugagccacuucgugaaccuggacaaccuccgggccaacaacaccaaggggucccugcccaucaacgugaucgucuucgacggcaagagcaagugcgaggaguccagcgccaaguccgccagcguguacuacucccagcugaugugccagcccauccuccugcuggaccaggcgcucgugagcgacgucggcgacagcgccgagguggccgugaagauguucgacgccuacgucaacacguucuccagcaccuucgacgugccgauggagaagcugaagacccugguggccaccgcggaggccgagcucgccaagaacgucucccuggacaacgugcugagcacguucaucuccgccgcgcgccagggguucguggacagcgacgucgagaccaaggacgugguggagugccucaagcugucccaccagagcgacaucgaggucaccggcgacuccugcaacaacuacaugcugaccuacaacaagguggagaacaugacgccccgggaccucggggccugcaucgacugcagcgcccgccacaucaacgcccagguggccaagucccacaacaucgcgcugaucuggaacgucaaggacuucaugagccuguccgagcagcuccggaagcagauccgcagcgccgccaagaagaacaaccugcccuucaagcugaccugcgccaccacccgccagguggugaacgucgugacgaccaagaucgcccucaagggcgggugaggacuaguuauaagacugacuagcccgaugggccucccaacgggcccuccuccccuccuugcaccgagauuaauaaaaaaaaaaaaaaaaaaaaaaaaaaaaaaaaaaaaaaaaaaaaaaaaaaaaaaaaaaaaaaaaugcaucccccccccccccccccccccccccccccccaaaggcucuuuucagagccaccagaauu

SEQ ID NO: 21852 - RNA, 6058 nt, Artificial Sequence
  SARS-CoV-2__MT632820.1__non-structural protein 3 (NSP3) mRNA gc
aggagaaagcuuaccauggcccccaccaaggugaccuucggcgacgacacggucaucgaggugcagggguacaagagcgugaacaucaccuucgagcuggacgagcgcaucgacaagguccucaacgagaagugcuccgccuacaccguggagcugggcaccgaggugaacgaguucgcgugcgucguggccgacgccgugaucaagacgcugcagccggucagcgagcuccugaccccccuggggaucgaccucgacgagugguccauggccaccuacuaccuguucgacgagagcggcgaguucaagcuggccucccacauguacugcagcuucuacccccccgacgaggacgaggaggagggggacugcgaggaggaggaguucgagccguccacccaguacgaguacggcacggaggacgacuaccagggcaagccccucgaguucggggcgaccagcgccgcccugcagcccgaggaggagcaggaggaggacuggcuggacgacgacucccagcagaccgugggccagcaggacgggagcgaggacaaccagaccacgaccauccagaccaucguggagguccagccccagcucgagauggagcugaccccgguggugcagacgaucgaggucaacuccuucagcggcuaccugaagcucaccgacaacguguacaucaagaacgccgacaucguggaggaggcgaagaaggucaagcccaccgugguggucaacgccgccaacguguaccugaagcacgggggcggcguggccggggcccugaacaaggcgaccaacaacgccaugcaggucgaguccgacgacuacaucgccacgaacggcccccucaagguggggggcagcugcguccuguccggccacaaccuggccaagcacugccuccacgugguggggcccaacgucaacaagggcgaggacauccagcugcugaagagcgccuacgagaacuucaaccagcacgaggugcuccuggcgccgcugcucuccgccgggaucuucggcgccgaccccauccacagccugcgggugugcgucgacaccgugcgcaccaacguguaccuggccgucuucgacaagaaccucuacgacaagcugguguccagcuuccuggagaugaagagcgagaagcagguggagcagaagaucgccgagauccccaaggaggaggucaagcccuucaucaccgaguccaagccgagcguggagcagcggaagcaggacgacaagaagaucaaggcgugcguggaggaggucacgaccacccucgaggagaccaaguuccugacggagaaccugcuccuguacaucgacaucaacgggaaccugcaccccgacuccgccacccucgugagcgacaucgacaucaccuuccugaagaaggacgcccccuacaucgugggcgacgucgugcaggagggcgugcugaccgccgucgugauccccacgaagaaggccgggggcaccaccgagaugcucgcgaaggcccugcgcaaggugccgaccgacaacuacaucacgaccuaccccgggcagggccugaacggguacaccgucgaggaggccaagaccgugcucaagaagugcaaguccgccuucuacauccugcccagcaucaucuccaacgagaagcaggagauccugggcaccgugagcuggaaccuccgggagaugcuggcgcacgccgaggagacgcgcaagcugaugcccgucugcguggagaccaaggccaucguguccaccauccagcggaaguacaagggcaucaagauccaggagggggucguggacuacggcgcccgcuucuacuucuacaccagcaagacgaccguggccucccugaucaacacccucaacgaccugaacgagacccuggucacgaugccgcucggguacgugacccacggccugaaccuggaggaggcggcccgguacaugcgcagccucaaggugcccgccaccgucuccgugagcucccccgacgccgugaccgccuacaacggguaccugacgagcuccagcaagacccccgaggagcacuucaucgagaccaucucccuggcgggcagcuacaaggacuggagcuacuccggccagagcacccagcucgggaucgaguuccugaagcggggcgacaaguccgucuacuacacgagcaacccgaccaccuuccaccuggacggggaggugaucaccuucgacaaccucaagacgcugcugucccuccgcgaggugcggaccaucaaggucuucaccaccguggacaacaucaaccugcacacgcagguggucgacaugagcaugaccuacggccagcaguucggccccaccuaccuggacggggccgacgugaccaagaucaagccccacaacucccacgagggcaagacguucuacgugcucccgaacgacgacacccugcgcgucgaggccuucgaguacuaccacaccaccgaccccagcuuccuggggcgguacauguccgcccucaaccacacgaagaaguggaaguacccccaggugaacggccugaccagcaucaagugggccgacaacaacugcuaccuggcgaccgcccuccugacccugcagcagaucgagcucaaguucaaccccccggcccugcaggacgccuacuaccgcgcgcgggccggggaggccgccaacuucugcgcccugauccucgcguacugcaacaagacggugggcgagcugggcgacguccgcgagaccauguccuaccuguuccagcacgccaaccucgacagcugcaagcgggugcugaacgucgugugcaagaccugcgggcagcagcagaccacccugaagggcguggaggccgucauguacauggggacgcucuccuacgagcaguucaagaagggcgugcagauccccugcaccugcgggaagcaggccaccaaguaccuggugcagcaggagagccccuucgucaugauguccgcccccccggcgcaguacgagcugaagcacggcaccuucacgugcgccagcgaguacaccggcaacuaccagugcgggcacuacaagcacaucaccuccaaggagacccucuacugcaucgacggcgcccugcugacgaagagcagcgaguacaaggggcccaucaccgacguguucuacaaggagaacuccuacaccaccacgaucaagcccgugaccuacaagcucgacggcgucgugugcaccgagaucgaccccaagcuggacaacuacuacaagaaggacaacagcuacuucaccgagcagccgaucgaccuggugcccaaccagcccuaccccaacgccuccuucgacaacuucaaguucgucugcgacaacaucaaguucgccgacgaccucaaccagcugacgggguacaagaagccggcgagccgcgagcugaaggugaccuucuuccccgaccucaacggcgacguggucgccaucgacuacaagcacuacacccccuccuucaagaagggcgccaagcugcugcacaagcccaucguguggcacgugaacaacgccaccaacaaggcgacguacaagccgaacaccuggugcauccggugccucuggagcaccaagcccgucgagaccuccaacagcuucgacgugcugaaguccgaggacgcccaggggauggacaaccuggccugcgaggaccucaagcccgugagcgaggaggucguggagaaccccacgauccagaaggacgugcuggagugcaacgucaagaccaccgagguggugggcgacaucauccugaagccggccaacaacucccucaagaucaccgagaaggucgggcacacggaccugauggccgcguacguggacaacagcucccugaccaucaagaagcccaacgagcucagccgcgugcugggccugaagacccucgccacccacgggcuggccgccgucaacuccgugcccugggacacgaucgccaacuacgcgaagccguuccugaacaagguggucagcaccaccaccaacaucgugacgcgcugccucaaccgggugugcaccaacuacaugcccuacuucuucacccugcugcuccagcugugcaccuucacccgcuccacgaacagccggaucaaggccuccaugcccaccaccaucgccaagaacaccgucaagagcgugggcaaguucugccuggaggccagcuucaacuaccucaagucccccaacuucagcaagcugaucaacaucaucaucugguuccugcuccuguccgugugccugggcagccucaucuacuccacggccgcgcuggggguccugaugagcaaccucggcaugccguccuacugcaccggguaccgcgagggcuaccugaacagcaccaacgugaccaucgccacguacugcaccggcuccauccccugcagcgugugccuguccgggcucgacagccuggacaccuaccccucccuggagaccauccagaucacgaucagcuccuucaagugggaccucaccgccuucggccuggucgccgagugguuccuggccuacauccucuucacccgguucuucuacgugcuggggcuggcggccaucaugcagcucuucuucagcuacuucgccgugcacuucaucuccaacagcuggcugauguggcugaucaucaaccugguccagauggcccccaucuccgcgauggugcgcauguacaucuucuucgccagcuucuacuacguguggaagagcuacguccacgugguggacggcugcaacuccagcaccugcaugaugugcuacaagcggaaccgcgccacgcgggucgagugcaccaccaucgugaacgggguccgccgguccuucuacguguacgccaacggcggcaagggguucugcaagcuccacaacuggaacugcgugaacugcgacaccuucugcgccggcagcacguucaucuccgacgaggucgcgcgcgaccugagccugcaguucaagcggccgaucaaccccaccgaccaguccagcuacaucguggacuccgugaccgucaagaacgggagcauccaccucuacuucgacaaggccggccagaagaccuacgagcgccacucccugagccacuucgugaaccuggacaaccuccgggccaacaacacgaaggggucccugcccaucaacgugaucgucuucgacggcaagagcaagugcgaggaguccagcgccaaguccgccagcguguacuacucccagcugaugugccagcccauccuccugcuggaccaggcgcucgugagcgacgucggcgacagcgccgagguggccgugaagauguucgacgccuacgucaacaccuucuccagcaccuucaacgugccgauggagaagcugaagacccugguggccacggcggaggccgagcucgccaagaacgucucccuggacaacgugcugagcaccuucaucuccgccgcgcgccagggguucguggacagcgacgucgagaccaaggacgugguggagugccucaagcugucccaccagagcgacaucgaggucaccggcgacuccugcaacaacuacaugcugacguacaacaagguggagaacaugaccccccgggaccucggggccugcaucgacugcagcgcccgccacaucaacgcccagguggccaagucccacaacaucgcgcugaucuggaacgucaaggacuucaugagccuguccgagcagcuccggaagcagauccgcagcgccgccaagaagaacaaccugcccuucaagcugaccugcgccaccacgcgccagguggugaacgucgugaccaccaagaucgcccucaagggcgggugaggacuaguuauaagacugacuagcccgaugggccucccaacgggcccuccuccccuccuugcaccgagauuaauaaaaaaaaaaaaaaaaaaaaaaaaaaaaaaaaaaaaaaaaaaaaaaaaaaaaaaaaaaaaaaaaugcaucccccccccccccccccccccccccccccccaaaggcucuuuucagagccaccagaauu

SEQ ID NO: 21853 - RNA, 6058 nt, Artificial Sequence
  SARS-CoV-2__MT632822.1__non-structural protein 3 (NSP3) mRNA gc
aggagaaagcuuaccauggcccccaccaaggugaccuucggcgacgacacggucaucgaggugcagggguacaagagcgugaacaucaccuucgagcuggacgagcgcaucgacaagguccucaacgagaagugcuccgccuacaccguggagcugggcaccgaggugaacgaguucgcgugcgucguggccgacgccgugaucaagacgcugcagccggucagcgagcuccugaccccccuggggaucgaccucgacgagugguccauggccaccuacuaccuguucgacgagagcggcgaguucaagcuggccucccacauguacugcagcuucuacccccccgacgaggacgaggaggagggggacugcgaggaggaggaguucgagccguccacccaguacgaguacggcacggaggacgacuaccagggcaagccccucgaguucggggcgaccagcgccgcccugcagcccgaggaggagcaggaggaggacuggcuggacgacgacucccagcagaccgugggccagcaggacgggagcgaggacaaccagaccacgaccauccagaccaucguggagguccagccccagcucgagauggagcugaccccgguggugcagacgaucgaggucaacuccuucagcggcuaccugaagcucaccgacaacguguacaucaagaacgccgacaucguggaggaggcgaagaaggucaagcccaccgugguggucaacgccgccaacguguaccugaagcacgggggcggcguggccggggcccugaacaaggcgaccaacaacgccaugcaggucgaguccgacgacuacaucgccacgaacggcccccucaagguggggggcagcugcguccuguccggccacaaccuggccaagcacugccuccacgugguggggcccaacgucaacaagggcgaggacauccagcugcugaagagcgccuacgagaacuucaaccagcacgaggugcuccuggcgccgcugcucuccgccgggaucuucggcgccgaccccauccacagccugcgggugugcgucgacaccgugcgcaccaacguguaccuggccgucuucgacaagaaccucuacgacaagcugguguccagcuuccuggagaugaagagcgagaagcagguggagcagaagaucgccgagauccccaaggaggaggucaagcccuucaucaccgaguccaagccgagcguggagcagcggaagcaggacgacaagaagaucaaggcgugcguggaggaggucacgaccacccucgaggagaccaaguuccugacggagaaccugcuccuguacaucgacaucaacgggaaccugcaccccgacuccgccacccucgugagcgacaucgacaucaccuuccugaagaaggacgcccccuacaucgugggcgacgucgugcaggagggcgugcugaccgccgucgugauccccacgaagaaggccgggggcaccaccgagaugcucgcgaaggcccugcgcaaggugccgaccgacaacuacaucacgaccuaccccgggcagggccugaacggguacaccgucgaggaggccaagaccgugcucaagaagugcaaguccgccuucuacauccugcccagcaucaucuccaacgagaagcaggagauccugggcaccgugagcuggaaccuccgggagaugcuggcgcacgccgaggagacgcgcaagcugaugcccgucugcguggagaccaaggccaucguguccaccauccagcggaaguacaagggcaucaagauccaggagggggucguggacuacggcgcccgcuucuacuucuacaccagcaagacgaccguggccucccugaucaacacccucaacgaccugaacgagacccuggucacgaugccgcucggguacgugacccacggccugaaccuggaggaggcggcccgguacaugcgcagccucaaggugcccgccaccgucuccgugagcucccccgacgccgugaccgccuacaacggguaccugacgagcuccagcaagacccccgaggagcacuucaucgagaccaucucccuggcgagcagcuacaaggacugguccuacagcggccaguccacccagcucggcaucgaguuccugaagcggggggacaagagcgucuacuacacguccaacccgaccaccuuccaccuggacggcgaggugaucaccuucgacaaccucaagacgcugcugagccuccgcgaggugcggaccaucaaggucuucaccaccguggacaacaucaaccugcacacgcagguggucgacauguccaugaccuacgggcagcaguucggccccaccuaccuggacggcgccgacgugaccaagaucaagccccacaacagccacgaggggaagacguucuacgugcucccgaacgacgacacccugcgcgucgaggccuucgaguacuaccacaccaccgaccccuccuuccugggccgguacaugagcgcccucaaccacacgaagaaguggaaguacccccaggugaacgggcugaccuccaucaagugggccgacaacaacugcuaccuggcgaccgcccuccugacccugcagcagaucgagcucaaguucaaccccccggcccugcaggacgccuacuaccgcgcgcgggccggcgaggccgccaacuucugcgcccugauccucgcguacugcaacaagacggugggggagcugggcgacguccgcgagaccaugagcuaccuguuccagcacgccaaccucgacuccugcaagcgggugcugaacgucgugugcaagaccugcggccagcagcagaccacccugaaggggguggaggccgucauguacaugggcacgcucagcuacgagcaguucaagaagggggugcagauccccugcaccugcggcaagcaggccaccaaguaccuggugcagcaggagucccccuucgucaugaugagcgcccccccggcgcaguacgagcugaagcacgggaccuucacgugcgccuccgaguacaccggcaacuaccagugcggccacuacaagcacaucaccagcaaggagacccucuacugcaucgacggggcccugcugacgaagagcuccgaguacaagggccccaucaccgacguguucuacaaggagaacagcuacaccaccacgaucaagcccgugaccuacaagcucgacggggucgugugcaccgagaucgaccccaagcuggacaacuacuacaagaaggacaacuccuacuucaccgagcagccgaucgaccuggugcccaaccagcccuaccccaacgccagcuucgacaacuucaaguucgucugcgacaacaucaaguucgccgacgaccucaaccagcugacgggcuacaagaagccggcgucccgcgagcugaaggugaccuucuuccccgaccucaacggggacguggucgccaucgacuacaagcacuacacccccagcuucaagaagggcgccaagcugcugcacaagcccaucguguggcacgugaacaacgccaccaacaaggcgacguacaagccgaacaccuggugcauccggugccucugguccaccaagcccgucgagaccagcaacuccuucgacgugcugaagagcgaggacgcccagggcauggacaaccuggccugcgaggaccucaagcccguguccgaggaggucguggagaaccccacgauccagaaggacgugcuggagugcaacgucaagaccaccgagguggugggggacaucauccugaagccggccaacaacagccucaagaucaccgaggaggucggccacacggaccugauggccgcguacguggacaacuccagccugaccaucaagaagcccaacgagcucucccgcgugcuggggcugaagacccucgccacccacggccuggccgccgucaacagcgugcccugggacacgaucgccaacuacgcgaagccguuccugaacaagguggucuccaccaccaccaacaucgugacgcgcugccucaaccgggugugcaccaacuacaugcccuacuucuucacccugcugcuccagcugugcaccuucacccgcagcacgaacucccggaucaaggccagcaugcccaccaccaucgccaagaacaccgucaagagcguggggaaguucugccuggaggccuccuucaacuaccucaagagccccaacuucuccaagcugaucaacaucaucaucugguuccugcuccugagcgugugccugggcucccucaucuacagcacggccgcgcugggcguccugauguccaaccucgggaugccgagcuacugcaccggcuaccgcgagggguaccugaacuccaccaacgugaccaucgccacguacugcaccggcagcauccccugcuccgugugccugagcggccucgacucccuggacaccuaccccagccuggagaccauccagaucacgaucuccagcuucaagugggaccucaccgccuucgggcuggucgccgagugguuccuggccuacauccucuucacccgguucuucuacgugcugggccuggcggccaucaugcagcucuucuucuccuacuucgccgugcacuucaucagcaacuccuggcugauguggcugaucaucaaccugguccagauggcccccaucagcgcgauggugcgcauguacaucuucuucgccagcuucuacuacguguggaaguccuacguccacgugguggacgggugcaacagcuccaccugcaugaugugcuacaagcggaaccgcgccacgcgggucgagugcaccaccaucgugaacggcguccgccggagcuucuacguguacgccaacgggggcaagggcuucugcaagcuccacaacuggaacugcgugaacugcgacaccuucugcgccggguccacguucaucagcgacgaggucgcgcgcgaccugucccugcaguucaagcggccgaucaaccccaccgaccagagcuccuacaucguggacagcgugaccgucaagaacggcuccauccaccucuacuucgacaaggccgggcagaagaccuacgagcgccacagccugucccacuucgugaaccuggacaaccuccgggccaacaacacgaagggcagccugcccaucaacgugaucgucuucgacgggaaguccaagugcgaggagagcuccgccaagagcgccuccguguacuacagccagcugaugugccagcccauccuccugcuggaccaggcgcucgugagcgacgucggcgacuccgccgagguggccgugaagauguucgacgccuacgucaacaccuucagcuccaccuucaacgugccgauggagaagcugaagacccugguggccacggcggaggccgagcucgccaagaacgucagccuggacaacgugcuguccaccuucaucagcgccgcgcgccagggcuucguggacuccgacgucgagaccaaggacgugguggagugccucaagcugagccaccaguccgacaucgaggucaccggggacagcugcaacaacuacaugcugacguacaacaagguggagaacaugaccccccgggaccucggcgccugcaucgacugcuccgcccgccacaucaacgcccagguggccaagagccacaacaucgcgcugaucuggaacgucaaggacuucaugucccugagcgagcagcuccggaagcagauccgcuccgccgccaagaagaacaaccugcccuucaagcugaccugcgccaccacgcgccagguggugaacgucgugaccaccaagaucgcccucaaggggggcugaggacuaguuauaagacugacuagcccgaugggccucccaacgggcccuccuccccuccuugcaccgagauuaauaaaaaaaaaaaaaaaaaaaaaaaaaaaaaaaaaaaaaaaaaaaaaaaaaaaaaaaaaaaaaaaaugcaucccccccccccccccccccccccccccccccaaaggcucuuuucagagccaccagaauu

SEQ ID NO: 21854 - RNA, 6058 nt, Artificial Sequence
  SARS-CoV-2__MT632834.1__non-structural protein 3 (NSP3) mRNA gc
aggagaaagcuuaccauggcccccaccaaggugaccuucggcgacgacacggucaucgaggugcagggguacaagagcgugaacaucaccuucgagcuggacgagcgcaucgacaagguccucaacgagaagugcuccgccuacaccguggagcugggcaccgaggugaacgaguucgcgugcgucguggccgacgccgugaucaagacgcugcagccggucagcgagcuccugaccccccuggggaucgaccucgacgagugguccauggccaccuacuaccuguucgacgagagcggcgaguucaagcuggccucccacauguacugcagcuucuacccccccgacgaggacgaggaggagggggacugcgaggaggaggaguucgagccguccacccaguacgaguacggcacggaggacgacuaccagggcaagccccucgaguucggggcgaccagcgccgcccugcagcccgaggaggagcaggaggaggacuggcuggacgacgacucccagcagaccgugggccagcaggacgggagcgaggacaaccagaccacgaccauccagaccaucguggagguccagccccagcucgagauggagcugaccccgguggugcagacgaucgaggucaacuccuucagcggcuaccugaagcucaccgacaacguguacaucaagaacgccgacaucguggaggaggcgaagaaggucaagcccaccgugguggucaacgccgccaacguguaccugaagcacgggggcggcguggccggggcccugaacaaggcgaccaacaacgccaugcaggucgaguccgacgacuacaucgccacgaacggcccccucaagguggggggcagcugcguccuguccggccacaaccuggccaagcacugccuccacgugguggggcccaacgucaacaagggcgaggacauccagcugcugaagagcgccuacgagaacuucaaccagcacgaggugcuccuggcgccgcugcucuccgccgggaucuucggcgccgaccccauccacagccugcgggugugcgucgacaccgugcgcaccaacguguaccuggccgucuucgacaagaaccucuacgacaagcugguguccagcuuccuggagaugaagagcgagaagcagguggagcagaagaucgccgagauccccaaggaggaggucaagcccuucaucaccgaguccaagccgagcguggagcagcggaagcaggacgacaagaagaucaaggcgugcguggaggaggucacgaccacccucgaggagaccaaguuccugacggagaaccugcuccuguacaucgacaucaacgggaaccugcaccccgacuccgccacccucgugagcgacaucgacaucaccuuccugaagaaggacgcccccuacaucgugggcgacgucgugcaggagggcgugcugaccgccgucgugauccccacgaagaaggccgggggcaccaccgagaugcucgcgaaggcccugcgcaaggugccgaccgacaacuacaucacgaccuaccccgggcagggccugaacggguacaccgucgaggaggccaagaccgugcucaagaagugcaaguccgccuucuacauccugcccagcaucaucuccaacgagaagcaggagauccugggcaccgugagcuggaaccuccgggagaugcuggcgcacgccgaggagacgcgcaagcugaugcccgucugcguggagaccaaggccaucguguccaccauccagcggaaguacaagggcaucaagauccaggagggggucguggacuacggcgcccgcuucuacuucuacaccagcaagacgaccguggccucccugaucaacacccucaacgaccugaacgagacccuggucacgaugccgcucggguacgugacccacggccugaaccuggaggaggcggcccgguacaugcgcagccucaaggugcccgccaccgucuccgugagcucccccgacgccgugaccgccuacaacggguaccugacgagcuccagcaagacccccgaggagcacuucaucgagaccaucucccuggcgggcagcuacaaggacuggagcuacuccggccagagcacccagcucgggaucgaguuccugaagcggggcgacaaguccgucuacuacacgagcaacccgaccaccuuccaccuggacggggaggugaucaccuucgacaaccucaagacgcugcugucccuccgcgaggugcggaccaucaaggucuucaccaccguggacaacaucaaccugcacacgcagguggucgacaugagcaugaccuacggccagcaguucggccccaccuaccuggacggggccgacgugaccaagaucaagccccacaacucccacgagggcaagacguucuacgugcucccgaacgacgacacccugcgcgucgaggccuucgaguacuaccacaccaccgaccccagcuuccuggggcgguacauguccgcccucaaccacacgaagaaguggaaguacccccaggugaacggccugaccagcaucaagugggccgacaacaacugcuaccuggcgaccgcccuccugacccugcagcagaucgagcucaaguucaaccccccggcccugcaggacgccuacuaccgcgcgcgggccggggaggccgccaacuucugcgcccugauccucgcguacugcaacaagacggugggcgagcugggcgacguccgcgagaccauguccuaccuguuccagcacgccaaccucgacagcugcaagcgggugcugaacgucgugugcaagaccugcgggcagcagcagaccacccugaagggcguggaggccgucauguacauggggacgcucuccuacgagcaguucaagaagggcgugcagauccccugcaccugcgggaagcaggccaccaaguaccuggugcagcaggagagccccuucgucaugauguccgcccccccggcgcaguacgagcugaagcacggcaccuucacgugcgccagcgaguacaccggcaacuaccagugcgggcacuacaagcacaucaccuccaaggagacccucuacugcaucgacggcgcccugcugacgaagagcagcgaguacaaggggcccaucaccgacguguucuacaaggagaacuccuacaccaccacgaucaagcccgugaccuacaagcucgacggcgucgugugcaccgagaucgaccccaagcuggacaacuacuacaagaaggacaacagcuacuucaccgagcagccgaucgaccuggugcccaaccagcccuaccccaacgccuccuucgacaacuucaaguucgucugcgacaacaucaaguucgccgacgaccucaaccagcugacgggguacaagaagccggcgagccgcgagcugaaggugaccuucuuccccgaccucaacggcgacguggucgccaucgacuacaagcacuacacccccuccuucaagaagggcgccaagcugcugcacaagcccaucguguggcacgugaacaacgccaccaacaaggcgacguacaagccgaacaccuggugcauccggugccucuggagcaccaagcccgucgagaccuccaacagcuucgacgugcugaaguccgaggacgcccaggggauggacaaccuggccugcgaggaccucaagcccgugagcgaggaggucguggagaaccccacgauccagaaggacgugcuggagugcaacgucaagaccaccgagguggugggcgacaucauccugaagccggccaacaacucccucaagaucaccgaggaggucgggcacacggaccugauggccgcguacguggacaacagcucccugaccaucaagaagcccaacgagcucagccgcgugcugggccugaagacccucgccacccacgggcuggccgccgucaacuccgugcccugggacacgaucgccaacuacgcgaagccguuccugaacaagguggucagcaccaccaccaacaucgugacgcgcugccucaaccgggugugcaccaacuacaugcccuacuucuucacccugcugcuccagcugugcaccuucacccgcuccacgaacagccggaucaaggccuccaugcccaccaccaucgccaagaacaccgucaagagcgugggcaaguucugccuggaggccagcuucaacuaccucaagucccccaacuucagcaagcugaucaacaucaucaucugguuccugcuccuguccgugugccugggcagccucaucuacuccacggccgcgcuggggguccugaugagcaaccucggcaugccguccuacugcaccggguaccgcgagggcuaccugaacagcaccaacgugaccaucgccacguacugcaccggcuccauccccugcagcgugugccuguccgggcucgacagccuggacaccuaccccucccuggagaccauccagaucacgaucagcuccuucaagugggaccucaccgccuucggccuggucgccgagugguuccuggccuacauccucuucacccgguucuucuacgugcuggggcuggcggccaucaugcagcucuucuucagcuacuucgccgugcacuucaucuccaacagcuggcugauguggcugaucaucaaccugguccagauggcccccaucuccgcgauggugcgcauguacaucuucuucgcccucuucuacuacguguggaagagcuacguccacgugguggacggcugcaacagcuccaccugcaugaugugcuacaagcggaaccgcgccacgcgggucgagugcaccaccaucgugaacgggguccgccggagcuucuacguguacgccaacggcggcaagggguucugcaagcugcacaacuggaacugcgugaacugcgacaccuucugcgccggcuccacguucaucagcgacgaggucgcgcgcgaccugucccuccaguucaagcggccgaucaaccccaccgaccagagcuccuacaucguggacagcgugaccgucaagaacggguccauccaccuguacuucgacaaggccggccagaagaccuacgagcgccacagccugucccacuucgugaaccucgacaaccugcgggccaacaacacgaaggggagccugcccaucaacgugaucgucuucgacggcaaguccaagugcgaggagagcuccgccaagagcgccuccguguacuacagccagcucaugugccagcccauccugcugcucgaccaggcgcugguguccgacgucggcgacagcgccgagguggccgugaagauguucgacgccuacgucaacaccuucagcuccaccuucaacgugccgauggagaagcugaagacccucguggccacggcggaggccgagcuggccaagaacgucagccuggacaacgugcucuccaccuucaucagcgccgcgcgccagggguucguggacuccgacgucgagaccaaggacgugguggagugccugaagcugagccaccaguccgacaucgaggucaccggcgacagcugcaacaacuacaugcucacguacaacaagguggagaacaugaccccccgggaccugggggccugcaucgacugcuccgcccgccacaucaacgcccagguggccaagagccacaacaucgcgcugaucuggaacgucaaggacuucaugucccucagcgagcagcugcggaagcagauccgcuccgccgccaagaagaacaaccugcccuucaagcucaccugcgccaccacgcgccagguggugaacgucgugaccaccaagaucgcccugaagggcgggugaggacuaguuauaagacugacuagcccgaugggccucccaacgggcccuccuccccuccuugcaccgagauuaauaaaaaaaaaaaaaaaaaaaaaaaaaaaaaaaaaaaaaaaaaaaaaaaaaaaaaaaaaaaaaaaaugcaucccccccccccccccccccccccccccccccaaaggcucuuuucagagccaccagaauu

SEQ ID NO: 21855 - RNA, 6058 nt, Artificial Sequence
  SARS-CoV-2__MT632840.1__non-structural protein 3 (NSP3) mRNA gc
aggagaaagcuuaccauggcccccaccaaggugaccuucggcgacgacacggucaucgaggugcagggguacaagagcgugaacaucaccuucgagcuggacgagcgcaucgacaagguccucaacgagaagugcuccgccuacaccguggagcugggcaccgaggugaacgaguucgcgugcgucguggccgacgccgugaucaagacgcugcagccggucagcgagcuccugaccccccuggggaucgaccucgacgagugguccauggccaccuacuaccuguucgacgagagcggcgaguucaagcuggccucccacauguacugcagcuucuacccccccgacgaggacgaggaggagggggacugcgaggaggaggaguucgagccguccacccaguacgaguacggcacggaggacgacuaccagggcaagccccucgaguucggggcgaccagcgccgcccugcagcccgaggaggagcaggaggaggacuggcuggacgacgacucccagcagaccgugggccagcaggacgggagcgaggacaaccagaccacgaccauccagaccaucguggagguccagccccagcucgagauggagcugaccccgguggugcagacgaucgaggucaacuccuucagcggcuaccugaagcucaccgacaacguguacaucaagaacgccgacaucguggaggaggcgaagaaggucaagcccaccgugguggucaacgccgccaacguguaccugaagcacgggggcggcguggccggggcccugaacaaggcgaccaacaacgccaugcaggucgaguccgacgacuacaucgccacgaacggcccccucaagguggggggcagcugcguccuguccggccacaaccuggccaagcacugccuccacgugguggggcccaacgucaacaagugcgaggacauccagcugcugaagagcgccuacgagaacuucaaccagcacgaggugcuccuggcgccgcugcucuccgccggcaucuucggggccgaccccauccacagccugcgggugugcgucgacaccgugcgcaccaacguguaccuggccgucuucgacaagaaccucuacgacaagcugguguccagcuuccuggagaugaagagcgagaagcagguggagcagaagaucgccgagauccccaaggaggaggucaagcccuucaucaccgaguccaagccgagcguggagcagcggaagcaggacgacaagaagaucaaggcgugcguggaggaggucacgaccacccucgaggagaccaaguuccugacggagaaccugcuccuguacaucgacaucaacggcaaccugcaccccgacuccgccacccucgugagcgacaucgacaucaccuuccugaagaaggacgcccccuacaucgugggggacgucgugcaggagggcgugcugaccgccgucgugauccccacgaagaaggccggcgggaccaccgagaugcucgcgaaggcccugcgcaaggugccgaccgacaacuacaucacgaccuaccccggccaggggcugaacggcuacaccgucgaggaggccaagaccgugcucaagaagugcaaguccgccuucuacauccugcccagcaucaucuccaacgagaagcaggagauccuggggaccgugagcuggaaccuccgggagaugcuggcgcacgccgaggagacgcgcaagcugaugcccgucugcguggagaccaaggccaucguguccaccauccagcggaaguacaagggcaucaagauccaggagggcgucguggacuacggggcccgcuucuacuucuacaccagcaagacgaccguggccucccugaucaacacccucaacgaccugaacgagacccuggucacgaugccgcucggcuacgugacccacgggcugaaccuggaggaggcggcccgguacaugcgcagccucaaggugcccgccaccgucuccgugagcucccccgacgccgugaccgccuacaacggcuaccugacgagcuccagcaagacccccgaggagcacuucaucgagaccaucucccuggcggggagcuacaaggacuggagcuacuccggccagagcacccagcucggcaucgaguuccugaagcggggggacaaguccgucuacuacacgagcaacccgaccaccuuccaccuggacggcgaggugaucaccuucgacaaccucaagacgcugcugucccuccgcgaggugcggaccaucaaggucuucaccaccguggacaacaucaaccugcacacgcagguggucgacaugagcaugaccuacgggcagcaguucggccccaccuaccuggacggcgccgacgugaccaagaucaagccccacaacucccacgaggggaagacguucuacgugcucccgaacgacgacacccugcgcgucgaggccuucgaguacuaccacaccaccgaccccagcuuccugggccgguacauguccgcccucaaccacacgaagaaguggaaguacccccaggugaacgggcugaccagcaucaagugggccgacaacaacugcuaccuggcgaccgcccuccugacccugcagcagaucgagcucaaguucaaccccccggcccugcaggacgccuacuaccgcgcgcgggccggcgaggccgccaacuucugcgcccugauccucgcguacugcaacaagacggugggggagcugggcgacguccgcgagaccauguccuaccuguuccagcacgccaaccucgacagcugcaagcgggugcugaacgucgugugcaagaccugcggccagcagcagaccacccugaaggggguggaggccgucauguacaugggcacgcucuccuacgagcaguucaagaagggggugcagauccccugcaccugcggcaagcaggccaccaaguaccuggugcagcaggagagccccuucgucaugauguccgcccccccggcgcaguacgagcugaagcacgggaccuucacgugcgccagcgaguacaccggcaacuaccagugcggccacuacaagcacaucaccuccaaggagacccucuacugcaucgacggggcccugcugacgaagagcagcgaguacaagggccccaucaccgacguguucuacaaggagaacuccuacaccaccacgaucaagcccgugaccuacaagcucgacggggucgugugcaccgagaucgaccccaagcuggacaacuacuacaagaaggacaacagcuacuucaccgagcagccgaucgaccuggugcccaaccagcccuaccccaacgccuccuucgacaacuucaaguucgucugcgacaacaucaaguucgccgacgaccucaaccagcugacgggcuacaagaagccggcgagccgcgagcugaaggugaccuucuuccccgaccucaacggggacguggucgccaucgacuacaagcacuacacccccuccuucaagaagggcgccaagcugcugcacaagcccaucguguggcacgugaacaacgccaccaacaaggcgacguacaagccgaacaccuggugcauccggugccucuggagcaccaagcccgucgagaccuccaacagcuucgacgugcugaaguccgaggacgcccagggcauggacaaccuggccugcgaggaccucaagcccgugagcgaggaggucguggagaaccccacgauccagaaggacgugcuggagugcaacgucaagaccaccgagguggugggggacaucauccugaagccggccaacaacucccucaagaucaccgaggaggucggccacacggaccugauggccgcguacguggacaacagcucccugaccaucaagaagcccaacgagcucagccgcgugcuggggcugaagacccucgccacccacggccuggccgccgucaacuccgugcccugggacacgaucgccaacuacgcgcgcccguuccugaacaagguggucagcaccaccaccaacaucgugacgcggugccucaaccgcgugugcaccaacuacaugcccuacuucuucacccugcugcuccagcugugcaccuucacccgguccacgaacagccgcaucaaggccuccaugcccaccaccaucgccaagaacaccgucaagagcguggggaaguucugccuggaggccagcuucaacuaccucaagucccccaacuucagcaagcugaucaacaucaucaucugguuccugcuccuguccgugugccugggcagccucaucuacuccacggccgcgcugggcguccugaugagcaaccucgggaugccguccuacugcaccggcuaccgggagggguaccugaacagcaccaacgugaccaucgccacguacugcaccggcuccauccccugcagcgugugccuguccggccucgacagccuggacaccuaccccucccuggagaccauccagaucacgaucagcuccuucaagugggaccucaccgccuucgggcuggucgccgagugguuccuggccuacauccucuucacccgcuucuucuacgugcugggccuggcggccaucaugcagcucuucuucagcuacuucgccgugcacuucaucuccaacagcuggcugauguggcugaucaucaaccugguccagauggcccccaucuccgcgauggugcggauguacaucuucuucgccagcuucuacuacguguggaagagcuacguccacgugguggacgggugcaacuccagcaccugcaugaugugcuacaagcgcaaccgggccacgcgcgucgagugcaccaccaucgugaacggcguccggcgcuccuucuacguguacgccaacgggggcaagggcuucugcaagcuccacaacuggaacugcgugaacugcgacaccuucugcgccgggagcacguucaucuccgacgaggucgcgcgggaccugagccugcaguucaagcgcccgaucaaccccaccgaccaguccagcuacaucguggacuccgugaccgucaagaacggcagcauccaccucuacuucgacaaggccgggcagaagaccuacgagcggcacucccugagccacuucgugaaccuggacaaccuccgcgccaacaacacgaagggcucccugcccaucaacgugaucgucuucgacgggaagagcaagugcgaggaguccagcgccaaguccgccagcguguacuacucccagcugaugugccagcccauccuccugcuggaccaggcgcucgugagcgacgucggcgacagcgccgagguggccgugaagauguucgacgccuacgucaacaccuucuccagcaccuucaacgugccgauggagaagcugaagacccugguggccacggcggaggccgagcucgccaagaacgucucccuggacaacgugcugagcaccuucaucuccgccgcgcggcagggcuucguggacagcgacgucgagaccaaggacgugguggagugccucaagcugucccaccagagcgacaucgaggucaccggggacuccugcaacaacuacaugcugacguacaacaagguggagaacaugaccccccgcgaccucggcgccugcaucgacugcagcgcccggcacaucaacgcccagguggccaagucccacaacaucgcgcugaucuggaacgucaaggacuucaugagccuguccgagcagcuccgcaagcagauccgcagcgccgccaagaagaacaaccugcccuucaagcugaccugcgccaccacgcggcagguggugaacgucgugaccaccaagaucgcccucaaggggggcugaggacuaguuauaagacugacuagcccgaugggccucccaacgggcccuccuccccuccuugcaccgagauuaauaaaaaaaaaaaaaaaaaaaaaaaaaaaaaaaaaaaaaaaaaaaaaaaaaaaaaaaaaaaaaaaaugcaucccccccccccccccccccccccccccccccaaaggcucuuuucagagccaccagaauu

SEQ ID NO: 21856 - RNA, 6058 nt, Artificial Sequence
  SARS-CoV-2__MT632866.1__non-structural protein 3 (NSP3) mRNA gc
aggagaaagcuuaccauggcccccaccaaggugaccuucggcgacgacacggucaucgaggugcagggguacaagagcgugaacaucaccuucgagcuggacgagcgcaucgacaagguccucaacgagaagugcuccgccuacaccguggagcugggcaccgaggugaacgaguucgcgugcgucguggccgacgccgugaucaagacgcugcagccggucagcgagcuccugaccccccuggggaucgaccucgacgagugguccauggccaccuacuaccuguucgacgagagcggcgaguucaagcuggccucccacauguacugcagcuucuacccccccgacgaggacgaggaggagggggacugcgaggaggaggaguucgagccguccacccaguacgaguacggcacggaggacgacuaccagggcaagccccucgaguucggggcgaccagcgccgcccugcagcccgaggaggagcaggaggaggacuggcuggacgacgacucccagcagaccgugggccagcaggacgggagcgaggacaaccagaccacgaccauccagaccaucguggagguccagccccagcucgagauggagcugaccccgguggugcagacgaucgaggucaacuccuucagcggcuaccugaagcucaccgacaacguguacaucaagaacgccgacaucguggaggaggcgaagaaggucaagcccaccgugguggucaacgccgccaacguguaccugaagcacgggggcggcguggccggggcccugaacaaggcgaccaacaacgccaugcaggucgaguccgacgacuacaucgccacgaacggcccccucaagguggggggcagcugcguccuguccggccacaaccuggccaagcacugccuccacgugguggggcccaacgucaacaagggcgaggacauccagcugcugaagagcgccuacgagaacuucaaccagcacgaggugcuccuggcgccgcugcucuccgccgggaucuucggcgccgaccccauccacagccugcgggugugcgucgacaccgugcgcaccaacguguaccuggccgucuucgacaagaaccucuacgacaagcugguguccagcuuccuggagaugaagagcgagaagcagguggagcagaagaucgccgagauccccaaggaggaggucaagcccuucaucaccgaguccaagccgagcguggagcagcggaagcaggacgacaagaagaucaaggcgugcguggaggaggucacgaccacccucgaggagaccaaguuccugacggagaaccugcuccuguacaucgacaucaacgggaaccugcaccccgacuccgccacccucgugagcgacaucgacaucaccuuccugaagaaggacgcccccuacaucgugggcgacgucgugcaggagggcgugcugaccgccgucgugauccccacgaagaaggccgggggcaccaccgagaugcucgcgaaggcccugcgcaaggugccgaccgacaacuacaucacgaccuaccccgggcagggccugaacggguacaccgucgaggaggccaagaccgugcucaagaagugcaaguccgccuucuacauccugcccagcaucaucuccaacgagaagcaggagauccugggcaccgugagcuggaaccuccgggagaugcuggcgcacgccgaggagacgcgcaagcugaugcccgucugcguggagaccaaggccaucguguccaccauccagcggaaguacaagggcaucaagauccaggagggggucguggacuacggcgcccgcuucuacuucuacaccagcaagacgaccguggccucccugaucaacacccucaacgaccugaacgagacccuggucacgaugccgcucggguacgugacccacggccugaaccuggaggaggcggcccgguacaugcgcagccucaaggugcccgccaccgucuccgugagcucccccgacgccgugaccgccuacaacggguaccugacgagcuccagcaagacccccgaggagcacuucaucgagaccaucucccuggcgggcagcuacaaggacuggagcuacuccggccagagcacccagcucgggaucgaguuccugaagcggggcgacaaguccgucuacuacacgagcaacccgaccaccuuccaccuggacggggaggugaucaccuucgacaaccucaagacgcugcugucccuccgcgaggugcggaccaucaaggucuucaccaccguggacaacaucaaccugcacacgcagguggucgacaugagcaugaccuacggccagcaguucggccccaccuaccuggacggggccgacgugaccaagaucaagccccacaacucccacgagggcaagacguucuacgugcucccgaacgacgacacccugcgcgucgaggccuucgaguacuaccacaccaccgaccccagcuuccuggggcgguacauguccgcccucaaccacacgaagaaguggaaguacccccaggugaacggccugaccagcaucaagugggccgacaacaacugcuaccuggcgaccgcccuccugacccugcagcagaucgagcucaaguucaaccccccggcccugcaggacgccuacuaccgcgcgcgggccggggaggccgccaacuucugcgcccugauccucgcguacugcaacaagacggugggcgagcugggcgacguccgcgagaccauguccuaccuguuccagcacgccaaccucgacagcugcaagcgggugcugaacgucgugugcaagaccugcgggcagcagcagaccacccugaagggcguggaggccgucauguacauggggacgcucuccuacgagcaguucaagaagggcgugcagauccccugcaccugcgggaagcaggccaccaaguaccuggugcagcaggagagccccuucgucaugauguccgcccccccggcgcaguacgagcugaagcacggcaccuucacgugcgccagcgaguacaccggcaacuaccagugcgggcacuacaagcacaucaccuccaaggagacccucuacugcaucgacggcgcccugcugacgaagagcagcgaguacaaggggcccaucaccgacguguucuacaaggagaacuccuacaccaccacgaucaagcccgugaccuacaagcucgacggcgucgugugcaccgagaucgaccccaagcuggacaacuacuacaagaaggacaacagcuacuucaccgagcagccgaucgaccuggugcccaaccagcccuaccccaacgccuccuucgacaacuucaaguucgucugcgacaacaucaaguucgccgacgaccucaaccagcugacgggguacaagaagccggcgagccgcgagcugaaggugaccuucuuccccgaccucaacggcgacguggucgccaucgacuacaagcacuacacccccuccuucaagaagggcgccaagcugcugcacaagcccaucguguggcacgugaacaacgccaccaacaaggcgacguacaagccgaacaccuggugcauccggugccucuggagcaccaagcccgucgagaccuccaacagcuucgacgugcugaaguccgaggacgcccaggggauggacaaccuggccugcgaggaccucaagcccgugagcgaggaggucguggagaaccccacgauccagaaggacgugcuggagugcaacgucaagaccaccgagguggugggcgacaucauccugaagccggccaacaacucccucaagaucaccgaggaggucgggcacacggaccugauggccgcguacguggacaacagcucccugaccaucaagaagcccaacgagcucagccgcgugcugggccugaagacccucgccacccacgggcuggccgccgucaacuccgugcccugggacacgaucgccaacuacgcgaagccguuccugaacaagguggucagcaccaccaccaacaucgugacgcgcugccucaaccgggugugcaccaacuacaugcccuacuucuucacccugcugcuccagcugugcaccuucacccgcuccacgaacagccggaucaaggccuccaugcccaccaccaucgccaagaacaccgucaagagcgugggcaaguucugccuggaggccagcuucaacuaccucaagucccccaacuucagcaagcugaucaacaucaucaucugguuccugcuccuguccgugugccugggcagccucaucuacuccacggccgcgcuggggguccugaugagcaaccucggcaugccguccuacugcaccggguaccgcgagggcuaccugaacagcaccaacgugaccaucgccacguacugcaccggcuccauccccugcagcgugugccuguccgggcucgacagccuggacaccuaccccucccuggagaccauccagaucacgaucagcuccuucaagugggaccucaccgccuucggccuggucgccgagugguuccuggccuacauccucuucacccgguucuucuacgugcuggggcuggcggccaucaugcagcucuucuucagcuacuucgccgugcacuucaucuccaacagcuggcugauguggcugaucaucaaccugguccagauggcccccaucuccgcgauggugcgcauguacaucuucuucgccagcuucuacuacguguggaagagcuacguccacgugguggacggcugcaacuccagcaccugcaugaugugcuacaagcggaaccgcgccacgcgggucgagugcaccaccaucgugaacgggguccgccgguccuucuacguguacgccaacggcggcaagggguucugcaagcuccacaacuggaacugcgugaacugcgacaccuucugcgccggcagcacguucaucuccgacgaggucgcgcgcgaccugagccugcaguucaagcggccgaucaaccccaccgaccaguccagcuacaucguggacuccgugaccgucaagaacgggagcauccaccucuacuucgacaaggccggccagaagaccuacgagcgccacucccugagccacuucgugaaccuggacaaccuccgggccaacaacacgaaggggucccugcccaucaacgugaucgucuucgacggcaagagcaagugcgaggaguccagcgccaaguccgccagcguguacuacucccagcugaugugccagcccauccuccugcuggaccaggcgcucgugagcgacgucggcgacagcgccgagguggccgugaagauguucgacgccuacgucaacaccuucuccagcaccuucaacgugccgauggagaagcugaagacccugguggccacggcggaggccgagcucgccaagaacgucucccuggggaacgugcugagcaccuucaucuccgccgcgcgccagggcuucguggacagcgacgucgagaccaaggacgugguggagugccucaagcugucccaccagagcgacaucgaggucaccggggacuccugcaacaacuacaugcugacguacaacaagguggagaacaugaccccccgggaccucggcgccugcaucgacugcagcgcccgccacaucaacgcccagguggccaagucccacaacaucgcgcugaucuggaacgucaaggacuucaugagccuguccgagcagcuccggaagcagauccgcagcgccgccaagaagaacaaccugcccuucaagcugaccugcgccaccacgcgccagguggugaacgucgugaccaccaagaucgcccucaaggggggcugaggacuaguuauaagacugacuagcccgaugggccucccaacgggcccuccuccccuccuugcaccgagauuaauaaaaaaaaaaaaaaaaaaaaaaaaaaaaaaaaaaaaaaaaaaaaaaaaaaaaaaaaaaaaaaaaugcaucccccccccccccccccccccccccccccccaaaggcucuuuucagagccaccagaauu

SEQ ID NO: 21857 - RNA, 6058 nt, Artificial Sequence
  SARS-CoV-2__MT632921.1__non-structural protein 3 (NSP3) mRNA gc
aggagaaagcuuaccauggcccccaccaaggugaccuucggcgacgacacggucaucgaggugcagggguacaagagcgugaacaucaccuucgagcuggacgagcgcaucgacaagguccucaacgagaagugcuccgccuacaccguggagcugggcaccgaggugaacgaguucgcgugcgucguggccgacgccgugaucaagacgcugcagccggucagcgagcuccugaccccccuggggaucgaccucgacgagugguccauggccaccuacuaccuguucgacgagagcggcgaguucaagcuggccucccacauguacugcagcuucuacccccccgacgaggacgaggaggagggggacugcgaggaggaggaguucgagccguccacccaguacgaguacggcacggaggacgacuaccagggcaagccccucgaguucggggcgaccagcgccgcccugcagcccgaggaggagcaggaggaggacuggcuggacgacgacucccagcagaccgugggccagcaggacgggagcgaggacaaccagaccacgaccauccagaccaucguggagguccagccccagcucgagauggagcugaccccgguggugcagacgaucgaggucaacuccuucagcggcuaccugaagcucaccgacaacguguacaucaagaacgccgacaucguggaggaggcgaagaaggucaagcccaccgugguggucaacgccgccaacguguaccugaagcacgggggcggcguggccggggcccugaacaaggcgaccaacaacgccaugcaggucgaguccgacgacuacaucgccacgaacggcccccucaagguggggggcagcugcguccuguccggccacaaccuggccaagcacugccuccacgugguggggcccaacgucaacaagggcgaggacauccagcugcugaagagcgccuacgagaacuucaaccagcacgaggugcuccuggcgccgcugcucuccgccgggaucuucggcgccgacagcauccacucccugcgggugugcgucgacaccgugcgcaccaacguguaccuggccgucuucgacaagaaccucuacgacaagcuggugagcagcuuccuggagaugaaguccgagaagcagguggagcagaagaucgccgagauccccaaggaggaggucaagcccuucaucaccgagagcaagcccuccguggagcagcggaagcaggacgacaagaagaucaaggcgugcguggaggaggucacgaccacccucgaggagaccaaguuccugacggagaaccugcuccuguacaucgacaucaacgggaaccugcacccggacagcgccacccucguguccgacaucgacaucaccuuccugaagaaggacgcccccuacaucgugggcgacgucgugcaggagggcgugcugaccgccgucgugauccccacgaagaaggccgggggcaccaccgagaugcucgcgaaggcccugcgcaaggugcccaccgacaacuacaucacgaccuacccggggcagggccugaacggguacaccgucgaggaggccaagaccgugcucaagaagugcaagagcgccuucuacauccugcccuccaucaucagcaacgagaagcaggagauccugggcaccguguccuggaaccuccgggagaugcuggcgcacgccgaggagacgcgcaagcugaugcccgucugcguggagaccaaggccaucgugagcaccauccagcggaaguacaagggcaucaagauccaggagggggucguggacuacggcgcccgcuucuacuucuacaccuccaagacgaccguggccagccugaucaacacccucaacgaccugaacgagacccuggucacgaugccccucggguacgugacccacggccugaaccuggaggaggcggcccgguacaugcgcucccucaaggugccggccaccgucagcguguccagccccgacgccgugaccgccuacaacggguaccugacguccagcuccaagacccccgaggagcacuucaucgagaccaucagccuggcgggcagcuacaaggacugguccuacagcggccaguccacccagcucgggaucgaguuccugaagcggggcgacaagagcgucuacuacacguccaaccccaccaccuuccaccuggacggggaggugaucaccuucgacaaccucaagacgcugcugagccuccgcgaggugcggaccaucaaggucuucaccaccguggacaacaucaaccugcacacgcagguggucgacauguccaugaccuacggccagcaguucggcccgaccuaccuggacggggccgacgugaccaagaucaagccccacaacagccacgagggcaagacguucuacgugcuccccaacgacgacacccugcgcgucgaggccuucgaguacuaccacaccaccgacccguccuuccuggggcgguacaugagcgcccucaaccacacgaagaaguggaaguacccccaggugaacggccugaccuccaucaagugggccgacaacaacugcuaccuggcgaccgcccuccugacccugcagcagaucgagcucaaguucaacccccccgcccugcaggacgccuacuaccgcgcgcgggccggggaggccgccaacuucugcgcccugauccucgcguacugcaacaagacggugggcgagcugggcgacguccgcgagaccaugagcuaccuguuccagcacgccaaccucgacuccugcaagcgggugcugaacgucgugugcaagaccugcgggcagcagcagaccacccugaagggcguggaggccgucauguacauggggacgcucagcuacgagcaguucaagaagggcgugcagaucccgugcaccugcgggaagcaggccaccaaguaccuggugcagcaggagucccccuucgucaugaugagcgccccccccgcgcaguacgagcugaagcacggcaccuucacgugcgccuccgaguacaccggcaacuaccagugcgggcacuacaagcacaucaccagcaaggagacccucuacugcaucgacggcgcccugcugacgaagagcuccgaguacaaggggccgaucaccgacguguucuacaaggagaacagcuacaccaccacgaucaagcccgugaccuacaagcucgacggcgucgugugcaccgagaucgaccccaagcuggacaacuacuacaagaaggacaacuccuacuucaccgagcagcccaucgaccuggugccgaaccagcccuaccccaacgccagcuucgacaacuucaaguucgucugcgacaacaucaaguucgccgacgaccucaaccagcugacgggguacaagaagcccgcgucccgcgagcugaaggugaccuucuucccggaccucaacggcgacguggucgccaucgacuacaagcacuacacccccagcuucaagaagggcgccaagcugcugcacaagcccaucguguggcacgugaacaacgccaccaacaaggcgacguacaagcccaacaccuggugcauccggugccucugguccaccaagccggucgagaccagcaacuccuucgacgugcugaagagcgaggacgcccaggggauggacaaccuggccugcgaggaccucaagcccguguccgaggaggucguggagaaccccacgauccagaaggacgugcuggagugcaacgucaagaccaccgagguggugggcgacaucauccugaagcccgccaacaacagccucaagaucaccgaggaggucgggcacacggaccugauggccgcguacguggacaacuccagccugaccaucaagaagccgaacgagcucucccgcgugcugggccugaagacccucgccacccacgggcuggccgccgucaacagcgugcccugggacacgaucgccaacuacgcgaagcccuuccugaacaagguggucuccaccaccaccaacaucgugacgcgcugccucaaccgggugugcaccaacuacaugccguacuucuucacccugcugcuccagcugugcaccuucacccgcagcacgaacucccggaucaaggccagcaugcccaccaccaucgccaagaacaccgucaagagcgugggcaaguucugccuggaggccuccuucaacuaccucaagagccccaacuucuccaagcugaucaacaucaucaucugguuccugcuccugagcgugugccugggcucccucaucuacagcacggccgcgcuggggguccugauguccaaccucggcaugcccagcuacugcaccggguaccgcgagggcuaccugaacuccaccaacgugaccaucgccacguacugcaccggcagcaucccgugcuccgugugccugagcgggcucgacucccuggacaccuaccccagccuggagaccauccagaucacgaucuccagcuucaagugggaccucaccgccuucggccuggucgccgagugguuccuggccuacauccucuucacccgguucuucuacgugcuggggcuggcggccaucaugcagcucuucuucuccuacuucgccgugcacuucaucagcaacuccuggcugauguggcugaucaucaaccugguccagauggcccccaucagcgcgauggugcgcauguacaucuucuucgccagcuucuacuacguguggaaguccuacguccacgugguggacggcugcaacagcuccaccugcaugaugugcuacaagcggaaccgcgccacgcgggucgagugcaccaccaucgugaacgggguccgccggagcuucuacguguacgccaacggcggcaagggguucugcaagcuccacaacuggaacugcgugaacugcgacaccuucugcgccggcuccacguucaucagcgacgaggucgcgcgcgaccugucccugcaguucaagcggcccaucaacccgaccgaccagagcuccuacaucguggacagcgugaccgucaagaacggguccauccaccucuacuucgacaaggccggccagaagaccuacgagcgccacagccugucccacuucgugaaccuggacaaccuccgggccaacaacacgaaggggagccugcccaucaacgugaucgucuucgacggcaaguccaagugcgaggagagcuccgccaagagcgccuccguguacuacagccagcugaugugccagcccauccuccugcuggaccaggcgcucgugagcgacgucggcgacuccgccgagguggccgugaagauguucgacgccuacgucaacaccuucagcuccaccuucaacgugcccauggagaagcugaagacccugguggccacggcggaggccgagcucgccaagaacgucagccuggacaacgugcuguccaccuucaucagcgccgcgcgccagggguucguggacuccgacgucgagaccaaggacgugguggagugccucaagcugagccaccaguccgacaucgaggucaccggcgacagcugcaacaacuacaugcugacguacaacaagguggagaacaugaccccgcgggaccucggggccugcaucgacugcuccgcccgccacaucaacgcccagguggccaagagccacaacaucgcgcugaucuggaacgucaaggacuucaugucccugagcgagcagcuccggaagcagauccgcuccgccgccaagaagaacaaccugcccuucaagcugaccugcgccaccacgcgccagguggugaacgucgugaccaccaagaucgcccucaagggcgggugaggacuaguuauaagacugacuagcccgaugggccucccaacgggcccuccuccccuccuugcaccgagauuaauaaaaaaaaaaaaaaaaaaaaaaaaaaaaaaaaaaaaaaaaaaaaaaaaaaaaaaaaaaaaaaaaugcaucccccccccccccccccccccccccccccccaaaggcucuuuucagagccaccagaauu

SEQ ID NO: 21858 - RNA, 6058 nt, Artificial Sequence
  SARS-CoV-2__MT632930.1__non-structural protein 3 (NSP3) mRNA gc
aggagaaagcuuaccauggcccccaccaaggugaccuucggcgacgacacggucaucgaggugcagggguacaagagcgugaacaucaccuucgagcuggacgagcgcaucgacaagguccucaacgagaagugcuccgccuacaccguggagcugggcaccgaggugaacgaguucgcgugcgucguggccgacgccgugaucaagacgcugcagccggucagcgagcuccugaccccccuggggaucgaccucgacgagugguccauggccaccuacuaccuguucgacgagagcggcgaguucaagcuggccucccacauguacugcagcuucuacccccccgacgaggacgaggaggagggggacugcgaggaggaggaguucgagccguccacccaguacgaguacggcacggaggacgacuaccagggcaagccccucgaguucggggcgaccagcgccgcccugcagcccgaggaggagcaggaggaggacuggcuggacgacgacucccagcagaccgugggccagcaggacgggagcgaggacaaccagaccacgaccauccagaccaucguggagguccagccccagcucgagauggagcugaccccgguggugcagacgaucgaggucaacuccuucagcggcuaccugaagcucaccgacaacguguacaucaagaacgccgacaucguggaggaggcgaagaaggucaagcccaccgugguggucaacgccgccaacguguaccugaagcacgggggcggcguggccggggcccugaacaaggcgaccaacaacgccaugcaggucgaguccgacgacuacaucgccacgaacggcccccucaagguggggggcagcugcguccuguccggccacaaccuggccaagcacugccuccacgugguggggcccaacgucaacaagggcgaggacauccagcugcugaagagcgccuacgagaacuucaaccagcacgaggugcuccuggcgccgcugcucuccgccgggaucuucggcgccgaccccauccacagccugcgggugugcgucgacaccgugcgcaccaacguguaccuggccgucuucgacaagaaccucuacgacaagcugguguccagcuuccuggagaugaagagcgagaagcagguggagcagaagaucgccgagauccccaaggaggaggucaagcccuucaucaccgaguccaagccgagcguggagcagcggaagcaggacgacaagaagaucaaggcgugcguggaggaggucacgaccacccucgaggagaccaaguuccugacggagaaccugcuccuguacaucgacaucaacgggaaccugcaccccgacuccgccacccucgugagcgacaucgacaucaccuuccugaagaaggacgcccccuacaucgugggcgacgucgugcaggagggcgugcugaccgccgucgugauccccacgaagaaggccgggggcaccaccgagaugcucgcgaaggcccugcgcaaggugccgaccgacaacuacaucacgaccuaccccgggcagggccugaacggguacaccgucgaggaggccaagaccgugcucaagaagugcaaguccgccuucuacauccugcccagcaucaucuccaacgagaagcaggagauccugggcaccgugagcuggaaccuccgggagaugcuggcgcacgccgaggagacgcgcaagcugaugcccgucugcguggagaccaaggccaucguguccaccauccagcggaaguacaagggcaucaagauccaggagggggucguggacuacggcgcccgcuucuacuucuacaccagcaagacgaccguggccucccugaucaacacccucaacgaccugaacgagacccuggucacgaugccgcucggguacgugacccacggccugaaccuggaggaggcggcccgguacaugcgcagccucaaggugcccgccaccgucuccgugagcucccccgacgccgugaccgccuacaacggguaccugacgagcuccagcaagacccccgaggagcacuucaucgagaccaucucccuggcgggcagcuacaaggacuggagcuacuccggccagagcacccagcucgggaucgaguuccugaagcggggcgacaaguccgucuacuacacgagcaacccgaccaccuuccaccuggacggggaggugaucaccuucgacaaccucaagacgcugcugucccuccgcgaggugcggaccaucaaggucuucaccaccguggacaacaucaaccugcacacgcagguggucgacaugagcaugaccuacggccagcaguucggccccaccuaccuggacggggccgacgugaccaagaucaagccccacaacucccacgagggcaagacguucuacgugcucccgaacgacgacacccugcgcgucgaggccuucgaguacuaccacaccaccgaccccagcuuccuggggcgguacauguccgcccucaaccacacgaagaaguggaaguacccccaggugaacggccugaccagcaucaagugggccgacaacaacugcuaccuggcgaccgcccuccugacccugcagcagaucgagcucaaguucaaccccccggcccugcaggacgccuacuaccgcgcgcgggccggggaggccgccaacuucugcgcccugauccucgcguacugcaacaagacggugggcgagcugggcgacguccgcgagaccauguccuaccuguuccagcacgccaaccucgacagcugcaagcgggugcugaacgucgugugcaagaccugcgggcagcagcagaccacccugaagggcguggaggccgucauguacauggggacgcucuccuacgagcaguucaagaagggcgugcagauccccugcaccugcgggaagcaggccaccaaguaccuggugcagcaggagagccccuucgucaugauguccgcccccccggcgcaguacgagcugaagcacggcaccuucacgugcgccagcgaguacaccggcaacuaccagugcgggcacuacaagcacaucaccuccaaggagacccucuacugcaucgacggcgcccugcugacgaagagcagcgaguacaaggggcccaucaccgacguguucuacaaggagaacuccuacaccaccacgaucaagcccgugaccuacaagcucgacggcgucgugugcaccgagaucgaccccaagcuggacaacuacuacaagaaggacaacagcuacuucaccgagcagccgaucgaccuggugcccaaccagcccuaccccaacgccuccuucgacaacuucaaguucgucugcgacaacaucaaguucgccgacgaccucaaccagcugacgggguacaagaagccggcgagccgcgagcugaaggugaccuucuuccccgaccucaacggcgacguggucgccaucgacuacaagcacuacacccccuccuucaagaagggcgccaagcugcugcacaagcccaucguguggcacgugaacaacgccaccaacaaggcgacguacaagccgaacaccuggugcauccggugccucuggagcaccaagcccgucgagaccuccaacagcuucgacgugcugaaguccgaggacgcccaggggauggacaaccuggccugcgaggaccucaagcccgugagcgaggaggucguggagaaccccacgauccagaaggacgugcuggagugcaacgucaagaccaccgagguggugggcgacaucauccugaagccggccaacaacucccucaagaucaccgaggaggucgggcacacggaccugauggccgcguacguggacaacagcucccugaccaucaagaagcccaacgagcucagccgcgugcugggccugaagacccucgccacccacgggcuggccgccgucaacuccgugcccugggacacgaucgccaacuacgcgaagccguuccugaacaagguggucagcaccaccaccaacaucgugacgcgcugccucaaccgggugugcaccaacuacaugcccuacuucuucacccugcugcuccagcugugcaccuucacccgcuccacgaacagccggaucaaggccuccaugcccaccaccaucgccaagaacaccgucaagagcgugggcaaguucugccuggaggccagcuucaacuaccucaagucccccaacuucagcaagcugaucaacaucaucaucugguuccugcuccuguccgugugccugggcagccucaucuacuccacggccgcgcuggggguccugaugagcaaccucggcaugccguccuacugcaccggguaccgcgagggcuaccugaacagcaccaacgugaccaucgccacguacugcaccggcuccauccccugcagcgugugccuguccgggcucgacagccuggacaccuaccccucccuggagaccauccagaucacgaucagcuccuucaagugggaccucaccgccuucggccuggucgccgagugguuccuggccuacauccucuucacccgguucuucuacgugcuggggcuggcggccaucaugcagcucuucuucagcuacuucgccgugcacuucaucuccaacagcuggcugauguggcugaucaucaaccugguccagauggcccccaucuccgcgauggugcgcauguacaucuucuucgccagcuucuacuacguguggaagagcuacguccacgugguggacggcugcaacuccagcaccugcaugaugugcuacaagcggaaccgcgccacgcgggucgagugcaccaccaucgugaacgggguccgccgguccuucuacguguacgccaacggcggcaagggguucugcaagcuccacaacuggaacugcgugaacugcgacaccuucugcgccggcagcacguucaucuccgacgaggucgcgcgcgaccugagccugcaguucaagcggccgaucaaccccaccgaccaguccagcuacaucguggacuccgugaccgucaagaacgggagcauccaccucuacuucgacaaggccggccagaagaccuacgagcgccacucccccagccacuucgugaaccuggacaaccugcgggccaacaacacgaaggggucccuccccaucaacgugaucgucuucgacggcaagagcaagugcgaggaguccagcgccaaguccgccagcguguacuacucccagcugaugugccagccgauccugcuccuggaccaggcgcuggugagcgacgucggcgacagcgccgagguggccgugaagauguucgacgccuacgucaacaccuucuccagcaccuucaacgugcccauggagaagcucaagacccugguggccacggcggaggccgagcuggccaagaacgucucccucgacaacgugcugagcaccuucaucuccgccgcgcgccagggguucguggacagcgacgucgagaccaaggacgugguggagugccugaagcucucccaccagagcgacaucgaggucaccggcgacuccugcaacaacuacaugcugacguacaacaagguggagaacaugaccccccgggaccugggggccugcaucgacugcagcgcccgccacaucaacgcccagguggccaagucccacaacaucgcgcucaucuggaacgucaaggacuucaugagccuguccgagcagcugcggaagcagauccgcagcgccgccaagaagaacaaccuccccuucaagcugaccugcgccaccacgcgccagguggugaacgucgugaccaccaagaucgcccugaagggcgggugaggacuaguuauaagacugacuagcccgaugggccucccaacgggcccuccuccccuccuugcaccgagauuaauaaaaaaaaaaaaaaaaaaaaaaaaaaaaaaaaaaaaaaaaaaaaaaaaaaaaaaaaaaaaaaaaugcaucccccccccccccccccccccccccccccccaaaggcucuuuucagagccaccagaauu

SEQ ID NO: 21859 - RNA, 6058 nt, Artificial Sequence
  SARS-CoV-2__MT632954.1__non-structural protein 3 (NSP3) mRNA gc
aggagaaagcuuaccauggcccccaccaaggugaccuucggcgacgacacggucaucgaggugcagggguacaagagcgugaacaucaccuucgagcuggacgagcgcaucgacaagguccucaacgagaagugcuccgccuacaccguggagcugggcaccgaggugaacgaguucgcgugcgucguggccgacgccgugaucaagacgcugcagccggucagcgagcuccugaccccccuggggaucgaccucgacgagugguccauggccaccuacuaccuguucgacgagagcggcgaguucaagcuggccucccacauguacugcagcuucuacccccccgacgaggacgaggaggagggggacugcgaggaggaggaguucgagccguccacccaguacgaguacggcacggaggacgacuaccagggcaagccccucgaguucggggcgaccagcgccgcccugcagcccgaggaggagcaggaggaggacuggcuggacgacgacucccagcagaccgugggccagcaggacgggagcgaggacaaccagaccacgaccauccagaccaucguggagguccagccccagcucgagauggagcugaccccgguggugcagacgaucgaggucaacuccuucagcggcuaccugaagcucaccgacaacguguacaucaagaacgccgacaucguggaggaggcgaagaaggucaagcccaccgugguggucaacgccgccaacguguaccugaagcacgggggcggcguggccggggcccugaacaaggcgaccaacaacgccaugcaggucgaguccgacgacuacaucgccacgaacggcccccucaagguggggggcagcugcguccuguccggccacaaccuggccaagcacugccuccacgugguggggcccaacgucaacaagggcgaggacauccagcugcugaagagcgccuacgagaacuucaaccagcacgaggugcuccuggcgccgcugcucuccgccgggaucuucggcgccgaccccauccacagccugcgggugugcgucgacaccgugcgcaccaacguguaccuggccgucuucgacaagaaccucuacgacaagcugguguccagcuuccuggagaugaagagcgagaagcagguggagcagaagaucgccgagauccccaaggaggaggucaagcccuucaucaccgaguccaagccgagcguggagcagcggaagcaggacgacaagaagaucaaggcgugcguggaggaggucacgaccacccucgaggagaccaaguuccugacggagaaccugcuccuguacguggacaucaacgggaaccugcaccccgacuccgccacccucgugagcgacaucgacaucaccuuccugaagaaggacgcccccuacaucgucggcgacguggugcaggagggcguccugaccgccguggugauccccacgaagaaggccgggggcaccaccgagaugcucgcgaaggcccugcgcaaggucccgaccgacaacuacaucacgaccuaccccgggcagggccugaacggguacaccguggaggaggccaagaccgugcucaagaagugcaaguccgccuucuacauccugcccagcaucaucuccaacgagaagcaggagauccugggcaccgucagcuggaaccuccgggagaugcuggcgcacgccgaggagacgcgcaagcugaugcccgugugcguggagaccaaggccaucgucuccaccauccagcggaaguacaagggcaucaagauccaggagggggugguggacuacggcgcccgcuucuacuucuacaccagcaagacgaccgucgccucccugaucaacacccucaacgaccugaacgagacccuggugacgaugccgcucggguacgugacccacggccugaaccuggaggaggcggcccgguacaugcgcagccucaagguccccgccaccguguccgugagcucccccgacgccgucaccgccuacaacggguaccugacgagcuccagcaagacccccgaggagcacuucaucgagaccaucucccuggcgggcagcuacaaggacuggagcuacuccggccagagcacccagcucgggaucgaguuccugaagcggggcgacaaguccguguacuacacgagcaacccgaccaccuuccaccuggacggggaggugaucaccuucgacaaccucaagacgcugcugucccuccgcgagguccggaccaucaagguguucaccaccguggacaacaucaaccugcacacgcaggucguggacaugagcaugaccuacggccagcaguucggccccaccuaccuggacggggccgacgugaccaagaucaagccccacaacucccacgagggcaagacguucuacguccucccgaacgacgacacccugcgcguggaggccuucgaguacuaccacaccaccgaccccagcuuccuggggcgguacauguccgcccucaaccacacgaagaaguggaaguacccccaggugaacggccugaccagcaucaagugggccgacaacaacugcuaccuggcgaccgcccuccugacccugcagcagaucgagcucaaguucaaccccccggcccugcaggacgccuacuaccgcgcgcgggccggggaggccgccaacuucugcgcccugauccucgcguacugcaacaagacggucggcgagcugggcgacgugcgcgagaccauguccuaccuguuccagcacgccaaccucgacagcugcaagcggguccugaacguggugugcaagaccugcgggcagcagcagaccacccugaagggcgucgaggccgugauguacauggggacgcucuccuacgagcaguucaagaagggcgugcagauccccugcaccugcgggaagcaggccaccaaguaccugguccagcaggagagccccuucgugaugauguccgcccccccggcgcaguacgagcugaagcacggcaccuucacgugcgccagcgaguacaccggcaacuaccagugcgggcacuacaagcacaucaccuccaaggagacccucuacugcaucgacggcgcccugcugacgaagagcagcgaguacaaggggcccaucaccgacguguucuacaaggagaacuccuacaccaccacgaucaagcccgucaccuacaagcucgacggcguggugugcaccgagaucgaccccaagcuggacaacuacuacaagaaggacaacagcuacuucaccgagcagccgaucgaccugguccccaaccagcccuaccccaacgccuccuucgacaacuucaaguucgugugcgacaacaucaaguucgccgacgaccucaaccagcugacgggguacaagaagccggcgagccgcgagcugaaggugaccuucuuccccgaccucaacggcgacgucguggccaucgacuacaagcacuacacccccuccuucaagaagggcgccaagcugcugcacaagcccaucguguggcacgucaacaacgccaccaacaaggcgacguacaagccgaacaccuggugcauccggugccucuggagcaccaagcccguggagaccuccaacagcuucgacgugcugaaguccgaggacgcccaggggauggacaaccuggccugcgaggaccucaagcccgucagcgaggaggugguggagaaccccacgauccagaaggacguccuggagugcaacgugaagaccaccgagguggucggcgacaucauccugaagccggccaacaacucccucaagaucaccgaggagguggggcacacggaccugauggccgcguacguggacaacagcucccugaccaucaagaagcccaacgagcucagccgcguccugggccugaagacccucgccacccacgggcuggccgccgugaacuccgugcccugggacacgaucgccaacuacgcgaagccguuccugaacaaggucgugagcaccaccaccaacaucgugacgcgcugccucaaccgggucugcaccaacuacaugcccuacuucuucacccugcugcuccagcugugcaccuucacccgcuccacgaacagccggaucaaggccuccaugcccaccaccaucgccaagaacaccgugaagagcgugggcaaguucugccuggaggccagcuucaacuaccucaagucccccaacuucagcaagcugaucaacaucaucaucugguuccugcuccuguccgucugccugggcagccucaucuacuccacggccgcgcugggggugcugaugagcaaccucggcaugccguccuacugcaccggguaccgcgagggcuaccugaacagcaccaacgugaccaucgccacguacugcaccggcuccauccccugcagcgucugccuguccgggcucgacagccuggacaccuaccccucccuggagaccauccagaucacgaucagcuccuucaagugggaccucaccgccuucggccugguggccgagugguuccuggccuacauccucuucacccgguucuucuacgugcuggggcuggcggccaucaugcagcucuucuucagcuacuucgccguccacuucaucuccaacagcuggcugauguggcugaucaucaaccuggugcagauggcccccaucuccgcgauggugcgcauguacaucuucuucgccagcuucuacuacgucuggaagagcuacgugcacguggucgacggcugcaacuccagcaccugcaugaugugcuacaagcggaaccgcgccacgcggguggagugcaccaccaucgucaacggggugcgccgguccuucuacguguacgccaacggcggcaagggguucugcaagcuccacaacuggaacugcgucaacugcgacaccuucugcgccggcagcacguucaucuccgacgagguggcgcgcgaccugagccugcaguucaagcggccgaucaaccccaccgaccaguccagcuacaucguggacuccgucaccgugaagaacgggagcauccaccucuacuucgacaaggccggccagaagaccuacgagcgccacucccugagccacuucgugaaccuggacaaccuccgggccaacaacacgaaggggucccugcccaucaacgucaucguguucgacggcaagagcaagugcgaggaguccagcgccaaguccgccagcguguacuacucccagcugaugugccagcccauccuccugcuggaccaggcgcucgucagcgacgugggcgacagcgccgagguggccgucaagauguucgacgccuacgugaacaccuucuccagcaccuucaacgugccgauggagaagcugaagacccuggucgccacggcggaggccgagcucgccaagaacgugucccuggacaacgugcugagcaccuucaucuccgccgcgcgccagggguucgucgacagcgacguggagaccaaggacguggucgagugccucaagcugucccaccagagcgacaucgaggugaccggcgacuccugcaacaacuacaugcugacguacaacaagguggagaacaugaccccccgggaccucggggccugcaucgacugcagcgcccgccacaucaacgcccaggucgccaagucccacaacaucgcgcugaucuggaacgugaaggacuucaugagccuguccgagcagcuccggaagcagauccgcagcgccgccaagaagaacaaccugcccuucaagcugaccugcgccaccacgcgccagguggucaacguggugaccaccaagaucgcccucaagggcgggugaggacuaguuauaagacugacuagcccgaugggccucccaacgggcccuccuccccuccuugcaccgagauuaauaaaaaaaaaaaaaaaaaaaaaaaaaaaaaaaaaaaaaaaaaaaaaaaaaaaaaaaaaaaaaaaaugcaucccccccccccccccccccccccccccccccaaaggcucuuuucagagccaccagaauu

SEQ ID NO: 21860 - RNA, 6058 nt, Artificial Sequence
  SARS-CoV-2__MT614457.1__non-structural protein 3 (NSP3) mRNA gc
aggagaaagcuuaccauggcccccaccaaggugaccuucggcgacgacacggucaucgaggugcagggguacaagagcgugaacaucaccuucgagcuggacgagcgcaucgacaagguccucaacgagaagugcuccgccuacaccguggagcugggcaccgaggugaacgaguucgcgugcgucguggccgacgccgugaucaagacgcugcagccggucagcgagcuccugaccccccuggggaucgaccucgacgagugguccauggccaccuacuaccuguucgacgagagcggcgaguucaagcuggccucccacauguacugcagcuucuacccccccgacgaggacgaggaggagggggacugcgaggaggaggaguucgagccguccacccaguacgaguacggcacggaggacgacuaccagggcaagccccucgaguucggggcgaccagcgccgcccugcagcccgaggaggagcaggaggaggacuggcuggacgacgacucccagcagaccgugggccagcaggacgggagcgaggacaaccagaccacgaccauccagaccaucguggagguccagccccagcucgagauggagcugaccccgguggugcagacgaucgaggucaacuccuucagcggcuaccugaagcucaccgacaacguguacaucaagaacgccgacaucguggaggaggcgaagaaggucaagcccaccgugguggucaacgccgccaacguguaccugaagcacgggggcggcguggccggggcccugaacaaggcgaccaacaacgccaugcaggucgaguccgacgacuacaucgccacgaacggcccccucaagguggggggcagcugcguccuguccggccacaaccuggccaagcacugccuccacgugguggggcccaacgucgacaagggcgaggacauccagcugcugaagagcgccuacgagaacuucaaccagcacgaggugcuccuggcgccgcugcucuccgccgggaucuucggcgccgaccccauccacagccugcgggugugcgucgacaccgugcgcaccaacguguaccuggccgucuucgacaagaaccucuacgacaagcugguguccagcuuccuggagaugaagagcgagaagcagguggagcagaagaucgccgagauccccaaggaggaggucaagcccuucaucaccgaguccaagccgagcguggagcagcggaagcaggacgacaagaagaucaaggcgugcguggaggaggucacgaccacccucgaggagaccaaguuccugacggagaaccugcuccuguacaucgacaucaacgggaaccugcaccccgacuccgccacccucgugagcgacaucgacaucaccuuccugaagaaggacgcccccuacaucgugggcgacgucgugcaggagggcgugcugaccgccgucgugauccccacgaagaaggccgggggcaccaccgagaugcucgcgaaggcccugcgcaaggugccgaccgacaacuacaucacgaccuaccccgggcagggccugaacggguacaccgucgaggaggccaagaccgugcucaagaagugcaaguccgccuucuacauccugcccagcaucaucuccaacgagaagcaggagauccugggcaccgugagcuggaaccuccgggagaugcuggcgcacgccgaggagacgcgcaagcugaugcccgucugcguggagaccaaggccaucguguccaccauccagcggaaguacaagggcaucaagauccaggagggggucguggacuacggcgcccgcuucuacuucuacaccagcaagacgaccguggccucccugaucaacacccucaacgaccugaacgagacccuggucacgaugccgcucggguacgugacccacggccugaaccuggaggaggcggcccgguacaugcgcagccucaaggugcccgccaccgucuccgugagcucccccgacgccgugaccgccuacaacggguaccugacgagcuccagcaagacccccgaggagcacuucaucgagaccaucucccuggcgggcagcuacaaggacuggagcuacuccggccagagcacccagcucgggaucgaguuccugaagcggggcgacaaguccgucuacuacacgagcaacccgaccaccuuccaccuggacggggaggugaucaccuucgacaaccucaagacgcugcugucccuccgcgaggugcggaccaucaaggucuucaccaccguggacaacaucaaccugcacacgcagguggucgacaugagcaugaccuacggccagcaguucggccccaccuaccuggacggggccgacgugaccaagaucaagccccacaacucccacgagggcaagacguucuacgugcucccgaacgacgacacccugcgcgucgaggccuucgaguacuaccacaccaccgaccccagcuuccuggggcgguacauguccgcccucaaccacacgaagaaguggaaguacccccaggugaacggccugaccagcaucaagugggccgacaacaacugcuaccuggcgaccgcccuccugacccugcagcagaucgagcucaaguucaaccccccggcccugcaggacgccuacuaccgcgcgcgggccggggaggccgccaacuucugcgcccugauccucgcguacugcaacaagacggugggcgagcugggcgacguccgcgagaccauguccuaccuguuccagcacgccaaccucgacagcugcaagcgggugcugaacgucgugugcaagaccugcgggcagcagcagaccacccugaagggcguggaggccgucauguacauggggacgcucuccuacgagcaguucaagaagggcgugcagauccccugcaccugcgggaagcaggccaccaaguaccuggugcagcaggagagccccuucgucaugauguccgcccccccggcgcaguacgagcugaagcacggcaccuucacgugcgccagcgaguacaccggcaacuaccagugcgggcacuacaagcacaucaccuccaaggagacccucuacugcaucgacggcgcccugcugacgaagagcagcgaguacaaggggcccaucaccgacguguucuacaaggagaacuccuacaccaccacgaucaagcccgugaccuacaagcucgacggcgucgugugcaccgagaucgaccccaagcuggacaacuacuacaagaaggacaacagcuacuucaccgagcagccgaucgaccuggugcccaaccagcccuaccccaacgccuccuucgacaacuucaaguucgucugcgacaacaucaaguucgccgacgaccucaaccagcugacgggguacaagaagccggcgagccgcgagcugaaggugaccuucuuccccgaccucaacggcgacguggucgccaucgacuacaagcacuacacccccuccuucaagaagggcgccaagcugcugcacaagcccaucguguggcacgugaacaacgccaccaacaaggcgacguacaagccgaacaccuggugcauccggugccucuggagcaccaagcccgucgagaccuccaacagcuucgacgugcugaaguccgaggacgcccaggggauggacaaccuggccugcgaggaccucaagcccgugagcgaggaggucguggagaaccccacgauccagaaggacgugcuggagugcaacgucaagaccaccgagguggugggcgacaucauccugaagccggccaacaacucccucaagaucaccgaggaggucgggcacacggaccugauggccgcguacguggacaacagcucccugaccaucaagaagcccaacgagcucagccgcgugcugggccugaagacccucgccacccacgggcuggccgccgucaacuccgugcccugggacacgaucgccaacuacgcgaagccguuccugaacaagguggucagcaccaccaccaacaucgugacgcgcugccucaaccgggugugcaccaacuacaugcccuacuucuucacccugcugcuccagcugugcaccuucacccgcuccacgaacagccggaucaaggccuccaugcccaccaccaucgccaagaacaccgucaagagcgugggcaaguucugccuggaggccagcuucaacuaccucaagucccccaacuucagcaagcugaucaacaucaucaucugguuccugcuccuguccgugugccugggcagccucaucuacuccacggccgcgcuggggguccugaugagcaaccucggcaugccguccuacugcaccggguaccgcgagggcuaccugaacagcaccaacgugaccaucgccacguacugcaccggcuccauccccugcagcgugugccuguccgggcucgacagccuggacaccuaccccucccuggagaccauccagaucacgaucagcuccuucaagugggaccucaccgccuucggccuggucgccgagugguuccuggccuacauccucuucacccgguucuucuacgugcuggggcuggcggccaucaugcagcucuucuucagcuacuucgccgugcacuucaucuccaacagcuggcugauguggcugaucaucaaccugguccagauggcccccaucuccgcgauggugcgcauguacaucuucuucgccagcuucuacuacguguggaagagcuacguccacgugguggacggcugcaacuccagcaccugcaugaugugcuacaagcggaaccgcgccacgcgggucgagugcaccaccaucgugaacgggguccgccgguccuucuacguguacgccaacggcggcaagggguucugcaagcuccacaacuggaacugcgugaacugcgacaccuucugcgccggcagcacguucaucuccgacgaggucgcgcgcgaccugagccugcaguucaagcggccgaucaaccccaccgaccaguccagcuacaucguggacuccgugaccgucaagaacgggagcauccaccucuacuucgacaaggccggccagaagaccuacgagcgccacucccugagccacuucgugaaccuggacaaccuccgggccaacaacacgaaggggucccugcccaucaacgugaucgucuucgacggcaagagcaagugcgaggaguccagcgccaaguccgccagcguguacuacucccagcugaugugccagcccauccuccugcuggaccaggcgcucgugagcgacgucggcgacagcgccgagguggccgugaagauguucgacgccuacgucaacaccuucuccagcaccuucaacgugccgauggagaagcugaagacccugguggccacggcggaggccgagcucgccaagaacgucucccuggacaacgugcugagcaccuucaucuccgccgcgcgccagggguucguggacagcgacgucgagaccaaggacgugguggagugccucaagcugucccaccagagcgacaucgaggucaccggcgacuccugcaacaacuacaugcugacguacaacaagguggagaacaugaccccccgggaccucggggccugcaucgacugcagcgcccgccacaucaacgcccagguggccaagucccacaacaucgcgcugaucuggaacgucaaggacuucaugagccuguccgagcagcuccggaagcagauccgcagcgccgccaagaagaacaaccugcccuucaagcugaccugcgccaccacgcgccagguggugaacgucgugaccaccaagaucgcccucaagggcgggugaggacuaguuauaagacugacuagcccgaugggccucccaacgggcccuccuccccuccuugcaccgagauuaauaaaaaaaaaaaaaaaaaaaaaaaaaaaaaaaaaaaaaaaaaaaaaaaaaaaaaaaaaaaaaaaaugcaucccccccccccccccccccccccccccccccaaaggcucuuuucagagccaccagaauu

SEQ ID NO: 21861 - RNA, 6058 nt, Artificial Sequence
  SARS-CoV-2__MT614462.1__non-structural protein 3 (NSP3) mRNA gc
aggagaaagcuuaccauggcccccaccaaggugaccuucggcgacgacacggucaucgaggugcagggguacaagagcgugaacaucaccuucgagcuggacgagcgcaucgacaagguccucaacgagaagugcuccgccuacaccguggagcugggcaccgaggugaacgaguucgcgugcgucguggccgacgccgugaucaagacgcugcagccggucagcgagcuccugaccccccuggggaucgaccucgacgagugguccauggccaccuacuaccuguucgacgagagcggcgaguucaagcuggccucccacauguacugcagcuucuacccccccgacgaggacgaggaggagggggacugcgaggaggaggaguucgagccguccacccaguacgaguacggcacggaggacgacuaccagggcaagccccucgaguucggggcgaccagcgccgcccugcagcccgaggaggagcaggaggaggacuggcuggacgacgacucccagcagaccgugggccagcaggacgggagcgaggacaaccagaccacgaccauccagaccaucguggagguccagccccagcucgagauggagcugaccccgguggugcagacgaucgaggucaacuccuucagcggcuaccugaagcucaccgacaacguguacaucaagaacgccgacaucguggaggaggcgaagaaggucaagcccaccgugguggucaacgccgccaacguguaccugaagcacgggggcggcguggccggggcccugaacaaggcgaccaacaacgccaugcaggucgaguccgacgacuacaucgccacgaacggcccccucaagguggggggcagcugcguccuguccggccacaaccuggccaagcacugccuccacgugguggggcccaacgucaacaagggcgaggacauccagcugcugaagagcgccuacgagaacuucaaccagcacgaggugcuccuggcgccgcugcucuccgccgggaucuucggcgccgaccccauccacagccugcgggugugcgucgacaccgugcgcaccaacguguaccuggccgucuucgacaagaaccucuacgacaagcugguguccagcuuccuggagaugaagagcgagaagcagguggagcagaagaucgccgagauccccaaggaggaggucaagcccuucaucaccgaguccaagccgagcguggagcagcggaagcaggacgacaagaagaucaaggcgugcguggaggaggucacgaccacccucgaggagaccaaguuccugacggagaaccugcuccuguacaucgacaucaacgggaaccugcaccccgacuccgccacccucgugagcgacaucgacaucaccuuccugaagaaggacgcccccuacaucgugggcgacgucgugcaggagggcgugcugaccgccgucgugauccccacgaagaaggccgggggcaccaccgagaugcucgcgaaggcccugcgcaaggugccgaccgacaacuacaucacgaccuaccccgggcagggccugaacggguacaccgucgaggaggccaagaccgugcucaagaagugcaaguccgccuucuacauccugcccagcaucaucuccaacgagaagcaggagauccugggcaccgugagcuggaaccuccgggagaugcuggcgcacgccgaggagacgcgcaagcugaugcccgucugcguggagaccaaggccaucguguccaccauccagcggaaguacaagggcaucaagauccaggagggggucguggacuacggcgcccgcuucuacuucuacaccagcaagacgaccguggccucccugaucaacacccucaacgaccugaacgagacccuggucacgaugccgcucggguacgugacccacggccugaaccuggaggaggcggcccgguacaugcgcagccucaaggugcccgccaccgucuccgugagcucccccgacgccgugaccgccuacaacggguaccugacgagcuccagcaagacccccgaggagcacuucaucgagaccaucucccuggcgggcagcuacaaggacuggagcuacuccggccagagcacccagcucgggaucgaguuccugaagcggggcgacaaguccgucuacuacacgagcaacccgaccaccuuccaccuggacggggaggugaucaccuucgacaaccucaagacgcugcugucccuccgcgaggugcggaccaucaaggucuucaccaccguggacaacaucaaccugcacacgcagguggucgacaugagcaugaccuacggccagcaguucggccccaccuaccuggacggggccgacgugaccaagaucaagccccacaacucccacgagggcaagacguucuacgugcucccgaacgacgacacccugcgcgucgaggccuucgaguacuaccacaccaccgaccccagcuuccuggggcgguacauguccgcccucaaccacacgaagaaguggaaguacccccaggugaacggccugaccagcaucaagugggccgacaacaacugcuaccuggcgaccgcccuccugacccugcagcagaucgagcucaaguucaaccccccggcccugcaggacgccuacuaccgcgcgcgggccggggaggccgccaacuucugcgcccugauccucgcguacugcaacaagacggugggcgagcugggcgacguccgcgagaccauguccuaccuguuccagcacgccaaccucgacagcugcaagcgggugcugaacgucgugugcaagaccugcgggcagcagcagaccacccugaagggcguggaggccgucauguacauggggacgcucuccuacgagcaguucaagaagggcgugcagauccccugcaccugcgggaagcaggccaccaaguaccuggugcagcaggagagccccuucgucaugauguccgcccccccggcgcaguacgagcugaagcacggcaccuucacgugcgccagcgaguacaccggcaacuaccagugcgggcacuacaagcacaucaccuccaaggagacccucuacugcaucgacggcgcccugcugacgaagagcagcgaguacaaggggcccaucaccgacguguucuacaaggagaacuccuacaccaccacgaucaagcccgugaccuacaagcucgacggcgucgugugcaccgagaucgaccccaagcuggacaacuacuacaagaaggacaacagcuacuucaccgagcagccgaucgaccuggugcccaaccagcccuaccccaacgccuccuucgacaacuucaaguucgucugcgacaacaucaaguucgccgacgaccucaaccagcugacgggguacaagaagccggcgagccgcgagcugaaggugaccuucuuccccgaccucaacggcgacguggucgccaucgacuacaagcacuacacccccuccuucaagaagggcgccaagcugcugcacaagcccaucguguggcacgugaacaacgccaccaacaaggcgacguacaagccgaacaccuggugcauccggugccucuggagcaagaagcccgucgagaccuccaacagcuucgacgugcugaaguccgaggacgcccaggggauggacaaccuggccugcgaggaccucaagcccgugagcgaggaggucguggagaaccccaccauccagaaggacgugcuggagugcaacgucaagacgaccgagguggugggcgacaucauccugaagccggccaacaacucccucaagaucaccgaggaggucgggcacaccgaccugauggccgcguacguggacaacagcucccugacgaucaagaagcccaacgagcucagccgcgugcugggccugaagacccucgccacccacgggcuggccgccgucaacuccgugcccugggacaccaucgccaacuacgcgaagccguuccugaacaagguggucagcacgaccaccaacaucgugacccgcugccucaaccgggugugcacgaacuacaugcccuacuucuucacccugcugcuccagcugugcaccuucacccgcuccaccaacagccggaucaaggccuccaugcccacgaccaucgccaagaacaccgucaagagcgugggcaaguucugccuggaggccagcuucaacuaccucaagucccccaacuucagcaagcugaucaacaucaucaucugguuccugcuccuguccgugugccugggcagccucaucuacuccaccgccgcgcuggggguccugaugagcaaccucggcaugccguccuacugcacgggguaccgcgagggcuaccugaacagcaccaacgugaccaucgccaccuacugcacgggcuccauccccugcagcgugugccuguccgggcucgacagccuggacaccuaccccucccuggagaccauccagaucaccaucagcuccuucaagugggaccucacggccuucggccuggucgccgagugguuccuggccuacauccucuucacccgguucuucuacgugcuggggcuggcggccaucaugcagcucuucuucagcuacuucgccgugcacuucaucuccaacagcuggcugauguggcugaucaucaaccugguccagauggcccccaucuccgcgauggugcgcauguacaucuucuucgccagcuucuacuacguguggaagagcuacguccacgugguggacggcugcaacuccagcaccugcaugaugugcuacaagcggaaccgcgccacccgggucgagugcacgaccaucgugaacgggguccgccgguccuucuacguguacgccaacggcggcaagggguucugcaagcuccacaacuggaacugcgugaacugcgacaccuucugcgccggcagcaccuucaucuccgacgaggucgcgcgcgaccugagccugcaguucaagcggccgaucaaccccacggaccaguccagcuacaucguggacuccgugaccgucaagaacgggagcauccaccucuacuucgacaaggccggccagaagaccuacgagcgccacucccugagccacuucgugaaccuggacaaccuccgggccaacaacaccaaggggucccugcccaucaacgugaucgucuucgacggcaagagcaagugcgaggaguccagcgccaaguccgccagcguguacuacucccagcugaugugccagcccauccuccugcuggaccaggcgcucgugagcgacgucggcgacagcgccgagguggccgugaagauguucgacgccuacgucaacacguucuccagcaccuucaacgugccgauggagaagcugaagacccugguggccaccgcggaggccgagcucgccaagaacgucuuccuggacaacgugcuguccacguucaucagcgccgcgcgccagggguucguggacuccgacgucgagaccaaggacgugguggagugccucaagcugagccaccaguccgacaucgaggucaccggcgacagcugcaacaacuacaugcugaccuacaacaagguggagaacaugacgccccgggaccucggggccugcaucgacugcuccgcccgccacaucaacgcccagguggccaagagccacaacaucgcgcugaucuggaacgucaaggacuucaugucccugagcgagcagcuccggaagcagauccgcuccgccgccaagaagaacaaccugcccuucaagcugaccugcgccaccacccgccagguggugaacgucgugacgaccaagaucgcccucaagggcgggugaggacuaguuauaagacugacuagcccgaugggccucccaacgggcccuccuccccuccuugcaccgagauuaauaaaaaaaaaaaaaaaaaaaaaaaaaaaaaaaaaaaaaaaaaaaaaaaaaaaaaaaaaaaaaaaaugcaucccccccccccccccccccccccccccccccaaaggcucuuuucagagccaccagaauu

SEQ ID NO: 21862 - RNA, 6058 nt, Artificial Sequence
  SARS-CoV-2__MT614466.1__non-structural protein 3 (NSP3) mRNA gc
aggagaaagcuuaccauggcccccaccaaggugaccuucggcgacgacacggucaucgaggugcagggguacaagagcgugaacaucaccuucgagcuggacgagcgcaucgacaagguccucaacgagaagugcuccgccuacaccguggagcugggcaccgaggugaacgaguucgcgugcgucguggccgacgccgugaucaagacgcugcagccggucagcgagcuccugaccccccuggggaucgaccucgacgagugguccauggccaccuacuaccuguucgacgagagcggcgaguucaagcuggccucccacauguacugcagcuucuacccccccgacgaggacgaggaggagggggacugcgaggaggaggaguucgagccguccacccaguacgaguacggcacggaggacgacuaccagggcaagccccucgaguucggggcgaccagcgccgcccugcagcccgaggaggagcaggaggaggacuggcuggacgacgacucccagcagaccgugggccagcaggacgggagcgaggacaaccagaccacgaccauccagaccaucguggagguccagccccagcucgagauggagcugaccccgguggugcagacgaucgaggucaacuccuucagcggcuaccugaagcucaccgacaacguguacaucaagaacgccgacaucguggaggaggcgaagaaggucaagcccaccgugguggucaacgccgccaacguguaccugaagcacgggggcggcguggccggggcccugaacaaggcgaccaacaacgccaugcaggucgaguccgacgacuacaucgccacgaacggcccccucaagguggggggcagcugcguccuguccggccacaaccuggccaagcacugccuccacgugguggggcccaacgucaacaagggcgaggacauccagcugcugaagagcgccuacgagaacuucaaccagcacgaggugcuccuggcgccgcugcucuccgccgggaucuucggcgccgaccccauccacagccugcgggugugcgucgacaccgugcgcaccaacguguaccuggccgucuucgacaagaaccucuacgacaagcugguguccagcuuccuggagaugaagagcgagaagcagguggagcagaagaucgccgagauccccaaggaggaggucaagcccuucaucaccgaguccaagccgagcguggagcagcggaagcaggacgacaagaagaucaaggcgugcguggaggaggucacgaccacccucgaggagaccaaguuccugacggagaaccugcuccuguacaucgacaucaacgggaaccugcaccccgacuccgccacccucgugagcgacaucgacaucaccuuccugaagaaggacgcccccuacaucgugggcgacgucgugcaggagggcgugcugaccgccgucgugauccccacgaagaaggccgggggcaccaccgagaugcucgcgaaggcccugcgcaaggugccgaccgacaacuacaucacgaccuaccccgggcagggccugaacggguacaccgucgaggaggccaagaccgugcucaagaagugcaaguccgccuucuacauccugcccagcaucaucuccaacgagaagcaggagauccugggcaccgugagcuggaaccuccgggagaugcuggcgcacgccgaggagacgcgcaagcugaugcccgucugcguggagaccaaggccaucguguccaccauccagcggaaguacaagggcaucaagauccaggagggggucguggacuacggcgcccgcuucuacuucuacaccagcaagacgaccguggccucccugaucaacacccucaacgaccugaacgagacccuggucacgaugccgcucggguacgugacccacggccugaaccuggaggaggcggcccgguacaugcgcagccucaaggugcccgccaccgucuccgugagcucccccgacgccgugaccgccuacaacggguaccugacgagcuccagcaagacccccgaggagcacuucaucgagaccaucucccuggcgggcagcuacaaggacuggagcuacuccggccagagcacccagcucgggaucgaguuccugaagcggggcgacaaguccgucuacuacacgagcaacccgaccaccuuccaccuggacggggaggugaucaccuucgacaaccucaagacgcugcugucccuccgcgaggugcggaccaucaaggucuucaccaccguggacaacaucaaccugcacacgcagguggucgacaugagcaugaccuacggccagcaguucggccccaccuaccuggacggggccgacgugaccaagaucaagccccacaacucccacgagggcaagacguucuacgugcucccgaacgacgacacccugcgcgucgaggccuucgaguacuaccacaccaccgaccccagcuuccuggggcgguacauguccgcccucaaccacacgaagaaguggaaguacccccaggugaacggccugaccagcaucaagugggccgacaacaacugcuaccuggcgaccgcccuccugacccugcagcagaucgagcucaaguucaaccccccggcccugcaggacgccuacuaccgcgcgcgggccggggaggccgccaacuucugcgcccugauccucgcguacugcaacaagacggugggcgagcugggcgacguccgcgagaccauguccuaccuguuccagcacgccaaccucgacagcugcaagcgggugcugaacgucgugugcaagaccugcgggcagcagcagaccacccugaagggcguggaggccgucauguacauggggacgcucuccuacgagcaguucaagaagggcgugcagauccccugcaccugcgggaagcaggccaccaaguaccuggugcagcaggagagccccuucgucaugauguccgcccccccggcgcaguacgagcugaagcacggcaccuucacgugcgccagcgaguacaccggcaacuaccagugcgggcacuacaagcacaucaccuccaaggagacccucuacugcaucgacggcgcccugcugacgaagagcagcgaguacaaggggcccaucaccgacguguucuacaaggagaacuccuacaccaccacgaucaagcccgugaccuacaagcucgacggcgucgugugcaccgagaucgaccccaagcuggacaacuacuacaagaaggacaacagcuacuucaccgagcagccgaucgaccuggugcccaaccagcccuaccccaacgccuccuucgacaacuucaaguucgucugcgacaacaucaaguucgccgacgaccucaaccagcugacgggguacaagaagccggcgagccgcgagcugaaggugaccuucuuccccgaccucaacggcgacguggucgccaucgacuacaagcacuacacccccuccuucaagaagggcgccaagcugcugcacaagcccaucguguggcacgugaacaacgccaccaacaaggcgacguacaagccgaacaccuggugcauccggugccucuggagcaccaagcccgucgagaccuccaacagcuucgacgugcugaaguccgaggacgcccaggggauggacaaccuggccugcgaggaccucaagcccgugagcgaggaggucguggagaaccccacgauccagaaggacgugcuggagugcaacgucaagaccaccgagguggugggcgacaucauccugaagccggccaacaacucccucaagaucaccgaggaggucgggcacacggaccugauggccgcguacguggacaacagcucccugaccaucaagaagcccaacgagcucagccgcgugcugggccugaagacccucgccacccacgggcuggccgccgucaacuccgugcccugggacacgaucgccaacuacgcgaagccguuccugaacaagguggucagcaccaccaccaacaucgugacgcgcugccucaaccgggugugcaccaacuacaugcccuacuucuucacccugcugcuccagcugugcaccuucacccgcuccacgaacagccggaucaaggccuccaugcccaccaccaucgccaagaacaccgucaagagcgugggcaaguucugccuggaggccagcuucaacuaccucaagucccccaacuucagcaagcugaucaacgugaucaucugguuccugcuccuguccgucugccugggcagccucaucuacuccacggccgcgcugggggugcugaugagcaaccucggcaugccguccuacugcaccggguaccgcgagggcuaccugaacagcaccaacgugaccaucgccacguacugcaccggcuccauccccugcagcgucugccuguccgggcucgacagccuggacaccuaccccucccuggagaccauccagaucacgaucagcuccuucaagugggaccucaccgccuucggccugguggccgagugguuccuggccuacauccucuucacccgguucuucuacgugcuggggcuggcggccaucaugcagcucuucuucagcuacuucgccguccacuucaucuccaacagcuggcugauguggcugaucaucaaccuggugcagauggcccccaucuccgcgauggugcgcauguacaucuucuucgccagcuucuacuacgucuggaagagcuacgugcacguggucgacggcugcaacuccagcaccugcaugaugugcuacaagcggaaccgcgccacgcggguggagugcaccaccaucgucaacggggugcgccgguccuucuacguguacgccaacggcggcaagggguucugcaagcuccacaacuggaacugcgucaacugcgacaccuucugcgccggcagcacguucaucuccgacgagguggcgcgcgaccugagccugcaguucaagcggccgaucaaccccaccgaccaguccagcuacaucguggacuccgucaccgugaagaacgggagcauccaccucuacuucgacaaggccggccagaagaccuacgagcgccacucccugagccacuucgugaaccuggacaaccuccgggccaacaacacgaaggggucccugcccaucaacgucaucguguucgacggcaagagcaagugcgaggaguccagcgccaaguccgccagcguguacuacucccagcugaugugccagcccauccuccugcuggaccaggcgcucgucagcgacgugggcgacagcgccgagguggccgucaagauguucgacgccuacgugaacaccuucuccagcaccuucaacgugccgauggagaagcugaagacccuggucgccacggcggaggccgagcucgccaagaacgugucccuggacaacgugcugagcaccuucaucuccgccgcgcgccagggguucgucgacagcgacguggagaccaaggacguggucgagugccucaagcugucccaccagagcgacaucgaggugaccggcgacuccugcaacaacuacaugcugacguacaacaagguggagaacaugaccccccgggaccucggggccugcaucgacugcagcgcccgccacaucaacgcccaggucgccaagucccacaacaucgcgcugaucuggaacgugaaggacuucaugagccuguccgagcagcuccggaagcagauccgcagcgccgccaagaagaacaaccugcccuucaagcugaccugcgccaccacgcgccagguggucaacguggugaccaccaagaucgcccucaagggcgggugaggacuaguuauaagacugacuagcccgaugggccucccaacgggcccuccuccccuccuugcaccgagauuaauaaaaaaaaaaaaaaaaaaaaaaaaaaaaaaaaaaaaaaaaaaaaaaaaaaaaaaaaaaaaaaaaugcaucccccccccccccccccccccccccccccccaaaggcucuuuucagagccaccagaauu

SEQ ID NO: 21863 - RNA, 6058 nt, Artificial Sequence
  SARS-CoV-2__MT614546.1__non-structural protein 3 (NSP3) mRNA gc
aggagaaagcuuaccauggcccccaccaaggugaccuucggcgacgacacggucaucgaggugcagggguacaagagcgugaacaucaccuucgagcuggacgagcgcaucgacaagguccucaacgagaagugcuccgccuacaccguggagcugggcaccgaggugaacgaguucgcgugcgucguggccgacgccgugaucaagacgcugcagccggucagcgagcuccugaccccccuggggaucgaccucgacgagugguccauggccaccuacuaccuguucgacgagagcggcgaguucaagcuggccucccacauguacugcagcuucuacccccccgacgaggacgaggaggagggggacugcgaggaggaggaguucgagccguccacccaguacgaguacggcacggaggacgacuaccagggcaagccccucgaguucggggcgaccagcgccgcccugcagcccgaggaggagcaggaggaggacuggcuggacgacgacucccagcagaccgugggccagcaggacgggagcgaggacaaccagaccacgaccauccagaccaucguggagguccagccccagcucgagauggagcugaccccgguggugcagacgaucgaggucaacuccuucagcggcuaccugaagcucaccgacaacguguacaucaagaacgccgacaucguggaggaggcgaagaaggucaagcccaccgugguggucaacgccgccaacguguaccugaagcacgggggcggcguggccggggcccugaacaaggcgaccaacaacgccaugcaggucgaguccgacgacuacaucgccacgaacggcccccucaagguggggggcagcugcguccuguccggccacaaccuggccaagcacugccuccacgugguggggcccaacgucaacaagggcgaggacauccagcugcugaagagcgccuacgagaacuucaaccagcacgaggugcuccuggcgccgcugcucuccgccgggaucuucggcgccgaccccauccacagccugcgggugugcgucgacaccgugcgcaccaacguguaccuggccgucuucgacaagaaccucuacgacaagcugguguccagcuuccuggagaugaagagcgagaagcagguggagcagaagaucgccgagauccccaaggaggaggucaagcccuucaucaccgaguccaagccgagcguggagcagcggaagcaggacgacaagaagaucaaggcgugcguggaggaggucacgaccacccucgaggagaccaaguuccugacggagaaccugcuccuguacaucgacaucaacgggaaccugcaccccgacuccgccacccucgugagcgacaucgacaucaccuuccugaagaaggacgcccccuacaucgugggcgacgucgugcaggagggcgugcugaccgccgucgugauccccacgaagaaggccgggggcaccaccgagaugcucgcgaaggcccugcgcaaggugccgaccgacaacuacaucacgaccuaccccgggcagggccugaacggguacaccgucgaggaggccaagaccgugcucaagaagugcaaguccgccuucuacauccugcccagcaucaucuccaacgagaagcaggagauccugggcaccgugagcuggaaccuccgggagaugcuggcgcacgccgaggagacgcgcaagcugaugcccgucugcguggagaccaaggccaucguguccaccauccagcggaaguacaagggcaucaagauccaggagggggucguggacuacggcgcccgcuucuacuucuacaccagcaagacgaccguggccucccugaucaacacccucaacgaccugaacgagacccuggucacgaugccgcucggguacgugacccacggccugaaccuggaggaggcggcccgguacaugcgcagccucaaggugcccgccaccgucuccgugagcucccccgacgccgugaccgccuacaacggguaccugacgagcuccagcaagacccccgaggagcacuucaucgagaccaucucccuggcgggcagcuacaaggacuggagcuacuccggccagagcacccagcucgggaucgaguuccugaagcggggcgacaaguccgucuacuacacgagcaacccgaccaccuuccaccuggacggggaggugaucaccuucgacaaccucaagacgcugcugucccuccgcgaggugcggaccaucaaggucuucaccaccguggacaacaucaaccugcacacgcagguggucgacaugagcaugaccuacggccagcaguucggccccaccuaccuggacggggccgacgugaccaagaucaagccccacaacucccacgagggcaagacguucuacgugcucccgaacgacgacacccugcuggucgaggccuucgaguacuaccacaccaccgaccccagcuuccucgggcgcuacauguccgcccugaaccacacgaagaaguggaaguacccccaggugaacggccugaccagcaucaagugggccgacaacaacugcuaccucgcgaccgcccugcugacccuccagcagaucgagcugaaguucaaccccccggcccugcaggacgccuacuaccgggcgcgcgccggggaggccgccaacuucugcgcccucauccuggcguacugcaacaagacggugggcgagcugggcgacguccgggagaccauguccuaccucuuccagcacgccaaccuggacagcugcaagcgcgugcugaacgucgugugcaagaccugcgggcagcagcagaccacccucaagggcguggaggccgucauguacauggggacgcuguccuacgagcaguucaagaagggcgugcagauccccugcaccugcgggaagcaggccaccaaguaccuggugcagcaggagagccccuucgucaugauguccgcccccccggcgcaguacgagcucaagcacggcaccuucacgugcgccagcgaguacaccggcaacuaccagugcgggcacuacaagcacaucaccuccaaggagacccuguacugcaucgacggcgcccugcucacgaagagcagcgaguacaaggggcccaucaccgacguguucuacaaggagaacuccuacaccaccacgaucaagcccgugaccuacaagcuggacggcgucgugugcaccgagaucgaccccaagcuggacaacuacuacaagaaggacaacagcuacuucaccgagcagccgaucgaccucgugcccaaccagcccuaccccaacgccuccuucgacaacuucaaguucgucugcgacaacaucaaguucgccgacgaccugaaccagcugacgggguacaagaagccggcgagccgggagcucaaggugaccuucuuccccgaccugaacggcgacguggucgccaucgacuacaagcacuacacccccuccuucaagaagggcgccaagcugcuccacaagcccaucguguggcacgugaacaacgccaccaacaaggcgacguacaagccgaacaccuggugcauccgcugccuguggagcaccaagcccgucgagaccuccaacagcuucgacgugcugaaguccgaggacgcccaggggauggacaaccucgccugcgaggaccugaagcccgugagcgaggaggucguggagaaccccacgauccagaaggacgugcuggagugcaacgucaagaccaccgagguggugggcgacaucauccucaagccggccaacaacucccugaagaucaccgaggaggucgggcacacggaccugauggccgcguacguggacaacagcucccucaccaucaagaagcccaacgagcugagccgggugcugggccucaagacccuggccacccacgggcuggccgccgucaacuccgugcccugggacacgaucgccaacuacgcgaagccguuccucaacaagguggucagcaccaccaccaacaucgugacgcgcugccugaaccgcgugugcaccaacuacaugcccuacuucuucacccugcuccugcagcugugcaccuucacccgguccacgaacagccgcaucaaggccuccaugcccaccaccaucgccaagaacaccgucaagagcgugggcaaguucugccucgaggccagcuucaacuaccugaagucccccaacuucagcaagcugaucaacaucaucaucugguuccuccugcuguccgugugccucggcagccugaucuacuccacggccgcgcuggggguccucaugagcaaccugggcaugccguccuacugcaccggguaccgggagggcuaccugaacagcaccaacgugaccaucgccacguacugcaccggcuccauccccugcagcgugugccucuccgggcuggacagccuggacaccuaccccucccucgagaccauccagaucacgaucagcuccuucaagugggaccugaccgccuucggccuggucgccgagugguuccucgccuacauccuguucacccgcuucuucuacgugcuggggcucgcggccaucaugcagcuguucuucagcuacuucgccgugcacuucaucuccaacagcuggcugauguggcugaucaucaaccucguccagauggcccccaucuccgcgauggugcggauguacaucuucuucgccagcuucuacuacguguggaagagcuacguccacgugguggacggcugcaacuccagcaccugcaugaugugcuacaagcgcaaccgggccacgcgcgucgagugcaccaccaucgugaacgggguccggcgcuccuucuacguguacgccaacggcggcaagggguucugcaagcugcacaacuggaacugcgugaacugcgacaccuucugcgccggcagcacguucaucuccgacgaggucgcgcgggaccugagccuccaguucaagcgcccgaucaaccccaccgaccaguccagcuacaucguggacuccgugaccgucaagaacgggagcauccaccuguacuucgacaaggccggccagaagaccuacgagcggcacucccugagccacuucgugaaccucgacaaccugcgcgccaacaacacgaaggggucccugcccaucaacgugaucgucuucgacggcaagagcaagugcgaggaguccagcgccaaguccgccagcguguacuacucccagcucaugugccagcccauccugcugcucgaccaggcgcuggugagcgacgucggcgacagcgccgagguggccgugaagauguucgacgccuacgucaacaccuucuccagcaccuucaacgugccgauggagaagcugaagacccucguggccacggcggaggccgagcuggccaagaacgucucccuggacaacgugcucagcaccuucaucuccgccgcgcggcagggguucguggacagcgacgucgagaccaaggacgugguggagugccugaagcugucccaccagagcgacaucgaggucaccggcgacuccugcaacaacuacaugcucacguacaacaagguggagaacaugaccccccgcgaccugggggccugcaucgacugcagcgcccggcacaucaacgcccagguggccaagucccacaacaucgcgcugaucuggaacgucaaggacuucaugagccucuccgagcagcugcgcaagcagauccggagcgccgccaagaagaacaaccugcccuucaagcucaccugcgccaccacgcgccagguggugaacgucgugaccaccaagaucgcccugaagggcgggugaggacuaguuauaagacugacuagcccgaugggccucccaacgggcccuccuccccuccuugcaccgagauuaauaaaaaaaaaaaaaaaaaaaaaaaaaaaaaaaaaaaaaaaaaaaaaaaaaaaaaaaaaaaaaaaaugcaucccccccccccccccccccccccccccccccaaaggcucuuuucagagccaccagaauu

SEQ ID NO: 21864 - RNA, 6058 nt, Artificial Sequence
  SARS-CoV-2__MT614552.1__non-structural protein 3 (NSP3) mRNA gc
aggagaaagcuuaccauggcccccaccaaggugaccuucggcgacgacacggucaucgaggugcagggguacaagagcgugaacaucaccuucgagcuggacgagcgcaucgacaagguccucaacgagaagugcuccgccuacaccguggagcugggcaccgaggugaacgaguucgcgugcgucguggccgacgccgugaucaagacgcugcagccggucagcgagcuccugaccccccuggggaucgaccucgacgagugguccauggccaccuacuaccuguucgacgagagcggcgaguucaagcuggccucccacauguacugcagcuucuacccccccgacgaggacgaggaggagggggacugcgaggaggaggaguucgagccguccacccaguacgaguacggcacggaggacgacuaccagggcaagccccucgaguucggggcgaccagcgccgcccugcagcccgaggaggagcaggaggaggacuggcuggacgacgacucccagcagaccgugggccagcaggacgggagcgaggacaaccagaccacgaccauccagaccaucguggagguccagccccagcucgagauggagcugaccccgguggugcagacgaucgaggucaacuccuucagcggcuaccugaagcucaccgacaacguguacaucaagaacgccgacaucguggaggaggcgaagaaggucaagcccaccgugguggucaacgccgccaacguguaccugaagcacgggggcggcguggccggggcccugaacaaggcgaccaacaacgccaugcaggucgaguccgacgacuacaucgccacgaacggcccccucaagguggggggcagcugcguccuguccggccacaaccuggccaagcacugccuccacgugguggggcccaacgucaacaagggcgaggacauccagcugcugaagagcgccuacgagaacuucaaccagcacgaggugcuccuggcgccgcugcucuccgccgggaucuucggcgccgaccccauccacagccugcgggugugcgucgacaccgugcgcaccaacguguaccuggccgucuucgacaagaaccucuacgacaagcugguguccagcuuccuggagaugaagagcgagaagcagguggagcagaagaucgccgagauccccaaggaggaggucaagcccuucaucaccgaguccaagccgagcguggagcagcggaagcaggacgacaagaagaucaaggcgugcguggaggaggucacgaccacccucgaggagaccaaguuccugacggagaaccugcuccuguacaucgacaucaacgggaaccugcaccccgacuccgccacccucgugagcgacaucgacaucaccuuccugaagaaggacgcccccuacaucgugggcgacgucgugcaggagggcgugcugaccgccgucgugauccccacgaagaaggccgggggcaccaccgagaugcucgcgaaggcccugcgcaaggugccgaccgacaacuacaucacgaccuaccccgggcagggccugaacggguacaccgucgaggaggccaagaccgugcucaagaagugcaaguccgccuucuacauccugcccagcaucaucuccaacgagaagcaggagauccugggcaccgugagcuggaaccuccgggagaugcuggcgcacgccgaggagacgcgcaagcugaugcccgucugcguggagaccaaggccaucguguccaccauccagcggaaguacaagggcaucaagauccaggagggggucguggacuacggcgcccgcuucuacuucuacaccagcaagacgaccguggccucccugaucaacacccucaacgaccugaacgagacccuggucacgaugccgcucggguacgugacccacggccugaaccuggaggaggcggcccgguacaugcgcagccucaaggugcccgccaccgucuccgugagcucccccgacgccgugaccgccuacaacggguaccugacgagcuccagcaagacccccgaggagcacuucaucgagaccaucucccuggcgggcagcuacaaggacuggagcuacuccggccagagcacccagcucgggaucgaguuccugaagcggggcgacaaguccgucuacuacacgagcaacccgaccaccuuccaccuggacggggaggugaucaccuucgacaaccucaagacgcugcugucccuccgcgaggugcggaccaucaaggucuucaccaccguggacaacaucaaccugcacacgcagguggucgacaugagcaugaccuacggccagcaguucggccccaccuaccuggacggggccgacgugaccaagaucaagccccacaacucccacgagggcaagacguucuacgugcucccgaacgacgacacccugcgcgucgaggccuucgaguacuaccacaccaccgaccccagcuuccuggggcgguacauguccgcccucaaccacacgaagaaguggaaguacccccaggugaacggccugaccagcaucaagugggccgacaacaacugcuaccuggcgaccgcccuccugacccugcagcagaucgagcucaaguucaaccccccggcccugcaggacgccuacuaccgcgcgcgggccggggaggccgccaacuucugcgcccugauccucgcguacugcaacaagacggugggcgagcugggcgacguccgcgagaccauguccuaccuguuccagcacgccaaccucgacagcugcaagcgggugcugaacgucgugugcaagaccugcgggcagcagcagaccacccugaagggcguggaggccgucauguacauggggacgcucuccuacgagcaguucaagaagggcgugcagauccccugcaccugcgggaagcaggccaccaaguaccuggugcagcaggagagccccuucgucaugauguccgcccccccggcgcaguacgagcugaagcacggcaccuucacgugcgccagcgaguacaccggcaacuaccagugcgggcacuacaagcacaucaccuccaaggagacccucuacugcaucgacggcgcccugcugacgaagagcagcgaguacaaggggcccaucaccgacguguucuacaaggagaacuccuacaccaccacgaucaagcccgugaccuacaagcucgacggcgucgugugcaccgagaucgaccccaagcuggacaacuacuacaagaaggacaacagcuacuucaccgagcagccgaucgaccuggugcccaaccagcccuaccccaacgccuccuucgacaacuucaaguucgucugcgacaacaucaaguucgccgacgaccucaaccagcugacgggguacaagaagccggcgagccgcgagcugaaggugaccuucuuccccgaccucaacggcgacguggucgccaucgacuacaagcacuacacccccuccuucaagaagggcgccaagcugcugcacaagcccaucguguggcacgugaacaacgccaccaacaaggcgacguacaagccgaacaccuggugcauccggugccucuggagcaccaagcccgucgagaccuccaacagcuucgacgugcugaaguccgaggacgcccaggggauggacaaccuggccugcgaggaccucaagcccgugagcgaggaggucguggagaaccccacgauccagaaggacgugcuggagugcaacgucaagaccaccgagguggugggcgacaucauccugaagccggccaacaacucccucaagaucaccgaggaggucgggcacacggaccugauggccgcguacguggacaacagcucccugaccaucaagaagcccaacgagcucagccgcgugcugggccugaagacccucgccacccacgggcuggccgccgucaacuccgugcccugggacacgaucgccaacuacgcgaagccguuccugaacaagguggucagcaccaccaccaacaucgugacgcgcugccucaaccgggugugcaccaacuacaugcccuacuucuucacccugcugcuccagcugugcaccuucacccgcuccacgaacagccggaucaaggccuccaugcccaccaccaucgccaagaacaccgucaagagcgugggcaaguucugccuggaggccagcuucaacuaccucaaguccagcaacuucuccaagcugaucaacaucaucaucugguuccugcuccugagcgugugccugggcucccucaucuacagcacggccgcgcuggggguccugauguccaaccucggcaugcccagcuacugcaccggguaccgcgagggcuaccugaacuccaccaacgugaccaucgccacguacugcaccggcagcaucccgugcuccgugugccugagcgggcucgacucccuggacaccuaccccagccuggagaccauccagaucacgaucuccagcuucaagugggaccucaccgccuucggccuggucgccgagugguuccuggccuacauccucuucacccgguucuucuacgugcuggggcuggcggccaucaugcagcucuucuucuccuacuucgccgugcacuucaucagcaacuccuggcugauguggcugaucaucaaccugguccagauggcccccaucagcgcgauggugcgcauguacaucuucuucgccagcuucuacuacguguggaaguccuacguccacgugguggacggcugcaacagcuccaccugcaugaugugcuacaagcggaaccgcgccacgcgggucgagugcaccaccaucgugaacgggguccgccggagcuucuacguguacgccaacggcggcaagggguucugcaagcuccacaacuggaacugcgugaacugcgacaccuucugcgccggcuccacguucaucagcgacgaggucgcgcgcgaccugucccugcaguucaagcggcccaucaacccgaccgaccagagcuccuacaucguggacagcgugaccgucaagaacggguccauccaccucuacuucgacaaggccggccagaagaccuacgagcgccacagccugucccacuucgugaaccuggacaaccuccgggccaacaacacgaaggggagccugcccaucaacgugaucgucuucgacggcaaguccaagugcgaggagagcuccgccaagagcgccuccguguacuacagccagcugaugugccagcccauccuccugcuggaccaggcgcucgugagcgacgucggcgacuccgccgagguggccgugaagauguucgacgccuacgucaacaccuucagcuccaccuucaacgugcccauggagaagcugaagacccugguggccacggcggaggccgagcucgccaagaacgucagccuggacaacgugcuguccaccuucaucagcgccgcgcgccagggguucguggacuccgacgucgagaccaaggacgugguggagugccucaagcugagccaccaguccgacaucgaggucaccggcgacagcugcaacaacuacaugcugacguacaacaagguggagaacaugaccccgcgggaccucggggccugcaucgacugcuccgcccgccacaucaacgcccagguggccaagagccacaacaucgcgcugaucuggaacgucaaggacuucaugucccugagcgagcagcuccggaagcagauccgcuccgccgccaagaagaacaaccugcccuucaagcugaccugcgccaccacgcgccagguggugaacgucgugaccaccaagaucgcccucaagggcgggugaggacuaguuauaagacugacuagcccgaugggccucccaacgggcccuccuccccuccuugcaccgagauuaauaaaaaaaaaaaaaaaaaaaaaaaaaaaaaaaaaaaaaaaaaaaaaaaaaaaaaaaaaaaaaaaaugcaucccccccccccccccccccccccccccccccaaaggcucuuuucagagccaccagaauu

SEQ ID NO: 21865 - RNA, 6058 nt, Artificial Sequence
  SARS-CoV-2__MT614556.1__non-structural protein 3 (NSP3) mRNA gc
aggagaaagcuuaccauggcccccaccaaggugaccuucggcgacgacacggucaucgaggugcagggguacaagagcgugaacaucaccuucgagcuggacgagcgcaucgacaagguccucaacgagaagugcuccaccuacaccguggagcugggcacggaggugaacgaguucgccugcgucguggcggacgccgugaucaagacccugcagccggucagcgagcuccugaccccccuggggaucgaccucgacgagugguccauggccaccuacuaccuguucgacgagagcggcgaguucaagcuggccucccacauguacugcagcuucuacccccccgacgaggacgaggaggagggggacugcgaggaggaggaguucgagccguccacgcaguacgaguacggcaccgaggacgacuaccagggcaagccccucgaguucggggccaccagcgcggcccugcagcccgaggaggagcaggaggaggacuggcuggacgacgacucccagcagaccgugggccagcaggacgggagcgaggacaaccagacgaccaccauccagaccaucguggagguccagccccagcucgagauggagcugacgccgguggugcagaccaucgaggucaacuccuucagcggcuaccugaagcucaccgacaacguguacaucaagaacgccgacaucguggaggaggccaagaaggucaagcccaccgugguggucaacgcggccaacguguaccugaagcacgggggcggcguggccggggcccugaacaaggccacgaacaacgcgaugcaggucgaguccgacgacuacaucgccaccaacggcccccucaagguggggggcagcugcguccuguccggccacaaccuggccaagcacugccuccacgugguggggcccaacgucaacaagggcgaggacauccagcugcugaagagcgccuacgagaacuucaaccagcacgaggugcuccuggccccgcugcucuccgcggggaucuucggcgccgaccccauccacagccugcgggugugcgucgacaccgugcgcaccaacguguaccuggccgucuucgacaagaaccucuacgacaagcugguguccagcuuccuggagaugaagagcgagaagcagguggagcagaagaucgccgagauccccaaggaggaggucaagcccuucaucacggaguccaagccgagcguggagcagcggaagcaggacgacaagaagaucaaggccugcguggaggaggucaccaccacccucgaggagacgaaguuccugaccgagaaccugcuccuguacaucgacaucaacgggaaccugcaccccgacuccgcgacccucgugagcgacaucgacaucaccuuccugaagaaggacgcccccuacaucgugggcgacgucgugcaggagggcgugcugacggccgucgugauccccaccaagaaggccgggggcaccaccgagaugcucgccaaggcgcugcgcaaggugccgacggacaacuacaucaccaccuaccccgggcagggccugaacggguacaccgucgaggaggccaagaccgugcucaagaagugcaaguccgccuucuacauccugcccagcaucaucuccaacgagaagcaggagauccugggcacggugagcuggaaccuccgggagaugcuggcccacgcggaggagacccgcaagcugaugcccgucugcguggagaccaaggccaucguguccaccauccagcggaaguacaagggcaucaagauccaggagggggucguggacuacggcgcccgcuucuacuucuacacgagcaagaccaccguggccucccugaucaacacccucaacgaccugaacgagacgcuggucaccaugccgcucggguacgugacccacggccugaaccuggaggaggccgcgcgguacaugcgcagccucaaggugcccgccaccgucuccgugagcucccccgacgccgugacggccuacaacggguaccugaccagcuccagcaagacccccgaggagcacuucaucgagaccaucucccuggccggcagcuacaaggacuggagcuacuccggccagagcacgcagcucgggaucgaguuccugaagcggggcgacaaguccgucuacuacaccagcaacccgaccaccuuccaccuggacggggaggugaucacguucgacaaccucaagacccugcugucccuccgcgaggugcggaccaucaaggucuucaccacgguggacaacaucaaccugcacacccagguggucgacaugagcaugaccuacggccagcaguucggccccaccuaccuggacggggcggacgugacgaagaucaagccccacaacucccacgagggcaagaccuucuacgugcucccgaacgacgacacccugcgcgucgaggccuucgaguacuaccacaccacggaccccagcuuccuggggcgguacauguccgcccucaaccacaccaagaaguggaaguacccccaggugaacggccugaccagcaucaagugggccgacaacaacugcuaccuggccaccgcgcuccugacgcugcagcagaucgagcucaaguucaaccccccggcccugcaggacgccuacuaccgcgcccgggcgggggaggccgccaacuucugcgcccugauccucgccuacugcaacaagaccgugggcgagcugggcgacguccgcgagaccauguccuaccuguuccagcacgcgaaccucgacagcugcaagcgggugcugaacgucgugugcaagaccugcgggcagcagcagaccacgcugaagggcguggaggccgucaucuacauggggacccucuccuacgagcaguucaagaagggcgugcagauccccugcaccugcgggaagcaggccaccaaguaccuggugcagcaggagagccccuucgucaugauguccgcccccccggcccaguacgagcugaagcacggcacguucaccugcgcgagcgaguacaccggcaacuaccagugcgggcacuacaagcacaucaccuccaaggagacgcucuacugcaucgacggcgcccugcugaccaagagcagcgaguacaaggggcccaucaccgacguguucuacaaggagaacuccuacaccacgaccaucaagcccgugaccuacaagcucgacggcgucgugugcaccgagaucgaccccaagcuggacaacuacuacaagaaggacaacagcuacuucacggagcagccgaucgaccuggugcccaaccagcccuaccccaacgccuccuucgacaacuucaaguucgucugcgacaacaucaaguucgccgacgaccucaaccagcugaccggguacaagaagccggccagccgcgagcugaaggugaccuucuuccccgaccucaacggcgacguggucgcgaucgacuacaagcacuacacccccuccuucaagaagggcgccaagcugcugcacaagcccaucguguggcacgugaacaacgccacgaacaaggccaccuacaagccgaacaccuggugcauccggugccucuggagcaccaagcccgucgagacguccaacagcuucgacgugcugaaguccgaggacgcgcaggggauggacaaccuggccugcgaggaccucaagcccgugagcgaggaggucguggagaaccccaccauccagaaggacgugcuggagugcaacgucaagaccaccgagguggugggcgacaucauccugaagccggccaacaacucccucaagaucacggaggaggucgggcacaccgaccugauggccgccuacguggacaacagcucccugaccaucaagaagcccaacgagcucagccgcgugcugggccugaagacccucgcgacgcacgggcuggccgccgucaacuccgugcccugggacaccaucgccaacuacgccaagccguuccugaacaagguggucagcaccaccacgaacaucgugacccgcugccucaaccgggugugcaccaacuacaugcccuacuucuucacccugcugcuccagcugugcaccuucacgcgcuccaccaacagccggaucaaggcguccaugcccaccaccaucgccaagaacacggucaagagcgugggcaaguucugccuggaggccagcuucaacuaccucaagucccccaacuucagcaagcugaucaacaucaucaucugguuccugcuccuguccgugugccugggcagccucaucuacuccaccgccgcccuggggguccugaugagcaaccucggcaugccguccuacugcaccggguaccgcgagggcuaccugaacagcaccaacgugacgaucgcgaccuacugcaccggcuccauccccugcagcgugugccuguccgggcucgacagccuggacaccuaccccucccuggagacgauccagaucaccaucagcuccuucaagugggaccucaccgccuucggccuggucgccgagugguuccuggccuacauccucuucacccgguucuucuacgugcuggggcuggccgcgaucaugcagcucuucuucagcuacuucgccgugcacuucaucuccaacagcuggcugauguggcugaucaucaaccugguccagauggcccccaucuccgccauggugcgcauguacaucuucuucgcgagcuucuacuacguguggaagagcuacguccacgugguggacggcugcaacuccagcacgugcaugaugugcuacaagcggaaccgcgccacccgggucgagugcaccaccaucgugaacgggguccgccgguccuucuacguguacgccaacggcggcaagggguucugcaagcuccacaacuggaacugcgugaacugcgacacguucugcgccggcagcaccuucaucuccgacgaggucgcccgcgaccugagccugcaguucaagcggccgaucaaccccaccgaccaguccagcuacaucguggacuccgugaccgucaagaacgggagcauccaccucuacuucgacaaggcgggccagaagacguacgagcgccacucccugagccacuucgugaaccuggacaaccuccgggccaacaacaccaaggggucccugcccaucaacgugaucgucuucgacggcaagagcaagugcgaggaguccagcgccaaguccgccagcguguacuacucccagcugaugugccagcccauccuccugcuggaccaggcccucgugagcgacgucggcgacagcgcggagguggccgugaagauguucgacgccuacgucaacaccuucuccagcaccuucaacgugccgauggagaagcugaagacgcugguggccaccgccgaggcggagcucgccaagaacgucucccuggacaacgugcugagcaccuucaucuccgccgcccgccagggguucguggacagcgacgucgagaccaaggacgugguggagugccucaagcugucccaccagagcgacaucgaggucacgggcgacuccugcaacaacuacaugcugaccuacaacaagguggagaacaugaccccccgggaccucggggcgugcaucgacugcagcgcccgccacaucaacgcccagguggccaagucccacaacaucgcccugaucuggaacgucaaggacuucaugagccuguccgagcagcuccggaagcagauccgcagcgcggccaagaagaacaaccugcccuucaagcugaccugcgccacgacccgccagguggugaacgucgugaccaccaagaucgcccucaagggcgggugaggacuaguuauaagacugacuagcccgaugggccucccaacgggcccuccuccccuccuugcaccgagauuaauaaaaaaaaaaaaaaaaaaaaaaaaaaaaaaaaaaaaaaaaaaaaaaaaaaaaaaaaaaaaaaaaugcaucccccccccccccccccccccccccccccccaaaggcucuuuucagagccaccagaauu

SEQ ID NO: 21866 - RNA, 6058 nt, Artificial Sequence
  SARS-CoV-2__MT510701.1__non-structural protein 3 (NSP3) mRNA gc
aggagaaagcuuaccauggcccccaccaaggugaccuucggcgacgacacggucaucgaggugcagggguacaagagcgugaacaucaccuucgagcuggacgagcgcaucgacaagguccucaacgagaagugcuccgccuacaccguggagcugggcaccgaggugaacgaguucgcgugcgucguggccgacgccgugaucaagacgcugcagccggucagcgagcuccugaccccccuggggaucgaccucgacgagugguccauggccaccuacuaccuguucgacgagagcggcgaguucaagcuggccucccacauguacugcagcuucuacccccccgacgaggacgaggaggagggggacugcgaggaggaggaguucgagccguccacccaguacgaguacggcacggaggacgacuaccagggcaagccccucgaguucggggcgaccagcgccgcccugcagcccgaggaggagcaggaggaggacuggcuggacgacgacucccagcagaccgugggccagcaggacgggagcgaggacaaccagaccacgaccauccagaccaucguggagguccagccccagcucgagauggagcugaccccgguggugcagacgaucgaggucaacuccuucagcggcuaccugaagcucaccgacaacguguacaucaagaacgccgacaucguggaggaggcgaagaaggucaagcccaccgugguggucaacgccgccaacguguaccugaagcacgggggcggcguggccggggcccugaacaaggcgaccaacaacgccaugcaggucgaguccgacgacuacaucgccacgaacggcccccucaagguggggggcagcugcguccuguccggccacaaccuggccaagcacugccuccacgugguggggcccaacgucaacaagggcgaggacauccagcugcugaagagcgccuacgagaacuucaaccagcacgaggugcuccuggcgccgcugcucuccgccgggaucuucggcgccgaccccauccacagccugcgggugugcgucgacaccgugcgcaccaacguguaccuggccgucuucgacaagaaccucuacgacaagcugguguccagcuuccuggagaugaagagcgagaagcagguggagcagaagaucgccgagauccccaaggaggaggucaagcccuucaucaccgaguccaagccgagcguggagcagcggaagcaggacgacaagaagaucaaggcgugcguggaggaggucacgaccacccucgaggagaccaaguuccugacggagaaccugcuccuguacaucgacaucaacgggaaccugcaccccgacuccgccacccucgugagcgacaucgacaucaccuuccugaagaaggacgcccccuacaucgugggcgacgucgugcaggagggcgugcugaccgccgucgugauccccacgaagaacgccgggggcaccaccgagaugcucgcgaaggcccugcgcaaggugccgaccgacaacuacaucacgaccuaccccgggcagggccugaacggguacaccgucgaggaggccaagaccgugcucaagaagugcaaguccgccuucuacauccugcccagcaucaucuccaacgagaagcaggagauccugggcaccgugagcuggaaccuccgggagaugcuggcgcacgccgaggagacgcgcaagcugaugcccgucugcguggagaccaaggccaucguguccaccauccagcggaaguacaagggcaucaagauccaggagggggucguggacuacggcgcccgcuucuacuucuacaccagcaagacgaccguggccucccugaucaacacccucaacgaccugaacgagacccuggucacgaugccgcucggguacgugacccacggccugaaccuggaggaggcggcccgguacaugcgcagccucaaggugcccgccaccgucuccgugagcucccccgacgccgugaccgccuacaacggguaccugacgagcuccagcaagacccccgaggagcacuucaucgagaccaucucccuggcgggcagcuacaaggacuggagcuacuccggccagagcacccagcucgggaucgaguuccugaagcggggcgacaaguccgucuacuacacgagcaacccgaccaccuuccaccuggacggggaggugaucaccuucgacaaccucaagacgcugcugucccuccgcgaggugcggaccaucaaggucuucaccaccguggacaacaucaaccugcacacgcagguggucgacaugagcaugaccuacggccagcaguucggccccaccuaccuggacggggccgacgugaccaagaucaagccccacaacucccacgagggcaagacguucuacgugcucccgaacgacgacacccugcgcgucgaggccuucgaguacuaccacaccaccgaccccagcuuccuggggcgguacauguccgcccucaaccacacgaagaacuggaaguacccccaggugaacggccugaccagcaucaagugggccgacaacaacugcuaccuggcgaccgcccuccugacccugcagcagaucgagcucaaguucaaccccccggcccugcaggacgccuacuaccgcgcgcgggccggggaggccgccaacuucugcgcccugauccucgcguacugcaacaagacggugggcgagcugggcgacguccgcgagaccauguccuaccuguuccagcacgccaaccucgacagcugcaagcgggugcugaacgucgugugcaagaccugcgggcagcagcagaccacccugaagggcguggaggccgucauguacauggggacgcucuccuacgagcaguucaagaagggcgugcagauccccugcaccugcgggaagcaggccaccaaguaccuggugcagcaggagagccccuucgucaugauguccgcccccccggcgcaguacgagcugaagcacggcaccuucacgugcgccagcgaguacaccggcaacuaccagugcgggcacuacaagcacaucaccuccaaggagacccucuacugcaucgacggcgcccugcugacgaagagcagcgaguacaaggggcccaucaccgacguguucuacaaggagaacuccuacaccaccacgaucaagcccgugaccuacaagcucgacggcgucgugugcaccgagaucgaccccaagcuggacaacuacuacaagaaggacaacagcuacuucaccgagcagccgaucgaccuggugcccaaccagcccuaccccaacgccuccuucgacaacuucaaguucgucugcgacaacaucaaguucgccgacgaccucaaccagcugacgggguacaagaagccggcgagccgcgagcugaaggugaccuucuuccccgaccucaacggcgacguggucgccaucgacuacaagcacuacacccccuccuucaagaagggcgccaagcugcugcacaagcccaucguguggcacgugaacaacgccaccaacaaggcgacguacaagccgaacaccuggugcauccggugccucuggagcaccaagcccgucgagaccuccaacagcuucgacgugcugaaguccgaggacgcccaggggauggacaaccuggccugcgaggaccucaagcccgugagcgaggaggucguggagaaccccacgauccagaaggacgugcuggagugcaacgucaagaccaccgagguggugggcgacaucauccugaagccggccaacaacucccucaagaucaccgaggaggucgggcacacggaccugauggccgcguacguggacaacagcucccugaccaucaagaagcccaacgagcucagccgcgugcugggccugaagacccucgccacccacgggcuggccgccgucaacuccgugcccugggacacgaucgccaacuacgcgaagccguuccugaacaagguggucagcaccaccaccaacaucgugacgcgcugccucaaccgggugugcaccaacuacaugcccuacuucuucacccugcugcuccagcugugcaccuucacccgcuccacgaacagccggaucaaggccuccaugcccaccaccaucgccaagaacaccgucaagagcgugggcaaguucugccuggaggccagcuucaacuaccucaagucccccaacuucagcaagcugaucaacaucaucaucugguuccugcuccuguccgugugccugggcagccucaucuacuccacggccgcgcuggggguccugaugagcaaccucggcaugccguccuacugcaccggguaccgcgagggcuaccugaacagcaccaacgugaccaucgccacguacugcaccggcuccauccccugcagcgugugccuguccgggcucgacagccuggacaccuaccccucccuggagaccauccagaucacgaucagcuccuucaagugggaccucaccgccuucggccuggucgccgagugguuccuggccuacauccucuucacccgguucuucuacgugcuggggcuggcggccaucaugcagcucuucuucagcuacuucgccgugcacuucaucuccaacagcuggcugauguggcugaucaucaaccugguccagauggcccccaucuccgcgauggugcgcauguacaucuucuucgccagcuucuacuacguguggaagagcuacguccacgugguggacggcugcaacuccagcaccugcaugaugugcuacaagcggaaccgcgccacgcgggucgagugcaccaccaucgugaacgggguccgccgguccuucuacguguacgccaacggcggcaagggguucugcaagcuccacaacuggaacugcgugaacugcgacaccuucugcgccggcagcacguucaucuccgacgaggucgcgcgcgaccugagccugcaguucaagcggccgaucaaccccaccgaccaguccagcuacaucguggacuccgugaccgucaagaacgggagcauccaccucuacuucgacaaggccggccagaagaccuacgagcgccacucccugagccacuucgugaaccuggacaaccuccgggccaacaacacgaaggggucccugcccaucaacgugaucgucuucgacggcaagagcaagugcgaggaguccagcgccaaguccgccagcguguacuacucccagcugaugugccagcccauccuccugcuggaccaggcgcucgugagcgacgucggcgacagcgccgagguggccgugaagauguucgacgccuacgucaacaccuucuccagcaccuucaacgugccgauggagaagcugaagacccugguggccacggcggaggccgagcucgccaagaacgucucccuggacaacgugcugagcaccuucaucuccgccgcgcgccagggguucguggacagcgacgucgagaccaaggacgugguggagugccucaagcugucccaccagagcgacaucgaggucaccggcgacuccugcaacaacuacaugcugacguacaacaagguggagaacaugaccccccgggaccucggggccugcaucgacugcagcgcccgccacaucaacgcccagguggccaagucccacaacaucgcgcugaucuggaacgucaaggacuucaugagccuguccgagcagcuccggaagcagauccgcagcgccgccaagaagaacaaccugcccuucaagcugaccugcgccaccacgcgccagguggugaacgucgugaccaccaagaucgcccucaagggcgggugaggacuaguuauaagacugacuagcccgaugggccucccaacgggcccuccuccccuccuugcaccgagauuaauaaaaaaaaaaaaaaaaaaaaaaaaaaaaaaaaaaaaaaaaaaaaaaaaaaaaaaaaaaaaaaaaugcaucccccccccccccccccccccccccccccccaaaggcucuuuucagagccaccagaauu

SEQ ID NO: 21867 - RNA, 6058 nt, Artificial Sequence
  SARS-CoV-2__MT607252.1__non-structural protein 3 (NSP3) mRNA gc
aggagaaagcuuaccauggcccccaccaaggugaccuucggcgacgacacggucaucgaggugcagggguacaagagcgugaacaucaccuucgagcuggacgagcgcaucgacaagguccucaacgagaagugcuccgccuacaccguggagcugggcaccgaggugaacgaguucgcgugcgucguggccgacgccgugaucaagacgcugcagccggucagcgagcuccugaccccccuggggaucgaccucgacgagugguccauggccaccuacuaccuguucgacgagagcggcgaguucaagcuggccucccacauguacugcagcuucuacccccccgacgaggacgaggaggagggggacugcgaggaggaggaguucgagccguccacccaguacgaguacggcacggaggacgacuaccagggcaagccccucgaguucggggcgaccagcgccgcccugcagcccgaggaggagcaggaggaggacuggcuggacgacgacucccagcagaccgugggccagcaggacgggagcgaggacaaccagaccacgaccauccagaccaucguggagguccagccccagcucgagauggagcugaccccgguggugcagacgaucgaggucaacuccuucagcggcuaccugaagcucaccgacaacguguacaucaagaacgccgacaucguggaggaggcgaagaaggucaagcccaccgugguggucaacgccgccaacguguaccugaagcacgggggcggcguggccggggcccugaacaaggcgaccaacaacgccaugcaggucgaguccgacgacuacaucgccacgaacggcccccucaagguggggggcagcugcguccuguccggccacaaccuggccaagcacugccuccacgugguggggcccaacgucaacaagggcgaggacauccagcugcugaagagcgccuacgagaacuucaaccagcacgaggugcuccuggcgccgcugcucuccgccgggaucuucggcgccgaccccauccacagccugcgggugugcgucgacaccgugcgcaccaacguguaccuggccgucuucgacaagaaccucuacgacaagcugguguccagcuuccuggagaugaagagcgagaagcagguggagcagaagaucgccgagauccccaaggaggaggucaagcccuucaucaccgaguccaagccgagcguggagcagcggaagcaggacgacaagaagaucaaggcgugcguggaggaggucacgaccacccucgaggagaccaaguuccugacggagaaccugcuccuguacaucgacaucaacgggaaccugcaccccgacuccgccacccucgugagcgacaucgacaucaccuuccugaagaaggacgcccccuacaucgugggcgacgucgugcaggagggcgugcugaccgccgucgugauccccacgaagaaggccgggggcaccaccgagaugcucgcgaaggcccugcgcaaggugccgaccgacaacuacaucacgaccuaccccgggcagggccugaacggguacaccgucgaggaggccaagaccgugcucaagaagugcaaguccgccuucuacauccugcccagcaucaucuccaacgagaagcaggagauccugggcaccgugagcuggaaccuccgggagaugcuggcgcacgccgaggagacgcgcaagcugaugcccgucugcguggagaccaaggccaucguguccaccauccagcggaaguacaagggcaucaagauccaggagggggucguggacuacggcgcccgcuucuacuucuacaccagcaagacgaccguggccucccugaucaacacccucaacgaccugaacgagacccuggucacgaugccgcucggguacgugacccacggccugaaccuggaggaggcggcccgguacaugcgcagccucaaggugcccgccaccgucuccgugagcucccccgacgccgugaccgccuacaacggguaccugacgagcuccagcaagacccccgaggagcacuucaucgagaccaucucccuggcgggcagcuacaaggacuggagcuacuccggccagagcacccagcucgggaucgaguuccugaagcggggcgacaaguccgucuacuacacgagcaacccgaccaccuuccaccuggacggggaggugaucaccuucgacaaccucaagacgcugcugucccuccgcgaggugcggaccaucaaggucuucaccaccguggacaacaucaaccugcacacgcagguggucgacaugagcaugaccuacggccagcaguucggccccaccuaccuggacggggccgacgugaccaagaucaagccccacaacucccacgagggcaagacguucuacgugcucccgaacgacgacacccugcgcgucgaggccuucgaguacuaccacaccaccgaccccagcuuccuggggcgguacauguccgcccucaaccacacgaagaaguggaaguacccccaggugaacggccugaccagcaucaagugggccgacaacaacugcuaccuggcgaccgcccuccugacccugcagcagaucgagcucaaguucaaccccccggcccugcaggacgccuacuaccgcgcgcgggccggggaggccgccaacuucugcgcccugauccucgcguacugcaacaagacggugggcgagcugggcgacguccgcgagaccauguccuaccuguuccagcacgccaaccucgacagcugcaagcgggugcugaacgucgugugcaagaccugcgggcagcagcagaccacccugaagggcguggaggccgucauguacauggggacgcucuccuacgagcaguucaagaagggcgugcagaucagcugcaccugcgggaagcaggccaccaaguaccuggugcagcaggagucccccuucgucaugaugagcgccccccccgcgcaguacgagcugaagcacggcaccuucacgugcgccuccgaguacaccggcaacuaccagugcgggcacuacaagcacaucaccagcaaggagacccucuacugcaucgacggcgcccugcugacgaagagcuccgaguacaaggggccgaucaccgacguguucuacaaggagaacagcuacaccaccacgaucaagcccgugaccuacaagcucgacggcgucgugugcaccgagaucgaccccaagcuggacaacuacuacaagaaggacaacuccuacuucaccgagcagcccaucgaccuggugccgaaccagcccuaccccaacgccagcuucgacaacuucaaguucgucugcgacaacaucaaguucgccgacgaccucaaccagcugacgggguacaagaagcccgcgucccgcgagcugaaggugaccuucuucccggaccucaacggcgacguggucgccaucgacuacaagcacuacacccccagcuucaagaagggcgccaagcugcugcacaagcccaucguguggcacgugaacaacgccaccaacaaggcgacguacaagcccaacaccuggugcauccggugccucugguccaccaagccggucgagaccagcaacuccuucgacgugcugaagagcgaggacgcccaggggauggacaaccuggccugcgaggaccucaagcccguguccgaggaggucguggagaaccccacgauccagaaggacgugcuggagugcaacgucaagaccaccgagguggugggcgacaucauccugaagcccgccaacaacagccucaagaucaccgaggaggucgggcacacggaccugauggccgcguacguggacaacuccagccugaccaucaagaagccgaacgagcucucccgcgugcugggccugaagacccucgccacccacgggcuggccgccgucaacagcgugcccugggacacgaucgccaacuacgcgaagcccuuccugaacaagguggucuccaccaccaccaacaucgugacgcgcugccucaaccgggugugcaccaacuacaugccguacuucuucacccugcugcuccagcugugcaccuucacccgcagcacgaacucccggaucaaggccagcaugcccaccaccaucgccaagaacaccgucaagagcgugggcaaguucugccuggaggccuccuucaacuaccucaagagccccaacuucuccaagcugaucaacaucaucaucugguuccugcuccugagcgugugccugggcucccucaucuacagcacggccgcgcuggggguccugauguccaaccucggcaugcccagcuacugcaccggguaccgcgagggcuaccugaacuccaccaacgugaccaucgccacguacugcaccggcagcaucccgugcuccgugugccugagcgggcucgacucccuggacaccuaccccagccuggagaccauccagaucacgaucuccagcuucaagugggaccucaccgccuucggccuggucgccgagugguuccuggccuacauccucuucacccgguucuucuacgugcuggggcuggcggccaucaugcagcucuucuucuccuacuucgccgugcacuucaucagcaacuccuggcugauguggcugaucaucaaccugguccagauggcccccaucagcgcgauggugcgcauguacaucuucuucgccagcuucuacuacguguggaaguccuacguccacgugguggacggcugcaacagcuccaccugcaugaugugcuacaagcggaaccgcgccacgcgggucgagugcaccaccaucgugaacgggguccgccggagcuucuacguguacgccaacggcggcaagggguucugcaagcuccacaacuggaacugcgugaacugcgacaccuucugcgccggcuccacguucaucagcgacgaggucgcgcgcgaccugucccugcaguucaagcggcccaucaacccgaccgaccagagcuccuacaucguggacagcgugaccgucaagaacggguccauccaccucuacuucgacaaggccggccagaagaccuacgagcgccacagccugucccacuucgugaaccuggacaaccuccgggccaacaacacgaaggggagccugcccaucaacgugaucgucuucgacggcaaguccaagugcgaggagagcuccgccaagagcgccuccguguacuacagccagcugaugugccagcccauccuccugcuggaccaggcgcucgugagcgacgucggcgacuccgccgagguggccgugaagauguucgacgccuacgucaacaccuucagcuccaccuucaacgugcccauggagaagcugaagacccugguggccacggcggaggccgagcucgccaagaacgucagccuggacaacgugcuguccaccuucaucagcgccgcgcgccagggguucguggacuccgacgucgagaccaaggacgugguggagugccucaagcugagccaccaguccgacaucgaggucaccggcgacagcugcaacaacuacaugcugacguacaacaagguggagaacaugaccccgcgggaccucggggccugcaucgacugcuccgcccgccacaucaacgcccagguggccaagagccacaacaucgcgcugaucuggaacgucaaggacuucaugucccugagcgagcagcuccggaagcagauccgcuccgccgccaagaagaacaaccugcccuucaagcugaccugcgccaccacgcgccagguggugaacgucgugaccaccaagaucgcccucaagggcgggugaggacuaguuauaagacugacuagcccgaugggccucccaacgggcccuccuccccuccuugcaccgagauuaauaaaaaaaaaaaaaaaaaaaaaaaaaaaaaaaaaaaaaaaaaaaaaaaaaaaaaaaaaaaaaaaaugcaucccccccccccccccccccccccccccccccaaaggcucuuuucagagccaccagaauu

SEQ ID NO: 21868 - RNA, 6058 nt, Artificial Sequence
  SARS-CoV-2__MT607602.1__non-structural protein 3 (NSP3) mRNA gc
aggagaaagcuuaccauggcccccaccaaggugaccuucggcgacgacacggucaucgaggugcagggguacaagagcgugaacaucaccuucgagcuggacgagcgcaucgacaagguccucaacgagaagugcuccgccuacaccguggagcugggcaccgaggugaacgaguucgcgugcgucguggccgacgccgugaucaagacgcugcagccggucagcgagcuccugaccccccuggggaucgaccucgacgagugguccauggccaccuacuaccuguucgacgagagcggcgaguucaagcuggccucccacauguacugcagcuucuacccccccgacgaggacgaggaggagggggacugcgaggaggaggaguucgagccguccacccaguacgaguacggcacggaggacgacuaccagggcaagccccucgaguucggggcgaccagcgccgcccugcagcccgaggaggagcaggaggaggacuggcuggacgacgacucccagcagaccgugggccagcaggacgggagcgaggacaaccagaccacgaccauccagaccaucguggagguccagccccagcucgagauggagcugaccccgguggugcagacgaucgaggucaacuccuucagcggcuaccugaagcucaccgacaacguguacaucaagaacgccgacaucguggaggaggcgaagaaggucaagcccaccgugguggucaacgccgccaacguguaccugaagcacgggggcggcguggccggggcccugaacaaggcgaccaacaacgccaugcaggucgaguccgacgacuacaucgccacgaacggcccccucaagguggggggcagcugcguccuguccggccacaaccuggccaagcacugccuccacgugguggggcccaacgucaacaagggcgaggacauccagcugcugaagagcgccuacgagaacuucaaccagcacgaggugcuccuggcgccgcugcucuccgccgggaucuucggcgccgaccccauccacagccugcgggugugcgucgacaccgugcgcaccaacguguaccuggccgucuucgacaagaaccucuacgacaagcugguguccagcuuccuggagaugaagagcgagaagcagguggagcagaagaucgccgagauccccaaggaggaggucaagcccuucaucaccgaguccaagccgagcguggagcagcggaagcaggacgacaagaagaucaaggcgugcguggaggaggucacgaccacccucgaggagaccaaguuccugacggagaaccugcuccuguacaucgacaucaacgggaaccugcaccccgacuccgccacccucgugagcgacaucgacaucaccuuccugaagaaggacgcccccuacaucgugggcgacgucgugcaggagggcgugcugaccgccgucgugauccccacgaagaaggccgggggcaccaccgagaugcucgcgaaggcccugcgcaaggugccgaccgacaacuacaucacgaccuaccccgggcagggccugaacggguacaccgucgaggaggccaagaccgugcucaagaagugcaaguccgccuucuacauccugcccagcaucaucuccaacgagaagcaggagauccugggcaccgugagcuggaaccuccgggagaugcuggcgcacgccgaggagacgcgcaagcugaugcccgucugcguggagaccaaggccaucguguccaccauccagcggaaguacaagggcaucaagauccaggagggggucguggacuacggcgcccgcuucuacuucuacaccagcaagacgaccguggccucccugaucaacacccucaacgaccugaacgagacccuggucacgaugccgcucggguacgugacccacggccugaaccuggaggaggcggcccgguacaugcgcagccucaaggugcccgccaccgucuccgugagcucccccgacgccgugaccgccuacaacggguaccugacgagcuccagcaagacccccgaggagcacuucaucgagaccaucucccuggcgggcagcuacaaggacuggagcuacuccggccagagcacccagcucgggaucgaguuccugaagcggggcgacaaguccgucuacuacacgagcaacccgaccaccuuccaccuggacggggaggugaucaccuucgacaaccucaagacgcugcugucccuccgcgaggugcggaccaucaaggucuucaccaccguggacaacaucaaccugcacacgcagguggucgacaugagcaugaccuacggccagcaguucggccccaccuaccuggacggggccgacgugaccaagaucaagccccacaacucccacgagggcaagacguucuacgugcucccgaacgacgacacccugcgcgucgaggccuucgaguacuaccacaccaccgaccccagcuuccuggggcgguacauguccgcccucaaccacacgaagaaguggaaguacccccaggugaacggccugaccagcaucaagugggccgacaacaacugcuaccuggcgaccgcccuccugacccugcagcagaucgagcucaaguucaaccccccggcccugcaggacgccuacuaccgcgcgcgggccggggaggccgccaacuucugcgcccugauccucgcguacugcaacaagacggugggcgagcugggcgacguccgcgagaccaugggguaccuguuccagcacgccaaccucgacuccugcaagcgggugcugaacgucgugugcaagaccugcggccagcagcagaccacccugaaggggguggaggccgucauguacaugggcacgcucagcuacgagcaguucaagaagggggugcagauccccugcaccugcggcaagcaggccaccaaguaccuggugcagcaggagucccccuucgucaugaugagcgcccccccggcgcaguacgagcugaagcacggcaccuucacgugcgccuccgaguacaccgggaacuaccagugcggccacuacaagcacaucaccagcaaggagacccucuacugcaucgacggggcccugcugacgaaguccagcgaguacaagggccccaucaccgacguguucuacaaggagaacagcuacaccaccacgaucaagcccgugaccuacaagcucgacggggucgugugcaccgagaucgaccccaagcuggacaacuacuacaagaaggacaacuccuacuucaccgagcagccgaucgaccuggugcccaaccagcccuaccccaacgccagcuucgacaacuucaaguucgucugcgacaacaucaaguucgccgacgaccucaaccagcugacgggcuacaagaagccggcgucccgcgagcugaaggugaccuucuuccccgaccucaacggcgacguggucgccaucgacuacaagcacuacacccccagcuucaagaagggggccaagcugcugcacaagcccaucguguggcacgugaacaacgccaccaacaaggcgacguacaagccgaacaccuggugcauccggugccucugguccaccaagcccgucgagaccagcaacuccuucgacgugcugaagagcgaggacgcccagggcauggacaaccuggccugcgaggaccucaagcccguguccgaggaggucguggagaaccccacgauccagaaggacgugcuggagugcaacgucaagaccaccgagguggugggggacaucauccugaagccggccaacaacagccucaagaucaccgaggaggucggccacacggaccugauggccgcguacguggacaacuccagccugaccaucaagaagcccaacgagcucucccgcgugcuggggcugaagacccucgccacccacggccuggccgccgucaacagcgugcccugggacacgaucgccaacuacgcgaagccguuccugaacaagguggucuccaccaccaccaacaucgugacgcgcugccucaaccgggugugcaccaacuacaugcccuacuucuucacccugcugcuccagcugugcaccuucacccgcagcacgaacucccggaucaaggccagcaugcccaccaccaucgccaagaacaccgucaaguccgugggcaaguucugccuggaggccagcuucaacuaccucaagagccccaacuucuccaagcugaucaacaucaucaucugguuccugcuccugagcgugugccuggggucccucaucuacagcacggccgcgcugggcguccugauguccaaccucgggaugccgagcuacugcaccggcuaccgcgagggcuaccugaacuccaccaacgugaccaucgccacguacugcaccgggagcauccccugcuccgugugccugagcggccucgacucccuggacaccuaccccagccuggagaccauccagaucacgaucuccagcuucaagugggaccucaccgccuucgggcuggucgccgagugguuccuggccuacauccucuucacccgguucuucuacgugcugggccuggcggccaucaugcagcucuucuucuccuacuucgccgugcacuucaucagcaacuccuggcugauguggcugaucaucaaccugguccagauggcccccaucagcgcgauggugcgcauguacaucuucuucgccuccuucuacuacguguggaagagcuacguccacgugguggacgggugcaacagcuccaccugcaugaugugcuacaagcggaaccgcgccacgcgggucgagugcaccaccaucgugaacggcguccgccggagcuucuacguguacgccaacggcgggaagggcuucugcaagcuccacaacuggaacugcgugaacugcgacaccuucugcgccggguccacguucaucagcgacgaggucgcgcgcgaccugucccugcaguucaagcggccgaucaaccccaccgaccagagcuccuacaucguggacagcgugaccgucaagaacggcuccauccaccucuacuucgacaaggccgggcagaagaccuacgagcgccacagccugucccacuucgugaaccuggacaaccuccgggccaacaacacgaagggcagccugcccaucaacgugaucgucuucgacggcaaguccaagugcgaggagagcuccgccaagagcgccuccguguacuacagccagcugaugugccagcccauccuccugcuggaccaggcgcucguguccgacgucggggacagcgccgagguggccgugaagauguucgacgccuacgucaacaccuucagcuccaccuucaacgugccgauggagaagcugaagacccugguggccacggcggaggccgagcucgccaagaacgucagccuggacaacgugcuguccaccuucaucagcgccgcgcgccagggcuucguggacuccgacgucgagaccaaggacgugguggagugccucaagcugagccaccaguccgacaucgaggucaccggggacagcugcaacaacuacaugcugacguacaacaagguggagaacaugaccccccgggaccucggcgccugcaucgacugcuccgcccgccacaucaacgcccagguggccaagagccacaacaucgcgcugaucuggaacgucaaggacuucaugucccugagcgagcagcuccggaagcagauccgcuccgccgccaagaagaacaaccugcccuucaagcugaccugcgccaccacgcgccagguggugaacgucgugaccaccaagaucgcccucaaggggggcugaggacuaguuauaagacugacuagcccgaugggccucccaacgggcccuccuccccuccuugcaccgagauuaauaaaaaaaaaaaaaaaaaaaaaaaaaaaaaaaaaaaaaaaaaaaaaaaaaaaaaaaaaaaaaaaaugcaucccccccccccccccccccccccccccccccaaaggcucuuuucagagccaccagaauu

SEQ ID NO: 21869 - RNA, 6058 nt, Artificial Sequence
  SARS-CoV-2__MT607608.1__non-structural protein 3 (NSP3) mRNA gc
aggagaaagcuuaccauggcccccaccaaggugaccuucggcgacgacacggucaucgaggugcagggguacaagagcgugaacaucaccuucgagcuggacgagcgcaucgacaagguccucaacgagaagugcuccgccuacaccguggagcugggcaccgaggugaacgaguucgcgugcgucguggccgacgccgugaucaagacgcugcagccggucagcgagcuccugaccccccuggggaucgaccucgacgagugguccauggccaccuacuaccuguucgacgagagcggcgaguucaagcuggccucccacauguacugcagcuucuacccccccgacgaggacgaggaggagggggacugcgaggaggaggaguucgagccguccacccaguacgaguacggcacggaggacgacuaccagggcaagccccucgaguucggggcgaccagcgccgcccugcagcccgaggaggagcaggaggaggacuggcuggacgacgacucccagcagaccgugggccagcaggacgggagcgaggacaaccagaccacgaccauccagaccaucguggagguccagccccagcucgagauggagcugaccccgguggugcagacgaucgaggucaacuccuucagcggcuaccugaagcucaccgacaacguguacaucaagaacgccgacaucguggaggaggcgaagaaggucaagcccaccgugguggucaacgccgccaacguguaccugaagcacgggggcggcguggccggggcccugaacaaggcgaccaacaacgccaugcaggucgaguccgacgacuacaucgccacgaacggcccccucaagguggggggcagcugcguccuguccggccacaaccuggccaagcacugccuccacgugguggggcccaacgucaacaagggcgaggacauccagcugcugaagagcgccuacgagaacuucaaccagcacgaggugcuccuggcgccgcugcucuccgccgggaucuucggcgccgaccccauccacagccugcgggugugcgucgacaccgugcgcaccaacguguaccuggccgucuucgacaagaaccucuacgacaagcugguguccagcuuccuggagaugaagagcgagaagcagguggagcagaagaucgccgagauccccaaggaggaggucaagcccuucaucaccgaguccaagccgagcguggagcagcggaagcaggacgacaagaagaucaaggcgugcguggaggaggucacgaccacccucgaggagaccaaguuccugacggagaaccugcuccuguacaucgacaucaacgggaaccugcaccccgacuccgccacccucgugagcgacaucgacaucaccuuccugaagaaggacgcccccuacaucgugggcgacgucgugcaggagggcgugcugaccgccgucgugauccccacgaagaaggccgggggcaccaccgagaugcucgcgaaggcccugcgcaaggugccgaccgacaacuacaucacgaccuaccccgggcagggccugaacggguacaccgucgaggaggccaagaccgugcucaagaagugcaaguccgccuucuacauccugcccagcaucaucuccaacgagaagcaggagauccugggcaccgugagcuggaaccuccgggagaugcuggcgcacgccgaggagacgcgcaagcugaugcccgucugcguggagaccaaggccaucguguccaccauccagcggaaguacaagggcaucaagauccaggagggggucguggacuacggcgcccgcuucuacuucuacaccagcaagacgaccguggccucccugaucaacacccucaacgaccugaacgagacccuggucacgaugccgcucggguacgugacccacggccugaaccuggaggaggcggcccgguacaugcgcagccucaaggugcccgccaccgucuccgugagcucccccgacgccgugaccgccuacaacggguaccugacgagcuccagcaagacccccgaggagcacuucaucgagaccaucucccuggcgggcagcuacaaggacuggagcuacuccggccagagcacccagcucgggaucgaguuccugaagcggggcgacaaguccgucuacuacacgagcaacccgaccaccuuccaccuggacggggaggugaucaccuucgacaaccucaagacgcugcugucccuccgcgaggugcggaccaucaaggucuucaccaccguggacaacaucaaccugcacacgcagguggucgacaugagcaugaccuacggccagcaguucggccccaccuaccuggacggggccgacgugaccaagaucaagccccacaacucccacgagggcaagacguucuacgugcucccgaacgacgacacccugcgcgucgaggccuucgaguacuaccacaccaccgaccccagcuuccuggggcgguacauguccgcccucaaccacacgaagaaguggaaguacccccaggugaacggccugaccagcaucaagugggccgacaacaacugcuaccuggcgaccgcccuccugacccugcagcagaucgagcucaaguucaaccccccggcccugcaggacgccuacuaccgcgcgcgggccggggaggccgccaacuucugcgcccugauccucgcguacugcaacaagacggugggcgagcugggcgacguccgcgagaccauguccuaccuguuccagcacgccaaccucgacagcugcaagcgggugcugaacgucgugugcaagaccugcgggcagcagcagaccacccugaagggcguggaggccgucauguacauggggacgcucuccuacgagcaguucaagaagggcgugcagauccccugcaccugcgggaagcaggccaccaaguaccuggugcagcaggagagccccuucgucaugauguccgcccccccggcgcaguacgagcugaagcacggcaccuucacgugcgccagcgaguacaccggcaacuaccagugcgggcacuacaagcacaucaccuccaaggagacccucuacugcaucgacggcgcccugcugacgaagagcagcgaguacaaggggcccaucaccgacguguucuacaaggagaacuccuacaucaccaccaucaagcccgugacguacaagcucgacggcgucgugugcaccgagaucgaccccaagcuggacaacuacuacaagaaggacaacagcuacuucaccgagcagccgaucgaccuggugcccaaccagcccuaccccaacgccuccuucgacaacuucaaguucgucugcgacaacaucaaguucgccgacgaccucaaccagcugaccggguacaagaagccggcgagccgcgagcugaaggugacguucuuccccgaccucaacggcgacguggucgccaucgacuacaagcacuacacccccuccuucaagaagggcgccaagcugcugcacaagcccaucguguggcacgugaacaacgccaccaacaaggcgaccuacaagccgaacacguggugcauccggugccucuggagcaccaagcccgucgagaccuccaacagcuucgacgugcugaaguccgaggacgcccaggggauggacaaccuggccugcgaggaccucaagcccgugagcgaggaggucguggagaaccccaccauccagaaggacgugcuggagugcaacgucaagacgaccgagguggugggcgacaucauccugaagccggccaacaacucccucaagaucaccgaggaggucgggcacaccgaccugauggccgcguacguggacaacagcucccugacgaucaagaagcccaacgagcucagccgcgugcugggccugaagacccucgccacccacgggcuggccgccgucaacuccgugcccugggacaccaucgccaacuacgcgaagccguuccugaacaagguggucagcacgaccaccaacaucgugacccgcugccucaaccgggugugcacgaacuacaugcccuacuucuucacccugcugcuccagcugugcaccuucacccgcuccaccaacagccggaucaaggccuccaugcccacgaccaucgccaagaacaccgucaagagcgugggcaaguucugccuggaggccagcuucaacuaccucaagucccccaacuucagcaagcugaucaacaucaucaucugguuccugcuccuguccgugugccugggcagccucaucuacuccaccgccgcgcuggggguccugaugagcaaccucggcaugccguccuacugcacgggguaccgcgagggcuaccugaacagcaccaacgugaccaucgccaccuacugcacgggcuccauccccugcagcgugugccuguccgggcucgacagccuggacaccuaccccucccuggagaccauccagaucaccaucagcuccuucaagugggaccucacggccuucggccuggucgccgagugguuccuggccuacauccucuucacccgguucuucuacgugcuggggcuggcggccaucaugcagcucuucuucagcuacuucgccgugcacuucaucuccaacagcuggcugauguggcugaucaucaaccugguccagauggcccccaucuccgcgauggugcgcauguacaucuucuucgccagcuucuacuacguguggaagagcuacguccacgugguggacggcugcaacuccagcaccugcaugaugugcuacaagcggaaccgcgccacccgggucgagugcacgaccaucgugaacgggguccgccgguccuucuacguguacgccaacggcggcaagggguucugcaagcuccacaacuggaacugcgugaacugcgacaccuucugcgccggcagcaccuucaucuccgacgaggucgcgcgcgaccugagccugcaguucaagcggccgaucaaccccacggaccaguccagcuacaucguggacuccgugaccgucaagaacgggagcauccaccucuacuucgacaaggccggccagaagaccuacgagcgccacucccugagccacuucgugaaccuggacaaccuccgggccaacaacaccaaggggucccugcccaucaacgugaucgucuucgacggcaagagcaagugcgaggaguccagcgccaaguccgccagcguguacuacucccagcugaugugccagcccauccuccugcuggaccaggcgcucgugagcgacgucggcgacagcgccgagguggccgugaagauguucgacgccuacgucaacacguucuccagcaccuucaacgugccgauggagaagcugaagacccugguggccaccgcggaggccgagcucgccaagaacgucucccuggacaacgugcugagcacguucaucuccgccgcgcgccagggguucguggacagcgacgucgagaccaaggacgugguggagugccucaagcugucccaccagagcgacaucgaggucaccggcgacuccugcaacaacuacaugcugaccuacaacaagguggagaacaugacgccccgggaccucggggccugcaucgacugcagcgcccgccacaucaacgcccagguggccaagucccacaacaucgcgcugaucuggaacgucaaggacuucaugagccuguccgagcagcuccggaagcagauccgcagcgccgccaagaagaacaaccugcccuucaagcugaccugcgccaccacccgccagguggugaacgucgugacgaccaagaucgcccucaagggcgggugaggacuaguuauaagacugacuagcccgaugggccucccaacgggcccuccuccccuccuugcaccgagauuaauaaaaaaaaaaaaaaaaaaaaaaaaaaaaaaaaaaaaaaaaaaaaaaaaaaaaaaaaaaaaaaaaugcaucccccccccccccccccccccccccccccccaaaggcucuuuucagagccaccagaauu

SEQ ID NO: 21870 - RNA, 6058 nt, Artificial Sequence
  SARS-CoV-2__MT607614.1__non-structural protein 3 (NSP3) mRNA gc
aggagaaagcuuaccauggcccccaccaaggugaccuucggcgacgacacggucaucgaggugcagggguacaagagcgugaacaucaccuucgagcuggacgagcgcaucgacaagguccucaacgagaagugcuccgccuacaccguggagcugggcaccgaggugaacgaguucgcgugcgucguggccgacgccgugaucaagacgcugcagccggucagcgagcuccugaccccccuggggaucgaccucgacgagugguccauggccaccuacuaccuguucgacgagagcggcgaguucaagcuggccucccacauguacugcagcuucuacccccccgacgaggacgaggaggagggggacugcgaggaggaggaguucgagccguccacccaguacgaguacggcacggaggacgacuaccagggcaagccccucgaguucggggcgaccagcgccgcccugcagcccgaggaggagcaggaggaggacuggcuggacgacgacucccagcagaccgugggccagcaggacgggagcgaggacaaccagaccacgaccauccagaccaucguggagguccagccccagcucgagauggagcugaccccgguggugcagacgaucgaggucaacuccuucagcggcuaccugaagcucaccgacaacguguacaucaagaacgccgacaucguggaggaggcgaagaaggucaagcccaccgugguggucaacgccgccaacguguaccugaagcacgggggcggcguggccggggcccugaacaaggcgaccaacaacgccaugcaggucgaguccgacgacuacaucgccacgaacggcccccucaagguggggggcagcugcguccuguccggccacaaccuggccaagcacugccuccacgugguggggcccaacgucaacaagggcgaggacauccagcugcugaagagcgccuacgagaacuucaaccagcacgaggugcuccuggcgccgcugcucuccgccgggaucuucggcgccgaccccauccacagccugcgggugugcgucgacaccgugcgcaccaacguguaccuggccgucuucgacaagaaccucuacgacaagcugguguccagcuuccuggagaugaagagcgagaagcagguggagcagaagaucgccgagauccccaaggaggaggucaagcccuucaucaccgaguccaagccgagcguggagcagcggaagcaggacgacaagaagaucaaggcgugcguggaggaggucacgaccacccucgaggagaccaaguuccugacggagaaccugcuccuguacaucgacaucaacgggaaccugcaccccgacuccgccacccucgugagcgacaucgacaucaccuuccugaagaaggacgcccccuacaucgugggcgacgucgugcaggagggcgugcugaccgccgucgugauccccacgaagaaggccgggggcaccaccgagaugcucgcgaaggcccugcgcaaggugccgaccgacaacuacaucacgaccuaccccgggcagggccugaacggguacaccgucgaggaggccaagaccgugcucaagaagugcaaguccgccuucuacauccugcccagcaucaucuccaacgagaagcaggagauccugggcaccgugagcuggaaccuccgggagaugcuggcgcacgccgaggagacgcgcaagcugaugcccgucugcguggagaccaaggccaucguguccaccauccagcggaaguacaagggcaucaagauccaggagggggucguggacuacggcgcccgcuucuacuucuacaccagcaagacgaccguggccucccugaucaacacccucaacgaccugaacgagacccuggucacgaugccgcucggguacgugacccacggccugaaccuggaggaggcggcccgguacaugcgcagccucaaggugcccgccaccgucuccgugagcucccccgacgccgugaccgccuacaacggguaccugacgagcuccagcaagacccccgaggagcacuucaucgagaccaucucccuggcgggcagcuacaaggacuggagcuacuccggccagagcacccagcucgggaucgaguuccugaagcggggcgacaaguccgucuacuacacgagcaacccgaccaccuuccaccuggacggggaggugaccacguucgacaaccucaagacccugcugucccuccgcgaggugcggaccaucaaggucuucaccacgguggacaacaucaaccugcacacccagguggucgacaugagcaugaccuacggccagcaguucggccccaccuaccuggacggggccgacgugacgaagaucaagccccacaacucccacgagggcaagaccuucuacgugcucccgaacgacgacacccugcgcgucgaggccuucgaguacuaccacaccacggaccccagcuuccuggggcgguacauguccgcccucaaccacaccaagaaguggaaguacccccaggugaacggccugaccagcaucaagugggccgacaacaacugcuaccuggcgaccgcccuccugacgcugcagcagaucgagcucaaguucaaccccccggcccugcaggacgccuacuaccgcgcgcgggccggggaggccgccaacuucugcgcccugauccucgcguacugcaacaagaccgugggcgagcugggcgacguccgcgagaccauguccuaccuguuccagcacgccaaccucgacagcugcaagcgggugcugaacgucgugugcaagaccugcgggcagcagcagaccacgcugaagggcguggaggccgucauguacauggggacccucuccuacgagcaguucaagaagggcgugcagauccccugcaccugcgggaagcaggccaccaaguaccuggugcagcaggagagccccuucgucaugauguccgcccccccggcgcaguacgagcugaagcacggcacguucaccugcgccagcgaguacaccggcaacuaccagugcgggcacuacaagcacaucaccuccaaggagacgcucuacugcaucgacggcgcccugcugaccaagagcagcgaguacaaggggcccaucaccgacguguucuacaaggagaacuccuacaccacgaccaucaagcccgugaccuacaagcucgacggcgucgugugcaccgagaucgaccccaagcuggacaacuacuacaagaaggacaacagcuacuucacggagcagccgaucgaccuggugcccaaccagcccuaccccaacgccuccuucgacaacuucaaguucgucugcgacaacaucaaguucgccgacgaccucaaccagcugaccggguacaagaagccggcgagccgcgagcugaaggugaccuucuuccccgaccucaacggcgacguggucgccaucgacuacaagcacuacacccccuccuucaagaagggcgccaagcugcugcacaagcccaucguguggcacgugaacaacgccacgaacaaggcgaccuacaagccgaacaccuggugcauccggugccucuggagcaccaagcccgucgagacguccaacagcuucgacgugcugaaguccgaggacgcccaggggauggacaaccuggccugcgaggaccucaagcccgugagcgaggaggucguggagaaccccaccauccagaaggacgugcuggagugcaacgucaagaccaccgagguggugggcgacaucauccugaagccggccaacaacucccucaagaucacggaggaggucgggcacaccgaccugauggccgcguacguggacaacagcucccugaccaucaagaagcccaacgagcucagccgcgugcugggccugaagacccucgccacgcacgggcuggccgccgucaacuccgugcccugggacaccaucgccaacuacgcgaagccguuccugaacaagguggucagcaccaccacgaacaucgugacccgcugccucaaccgggugugcaccaacuacaugcccuacuucuucacccugcugcuccagcugugcaccuucacgcgcuccaccaacagccggaucaaggccuccaugcccaccaccaucgccaagaacacggucaagagcgugggcaaguucugccuggaggccagcuucaacuaccucaagucccccaacuucagcaagcugaucaacaucaucaucugguuccugcuccuguccgugugccugggcagccucaucuacuccaccgccgcgcuggggguccugaugagcaaccucggcaugccguccuacugcaccggguaccgcgagggcuaccugaacagcaccaacgugacgaucgccaccuacugcaccggcuccauccccugcagcgugugccuguccgggcucgacagccuggacaccuaccccucccuggagacgauccagaucaccaucagcuccuucaagugggaccucaccgccuucggccuggucgccgagugguuccuggccuacauccucuucacccgguucuucuacgugcuggggcuggcggccaucaugcagcucuucuucagcuacuucgccgugcacuucaucuccaacagcuggcugauguggcugaucaucaaccugguccagauggcccccaucuccgcgauggugcgcauguacaucuucuucgccagcuucuacuacguguggaagagcuacguccacgugguggacggcugcaacuccagcacgugcaugaugugcuacaagcggaaccgcgccacccgggucgagugcaccaccaucgugaacgggguccgccgguccuucuacguguacgccaacggcggcaagggguucugcaagcuccacaacuggaacugcgugaacugcgacacguucugcgccggcagcaccuucaucuccgacgaggucgcgcgcgaccugagccugcaguucaagcggccgaucaaccccaccgaccaguccagcuacaucguggacuccgugaccgucaagaacgggagcauccaccucuacuucgacaaggccggccagaagacguacgagcgccacucccugagccacuucgugaaccuggacaaccuccgggccaacaacaccaaggggucccugcccaucaacgugaucgucuucgacggcaagagcaagugcgaggaguccagcgccaaguccgccagcguguacuacucccagcugaugugccagcccauccuccugcuggaccaggcgcucgugagcgacgucggcgacagcgccgagguggccgugaagauguucgacgccuacgucaacaccuucuccagcaccuucaacgugccgauggagaagcugaagacgcugguggccaccgcggaggccgagcucgccaagaacgucucccuggacaacgugcugagcaccuucaucuccgccgcgcgccagggguucguggacagcgacgucgagaccaaggacgugguggagugccucaagcugucccaccagagcgacaucgaggucacgggcgacuccugcaacaacuacaugcugaccuacaacaagguggagaacaugaccccccgggaccucggggccugcaucgacugcagcgcccgccacaucaacgcccagguggccaagucccacaacaucgcgcugaucuggaacgucaaggacuucaugagccuguccgagcagcuccggaagcagauccgcagcgccgccaagaagaacaaccugcccuucaagcugaccugcgccacgacccgccagguggugaacgucgugaccaccaagaucgcccucaagggcgggugaggacuaguuauaagacugacuagcccgaugggccucccaacgggcccuccuccccuccuugcaccgagauuaauaaaaaaaaaaaaaaaaaaaaaaaaaaaaaaaaaaaaaaaaaaaaaaaaaaaaaaaaaaaaaaaaugcaucccccccccccccccccccccccccccccccaaaggcucuuuucagagccaccagaauu

SEQ ID NO: 21871 - RNA, 6058 nt, Artificial Sequence
  SARS-CoV-2__MT609570.1__non-structural protein 3 (NSP3) mRNA gc
aggagaaagcuuaccauggcccccaccaaggugaccuucggcgacgacacggucaucgaggugcagggguacaagagcgugaacaucaccuucgagcuggacgagcgcaucgacaagguccucaacgagaagugcuccgccuacaccguggagcugggcaccgaggugaacgaguucgcgugcgucguggccgacgccgugaucaagacgcugcagccggucagcgagcuccugaccccccuggggaucgaccucgacgagugguccauggccaccuacuaccuguucgacgagagcggcgaguucaagcuggccucccacauguacugcagcuucuacccccccgacgaggacgaggaggagggggacugcgaggaggaggaguucgagccguccacccaguacgaguacggcacggaggacgacuaccagggcaagccccucgaguucggggcgaccagcgccgcccugcagcccgaggaggagcaggaggaggacuggcuggacgacgacucccagcagaccgugggccagcaggacgggagcgaggacaaccagaccacgaccauccagaccaucguggagguccagccccagcucgagauggagcugaccccgguggugcagacgaucgaggucaacuccuucagcggcuaccugaagcucaccgacaacguguacaucaagaacgccgacaucguggaggaggcgaagaaggucaagcccaccgugguggucaacgccgccaacguguaccugaagcacgggggcggcguggccggggcccugaacaaggcgaccaacaacgccaugcaggucgaguccgacgacuacaucgccacgaacggcccccucaagguggggggcagcugcguccuguccggccacaaccuggccaagcacugccuccacgugguggggcccaacgucaacaagggcgaggacauccagcugcugaagagcgccuacgagaacuucaaccagcacgaggugcuccuggcgccgcugcucuccgccgggguguucggcgccgaccccauccacagccugcgggucugcguggacaccgugcgcaccaacgucuaccuggccguguucgacaagaaccucuacgacaagcugguguccagcuuccuggagaugaagagcgagaagcaggucgagcagaagaucgccgagauccccaaggaggaggugaagcccuucaucaccgaguccaagccgagcguggagcagcggaagcaggacgacaagaagaucaaggcgugcgucgaggaggugacgaccacccucgaggagaccaaguuccugacggagaaccugcuccuguacaucgacaucaacgggaaccugcaccccgacuccgccacccucgugagcgacaucgacaucaccuuccugaagaaggacgcccccuacaucgucggcgacguggugcaggagggcguccugaccgccguggugauccccacgaagaaggccgggggcaccaccgagaugcucgcgaaggcccugcgcaaggucccgaccgacaacuacaucacgaccuaccccgggcagggccugaacggguacaccguggaggaggccaagaccgugcucaagaagugcaaguccgccuucuacauccugcccagcaucaucuccaacgagaagcaggagauccugggcaccgucagcuggaaccuccgggagaugcuggcgcacgccgaggagacgcgcaagcugaugcccgugugcguggagaccaaggccaucgucuccaccauccagcggaaguacaagggcaucaagauccaggagggggugguggacuacggcgcccgcuucuacuucuacaccagcaagacgaccgucgccucccugaucaacacccucaacgaccugaacgagacccuggugacgaugccgcucggguacgugacccacggccugaaccuggaggaggcggcccgguacaugcgcagccucaagguccccgccaccguguccgugagcucccccgacgccgucaccgccuacaacggguaccugacgagcuccagcaagacccccgaggagcacuucaucgagaccaucucccuggcgggcagcuacaaggacuggagcuacuccggccagagcacccagcucgggaucgaguuccugaagcggggcgacaaguccguguacuacacgagcaacccgaccaccuuccaccuggacggggaggugaucaccuucgacaaccucaagacgcugcugucccuccgcgagguccggaccaucaagguguucaccaccguggacaacaucaaccugcacacgcaggucguggacaugagcaugaccuacggccagcaguucggccccaccuaccuggacggggccgacgugaccaagaucaagccccacaacucccacgagggcaagacguucuacguccucccgaacgacgacacccugcgcguggaggccuucgaguacuaccacaccaccgaccccagcuuccuggggcgguacauguccgcccucaaccacacgaagaaguggaaguacccccaggugaacggccugaccagcaucaagugggccgacaacaacugcuaccuggcgaccgcccuccugacccugcagcagaucgagcucaaguucaaccccccggcccugcaggacgccuacuaccgcgcgcgggccggggaggccgccaacuucugcgcccugauccucgcguacugcaacaagacggucggcgagcugggcgacgugcgcgagaccauguccuaccuguuccagcacgccaaccucgacagcugcaagcggguccugaacguggugugcaagaccugcgggcagcagcagaccacccugaagggcgucgaggccgugauguacauggggacgcucuccuacgagcaguucaagaagggcgugcagauccccugcaccugcgggaagcaggccaccaaguaccugguccagcaggagagccccuucgugaugauguccgcccccccggcgcaguacgagcugaagcacggcaccuucacgugcgccagcgaguacaccggcaacuaccagugcgggcacuacaagcacaucaccuccaaggagacccucuacugcaucgacggcgcccugcugacgaagagcagcgaguacaaggggcccaucaccgacguguucuacaaggagaacuccuacaccaccacgaucaagcccgucaccuacaagcucgacggcguggugugcaccgagaucgaccccaagcuggacaacuacuacaagaaggacaacagcuacuucaccgagcagccgaucgaccugguccccaaccagcccuaccccaacgccuccuucgacaacuucaaguucgugugcgacaacaucaaguucgccgacgaccucaaccagcugacgggguacaagaagccggcgagccgcgagcugaaggugaccuucuuccccgaccucaacggcgacgucguggccaucgacuacaagcacuacacccccuccuucaagaagggcgccaagcugcugcacaagcccaucguguggcacgucaacaacgccaccaacaaggcgacguacaagccgaacaccuggugcauccggugccucuggagcaccaagcccguggagaccuccaacagcuucgacgugcugaaguccgaggacgcccaggggauggacaaccuggccugcgaggaccucaagcccgucagcgaggaggugguggagaaccccacgauccagaaggacguccuggagugcaacgugaagaccaccgagguggucggcgacaucauccugaagccggccaacaacucccucaagaucaccgaggagguggggcacacggaccugauggccgcguacguggacaacagcucccugaccaucaagaagcccaacgagcucagccgcguccugggccugaagacccucgccacccacgggcuggccgccgugaacuccgugcccugggacacgaucgccaacuacgcgaagccguuccugaacaaggucgugagcaccaccaccaacaucgugacgcgcugccucaaccgggucugcaccaacuacaugcccuacuucuucacccugcugcuccagcugugcaccuucacccgcuccacgaacagccggaucaaggccuccaugcccaccaccaucgccaagaacaccgugaagagcgugggcaaguucugccuggaggccagcuucaacuaccucaagucccccaacuucagcaagcugaucaacaucaucaucugguuccugcuccuguccgucugccugggcagccucaucuacuccacggccgcgcugggggugcugaugagcaaccucggcaugccguccuacugcaccggguaccgcgagggcuaccugaacagcaccaacgugaccaucgccacguacugcaccggcuccauccccugcagcgucugccuguccgggcucgacagccuggacaccuaccccucccuggagaccauccagaucacgaucagcuccuucaagugggaccucaccgccuucggccugguggccgagugguuccuggccuacauccucuucacccgguucuucuacgugcuggggcuggcggccaucaugcagcucuucuucagcuacuucgccguccacuucaucuccaacagcuggcugauguggcugaucaucaaccuggugcagauggcccccaucuccgcgauggugcgcauguacaucuucuucgccagcuucuacuacgucuggaagagcuacgugcacguggucgacggcugcaacuccagcaccugcaugaugugcuacaagcggaaccgcgccacgcggguggagugcaccaccaucgucaacggggugcgccgguccuucuacguguacgccaacggcggcaagggguucugcaagcuccacaacuggaacugcgucaacugcgacaccuucugcgccggcagcacguucaucuccgacgagguggcgcgcgaccugagccugcaguucaagcggccgaucaaccccaccgaccaguccagcuacaucguggacuccgucaccgugaagaacgggagcauccaccucuacuucgacaaggccggccagaagaccuacgagcgccacucccugagccacuucgugaaccuggacaaccuccgggccaacaacacgaaggggucccugcccaucaacgucaucguguucgacggcaagagcaagugcgaggaguccagcgccaaguccgccagcguguacuacucccagcugaugugccagcccauccuccugcuggaccaggcgcucgucagcgacgugggcgacagcgccgagguggccgucaagauguucgacgccuacgugaacaccuucuccagcaccuucaacgugccgauggagaagcugaagacccuggucgccacggcggaggccgagcucgccaagaacgugucccuggacaacgugcugagcaccuucaucuccgccgcgcgccagggguucgucgacagcgacguggagaccaaggacguggucgagugccucaagcugucccaccagagcgacaucgaggugaccggcgacuccugcaacaacuacaugcugacguacaacaagguggagaacaugaccccccgggaccucggggccugcaucgacugcagcgcccgccacaucaacgcccaggucgccaagucccacaacaucgcgcugaucuggaacgugaaggacuucaugagccuguccgagcagcuccggaagcagauccgcagcgccgccaagaagaacaaccugcccuucaagcugaccugcgccaccacgcgccagguggucaacguggugaccaccaagaucgcccucaagggcgggugaggacuaguuauaagacugacuagcccgaugggccucccaacgggcccuccuccccuccuugcaccgagauuaauaaaaaaaaaaaaaaaaaaaaaaaaaaaaaaaaaaaaaaaaaaaaaaaaaaaaaaaaaaaaaaaaugcaucccccccccccccccccccccccccccccccaaaggcucuuuucagagccaccagaauu

SEQ ID NO: 21872 - RNA, 6058 nt, Artificial Sequence
  SARS-CoV-2__MT609593.1__non-structural protein 3 (NSP3) mRNA gc
aggagaaagcuuaccauggcccccaccaaggugaccuucggcgacgacacggucaucgaggugcagggguacaagagcgugaacaucaccuucgagcuggacgagcgcaucgacaagguccucaacgagaagugcuccgccuacaccguggagcugggcaccgaggugaacgaguucgcgugcgucguggccgacgccgugaucaagacgcugcagccggucagcgagcuccugaccccccuggggaucgaccucgacgagugguccauggccaccuacuaccuguucgacgagagcggcgaguucaagcuggccucccacauguacugcagcuucuacccccccgacgaggacgaggaggagggggacugcgaggaggaggaguucgagccguccacccaguacgaguacggcacggaggacgacuaccagggcaagccccucgaguucggggcgaccagcgccgcccugcagcccgaggaggagcaggaggaggacuggcuggacgacgacucccagcagaccgugggccagcaggacgggagcgaggacaaccagaccacgaccauccagaccaucguggagguccagccccagcucgagauggagcugaccccgguggugcagacgaucgaggucaacuccuucagcggcuaccugaagcucaccgacaacguguacaucaagaacgccgacaucguggaggaggcgaagaaggucaagcccaccgugguggucaacgccgccaacguguaccugaagcacgggggcggcguggccggggcccugaacaaggcgaccaacaacacgaugcaggucgaguccgacgacuacaucgccaccaacggcccccucaagguggggggcagcugcguccuguccggccacaaccuggccaagcacugccuccacgugguggggcccaacgucaacaagggcgaggacauccagcugcugaagagcgccuacgagaacuucaaccagcacgaggugcuccuggccccgcugcucuccgcggggaucuucggcgccgaccccauccacagccugcgggugugcgucgacaccgugcgcaccaacguguaccuggccgucuucgacaagaaccucuacgacaagcugguguccagcuuccuggagaugaagagcgagaagcagguggagcagaagaucgccgagauccccaaggaggaggucaagcccuucaucacggaguccaagccgagcguggagcagcggaagcaggacgacaagaagaucaaggccugcguggaggaggucaccaccacccucgaggagacgaaguuccugaccgagaaccugcuccuguacaucgacaucaacgggaaccugcaccccgacuccgcgacccucgugagcgacaucgacaucaccuuccugaagaaggacgcccccuacaucgugggcgacgucgugcaggagggcgugcugacggccgucgugauccccaccaagaaggccgggggcaccaccgagaugcucgccaaggcgcugcgcaaggugccgacggacaacuacaucaccaccuaccccgggcagggccugaacggguacaccgucgaggaggccaagaccgugcucaagaagugcaaguccgccuucuacauccugcccagcaucaucuccaacgagaagcaggagauccugggcacggugagcuggaaccuccgggagaugcuggcccacgcggaggagacccgcaagcugaugcccgucugcguggagaccaaggccaucguguccaccauccagcggaaguacaagggcaucaagauccaggagggggucguggacuacggcgcccgcuucuacuucuacacgagcaagaccaccguggccucccugaucaacacccucaacgaccugaacgagacgcuggucaccaugccgcucggguacgugacccacggccugaaccuggaggaggccgcgcgguacaugcgcagccucaaggugcccgccaccgucuccgugagcucccccgacgccgugacggccuacaacggguaccugaccagcuccagcaagacccccgaggagcacuucaucgagaccaucucccuggccggcagcuacaaggacuggagcuacuccggccagagcacgcagcucgggaucgaguuccugaagcggggcgacaaguccgucuacuacaccagcaacccgaccaccuuccaccuggacggggaggugaucacguucgacaaccucaagacccugcugucccuccgcgaggugcggaccaucaaggucuucaccacgguggacaacaucaaccugcacacccagguggucgacaugagcaugaccuacggccagcaguucggccccaccuaccuggacggggcggacgugacgaagaucaagccccacaacucccacgagggcaagaccuucuacgugcucccgaacgacgacacccugcgcgucgaggccuucgaguacuaccacaccacggaccccagcuuccuggggcgguacauguccgcccucaaccacaccaagaaguggaaguacccccaggugaacggccugaccagcaucaagugggccgacaacaacugcuaccuggccaccgcgcuccugacgcugcagcagaucgagcucaaguucaaccccccggcccugcaggacgccuacuaccgcgcccgggcgggggaggccgccaacuucugcgcccugauccucgccuacugcaacaagaccgugggcgagcugggcgacguccgcgagaccauguccuaccuguuccagcacgcgaaccucgacagcugcaagcgggugcugaacgucgugugcaagaccugcgggcagcagcagaccacgcugaagggcguggaggccgucauguacauggggacccucuccuacgagcaguucaagaagggcgugcagauccccugcaccugcgggaagcaggccaccaaguaccuggugcagcaggagagccccuucgucaugauguccgcccccccggcccaguacgagcugaagcacggcacguucaccugcgcgagcgaguacaccggcaacuaccagugcgggcacuacaagcacaucaccuccaaggagacgcucuacugcaucgacggcgcccugcugaccaagagcagcgaguacaaggggcccaucaccgacguguucuacaaggagaacuccuacaccacgaccaucaagcccgugaccuacaagcucgacggcgucgugugcaccgagaucgaccccaagcuggacaacuacuacaagaaggacaacagcuacuucacggagcagccgaucgaccuggugcccaaccagcccuaccccaacgccuccuucgacaacuucaaguucgucugcgacaacaucaaguucgccgacgaccucaaccagcugaccggguacaagaagccggccagccgcgagcugaaggugaccuucuuccccgaccucaacggcgacguggucgcgaucgacuacaagcacuacacccccuccuucaagaagggcgccaagcugcugcacaagcccaucguguggcacgugaacaacgccacgaacaaggccaccuacaagccgaacaccuggugcauccggugccucuggagcaccaagcccgucgagacguccaacagcuucgacgugcugaaguccgaggacgcgcaggggauggacaaccuggccugcgaggaccucaagcccgugagcgaggaggucguggagaaccccaccauccagaaggacgugcuggagugcaacgucaagaccaccgagguggugggcgacaucauccugaagccggccaacaacucccucaagaucacggaggaggucgggcacaccgaccugauggccgccuacguggacaacagcucccugaccaucaagaagcccaacgagcucagccgcgugcugggccugaagacccucgcgacgcacgggcuggccgccgucaacuccgugcccugggacaccaucgccaacuacgccaagccguuccugaacaagguggucagcaccaccacgaacaucgugacccgcugccucaaccgggugugcaccaacuacaugcccuacuucuucacccugcugcuccagcugugcaccuucacgcgcuccaccaacagccggaucaaggcguccaugcccaccaccaucgccaagaacacggucaagagcgugggcaaguucugccuggaggccagcuucaacuaccucaagucccccaacuucagcaagcugaucaacaucaucaucugguuccugcuccuguccgugugccugggcagccucaucuacuccaccgccgcccuggggguccugaugagcaaccucggcaugccguccuacugcaccggguaccgcgagggcuaccugaacagcaccaacgugacgaucgcgaccuacugcaccggcuccauccccugcagcgugugccuguccgggcucgacagccuggacaccuaccccucccuggagacgauccagaucaccaucagcuccuucaagugggaccucaccgccuucggccuggucgccgagugguuccuggccuacauccucuucacccgguucuucuacgugcuggggcuggccgcgaucaugcagcucuucuucagcuacuucgccgugcacuucaucuccaacagcuggcugauguggcugaucaucaaccugguccagauggcccccaucuccgccauggugcgcauguacaucuucuucgcgagcuucuacuacguguggaagagcuacguccacgugguggacggcugcaacuccagcacgugcaugaugugcuacaagcggaaccgcgccacccgggucgagugcaccaccaucgugaacgggguccgccgguccuucuacguguacgccaacggcggcaagggguucugcaagcuccacaacuggaacugcgugaacugcgacacguucugcgccggcagcaccuucaucuccgacgaggucgcccgcgaccugagccugcaguucaagcggccgaucaaccccaccgaccaguccagcuacaucguggacuccgugaccgucaagaacgggagcauccaccucuacuucgacaaggcgggccagaagacguacgagcgccacucccugagccacuucgugaaccuggacaaccuccgggccaacaacaccaaggggucccugcccaucaacgugaucgucuucgacggcaagagcaagugcgaggaguccagcgccaaguccgccagcguguacuacucccagcugaugugccagcccauccuccugcuggaccaggcccucgugagcgacgucggcgacagcgcggagguggccgugaagauguucgacgccuacgucaacaccuucuccagcaccuucaacgugccgauggagaagcugaagacgcugguggccaccgccgaggcggagcucgccaagaacgucucccuggacaacgugcugagcaccuucaucuccgccgcccgccagggguucguggacagcgacgucgagaccaaggacgugguggagugccucaagcugucccaccagagcgacaucgaggucacgggcgacuccugcaacaacuacaugcugaccuacaacaagguggagaacaugaccccccgggaccucggggcgugcaucgacugcagcgcccgccacaucaacgcccagguggccaagucccacaacaucgcccugaucuggaacgucaaggacuucaugagccuguccgagcagcuccggaagcagauccgcagcgcggccaagaagaacaaccugcccuucaagcugaccugcgccacgacccgccagguggugaacgucgugaccaccaagaucgcccucaagggcgggugaggacuaguuauaagacugacuagcccgaugggccucccaacgggcccuccuccccuccuugcaccgagauuaauaaaaaaaaaaaaaaaaaaaaaaaaaaaaaaaaaaaaaaaaaaaaaaaaaaaaaaaaaaaaaaaaugcaucccccccccccccccccccccccccccccccaaaggcucuuuucagagccaccagaauu

SEQ ID NO: 21873 - RNA, 6058 nt, Artificial Sequence
  SARS-CoV-2__MT609599.1__non-structural protein 3 (NSP3) mRNA gc
aggagaaagcuuaccauggcccccaccaaggugaccuucggcgacgacacggucaucgaggugcagggguacaagagcgugaacaucaccuucgagcuggacgagcgcaucgacaagguccucaacgagaagugcuccgccuacaccguggagcugggcaccgaggugaacgaguucgcgugcgucguggccgacgccgugaucaagacgcugcagccggucagcgagcuccugaccccccuggggaucgaccucgacgagugguccauggccaccuacuaccuguucgacgagagcggcgaguucaagcuggccucccacauguacugcagcuucuacccccccgacgaggacgaggaggagggggacugcgaggaggaggaguucgagccguccacccaguacgaguacggcacggaggacgacuaccagggcaagccccucgaguucggggcgaccagcgccgcccugcagcccgaggaggagcaggaggaggacuggcuggacgacgacucccagcagaccgugggccagcaggacgggagcgaggacaaccagaccacgaccauccagaccaucguggagguccagccccagcucgagauggagcugaccccgguggugcagacgaucgaggucaacuccuucagcggcuaccugaagcucaccgacaacguguacaucaagaacgccgacaucguggaggaggcgaagaaggucaagcccaccgugguggucaacgccgccaacguguaccugaagcacgggggcggcguggccggggcccugaacaaggcgaccaacaacgccaugcaggucgaguccgacgacuacaucgccacgaacggcccccucaagguggggggcagcugcguccuguccggccacaaccuggccaagcacugccuccacgugguggggcccaacgucaacaagggcgaggacauccagcugcugaagagcgccuacgagaacuucaaccagcacgaggugcuccuggcgccgcugcucuccgccgggaucuucggcgccgaccccauccacagccugcgggugugcgucgacaccgugcgcaccaacguguaccuggccgucuucgacaagaaccucuacgacaagcugguguccagcuuccuggagaugaagagcgagaagcagguggagcagaagaucgccgagauccccaaggaggaggucaagcccuucaucaccgaguccaagccgagcguggagcagcggaagcaggacgacaagaagaucaaggcgugcguggaggaggucacgaccacccucgaggagaccaaguuccugacggagaaccugcuccuguacaucgacaucaacgggaaccugcaccccgacuccgccacccucgugagcgacaucgacaucaccuuccugaagaaggacgcccccuacaucgugggcgacgucgugcaggagggcgugcugaccgccgucgugauccccacgaagaaggccgggggcaccaccgagaugcucgcgaaggcccugcgcaaggugccgaccgacaacuacaucacgaccuaccccgggcagggccugaacggguacaccgucgaggaggccaagaccgugcucaagaagugcaaguccgccuucuacauccugcccagcaucaucuccaacgagaagcaggagauccugggcaccgugagcuggaaccuccgggagaugcuggcgcacgccgaggagacgcgcaagcugaugcccgucugcguggagaccaaggccaucguguccaccauccagcggaaguacaagggcaucaagauccaggagggggucguggacuacggcgcccgcuucuacuucuacaccagcaagacgaccguggccucccugaucaacacccucaacgaccugaacgagacccuggucacgaugccgcucggguacgugacccacggccugaaccuggaggaggcggcccgguacaugcgcagccucaaggugcccgccaccgucuccgugagcucccccgacgccgugaccgccuacaacggguaccugacgagcuccagcaagacccccgaggagcacuucaucgagaccaucucccuggcgggcagcuacaaggacuggagcuacuccggccagagcacccagcucgggaucgaguuccugaagcggggcgacaaguccgucuacuacacgagcaacccgaccaccuuccaccuggacggggaggugaucaccuucgacaaccucaagacgcugcugucccuccgcgaggugcggaccaucaaggucuucaccaccguggacaacaucaaccugcacacgcagguggucgacaugagcaugaccuacggccagcaguucggccccaccuaccuggacggggccgacgugaccaagaucaagccccacaacucccacgagggcaagacguucuacgugcucccgaacgacgacacccugcgcgucgaggccuucgaguacuaccacaccaccgaccccagcuuccuggggcgguacauguccgcccucaaccacacgaagaaguggaaguacccccaggugaacggccugaccagcaucaagugggccgacaacaacugcuaccuggcgaccgcccuccugacccugcagcagaucgagcucaaguucaaccccccggcccugcaggacgccuacuaccgcgcgcgggccggggaggccgccaacuucugcgcccugauccucgcguacugcaacaagacggugggcgagcugggcgacguccgcgagaccauguccuaccuguuccagcacgccaaccucgacagcugcaagcgggugcugaacgucgugugcaagaccugcgggcagcagcagaccacccugaagggcguggaggccgucauguacauggggacgcucuccuacgagcaguucaagaagggcgugcagauccccugcaccugcgggaagcaggccaccaaguaccuggugcagcaggagagccccuucgucaugauguccgcccccccggcgcaguacgagcugaagcacggcaccuucacgugcgccagcgaguacaccggcaacuaccagugcgggcacuacaagcacaucaccuccaaggagacccucuacugcaucgacggcgcccugcugacgaagagcagcgaguacaaggggcccaucaccgacguguucuacaaggagaacuccuacaccaccacgaucaagcccgugaccuacaagcucgacggcgucgugugcaccgagaucgaccccaagcuggacaacuacuacaagaaggacaacagcuacuucaccgagcagccgaucgaccuggugcccaaccagcccuaccccaacgccuccuucgacaacuucaaguucgucugcgacaacaucaaguucgccgacgaccucaaccagcugacgggguacaagaagccggcgagccgcgagcugaaggugaccuucuuccccgaccucaacggcgacguggucgccaucgacuacaagcacuacacccccuccuucaagaagggcgccaagcugcugcacaagcccaucguguggcacgugaacaacgccaccaacaaggcgacguacaagccgaacaccuggugcauccggugccucuggagcaccaagcccgucgagaccuccaacagcuucgacgugcugaaguccgaggacgcccaggggauggacaaccuggccugcgaggaccucaagcccgugagcgaggaggucguggagaaccccacgauccagaaggacgugcuggagugcaacgucaagaccaccgagguggugggcgacaucauccugaagccggccaacaacauccucaagaucaccgaggaggucgggcacacggaccugauggccgcguacguggacaacuccagccugaccaucaagaagcccaacgagcucucccgcgugcugggccugaagacccucgccacccacgggcuggccgccgucaacagcgugcccugggacacgaucgccaacuacgcgaagccguuccugaacaagguggucuccaccaccaccaacaucgugacgcgcugccucaaccgggugugcaccaacuacaugcccuacuucuucacccugcugcuccagcugugcaccuucacccgcagcacgaacucccggaucaaggccagcaugcccaccaccaucgccaagaacaccgucaaguccgugggcaaguucugccuggaggccagcuucaacuaccucaagagccccaacuucuccaagcugaucaacaucaucaucugguuccugcuccugagcgugugccugggcucccucaucuacagcacggccgcgcuggggguccugauguccaaccucggcaugccgagcuacugcaccggguaccgcgagggcuaccugaacuccaccaacgugaccaucgccacguacugcaccggcagcauccccugcuccgugugccugagcgggcucgacucccuggacaccuaccccagccuggagaccauccagaucacgaucuccagcuucaagugggaccucaccgccuucggccuggucgccgagugguuccuggccuacauccucuucacccgguucuucuacgugcuggggcuggcggccaucaugcagcucuucuucuccuacuucgccgugcacuucaucagcaacuccuggcugauguggcugaucaucaaccugguccagauggcccccaucagcgcgauggugcgcauguacaucuucuucgccuccuucuacuacguguggaagagcuacguccacgugguggacggcugcaacagcuccaccugcaugaugugcuacaagcggaaccgcgccacgcgggucgagugcaccaccaucgugaacgggguccgccggagcuucuacguguacgccaacggcggcaagggguucugcaagcuccacaacuggaacugcgugaacugcgacaccuucugcgccggcuccacguucaucagcgacgaggucgcgcgcgaccugucccugcaguucaagcggccgaucaaccccaccgaccagagcuccuacaucguggacagcgugaccgucaagaacggguccauccaccucuacuucgacaaggccggccagaagaccuacgagcgccacagccugucccacuucgugaaccuggacaaccuccgggccaacaacacgaaggggagccugcccaucaacgugaucgucuucgacggcaaguccaagugcgaggagagcuccgccaagagcgccuccguguacuacagccagcugaugugccagcccauccuccugcuggaccaggcgcucguguccgacgucggcgacagcgccgagguggccgugaagauguucgacgccuacgucaacaccuucagcuccaccuucaacgugccgauggagaagcugaagacccugguggccacggcggaggccgagcucgccaagaacgucagccuggacaacgugcuguccaccuucaucagcgccgcgcgccagggguucguggacuccgacgucgagaccaaggacgugguggagugccucaagcugagccaccaguccgacaucgaggucaccggcgacagcugcaacaacuacaugcugacguacaacaagguggagaacaugaccccccgggaccucggggccugcaucgacugcuccgcccgccacaucaacgcccagguggccaagagccacaacaucgcgcugaucuggaacgucaaggacuucaugucccugagcgagcagcuccggaagcagauccgcuccgccgccaagaagaacaaccugcccuucaagcugaccugcgccaccacgcgccagguggugaacgucgugaccaccaagaucgcccucaagggcgggugaggacuaguuauaagacugacuagcccgaugggccucccaacgggcccuccuccccuccuugcaccgagauuaauaaaaaaaaaaaaaaaaaaaaaaaaaaaaaaaaaaaaaaaaaaaaaaaaaaaaaaaaaaaaaaaaugcaucccccccccccccccccccccccccccccccaaaggcucuuuucagagccaccagaauu

SEQ ID NO: 21874 - RNA, 6058 nt, Artificial Sequence
  SARS-CoV-2__MT612115.1__non-structural protein 3 (NSP3) mRNA gc
aggagaaagcuuaccauggcccccaccaaggugaccuucggcgacgacacggucaucgaggugcagggguacaagagcgugaacaucaccuucgagcuggacgagcgcaucgacaagguccucaacgagaagugcuccgccuacaccguggagcugggcaccgaggugaacgaguucgcgugcgucguggccgacgccgugaucaagacgcugcagccggucagcgagcuccugaccccccuggggaucgaccucgacgagugguccauggccaccuacuaccuguucgacgagagcggcgaguucaagcuggccucccacauguacugcagcuucuacccccccgacgaggacgaggaggagggggacugcgaggaggaggaguucgagccguccacccaguacgaguacggcacggaggacgacuaccagggcaagccccucgaguucggggcgaccagcgccgcccugcagcccgaggaggagcaggaggaggacuggcuggacgacgacucccagcagaccgugggccagcaggacgggagcgaggacaaccagaccaucacgauccagaccaucguggagguccagccccagcucgagauggagcugaccccgguggugcagaccaucgaggucaacuccuucagcggcuaccugaagcucacggacaacguguacaucaagaacgccgacaucguggaggaggcgaagaaggucaagcccaccgugguggucaacgccgccaacguguaccugaagcacgggggcggcguggccggggcccugaacaaggcgaccaacaacgccaugcaggucgaguccgacgacuacaucgccaccaacggcccccucaagguggggggcagcugcguccuguccggccacaaccuggccaagcacugccuccacgugguggggcccaacgucaacaagggcgaggacauccagcugcugaagagcgccuacgagaacuucaaccagcacgaggugcuccuggcgccgcugcucuccgccgggaucuucggcgccgaccccauccacagccugcgggugugcgucgacacggugcgcaccaacguguaccuggccgucuucgacaagaaccucuacgacaagcugguguccagcuuccuggagaugaagagcgagaagcagguggagcagaagaucgccgagauccccaaggaggaggucaagcccuucaucaccgaguccaagccgagcguggagcagcggaagcaggacgacaagaagaucaaggcgugcguggaggaggucaccacgacccucgaggagaucaaguuccugaccgagaaccugcuccuguacaucgacaucaacgggaaccugcaccccgacuccgccacccucgugagcgacaucgacaucacguuccugaagaaggacgcccccuacaucgugggcgacgucgugcaggagggcgugcugaccgccgucgugauccccaccaagaaggccgggggcaccacggagaugcucgcgaaggcccugcgcaaggugccgaccgacaacuacaucaccaccuaccccgggcagggccugaacggguacacggucgaggaggccaagaccgugcucaagaagugcaaguccgccuucuacauccugcccagcaucaucuccaacgagaagcaggagauccugggcaccgugagcuggaaccuccgggagaugcuggcgcacgccgaggagacccgcaagcugaugcccgucugcguggagaccaaggccaucguguccacgauccagcggaaguacaagggcaucaagauccaggagggggucguggacuacggcgcccgcuucuacuucuacaccagcaagaccaccguggccucccugaucaacacgcucaacgaccugaacgagacccuggucaccaugccgcucggguacgugacccacggccugaaccuggaggaggcggcccgguacaugcgcagccucaaggugcccgccacggucuccgugagcucccccgacgccgugaccgccuacaacggguaccugaccagcuccagcaagacccccgaggagcacuucaucgagacgaucucccuggcgggcagcuacaaggacuggagcuacuccggccagagcacccagcucgggaucgaguuccugaagcggggcgacaaguccgucuacuacaccagcaacccgaccacguuccaccuggacggggaggugaucaccuucgacaaccucaagacccugcugucccuccgcgaggugcggaccaucaaggucuucacgaccguggacaacaucaaccugcacacccagguggucgacaugagcaugaccuacggccagcaguucggccccacguaccuggacggggccgacgugaccaagaucaagccccacaacucccacgagggcaagaccuucuacgugcucccgaacgacgacacccugcgcgucgaggccuucgaguacuaccacacgaccgaccccagcuuccuggggcgguacauguccgcccucaaccacaccaagaaguggaaguacccccaggugaacggccugaccagcaucaagugggccgacaacaacugcuaccuggcgacggcccuccugacccugcagcagaucgagcucaaguucaaccccccggcccugcaggacgccuacuaccgcgcgcgggccggggaggccgccaacuucugcgcccugauccucgcguacugcaacaagaccgugggcgagcugggcgacguccgcgagaccauguccuaccuguuccagcacgccaaccucgacagcugcaagcgggugcugaacgucgugugcaagacgugcgggcagcagcagaccacccugaagggcguggaggccgucauguacauggggacccucuccuacgagcaguucaagaagggcgugcagauccccugcaccugcgggaagcaggccacgaaguaccuggugcagcaggagagccccuucgucaugauguccgcccccccggcgcaguacgagcugaagcacggcaccuucaccugcgccagcgaguacaccggcaacuaccagugcgggcacuacaagcacaucacguccaaggagacccucuacugcaucgacggcgcccugcugaccaagagcagcgaguacaaggggcccaucaccgacguguucuacaaggagaacuccuacacgaccaccaucaagcccgugaccuacaagcucgacggcgucgugugcacggagaucgaccccaagcuggacaacuacuacaagaaggacaacagcuacuucaccgagcagccgaucgaccuggugcccaaccagcccuaccccaacgccuccuucgacaacuucaaguucgucugcgacaacaucaaguucgccgacgaccucaaccagcugaccggguacaagaagccggcgagccgcgagcugaaggugaccuucuuccccgaccucaacggcgacguggucgccaucgacuacaagcacuacacgcccuccuucaagaagggcgccaagcugcugcacaagcccaucguguggcacgugaacaacgccaccaacaaggcgaccuacaagccgaacaccuggugcauccggugccucuggagcacgaagcccgucgagaccuccaacagcuucgacgugcugaaguccgaggacgcccaggggauggacaaccuggccugcgaggaccucaagcccgugagcgaggaggucguggagaaccccaccauccagaaggacgugcuggagugcaacgucaagaccacggagguggugggcgacaucauccugaagccggccaacaacucccucaagaucaccgaggaggucgggcacaccgaccugauggccgcguacguggacaacagcucccugaccaucaagaagcccaacgagcucagccgcgugcugggccugaagacgcucgccacccacgggcuggccgccgucaacuccgugcccugggacaccaucgccaacuacgcgaagccguuccugaacaagguggucagcaccacgaccaacaucgugacccgcugccucaaccgggugugcaccaacuacaugcccuacuucuucacgcugcugcuccagcugugcaccuucacccgcuccaccaacagccggaucaaggccuccaugcccaccacgaucgccaagaacaccgucaagagcgugggcaaguucugccuggaggccagcuucaacuaccucaagucccccaacuucagcaagcugaucaacaucaucaucugguuccugcuccuguccgugugccugggcagccucaucuacuccaccgccgcgcuggggguccugaugagcaaccucggcaugccguccuacugcaccggguaccgcgagggcuaccugaacagcacgaacgugaccaucgccaccuacugcaccggcuccauccccugcagcgugugccuguccgggcucgacagccuggacacguaccccucccuggagaccauccagaucaccaucagcuccuucaagugggaccucaccgccuucggccuggucgccgagugguuccuggccuacauccucuucacgcgguucuucuacgugcuggggcuggcggccaucaugcagcucuucuucagcuacuucgccgugcacuucaucuccaacagcuggcugauguggcugaucaucaaccugguccagauggcccccaucuccgcgauggugcgcauguacaucuucuucgccagcuucuacuacguguggaagagcuacguccacgugguggacggcugcaacuccagcaccugcaugaugugcuacaagcggaaccgcgccacccgggucgagugcaccacgaucgugaacgggguccgccgguccuucuacguguacgccaacggcggcaagggguucugcaagcuccacaacuggaacugcgugaacugcgacaccuucugcgccggcagcaccuucaucuccgacgaggucgcgcgcgaccugagccugcaguucaagcggccgaucaaccccaccgaccaguccagcuacaucguggacuccgugacggucaagaacgggagcauccaccucuacuucgacaaggccggccagaagaccuacgagcgccacucccugagccacuucgugaaccuggacaaccuccgggccaacaacaccaaggggucccugcccaucaacgugaucgucuucgacggcaagagcaagugcgaggaguccagcgccaaguccgccagcguguacuacucccagcugaugugccagcccauccuccugcuggaccaggcgcucgugagcgacgucggcgacagcgccgagguggccgugaagauguucgacgccuacgucaacaccuucuccagcacguucaacgugccgauggagaagcugaagacccugguggccaccgcggaggccgagcucgccaagaacgucucccuggacaacgugcugagcaccuucaucuccgccgcgcgccagggguucguggacagcgacgucgagacgaaggacgugguggagugccucaagcugucccaccagagcgacaucgaggucaccggcgacuccugcaacaacuacaugcugaccuacaacaagguggagaacaugaccccccgggaccucggggccugcaucgacugcagcgcccgccacaucaacgcccagguggccaagucccacaacaucgcgcugaucuggaacgucaaggacuucaugagccuguccgagcagcuccggaagcagauccgcagcgccgccaagaagaacaaccugcccuucaagcugacgugcgccaccacccgccagguggugaacgucgugaccacgaagaucgcccucaagggcgggugaggacuaguuauaagacugacuagcccgaugggccucccaacgggcccuccuccccuccuugcaccgagauuaauaaaaaaaaaaaaaaaaaaaaaaaaaaaaaaaaaaaaaaaaaaaaaaaaaaaaaaaaaaaaaaaaugcaucccccccccccccccccccccccccccccccaaaggcucuuuucagagccaccagaauu

SEQ ID NO: 21875 - RNA, 6058 nt, Artificial Sequence
  SARS-CoV-2__MT601281.1__non-structural protein 3 (NSP3) mRNA gc
aggagaaagcuuaccauggcccccaccaaggugaccuucggcgacgacacggucaucgaggugcagggguacaagagcgugaacaucaccuucgagcuggacgagcgcaucgacaagguccucaacgagaagugcuccgccuacaccguggagcugggcaccgaggugaacgaguucgcgugcgucguggccgacgccgugaucaagacgcugcagccggucagcgagcuccugaccccccuggggaucgaccucgacgagugguccauggccaccuacuaccuguucgacgagagcggcgaguucaagcuggccucccacauguacugcagcuucuacccccccgacgaggacgaggaggagggggacugcgaggaggaggaguucgagccguccacccaguacgaguacggcacggaggacgacuaccagggcaagccccucgaguucggggcgaccagcgccgcccugcagcccgaggaggagcaggaggaggacuggcuggacgacgacucccagcagaccgugggccagcaggacgggagcgaggacaaccagaccacgaccauccagaccaucguggagguccagccccagcucgagauggagcugaccccgguggugcagacgaucgaggucaacuccuucagcggcuaccugaagcucaccgacaacguguacaucaagaacgccgacaucguggaggaggcgaagaaggucaagcccaccgugguggucaacgccgccaacguguaccugaagcacgggggcggcguggccggggcccugaacaaggcgaccaacaacgccaugcaggucgaguccgacgacuacaucgccacgaacggcccccucaagguggggggcagcugcguccuguccggccacaaccuggccaagcacugccuccacgugguggggcccaacgucaacaagggcgaggacauccagcugcugaagagcgccuacgagaacuucaaccagcacgaggugcuccuggcgccgcugcucuccgccgggaucuucggcgccgaccccauccacagccugcgggugugcgucgacaccgugcgcaccaacguguaccuggccgucuucgacaagaaccucuacgacaagcugguguccagcuuccuggagaugaagagcgagaagcagguggagcagaagaucgccgagauccccaaggaggaggucaagcccuucaucaccgaguccaagccgagcguggagcagcggaagcaggacgacaagaagaucaaggcgugcguggaggaggucacgaccacccucgaggagaccaaguuccugacggagaaccugcuccuguacaucgacaucaacgggaaccugcaccccgacuccgccacccucgugagcgacaucgacaucaccuuccugaagaaggacgcccccuacaucgugggcgacgucgugcaggagggcgugcugaccgccgucgugauccccacgaagaaggccgggggcaccaccgagaugcucgcgaaggcccugcgcaaggugccgaccgacaacuacaucacgaccuaccccgggcagggccugaacggguacaccgucgaggaggccaagaccgugcucaagaagugcaaguccgccuucuacauccugcccagcaucaucuccaacgagaagcaggagauccugggcaccgugagcuggaaccuccgggagaugcuggcgcacgccgaggagacgcgcaagcugaugcccgucugcguggagaccaaggccaucguguccaccauccagcggaaguacaagggcaucaagauccaggagggggucguggacuacggcagccgcuucuacuucuacaccuccaagacgaccguggccagccugaucaacacccucaacgaccugaacgagacccuggucacgaugccgcucggguacgugacccacggccugaaccuggaggaggccgcgcgguacaugcgcucccucaaggugcccgccaccgucagcguguccagccccgacgccgugaccgccuacaacggguaccugacguccagcuccaagacccccgaggagcacuucaucgagaccaucagccuggccggcagcuacaaggacugguccuacagcggccaguccacccagcucgggaucgaguuccugaagcggggcgacaagagcgucuacuacacguccaacccgaccaccuuccaccuggacggggaggugaucaccuucgacaaccucaagacgcugcugagccuccgcgaggugcggaccaucaaggucuucaccaccguggacaacaucaaccugcacacgcagguggucgacauguccaugaccuacggccagcaguucggccccaccuaccuggacggggcggacgugaccaagaucaagccccacaacagccacgagggcaagacguucuacgugcucccgaacgacgacacccugcgcgucgaggccuucgaguacuaccacaccaccgaccccuccuuccuggggcgguacaugagcgcccucaaccacacgaagaaguggaaguacccccaggugaacggccugaccuccaucaagugggccgacaacaacugcuaccuggccaccgcgcuccugacccugcagcagaucgagcucaaguucaaccccccggcccugcaggacgccuacuaccgcgcccgggcgggggaggccgccaacuucugcgcccugauccucgccuacugcaacaagacggugggcgagcugggcgacguccgcgagaccaugagcuaccuguuccagcacgcgaaccucgacuccugcaagcgggugcugaacgucgugugcaagaccugcgggcagcagcagaccacccugaagggcguggaggccgucauguacauggggacgcucagcuacgagcaguucaagaagggcgugcagauccccugcaccugcgggaagcaggccaccaaguaccuggugcagcaggagucccccuucgucaugaugagcgcccccccggcccaguacgagcugaagcacggcaccuucacgugcgcguccgaguacaccggcaacuaccagugcgggcacuacaagcacaucaccagcaaggagacccucuacugcaucgacggcgcccugcugacgaagagcuccgaguacaaggggcccaucaccgacguguucuacaaggagaacagcuacaccaccacgaucaagcccgugaccuacaagcucgacggcgucgugugcaccgagaucgaccccaagcuggacaacuacuacaagaaggacaacuccuacuucaccgagcagccgaucgaccuggugcccaaccagcccuaccccaacgccagcuucgacaacuucaaguucgucugcgacaacaucaaguucgccgacgaccucaaccagcugacgggguacaagaagccggccucccgcgagcugaaggugaccuucuuccccgaccucaacggcgacguggucgcgaucgacuacaagcacuacacccccagcuucaagaagggcgccaagcugcugcacaagcccaucguguggcacgugaacaacgccaccaacaaggccacguacaagccgaacaccuggugcauccggugccucugguccaccaagcccgucgagaccagcaacuccuucgacgugcugaagagcgaggacgcgcaggggauggacaaccuggccugcgaggaccucaagcccguguccgaggaggucguggagaaccccacgauccagaaggacgugcuggagugcaacgucaagaccaccgagguggugggcgacaucauccugaagccggccaacaacagccucaagaucaccgaggaggucgggcacacggaccugauggccgccuacguggacaacuccagccugaccaucaagaagcccaacgagcucucccgcgugcugggccugaagacccucgcgacccacgggcuggccgccgucaacagcgugcccugggacacgaucgccaacuacgccaagccguuccugaacaagguggucuccaccaccaccaacaucgugacgcgcugccucaaccgggugugcaccaacuacaugcccuacuucuucacccugcugcuccagcugugcaccuucacccgcagcacgaacucccggaucaaggcgagcaugcccaccaccaucgccaagaacaccgucaagagcgugggcaaguucugccuggaggccuccuucaacuaccucaagagccccaacuucuccaagcugaucaacaucaucaucugguuccugcuccugagcgugugccugggcucccucaucuacagcacggccgcccuggggguccugauguccaaccucggcaugccgagcuacugcaccggguaccgcgagggcuaccugaacuccaccaacgugaccaucgcgacguacugcaccggcagcauccccugcuccgugugccugagcgggcucgacucccuggacaccuaccccagccuggagaccauccagaucacgaucuccagcuucaagugggaccucaccgccuucggccuggucgccgagugguuccuggccuacauccucuucacccgguucuucuacgugcuggggcuggccgcgaucaugcagcucuucuucuccuacuucgccgugcacuucaucagcaacuccuggcugauguggcugaucaucaaccugguccagauggcccccaucagcgccauggugcgcauguacaucuucuucgcgagcuucuacuacguguggaaguccuacguccacgugguggacggcugcaacagcuccaccugcaugaugugcuacaagcggaaccgcgccacgcgggucgagugcaccaccaucgugaacgggguccgccggagcuucuacguguacgccaacggcggcaagggguucugcaagcuccacaacuggaacugcgugaacugcgacaccuucugcgccggcuccacguucaucagcgacgaggucgcccgcgaccugucccugcaguucaagcggccgaucaaccccaccgaccagagcuccuacaucguggacagcgugaccgucaagaacggguccauccaccucuacuucgacaaggcgggccagaagaccuacgagcgccacagccugucccacuucgugaaccuggacaaccuccgggccaacaacacgaaggggagccugcccaucaacgugaucgucuucgacggcaaguccaagugcgaggagagcuccgccaagagcgccuccguguacuacagccagcugaugugccagcccauccuccugcuggaccaggcccucgugagcgacgucggcgacuccgcggagguggccgugaagauguucgacgccuacgucaacaccuucagcuccaccuucaacgugccgauggagaagcugaagacccugguggccacggccgaggcggagcucgccaagaacgucagccuggacaacgugcuguccaccuucaucagcgccgcccgccagggguucguggacuccgacgucgagaccaaggacgugguggagugccucaagcugagccaccaguccgacaucgaggucaccggcgacagcugcaacaacuacaugcugacguacaacaagguggagaacaugaccccccgggaccucggggcgugcaucgacugcuccgcccgccacaucaacgcccagguggccaagagccacaacaucgcccugaucuggaacgucaaggacuucaugucccugagcgagcagcuccggaagcagauccgcuccgcggccaagaagaacaaccugcccuucaagcugaccugcgccaccacgcgccagguggugaacgucgugaccaccaagaucgcccucaagggcgggugaggacuaguuauaagacugacuagcccgaugggccucccaacgggcccuccuccccuccuugcaccgagauuaauaaaaaaaaaaaaaaaaaaaaaaaaaaaaaaaaaaaaaaaaaaaaaaaaaaaaaaaaaaaaaaaaugcaucccccccccccccccccccccccccccccccaaaggcucuuuucagagccaccagaauu

SEQ ID NO: 21876 - RNA, 6058 nt, Artificial Sequence
  SARS-CoV-2__MT601291.1__non-structural protein 3 (NSP3) mRNA gc
aggagaaagcuuaccauggcccccaccaaggugaccuucggcgacgacacggucaucgaggugcagggguacaagagcgugaacaucaccuucgagcuggacgagcgcaucgacaagguccucaacgagaagugcuccgccuacaccguggagcugggcaccgaggugaacgaguucgcgugcgucguggccgacgccgugaucaagacgcugcagccggucagcgagcuccugaccccccuggggaucgaccucgacgagugguccauggccaccuacuaccuguucgacgagagcggcgaguucaagcuggccucccacauguacugcagcuucuacccccccgacgaggacgaggaggagggggacugcgaggaggaggaguucgagccguccacccaguacgaguacggcacggaggacgacuaccagggcaagccccucgaguucggggcgaccagcgccgcccugcagcccgaggaggagcaggaggaggacuggcuggacgacgacucccagcagaccgugggccagcaggacgggagcgaggacaaccagaccacgaccauccagaccaucguggagguccagccccagcucgagauggagcugaccccgguggugcagacgaucgaggucaacuccuucagcggcuaccugaagcucaccgacaacguguacaucaagaacgccgacaucguggaggaggcgaagaaggucaagcccaccgugguggucaacgccgccaacguguaccugaagcacgggggcggcguggccggggcccugaacaaggcgaccaacaacgccaugcaggucgaguccgacgacuacaucgccacgaacggcccccucaagguggggggcagcugcguccuguccggccacaaccuggccaagcacugccuccacgugguggggcccaacgucaacaagggcgaggacauccagcugcugaagagcgccuacgagaacuucaaccagcacgaggugcuccuggcgccgcugcucuccgccgggaucuucggcgccgaccccauccacagccugcgggugugcgucgacaccgugcgcaccaacguguaccuggccgucuucgacaagaaccucuacgacaagcugguguccagcuuccuggagaugaagagcgagaagcagguggagcagaagaucgccgagauccccaaggaggaggucaagcccuucaucaccgaguccaagccgagcguggagcagcggaagcaggacgacaagaagaucaaggcgugcguggaggaggucacgaccacccucgaggagaccaaguuccugacggagaaccugcuccuguacaucgacaucaacgggaaccugcacuccgacagcgccacccucguguccgacaucgacaucaccuuccugaagaaggacgcccccuacaucgugggcgacgucgugcaggagggcgugcugaccgccgucgugauccccacgaagaaggccgggggcaccaccgagaugcucgcgaaggcccugcgcaaggugcccaccgacaacuacaucacgaccuacccggggcagggccugaacggguacaccgucgaggaggccaagaccgugcucaagaagugcaagagcgccuucuacauccugcccuccaucaucagcaacgagaagcaggagauccugggcaccguguccuggaaccuccgggagaugcuggcgcacgccgaggagacgcgcaagcugaugcccgucugcguggagaccaaggccaucgugagcaccauccagcggaaguacaagggcaucaagauccaggagggggucguggacuacggcgcccgcuucuacuucuacaccuccaagacgaccguggccagccugaucaacacccucaacgaccugaacgagacccuggucacgaugccccucggguacgugacccacggccugaaccuggaggaggcggcccgguacaugcgcucccucaaggugccggccaccgucagcguguccagccccgacgccgugaccgccuacaacggguaccugacguccagcuccaagacccccgaggagcacuucaucgagaccaucagccuggcgggcagcuacaaggacugguccuacagcggccaguccacccagcucgggaucgaguuccugaagcggggcgacaagagcgucuacuacacguccaaccccaccaccuuccaccuggacggggaggugaucaccuucgacaaccucaagacgcugcugagccuccgcgaggugcggaccaucaaggucuucaccaccguggacaacaucaaccugcacacgcagguggucgacauguccaugaccuacggccagcaguucggcccgaccuaccuggacggggccgacgugaccaagaucaagccccacaacagccacgagggcaagacguucuacgugcuccccaacgacgacacccugcgcgucgaggccuucgaguacuaccacaccaccgacccguccuuccuggggcgguacaugagcgcccucaaccacacgaagaaguggaaguacccccaggugaacggccugaccuccaucaagugggccgacaacaacugcuaccuggcgaccgcccuccugacccugcagcagaucgagcucaaguucaacccccccgcccugcaggacgccuacuaccgcgcgcgggccggggaggccgccaacuucugcgcccugauccucgcguacugcaacaagacggugggcgagcugggcgacguccgcgagaccaugagcuaccuguuccagcacgccaaccucgacuccugcaagcgggugcugaacgucgugugcaagaccugcgggcagcagcagaccacccugaagggcguggaggccgucauguacauggggacgcucagcuacgagcaguucaagaagggcgugcagaucccgugcaccugcgggaagcaggccaccaaguaccuggugcagcaggagucccccuucgucaugaugagcgccccccccgcgcaguacgagcugaagcacggcaccuucacgugcgccuccgaguacaccggcaacuaccagugcgggcacuacaagcacaucaccagcaaggagacccucuacugcaucgacggcgcccugcugacgaagagcuccgaguacaaggggccgaucaccgacguguucuacaaggagaacagcuacaccaccacgaucaagcccgugaccuacaagcucgacggcgucgugugcaccgagaucgaccccaagcuggacaacuacuacaagaaggacaacuccuacuucaccgagcagcccaucgaccuggugccgaaccagcccuaccccaacgccagcuucgacaacuucaaguucgucugcgacaacaucaaguucgccgacgaccucaaccagcugacgggguacaagaagcccgcgucccgcgagcugaaggugaccuucuucccggaccucaacggcgacguggucgccaucgacuacaagcacuacacccccagcuucaagaagggcgccaagcugcugcacaagcccaucguguggcacgugaacaacgccaccaacaaggcgacguacaagcccaacaccuggugcauccggugccucugguccaccaagccggucgagaccagcaacuccuucgacgugcugaagagcgaggacgcccaggggauggacaaccuggccugcgaggaccucaagcccguguccgaggaggucguggagaaccccacgauccagaaggacgugcuggagugcaacgucaagaccaccgagguggugggcgacaucauccugaagcccgccaacaacagccucaagaucaccgaggaggucgggcacacggaccugauggccgcguacguggacaacuccagccugaccaucaagaagccgaacgagcucucccgcgugcugggccugaagacccucgccacccacgggcuggccgccgucaacagcgugcccugggacacgaucgccaacuacgcgaagcccuuccugaacaagguggucuccaccaccaccaacaucgugacgcgcugccucaaccgggugugcaccaacuacaugccguacuucuucacccugcugcuccagcugugcaccuucacccgcagcacgaacucccggaucaaggccagcaugcccaccaccaucgccaagaacaccgucaagagcgugggcaaguucugccuggaggccuccuucaacuaccucaagagccccaacuucuccaagcugaucaacaucaucaucugguuccugcuccugagcgugugccugggcucccucaucuacagcacggccgcgcuggggguccugauguccaaccucggcaugcccagcuacugcaccggguaccgcgagggcuaccugaacuccaccaacgugaccaucgccacguacugcaccggcagcaucccgugcuccgugugccugagcgggcucgacucccuggacaccuaccccagccuggagaccauccagaucacgaucuccagcuucaagugggaccucaccgccuucggccuggucgccgagugguuccuggccuacauccucuucacccgguucuucuacgugcuggggcuggcggccaucaugcagcucuucuucuccuacuucgccgugcacuucaucagcaacuccuggcugauguggcugaucaucaaccugguccagauggcccccaucagcgcgauggugcgcauguacaucuucuucgccagcuucuacuacguguggaaguccuacguccacgugguggacggcugcaacagcuccaccugcaugaugugcuacaagcggaaccgcgccacgcgggucgagugcaccaccaucgugaacgggguccgccggagcuucuacguguacgccaacggcggcaagggguucugcaagcuccacaacuggaacugcgugaacugcgacaccuucugcgccggcuccacguucaucagcgacgaggucgcgcgcgaccugucccugcaguucaagcggcccaucaacccgaccgaccagagcuccuacaucguggacagcgugaccgucaagaacggguccauccaccucuacuucgacaaggccggccagaagaccuacgagcgccacagccugucccacuucgugaaccuggacaaccuccgggccaacaacacgaaggggagccugcccaucaacgugaucgucuucgacggcaaguccaagugcgaggagagcuccgccaagagcgccuccguguacuacagccagcugaugugccagcccauccuccugcuggaccaggcgcucgugagcgacgucggcgacuccgccgagguggccgugaagauguucgacgccuacgucaacaccuucagcuccaccuucaacgugcccauggagaagcugaagacccugguggccacggcggaggccgagcucgccaagaacgucagccuggacaacgugcuguccaccuucaucagcgccgcgcgccagggguucguggacuccgacgucgagaccaaggacgugguggagugccucaagcugagccaccaguccgacaucgaggucaccggcgacagcugcaacaacuacaugcugacguacaacaagguggagaacaugaccccgcgggaccucggggccugcaucgacugcuccgcccgccacaucaacgcccagguggccaagagccacaacaucgcgcugaucuggaacgucaaggacuucaugucccugagcgagcagcuccggaagcagauccgcuccgccgccaagaagaacaaccugcccuucaagcugaccugcgccaccacgcgccagguggugaacgucgugaccaccaagaucgcccucaagggcgggugaggacuaguuauaagacugacuagcccgaugggccucccaacgggcccuccuccccuccuugcaccgagauuaauaaaaaaaaaaaaaaaaaaaaaaaaaaaaaaaaaaaaaaaaaaaaaaaaaaaaaaaaaaaaaaaaugcaucccccccccccccccccccccccccccccccaaaggcucuuuucagagccaccagaauu

SEQ ID NO: 21877 - RNA, 6058 nt, Artificial Sequence
  SARS-CoV-2__MT601292.1__non-structural protein 3 (NSP3) mRNA gc
aggagaaagcuuaccauggcccccaccaaggugaccuucggcgacgacacggucaucgaggugcagggguacaagagcgugaacaucaccuucgagcuggacgagcgcaucgacaagguccucaacgagaagugcuccgccuacaccguggagcugggcaccgaggugaacgaguucgcgugcgucguggccgacgccgugaucaagacgcugcagccggucagcgagcuccugaccccccuggggaucgaccucgacgagugguccauggccaccuacuaccuguucgacgagagcggcgaguucaagcuggccucccacauguacugcagcuucuacccccccgacgaggacgaggaggagggggacugcgaggaggaggaguucgagccguccacccaguacgaguacggcacggaggacgacuaccagggcaagccccucgaguucggggcgaccagcgccgcccugcagcccgaggaggagcaggaggaggacuggcuggacgacgacucccagcagaccgugggccagcaggacgggagcgaggacaaccagaccacgaccauccagaccaucguggagguccagccccagcucgagauggagcugaccccgguggugcagacgaucgaggucaacuccuucagcggcuaccugaagcucaccgacaacguguacaucaagaacgccgacaucguggaggaggcgaagaaggucaagcccaccgugguggucaacgccgccaacguguaccugaagcacgggggcggcguggccggggcccugaacaaggcgaccaacaacgccaugcaggucgaguccgacgacuacaucgccacgaacggcccccucaagguggggggcagcugcguccuguccggccacaaccuggccaagcacugccuccacgugguggggcccaacgucaacaagggcgaggacauccagcugcugaagagcgccuacgagaacuucaaccagcacgaggugcuccuggcgccgcugcucuccgccgggaucuucggcgccgaccccauccacagccugcgggugugcgucgacaccgugcgcaccaacguguaccuggccgucuucgacaagaaccucuacgacaagcugguguccagcuuccuggagaugaagagcgagaagcagguggagcagaagaucgccgagauccccaaggaggaggucaagcccuucaucaccgaguccaagccgagcguggagcagcggaagcaggacgacaagaagaucaaggcgugcguggaggaggucacgaccacccucgaggagaccaaguuccugacggagaaccugcuccuguacaucgacaucaacgggaaccugcaccccgacuccgccacccucgugagcgacaucgacaucaccuuccugaagaaggacgcccccuacaucgugggcgacgucgugcaggagggcgugcugaccgccgucgugauccccacgaagaaggccgggggcaccaccgagaugcucgcgaaggcccugcgcaaggugccgaccgacaacuacaucacgaccuaccccgggcagggccugaacggguacaccgucgaggaggccaagaccgugcucaagaagugcaaguccgccuucuacauccugcccagcaucaucuccaacgagaagcaggagauccugggcaccgugagcuggaaccuccgggagaugcuggcgcacgccgaggagacgcgcaagcugaugcccgucugcguggagaccaaggccaucguguccaccauccagcggaaguacaagggcaucaagauccaggagggggucguggacuacggcgcccgcuucuacuucuacaccagcaagacgaccguggccucccugaucaacacccucaacgaccugaacgagacccuggucacgaugccgcucggguacgugacccacggccugaaccuggaggaggcggcccgguacaugcgcagccucaaggugcccgccaccgucuccgugagcucccccgacgccgugaccgccuacaacggguaccugacgagcuccagcaagacccccgaggagcacuucaucgagaccaucucccuggcgggcagcuacaaggacuggagcuacuccggccagagcacccagcucgggaucgaguuccugaagcggggcgacaaguccgucuacuacacgagcaacccgaccaccuuccaccuggacggggaggugaucaccuucgacaaccucaagacgcugcugucccuccgcgaggugcggaccaucaaggucuucaccaccguggacaacaucaaccugcacacgcagguggucgacaugagcaugaccuacggccagcaguucggccccaccuaccuggacggggccgacgugaccaagaucaagccccacaacucccacgagggcaagacguucuacgugcucccgaacgacgacacccugcgcgucgaggccuucgaguacuaccacaccaccgaccccagcuuccuggggcgguacauguccgcccucaaccacacgaagaaguggaaguacccccaggugaacggccugaccagcaucaagugggccgacaacaacugcuaccuggcgaccgcccuccugacccugcagcagaucgagcucaaguucaacucccccgcccugcaggacgccuacuaccgcgcgcgggccggggaggccgccaacuucugcgcccugauccucgcguacugcaacaagacggugggcgagcugggcgacguccgcgagaccaugagcuaccuguuccagcacgccaaccucgacuccugcaagcgggugcugaacgucgugugcaagaccugcgggcagcagcagaccacccugaagggcguggaggccgucauguacauggggacgcucagcuacgagcaguucaagaagggcgugcagaucccgugcaccugcgggaagcaggccaccaaguaccuggugcagcaggagucccccuucgucaugaugagcgccccccccgcgcaguacgagcugaagcacggcaccuucacgugcgccuccgaguacaccggcaacuaccagugcgggcacuacaagcacaucaccagcaaggagacccucuacugcaucgacggcgcccugcugacgaagagcuccgaguacaaggggccgaucaccgacguguucuacaaggagaacagcuacaccaccacgaucaagcccgugaccuacaagcucgacggcgucgugugcaccgagaucgaccccaagcuggacaacuacuacaagaaggacaacuccuacuucaccgagcagcccaucgaccuggugccgaaccagcccuaccccaacgccagcuucgacaacuucaaguucgucugcgacaacaucaaguucgccgacgaccucaaccagcugacgggguacaagaagcccgcgucccgcgagcugaaggugaccuucuucccggaccucaacggcgacguggucgccaucgacuacaagcacuacacccccagcuucaagaagggcgccaagcugcugcacaagcccaucguguggcacgugaacaacgccaccaacaaggcgacguacaagcccaacaccuggugcauccggugccucugguccaccaagccggucgagaccagcaacuccuucgacgugcugaagagcgaggacgcccaggggauggacaaccuggccugcgaggaccucaagcccguguccgaggaggucguggagaaccccacgauccagaaggacgugcuggagugcaacgucaagaccaccgagguggugggcgacaucauccugaagcccgccaacaacagccucaagaucaccgaggaggucgggcacacggaccugauggccgcguacguggacaacuccagccugaccaucaagaagccgaacgagcucucccgcgugcugggccugaagacccucgccacccacgggcuggccgccgucaacagcgugcccugggacacgaucgccaacuacgcgaagcccuuccugaacaagguggucuccaccaccaccaacaucgugacgcgcugccucaaccgggugugcaccaacuacaugccguacuucuucacccugcugcuccagcugugcaccuucacccgcagcacgaacucccggaucaaggccagcaugcccaccaccaucgccaagaacaccgucaagagcgugggcaaguucugccuggaggccuccuucaacuaccucaagagccccaacuucuccaagcugaucaacaucaucaucugguuccugcuccugagcgugugccugggcucccucaucuacagcacggccgcgcuggggguccugauguccaaccucggcaugcccagcuacugcaccggguaccgcgagggcuaccugaacuccaccaacgugaccaucgccacguacugcaccggcagcaucccgugcuccgugugccugagcgggcucgacucccuggacaccuaccccagccuggagaccauccagaucacgaucuccagcuucaagugggaccucaccgccuucggccuggucgccgagugguuccuggccuacauccucuucacccgguucuucuacgugcuggggcuggcggccaucaugcagcucuucuucuccuacuucgccgugcacuucaucagcaacuccuggcugauguggcugaucaucaaccugguccagauggcccccaucagcgcgauggugcgcauguacaucuucuucgccagcuucuacuacguguggaaguccuacguccacgugguggacggcugcaacagcuccaccugcaugaugugcuacaagcggaaccgcgccacgcgggucgagugcaccaccaucgugaacgggguccgccggagcuucuacguguacgccaacggcggcaagggguucugcaagcuccacaacuggaacugcgugaacugcgacaccuucugcgccggcuccacguucaucagcgacgaggucgcgcgcgaccugucccugcaguucaagcggcccaucaacccgaccgaccagagcuccuacaucguggacagcgugaccgucaagaacggguccauccaccucuacuucgacaaggccggccagaagaccuacgagcgccacagccugucccacuucgugaaccuggacaaccuccgggccaacaacacgaaggggagccugcccaucaacgugaucgucuucgacggcaaguccaagugcgaggagagcuccgccaagagcgccuccguguacuacagccagcugaugugccagcccauccuccugcuggaccaggcgcucgugagcgacgucggcgacuccgccgagguggccgugaagauguucgacgccuacgucaacaccuucagcuccaccuucaacgugcccauggagaagcugaagacccugguggccacggcggaggccgagcucgccaagaacgucagccuggacaacgugcuguccaccuucaucagcgccgcgcgccagggguucguggacuccgacgucgagaccaaggacgugguggagugccucaagcugagccaccaguccgacaucgaggucaccggcgacagcugcaacaacuacaugcugacguacaacaagguggagaacaugaccccgcgggaccucggggccugcaucgacugcuccgcccgccacaucaacgcccagguggccaagagccacaacaucgcgcugaucuggaacgucaaggacuucaugucccugagcgagcagcuccggaagcagauccgcuccgccgccaagaagaacaaccugcccuucaagcugaccugcgccaccacgcgccagguggugaacgucgugaccaccaagaucgcccucaagggcgggugaggacuaguuauaagacugacuagcccgaugggccucccaacgggcccuccuccccuccuugcaccgagauuaauaaaaaaaaaaaaaaaaaaaaaaaaaaaaaaaaaaaaaaaaaaaaaaaaaaaaaaaaaaaaaaaaugcaucccccccccccccccccccccccccccccccaaaggcucuuuucagagccaccagaauu

SEQ ID NO: 21878 - RNA, 6058 nt, Artificial Sequence
  SARS-CoV-2__MT584985.1__non-structural protein 3 (NSP3) mRNA gc
aggagaaagcuuaccauggcccccaccaaggugaccuucggcgacgacacggucaucgaggugcagggguacaagagcgugaacaucaccuucgagcuggacgagcgcaucgacaagguccucaaccagaagugcuccgccuacaccguggagcugggcaccgaggugaacgaguucgcgugcgucguggccgacgccgugaucaagacgcugcagccggucagcgagcuccugaccccccuggggaucgaccucgacgagugguccauggccaccuacuaccuguucgacgagagcggcgaguucaagcuggccucccacauguacugcagcuucuacccccccgacgaggacgaggaggagggggacugcgaggaggaggaguucgagccguccacccaguacgaguacggcacggaggacgacuaccagggcaagccccucgaguucggggcgaccagcgccgcccugcagcccgaggaggagcaggaggaggacuggcuggacgacgacucccagcagaccgugggccagcaggacgggagcgaggacaaccagaccacgaccauccagaccaucguggagguccagccccagcucgagauggagcugaccccgguggugcagacgaucgaggucaacuccuucagcggcuaccugaagcucaccgacaacguguacaucaagaacgccgacaucguggaggaggcgaagaaggucaagcccaccgugguggucaacgccgccaacguguaccugaagcacgggggcggcguggccggggcccugaacaaggcgaccaacaacgccaugcaggucgaguccgacgacuacaucgccacgaacggcccccucaagguggggggcagcugcguccuguccggccacaaccuggccaagcacugccuccacgugguggggcccaacgucaacaagggcgaggacauccagcugcugaagagcgccuacgagaacuucaaccagcacgaggugcuccuggcgccgcugcucuccgccgggaucuucggcgccgaccccauccacagccugcgggugugcgucgacaccgugcgcaccaacguguaccuggccgucuucgacaagaaccucuacgacaagcugguguccagcuuccuggagaugaagagcgagaagcagguggagcagaagaucgccgagauccccaaggaggaggucaagcccuucaucaccgaguccaagccgagcguggagcagcggaagcaggacgacaagaagaucaaggcgugcguggaggaggucacgaccacccucgaggagaccaaguuccugacggagaaccugcuccuguacaucgacaucaacgggaaccugcaccccgacuccgccacccucgugagcgacaucgacaucaccuuccugaagaaggacgcccccuacaucgugggcgacgucgugcaggagggcgugcugaccgccgucgugauccccacgaagaaggccgggggcaccaccgagaugcucgcgaaggcccugcgcaaggugccgaccgacaacuacaucacgaccuaccccgggcagggccugaacggguacaccgucgaggaggccaagaccgugcucaagaagugcaaguccgccuucuacauccugcccagcaucaucuccaacgagaagcaggagauccugggcaccgugagcuggaaccuccgggagaugcuggcgcacgccgaggagacgcgcaagcugaugcccgucugcguggagaccaaggccaucguguccaccauccagcggaaguacaagggcaucaagauccaggagggggucguggacuacggcgcccgcuucuacuucuacaccagcaagacgaccguggccucccugaucaacacccucaacgaccugaacgagacccuggucacgaugccgcucggguacgugacccacggccugaaccuggaggaggcggcccgguacaugcgcagccucaaggugcccgccaccgucuccgugagcucccccgacgccgugaccgccuacaacggguaccugacgagcuccagcaagacccccgaggagcacuucaucgagaccaucucccuggcgggcagcuacaaggacuggagcuacuccggccagagcacccagcucgggaucgaguuccugaagcggggcgacaaguccgucuacuacacgagcaacccgaccaccuuccaccuggacggggaggugaucaccuucgacaaccucaagacgcugcugucccuccgcgaggugcggaccaucaaggucuucaccaccguggacaacaucaaccugcacacgcagguggucgacaugagcaugaccuacggccagcaguucggccccaccuaccuggacggggccgacgugaccaagaucaagccccacaacucccacgagggcaagacguucuacgugcucccgaacgacgacacccugcgcgucgaggccuucgaguacuaccacaccaccgaccccagcuuccuggggcgguacauguccgcccucaaccacacgaagaaguggaaguacccccaggugaacggccugaccagcaucaagugggccgacaacaacugcuaccuggcgaccgcccuccugacccugcagcagaucgagcucaaguucaaccccccggcccugcaggacgccuacuaccgcgcgcgggccggggaggccgccaacuucugcgcccugauccucgcguacugcaacaagacggugggcgagcugggcgacguccgcgagaccauguccuaccuguuccagcacgccaaccucgacagcugcaagcgggugcugaacgucgugugcaagaccugcgggcagcagcagaccacccugaagggcguggaggccgucauguacauggggacgcucuccuacgagcaguucaagaagggcgugcagauccccugcaccugcgggaagcaggccaccaaguaccuggugcagcaggagagccccuucgucaugauguccgcccccccggcgcaguacgagcugaagcacggcaccuucacgugcgccagcgaguacaccggcaacuaccagugcgggcacuacaagcacaucaccuccaaggagacccucuacugcaucgacggcgcccugcugacgaagagcagcgaguacaaggggcucaucaccgacguguucuacaaggagaacuccuacaccaccacgaucaagcccgugaccuacaagcuggacggcgucgugugcaccgagaucgaccccaagcuggacaacuacuacaagaaggacaacagcuacuucaccgagcagcccaucgaccucgugccgaaccagcccuaccccaacgccuccuucgacaacuucaaguucgucugcgacaacaucaaguucgccgacgaccugaaccagcugacgggguacaagaagcccgcgagccgcgagcucaaggugaccuucuucccggaccugaacggcgacguggucgccaucgacuacaagcacuacacccccuccuucaagaagggcgccaagcugcuccacaagcccaucguguggcacgugaacaacgccaccaacaaggcgacguacaagcccaacaccuggugcauccggugccuguggagcaccaagccggucgagaccuccaacagcuucgacgugcugaaguccgaggacgcccaggggauggacaaccucgccugcgaggaccugaagcccgugagcgaggaggucguggagaaccccacgauccagaaggacgugcuggagugcaacgucaagaccaccgagguggugggcgacaucauccucaagcccgccaacaacucccugaagaucaccgaggaggucgggcacacggaccugauggccgcguacguggacaacagcucccucaccaucaagaagccgaacgagcugagccgcgugcugggccucaagacccuggccacccacgggcuggccgccgucaacuccgugcccugggacacgaucgccaacuacgcgaagcccuuccucaacaagguggucagcaccaccaccaacaucgugacgcgcugccugaaccgggugugcaccaacuacaugccguacuucuucacccugcuccugcagcugugcaccuucacccgcuccacgaacagccggaucaaggccuccaugcccaccaccaucgccaagaacaccgucaagagcgugggcaaguucugccucgaggccagcuucaacuaccugaagucccccaacuucagcaagcugaucaacaucaucaucugguuccuccugcuguccgugugccucggcagccugaucuacuccacggccgcgcuggggguccucaugagcaaccugggcaugcccuccuacugcaccggguaccgcgagggcuaccugaacagcaccaacgugaccaucgccacguacugcaccggcuccaucccgugcagcgugugccucuccgggcuggacagccuggacaccuaccccucccucgagaccauccagaucacgaucagcuccuucaagugggaccugaccgccuucggccuggucgccgagugguuccucgccuacauccuguucacccgguucuucuacgugcuggggcucgcggccaucaugcagcuguucuucagcuacuucgccgugcacuucaucuccaacagcuggcugauguggcugaucaucaaccucguccagauggcccccaucuccgcgauggugcgcauguacaucuucuucgccagcuucuacuacguguggaagagcuacguccacgugguggacggcugcaacuccagcaccugcaugaugugcuacaagcggaaccgcgccacgcgggucgagugcaccaccaucgugaacgggguccgccgguccuucuacguguacgccaacggcggcaagggguucugcaagcugcacaacuggaacugcgugaacugcgacaccuucugcgccggcagcacguucaucuccgacgaggucgcgcgcgaccugagccuccaguucaagcggcccaucaacccgaccgaccaguccagcuacaucguggacuccgugaccgucaagaacgggagcauccaccuguacuucgacaaggccggccagaagaccuacgagcgccacucccugagccacuucgugaaccucgacaaccugcgggccaacaacacgaaggggucccugcccaucaacgugaucgucuucgacggcaagagcaagugcgaggaguccagcgccaaguccgccagcguguacuacucccagcucaugugccagcccauccugcugcucgaccaggcgcuggugagcgacgucggcgacagcgccgagguggccgugaagauguucgacgccuacgucaacaccuucuccagcaccuucaacgugcccauggagaagcugaagacccucguggccacggcggaggccgagcuggccaagaacgucucccuggacaacgugcucagcaccuucaucuccgccgcgcgccagggguucguggacagcgacgucgagaccaaggacgugguggagugccugaagcugucccaccagagcgacaucgaggucaccggcgacuccugcaacaacuacaugcucacguacaacaagguggagaacaugaccccgcgggaccugggggccugcaucgacugcagcgcccgccacaucaacgcccagguggccaagucccacaacaucgcgcugaucuggaacgucaaggacuucaugagccucuccgagcagcugcggaagcagauccgcagcgccgccaagaagaacaaccugcccuucaagcucaccugcgccaccacgcgccagguggugaacgucgugaccaccaagaucgcccugaagggcgggugaggacuaguuauaagacugacuagcccgaugggccucccaacgggcccuccuccccuccuugcaccgagauuaauaaaaaaaaaaaaaaaaaaaaaaaaaaaaaaaaaaaaaaaaaaaaaaaaaaaaaaaaaaaaaaaaugcaucccccccccccccccccccccccccccccccaaaggcucuuuucagagccaccagaauu

SEQ ID NO: 21879 - RNA, 6058 nt, Artificial Sequence
  SARS-CoV-2__MT585059.1__non-structural protein 3 (NSP3) mRNA gc
aggagaaagcuuaccauggcccccaccaaggugaccuucggcgacgacacggucaucgaggugcagggguacaagagcgugaacaucaccuucgagcuggacgagcgcaucgacaagguccucaacgagaagugcuccgccuacaccguggagcugggcaccgaggugaacgaguucgcgugcgucguggccgacgccgugaucaagacgcugcagccggucagcgagcuccugaccccccuggggaucgaccucgacgagugguccauggccaccuacuaccuguucgacgagagcggcgaguucaagcuggccucccacauguacugcagcuucuacccccccgacgaggacgaggaggagggggacugcgaggaggaggaguucgagccguccacccaguacgaguacggcacggaggacgacuaccagggcaagccccucgaguucggggcgaccagcgccgcccugcagcccgaggaggagcaggaggaggacuggcuggacgacgacucccagcagaccgugggccagcaggacgggagcgaggacaaccagaccacgaccauccagaccaucguggagguccagccccagcucgagauggagcugaccccgguggugcagacgaucgaggucaacuccuucagcggcuaccugaagcucaccgacaacguguacaucaagaacgccgacaucguggaggaggcgaagaaggucaagcccaccgugguggucaacgccgccaacguguaccugaagcacgggggcggcguggccggggcccugaacaaggcgaccaacaacgccaugcaggucgaguccgacgacuacaucgccacgaacggcccccucaagguggggggcagcugcguccuguccggccacaaccuggccaagcacugccuccacgugguggggcccaacgucaacaagggcgaggacauccagcugcugaagagcgccuacgagaacuucaaccagcacgaggugcuccuggcgccgcugcucuccgccgggaucuucggcgccgaccccauccacagccugcgggugugcgucgacaccgugcgcaccaacguguaccuggccgucuucgacaagaaccucuacgacaagcugguguccagcuuccuggagaugaagagcgagaagcagguggagcagaagaucgccgagauccccaaggaggaggucaagcccuucaucaccgaguccaagccgagcguggagcagcggaagcaggacgacaagaagaucaaggcgugcguggaggaggucacgaccacccucgaggagaccaaguuccugacggagaaccugcuccuguacaucgacaucaacgggaaccugcaccccgacuccgccacccucgugagcgacaucgacaucaccuuccugaagaaggacgcccccuacaucgugggcgacgucgugcaggagggcgugcugaccgccgucgugauccccacgaagaaggccgggggcaccaccgagaugcucgcgaaggcccugcgcaaggugccgaccgacaacuacaucacgaccuaccccgggcagggccugaacggguacaccgucgaggaggccaagaccgugcucaagaagugcaaguccgccuucuacauccugcccagcaucaucuccaacgagaagcaggagauccugggcaccgugagcuggaaccuccgggagaugcuggcgcacgccgaggagacgcgcaagcugaugcccgucugcguggagaccaaggccaucguguccaccauccagcacaaguacaagggcaucaagauccaggagggggucguggacuacggcgcccgguucuacuucuacaccagcaagacgaccguggccucccugaucaacacccucaacgaccugaacgagacccuggucacgaugccgcucggguacgugacccacggccugaaccuggaggaggcggcccgcuacaugcggagccucaaggugcccgccaccgucuccgugagcucccccgacgccgugaccgccuacaacggguaccugacgagcuccagcaagacccccgaggagcacuucaucgagaccaucucccuggcgggcagcuacaaggacuggagcuacuccggccagagcacccagcucgggaucgaguuccugaagcgcggcgacaaguccgucuacuacacgagcaacccgaccaccuuccaccuggacggggaggugaucaccuucgacaaccucaagacgcugcugucccuccgggaggugcgcaccaucaaggucuucaccaccguggacaacaucaaccugcacacgcagguggucgacaugagcaugaccuacggccagcaguucggccccaccuaccuggacggggccgacgugaccaagaucaagccccacaacucccacgagggcaagacguucuacgugcucccgaacgacgacacccugcgggucgaggccuucgaguacuaccacaccaccgaccccagcuuccuggggcgcuacauguccgcccucaaccacacgaagaaguggaaguacccccaggugaacggccugaccagcaucaagugggccgacaacaacugcuaccuggcgaccgcccuccugacccugcagcagaucgagcucaaguucaaccccccggcccugcaggacgccuacuaccgggcgcgcgccggggaggccgccaacuucugcgcccugauccucgcguacugcaacaagacggugggcgagcugggcgacguccgggagaccauguccuaccuguuccagcacgccaaccucgacagcugcaagcgcgugcugaacgucgugugcaagaccugcgggcagcagcagaccacccugaagggcguggaggccgucauguacauggggacgcucuccuacgagcaguucaagaagggcgugcagauccccugcaccugcgggaagcaggccaccaaguaccuggugcagcaggagagccccuucgucaugauguccgcccccccggcgcaguacgagcugaagcacggcaccuucacgugcgccagcgaguacaccggcaacuaccagugcgggcacuacaagcacaucaccuccaaggagacccucuacugcaucgacggcgcccugcugacgaagagcagcgaguacaaggggcccaucaccgacguguucuacaaggagaacuccuacaccaccacgaucaagcccgugaccuacaagcucgacggcgucgugugcaccgagaucgaccccaagcuggacaacuacuacaagaaggacaacagcuacuucaccgagcagccgaucgaccuggugcccaaccagcccuaccccaacgccuccuucgacaacuucaaguucgucugcgacaacaucaaguucgccgacgaccucaaccagcugacgggguacaagaagccggcgagccgggagcugaaggugaccuucuuccccgaccucaacggcgacguggucgccaucgacuacaagcacuacacccccuccuucaagaagggcgccaagcugcugcacaagcccaucguguggcacgugaacaacgccaccaacaaggcgacguacaagccgaacaccuggugcauccgcugccucuggagcaccaagcccgucgagaccuccaacagcuucgacgugcugaaguccgaggacgcccaggggauggacaaccuggccugcgaggaccucaagcccgugagcgaggaggucguggagaaccccacgauccagaaggacgugcuggagugcaacgucaagaccaccgagguggugggcgacaucauccugaagccggccaacaacucccucaagaucaccgaggaggucgggcacacggaccugauggccgcguacguggacaacagcucccugaccaucaagaagcccaacgagcucagccgggugcugggccugaagacccucgccacccacgggcuggccgccgucaacuccgugcccugggacacgaucgccaacuacgcgaagccguuccugaacaagguggucagcaccaccaccaacaucgugacgcgcugccucaaccgcgugugcaccaacuacaugcccuacuucuucacccugcugcuccagcugugcaccuucacccgguccacgaacagccgcaucaaggccuccaugcccaccaccaucgccaagaacaccgucaagagcgugggcaaguucugccuggaggccagcuucaacuaccucaagucccccaacuucagcaagcugaucaacaucaucaucugguuccugcuccuguccgugugccugggcagccucaucuacuccacggccgcgcuggggguccugaugagcaaccucggcaugccguccuacugcaccggguaccgggagggcuaccugaacagcaccaacgugaccaucgccacguacugcaccggcuccauccccugcagcgugugccuguccgggcucgacagccuggacaccuaccccucccuggagaccauccagaucacgaucagcuccuucaagugggaccucaccgccuucggccuggucgccgagugguuccuggccuacauccucuucacccgcuucuucuacgugcuggggcuggcggccaucaugcagcucuucuucagcuacuucgccgugcacuucaucuccaacagcuggcugauguggcugaucaucaaccugguccagauggcccccaucuccgcgauggugcggauguacaucuucuucgccagcuucuacuacguguggaagagcuacguccacgugguggacggcugcaacuccagcaccugcaugaugugcuacaagcgcaaccgggccacgcgcgucgagugcaccaccaucgugaacgggguccggcgcuccuucuacguguacgccaacggcggcaagggguucugcaagcuccacaacuggaacugcgugaacugcgacaccuucugcgccggcagcacguucaucuccgacgaggucgcgcgggaccugagccugcaguucaagcgcccgaucaaccccaccgaccaguccagcuacaucguggacuccgugaccgucaagaacgggagcauccaccucuacuucgacaaggccggccagaagaccuacgagcggcacucccugagccacuucgugaaccuggacaaccuccgcgccaacaacacgaaggggucccugcccaucaacgugaucgucuucgacggcaagagcaagugcgaggaguccagcgccaaguccgccagcguguacuacucccagcugaugugccagcccauccuccugcuggaccaggcgcucgugagcgacgucggcgacagcgccgagguggccgugaagauguucgacgccuacgucaacaccuucuccagcaccuucaacgugccgauggagaagcugaagacccugguggccacggcggaggccgagcucgccaagaacgucucccuggacaacgugcugagcaccuucaucuccgccgcgcggcagggguucguggacagcgacgucgagaccaaggacgugguggagugccucaagcugucccaccagagcgacaucgaggucaccggcgacuccugcaacaacuacaugcugacguacaacaagguggagaacaugaccccccgcgaccucggggccugcaucgacugcagcgcccggcacaucaacgcccagguggccaagucccacaacaucgcgcugaucuggaacgucaaggacuucaugagccuguccgagcagcuccgcaagcagauccggagcgccgccaagaagaacaaccugcccuucaagcugaccugcgccaccacgcgccagguggugaacgucgugaccaccaagaucgcccucaagggcgggugaggacuaguuauaagacugacuagcccgaugggccucccaacgggcccuccuccccuccuugcaccgagauuaauaaaaaaaaaaaaaaaaaaaaaaaaaaaaaaaaaaaaaaaaaaaaaaaaaaaaaaaaaaaaaaaaugcaucccccccccccccccccccccccccccccccaaaggcucuuuucagagccaccagaauu

SEQ ID NO: 21880 - RNA, 6058 nt, Artificial Sequence
  SARS-CoV-2__MT585090.1__non-structural protein 3 (NSP3) mRNA gc
aggagaaagcuuaccauggcccccaccaaggugaccuucggcgacgacacggucaucgaggugcagggguacaagagcgugaacaucaccuucgagcuggacgagcgcaucgacaagguccucaacgagaagugcuccgccuacaccguggagcugggcaccgaggugaacgaguucgcgugcgucguggccgacgccgugaucaagacgcugcagccggucagcgagcuccugaccccccuggggaucgaccucgacgagugguccauggccaccuacuaccuguucgacgagagcggcgaguucaagcuggccucccacauguacugcagcuucuacccccccgacgaggacgaggaggagggggacugcgaggaggaggaguucgagccguccacccaguacgaguacggcacggaggacgacuaccagggcaagccccucgaguucggggcgaccagcgccgcccugcagcccgaggaggagcaggaggaggacuggcuggacgacgacucccagcagaccgugggccagcaggacgggagcgaggacaaccagaccacgaccauccagaccaucguggagguccagccccagcucgagauggagcugaccccgguggugcagacgaucgaggucaacuccuucagcggcuaccugaagcucaccgacaacguguacaucaagaacgccgacaucguggaggaggcgaagaaggucaagcccaccgugguggucaacgccgccaacguguaccugaagcacgggggcggcguggccggggcccugaacaaggcgaccaacaacgccaugcaggucgaguccgacgacuacaucgccacgaacggcccccucaagguggggggcagcugcguccuguccggccacaaccuggccaagcacugccuccacgugguggggcccaacgucaacaagggcgaggacauccagcugcugaagagcgccuacgagaacuucaaccagcacgaggugcuccuggcgccgcugcucuccgccgggaucuucggcgccgaccccauccacagccugcgggugugcgucgacaccgugcgcaccaacguguaccuggccgucuucgacaagaaccucuacgacaagcugguguccagcuuccuggagaugaagagcgagaagcagguggagcagaagaucgccgagauccccaaggaggaggucaagcccuucaucaccgaguccaagccgagcguggagcagcggaagcaggacgacaagaagaucaaggcgugcguggaggaggucacgaccacccucgaggagaccaaguuccugacggagaaccugcuccuguacaucgacaucaacgggaaccugcaccccgacuccgccacccucgugagcgacaucgacaucaccuuccugaagaaggacgcccccuacaucgugggcgacgucgugcaggagggcgugcugaccgccgucgugauccccacgaagaaggccgggggcaccaccgagaugcucgcgaaggcccugcgcaaggugccgaccgacaacuacaucacgaccuaccccgggcagggccugaacggguacaccgucgaggaggccaagaccgugcucaagaagugcaaguccgccuucuacauccugcccagcaucaucuccaacgagaagcaggagauccugggcaccgugagcuggaaccuccgggagaugcuggcgcacgccgaggagacgcgcaagcugaugcccgucugcguggagaccaaggccaucguguccaccauccagcggaaguacaagggcaucaagauccaggagggggucguggacuacggcgcccgcuucuacuucuacaccagcaagacgaccguggccucccugaucaacacccucaacgaccugaacgagacccuggucacgaugccgcucggguacgugacccacggccugaaccuggaggaggcggcccgguacaugcgcagccucaaggugcccgccaccgucuccgugagcucccccgacgccgugaccgccuacaacggguaccugacgagcuccagcaagacccccgaggagcacuucaucgagaccaucucccuggcgggcagcuacaaggacuggagcuacuccggccagagcacccagcucgggaucgaguuccugaagcggggcgacaaguccgucuacuacacgagcaacccgaccaccuuccaccuggacggggaggugaucaccuucgacaaccucaagacgcugcugucccuccgcgaggugcggaccaucaaggucuucaccaccguggacaacaucaaccugcacacgcagguggucgacaugagcaugaccuacggccagcaguucggccccaccuaccuggacggggccgacgugaccaagaucaagccccacaacucccacgagggcaagacguucuacgugcucccgaacgacgacacccugcgcgucgaggccuucgaguacuaccacaccaccgaccccagcuuccuggggcgguacauguccgcccucaaccacacgaagaaguggaaguacccccaggugaacggccugaccagcaucaagugggccgacaacaacugcuaccuggcgaccgcccuccugacccugcagcagaucgagcucaaguucaaccccccggcccugcaggacgccuacuaccgcgcgcgggccggggaggccgccaacuucugcgcccugauccucgcguacugcaacaagacggugggcgagcugggcgacguccgcgagaccauguccuaccuguuccagcacgccaaccucgacagcugcaagcgggugcugaacgucgugugcaagaccugcgggcagcagcagaccacccugaagggcguggaggccgucauguacauggggacgcucuccuacgagcaguucaagaagggcgugcagauccccugcaccugcgggaagcaggccaccaaguaccuggugcagcaggagagccccuucgucaugauguccgcccccccggcgcaguacgagcugaagcacggcaccuucacgugcgccagcgaguacaccggcaacuaccagugcgggcacuacaagcacaucaccuccaaggagacccucuacugcaucgacggcgcccugcugacgaagagcagcgaguacaaggggcccaucaccgacguguucuacaaggagaacuccuacaccaccacgaucaagcccgugaccuacaagcucgacggcgucgugugcaccgagaucgaccccaagcuggacaucuacuacaagaaggacaacagcuacuucaccgagcagccgaucgaccuggugcccaaccagcccuaccccaacgccuccuucgacaacuucaaguucgucugcgacaacaucaaguucgccgacgaccucaaccagcugacgggguacaagaagccggcgagccgcgagcugaaggugaccuucuuccccgaccucaacggcgacguggucgccaucgacuacaagcacuacacccccuccuucaagaagggcgccaagcugcugcacaagcccaucguguggcacgugaacaacgccaccaacaaggcgacguacaagccgaacaccuggugcauccggugccucuggagcaccaagcccgucgagaccuccaacagcuucgacgugcugaaguccgaggacgcccaggggauggacaaccuggccugcgaggaccucaagcccgugagcgaggaggucguggagaaccccacgauccagaaggacgugcuggagugcaacgucaagaccaccgagguggugggcgacaucauccugaagccggccaacaacucccucaagaucaccgaggaggucgggcacacggaccugauggccgcguacguggacaacagcucccugaccaucaagaagcccaacgagcucagccgcgugcugggccugaagacccucgccacccacgggcuggccgccgucaacuccgugcccugggacacgaucgccaacuacgcgaagccguuccugaacaagguggucagcaccaccaccaacaucgugacgcgcugccucaaccgggugugcaccaacuacaugcccuacuucuucacccugcugcuccagcugugcaccuucacccgcuccacgaacagccggaucaaggccuccaugcccaccaccaucgccaagaacaccgucaagagcgugggcaaguucugccuggaggccagcuucaacuaccucaagucccccaacuucagcaagcugaucaacaucaucaucugguuccugcuccuguccgugugccugggcagccucaucuacuccacggccgcgcuggggguccugaugagcaaccucggcaugccguccuacugcaccggguaccgcgagggcuaccugaacagcaccaacgugaccaucgccacguacugcaccggcuccauccccugcagcgugugccuguccgggcucgacagccuggacaccuaccccucccuggagaccauccagaucacgaucagcuccuucaagugggaccucaccgccuucggccuggucgccgagugguuccuggccuacauccucuucacccgguucuucuacgugcuggggcuggcggccaucaugcagcucuucuucagcuacuucgccgugcacuucaucuccaacagcuggcugauguggcugaucaucaaccugguccagauggcccccaucuccgcgauggugcgcauguacaucuucuucgccagcuucuacuacguguggaagagcuacguccacgugguggacggcugcaacuccagcaccugcaugaugugcuacaagcggaaccgcgccacgcgggucgagugcaccaccaucgugaacgggguccgccgguccuucuacguguacgccaacggcggcaagggguucugcaagcuccacaacuggaacugcgugaacugcgacaccuucugcgccggcagcacguucaucuccgacgaggucgcgcgcgaccugagccugcaguucaagcggccgaucaaccccaccgaccaguccagcuacaucguggacuccgugaccgucaagaacgggagcauccaccucuacuucgacaaggccggccagaagaccuacgagcgccacucccugagccacuucgugaaccuggacaaccuccgggccaacaacacgaaggggucccugcccaucaacgugaucgucuucgacggcaagagcaagugcgaggaguccagcgccaaguccgccagcguguacuacucccagcugaugugccagcccauccuccugcuggaccaggcgcucgugagcgacgucggcgacagcgccgagguggccgugaagauguucgacgccuacgucaacaccuucuccagcaccuucaacgugccgauggagaagcugaagacccugguggccacggcggaggccgagcucgccaagaacgucucccuggacaacgugcugagcaccuucaucuccgccgcgcgccagggguucguggacagcgacgucgagaccaaggacgugguggagugccucaagcugucccaccagagcgacaucgaggucaccggcgacuccugcaacaacuacaugcugacguacaacaagguggagaacaugaccccccgggaccucggggccugcaucgacugcagcgcccgccacaucaacgcccagguggccaagucccacaacaucgcgcugaucuggaacgucaaggacuucaugagccuguccgagcagcuccggaagcagauccgcagcgccgccaagaagaacaaccugcccuucaagcugaccugcgccaccacgcgccagguggugaacgucgugaccaccaagaucgcccucaagggcgggugaggacuaguuauaagacugacuagcccgaugggccucccaacgggcccuccuccccuccuugcaccgagauuaauaaaaaaaaaaaaaaaaaaaaaaaaaaaaaaaaaaaaaaaaaaaaaaaaaaaaaaaaaaaaaaaaugcaucccccccccccccccccccccccccccccccaaaggcucuuuucagagccaccagaauu

SEQ ID NO: 21881 - RNA, 6058 nt, Artificial Sequence
  SARS-CoV-2__MT479223.1__non-structural protein 3 (NSP3) mRNA gc
aggagaaagcuuaccauggcccccaccaaggugaccuucggcgacgacacggucaucgaggugcagggguacaagagcgugaacaucaccuucgagcuggacgagcgcaucgacaagguccucaacgagaagugcuccgccuacaccguggagcugggcaccgaggugaacgaguucgcgugcgucguggccgacgccgugaucaagacgcugcagccggucagcgagcuccugaccccccuggggaucgaccucgacgagugguccauggccaccuacuaccuguucgacgagagcggcgaguucaagcuggccucccacauguacugcagcuucuacccccccgacgaggacgaggaggagggggacugcgaggaggaggaguucgagccguccacccaguacgaguacggcacggaggacgacuaccagggcaagccccucgaguucggggcgaccagcgccgcccugcagcccgaggaggagcaggaggaggacuggcuggacgacgacucccagcagaccgugggccagcaggacgggagcgaggacaaccagaccacgaccauccagaccaucguggagguccagccccagcucgagauggagcugaccccgguggugcagacgaucgaggucaacuccuucagcggcuaccugaagcucaccgacaacguguacaucaagaacgccgacaucguggaggaggcgaagaaggucaagcccaccgugguggucaacgccgccaacguguaccugaagcacgggggcggcguggccggggcccugaacaaggcgaccaacaacgccaugcaggucgaguccgacgacuacaucgccacgaacggcccccucaagguggggggcagcugcguccuguccggccacaaccuggccaagcacugccuccacgugguggggcccaacgucaacaagggcgaggacauccagcugcugaagagcgccuacgagaacuucaaccagcacgaggugcuccuggcgccgcugcucuccgccgggaucuucggcgccgaccccauccacagccugcgggugugcgucgacaccgugcgcaccaacguguaccuggccgucuucgacaagaaccucuacgacaagcugguguccagcuuccuggagaugaagagcgagaagcagguggagcagaagaucgccgagauccccaaggaggaggucaagcccuucaucaccgaguccaagccgagcguggagcagcggaagcaggacgacaagaagaucaaggcgugcguggaggaggucacgaccacccucgaggagaccaaguuccugacggagaaccugcuccuguacaucgacaucaacgggaaccugcaccccgacuccgccacccucgugagcgacaucgacaucaccuuccugaagaaggacgcccccuacaucgugggcgacgucgugcaggagggcgugcugaccgccgucgugauccccacgaagaaggccgggggcaccaccgagaugcucgcgaaggcccugcgcaaggugccgaccgacaacuacaucacgaccuaccccgggcagggccugaacggguacaccgucgaggaggccaagaccgugcucaagaagugcaaguccgccuucuacauccugcccagcaucaucuccaacgagaagcaggagauccugggcaccgugagcuggaaccuccgggagaugcuggcgcacgccgaggagacgcgcaagcugaugcccgucugcguggagaccaaggccaucguguccaccauccagcggaaguacaagggcaucaagauccaggagggggucguggacuacggcgcccgcuucuacuucuacaccagcaagacgaccguggccucccugaucaacacccucaacgaccugaacgagacccuggucacgaugccgcucggguacgugacccacggccugaaccuggaggaggcggcccgguacaugcgcagccucaaggugcccgccaccgucuccgugagcucccccgacgccgugaccgccuacaacggguaccugacgagcuccagcaagacccccgaggagcacuucaucgagaccaucucccuggcgggcagcuacaaggacuggagcuacuccggccagagcacccagcucgggaucgaguuccugaagcggggcgacaaguccgucuacuacacgagcaacccgaccaccuuccaccuggacggggaggugaucaccuucgacaaccucaagacgcugcugucccuccgcgaggugcggaccaucaaggucuucaccaccguggacaacaucaaccugcacacgcagguggucgacaugagcaugaccuacggccagcaguucggccccaccuaccuggacggggccgacgugaccaagaucaagccccacaacucccacgagggcaagacguucuacgugcucccgaacgacgacacccugcgcgucgaggccuucgaguacuaccacaccaccgaccccagcuuccuggggcgguacauguccgcccucaaccacacgaagaaguggaaguacccccaggugaacggccugaccagcaucaagugggccgacaacaacugcuaccuggcgaccgcccuccugacccugcagcagaucgagcucaaguucaaccccccggcccugcaggacgccuacuaccgcgcgcgggccggggaggccgccaacuucugcgcccugauccucgcguacugcaacaagacggugggcgagcugggcgacguccgcgagaccauguccuaccuguuccagcacgccaaccucgacagcugcaagcgggugcugaacgucgugugcaagaccugcgggcagcagcagaccacccugaagggcguggaggccgucauguacauggggacgcucuccuacgagcaguucaagaagggcgugcagauccccugcaccugcgggaagcaggccaccaaguaccuggugcagcaggagagccccuucgucaugauguccgcccccccggcgcaguacgagcugaagcacggcaccuucacgugcgccagcgaguacaccggcaacuaccagugcgggcacuacaagcacaucaccuccaaggagacccucuacugcaucgacggcgcccugcugacgaagagcagcgaguacaaggggcccaucaccgacguguucuacaaggagaacuccuacaccaccacgaucaagcccgugaccuacaagcucgacggcgucgugugcaccgagaucgaccccaagcuggacaacuacuacaagaaggacaacagcuacuucaccgagcagccgaucgaccuggugcccaaccagcccuaccccaacgccuccuucgacaacuucaaguucgucugcgacaacaucaaguucgccgacgaccucaaccagcugacgggguacaagaagccggcgagccgcgagcugaaggugaccuucuuccccgaccucaacggcgacguggucgccaucgacuacaagcacuacacccccuccuucaagaagggcgccaagcugcugcacaagcccaucguguggcacgugaacaacgccaccaacaaggcgacguacaagccgaacaccuggugcauccggugccucuggagcaccaagcccgucgagaccuccaacagcuucgacgugcugaaguccgaggacgcccaggggauggacaaccuggccugcgaggaccucaagcccgugagcgaggaggucguggagaaccccacgauccagaaggacgugcuggagugcaacgucaagaccaccgagguggugggcgacaucauccugaagccggccaacaacucccucaagaucaccgaggaggucgggcacacggaccugauggccgcguacguggacaacagcucccugaccaucaagaagcccaacgagcucagccgcgugcugggccugaagacccucgccacccacgggcuggccgccgucaacuccgugcccugggacacgaucgccaacuacgcgaagccguuccugaacaagguggucagcaccaccaccaacaucgugacgcgcugccucaaccgggugugcaccaacuacaugcccuacuucuucacccugcugcuccagcugugcaccuucacccgcuccacgaacagccggaucaaggccuccaugcccaccaccaucgccaagaacaccgucaagagcgugggcaaguucugccuggaggccagcuucaacuaccucaagucccccaacuucagcaagcugaucaacaucaucaucugguuccugcuccuguccgugugccugggcagccucaucuacuccacggccgcgcuggggguccugaugagcaaccucggcaugccguccuacugcaccggguaccgcgagggcuaccugaacagcaccaacgugaccaucgccacguacugcaccggcuccauccccugcagcgugugccuguccgggcucgacagccuggacaccuaccccucccuggagaccauccagaucacgaucagcuccuucaagugggaccucaccgccuucggccuggucgccgagugguuccuggccuacauccucuucacccgguucuucuacgugcuggggcuggcggccaucaugcagcucuucuucagcuacuucgccgugcacuucaucuccaacagcuggcugauguggcugaucaucaaccugguccagauggcccccaucuccgcgauggugcgcauguacaucuucuucgccagcuucuacuacguguggaagagcuacguccacgugguggacggcugcaacuccagcaccugcaugaugugcuacaagcggaaccgcgccauccgggucgagugcacgaccaucgugaacgggguccgccgguccuucuacguguacgccaacggcggcaagggguucugcaagcuccacaacuggaacugcgugaacugcgacaccuucugcgccggcagcaccuucaucuccgacgaggucgcgcgcgaccugagccugcaguucaagcggccgaucaaccccacggaccaguccagcuacaucguggacuccgugaccgucaagaacgggagcauccaccucuacuucgacaaggccggccagaagaccuacgagcgccacucccugagccacuucgugaaccuggacaaccuccgggccaacaacaccaaggggucccugcccaucaacgugaucgucuucgacggcaagagcaagugcgaggaguccagcgccaaguccgccagcguguacuacucccagcugaugugccagcccauccuccugcuggaccaggcgcucgugagcgacgucggcgacagcgccgagguggccgugaagauguucgacgccuacgucaacacguucuccagcaccuucaacgugccgauggagaagcugaagacccugguggccaccgcggaggccgagcucgccaagaacgucucccuggacaacgugcugagcacguucaucuccgccgcgcgccagggguucguggacagcgacgucgagaccaaggacgugguggagugccucaagcugucccaccagagcgacaucgaggucaccggcgacuccugcaacaacuacaugcugaccuacaacaagguggagaacaugacgccccgggaccucggggccugcaucgacugcagcgcccgccacaucaacgcccagguggccaagucccacaacaucgcgcugaucuggaacgucaaggacuucaugagccuguccgagcagcuccggaagcagauccgcagcgccgccaagaagaacaaccugcccuucaagcugaccugcgccaccacccgccagguggugaacgucgugacgaccaagaucgcccucaagggcgggugaggacuaguuauaagacugacuagcccgaugggccucccaacgggcccuccuccccuccuugcaccgagauuaauaaaaaaaaaaaaaaaaaaaaaaaaaaaaaaaaaaaaaaaaaaaaaaaaaaaaaaaaaaaaaaaaugcaucccccccccccccccccccccccccccccccaaaggcucuuuucagagccaccagaauu

SEQ ID NO: 21882 - RNA, 6058 nt, Artificial Sequence
  SARS-CoV-2__MT582483.1__non-structural protein 3 (NSP3) mRNA gc
aggagaaagcuuaccauggcccccaccaaggugaccuucggcgacgacacggucaucgaggugcagggguacaagagcgugaacaucaccuucgagcuggacgagcgcaucgacaagguccucaacgagaagugcuccgccuacaccguggagcugggcaccgaggugaacgaguucgcgugcgucgugacggacgccgugaucaagacccugcagccggucagcgagcuccugaccccccuggggaucgaccucgacgagugguccauggccaccuacuaccuguucgacgagagcggcgaguucaagcuggccucccacauguacugcagcuucuacccccccgacgaggacgaggaggagggggacugcgaggaggaggaguucgagccguccacgcaguacgaguacggcaccgaggacgacuaccagggcaagccccucgaguucggggccaccagcgcggcccugcagcccgaggaggagcaggaggaggacuggcuggacgacgacucccagcagaccgugggccagcaggacgggagcgaggacaaccagacgaccaccauccagaccaucguggagguccagccccagcucgagauggagcugacgccgguggugcagaccaucgaggucaacuccuucagcggcuaccugaagcucaccgacaacguguacaucaagaacgccgacaucguggaggaggccaagaaggucaagcccaccgugguggucaacgcggccaacguguaccugaagcacgggggcggcguggccggggcccugaacaaggccacgaacaacgcgaugcaggucgaguccgacgacuacaucgccaccaacggcccccucaagguggggggcagcugcguccuguccggccacaaccuggccaagcacugccuccacgugguggggcccaacgucaacaagggcgaggacauccagcugcugaagagcgccuacgagaacuucaaccagcacgaggugcuccuggccccgcugcucuccgcggggaucuucggcgccgaccccauccacagccugcgggugugcgucgacaccgugcgcaccaacguguaccuggccgucuucgacaagaaccucuacgacaagcugguguccagcuuccuggagaugaagagcgagaagcagguggagcagaagaucgccgagauccccaaggaggaggucaagcccuucaucacggaguccaagccgagcguggagcagcggaagcaggacgacaagaagaucaaggccugcguggaggaggucaccaccacccucgaggagacgaaguuccugaccgagaaccugcuccuguacaucgacaucaacgggaaccugcaccccgacuccgcgacccucgugagcgacaucgacaucaccuuccugaagaaggacgcccccuacaucgugggcgacgucgugcaggagggcgugcugacggccgucgugauccccaccaagaaggccgggggcaccaccgagaugcucgccaaggcgcugcgcaaggugccgacggacaacuacaucaccaccuaccccgggcagggccugaacggguacaccgucgaggaggccaagaccgugcucaagaagugcaaguccgccuucuacauccugcccagcaucaucuccaacgagaagcaggagauccugggcacggugagcuggaaccuccgggagaugcuggcccacgcggaggagacccgcaagcugaugcccgucugcguggagaccaaggccaucguguccaccauccagcggaaguacaagggcaucaagauccaggagggggucguggacuacggcgcccgcuucuacuucuacacgagcaagaccaccguggccucccugaucaacacccucaacgaccugaacgagacgcuggucaccaugccgcucggguacgugacccacggccugaaccuggaggaggccgcgcgguacaugcgcagccucaaggugcccgccaccgucuccgugagcucccccgacgccgugacggccuacaacggguaccugaccagcuccagcaagacccccgaggagcacuucaucgagaccaucucccuggccggcagcuacaaggacuggagcuacuccggccagagcacgcagcucgggaucgaguuccugaagcggggcgacaaguccgucuacuacaccagcaacccgaccaccuuccaccuggacggggaggugaucacguucgacaaccucaagacccugcugucccuccgcgaggugcggaccaucaaggucuucaccacgguggacaacaucaaccugcacacccagguggucgacaugagcaugaccuacggccagcaguucggccccaccuaccuggacggggcggacgugacgaagaucaagccccacaacucccacgagggcaagaccuucuacgugcucccgaacgacgacacccugcgcgucgaggccuucgaguacuaccacaccacggaccccagcuuccuggggcgguacauguccgcccucaaccacaccaagaaguggaaguacccccaggugaacggccugaccagcaucaagugggccgacaacaacugcuaccuggccaccgcgcuccugacgcugcagcagaucgagcucaaguucaaccccccggcccugcaggacgccuacuaccgcgcccgggcgggggaggccgccaacuucugcgcccugauccucgccuacugcaacaagaccgugggcgagcugggcgacguccgcgagaccauguccuaccuguuccagcacgcgaaccucgacagcugcaagcgggugcugaacgucgugugcaagaccugcgggcagcagcagaccacgcugaagggcguggaggccgucauguacauggggacccucuccuacgagcaguucaagaagggcgugcagauccccugcaccugcgggaagcaggccaccaaguaccuggugcagcaggagagccccuucgucaugauguccgcccccccggcccaguacgagcugaagcacggcacguucaccugcgcgagcgaguacaccggcaacuaccagugcgggcacuacaagcacaucaccuccaaggagacgcucuacugcaucgacggcgcccugcugaccaagagcagcgaguacaaggggcccaucaccgacguguucuacaaggagaacuccuacaccacgaccaucaagcccgugaccuacaagcucgacggcgucgugugcaccgagaucgaccccaagcuggacaacuacuacaagaaggacaacagcuacuucacggagcagccgaucgaccuggugcccaaccagcccuaccccaacgccuccuucgacaacuucaaguucgucugcgacaacaucaaguucgccgacgaccucaaccagcugaccggguacaagaagccggccagccgcgagcugaaggugaccuucuuccccgaccucaacggcgacguggucgcgaucgacuacaagcacuacacccccuccuucaagaagggcgccaagcugcugcacaagcccaucguguggcacgugaacaacgccacgaacaaggccaccuacaagccgaacaccuggugcauccggugccucuggagcaccaagcccgucgagacguccaacagcuucgacgugcugaaguccgaggacgcgcaggggauggacaaccuggccugcgaggaccucaagcccgugagcgaggaggucguggagaaccccaccauccagaaggacgugcuggagugcaacgucaagaccaccgagguggugggcgacaucauccugaagccggccaacaacucccucaagaucacggaggaggucgggcacaccgaccugauggccgccuacguggacaacagcucccugaccaucaagaagcccaacgagcucagccgcgugcugggccugaagacccucgcgacgcacgggcuggccgccgucaacuccgugcccugggacaccaucgccaacuacgccaagccguuccugaacaagguggucagcaccaccacgaacaucgugacccgcugccucaaccgggugugcaccaacuacaugcccuacuucuucacccugcugcuccagcugugcaccuucacgcgcuccaccaacagccggaucaaggcguccaugcccaccaccaucgccaagaacacggucaagagcgugggcaaguucugccuggaggccagcuucaacuaccucaagucccccaacuucagcaagcugaucaacaucaucaucugguuccugcuccuguccgugugccugggcagccucaucuacuccaccgccgcccuggggguccugaugagcaaccucggcaugccguccuacugcaccggguaccgcgagggcuaccugaacagcaccaacgugacgaucgcgaccuacugcaccggcuccauccccugcagcgugugccuguccgggcucgacagccuggacaccuaccccucccuggagacgauccagaucaccaucagcuccuucaagugggaccucaccgccuucggccuggucgccgagugguuccuggccuacauccucuucacccgguucuucuacgugcuggggcuggccgcgaucaugcagcucuucuucagcuacuucgccgugcacuucaucuccaacagcuggcugauguggcugaucaucaaccugguccagauggcccccaucuccgccauggugcgcauguacaucuucuucgcgagcuucuacuacguguggaagagcuacguccacgugguggacggcugcaacuccagcacgugcaugaugugcuacaagcggaaccgcgccacccgggucgagugcaccaccaucgugaacgggguccgccgguccuucuacguguacgccaacggcggcaagggguucugcaagcuccacaacuggaacugcgugaacugcgacacguucugcgccggcagcaccuucaucuccgacgaggucgcccgcgaccugagccugcaguucaagcggccgaucaaccccaccgaccaguccagcuacaucguggacuccgugaccgucaagaacgggagcauccaccucuacuucgacaaggcgggccagaagacguacgagcgccacucccugagccacuucgugaaccuggacaaccuccgggccaacaacaccaaggggucccugcccaucaacgugaucgucuucgacggcaagagcaagugcgaggaguccagcgccaaguccgccagcguguacuacucccagcugaugugccagcccauccuccugcuggaccaggcccucgugagcgacgucggcgacagcgcggagguggccgugaagauguucgacgccuacgucaacaccuucuccagcaccuucaacgugccgauggagaagcugaagacgcugguggccaccgccgaggcggagcucgccaagaacgucucccuggacaacgugcugagcaccuucaucuccgccgcccgccagggguucguggacagcgacgucgagaccaaggacgugguggagugccucaagcugucccaccagagcgacaucgaggucacgggcgacuccugcaacaacuacaugcugaccuacaacaagguggagaacaugaccccccgggaccucggggcgugcaucgacugcagcgcccgccacaucaacgcccagguggccaagucccacaacaucgcccugaucuggaacgucaaggacuucaugagccuguccgagcagcuccggaagcagauccgcagcgcggccaagaagaacaaccugcccuucaagcugaccugcgccacgacccgccagguggugaacgucgugaccaccaagaucgcccucaagggcgggugaggacuaguuauaagacugacuagcccgaugggccucccaacgggcccuccuccccuccuugcaccgagauuaauaaaaaaaaaaaaaaaaaaaaaaaaaaaaaaaaaaaaaaaaaaaaaaaaaaaaaaaaaaaaaaaaugcaucccccccccccccccccccccccccccccccaaaggcucuuuucagagccaccagaauu

SEQ ID NO: 21883 - RNA, 6058 nt, Artificial Sequence
  SARS-CoV-2__MT582496.1__non-structural protein 3 (NSP3) mRNA gc
aggagaaagcuuaccauggcccccaccaaggugaccuucggcgacgacacggucaucgaggugcagggguacaagagcgugaacaucaccuucgagcuggacgagcgcaucgacaagguccucaacgagaagugcuccgccuacaccguggagcugggcaccgaggugaacgaguucgcgugcgucgugacggacgccgugaucaagacccugcagccggucagcgagcuccugaccccccuggggaucgaccucgacgagugguccauggccaccuacuaccuguucgacgagagcggcgaguucaagcuggccucccacauguacugcagcuucuacccccccgacgaggacgaggaggagggggacugcgaggaggaggaguucgagccguccacgcaguacgaguacggcaccgaggacgacuaccagggcaagccccucgaguucggggccaccagcgcggcccugcagcccgaggaggagcaggaggaggacuggcuggacgacgacucccagcagaccgugggccagcaggacgggagcgaggacaaccagacgaccaccauccagaccaucguggagguccagccccagcucgagauggagcugacgccgguggugcagaccaucgaggucaacuccuucagcggcuaccugaagcucaccgacaacguguacaucaagaacgccgacaucguggaggaggccaagaaggucaagcccaccgugguggucaacgcggccaacguguaccugaagcacgggggcggcguggccggggcccugaacaaggccacgaacaacgcgaugcaggucgaguccgacgacuacaucgccaccaacggcccccucaagguggggggcagcugcguccuguccggccacaaccuggccaagcacugccuccacgugguggggcccaacgucaacaagggcgaggacauccagcugcugaagagcgccuacgagaacuucaaccagcacgaggugcuccuggccccgcugcucuccgcggggaucuucggcgccgaccccauccacagccugcgggugugcgucgacaccgugcgcaccaacguguaccuggccgucuucgacaagaaccucuacgacaagcugguguccagcuuccuggagaugaagagcgagaagcagguggagcagaagaucgccgagauccccaaggaggaggucaagcccuucaucacggaguccaagccgagcguggagcagcggaagcaggacgacaagaagaucaaggccugcguggaggaggucaccaccacccucgaggagacgaaguuccugaccgagaaccugcuccuguacaucgacaucaacgggaaccugcaccccgacuccgcgacccucgugagcgacaucgacaucaccuuccugaagaaggacgcccccuacaucgugggcgacgucgugcaggagggcgugcugacggccgucgugauccccaccaagaaggccgggggcaccaccgagaugcucgccaaggcgcugcgcaaggugccgacggacaacuacaucaccaccuaccccgggcagggccugaacggguacaccgucgaggaggccaagaccgugcucaagaagugcaaguccgccuucuacauccugcccagcaucaucuccaacgagaagcaggagauccugggcacggugagcuggaaccuccgggagaugcuggcccacgcggaggagacccgcaagcugaugcccgucugcguggagaccaaggccaucguguccaccauccagcggaaguacaagggcaucaagauccaggagggggucguggacuacggcgcccgcuucuacuucuacacgagcaagaccaccguggccucccugaucaacacccucaacgaccugaacgagacgcuggucaccaugccgcucggguacgugacccacggccugaaccuggaggaggccgcgugguacaugcggagccucaaggugcccgccaccgucuccgugagcucccccgacgccgugacggccuacaacggguaccugaccagcuccagcaagacccccgaggagcacuucaucgagaccaucucccuggccggcagcuacaaggacuggagcuacuccggccagagcacgcagcucgggaucgaguuccugaagcgcggcgacaaguccgucuacuacaccagcaacccgaccaccuuccaccuggacggggaggugaucacguucgacaaccucaagacccugcugucccuccgggaggugcgcaccaucaaggucuucaccacgguggacaacaucaaccugcacacccagguggucgacaugagcaugaccuacggccagcaguucggccccaccuaccuggacggggcggacgugacgaagaucaagccccacaacucccacgagggcaagaccuucuacgugcucccgaacgacgacacccugcgggucgaggccuucgaguacuaccacaccacggaccccagcuuccuggggcgcuacauguccgcccucaaccacaccaagaaguggaaguacccccaggugaacggccugaccagcaucaagugggccgacaacaacugcuaccuggccaccgcgcuccugacgcugcagcagaucgagcucaaguucaaccccccggcccugcaggacgccuacuaccgggcccgcgcgggggaggccgccaacuucugcgcccugauccucgccuacugcaacaagaccgugggcgagcugggcgacguccgggagaccauguccuaccuguuccagcacgcgaaccucgacagcugcaagcgcgugcugaacgucgugugcaagaccugcgggcagcagcagaccacgcugaagggcguggaggccgucauguacauggggacccucuccuacgagcaguucaagaagggcgugcagauccccugcaccugcgggaagcaggccaccaaguaccuggugcagcaggagagccccuucgucaugauguccgcccccccggcccaguacgagcugaagcacggcacguucaccugcgcgagcgaguacaccggcaacuaccagugcgggcacuacaagcacaucaccuccaaggagacgcucuacugcaucgacggcgcccugcugaccaagagcagcgaguacaaggggcccaucaccgacguguucuacaaggagaacuccuacaccacgaccaucaagcccgugaccuacaagcucgacggcgucgugugcaccgagaucgaccccaagcuggacaacuacuacaagaaggacaacagcuacuucacggagcagccgaucgaccuggugcccaaccagcccuaccccaacgccuccuucgacaacuucaaguucgucugcgacaacaucaaguucgccgacgaccucaaccagcugaccggguacaagaagccggccagccgggagcugaaggugaccuucuuccccgaccucaacggcgacguggucgcgaucgacuacaagcacuacacccccuccuucaagaagggcgccaagcugcugcacaagcccaucguguggcacgugaacaacgccacgaacaaggccaccuacaagccgaacaccuggugcauccgcugccucuggagcaccaagcccgucgagacguccaacagcuucgacgugcugaaguccgaggacgcgcaggggauggacaaccuggccugcgaggaccucaagcccgugagcgaggaggucguggagaaccccaccauccagaaggacgugcuggagugcaacgucaagaccaccgagguggugggcgacaucauccugaagccggccaacaacucccucaagaucacggaggaggucgggcacaccgaccugauggccgccuacguggacaacagcucccugaccaucaagaagcccaacgagcucagccgggugcugggccugaagacccucgcgacgcacgggcuggccgccgucaacuccgugcccugggacaccaucgccaacuacgccaagccguuccugaacaagguggucagcaccaccacgaacaucgugacccgcugccucaaccgcgugugcaccaacuacaugcccuacuucuucacccugcugcuccagcugugcaccuucacgcgguccaccaacagccgcaucaaggcguccaugcccaccaccaucgccaagaacacggucaagagcgugggcaaguucugccuggaggccagcuucaacuaccucaagucccccaacuucagcaagcugaucaacaucaucaucugguuccugcuccuguccgugugccugggcagccucaucuacuccaccgccgcccuggggguccugaugagcaaccucggcaugccguccuacugcaccggguaccgggagggcuaccugaacagcaccaacgugacgaucgcgaccuacugcaccggcuccauccccugcagcgugugccuguccgggcucgacagccuggacaccuaccccucccuggagacgauccagaucaccaucagcuccuucaagugggaccucaccgccuucggccuggucgccgagugguuccuggccuacauccucuucacccgcuucuucuacgugcuggggcuggccgcgaucaugcagcucuucuucagcuacuucgccgugcacuucaucuccaacagcuggcugauguggcugaucaucaaccugguccagauggcccccaucuccgccauggugcggauguacaucuucuucgcgagcuucuacuacguguggaagagcuacguccacgugguggacggcugcaacuccagcacgugcaugaugugcuacaagcgcaaccgggccacccgcgucgagugcaccaccaucgugaacgggguccggcgcuccuucuacguguacgccaacggcggcaagggguucugcaagcuccacaacuggaacugcgugaacugcgacacguucugcgccggcagcaccuucaucuccgacgaggucgcccgggaccugagccugcaguucaagcgcccgaucaaccccaccgaccaguccagcuacaucguggacuccgugaccgucaagaacgggagcauccaccucuacuucgacaaggcgggccagaagacguacgagcggcacucccugagccacuucgugaaccuggacaaccuccgcgccaacaacaccaaggggucccugcccaucaacgugaucgucuucgacggcaagagcaagugcgaggaguccagcgccaaguccgccagcguguacuacucccagcugaugugccagcccauccuccugcuggaccaggcccucgugagcgacgucggcgacagcgcggagguggccgugaagauguucgacgccuacgucaacaccuucuccagcaccuucaacgugccgauggagaagcugaagacgcugguggccaccgccgaggcggagcucgccaagaacgucucccuggacaacgugcugagcaccuucaucuccgccgcccggcagggguucguggacagcgacgucgagaccaaggacgugguggagugccucaagcugucccaccagagcgacaucgaggucacgggcgacuccugcaacaacuacaugcugaccuacaacaagguggagaacaugaccccccgcgaccucggggcgugcaucgacugcagcgcccggcacaucaacgcccagguggccaagucccacaacaucgcccugaucuggaacgucaaggacuucaugagccuguccgagcagcuccgcaagcagauccggagcgcggccaagaagaacaaccugcccuucaagcugaccugcgccacgacccgccagguggugaacgucgugaccaccaagaucgcccucaagggcgggugaggacuaguuauaagacugacuagcccgaugggccucccaacgggcccuccuccccuccuugcaccgagauuaauaaaaaaaaaaaaaaaaaaaaaaaaaaaaaaaaaaaaaaaaaaaaaaaaaaaaaaaaaaaaaaaaugcaucccccccccccccccccccccccccccccccaaaggcucuuuucagagccaccagaauu

SEQ ID NO: 21884 - RNA, 6058 nt, Artificial Sequence
  SARS-CoV-2__MT499218.1__non-structural protein 3 (NSP3) mRNA gc
aggagaaagcuuaccauggcccccaccaaggugaccuucggcgacgacacggucaucgaggugcagggguacaagagcgugaacaucaccuucgagcuggacgagcgcaucgacaagguccucaacgagaagugcuccgccuacaccguggagcugggcaccgaggugaacgaguucgcgugcgucguggccgacgccgugaucaagacgcugcagccggucagcgagcuccugaccccccuggggaucgaccucgacgagugguccauggccaccuacuaccuguucgacgagagcggcgaguucaagcuggccucccacauguacugcagcuucuacccccccgacgaggacgaggaggagggggacugcgaggaggaggaguucgagccguccacccaguacgaguacggcacggaggacgacuaccagggcaagccccucgaguucggggcgaccagcgccgcccugcagcccgaggaggagcaggaggaggacuggcuggacgacgacucccagcagaccgugggccagcaggacgggagcgaggacaaccagaccacgaccauccagaccaucguggagguccagccccagcucgagauggagcugaccccgguggugcagacgaucgaggucaacuccuucagcggcuaccugaagcucaccgacaacguguacaucaagaacgccgacaucguggaggaggcgaagaaggucaagcccaccgugguggucaacgccgccaacguguaccugaagcacgggggcggcguggccggggcccugaacaaggcgaccaacaacgccaugcaggucgaguccgacgacuacaucgccacgaacggcccccucaagguggggggcagcugcguccuguccggccacaaccuggccaagcacugccuccacgugguggggcccaacgucaacaagggcgaggacauccagcugcugaagagcgccuacgagaacuucaaccagcacgaggugcuccuggcgccgcugcucuccgccgggaucuucggcgccgaccccauccacagccugcgggugugcgucgacaccgugcgcaccaacguguaccuggccgucuucgacaagaaccucuacgacaagcugguguccagcuuccuggagaugaagagcgagaagcagguggagcagaagaucgccgagauccccaaggaggaguucaagcccuucaucaccgaguccaagccgagcgucgagcagcggaagcaggacgacaagaagaucaaggcgugcguggaggaggugacgaccacccucgaggagaccaaguuccugacggagaaccugcuccuguacaucgacaucaacgggaaccugcaccccgacuccgccacccucgucagcgacaucgacaucaccuuccugaagaaggacgcccccuacaucgugggcgacgugguccaggagggcgugcugaccgccguggucauccccacgaagaaggccgggggcaccaccgagaugcucgcgaaggcccugcgcaaggugccgaccgacaacuacaucacgaccuaccccgggcagggccugaacggguacaccguggaggaggccaagaccguccucaagaagugcaaguccgccuucuacauccugcccagcaucaucuccaacgagaagcaggagauccugggcaccgugagcuggaaccuccgggagaugcuggcgcacgccgaggagacgcgcaagcugaugcccgugugcgucgagaccaaggccaucguguccaccauccagcggaaguacaagggcaucaagauccaggaggggguggucgacuacggcgcccgcuucuacuucuacaccagcaagacgaccguggccucccugaucaacacccucaacgaccugaacgagacccuggugacgaugccgcucggguacgucacccacggccugaaccuggaggaggcggcccgguacaugcgcagccucaaggugcccgccaccguguccgucagcucccccgacgccgugaccgccuacaacggguaccugacgagcuccagcaagacccccgaggagcacuucaucgagaccaucucccuggcgggcagcuacaaggacuggagcuacuccggccagagcacccagcucgggaucgaguuccugaagcggggcgacaaguccguguacuacacgagcaacccgaccaccuuccaccuggacggggaggucaucaccuucgacaaccucaagacgcugcugucccuccgcgaggugcggaccaucaagguguucaccaccgucgacaacaucaaccugcacacgcaggugguggacaugagcaugaccuacggccagcaguucggccccaccuaccuggacggggccgacgucaccaagaucaagccccacaacucccacgagggcaagacguucuacgugcucccgaacgacgacacccugcgcguggaggccuucgaguacuaccacaccaccgaccccagcuuccuggggcgguacauguccgcccucaaccacacgaagaaguggaaguacccccaggucaacggccugaccagcaucaagugggccgacaacaacugcuaccuggcgaccgcccuccugacccugcagcagaucgagcucaaguucaaccccccggcccugcaggacgccuacuaccgcgcgcgggccggggaggccgccaacuucugcgcccugauccucgcguacugcaacaagacggugggcgagcugggcgacgugcgcgagaccauguccuaccuguuccagcacgccaaccucgacagcugcaagcggguccugaacguggucugcaagaccugcgggcagcagcagaccacccugaagggcguggaggccgugauguacauggggacgcucuccuacgagcaguucaagaagggcguccagauccccugcaccugcgggaagcaggccaccaaguaccuggugcagcaggagagccccuucgugaugauguccgcccccccggcgcaguacgagcugaagcacggcaccuucacgugcgccagcgaguacaccggcaacuaccagugcgggcacuacaagcacaucaccuccaaggagacccucuacugcaucgacggcgcccugcugacgaagagcagcgaguacaaggggcccaucaccgacgucuucuacaaggagaacuccuacaccaccacgaucaagcccgugaccuacaagcucgacggcguggucugcaccgagaucgaccccaagcuggacaacuacuacaagaaggacaacagcuacuucaccgagcagccgaucgaccuggugcccaaccagcccuaccccaacgccuccuucgacaacuucaaguucgugugcgacaacaucaaguucgccgacgaccucaaccagcugacgggguacaagaagccggcgagccgcgagcugaaggucaccuucuuccccgaccucaacggcgacgugguggccaucgacuacaagcacuacacccccuccuucaagaagggcgccaagcugcugcacaagcccaucgucuggcacgugaacaacgccaccaacaaggcgacguacaagccgaacaccuggugcauccggugccucuggagcaccaagcccguggagaccuccaacagcuucgacguccugaaguccgaggacgcccaggggauggacaaccuggccugcgaggaccucaagcccgugagcgaggagguggucgagaaccccacgauccagaaggacgugcuggagugcaacgugaagaccaccgaggucgugggcgacaucauccugaagccggccaacaacucccucaagaucaccgaggagguggggcacacggaccugauggccgcguacgucgacaacagcucccugaccaucaagaagcccaacgagcucagccgcgugcugggccugaagacccucgccacccacgggcuggccgccgugaacuccguccccugggacacgaucgccaacuacgcgaagccguuccugaacaagguggugagcaccaccaccaacaucgucacgcgcugccucaaccgggugugcaccaacuacaugcccuacuucuucacccugcugcuccagcugugcaccuucacccgcuccacgaacagccggaucaaggccuccaugcccaccaccaucgccaagaacaccgugaagagcgucggcaaguucugccuggaggccagcuucaacuaccucaagucccccaacuucagcaagcugaucaacaucaucaucugguuccugcuccuguccgugugccugggcagccucaucuacuccacggccgcgcugggggugcugaugagcaaccucggcaugccguccuacugcaccggguaccgcgagggcuaccugaacagcaccaacgucaccaucgccacguacugcaccggcuccauccccugcagcgugugccuguccgggcucgacagccuggacaccuaccccucccuggagaccauccagaucacgaucagcuccuucaagugggaccucaccgccuucggccugguggccgagugguuccuggccuacauccucuucacccgguucuucuacguccuggggcuggcggccaucaugcagcucuucuucagcuacuucgccgugcacuucaucuccaacagcuggcugauguggcugaucaucaaccuggugcagauggcccccaucuccgcgaugguccgcauguacaucuucuucgccagcuucuacuacguguggaagagcuacgugcacgucguggacggcugcaacuccagcaccugcaugaugugcuacaagcggaaccgcgccacgcggguggagugcaccaccaucgucaacggggugcgccgguccuucuacgucuacgccaacggcggcaagggguucugcaagcuccacaacuggaacugcgugaacugcgacaccuucugcgccggcagcacguucaucuccgacgagguggcgcgcgaccugagccugcaguucaagcggccgaucaaccccaccgaccaguccagcuacaucgucgacuccgugaccgugaagaacgggagcauccaccucuacuucgacaaggccggccagaagaccuacgagcgccacucccugagccacuucgucaaccuggacaaccuccgggccaacaacacgaaggggucccugcccaucaacgugaucguguucgacggcaagagcaagugcgaggaguccagcgccaaguccgccagcgucuacuacucccagcugaugugccagcccauccuccugcuggaccaggcgcucgugagcgacgugggcgacagcgccgaggucgccgugaagauguucgacgccuacgugaacaccuucuccagcaccuucaacgucccgauggagaagcugaagacccugguggccacggcggaggccgagcucgccaagaacgugucccuggacaacguccugagcaccuucaucuccgccgcgcgccagggguucguggacagcgacguggagaccaaggacgucguggagugccucaagcugucccaccagagcgacaucgaggugaccggcgacuccugcaacaacuacaugcugacguacaacaaggucgagaacaugaccccccgggaccucggggccugcaucgacugcagcgcccgccacaucaacgcccagguggccaagucccacaacaucgcgcugaucuggaacgugaaggacuucaugagccuguccgagcagcuccggaagcagauccgcagcgccgccaagaagaacaaccugcccuucaagcugaccugcgccaccacgcgccaggucgugaacguggucaccaccaagaucgcccucaagggcgggugaggacuaguuauaagacugacuagcccgaugggccucccaacgggcccuccuccccuccuugcaccgagauuaauaaaaaaaaaaaaaaaaaaaaaaaaaaaaaaaaaaaaaaaaaaaaaaaaaaaaaaaaaaaaaaaaugcaucccccccccccccccccccccccccccccccaaaggcucuuuucagagccaccagaauu

SEQ ID NO: 21885 - RNA, 6058 nt, Artificial Sequence
  SARS-CoV-2__MT576035.1__non-structural protein 3 (NSP3) mRNA gc
aggagaaagcuuaccauggcccccaccaaggugaccuucggcgacgacacggucaucgaggugcagggguacaagagcgugaacaucaccuucgagcuggacgagcgcaucgacaagguccucaacgagaagugcuccgccuacaccguggagcugggcaccgaggugaacgaguucgcgugcgucguggccgacgccgugaucaagacgcugcagccggucagcgagcuccugaccccccuggggaucgaccucgacgagugguccauggccaccuacuaccuguucgacgagagcggcgaguucaagcuggccucccacauguacugcagcuucuacccccccgacgaggacgaggaggagggggacugcgaggaggaggaguucgagccguccacccaguacgaguacggcacggaggacgacuaccagggcaagccccucgaguucggggcgaccagcgccgcccugcagcccgaggaggagcaggaggaggacuggcuggacgacgacucccagcagaccgugggccagcaggacgggagcgaggacaaccagaccacgaccauccagaccaucguggagguccagccccagcucgagauggagcugaccccgguggugcagacgaucgaggucaacuccuucagcggcuaccugaagcucaccgacaacguguacaucaagaacgccgacaucguggaggaggcgaagaaggucaagcccaccgugguggucaacgccgccaacguguaccugaagcacgggggcggcguggccggggcccugaacaaggcgaccaacaacgccaugcaggucgaguccgacgacuacaucgccacgaacggcccccucaagguggggggcagcugcguccuguccggccacaaccuggccaagcacugccuccacgugguggggcccaacgucaacaagggcgaggacauccagcugcugaagagcgccuacgagaacuucaaccagcacgaggugcuccuggcgccgcugcucuccgccgggaucuucggcgccgaccccauccacagccugcgggugugcgucgacaccgugcgcaccaacguguaccuggccgucuucgacaagaaccucuacgacaagcugguguccagcuuccuggagaugaagagcgagaagcagguggagcagaagaucgccgagauccccaaggaggaggucaagcccuucaucaccgaguccaagccgagcguggagcagcggaagcaggacgacaagaagaucaaggcgugcguggaggaggucacgaccacccucgaggagaccaaguuccugacggagaaccugcuccuguacaucgacaucaacgggaaccugcaccccgacuccgccacccucgugagcgacaucgacaucaccuuccugaagaaggacgcccccuacaucgugggcgacgucgugcaggagggcgugcugaccgccgucgugauccccacgaagaaggccgggggcaccaccgagaugcucgcgaaggcccugcgcaaggugccgaccgacaacuacaucacgaccuaccccgggcagggccugaacggguacaccgucgaggaggccaagaccgugcucaagaagugcaaguccgccuucuacauccugcccagcaucaucuccaacgagaagcaggagauccugggcaccgugagcuggaaccuccgggagaugcuggcgcacgccgaggagacgcgcaagcugaugcccgucugcguggagaccaaggccaucguguccaccauccagcggaaguacaagggcaucaagauccaggagggggucguggacuacggcgcccgcuucuacuucuacaccagcaagacgaccguggccucccugaucaacacccucaacgaccugaacgagacccuggucacgaugccgcucggguacgugacccacggccugaaccuggaggaggcggcccgguacaugcgcagccucaaggugcccgccaccgucuccgugagcucccccgacgccgugaccgccuacaacggguaccugacgagcuccagcaagacccccgaggagcacuucaucgagaccaucucccuggcgggcagcuacaaggacuggagcuacuccggccagagcacccagcucgggaucgaguuccugaagcggggcgacaaguccgucuacuacacgagcaacccgaccaccuuccaccuggacggggaggugaucaccuucgacaaccucaagacgcugcugucccuccgcgaggugcggaccaucaaggucuucaccaccguggacaacaucaaccugcacacgcagguggucgacaugagcaucaccuacggccagcaguucggccccaccuaccuggacggggccgacgugaccaagaucaagccccacaacucccacgagggcaagacguucuacgugcucccgaacgacgacacccugcgcgucgaggccuucgaguacuaccacaccaccgaccccagcuuccuggggcgguacauguccgcccucaaccacacgaagaaguggaaguacccccaggugaacggccugaccagcaucaagugggccgacaacaacugcuaccuggcgaccgcccuccugacccugcagcagaucgagcucaaguucaaccccccggcccugcaggacgccuacuaccgcgcgcgggccggggaggccgccaacuucugcgcccugauccucgcguacugcaacaagacggugggcgagcugggcgacguccgcgagaccauguccuaccuguuccagcacgccaaccucgacagcugcaagcgggugcugaacgucgugugcaagaccugcgggcagcagcagaccacccugaagggcguggaggccgucauguacauggggacgcucuccuacgagcaguucaagaagggcgugcagauccccugcaccugcgggaagcaggccaccaaguaccuggugcagcaggagagccccuucgucaugauguccgcccccccggcgcaguacgagcugaagcacggcaccuucacgugcgccagcgaguacaccggcaacuaccagugcgggcacuacaagcacaucaccuccaaggagacccucuacugcaucgacggcgcccugcugacgaagagcagcgaguacaaggggcccaucaccgacguguucuacaaggagaacuccuacaccaccacgaucaagcccgugaccuacaagcucgacggcgucgugugcaccgagaucgaccccaagcuggacaacuacuacaagaaggacaacagcuacuucaccgagcagccgaucgaccuggugcccaaccagcccuaccccaacgccuccuucgacaacuucaaguucgucugcgacaacaucaaguucgccgacgaccucaaccagcugacgggguacaagaagccggcgagccgcgagcugaaggugaccuucuuccccgaccucaacggcgacguggucgccaucgacuacaagcacuacacccccuccuucaagaagggcgccaagcugcugcacaagcccaucguguggcacgugaacaacgccaccaacaaggcgacguacaagccgaacaccuggugcauccggugccucuggagcaccaagcccgucgagaccuccaacagcuucgacgugcugaaguccgaggacgcccaggggauggacaaccuggccugcgaggaccucaagcccgugagcgaggaggucguggagaaccccacgauccagaaggacgugcuggagugcaacgucaagaccaccgagguggugggcgacaucauccugaagccggccaacaacucccucaagaucaccgaggaggucgggcacacggaccugauggccgcguacguggacaacagcucccugaccaucaagaagcccaacgagcucagccgcgugcugggccugaagacccucgccacccacgggcuggccgccgucaacuccgugcccugggacacgaucgccaacuacgcgaagccguuccugaacaagguggucagcaccaccaccaacaucgugacgcgcugccucaaccgggugugcaccaacuacaugcccuacuucuucacccugcugcuccagcugugcaccuucacccgcuccacgaacagccggaucaaggccuccaugcccaccaccaucgccaagaacaccgucaagagcgugggcaaguucugccuggaggccagcuucaacuaccucaagucccccaacuucagcaagcugaucaacaucaucaucugguuccugcuccuguccgugugccugggcagccucaucuacuccacggccgcgcuggggguccugaugagcaaccucggcaugccguccuacugcaccggguaccgcgagggcuaccugaacagcaccaacgugaccaucgccacguacugcaccggcuccauccccugcagcgugugccuguccgggcucgacagccuggacaccuaccccucccuggagaccauccagaucacgaucagcuccuucaagugggaccucaccgccuucggccuggucgccgagugguuccuggccuacauccucuucacccgguucuucuacgugcuggggcuggcggccaucaugcagcucuucuucagcuacuucgccgugcacuucaucuccaacagcuggcugauguggcugaucaucaaccugguccagauggcccccaucuccgcgauggugcgcauguacaucuucuucgccagcuucuacuacguguggaagagcuacguccacgugguggacggcugcaacuccagcaccugcaugaugugcuacaagcggaaccgcgccacgcgggucgagugcaccaccaucgugaacgggguccgccgguccuucuacguguacgccaacggcggcaagggguucugcaagcuccacaacuggaacugcgugaacugcgacaccuucugcgccggcagcacguucaucuccgacgaggucgcgcgcgaccugagccugcaguucaagcggccgaucaaccccaccgaccaguccagcuacaucguggacuccgugaccgucaagaacgggagcauccaccucuacuucgacaaggccggccagaagaccuacgagcgccacucccugagccacuucgugaaccuggacaaccuccgggccaacaacacgaaggggucccugcccaucaacgugaucgucuucgacggcaagagcaagugcgaggaguccagcgccaaguccgccagcguguacuacucccagcugaugugccagcccauccuccugcuggaccaggcgcucgugagcgacgucggcgacagcgccgagguggccgugaagauguucgacgccuacgucaacaccuucuccagcaccuucaacgugccgauggagaagcugaagacccugguggccacggcggaggccgagcucgccaagaacgucucccuggacaacgugcugagcaccuucaucuccgccgcgcgccagggguucguggacagcgacgucgagaccaaggacgugguggagugccucaagcugucccaccagagcgacaucgaggucaccggcgacuccugcaacaacuacaugcugacguacaacaagguggagaacaugaccccccgggaccucggggccugcaucgacugcagcgcccgccacaucaacgcccagguggccaagucccacaacaucgcgcugaucuggaacgucaaggacuucaugagccuguccgagcagcuccggaagcagauccgcagcgccgccaagaagaacaaccugcccuucaagcugaccugcgccaccacgcgccagguggugaacgucgugaccaccaagaucgcccucaagggcgggugaggacuaguuauaagacugacuagcccgaugggccucccaacgggcccuccuccccuccuugcaccgagauuaauaaaaaaaaaaaaaaaaaaaaaaaaaaaaaaaaaaaaaaaaaaaaaaaaaaaaaaaaaaaaaaaaugcaucccccccccccccccccccccccccccccccaaaggcucuuuucagagccaccagaauu

SEQ ID NO: 21886 - RNA, 6058 nt, Artificial Sequence
  SARS-CoV-2__MT576041.1__non-structural protein 3 (NSP3) mRNA gc
aggagaaagcuuaccauggcccccaccaaggugaccuucggcgacgacacggucaucgaggugcagggguacaagagcgugaacaucaccuucgagcuggacgagcgcaucgacaagguccucaacgagaagugcuccgccuacaccguggagcugggcaccgaggugaacgaguucgcgugcgucguggccgacgccgugaucaagacgcugcagccggucagcgagcuccugaccccccuggggaucgaccucgacgagugguccauggccaccuacuaccuguucgacgagagcggcgaguucaagcuggccucccacauguacugcagcuucuacccccccgacgaggacgaggaggagggggacugcgaggaggaggaguucgagccguccacccaguacgaguacggcacggaggacgacuaccagggcaagccccucgaguucggggcgaccagcgccgcccugcagcccgaggaggagcaggaggaggacuggcuggacgacgacucccagcagaccgugggccagcaggacgggagcgaggacaaccagaccacgaccauccagaccaucguggagguccagccccagcucgagauggagcugaccccgguggugcagacgaucgaggucaacuccuucagcggcuaccugaagcucaccgacaacguguacaucaagaacgccgacaucguggaggaggcgaagaaggucaagcccaccgugguggucaacgccgccaacguguaccugaagcacgggggcggcguggccggggcccugaacaaggcgaccaacaacgccaugcaggucgaguccgacgacuacaucgccacgaacggcccccucaagguggggggcagcugcguccuguccggccacaaccuggccaagcacugccuccacgugguggggcccaacgucaacaagggcgaggacauccagcugcugaagagcgccuacgagaacuucaaccagcacgaggugcuccuggcgccgcugcucuccgccgggaucuucggcgccgaccccauccacagccugcgggugugcgucgacaccgugcgcaccaacguguaccuggccgucuucgacaagaaccucuacgacaagcugguguccagcuuccuggagaugaagagcgagaagcagguggagcagaagaucgccgagauccccaaggaggaggucaagcccuucaucaccgaguccaagccgagcguggagcagcggaagcaggacgacaagaagaucaaggcgugcguggaggaggucacgaccacccucgaggagaccaaguuccugacggagaaccugcuccuguacaucgacaucaacgggaaccugcaccccgacuccaccacccucgugagcgacaucgacaucaccuuccugaagaaggacgcccccuacaucgugggcgacgucgugcaggagggcgugcugacggccgucgugauccccaccaagaaggccgggggcaccaccgagaugcucgccaaggcgcugcgcaaggugccgacggacaacuacaucaccaccuaccccgggcagggccugaacggguacaccgucgaggaggccaagaccgugcucaagaagugcaaguccgccuucuacauccugcccagcaucaucuccaacgagaagcaggagauccugggcacggugagcuggaaccuccgggagaugcuggcccacgcggaggagacccgcaagcugaugcccgucugcguggagaccaaggccaucguguccaccauccagcggaaguacaagggcaucaagauccaggagggggucguggacuacggcgcccgcuucuacuucuacacgagcaagaccaccguggccucccugaucaacacccucaacgaccugaacgagacgcuggucaccaugccgcucggguacgugacccacggccugaaccuggaggaggccgcgcgguacaugcgcagccucaaggugcccgccaccgucuccgugagcucccccgacgccgugacggccuacaacggguaccugaccagcuccagcaagacccccgaggagcacuucaucgagaccaucucccuggccggcagcuacaaggacuggagcuacuccggccagagcacgcagcucgggaucgaguuccugaagcggggcgacaaguccgucuacuacaccagcaacccgaccaccuuccaccuggacggggaggugaucacguucgacaaccucaagacccugcugucccuccgcgaggugcggaccaucaaggucuucaccacgguggacaacaucaaccugcacacccagguggucgacaugagcaugaccuacggccagcaguucggccccaccuaccuggacggggcggacgugacgaagaucaagccccacaacucccacgagggcaagaccuucuacgugcucccgaacgacgacacccugcgcgucgaggccuucgaguacuaccacaccacggaccccagcuuccuggggcgguacauguccgcccucaaccacaccaagaaguggaaguacccccaggugaacggccugaccagcaucaagugggccgacaacaacugcuaccuggccaccgcgcuccugacgcugcagcagaucgagcucaaguucaaccccccggcccugcaggacgccuacuaccgcgcccgggcgggggaggccgccaacuucugcgcccugauccucgccuacugcaacaagaccgugggcgagcugggcgacguccgcgagaccauguccuaccuguuccagcacgcgaaccucgacagcugcaagcgggugcugaacgucgugugcaagaccugcgggcagcagcagaccacgcugaagggcguggaggccgucaucuacauggggacccucuccuacgagcaguucaagaagggcgugcagauccccugcaccugcgggaagcaggccaccaaguaccuggugcagcaggagagccccuucgucaugauguccgcccccccggcccaguacgagcugaagcacggcacguucaccugcgcgagcgaguacaccggcaacuaccagugcgggcacuacaagcacaucaccuccaaggagacgcucuacugcaucgacggcgcccugcugaccaagagcagcgaguacaaggggcccaucaccgacguguucuacaaggagaacuccuacaccacgaccaucaagcccgugaccuacaagcucgacggcgucgugugcaccgagaucgaccccaagcuggacaacuacuacaagaaggacaacagcuacuucacggagcagccgaucgaccuggugcccaaccagcccuaccccaacgccuccuucgacaacuucaaguucgucugcgacaacaucaaguucgccgacgaccucaaccagcugaccggguacaagaagccggccagccgcgagcugaaggugaccuucuuccccgaccucaacggcgacguggucgcgaucgacuacaagcacuacacccccuccuucaagaagggcgccaagcugcugcacaagcccaucguguggcacgugaacaacgccacgaacaaggccaccuacaagccgaacaccuggugcauccggugccucuggagcaccaagcccgucgagacguccaacagcuucgacgugcugaaguccgaggacgcgcaggggauggacaaccuggccugcgaggaccucaagcccgugagcgaggaggucguggagaaccccaccauccagaaggacgugcuggagugcaacgucaagaccaccgagguggugggcgacaucauccugaagccggccaacaacucccucaagaucacggaggaggucgggcacaccgaccugauggccgccuacguggacaacagcucccugaccaucaagaagcccaacgagcucagccgcgugcugggccugaagacccucgcgacgcacgggcuggccgccgucaacuccgugcccugggacaccaucgccaacuacgccaagccguuccugaacaagguggucagcaccaccacgaacaucgugacccgcugccucaaccgggugugcaccaacuacaugcccuacuucuucacccugcugcuccagcugugcaccuucacgcgcuccaccaacagccggaucaaggcguccaugcccaccaccaucgccaagaacacggucaagagcgugggcaaguucugccuggaggccagcuucaacuaccucaagucccccaacuucagcaagcugaucaacaucaucaucugguuccugcuccuguccgugugccugggcagccucaucuacuccaccgccgcccuggggguccugaugagcaaccucggcaugccguccuacugcaccggguaccgcgagggcuaccugaacagcaccaacgugacgaucgcgaccuacugcaccggcuccauccccugcagcgugugccuguccgggcucgacagccuggacaccuaccccucccuggagacgauccagaucaccaucagcuccuucaagugggaccucaccgccuucggccuggucgccgagugguuccuggccuacauccucuucacccgguucuucuacgugcuggggcuggccgcgaucaugcagcucuucuucagcuacuucgccgugcacuucaucuccaacagcuggcugauguggcugaucaucaaccugguccagauggcccccaucuccgccauggugcgcauguacaucuucuucgcgagcuucuacuacguguggaagagcuacguccacgugguggacggcugcaacuccagcacgugcaugaugugcuacaagcggaaccgcgccacccgggucgagugcaccaccaucgugaacgggguccgccgguccuucuacguguacgccaacggcggcaagggguucugcaagcuccacaacuggaacugcgugaacugcgacacguucugcgccggcagcaccuucaucuccgacgaggucgcccgcgaccugagccugcaguucaagcggccgaucaaccccaccgaccaguccagcuacaucguggacuccgugaccgucaagaacgggagcauccaccucuacuucgacaaggcgggccagaagacguacgagcgccacucccugagccacuucgugaaccuggacaaccuccgggccaacaacaccaaggggucccugcccaucaacgugaucgucuucgacggcaagagcaagugcgaggaguccagcgccaaguccgccagcguguacuacucccagcugaugugccagcccauccuccugcuggaccaggcccucgugagcgacgucggcgacagcgcggagguggccgugaagauguucgacgccuacgucaacaccuucuccagcaccuucaacgugccgauggagaagcugaagacgcugguggccaccgccgaggcggagcucgccaagaacgucucccuggacaacgugcugagcaccuucaucuccgccgcccgccagggguucguggacagcgacgucgagaccaaggacgugguggagugccucaagcugucccaccagagcgacaucgaggucacgggcgacuccugcaacaacuacaugcugaccuacaacaagguggagaacaugaccccccgggaccucggggcgugcaucgacugcagcgcccgccacaucaacgcccagguggccaagucccacaacaucgcccugaucuggaacgucaaggacuucaugagccuguccgagcagcuccggaagcagauccgcagcgacgcgaagaagaacaaccugcccuucaagcugaccugcgccacgacccgccagguggugaacgucgugaccaccaagaucgcccucaagggcgggugaggacuaguuauaagacugacuagcccgaugggccucccaacgggcccuccuccccuccuugcaccgagauuaauaaaaaaaaaaaaaaaaaaaaaaaaaaaaaaaaaaaaaaaaaaaaaaaaaaaaaaaaaaaaaaaaugcaucccccccccccccccccccccccccccccccaaaggcucuuuucagagccaccagaauu

SEQ ID NO: 21887 - RNA, 6058 nt, Artificial Sequence
  SARS-CoV-2__MT576044.1__non-structural protein 3 (NSP3) mRNA gc
aggagaaagcuuaccauggcccccaccaaggugaccuucggcgacgacacggucaucgaggugcagggguacaagagcgugaacaucaccuucgagcuggacgagcgcaucgacaagguccucaacgagaagugcuccgccuacaccguggagcugggcaccgaggugaacgaguucgcgugcgucguggccgacgccgugaucaagacgcugcagccggucagcgagcuccugaccccccuggggaucgaccucgacgagugguccauggccaccuacuaccuguucgacgagagcggcgaguucaagcuggccucccacauguacugcagcuucuacccccccgacgaggacgaggaggagggggacugcgaggaggaggaguucgagccguccacccaguacgaguacggcacggaggacgacuaccagggcaagccccucgaguucggggcgaccagcgccgcccugcagcccgaggaggagcaggaggaggacuggcuggacgacgacucccagcagaccgugggccagcaggacgggagcgaggacaaccagaccacgaccauccagaccaucguggagguccagccccagcucgagauggagcugaccccgguggugcagacgaucgaggucaacuccuucagcggcuaccugaagcucaccgacaacguguacaucaagaacgccgacaucguggaggaggcgaagaaggucaagcccaccgugguggucaacgccgccaacguguaccugaagcacgggggcggcguggccggggcccugaacaaggcgaccaacaacgccaugcaggucgaguccgacgacuacaucgccacgaacggcccccucaagguggggggcagcugcguccuguccggccacaaccuggccaagcacugccuccacgugguggggcccaacgucaacaagggcgaggacauccagcugcugaagagcgccuacgagaacuucaaccagcacgaggugcuccuggcgccgcugcucuccgccgggaucuucggcgccgaccccauccacagccugcgggugugcgucgacaccgugcgcaccaacguguaccuggccgucuucgacaagaaccucuacgacaagcugguguccagcuuccuggagaugaagagcgagaagcagguggagcagaagaucgccgagauccccaaggaggaggucaagcccuucaucaccgaguccaagccgagcguggagcagcggaagcaggacgacaagaagaucaaggcgugcguggaggaggucacgaccacccucgaggagaccaaguuccugacggagaaccugcuccuguacaucgacaucaacgggaaccugcaccccgacuccgccacccucgugagcgacaucgacaucaccuuccugaagaaggacgcccccuacaucgugggcgacgucgugcaggagggcgugcugaccgccgucgugauccccacgaagaaggccgggggcaccaccgagaugcucgcgaaggcccugcgcaaggugccgaccgacaacuacaucacgaccuaccccgggcagggccugaacggguacaccgucgaggaggccaagaccgugcucaagaagugcaaguccgccuucuacauccugcccagcaucaucuccaacgagaagcaggagauccugggcaccgugagcuggaaccuccgggagaugcuggcgcacgccgaggagacgcgcaagcugaugcccgucugcguggagaccaaggccaucguguccaccauccagcggaaguacaagggcaucaagauccaggagggggucguggacuacggcgcccgcuucuacuucuacaccagcaagacgaccguggccucccugaucaacacccucaacgaccugaacgagacccuggucacgaugccgcucggguacgugacccacggccugaaccuggaggaggcggcccgguacaugcgcagccucaaggugcccgccaccgucuccgugagcucccccgacgccgugaccgccuacaacggguaccugacgagcuccagcaagacccccgaggagcacuucaucgagaccaucucccuggcgggcagcuacaaggacuggagcuacuccggccagagcacccagcucgggaucgaguuccugaagcggggcgacaaguccgucuacuacacgagcaacccgaccaccuuccaccuggacggggaggugaucaccuucgacaaccucaagacgcugcugucccuccgcgaggugcggaccaucaaggucuucaccaccguggacaacaucaaccugcacacgcagguggucgacaugagcaugaccuacggccagcaguucggccccaccuaccuggacggggccgacgugaccaagaucaagccccacaacucccacgagggcaagacguucuacgugcucccgaacgacgacacccugcgcgucgaggccuucgaguacuaccacaccaccgaccccagcuuccuggggcgguacauguccgcccucaaccacacgaagaaguggaaguacccccaggugaacggccugaccagcaucaagugggccgacaacaacugcuaccuggcgaccgcccuccugacccugcagcagaucgagcucaaguucaaccccccggcccugcaggacgccuacuaccgcgcgcgggccggggaggccgccaacuucugcgcccugauccucgcguacugcaacaagacggugggcgagcugggcgacguccgcgagaccauguccuaccuguuccagcacgccaaccucgacagcugcaagcgggugcugaacgucgugugcaagaccugcgggcagcagcagaccacccugaagggcguggaggccgucauguacauggggacgcucuccuacgagcaguucaagaagggcgugcagauccccugcaccugcgggaagcaggccaccaaguaccuggugcagcaggagagccccuucgucaugauguccgcccccccggcgcaguacgagcugaagcacggcaccuucacgugcgccagcgaguacaccggcaacuaccagugcgggcacuacaagcacaucaccuccaaggagacccucuacugcaucgacggcgcccugcugacgaagagcagcgaguacaaggggcccaucaccgacguguucuacaaggagaacuccuacaccaccacgaucaagcccgugaccuacaagcucgacggcgucgugugcaccgagaucgaccccaagcuggacaacuacuacaagaaggacaacagcuacuucaccgagcagccgaucgaccuggugcccaaccagcccuaccccaacgccuccuucgacaacuucaaguucgucugcgacaacaucaaguucgccgacgaccucaaccagcugacgggguacaagaagccggcgagccgcgagcugaaggugaccuucuuccccgaccucaacggcgacguggucgccaucgacuacaagcacuacacccccuccuucaagaagggcgccaagcugcugcacaagcccaucguguggcacgugaacaacgccaccaacaaggcgacguacaagccgaacaccuggugcauccggugccucuggagcaccaagcccgucgagaccuccaacagcuucgacgugcugaaguccgaggacgcccaggggauggacaaccuggccugcgaggaccucaagcccgugagcgaggaggucguggagaaccccacgauccagaaggacgugcuggagugcaacgucaagaccaccgagguggugggcgacaucauccugaagccggccaacaacucccucaagaucaccgaggaggucgggcacacggaccugauggccgcguacguggacaacagcucccugaccaucaagaagcccaacgagcucagccgcgugcugggccugaagacccucgccacccacgggcuggccgccgucaacuccgugcccugggacacgaucgccaacuacgcgaagccguuccugaacaagguggucagcaccaccaccaacaucgugacgcgcugccucaaccgggugugcaccaacuacaugcccuacuucuucacccugcugcuccagcugugcaccuucacccgcuccacgaacagccggaucaaggccuccaugcccaccaccaucgccaagaacaccgucaagagcgugggcaaguucugccuggaggccagcuucaacuaccucaagucccccaacuucagcaagcugaucaacaucaucaucugguuccugcuccuguccgugugccugggcagccucaucuacuccacggccgcgcuggggguccugaugagcaaccucggcaugccguccuacugcaccggguaccgcgagggcuaccugaacagcaccaacgugaccaucgccacguacugcaccggcuccauccccugcagcgugugccuguccgggcucgacagccuggacaccuaccccucccuggagaccauccagaucacgaucagcuccuucaagugggaccucaccgccuucggcgucguggccgagugguuccuggccuacauccuguucacccgguucuucuacgugcucgggcuggcggccaucaugcagcuguucuucagcuacuucgccguccacuucaucuccaacagcuggcucauguggcugaucaucaaccuggugcagauggcccccaucuccgcgauggugcgcauguacaucuucuucgccagcuucuacuacgucuggaagagcuacgugcacguggucgacggcugcaacuccagcaccugcaugaugugcuacaagcggaaccgcgccacgcggguggagugcaccaccaucgucaacggggugcgccgguccuucuacguguacgccaacggcggcaagggguucugcaagcugcacaacuggaacugcgucaacugcgacaccuucugcgccggcagcacguucaucuccgacgagguggcgcgcgaccucagccugcaguucaagcggccgaucaaccccaccgaccaguccagcuacaucguggacuccgucaccgugaagaacgggagcauccaccuguacuucgacaaggccggccagaagaccuacgagcgccacucccucagccacuucgugaaccuggacaaccugcgggccaacaacacgaaggggucccuccccaucaacgucaucguguucgacggcaagagcaagugcgaggaguccagcgccaaguccgccagcguguacuacucccagcugaugugccagcccauccugcuccuggaccaggcgcuggucagcgacgugggcgacagcgccgagguggccgucaagauguucgacgccuacgugaacaccuucuccagcaccuucaacgugccgauggagaagcucaagacccuggucgccacggcggaggccgagcuggccaagaacgugucccucgacaacgugcugagcaccuucaucuccgccgcgcgccagggguucgucgacagcgacguggagaccaaggacguggucgagugccugaagcucucccaccagagcgacaucgaggugaccggcgacuccugcaacaacuacaugcugacguacaacaagguggagaacaugaccccccgggaccugggggccugcaucgacugcagcgcccgccacaucaacgcccaggucgccaagucccacaacaucgcgcucaucuggaacgugaaggacuucaugagccuguccgagcagcugcggaagcagauccgcagcgccgccaagaagaacaaccuccccuucaagcugaccugcgccaccacgcgccagguggucaacguggugaccaccaagaucgcccugaagggcgggugaggacuaguuauaagacugacuagcccgaugggccucccaacgggcccuccuccccuccuugcaccgagauuaauaaaaaaaaaaaaaaaaaaaaaaaaaaaaaaaaaaaaaaaaaaaaaaaaaaaaaaaaaaaaaaaaugcaucccccccccccccccccccccccccccccccaaaggcucuuuucagagccaccagaauu

SEQ ID NO: 21888 - RNA, 6058 nt, Artificial Sequence
  SARS-CoV-2__MT576530.1__non-structural protein 3 (NSP3) mRNA gc
aggagaaagcuuaccauggcccccaccaaggugaccuucggcgacgacacggucaucgaggugcagggguacaagagcgugaacaucaccuucgagcuggacgagcgcaucgacaagguccucaacgagaagugcuccgccuacaccguggagcugggcaccgaggugaacgaguucgcgugcgucguggccgacgccgugaucaagacgcugcagccggucagcgagcuccugaccccccuggggaucgaccucgacgagugguccauggccaccuacuaccuguucgacgagagcggcgaguucaagcuggccucccacauguacugcagcuucuacccccccgacgaggacgaggaggagggggacugcgaggaggaggaguucgagccguccacccaguacgaguacggcacggaggacgacuaccagggcaagccccucgaguucggggcgaccagcgccgcccugcagcccgaggaggagcaggaggaggacuggcuggacgacgacucccagcagaccgugggccagcaggacgggagcgaggacaaccagaccacgaccauccagaccaucguggagguccagccccagcucgagauggagcugaccccgguggugcagacgaucgaggucaacuccuucagcggcuaccugaagcucaccgacaacguguacaucaagaacgccgacaucguggaggaggcgaagaaggucaagcccaccgugguggucaacgccgccaacguguaccugaagcacgggggcggcguggccggggcccugaacaaggcgaccaacaacgccaugcaggucgaguccgacgacuacaucgccacgaacggcccccucaagguggggggcagcugcguccuguccggccacaaccuggccaagcacugccuccacgugguggggcccaacgucaacaagggcgaggacauccagcugcugaagagcgccuacgagaacuucaaccagcacgaggugcuccuggcgccgcugcucuccgccgggaucuucggcgccgaccccauccacagccugcgggugugcgucgacaccgugcgcaccaacguguaccuggccgucuucgacaagaaccucuacgacaagcugguguccagcuuccuggagaugaagagcgagaagcagguggagcagaagaucgccgagauccccaaggaggaggucaagcccuucaucaccgaguccaagccgagcguggagcagcggaagcaggacgacaagaagaucaaggcgugcguggaggaggucacgaccacccucgaggagaccaaguuccugacggagaaccugcuccuguacaucgacaucaacgggaaccugcaccccgacuccgccacccucgugagcgacaucgacaucaccuuccugaagaaggacgcccccuacaucgugggcgacgucgugcaggagggcgugcugaccgccgucgugauccccacgaagaaggccgggggcaccaccgagaugcucgcgaaggcccugcgcaaggugccgaccgacaacuacaucacgaccuaccccgggcagggccugaacggguacaccgucgaggaggccaagaccgugcucaagaagugcaaguccgccuucuacauccugcccagcaucaucuccaacgagaagcaggagauccugggcaccgugagcuggaaccuccgggagaugcuggcgcacgccgaggagacgcgcaagcugaugcccgucugcguggagaccaaggccaucguguccaccauccagcggaaguacaagggcaucaagauccaggagggggucguggacuacggcgcccgcuucuacuucuacaccagcaagacgaccguggccucccugaucaacacccucaacgaccugaacgagacccuggucacgaugccgcucggguacgugacccacggccugaaccuggaggaggcggcccgguacaugcgcagccucaaggugcccgccaccgucuccgugagcucccccgacgccgugaccgccuacaacggguaccugacgagcuccagcaagacccccgaggagcacuucaucgagaccaucucccuggcgggcagcuacaaggacuggagcuacuccggccagagcacccagcucgggaucgaguuccugaagcggggcgacaaguccgucuacuacacgagcaacccgaccaccuuccaccuggacggggaggugaucaccuucgacaaccucaagacgcugcugucccuccgcgaggugcggaccaucaaggucuucaccaccguggacaacaucaaccugcacacgcagguggucgacaugagcaugaccuacggccagcaguucggccccaccuaccuggacggggccgacgugaccaagaucaagccccacaacucccacgagggcaagacguucuacgugcucccgaacgacgacacccugcgcgucgaggccuucgaguacuaccacaccaccgaccccagcuuccuggggcgguacauguccgcccucaaccacacgaagaaguggaaguacccccaggugaacggccugaccagcaucaagugggccgacaacaacugcuaccuggcgaccgcccuccugacccugcagcagaucgagcucaaguucaaccccccggcccugcaggacgccuacuaccgcgcgcgggccggggaggccgccaacuucugcgcccugauccucgcguacugcaacaagacggugggcgagcugggcgacguccgcgagaccauguccuaccuguuccagcacgccaaccucgacagcugcaagcgggugcugaacgucgugugcaagaccugcgggcagcagcagaccacccugaagggcguggaggccgucauguacauggggacgcucuccuacgagcaguucaagaagggcgugcagauccccugcaccugcgggaagcaggccaccaaguaccuggugcagcaggagagccccuucgucaugauguccgcccccccggcgcaguacgagcugaagcacggcaccuucacgugcgccagcgaguacaccggcaacuaccagugcgggcacuacaagcacaucaccuccaaggagacccucuacugcaucgacggcgcccugcugacgaagagcagcgaguacaaggggcccaucaccgacguguucuacaaggagaacuccuacaccaccacgaucaagcccgugaccuacaagcucgacggcgucgugugcaccgagaucgaccccaagcuggacaacuacuacaagaaggacaacagcuacuucaccgagcagccgaucgaccuggugcccaaccagcccuaccccaacgccuccuucgacaacuucaaguucgucugcgacaacaucaaguucgccgacgaccucaaccagcugacgggguacaagaagccggcgagccgcgagcugaaggugaccuucuuccccgaccucaacggcgacguggucgccaucgacuacaagcacuacacccccuccuucaagaagggcgccaagcugcugcacaagcccaucguguggcacgugaacaacgccaccaacaaggcgacguacaagccgaacaccuggugcauccggugccucuggagcaccaagcccgucgagaccuccaacagcuucgacgugcugaaguccgaggacgcccaggggauggacaaccuggccugcgaggaccucaagcccgugagcgaggaggucguggagaaccccacgauccagaaggacgugcuggagugcaacgucaagaccaccgagguggugggcgacaucauccugaagccggccaacaacucccucaagaucaccgaggaggucgggcacaucgaccugauggccgcguacguggacaacagcucccugacgaucaagaagcccaacgagcucagccgcgugcugggccugaagacccucgccacccacgggcuggccgccgucaacuccgugcccugggacaccaucgccaacuacgcgaagccguuccugaacaagguggucagcacgaccaccaacaucgugacccgcugccucaaccgggugugcacgaacuacaugcccuacuucuucacccugcugcuccagcugugcaccuucacccgcuccaccaacagccggaucaaggccuccaugcccacgaccaucgccaagaacaccgucaagagcgugggcaaguucugccuggaggccagcuucaacuaccucaagucccccaacuucagcaagcugaucaacaucaucaucugguuccugcuccuguccgugugccugggcagccucaucuacuccaccgccgcgcuggggguccugaugagcaaccucggcaugccguccuacugcacgggguaccgcgagggcuaccugaacagcaccaacgugaccaucgccaccuacugcacgggcuccauccccugcagcgugugccuguccgggcucgacagccuggacaccuaccccucccuggagaccauccagaucaccaucagcuccuucaagugggaccucacggccuucggccuggucgccgagugguuccuggccuacauccucuucacccgguucuucuacgugcuggggcuggcggccaucaugcagcucuucuucagcuacuucgccgugcacuucaucuccaacagcuggcugauguggcugaucaucaaccugguccagauggcccccaucuccgcgauggugcgcauguacaucuucuucgccagcuucuacuacguguggaagagcuacguccacgugguggacggcugcaacuccagcaccugcaugaugugcuacaagcggaaccgcgccacccgggucgagugcacgaccaucgugaacgggguccgccgguccuucuacguguacgccaacggcggcaagggguucugcaagcuccacaacuggaacugcgugaacugcgacaccuucugcgccggcagcaccuucaucuccgacgaggucgcgcgcgaccugagccugcaguucaagcggccgaucaaccccacggaccaguccagcuacaucguggacuccgugaccgucaagaacgggagcauccaccucuacuucgacaaggccggccagaagaccuacgagcgccacucccugagccacuucgugaaccuggacaaccuccgggccaacaacaccaaggggucccugcccaucaacgugaucgucuucgacggcaagagcaagugcgaggaguccagcgccaaguccgccagcguguacuacucccagcugaugugccagcccauccuccugcuggaccaggcgcucgugagcgacgucggcgacagcgccgagguggccgugaagauguucgacgccuacgucaacacguucuccagcaccuucaacgugccgauggagaagcugaagacccugguggccaccgcggaggccgagcucgccaagaacgucucccuggacaacgugcugagcacguucaucuccgccgcgcgccagggguucguggacagcgacgucgagaccaaggacgugguggagugccucaagcugucccaccagagcgacaucgaggucaccggcgacuccugcaacaacuacaugcugaccuacaacaagguggagaacaugacgccccgggaccucggggccugcaucgacugcagcgcccgccacaucaacgcccagguggccaagucccacaacaucgcgcugaucuggaacgucaaggacuucaugagccuguccgagcagcuccggaagcagauccgcagcgccgccaagaagaacaaccugcccuucaagcugaccugcgccaccacccgccagguggugaacgucgugacgaccaagaucgcccucaagggcgggugaggacuaguuauaagacugacuagcccgaugggccucccaacgggcccuccuccccuccuugcaccgagauuaauaaaaaaaaaaaaaaaaaaaaaaaaaaaaaaaaaaaaaaaaaaaaaaaaaaaaaaaaaaaaaaaaugcaucccccccccccccccccccccccccccccccaaaggcucuuuucagagccaccagaauu

SEQ ID NO: 21889 - RNA, 6058 nt, Artificial Sequence
  SARS-CoV-2__MT576639.1__non-structural protein 3 (NSP3) mRNA gc
aggagaaagcuuaccauggcccccaccaaggugaccuucggcgacgacacggucaucgaggugcagggguacaagagcgugaacaucaccuucgagcuggacgagcgcaucgacaagguccucaacgagaagugcuccgccuacaccguggagcugggcaccgaggugaacgaguucgcgugcgucguggccgacgccgugaucaagacgcugcagccggucagcgagcuccugaccccccuggggaucgaccucgacgagugguccauggccaccuacuaccuguucgacgagagcggcgaguucaagcuggccucccacauguacugcagcuucuacccccccgacgaggacgaggaggagggggacugcgaggaggaggaguucgagccguccacccaguacgaguacggcacggaggacgacuaccagggcaagccccucgaguucggggcgaccagcgccgcccugcagcccgaggaggagcaggaggaggacuggcuggacgacgacucccagcagaccgugggccagcaggacgggagcgaggacaaccagaccacgaccauccagaccaucguggagguccagccccagcucgagauggagcugaccccgguggugcagacgaucgaggucaacuccuucagcggcuaccugaagcucaccgacaacguguacaucaagaacgccgacaucguggaggaggcgaagaaggucaagcccaccgugguggucaacgccgccaacguguaccugaagcacgggggcggcguggccggggcccugaacaaggcgaccaacaacgccaugcaggucgaguccgacgacuacaucgccacgaacggcccccucaagguggggggcagcugcguccuguccggccacaaccuggccaagcacugccuccacgugguggggcccaacgucaacaagggcgaggacauccagcugcugaagagcgccuacgagaacuucaaccagcacgaggugcuccuggcgccgcugcucuccgccgggaucuucggcgccgaccccauccacagccugcgggugugcgucgacaccgugcgcaccaacguguaccuggccgucuucgacaagaaccucuacgacaagcugguguccagcuuccuggagaugaagagcgagaagcagguggagcagaagaucgccgagauccccaaggaggaggucaagcccuucaucaccgaguccaagccgagcguggagcagcggaagcaggacgacaagaagaucaaggcgugcguggaggaggucacgaucacccucgaggagaccaaguuccugaccgagaaccugcuccuguacaucgacaucaacgggaaccugcaccccgacuccgccacgcucgugagcgacaucgacaucaccuuccugaagaaggacgcccccuacaucgugggcgacgucgugcaggagggcgugcugaccgccgucgugauccccaccaagaaggccgggggcacgaccgagaugcucgcgaaggcccugcgcaaggugccgaccgacaacuacaucaccacguaccccgggcagggccugaacggguacaccgucgaggaggccaagaccgugcucaagaagugcaaguccgccuucuacauccugcccagcaucaucuccaacgagaagcaggagauccugggcaccgugagcuggaaccuccgggagaugcuggcgcacgccgaggagacccgcaagcugaugcccgucugcguggagacgaaggccaucguguccaccauccagcggaaguacaagggcaucaagauccaggagggggucguggacuacggcgcccgcuucuacuucuacaccagcaagaucaccguggccucccugaucaacacgcucaacgaccugaacgagacccuggucaccaugccgcucggguacgugacccacggccugaaccuggaggaggcggcccgguacaugcgcagccucaaggugcccgccacggucuccgugagcucccccgacgccgugaccgccuacaacggguaccugaccagcuccagcaagacccccgaggagcacuucaucgagacgaucucccuggcgggcagcuacaaggacuggagcuacuccggccagagcacccagcucgggaucgaguuccugaagcggggcgacaaguccgucuacuacaccagcaacccgaccacguuccaccuggacggggaggugaucaccuucgacaaccucaagacccugcugucccuccgcgaggugcggaccaucaaggucuucacgaccguggacaacaucaaccugcacacccagguggucgacaugagcaugaccuacggccagcaguucggccccacguaccuggacggggccgacgugaccaagaucaagccccacaacucccacgagggcaagaccuucuacgugcucccgaacgacgacacccugcgcgucgaggccuucgaguacuaccacacgaccgaccccagcuuccuggggcgguacauguccgcccucaaccacaccaagaaguggaaguacccccaggugaacggccugaccagcaucaagugggccgacaacaacugcuaccuggcgacggcccuccugacccugcagcagaucgagcucaaguucaaccccccggcccugcaggacgccuacuaccgcgcgcgggccggggaggccgccaacuucugcgcccugauccucgcguacugcaacaagaccgugggcgagcugggcgacguccgcgagaccauguccuaccuguuccagcacgccaaccucgacagcugcaagcgggugcugaacgucgugugcaagacgugcgggcagcagcagaccacccugaagggcguggaggccgucauguacauggggacccucuccuacgagcaguucaagaagggcgugcagauccccugcaccugcgggaagcaggccacgaaguaccuggugcagcaggagagccccuucgucaugauguccgcccccccggcgcaguacgagcugaagcacggcaccuucaccugcgccagcgaguacaccggcaacuaccagugcgggcacuacaagcacaucacguccaaggagacccucuacugcaucgacggcgcccugcugaccaagagcagcgaguacaaggggcccaucaccgacguguucuacaaggagaacuccuacacgaccaccaucaagcccgugaccuacaagcucgacggcgucgugugcacggagaucgaccccaagcuggacaacuacuacaagaaggacaacagcuacuucaccgagcagccgaucgaccuggugcccaaccagcccuaccccaacgccuccuucgacaacuucaaguucgucugcgacaacaucaaguucgccgacgaccucaaccagcugaccggguacaagaagccggcgagccgcgagcugaaggugaccuucuuccccgaccucaacggcgacguggucgccaucgacuacaagcacuacacgcccuccuucaagaagggcgccaagcugcugcacaagcccaucguguggcacgugaacaacgccaccaacaaggcgaccuacaagccgaacaccuggugcauccggugccucuggagcacgaagcccgucgagaccuccaacagcuucgacgugcugaaguccgaggacgcccaggggauggacaaccuggccugcgaggaccucaagcccgugagcgaggaggucguggagaaccccaccauccagaaggacgugcuggagugcaacgucaagaccacggagguggugggcgacaucauccugaagccggccaacaacucccucaagaucaccgaggaggucgggcacaccgaccugauggccgcguacguggacaacagcucccugaccaucaagaagcccaacgagcucagccgcgugcugggccugaagacgcucgccacccacgggcuggccgccgucaacuccgugcccugggacaccaucgccaacuacgcgaagccguuccugaacaagguggucagcaccacgaccaacaucgugacccgcugccucaaccgggugugcaccaacuacaugcccuacuucuucacgcugcugcuccagcugugcaccuucacccgcuccaccaacagccggaucaaggccuccaugcccaccacgaucgccaagaacaccgucaagagcgugggcaaguucugccuggaggccagcuucaacuaccucaagucccccaacuucagcaagcugaucaacaucaucaucugguuccugcuccuguccgugugccugggcagccucaucuacuccaccgccgcgcuggggguccugaugagcaaccucggcaugccguccuacugcaccggguaccgcgagggcuaccugaacagcacgaacgugaccaucgccaccuacugcaccggcuccauccccugcagcgugugccuguccgggcucgacagccuggacacguaccccucccuggagaccauccagaucaccaucagcuccuucaagugggaccucaccgccuucggccuggucgccgagugguuccuggccuacauccucuucacgcgguucuucuacgugcuggggcuggcggccaucaugcagcucuucuucagcuacuucgccgugcacuucaucuccaacagcuggcugauguggcugaucaucaaccugguccagauggcccccaucuccgcgauggugcgcauguacaucuucuucgccagcuucuacuacguguggaagagcuacguccacgugguggacggcugcaacuccagcaccugcaugaugugcuacaagcggaaccgcgccacccgggucgagugcaccacgaucgugaacgggguccgccgguccuucuacguguacgccaacggcggcaagggguucugcaagcuccacaacuggaacugcgugaacugcgacaccuucugcgccggcagcaccuucaucuccgacgaggucgcgcgcgaccugagccugcaguucaagcggccgaucaaccccaccgaccaguccagcuacaucguggacuccgugacggucaagaacgggagcauccaccucuacuucgacaaggccggccagaagaccuacgagcgccacucccugagccacuucgugaaccuggacaaccuccgggccaacaacaccaaggggucccugcccaucaacgugaucgucuucgacggcaagagcaagugcgaggaguccagcgccaaguccgccagcguguacuacucccagcugaugugccagcccauccuccugcuggaccaggcgcucgugagcgacgucggcgacagcgccgagguggccgugaagauguucgacgccuacgucaacaccuucuccagcacguucaacgugccgauggagaagcugaagacccugguggccaccgcggaggccgagcucgccaagaacgucucccuggacaacgugcugagcaccuucaucuccgccgcgcgccagggguucguggacagcgacgucgagacgaaggacgugguggagugccucaagcugucccaccagagcgacaucgaggucaccggcgacuccugcaacaacuacaugcugaccuacaacaagguggagaacaugaccccccgggaccucggggccugcaucgacugcagcgcccgccacaucaacgcccagguggccaagucccacaacaucgcgcugaucuggaacgucaaggacuucaugagccuguccgagcagcuccggaagcagauccgcagcgccgccaagaagaacaaccugcccuucaagcugacgugcgccaccacccgccagguggugaacgucgugaccacgaagaucgcccucaagggcgggugaggacuaguuauaagacugacuagcccgaugggccucccaacgggcccuccuccccuccuugcaccgagauuaauaaaaaaaaaaaaaaaaaaaaaaaaaaaaaaaaaaaaaaaaaaaaaaaaaaaaaaaaaaaaaaaaugcaucccccccccccccccccccccccccccccccaaaggcucuuuucagagccaccagaauu

SEQ ID NO: 21890 - RNA, 6058 nt, Artificial Sequence
  SARS-CoV-2__MT576641.1__non-structural protein 3 (NSP3) mRNA gc
aggagaaagcuuaccauggcccccaccaaggugaccuucggcgacgacacggucaucgaggugcagggguacaagagcgugaacaucaccuucgagcuggacgagcgcaucgacaagguccucaacgagaagugcuccgccuacaccguggagcugggcaccgaggugaacgaguucgcgugcgucguggccgacgccgugaucaagacgcugcagccggucagcgagcuccugaccccccuggggaucgaccucgacgagugguccauggccaccuacuaccuguucgacgagagcggcgaguucaagcuggccucccacauguacugcagcuucuacccccccgacgaggacgaggaggagggggacugcgaggaggaggaguucgagccguccacccaguacgaguacggcacggaggacgacuaccagggcaagccccucgaguucggggcgaccagcgccgcccugcagcccgaggaggagcaggaggaggacuggcuggacgacgacucccagcagaccgugggccagcaggacgggagcgaggacaaccagaccacgaccauccagaccaucguggagguccagccccagcucgagauggagcugaccccgguggugcagacgaucgaggucaacuccuucagcggcuaccugaagcucaccgacaacguguacaucaagaacgccgacaucguggaggaggcgaagaaggucaagcccaccgugguggucaacgccgccaacguguaccugaagcacgggggcggcguggccggggcccugaacaaggcgaccaacaacgccaugcaggucgaguccgacgacuacaucgccacgaacggcccccucaagguggggggcagcugcguccuguccggccacaaccuggccaagcacugccuccacgugguggggcccaacgucaacaagggcgaggacauccagcugcugaagagcgccuacgagaacuucaaccagcacgaggugcuccuggcgccgcugcucuccgccgggaucuucggcgccgaccccauccacagccugcgggugugcgucgacaccgugcgcaccaacguguaccuggccgucuucgacaagaaccucuacgacaagcugguguccagcuuccuggagaugaagagcgagaagcagguggagcagaagaucgccgagauccccaaggaggaggucaagcccuucaucaccgaguccaagccgagcguggagcagcggaagcaggacgacaagaagaucaaggcgugcguggaggaggucacgaccacccucgaggagaccaaguuccugacggagaaccugcuccuguacaucgacaucaacgggaaccugcaccccgacuccgccacccucgugagcgacaucgacaucaccuuccugaagaaggacgcccccuacaucgugggcgacgucgugcaggagggcgugcugaccgccgucgugauccccacgaagaaggccgggggcaccaccgagaugcucgcgaaggcccugcgcaaggugccgaccgacaacuacaucacgaccuaccccgggcagggccugaacggguacaccgucgaggaggccaagaccgugcucaagaagugcaaguccgccuucuacauccugcccagcaucaucuccaacgagaagcaggagauccugggcaccgugagcuggaaccuccgggagaugcuggcgcacgccgaggagacgcgcaagcugaugcccgucugcguggagaccaaggccaucguguccaccauccagcggaaguacaagggcaucaagauccaggagggggucguggacuacggcgcccgcuucuacuucuacaccagcaagacgaccguggccucccugaucaacacccucaacgaccugaacgagacccuggucacgaugccgcucggguacgugacccacggccugaaccuggaggaggcggcccgguacaugcgcagccucaaggugcccgccaccgucuccgugagcucccccgacgccgugaccgccuacaacggguaccugacgagcuccagcaagaccuccgaggagcacuucaucgagaccaucagccuggcgggcagcuacaaggacugguccuacagcggccaguccacccagcucgggaucgaguuccugaagcggggcgacaagagcgucuacuacacguccaaccccaccaccuuccaccuggacggggaggugaucaccuucgacaaccucaagacgcugcugagccuccgcgaggugcggaccaucaaggucuucaccaccguggacaacaucaaccugcacacgcagguggucgacauguccaugaccuacggccagcaguucggcccgaccuaccuggacggggccgacgugaccaagaucaagccccacaacagccacgagggcaagacguucuacgugcuccccaacgacgacacccugcgcgucgaggccuucgaguacuaccacaccaccgacccguccuuccuggggcgguacaugagcgcccucaaccacacgaagaaguggaaguacccccaggugaacggccugaccuccaucaagugggccgacaacaacugcuaccuggcgaccgcccuccugacccugcagcagaucgagcucaaguucaacccccccgcccugcaggacgccuacuaccgcgcgcgggccggggaggccgccaacuucugcgcccugauccucgcguacugcaacaagacggugggcgagcugggcgacguccgcgagaccaugagcuaccuguuccagcacgccaaccucgacuccugcaagcgggugcugaacgucgugugcaagaccugcgggcagcagcagaccacccugaagggcguggaggccgucauguacauggggacgcucagcuacgagcaguucaagaagggcgugcagaucccgugcaccugcgggaagcaggccaccaaguaccuggugcagcaggagucccccuucgucaugaugagcgccccccccgcgcaguacgagcugaagcacggcaccuucacgugcgccuccgaguacaccggcaacuaccagugcgggcacuacaagcacaucaccagcaaggagacccucuacugcaucgacggcgcccugcugacgaagagcuccgaguacaaggggccgaucaccgacguguucuacaaggagaacagcuacaccaccacgaucaagcccgugaccuacaagcucgacggcgucgugugcaccgagaucgaccccaagcuggacaacuacuacaagaaggacaacuccuacuucaccgagcagcccaucgaccuggugccgaaccagcccuaccccaacgccagcuucgacaacuucaaguucgucugcgacaacaucaaguucgccgacgaccucaaccagcugacgggguacaagaagcccgcgucccgcgagcugaaggugaccuucuucccggaccucaacggcgacguggucgccaucgacuacaagcacuacacccccagcuucaagaagggcgccaagcugcugcacaagcccaucguguggcacgugaacaacgccaccaacaaggcgacguacaagcccaacaccuggugcauccggugccucugguccaccaagccggucgagaccagcaacuccuucgacgugcugaagagcgaggacgcccaggggauggacaaccuggccugcgaggaccucaagcccguguccgaggaggucguggagaaccccacgauccagaaggacgugcuggagugcaacgucaagaccaccgagguggugggcgacaucauccugaagcccgccaacaacagccucaagaucaccgaggaggucgggcacacggaccugauggccgcguacguggacaacuccagccugaccaucaagaagccgaacgagcucucccgcgugcugggccugaagacccucgccacccacgggcuggccgccgucaacagcgugcccugggacacgaucgccaacuacgcgaagcccuuccugaacaagguggucuccaccaccaccaacaucgugacgcgcugccucaaccgggugugcaccaacuacaugccguacuucuucacccugcugcuccagcugugcaccuucacccgcagcacgaacucccggaucaaggccagcaugcccaccaccaucgccaagaacaccgucaagagcgugggcaaguucugccuggaggccuccuucaacuaccucaagagccccaacuucuccaagcugaucaacaucaucaucugguuccugcuccugagcgugugccugggcucccucaucuacagcacggccgcgcuggggguccugauguccaaccucggcaugcccagcuacugcaccggguaccgcgagggcuaccugaacuccaccaacgugaccaucgccacguacugcaccggcagcaucccgugcuccgugugccugagcgggcucgacucccuggacaccuaccccagccuggagaccauccagaucacgaucuccagcuucaagugggaccucaccgccuucggccuggucgccgagugguuccuggccuacauccucuucacccgguucuucuacgugcuggggcuggcggccaucaugcagcucuucuucuccuacuucgccgugcacuucaucagcaacuccuggcugauguggcugaucaucaaccugguccagauggcccccaucagcgcgauggugcgcauguacaucuucuucgccagcuucuacuacguguggaaguccuacguccacgugguggacggcugcaacagcuccaccugcaugaugugcuacaagcggaaccgcgccacgcgggucgagugcaccaccaucgugaacgggguccgccggagcuucuacguguacgccaacggcggcaagggguucugcaagcuccacaacuggaacugcgugaacugcgacaccuucugcgccggcuccacguucaucagcgacgaggucgcgcgcgaccugucccugcaguucaagcggcccaucaacccgaccgaccagagcuccuacaucguggacagcgugaccgucaacaacggguccauccaccucuacuucgacaaggccggccagaagaccuacgagcgccacagccugucccacuucgugaaccuggacaaccuccgggccaacaacacgaaggggagccugcccaucaacgugaucgucuucgacggcaaguccaagugcgaggagagcuccgccaagagcgccuccguguacuacagccagcugaugugccagcccauccuccugcuggaccaggcgcucgugagcgacgucggcgacuccgccgagguggccgugaagauguucgacgccuacgucaacaccuucagcuccaccuucaacgugcccauggagaagcugaagacccugguggccacggcggaggccgagcucgccaagaacgucagccuggacaacgugcuguccaccuucaucagcgccgcgcgccagggguucguggacuccgacgucgagaccaaggacgugguggagugccucaagcugagccaccaguccgacaucgaggucaccggcgacagcugcaacaacuacaugcugacguacaacaagguggagaacaugaccccgcgggaccucggggccugcaucgacugcuccgcccgccacaucaacgcccagguggccaagagccacaacaucgcgcugaucuggaacgucaaggacuucaugucccugagcgagcagcuccggaagcagauccgcuccgccgccaagaagaacaaccugcccuucaagcugaccugcgccaccacgcgccagguggugaacgucgugaccaccaagaucgcccucaagggcgggugaggacuaguuauaagacugacuagcccgaugggccucccaacgggcccuccuccccuccuugcaccgagauuaauaaaaaaaaaaaaaaaaaaaaaaaaaaaaaaaaaaaaaaaaaaaaaaaaaaaaaaaaaaaaaaaaugcaucccccccccccccccccccccccccccccccaaaggcucuuuucagagccaccagaauu

SEQ ID NO: 21891 - RNA, 6058 nt, Artificial Sequence
  SARS-CoV-2__MT576689.1__non-structural protein 3 (NSP3) mRNA gc
aggagaaagcuuaccauggcccccaccaaggugaccuucggcgacgacacggucaucgaggugcagggguaccgcagcgugaacaucaccuucgagcuggacgagcggaucgacaagguccucaacgagaagugcuccgccuacaccguggagcugggcaccgaggugaacgaguucgcgugcgucguggccgacgccgugaucaagacgcugcagccggucagcgagcuccugaccccccuggggaucgaccucgacgagugguccauggccaccuacuaccuguucgacgagagcggcgaguucaagcuggccucccacauguacugcagcuucuacccccccgacgaggacgaggaggagggggacugcgaggaggaggaguucgagccguccacccaguacgaguacggcacggaggacgacuaccagggcaagccccucgaguucggggcgaccagcgccgcccugcagcccgaggaggagcaggaggaggacuggcuggacgacgacucccagcagaccgugggccagcaggacgggagcgaggacaaccagaccacgaccauccagaccaucguggagguccagccccagcucgagauggagcugaccccgguggugcagacgaucgaggucaacuccuucagcggcuaccugaagcucaccgacaacguguacaucaagaacgccgacaucguggaggaggcgaagaaggucaagcccaccgugguggucaacgccgccaacguguaccugaagcacgggggcggcguggccggggcccugaacaaggcgaccaacaacgccaugcaggucgaguccgacgacuacaucgccacgaacggcccccucaagguggggggcagcugcguccuguccggccacaaccuggccaagcacugccuccacgugguggggcccaacgucaacaagggcgaggacauccagcugcugaagagcgccuacgagaacuucaaccagcacgaggugcuccuggcgccgcugcucuccgccgggaucuucggcgccgaccccauccacagccugcgcgugugcgucgacaccgugcggaccaacguguaccuggccgucuucgacaagaaccucuacgacaagcugguguccagcuuccuggagaugaagagcgagaagcagguggagcagaagaucgccgagauccccaaggaggaggucaagcccuucaucaccgaguccaagccgagcguggagcagcgcaagcaggacgacaagaagaucaaggcgugcguggaggaggucacgaccacccucgaggagaccaaguuccugacggagaaccugcuccuguacaucgacaucaacgggaaccugcaccccgacuccgccacccucgugagcgacaucgacaucaccuuccugaagaaggacgcccccuacaucgugggcgacgucgugcaggagggcgugcugaccgccgucgugauccccacgaagaaggccgggggcaccaccgagaugcucgcgaaggcccugcggaaggugccgaccgacaacuacaucacgaccuaccccgggcagggccugaacggguacaccgucgaggaggccaagaccgugcucaagaagugcaaguccgccuucuacauccugcccagcaucaucuccaacgagaagcaggagauccugggcaccgugagcuggaaccuccgcgagaugcuggcgcacgccgaggagacgcggaagcugaugcccgucugcguggagaccaaggccaucguguccaccauccagcgcaaguacaagggcaucaagauccaggagggggucguggacuacggcgcccgguucuacuucuacaccagcaagacgaccguggccucccugaucaacacccucaacgaccugaacgagacccuggucacgaugccgcucggguacgugacccacggccugaaccuggaggaggcggcccgcuacaugcggagccucaaggugcccgccaccgucuccgugagcucccccgacgccgugaccgccuacaacggguaccugacgagcuccagcaagacccccgaggagcacuucaucgagaccaucucccuggcgggcagcuacaaggacuggagcuacuccggccagagcacccagcucgggaucgaguuccugaagcgcggcgacaaguccgucuacuacacgagcaacccgaccaccuuccaccuggacggggaggugaucaccuucgacaaccucaagacgcugcugucccuccgggaggugcgcaccaucaaggucuucaccaccguggacaacaucaaccugcacacgcagguggucgacaugagcaugaccuacggccagcaguucggccccaccuaccuggacggggccgacgugaccaagaucaagccccacaacucccacgagggcaagacguucuacgugcucccgaacgacgacacccugcgggucgaggccuucgaguacuaccacaccaccgaccccagcuuccuggggcgcuacauguccgcccucaaccacacgaagaaguggaaguacccccaggugaacggccugaccagcaucaagugggccgacaacaacugcuaccuggcgaccgcccuccugacccugcagcagaucgagcucaaguucaaccccccggcccugcaggacgccuacuaccgggcgcgcgccggggaggccgccaacuucugcgcccugauccucgcguacugcaacaagacggugggcgagcugggcgacguccgggagaccauguccuaccuguuccagcacgccaaccucgacagcugcaagcgcgugcugaacgucgugugcaagaccugcgggcagcagcagaccacccugaagggcguggaggccgucauguacauggggacgcucuccuacgagcaguucaagaagggcgugcagauccccugcaccugcgggaagcaggccaccaaguaccuggugcagcaggagagccccuucgucaugauguccgcccccccggcgcaguacgagcugaagcacggcaccuucacgugcgccagcgaguacaccggcaacuaccagugcgggcacuacaagcacaucaccuccaaggagacccucuacugcaucgacggcgcccugcugacgaagagcagcgaguacaaggggcccaucaccgacguguucuacaaggagaacuccuacaccaccacgaucaagcccgugaccuacaagcucgacggcgucgugugcaccgagaucgaccccaagcuggacaacuacuacaagaaggacaacagcuacuucaccgagcagccgaucgaccuggugcccaaccagcccuaccccaacgccuccuucgacaacuucaaguucgucugcgacaacaucaaguucgccgacgaccucaaccagcugacgggguacaagaagccggcgagccgggagcugaaggugaccuucuuccccgaccucaacggcgacguggucgccaucgacuacaagcacuacacccccuccuucaagaagggcgccaagcugcugcacaagcccaucguguggcacgugaacaacgccaccaacaaggcgacguacaagccgaacaccuggugcauccgcugccucuggagcaccaagcccgucgagaccuccaacagcuucgacgugcugaaguccgaggacgcccaggggauggacaaccuggccugcgaggaccucaagcccgugagcgaggaggucguggagaaccccacgauccagaaggacgugcuggagugcaacgucaagaccaccgagguggugggcgacaucauccugaagccggccaacaacucccucaagaucaccgaggaggucgggcacacggaccugauggccgcguacguggacaacagcucccugaccaucaagaagcccaacgagcucagccgcgugcugggccugaagacccucgccacccacgggcuggccgccgucaacuccgugcccugggacacgaucgccaacuacgcgaagccguuccugaacaagguggucagcaccaccaccaacaucgugacgcggugccucaaccgcgugugcaccaacuacaugcccuacuucuucacccugcugcuccagcugugcaccuucacccgguccacgaacagccgcaucaaggccuccaugcccaccaccaucgccaagaacaccgucaagagcgugggcaaguucugccuggaggccagcuucaacuaccucaagucccccaacuucagcaagcugaucaacaucaucaucugguuccugcuccuguccgugugccugggcagccucaucuacuccacggccgcgcuggggguccugaugagcaaccucggcaugccguccuacugcaccggguaccgggagggcuaccugaacagcaccaacgugaccaucgccacguacugcaccggcuccauccccugcagcgugugccuguccgggcucgacagccuggacaccuaccccucccuggagaccauccagaucacgaucagcuccuucaagugggaccucaccgccuucggccuggucgccgagugguuccuggccuacauccucuucacccgcuucuucuacgugcuggggcuggcggccaucaugcagcucuucuucagcuacuucgccgugcacuucaucuccaacagcuggcugauguggcugaucaucaaccugguccagauggcccccaucuccgcgauggugcggauguacaucuucuucgccagcuucuacuacguguggaagagcuacguccacgugguggacggcugcaacuccagcaccugcaugaugugcuacaagcgcaaccgggccacgcgcgucgagugcaccaccaucgugaacgggguccggcgcuccuucuacguguacgccaacggcggcaagggguucugcaagcuccacaacuggaacugcgugaacugcgacaccuucugcgccggcagcacguucaucuccgacgaggucgcgcgggaccugagccugcaguucaagcgcccgaucaaccccaccgaccaguccagcuacaucguggacuccgugaccgucaagaacgggagcauccaccucuacuucgacaaggccggccagaagaccuacgagcggcacucccugagccacuucgugaaccuggacaaccuccgcgccaacaacacgaaggggucccugcccaucaacgugaucgucuucgacggcaagagcaagugcgaggaguccagcgccaaguccgccagcguguacuacucccagcugaugugccagcccauccuccugcuggaccaggcgcucgugagcgacgucggcgacagcgccgagguggccgugaagauguucgacgccuacgucaacaccuucuccagcaccuucaacgugccgauggagaagcugaagacccugguggccacggcggaggccgagcucgccaagaacgucucccuggacaacgugcugagcaccuucaucuccgccgcgcggcagggguucguggacagcgacgucgagaccaaggacgugguggagugccucaagcugucccaccagagcgacaucgaggucaccggcgacuccugcaacaacuacaugcugacguacaacaagguggagaacaugaccccccgcgaccucggggccugcaucgacugcagcgcccggcacaucaacgcccagguggccaagucccacaacaucgcgcugaucuggaacgucaaggacuucaugagccuguccgagcagcuccgcaagcagauccgcagcgccgccaagaagaacaaccugcccuucaagcugaccugcgccaccacgcggcagguggugaacgucgugaccaccaagaucgcccucaagggcgggugaggacuaguuauaagacugacuagcccgaugggccucccaacgggcccuccuccccuccuugcaccgagauuaauaaaaaaaaaaaaaaaaaaaaaaaaaaaaaaaaaaaaaaaaaaaaaaaaaaaaaaaaaaaaaaaaugcaucccccccccccccccccccccccccccccccaaaggcucuuuucagagccaccagaauu

SEQ ID NO: 21892 - RNA, 6058 nt, Artificial Sequence
  SARS-CoV-2__MT569474.1__non-structural protein 3 (NSP3) mRNA gc
aggagaaagcuuaccauggcccccaccaaggugaccuucggcgacgacacggucaucgaggugcagggguacaagagcgugaacaucaccuucgagcuggacgagcgcaucgacaagguccucaacgagaagugcuccgccuacaccguggagcugggcaccgaggugaacgaguucgcgugcgucguggccgacgccgugaucaagacgcugcagccggucagcgagcuccugaccccccuggggaucgaccucgacgagugguccauggccaccuacuaccuguucgacgagagcggcgaguucaagcuggccucccacauguacugcagcuucuacccccccgacgaggacgaggaggagggggacugcgaggaggaggaguucgagccguccacccaguacgaguacggcacggaggacgacuaccagggcaagccccucgaguucggggcgaccagcgccgcccugcagcccgaggaggagcaggaggaggacuggcuggacgacgacucccagcagaccgugggccagcaggacgggagcgaggacaaccagaccacgaccauccagaccaucguggagguccagccccagcucgagauggagcugaccccgguggugcagacgaucgaggucaacuccuucagcggcuaccugaagcucaccgacaacguguacaucaagaacgccgacaucguggaggaggcgaagaaggucaagcccaccgugguggucaacgccgccaacguguaccugaagcacgggggcggcguggccggggcccugaacaaggcgaccaacaacgccaugcaggucgaguccgacgacuacaucgccacgaacggcccccucaagguggggggcagcugcguccuguccggccacaaccuggccaagcacugccuccacgugguggggcccaacgucaacaagggcgaggacauccagcugcugaagagcgccuacgagaacuucaaccagcacgaggugcuccuggcgccgcugcucuccgccgggaucuucggcgccgaccccauccacagccugcgggugugcgucgacaccgugcgcaccaacguguaccuggccgucuucgacaagaaccucuacgacaagcugguguccagcuuccuggagaugaagagcgagaagcagguggagcagaagaucgccgagauccccaaggaggaggucaagcccuucaucaccgaguccaagccgagcguggagcagcggaagcaggacgacaagaagaucaaggcgugcguggaggaggucacgaccacccucgaggagaccaaguuccugacggagaaccugcuccuguacaucgacaucaacgggaaccugcaccccgacuccgccacccucgugagcgacaucgacaucaccuuccugaagaaggacgcccccuacaucgugggcgacgucgugcaggagggcgugcugaccgccgucgugauccccacgaagaaggccgggggcaccaccgagaugcucgcgaaggcccugcgcaaggugccgaccgacaacuacaucacgaccuaccccgggcagggccugaacggguacaccgucgaggaggccaagaccgugcucaagaagugcaaguccgccuucuacauccugcccagcaucaucuccaacgagaagcaggagauccugggcaccgugagcuggaaccuccgggagaugcuggcgcacgccgaggagacgcgcaagcugaugcccgucugcguggagaccaaggccaucguguccaccauccagcggaaguacaagggcaucaagauccaggagggggucguggacuacggcgcccgcuucuacuucuacaccagcaagacgaccguggccucccugaucaacacccucaacgaccugaacgagacccuggucacgaugccgcucggguacgugacccacggccugaaccuggaggaggcggcccgguacaugcgcagccucaaggugcccgccaccgucuccgugagcucccccgacgccgugaccgccuacaacggguaccugacgagcuccagcaagacccccgaggagcacuucaucgagaccaucucccuggcgggcagcuacaaggacuggagcuacuccggccagagcacccagcucgggaucgaguuccugaagcggggcgacaaguccgucuacuacacgagcaacccgaccaccuuccaccuggacggggaggugaucaccuucgacaaccucaagacgcugcugucccuccgcgaggugcggaccaucaaggucuucaccaccguggacaacaucaaccugcacacgcagguggucgacaugagcaugaccuacggccagcaguucggccccaccuaccuggacggggccgacgugaccaagaucaagccccacaacucccacgagggcaagacguucuacgugcucccgaacgacgacacccugcgcgucgaggccuucgaguacuaccacaccaccgaccccagcuuccuggggcgguacauguccgcccucaaccacacgaagaaguggaaguacccccaggugaacggccugaccagcaucaagugggccgacaacaacugcuaccuggcgaccgcccuccugacccugcagcagaucgagcucaaguucaaccccccggcccugcaggacgccuacuaccgcgcgcgggccggggaggccgccaacuucugcgcccugauccucgcguacugcaacaagacggugggcgagcugggcgacguccgcgagaccauguccuaccuguuccagcacgccaaccucgacagcugcaagcgggugcugaacgucgugugcaagaccugcgggcagcagcagaccacccugaagggcguggaggccgucauguacauggggacgcucuccuacgagcaguucaagaagggcgugcagauccccugcaccugcgggaagcaggccaccaaguaccuggugcagcaggagagccccuucgucaugauguccgcccccccggcgcaguacgagcugaagcacggcaccuucacgugcgccagcgaguacaccggcaacuaccagugcgggcacuacaagcacaucaccuccaaggagacccucuacugcaucgacggcgcccugcugacgaagagcagcgaguacaaggggcccaucaccgacguguucuacaaggagaacuccuacaccaccacgaucaagcccgugaccuacaagcucgacggcgucgugugcaccgagaucgaccccaagcuggacaacuacuacaagaaggacaacagcuacuucaccgagcagccgaucgaccuggugcccaaccagcccuaccccaacgccuccuucgacaacuucaaguucgucugcgacaacaucaaguucgccgacgaccucaaccagcugacgggguacaagaagccggcgagccgcgagcugaaggugaccuucuuccccgaccucaacggcgacguggucgccaucgacuacaagcacuacacccccuccuucaagaagggcgccaagcugcugcacaagcccaucguguggcacgugaacaacgccaccaacaaggcgacguacaagccgaacaccuggugcauccggugccucuggagcaccaagcccgucgagaccuccaacagcuucgacgugcugaaguccgaggacgcccaggggauggacaaccuggccugcgaggaccucaagcccgugagcgaggaggucguggagaaccccacgauccagaaggacgugcuggagugcaacgucaagaccaccgagguggugggcgacaucauccugaagccggccaacaacucccucaagaucaccgaggaggucgggcacacggaccugauggccgcguacguggacaacagcucccugaccaucaagaagcccaacgagcucagccgcgugcugggccugaagacccucgccacccacgggcuggccgccgucaacuccgugcccugggacacgaucgccaacuacgcgaagccguuccugaacaagguggucagcaccaccaccaacaucgugacgcgcugccucaaccgggugugcaccaacuacaugcccuacuucuucacccugcugcuccagcugugcaccuucacccgcuccacgaacagccggaucaaggccuccaugcccaccaccaucgccaagaacaccgucaagagcgugggcaaguucugccuggaggccagcuucaacuaccucaagucccccaacuucagcaagcugaucaacaucaucaucugguuccugcuccuguccgugugccugggcagccucaucuacuccacggccgcgcuggggguccugaugagcaaccucggcaugccguccuacugcaccggguaccgcgagggcuaccugaacagcaccaacgugaccaucgccacguacugcaccggcuccauccccugcagcgugugccuguccgggcucgacagccuggacaccuaccccucccuggagaccauccagaucacgaucagcuccuucaagugggaccucaccgccuucggccuggucgccgagugguuccuggccuacauccucuucacccgguucuucuacgugcuggggcuggcggccaucaugcagcucuucuucagcuacuucgccgugcacuucaucuccaacagcuggcugauguggcugaucaucaaccugguccagauggcccccaucuccgcgauggugcgcauguacaucuucuucgccagcuucuacuacguguggaagagcuacguccacgugguggacggcugcaacuccagcaccugcaugaugugcuacaagcggaaccgcgccacgcgggucgagugcaccaccaucgugaacgggguccgccgguccuucuacguguacgccaacggcggcaagggguucugcaagcuccacaacuggaacugcgugaacugcgacaccuucugcgccggcagcacguucaucuccgacgaggucgcgcgcgaccugagccugcaguucaagcggccgaucaaccccaccgaccaguccagcuacaucguggacuccgugaucgucaagaacgggagcauccaccucuacuucgacaaggccggccagaagaccuacgagcgccacucccugagccacuucgugaaccuggacaaccuccgggccaacaacaccaaggggucccugcccaucaacgugaucgucuucgacggcaagagcaagugcgaggaguccagcgccaaguccgccagcguguacuacucccagcugaugugccagcccauccuccugcuggaccaggcgcucgugagcgacgucggcgacagcgccgagguggccgugaagauguucgacgccuacgucaacacguucuccagcaccuucaacgugccgauggagaagcugaagacccugguggccaccgcggaggccgagcucgccaagaacgucucccuggacaacgugcugagcacguucaucuccgccgcgcgccagggguucguggacagcgacgucgagaccaaggacgugguggagugccucaagcugucccaccagagcgacaucgaggucaccggcgacuccugcaacaacuacaugcugaccuacaacaagguggagaacaugacgccccgggaccucggggccugcaucgacugcagcgcccgccacaucaacgcccagguggccaagucccacaacaucgcgcugaucuggaacgucaaggacuucaugagccuguccgagcagcuccggaagcagauccgcagcgccgccaagaagaacaaccugcccuucaagcugaccugcgccaccacccgccagguggugaacgucgugacgaccaagaucgcccucaagggcgggugaggacuaguuauaagacugacuagcccgaugggccucccaacgggcccuccuccccuccuugcaccgagauuaauaaaaaaaaaaaaaaaaaaaaaaaaaaaaaaaaaaaaaaaaaaaaaaaaaaaaaaaaaaaaaaaaugcaucccccccccccccccccccccccccccccccaaaggcucuuuucagagccaccagaauu

SEQ ID NO: 21893 - RNA, 6058 nt, Artificial Sequence
  SARS-CoV-2__MT520189.1__non-structural protein 3 (NSP3) mRNA gc
aggagaaagcuuaccauggcccccaccaaggugaccuucggcgacgacacggucaucgaggugcagggguacaagagcgugaacaucaccuucgagcuggacgagcgcaucgacaagguccucaacgagaagugcuccgccuacaccguggagcugggcaccgaggugaacgaguucgcgugcgucguggccgacgccgugaucaagacgcugcagccggucagcgagcuccugaccccccuggggaucgaccucgacgagugguccauggccaccuacuaccuguucgacgagagcggcgaguucaagcuggccucccacauguacugcagcuucuacccccccgacgaggacgaggaggagggggacugcgaggaggaggaguucgagccguccacccaguacgaguacggcacggaggacgacuaccagggcaagccccucgaguucggggcgaccagcgccgcccugcagcuggaggaggagcaggaggaggacuggcucgacgacgacucccagcagaccgugggccagcaggacgggagcgaggacaaccagaccacgaccauccagaccaucguggagguccagccccagcuggagauggagcugacccccguggugcagacgaucgaggucaacuccuucagcggcuaccucaagcugaccgacaacguguacaucaagaacgccgacaucguggaggaggcgaagaaggucaagccgaccgugguggucaacgccgccaacguguaccugaagcacgggggcggcguggccggggcccucaacaaggcgaccaacaacgccaugcaggucgaguccgacgacuacaucgccacgaacggcccccugaagguggggggcagcugcguccuguccggccacaaccucgccaagcacugccugcacgugguggggcccaacgucaacaagggcgaggacauccagcugcucaagagcgccuacgagaacuucaaccagcacgaggugcugcuggcgccccuccuguccgccgggaucuucggcgccgacccgauccacagccugcgggugugcgucgacaccgugcgcaccaacguguaccucgccgucuucgacaagaaccuguacgacaagcugguguccagcuuccucgagaugaagagcgagaagcagguggagcagaagaucgccgagauccccaaggaggaggucaagcccuucaucaccgaguccaagcccagcguggagcagcggaagcaggacgacaagaagaucaaggcgugcguggaggaggucacgaccacccuggaggagaccaaguuccugacggagaaccuccugcuguacaucgacaucaacgggaaccuccacccggacuccgccacccuggugagcgacaucgacaucaccuuccugaagaaggacgcccccuacaucgugggcgacgucgugcaggagggcgugcucaccgccgucgugauccccacgaagaaggccgggggcaccaccgagaugcuggcgaaggcccugcgcaaggugcccaccgacaacuacaucacgaccuacccggggcagggccucaacggguacaccgucgaggaggccaagaccgugcugaagaagugcaaguccgccuucuacauccugcccagcaucaucuccaacgagaagcaggagauccucggcaccgugagcuggaaccugcgggagaugcuggcgcacgccgaggagacgcgcaagcugaugcccgucugcguggagaccaaggccaucguguccaccauccagcggaaguacaagggcaucaagauccaggagggggucguggacuacggcgcccgcuucuacuucuacaccagcaagacgaccguggccucccucaucaacacccugaacgaccugaacgagacccucgucacgaugccccugggguacgugacccacggccugaaccucgaggaggcggcccgguacaugcgcagccugaaggugccggccaccgucuccgugagcucccccgacgccgugaccgccuacaacggguaccugacgagcuccagcaagacccccgaggagcacuucaucgagaccaucucccucgcgggcagcuacaaggacuggagcuacuccggccagagcacccagcuggggaucgaguuccugaagcggggcgacaaguccgucuacuacacgagcaaccccaccaccuuccaccucgacggggaggugaucaccuucgacaaccugaagacgcugcucucccugcgcgaggugcggaccaucaaggucuucaccaccguggacaacaucaaccugcacacgcagguggucgacaugagcaugaccuacggccagcaguucggcccgaccuaccucgacggggccgacgugaccaagaucaagccccacaacucccacgagggcaagacguucuacgugcugcccaacgacgacacccugcgcgucgaggccuucgaguacuaccacaccaccgacccgagcuuccucgggcgguacauguccgcccugaaccacacgaagaaguggaaguacccccaggugaacggccugaccagcaucaagugggccgacaacaacugcuaccucgcgaccgcccugcugacccuccagcagaucgagcugaaguucaacccccccgcccugcaggacgccuacuaccgcgcgcgggccggggaggccgccaacuucugcgcccucauccuggcguacugcaacaagacggugggcgagcugggcgacguccgcgagaccauguccuaccucuuccagcacgccaaccuggacagcugcaagcgggugcugaacgucgugugcaagaccugcgggcagcagcagaccacccucaagggcguggaggccgucauguacauggggacgcuguccuacgagcaguucaagaagggcgugcagaucccgugcaccugcgggaagcaggccaccaaguaccuggugcagcaggagagccccuucgucaugauguccgccccccccgcgcaguacgagcucaagcacggcaccuucacgugcgccagcgaguacaccggcaacuaccagugcgggcacuacaagcacaucaucuccaaggagacccuguacugcaucgacggcgcccugcucaccaagagcagcgaguacaaggggccgaucacggacguguucuacaaggagaacuccuacaccaccaccaucaagcccgugacguacaagcuggacggcgucgugugcaccgagaucgaccccaagcuggacaacuacuacaagaaggacaacagcuacuucaccgagcagcccaucgaccucgugccgaaccagcccuaccccaacgccuccuucgacaacuucaaguucgucugcgacaacaucaaguucgccgacgaccugaaccagcugaccggguacaagaagcccgcgagccgcgagcucaaggugacguucuucccggaccugaacggcgacguggucgccaucgacuacaagcacuacacccccuccuucaagaagggcgccaagcugcuccacaagcccaucguguggcacgugaacaacgccaccaacaaggcgaccuacaagcccaacacguggugcauccggugccuguggagcaccaagccggucgagaccuccaacagcuucgacgugcugaaguccgaggacgcccaggggauggacaaccucgccugcgaggaccugaagcccgugagcgaggaggucguggagaaccccaccauccagaaggacgugcuggagugcaacgucaagacgaccgagguggugggcgacaucauccucaagcccgccaacaacucccugaagaucaccgaggaggucgggcacaccgaccugauggccgcguacguggacaacagcucccucacgaucaagaagccgaacgagcugagccgcgugcugggccucaagacccuggccacccacgggcuggccgccgucaacuccgugcccugggacaccaucgccaacuacgcgaagcccuuccucaacaagguggucagcacgaccaccaacaucgugacccgcugccugaaccgggugugcacgaacuacaugccguacuucuucacccugcuccugcagcugugcaccuucacccgcuccaccaacagccggaucaaggccuccaugcccacgaccaucgccaagaacaccgucaagagcgugggcaaguucugccucgaggccagcuucaacuaccugaagucccccaacuucagcaagcugaucaacaucaucaucugguuccuccugcuguccgugugccucggcagccugaucuacuccaccgccgcgcuggggguccucaugagcaaccugggcaugcccuccuacugcacgggguaccgcgagggcuaccugaacagcaccaacgugaccaucgccaccuacugcacgggcuccaucccgugcagcgugugccucuccgggcuggacagccuggacaccuaccccucccucgagaccauccagaucaccaucagcuccuucaagugggaccugacggccuucggccuggucgccgagugguuccucgccuacauccuguucacccgguucuucuacgugcuggggcucgcggccaucaugcagcuguucuucagcuacuucgccgugcacuucaucuccaacagcuggcugauguggcugaucaucaaccucguccagauggcccccaucuccgcgauggugcgcauguacaucuucuucgccagcuucuacuacguguggaagagcuacguccacgugguggacggcugcaacuccagcaccugcaugaugugcuacaagcggaaccgcgccacccgggucgagugcacgaccaucgugaacgggguccgccgguccuucuacguguacgccaacggcggcaagggguucugcaagcugcacaacuggaacugcgugaacugcgacaccuucugcgccggcagcaccuucaucuccgacgaggucgcgcgcgaccugagccuccaguucaagcggcccaucaacccgacggaccaguccagcuacaucguggacuccgugaccgucaagaacgggagcauccaccuguacuucgacaaggccggccagaagaccuacgagcgccacucccugagccacuucgugaaccucgacaaccugcgggccaacaacaccaaggggucccugcccaucaacgugaucgucuucgacggcaagagcaagugcgaggaguccagcgccaaguccgccagcguguacuacucccagcucaugugccagcccauccugcugcucgaccaggcgcuggugagcgacgucggcgacagcgccgagguggccgugaagauguucgacgccuacgucaacacguucuccagcaccuucaacgugcccauggagaagcugaagacccucguggccaccgcggaggccgagcuggccaagaacgucucccuggacaacgugcucagcacguucaucuccgccgcgcgccagggguucguggacagcgacgucgagaccaaggacgugguggagugccugaagcugucccaccagagcgacaucgaggucaccggcgacuccugcaacaacuacaugcucaccuacaacaagguggagaacaugacgccgcgggaccugggggccugcaucgacugcagcgcccgccacaucaacgcccagguggccaagucccacaacaucgcgcugaucuggaacgucaaggacuucaugagccucuccgagcagcugcggaagcagauccgcagcgccgccaagaagaacaaccugcccuucaagcucaccugcgccaccacccgccagguggugaacgucgugacgaccaagaucgcccugaagggcgggugaggacuaguuauaagacugacuagcccgaugggccucccaacgggcccuccuccccuccuugcaccgagauuaauaaaaaaaaaaaaaaaaaaaaaaaaaaaaaaaaaaaaaaaaaaaaaaaaaaaaaaaaaaaaaaaaugcaucccccccccccccccccccccccccccccccaaaggcucuuuucagagccaccagaauu

SEQ ID NO: 21894 - RNA, 6058 nt, Artificial Sequence
  SARS-CoV-2__MT520208.1__non-structural protein 3 (NSP3) mRNA gc
aggagaaagcuuaccauggcccccaccaaggugaccuucggcgacgacacggucaucgaggugcagggguacaagagcgugaacaucaccuucgagcuggacgagcgcaucgacaagguccucaacgagaagugcuccgccuacaccguggagcugggcaccgaggugaacgaguucgcgugcgucguggccgacgccgugaucaagacgcugcagccggucagcgagcuccugaccccccuggggaucgaccucgacgagugguccauggccaccuacuaccuguucgacgagagcggcgaguucaagcuggccucccacauguacugcagcuucuacccccccgacgaggacgaggaggagggggacugcgaggaggaggaguucgagccguccacccaguacgaguacggcacggaggacgacuaccagggcaagccccucgaguucggggcgaccagcgccgcccugcagcccgaggaggagcaggaggaggacuggcuggacgacgacucccagcagaccgugggccagcaggacgggagcgaggacaaccagaccacgaccauccagaccaucguggagguccagccccagcucgagauggagcugaccccgguggugcagacgaucgaggucaacuccuucagcggcuaccugaagcucaccgacaacguguacaucaagaacgccgacaucguggaggaggcgaagaaggucaagcccaccgugguggucaacgccgccaacguguaccugaagcacgggggcggcguggccggggcccugaacaaggcgaccaacaacgccaugcaggucgaguccgacgacuacaucgccacgaacggcccccucaagguggggggcagcugcguccuguccggccacaaccuggccaagcacugccuccacgugguggggcccaacgucaacaagggcgaggacauccagcugcugaagagcgccuacgagaacuucaaccagcacgaggugcuccuggcgccgcugcucuccgccgggaucuucggcgccgaccccauccacagccugcgggugugcgucgacaccgugcgcaccaacguguaccuggccgucuucgacaagaaccucuacgacaagcugguguccagcuuccuggagaugaagagcgagaagcagguggagcagaagaucgccgagauccccaaggacgaggucaagcccuucaucaccgaguccaagccgagcguggagcagcggaagcaggacgacaagaagaucaaggcgugcguggaggaggucacgaccacccucgaggagaccaaguuccugacggagaaccugcuccuguacaucgacaucaacgggaaccugcaccccgacuccgccacccucgugagcgacaucgacaucaccuuccugaagaaggacgcccccuacaucgugggcgacgucgugcaggagggcgugcugaccgccgucgugauccccacgaagaaggccgggggcaccaccgagaugcucgcgaaggcccugcgcaaggugccgaccgacaacuacaucacgaccuaccccgggcagggccugaacggguacaccgucgaggaggccaagaccgugcucaagaagugcaaguccgccuucuacauccugcccagcaucaucuccaacgagaagcaggagauccugggcaccgugagcuggaaccuccgggagaugcuggcgcacgccgaggagacgcgcaagcugaugcccgucugcguggagaccaaggccaucguguccaccauccagcggaaguacaagggcaucaagauccaggagggggucguggacuacggcgcccgcuucuacuucuacaccagcaagacgaccguggccucccugaucaacacccucaacgaccugaacgagacccuggucacgaugccgcucggguacgugacccacggccugaaccuggaggaggcggcccgguacaugcgcagccucaaggugcccgccaccgucuccgugagcucccccgacgccgugaccgccuacaacggguaccugacgagcuccagcaagacccccgaggagcacuucaucgagaccaucucccuggcgggcagcuacaaggacuggagcuacuccggccagagcacccagcucgggaucgaguuccugaagcggggcgacaaguccgucuacuacacgagcaacccgaccaccuuccaccuggacggggaggugaucaccuucgacaaccucaagacgcugcugucccuccgcgaggugcggaccaucaaggucuucaccaccguggacaacaucaaccugcacacgcagguggucgacaugagcaugaccuacggccagcaguucggccccaccuaccuggacggggccgacgugaccaagaucaagccccacaacucccacgagggcaagacguucuacgugcucccgaacgacgacacccugcgcgucgaggccuucgaguacuaccacaccaccgaccccagcuuccuggggcgguacauguccgcccucaaccacacgaagaaguggaaguacccccaggugaacggccugaccagcaucaagugggccgacaacaacugcuaccuggcgaccgcccuccugacccugcagcagaucgagcucaaguucaaccccccggcccugcaggacgccuacuaccgcgcgcgggccggggaggccgccaacuucugcgcccugauccucgcguacugcaacaagacggugggcgagcugggcgacguccgcgagaccauguccuaccuguuccagcacgccaaccucgacagcugcaagcgggugcugaacgucgugugcaagaccugcgggcagcagcagaccacccugaagggcguggaggccgucauguacauggggacgcucuccuacgagcaguucaagaagggcgugcagauccccugcaccugcgggaagcaggccaccaaguaccuggugcagcaggagagccccuucgucaugauguccgcccccccggcgcaguacgagcugaagcacggcaccuucacgugcgccagcgaguacaccggcaacuaccagugcgggcacuacaagcacaucaccuccaaggagacccucuacugcaucgacggcgcccugcugacgaagagcagcgaguacaaggggcccaucaccgacguguucuacaaggagaacuccuacaccaccacgaucaagcccgugaccuacaagcucgacggcgucgugugcaccgagaucgaccccaagcuggacaacuacuacaagaaggacaacagcuacuucaccgagcagccgaucgaccuggugcccaaccagcccuaccccaacgccuccuucgacaacuucaaguucgucugcgacaacaucaaguucgccgacgaccucaaccagcugacgggguacaagaagccggcgagccgcgagcugaaggugaccuucuuccccgaccucaacggcgacguggucgccaucgacuacaagcacuacacccccuccuucaagaagggcgccaagcugcugcacaagcccaucguguggcacgugaacaacgccaccaacaaggcgacguacaagccgaacaccuggugcauccggugccucuggagcaccaagcccgucgagaccuccaacagcuucgacgugcugaaguccgaggacgcccaggggauggacaaccuggccugcgaggaccucaagcccgugagcgaggaggucguggagaaccccacgauccagaaggacgugcuggagugcaacgucaagaccaccgagguggugggcgacaucauccugaaguccgccaacaacagccucaagaucaccgaggaggucgggcacacggaccugauggccgcguacguggacaacuccagccugaccaucaagaagccgaacgagcucucccgcgugcugggccugaagacccucgccacccacgggcuggccgccgucaacagcgugcccugggacacgaucgccaacuacgcgaagcccuuccugaacaagguggucuccaccaccaccaacaucgugacgcgcugccucaaccgggugugcaccaacuacaugccguacuucuucacccugcugcuccagcugugcaccuucacccgcagcacgaacucccggaucaaggccagcaugcccaccaccaucgccaagaacaccgucaagagcgugggcaaguucugccuggaggccuccuucaacuaccucaagagccccaacuucuccaagcugaucaacaucaucaucugguuccugcuccugagcgugugccugggcucccucaucuacagcacggccgcgcuggggguccugauguccaaccucggcaugcccagcuacugcaccggguaccgcgagggcuaccugaacuccaccaacgugaccaucgccacguacugcaccggcagcaucccgugcuccgugugccugagcgggcucgacucccuggacaccuaccccagccuggagaccauccagaucacgaucuccagcuucaagugggaccucaccgccuucggccuggucgccgagugguuccuggccuacauccucuucacccgguucuucuacgugcuggggcuggcggccaucaugcagcucuucuucuccuacuucgccgugcacuucaucagcaacuccuggcugauguggcugaucaucaaccugguccagauggcccccaucagcgcgauggugcgcauguacaucuucuucgccagcuucuacuacguguggaaguccuacguccacgugguggacggcugcaacagcuccaccugcaugaugugcuacaagcggaaccgcgccacgcgggucgagugcaccaccaucgugaacgggguccgccggagcuucuacguguacgccaacggcggcaagggguucugcaagcuccacaacuggaacugcgugaacugcgacaccuucugcgccggcuccacguucaucagcgacgaggucgcgcgcgaccugucccugcaguucaagcggcccaucaacccgaccgaccagagcuccuacaucguggacagcgugaccgucaagaacggguccauccaccucuacuucgacaaggccggccagaagaccuacgagcgccacagccugucccacuucgugaaccuggacaaccuccgggccaacaacacgaaggggagccugcccaucaacgugaucgucuucgacggcaaguccaagugcgaggagagcuccgugaagagcgccuccguguacuacagccagcugaugugccagcccauccuccugcuggaccaggcccucgucagcgacgugggcgacuccgcggagguggccgucaagauguucgacgccuacgugaacaccuucagcuccaccuucaacgugcccauggagaagcugaagacccuggucgccacggccgaggcggagcucgccaagaacgugagccuggacaacgugcuguccaccuucaucagcgccgcccgccagggguucgucgacuccgacguggagaccaaggacguggucgagugccucaagcugagccaccaguccgacaucgaggugaccggcgacagcugcaacaacuacaugcugacguacaacaagguggagaacaugaccccgcgggaccucggggcgugcaucgacugcuccgcccgccacaucaacgcccaggucgccaagagccacaacaucgcccugaucuggaacgugaaggacuucaugucccugagcgagcagcuccggaagcagauccgcuccgcggccaagaagaacaaccugcccuucaagcugaccugcgccaccacgcgccagguggucaacguggugaccaccaagaucgcccucaagggcgggugaggacuaguuauaagacugacuagcccgaugggccucccaacgggcccuccuccccuccuugcaccgagauuaauaaaaaaaaaaaaaaaaaaaaaaaaaaaaaaaaaaaaaaaaaaaaaaaaaaaaaaaaaaaaaaaaugcaucccccccccccccccccccccccccccccccaaaggcucuuuucagagccaccagaauu

SEQ ID NO: 21895 - RNA, 6058 nt, Artificial Sequence
  SARS-CoV-2__MT520254.1__non-structural protein 3 (NSP3) mRNA gc
aggagaaagcuuaccauggcccccaccaaggugaccuucggcgacgacacggucaucgaggugcagggguacaagagcgugaacaucaccuucgagcuggacgagcgcaucgacaagguccucaacgagaagugcuccgccuacaccguggagcugggcaccgaggugaacgaguucgcgugcgucguggccgacgccgugaucaagacgcugcagccggucagcgagcuccugaccccccuggggaucgaccucgacgagugguccauggccaccuacuaccuguucgacgagagcggcgaguucaagcuggccucccacauguacugcagcuucuacccccccgacgaggacgaggaggagggggacugcgaggaggaggaguucgagccguccacccaguacgaguacggcacggaggacgacuaccagggcaagccccucgaguucggggcgaccagcgccgcccugcagcuggaggaggagcaggaggaggacuggcucgacgacgacucccagcagaccgugggccagcaggacgggagcgaggacaaccagaccacgaccauccagaccaucguggagguccagccccagcuggagauggagcugacccccguggugcagacgaucgaggucaacuccuucagcggcuaccucaagcugaccgacaacguguacaucaagaacgccgacaucguggaggaggcgaagaaggucaagccgaccgugguggucaacgccgccaacguguaccugaagcacgggggcggcguggccggggcccucaacaaggcgaccaacaacgccaugcaggucgaguccgacgacuacaucgccacgaacggcccccugaagguggggggcagcugcguccuguccggccacaaccucgccaagcacugccugcacgugguggggcccaacgucaacaagggcgaggacauccagcugcucaagagcgccuacgagaacuucaaccagcacgaggugcugcuggcgccccuccuguccgccgggaucuucggcgccgacccgauccacagccugcgggugugcgucgacaccgugcgcaccaacguguaccucgccgucuucgacaagaaccuguacgacaagcugguguccagcuuccucgagaugaagagcgagaagcagguggagcagaagaucgccgagauccccaaggaggaggucaagcccuucaucaccgaguccaagcccagcguggagcagcggaagcaggacgacaagaagaucaaggcgugcguggaggaggucacgaccacccuggaggagaccaaguuccugacggagaaccuccugcuguacaucgacaucaacgggaaccuccacccggacuccgccacccuggugagcgacaucgacaucaccuuccugaagaaggacgcccccuacaucgugggcgacgucgugcaggagggcgugcucaccgccgucgugauccccacgaagaaggccgggggcaccaccgagaugcuggcgaaggcccugcgcaaggugcccaccgacaacuacaucacgaccuacccggggcagggccucaacggguacaccgucgaggaggccaagaccgugcugaagaagugcaaguccgccuucuacauccugcccagcaucaucuccaacgagaagcaggagauccucggcaccgugagcuggaaccugcgggagaugcuggcgcacgccgaggagacgcgcaagcugaugcccgucugcguggagaccaaggccaucguguccaccauccagcggaaguacaagggcaucaagauccaggagggggucguggacuacggcgcccgcuucuacuucuacaccagcaagacgaccguggccucccucaucaacacccugaacgaccugaacgagacccucgucacgaugccccugggguacgugacccacggccugaaccucgaggaggcggcccgguacaugcgcagccugaaggugccggccaccgucuccgugagcucccccgacgccgugaccgccuacaacggguaccugacgagcuccagcaagacccccgaggagcacuucaucgagaccaucucccucgcgggcagcuacaaggacuggagcuacuccggccagagcacccagcuggggaucgaguuccugaagcggggcgacaaguccgucuacuacacgagcaaccccaccgccuuccaccucgacggggaggugaucaccuucgacaaccugaagacccugcucucccugcgcgaggugcggacgaucaaggucuucaccaccguggacaacaucaaccugcacacccagguggucgacaugagcaugacguacggccagcaguucggcccgaccuaccucgacggggccgacgugaccaagaucaagccccacaacucccacgagggcaagaccuucuacgugcugcccaacgacgacacgcugcgcgucgaggccuucgaguacuaccacaccaccgacccgagcuuccucgggcgguacauguccgcccugaaccacaccaagaaguggaaguacccccaggugaacggccugacgagcaucaagugggcggacaacaacugcuaccucgccaccgcccugcugacccuccagcagaucgagcugaaguucaacccccccgcccugcaggacgcguacuaccgcgcccgggccggggaggccgccaacuucugcgcgcucauccuggccuacugcaacaagaccgugggcgagcugggcgacguccgcgagacgauguccuaccucuuccagcacgccaaccuggacagcugcaagcgggugcugaacgucgugugcaagaccugcgggcagcagcagaccacccucaagggcguggaggccgucauguacauggggacccuguccuacgagcaguucaagaagggcgugcagaucccgugcacgugcgggaagcaggccaccaaguaccuggugcagcaggagagccccuucgucaugauguccgcgccccccgcccaguacgagcucaagcacggcaccuucaccugcgccagcgaguacacgggcaacuaccagugcgggcacuacaagcacaucaccuccaaggagacccuguacugcaucgacggcgcccugcucaccaagagcagcgaguacaaggggccgaucacggacguguucuacaaggagaacuccuacaccaccaccaucaagcccgugacguacaagcuggacggcgucgugugcaccgagaucgaccccaagcuggacaacuacuacaagaaggacaacagcuacuucaccgagcagcccaucgaccucgugccgaaccagcccuaccccaacgccuccuucgacaacuucaaguucgucugcgacaacaucaaguucgcggacgaccugaaccagcugaccggguacaagaagcccgccagccgcgagcucaaggugacguucuucccggaccugaacggcgacguggucgccaucgacuacaagcacuacacccccuccuucaagaagggcgccaagcugcuccacaagcccaucguguggcacgugaacaacgcgaccaacaaggccaccuacaagcccaacacguggugcauccggugccuguggagcaccaagccggucgagaccuccaacagcuucgacgugcugaagcucgaggacgcccaggggauggacaaccuggccugcgaggaccugaagcccguguccgaggaggucguggagaaccccaccauccagaaggacgugcucgagugcaacgucaagacgaccgagguggugggcgacaucauccugaagcccgccaacaacagccugaagaucaccgaggaggucgggcacaccgaccucauggcggccuacguggacaacuccagccugacgaucaagaagccgaacgagcugucccgcgugcucggccugaagacccuggccacccacgggcucgccgccgucaacagcgugcccugggacaccaucgcgaacuacgccaagcccuuccugaacaagguggucuccacgaccaccaacaucgugacccgcugccugaaccgggugugcacgaacuacaugccguacuucuucacccuccugcugcagcucugcaccuucacccgcagcaccaacucccggaucaaggccagcaugcccacgaccaucgccaagaacaccgucaaguccgugggcaaguucugccuggaggccagcuucaacuaccugaagagccccaacuucuccaagcucaucaacaucaucaucugguuccugcugcucagcgugugccugggcucccugaucuacagcaccgcggcccucgggguccugauguccaaccugggcaugcccagcuacugcacgggguaccgcgagggcuaccucaacuccaccaacgugaccaucgccaccuacugcacgggcagcaucccgugcuccgugugccugagcgggcuggacucccucgacaccuaccccagccuggagaccauccagaucaccaucuccagcuucaagugggaccugacggccuucggccucgucgccgagugguuccuggcguacauccuguucacccgguucuucuacgugcucgggcuggccgccaucaugcagcuguucuucuccuacuucgccgugcacuucaucagcaacuccuggcugauguggcucaucaucaaccugguccagauggcgcccaucagcgccauggugcgcauguacaucuucuucgccuccuucuacuacguguggaagagcuacguccacgugguggacggcugcaacagcuccaccugcaugaugugcuacaagcggaaccgcgccacccgggucgagugcacgaccaucgugaacgggguccgccggagcuucuacguguacgccaacggcggcaagggguucugcaagcugcacaacuggaacugcgugaacugcgacaccuucugcgcgggcuccaccuucaucagcgacgaggucgcccgcgaccucucccugcaguucaagcggcccaucaacccgacggaccagagcuccuacaucguggacagcgugaccgucaagaacggguccauccaccuguacuucgacaaggccggccagaagaccuacgagcgccacagccucucccacuucgugaaccuggacaaccugcgggccaacaacaccaaggggagccuccccaucaacgugaucgucuucgacggcaaguccaagugcgaggagagcuccgccaagagcgcguccguguacuacagccagcugaugugccagcccauccugcuccuggaccaggcccugguguccgacgucggcgacagcgccgagguggccgugaagauguucgacgccuacgucaacacguucagcuccaccuucaacgugcccauggagaagcucaagacccugguggcgaccgccgaggccgagcuggccaagaacgucagccucgacaacgugcuguccacguucaucagcgcggcccgccagggguucguggacuccgacgucgagaccaaggacgugguggagugccugaagcucagccaccaguccgacaucgaggucaccggcgacagcugcaacaacuacaugcugaccuacaacaagguggagaacaugacgccgcgggaccugggggccugcaucgacugcuccgcccgccacaucaacgcccagguggcgaagagccacaacaucgcccucaucuggaacgucaaggacuucaugucccugagcgagcagcugcggaagcagauccgcuccgccgccaagaagaacaaccuccccuucaagcugaccugcgccaccacccgccagguggugaacgucgugacgaccaagaucgcgcugaagggcgggugaggacuaguuauaagacugacuagcccgaugggccucccaacgggcccuccuccccuccuugcaccgagauuaauaaaaaaaaaaaaaaaaaaaaaaaaaaaaaaaaaaaaaaaaaaaaaaaaaaaaaaaaaaaaaaaaugcaucccccccccccccccccccccccccccccccaaaggcucuuuucagagccaccagaauu

SEQ ID NO: 21896 - RNA, 6058 nt, Artificial Sequence
  SARS-CoV-2__MT520255.1__non-structural protein 3 (NSP3) mRNA gc
aggagaaagcuuaccauggcccccaccaaggugaccuucggcgacgacacggucaucgaggugcagggguacaagagcgugaacaucaccuucgagcuggacgagcgcaucgacaagguccucaacgagaagugcuccgccuacaccguggagcugggcaccgaggugaacgaguucgcgugcgucguggccgacgccgugaucaagacgcugcagccggucagcgagcuccugaccccccuggggaucgaccucgacgagugguccauggccaccuacuaccuguucgacgagagcggcgaguucaagcuggccucccacauguacugcagcuucuacccccccgacgaggacgaggaggagggggacugcgaggaggaggaguucgagccguccacccaguacgaguacggcacggaggacgacuaccagggcaagccccucgaguucggggcgaccagcgccgcccugcagcccgaggaggagcaggaggaggacuggcuggacgacgacucccagcagaccgugggccagcaggacgggagcgaggacaaccagaccacgaccauccagaccaucguggagguccagccccagcucgagauggagcugaccccgguggugcagacgaucgaggucaacuccuucagcggcuaccugaagcucaccgacaacguguacaucaagaacgccgacaucguggaggaggcgaagaaggucaagcccaccgugguggucaacgccgccaacguguaccugaagcacgggggcggcguggccggggcccugaacaaggcgaccaacaacgccaugcaggucgaguccgacgacuacaucgccacgaacggcccccucaagguggggggcagcugcguccuguccggccacaaccuggccaagcacugccuccacgugguggggcccaacgucaacaagggcgaggacauccagcugcugaagagcgccuacgagaacuucaaccagcacgaggugcuccuggcgccgcugcucuccgccgggaucuucggcgccgaccccauccacagccugcgggugugcgucgacaccgugcgcaccaacguguaccuggccgucuucgacaagaaccucuacgacaagcugguguccagcuuccuggagaugaagagcgagaagcagguggagcagaagaucgccgagauccccaaggaggaggucaagcccuucaucaccgaguccaagccgagcguggagcagcggaagcaggacgacaagaagaucaaggcgugcguggaggaggucacgaccacccucgaggagaccaaguuccugacggagaaccugcuccuguacaucgacaucaacgggaaccugcaccccgacuccgccacccucgugagcgacaucgacaucaccuuccugaagaaggacgcccccuacaucgugggcgacgucgugcaggagggcgugcugaccgccgucgugauccccacgaagaaggccgggggcaccaccgagaugcucgcgaaggcccugcgcaaggugccgaccgacaacuacaucacgaccuaccccgggcagggccugaacggguacaccgucgaggaggccaagaccgugcucaagaagugcaaguccgccuucuacauccugcccagcaucaucuccaacgagaagcaggagauccugggcaccgugagcuggaaccuccgggagaugcuggcgcacgccgaggagacgcgcaagcugaugcccgucugcguggagaccaaggccaucguguccaccauccagcggaaguacaagggcaucaagauccaggagggggucguggacuacggcgcccgcuucuacuucuacaccagcaagacgaccguggccucccugaucaacacccucaacgaccugaacgagacccuggucacgaugccgcucggguacgugacccacggccugaaccuggaggaggcggcccgguacaugcgcagccucaaggugcccgccaccgucuccgugagcucccccgacgccgugaccgccuacaacggguaccugacgagcuccagcaagacccccgaggagcacuucaucgagaccaucucccuggcgggcagcuacaaggacuggagcuacuccggccagagcacccagcucgggaucgaguuccugaagcggggcgacaaguccgucuacuacacgagcaacccgaccaccuuccaccuggacggggaggugaucaccuucgacaaccucaagacgcugcugucccuccgcgaggugcggaccaucaaggucuucaccaccguggacaacaucaaccugcacacgcagguggucgacaugagcaugaccuacggccagcaguucggccccaccuaccuggacggggccgacgugaccaagaucaagccccacaacucccacgagggcaagacguucuacgugcucccgaacgacgacacccugcgcgucgaggccuucgaguacuaccacaccaccgaccccagcuuccuggggcgguacauguccgcccucaaccacacgaagaaguggaaguacccccaggugaacggccugaccagcaucaagugggccgacaacaacugcuaccuggcgaccgcccuccugacccugcagcagaucgagcucaaguucaaccccccggcccugcaggacgccuacuaccgcgcgcgggccggggaggccgccaacuucugcgcccugauccucgcguacugcaacaagacggugggcgagcugggcgacguccgcgagaccauguccuaccuguuccagcacgccaaccucgacagcugcaagcgggugcugaacgucgugugcaagaccugcgggcagcagcagaccacccugaagggcguggaggccgucauguacauggggacgcucuccuacgagcaguucaagaagggcgugcagauccccugcaccugcgggaagcaggccaccaaguaccuggugcagcaggagagccccuucgucaugauguccgcccccccggcgcaguacgagcugaagcacggcaccuucacgugcgccagcgaguacaccggcaacuaccagugcgggcacuacaagcacaucaccuccaaggagacccucuacugcaucgacggcgcccugcugacgaagagcagcgaguacaaggggcccaucaccgacguguucuacaaggagaacuccuacaccaccacgaucaagcccgugaccuacaagcucgacggcgucgugugcaccgagaucgaccccaagcuggacaacuacuacaagaaggacaacagcuacuucaccgagcagccgaucgaccuggugcccaaccagcccuaccccaacgccuccuucgacaacuucaaguucgucugcgacaacacgaaguucgccgacgaccucaaccagcugaccggguacaagaagccggcgagccgcgagcugaaggugaccuucuuccccgaccucaacggcgacguggucgccaucgacuacaagcacuacacccccuccuucaagaagggcgccaagcugcugcacaagcccaucguguggcacgugaacaacgccacgaacaaggcgaccuacaagccgaacaccuggugcauccggugccucuggagcaccaagcccgucgagacguccaacagcuucgacgugcugaaguccgaggacgcccaggggauggacaaccuggccugcgaggaccucaagcccgugagcgaggaggucguggagaaccccaccauccagaaggacgugcuggagugcaacgucaagaccaccgagguggugggcgacaucauccugaagccggccaacaacucccucaagaucacggaggaggucgggcacaccgaccugauggccgcguacguggacaacagcucccugaccaucaagaagcccaacgagcucagccgcgugcugggccugaagacccucgccacgcacgggcuggccgccgucaacuccgugcccugggacaccaucgccaacuacgcgaagccguuccugaacaagguggucagcaccaccacgaacaucgugacccgcugccucaaccgggugugcaccaacuacaugcccuacuucuucacccugcugcuccagcugugcaccuucacgcgcuccaccaacagccggaucaaggccuccaugcccaccaccaucgccaagaacacggucaagagcgugggcaaguucugccuggaggccagcuucaacuaccucaagucccccaacuucagcaagcugaucaacaucaucaucugguuccugcuccuguccgugugccugggcagccucaucuacuccaccgccgcgcuggggguccugaugagcaaccucggcaugccguccuacugcaccggguaccgcgagggcuaccugaacagcaccaacgugacgaucgccaccuacugcaccggcuccauccccugcagcgugugccuguccgggcucgacagccuggacaccuaccccucccuggagacgauccagaucaccaucagcuccuucaagugggaccucaccgccuucggccuggucgccgagugguuccuggccuacauccucuucacccgguucuucuacgugcuggggcuggcggccaucaugcagcucuucuucagcuacuucgccgugcacuucaucuccaacagcuggcugauguggcugaucaucaaccugguccagauggcccccaucuccgcgauggugcgcauguacaucuucuucgccagcuucuacuacguguggaagagcuacguccacgugguggacggcugcaacuccagcacgugcaugaugugcuacaagcggaaccgcgccacccgggucgagugcaccaccaucgugaacgggguccgccgguccuucuacguguacgccaacggcggcaagggguucugcaagcuccacaacuggaacugcgugaacugcgacacguucugcgccggcagcaccuucaucuccgacgaggucgcgcgcgaccugagccugcaguucaagcggccgaucaaccccaccgaccaguccagcuacaucguggacuccgugaccgucaagaacgggagcauccaccucuacuucgacaaggccggccagaagacguacgagcgccacucccugagccacuucgugaaccuggacaaccuccgggccaacaacaccaaggggucccugcccaucaacgugaucgucuucgacggcaagagcaagugcgaggaguccagcgccaaguccgccagcguguacuacucccagcugaugugccagcccauccuccugcuggaccaggcgcucgugagcgacgucggcgacagcgccgagguggccgugaagauguucgacgccuacgucaacaccuucuccagcaccuucaacgugccgauggagaagcugaagacgcugguggccaccgcggaggccgagcucgccaagaacgucucccuggacaacgugcugagcaccuucaucuccgccgcgcgccagggguucguggacagcgacgucgagaccaaggacgugguggagugccucaagcugucccaccagagcgacaucgaggucacgggcgacuccugcaacaacuacaugcugaccuacaacaagguggagaacaugaccccccgggaccucggggccugcaucgacugcagcgcccgccacaucaacgcccagguggccaagucccacaacaucgcgcugaucuggaacgucaaggacuucaugagccuguccgagcagcuccggaagcagauccgcagcgccgccaagaagaacaaccugcccuucaagcugaccugcgccacgacccgccagguggugaacgucgugaccaccaagaucgcccucaagggcgggugaggacuaguuauaagacugacuagcccgaugggccucccaacgggcccuccuccccuccuugcaccgagauuaauaaaaaaaaaaaaaaaaaaaaaaaaaaaaaaaaaaaaaaaaaaaaaaaaaaaaaaaaaaaaaaaaugcaucccccccccccccccccccccccccccccccaaaggcucuuuucagagccaccagaauu

SEQ ID NO: 21897 - RNA, 6058 nt, Artificial Sequence
  SARS-CoV-2__MT520265.1__non-structural protein 3 (NSP3) mRNA gc
aggagaaagcuuaccauggcccccaccaaggugaccuucggcgacgacacggucaucgaggugcagggguacaagagcgugaacaucaccuucgagcuggacgagcgcaucgacaagguccucaacgagaagugcuccgccuacaccguggagcugggcaccgaggugaacgaguucgcgugcgucguggccgacgccgugaucaagacgcugcagccggucagcgagcuccugaccccccuggggaucgaccucgacgagugguccauggccaccuacuaccuguucgacgagagcggcgaguucaagcuggccucccacauguacugcagcuucuacccccccgacgaggacgaggaggagggggacugcgaggaggaggaguucgagccguccacccaguacgaguacggcacggaggacgacuaccagggcaagccccucgaguucggggcgaccagcgccgcccugcagcccgaggaggagcaggaggaggacuggcuggacgacgacucccagcagaccgugggccagcaggacgggagcgaggacaaccagaccacgaccauccagaccaucguggagguccagccccagcucgagauggagcugaccccgguggugcagacgaucgaggucaacuccuucagcggcuaccugaagcucaccgacaacguguacaucaagaacgccgacaucguggaggaggcgaagaaggucaagcccaccgugguggucaacgccgccaacguguaccugaagcacgggggcggcguggccggggcccugaacaaggcgaccaacaacgccaugcaggucgaguccgacgacuacaucgccacgaacggcccccucaagguggggggcagcugcguccuguccggccacaaccuggccaagcacugccuccacgugguggggcccaacgucaacaagggcgaggacauccagcugcugaagagcgccuacgagaacuucaaccagcacgaggugcuccuggcgccgcugcucuccgccgggaucuucggcgccgaccccauccacagccugcgggugugcgucgacaccgugcgcaccaacguguaccuggccgucuucgacaagaaccucuacgacaagcugguguccagcuuccuggagaugaagagcgagaagcagguggagcagaagaucgccgagauccccaaggaggaggucaagcccuucaucaccgaguccaagccgagcguggagcagcggaagcaggacgacaagaagaucaaggcgugcguggaggaggucacgaccacccucgaggagaccaaguuccugacggagaaccugcuccuguacaucgacaucaacgggaaccugcaccccgacuccgccacccucgugagcgacaucgacaucaccuuccugaagaaggacgcccccuacaucgugggcgacgucgugcaggagggcgugcugaccgccgucgugauccccacgaagaaggccgggggcaccaccgagaugcucgcgaaggcccugcgcaaggugccgaccgacaacuacaucacgaccuaccccgggcagggccugaacggguacaccgucgaggaggccaagaccgugcucaagaagugcaaguccgccuucuacauccugcccagcaucaucuccaacgagaagcaggagauccugggcaccgugagcuggaaccuccgggagaugcuggcgcacgccgaggagacgcgcaagcugaugcccgucugcguggagaccaaggccaucguguccaccauccagcggaaguacaagggcaucaagauccaggagggggucguggacuacggcgcccgcuucuacuucuacaccagcaagacgaccguggccucccugaucaacacccucaacgaccugaacgagacccuggucacgaugccgcucggguacgugacccacggccugaaccuggaggaggcggcccgguacaugcgcagccucaaggugcccgccaccgucuccgugagcucccccgacgccgugaccgccuacaacggguaccugacgagcuccagcaagacccccgaggagcacuucaucgagaccaucucccuggcgggcagcuacaaggacuggagcuacuccggccagagcacccagcucgggaucgaguuccugaagcggggcgacaaguccgucuacuacacgagcaacccgaccaccuuccaccuggacggggaggugaucaccuucgacaaccucaagacgcugcugucccuccgcgaggugcggaccaucaaggucuucaccaccguggacaacaucaaccugcacacgcagguggucgacaugagcaugaccuacggccagcaguucggccccaccuaccuggacggggccgacgugaccaagaucaagccccacaacucccacgagggcaagacguucuacgugcucccgaacgacgacacccugcgcgucgaggccuucgaguacuaccacaccaccgaccccagcuuccuggggcgguacauguccgcccucaaccacacgaagaaguggaaguacccccaggugaacggccugaccagcaucaagugggccgacaacaacugcuaccuggcgaccgcccuccugacccugcagcagaucgagcucaaguucaaccccccggcccugcaggacgccuacuaccgcgcgcgggccggggaggccgccaacuucugcgcccugauccucgcguacugcaacaagacggugggcgagcugggcgacguccgcgagaccauguccuaccuguuccagcacgccaaccucgacagcugcaagcgggugcugaacgucgugugcaagaccugcgggcagcagcagaccacccugaagggcguggaggccgucauguacauggggacgcucuccuacgagcaguucaagaagggcgugcagauccccugcaccugcgggaagcaggccaccaaguaccuggugcagcaggagagccccuucgucaugauguccgcccccccggcgcaguacgagcugaagcacggcaccuucacgugcgccagcgaguacaccggcaacuaccagugcgggcacuacaagcacaucaccuccaaggagacccucuacugcaucgacggcgcccugcugacgaagagcagcgaguacaaggggcccaucaccgacguguucuacaaggagaacuccuacaccaccacgaucaagcccgugaccuacaagcucgacggcgucgugugcaccgagaucgaccccaagcuggacaacuacuacaagaaggacaacagcuacuucaccgagcagccgaucgaccuggugcccaaccagcccuaccccaacgccuccuucgacaacuucaaguucgucugcgacaacaucaaguucgccgacgaccucaaccagcugacgggguacaagaagccggcgagccgcgagcugaaggugaccuucuuccccgaccucaacggcgacguggucgccaucgacuacaagcacuacacccccuccuucaagaagggcgccaagcugcugcacaagcccaucguguggcacgugaacaacgccaccaacaaggcgacguacaagccgaacaccuggugcauccggugccucuggagcaccaagcccgucgagaccuccaacagcuucgacgugcugaaguccgaggacgcccaggggauggacaaccuggccugcgaggaccucaagcccgugagcgaggaggucguggagaaccccacgauccagaaggacgugcuggagugcaacgucaagaccaccgagguggugggcgacaucauccugaagccggccaacaacucccucaagaucaccgaggaggucgggcacacggaccugauggccgcguacguggacaacagcucccugaccaucaagaagcccaacgagcucagccgcgugcugggccugaagacccucgccacccacgggcuggccgccgucaacuccgugcccugggacacgaucgccaacuacgcgaagccguuccugaacaagguggucagcaccaccaccaacaucgugacgcgcugccucaaccgggugugcaccaacuacaugcccuacuucuucacccugcugcuccagcugugcaccuucacccgcuccacgaacagccggaucaaggccuccaugcccaccaccaucgccaagaacaccgucaagagcgugggcaaguucugccuggaggccagcuucaacuaccucaagucccccaacuucagcaagcugaucaacaucaucaucugguuccugcuccuguccgugugccugggcagccucaucuacuccacggccgcgcuggggguccugaugagcaaccucggcaugccguccuacugcaccggguaccgcgagggcuaccugaacagcaccaacgugaccaucgccacguacugcaccggcuccauccccugcagcgugugccuguccgggcucgacagccuggacaccuaccccucccuggagaccauccagaucacgaucagcuccuucaagugggaccucaccgccuucggccuggucgccgagugguuccuggccuacauccucuucacccgguucuucuacgugcuggggcuggcggccaucaugcagcucuucuucagcuacuucgccgugcacuucaucuccaacagcuggcugauguggcugaucaucaaccugguccagauggcccccaucuccgcgauggugcgcauguacaucuucuucgccagcuucuacuacguguggaagagcuacguccacgugguggacggcugcaacuccagcaccugcaugaugugcuacaagcggaaccgcgccacgcgggucgagugcaccaccaucgugaacgggguccgccgguccuucuacguguacgccaacggcggcaagggguucugcaagcuccacaacuggaacugcgugaacugcgacaccuucugcgccggcagcacguucaucuccgacgaggucgcgcgcgaccugagccugcaguucaagcggccgaucaaccccaccgaccaguccagcuacaucguggacuccgugaccgucaagaacgggagcauccaccucuacuucgacaaggccggccagaagaccuacgagcgccacucccugagccacuucgugaaccuggacaaccuccgggccaacaacacgaaggggucccugcccaucaacgugaucgucuucgacggcaagagcaagugcgaggaguccagcgccaaguccgccagcguguacuacucccagcugaugugccagcccauccuccugcuggaccaggcgcucgugagcgacgucggcgacagcgccgagguggccgugaagauguucgacgccuacgucaacaccuucuccagcaccuucaacgugccgauggagaaguucaagacccugguggccacggcggaggccgagcuggccaagaacgucucccucgacaacgugcugagcaccuucaucuccgccgcgcgccagggguucguggacagcgacgucgagaccaaggacgugguggagugccugaagcucucccaccagagcgacaucgaggucaccggcgacuccugcaacaacuacaugcugacguacaacaagguggagaacaugaccccccgggaccugggggccugcaucgacugcagcgcccgccacaucaacgcccagguggccaagucccacaacaucgcgcucaucuggaacgucaaggacuucaugagccuguccgagcagcugcggaagcagauccgcagcgccgccaagaagaacaaccuccccuucaagcugaccugcgccaccacgcgccagguggugaacgucgugaccaccaagaucgcccugaagggcgggugaggacuaguuauaagacugacuagcccgaugggccucccaacgggcccuccuccccuccuugcaccgagauuaauaaaaaaaaaaaaaaaaaaaaaaaaaaaaaaaaaaaaaaaaaaaaaaaaaaaaaaaaaaaaaaaaugcaucccccccccccccccccccccccccccccccaaaggcucuuuucagagccaccagaauu

SEQ ID NO: 21898 - RNA, 6058 nt, Artificial Sequence
  SARS-CoV-2__MT520343.1__non-structural protein 3 (NSP3) mRNA gc
aggagaaagcuuaccauggcccccaccaaggugaccuucggcgacgacacggucaucgaggugcagggguacaagagcgugaacaucaccuucgagcuggacgagcgcaucgacaagguccucaacgagaagugcuccgccuacaccguggagcugggcaccgaggugaacgaguucgcgugcgucguggccgacgccgugaucaagacgcugcagccggucagcgagcuccugaccccccuggggaucgaccucgacgagugguccauggccaccuacuaccuguucgacgagagcggcgaguucaagcuggccucccacauguacugcagcuucuacccccccgacgaggacgaggaggagggggacugcgaggaggaggaguucgagccguccacccaguacgaguacggcacggaggacgacuaccagggcaagccccucgaguucggggcgaccagcgccgcccugcagcccgaggaggagcaggaggaggacuggcuggacgacgacucccagcagaccgugggccagcaggacgggagcgaggacaaccagaccacgaccauccagaccaucguggagguccagccccagcucgagauggagcugaccccgguggugcagacgaucgaggucaacuccuucagcggcuaccugaagcucaccgacaacguguacaucaagaacgccgacaucguggaggaggcgaagaaggucaagcccaccgugguggucaacgccgccaacguguaccugaagcacgggggcggcguggccggggcccugaacaaggcgaccaacaacgccaugcaggucgaguccgacgacuacaucgccacgaacggcccccucaagguggggggcagcugcguccuguccggccacaaccuggccaagcacugccuccacgugguggggcccaacgucaacaagggcgaggacauccagcugcugaagagcgccuacgagaacuucaaccagcacgaggugcuccuggcgccgcugcucuccgccgggaucuucggcgccgaccccauccacagccugcgggugugcgucgacaccgugcgcaccaacguguaccuggccgucuucgacaagaaccucuacgacaagcugguguccagcuuccuggagaugaagagcgagaagcagguggagcagaagaucgccgagauccccaaggaggaggucaagcccuucaucaccgaguccaagccgagcguggagcagcggaagcaggacgacaagaagaucaaggcgugcguggaggaggucacgaccacccucgaggagaccaaguuccugacggagaaccugcuccuguacaucgacaucaacgggaaccugcaccccgacuccgccacccucgugagcgacaucgacaucaccuuccugaagaaggacgcccccuacaucgugggcgacgucgugcaggagggcgugcugaccgccgucgugauccccacgaagaaggccgggggcaccaccgagaugcucgcgaaggcccugcgcaaggugccgaccgacaacuacaucacgaccuaccccgggcagggccugaacggguacaccgucgaggaggccaagaccgugcucaagaagugcaaguccgccuucuacauccugcccagcaucaucuccaacgagaagcaggagauccugggcaccgugagcuggaaccuccgggagaugcuggcgcacgccgaggagacgcgcaagcugaugcccgucugcguggagaccaaggccaucguguccaccauccagcggaaguacaagggcaucaagauccaggagggggucguggacuacggcgcccgcuucuacuucuacaccagcaagacgaccguggccucccugaucaacacccucaacgaccugaacgagacccuggucacgaugccgcucggguacgugacccacggccugaaccuggaggaggcggcccgguacaugcgcagccucaaggugcccgccaccgucuccgugagcucccccgacgccgugaccgccuacaacggguaccugacgagcuccagcaagacccccgaggagcacuucaucgagaccaucucccuggcgggcagcuacaaggacuggagcuacuccggccagagcacccagcucgggaucgaguuccugaagcggggcgacaaguccgucuacuacacgagcaacccgaccaccuuccaccuggacggggaggugaucaccuucgacaaccucaagacgcugcugucccuccgcgaggugcggaccaucaaggucuucaccaccguggacaacaucaaccugcacacgcagguggucgacaugagcaugaccuacggccagcaguucggccccaccuaccuggacggggccgacgugaccaagaucaagccccacaacucccacgagggcaagacguucuacgugcucccgaacgacgacacccugcgcgucgaggccuucgaguacuaccacaccaccgaccccagcuuccuggggcgguacauguccgcccucaaccacacgaagaaguggaaguacccccaggugaacggccugaccagcaucaagugggccgacaacaacugcuaccuggcgaccgcccuccugacccugcagcagaucgagcucaaguucaaccccccggcccugcaggacgccuacuaccgcgcgcgggccggggaggccgccaacuucugcgcccugauccucgcguacugcaacaagacggugggcgagcugggcgacguccgcgagaccauguccuaccuguuccagcacgccaaccucgacagcugcaagcgggugcugaacgucgugugcaagaccugcgggcagcagcagaccacccugaagggcguggaggccgucauguacauggggacgcucuccuacgagcaguucaagaagggcgugcagauccccugcaccugcgggaagcaggccaccaaguaccuggugcagcaggagagccccuucgucaugauguccgcccccccggcgcaguacgagcugaagcacggcaccuucacgugcgccagcgaguacaccggcaacuaccagugcgggcacuacaagcacaucaccuccaaggagacccucuacugcaucgacggcgcccugcugacgaagagcagcgaguacaaggggcccaucaccgacguguucuacaaggagaacuccuacaccaccacgaucaagcccgugaccuacaagcucgacggcgucgugugcaccgagaucgaccccaagcuggacaacuacuacaagaaggacaacagcuacuucaccgagcagccgaucgaccuggugcccaaccagcccuaccccaacgccuccuucgacaacuucaaguucgucugcgacaacaucaaguucgccgacgaccucaaccagcugacgggguacaagaagccggcgagccgcgagcugaaggugaccuucuuccccgaccucaacggcgacguggucgccaucgacuacaagcacuacacccccuccuucaagaagggcgccaagcugcugcacaagcccaucguguggcacgugaacaacgccaccaacaaggcgacguacaagccgaacaccuggugcauccggugccucuggagcaccaagcccgucgagaccuccaacagcuucgacgugcugaaguccgaggacgcccaggggauggacaaccuggccugcgaggaccucaagcccgugagcgaggaggucguggagaaccccacgauccagaaggacgugcuggagugcaacgucaagaccaccgagguggugggcgacaucauccugaagccggccaacaacucccucaagaucaccgaggaggucgggcacacggaccugauggccgcguacguggacaacagcucccugaccaucaagaagcccaacgagcucagccgcgugcugggccugaagacccucgccacccacgggcuggccgccgucaacuccgugcccugggacacgaucgccaacuacgcgaagccguuccugaacaagguggucagcaccaccaccaacaucgugacgcgcugccucaaccgggugugcaccaacuacaugcccuacuucuucacccugcugcuccagcugugcaccuucacccgcuccacgaacagccggaucaaggccuccaugcccaccaccaucgccaagaacaccgucaagagcgugggcaaguucugccuggaggccagcuucaacuaccucaagucccccaacuucagcaagcugaucaacaucaucaucugguuccugcuccuguccgugugccugggcagccucaucuacuccacggccgcgcuggggguccugaugagcaaccucggcaugccguccuacugcaccggguaccgcgagggcuaccugaacagcaccaacgugaccaucgccacguacugcaccggcuccauccccugcggggugugccugagcggccucgacucccuggacaccuaccccagccuggagaccauccagaucacgaucuccagcuucaagugggaccucaccgccuucgggcuggucgccgagugguuccuggccuacauccucuucacccgguucuucuacgugcugggccuggcggccaucaugcagcucuucuucuccuacuucgccgugcacuucaucagcaacuccuggcugauguggcugaucaucaaccugguccagauggcccccaucagcgcgauggugcgcauguacaucuucuucgccuccuucuacuacguguggaagagcuacguccacgugguggacgggugcaacagcuccaccugcaugaugugcuacaagcggaaccgcgccacgcgggucgagugcaccaccaucgugaacggcguccgccggagcuucuacguguacgccaacggcgggaagggcuucugcaagcuccacaacuggaacugcgugaacugcgacaccuucugcgccggguccacguucaucagcgacgaggucgcgcgcgaccugucccugcaguucaagcggccgaucaaccccaccgaccagagcuccuacaucguggacagcgugaccgucaagaacggcuccauccaccucuacuucgacaaggccgggcagaagaccuacgagcgccacagccugucccacuucgugaaccuggacaaccuccgggccaacaacacgaagggcagccugcccaucaacgugaucgucuucgacggcaaguccaagugcgaggagagcuccgccaagagcgccuccguguacuacagccagcugaugugccagcccauccuccugcuggaccaggcgcucguguccgacgucggggacagcgccgagguggccgugaagauguucgacgccuacgucaacaccuucagcuccaccuucaacgugccgauggagaagcugaagacccugguggccacggcggaggccgagcucgccaagaacgucagccuggacaacgugcuguccaccuucaucagcgccgcgcgccagggcuucguggacuccgacgucgagaccaaggacgugguggagugccucaagcugagccaccaguccgacaucgaggucaccggggacagcugcaacaacuacaugcugacguacaacaagguggagaacaugaccccccgggaccucggcgccugcaucgacugcuccgcccgccacaucaacgcccagguggccaagagccacaacaucgcgcugaucuggaacgucaaggacuucaugucccugagcgagcagcuccggaagcagauccgcuccgccgccaagaagaacaaccugcccuucaagcugaccugcgccaccacgcgccagguggugaacgucgugaccaccaagaucgcccucaaggggggcugaggacuaguuauaagacugacuagcccgaugggccucccaacgggcccuccuccccuccuugcaccgagauuaauaaaaaaaaaaaaaaaaaaaaaaaaaaaaaaaaaaaaaaaaaaaaaaaaaaaaaaaaaaaaaaaaugcaucccccccccccccccccccccccccccccccaaaggcucuuuucagagccaccagaauu

SEQ ID NO: 21899 - RNA, 6058 nt, Artificial Sequence
  SARS-CoV-2__MT520344.1__non-structural protein 3 (NSP3) mRNA gc
aggagaaagcuuaccauggcccccaccaaggugaccuucggcgacgacacggucaucgaggugcagggguacaagagcgugaacaucaccuucgagcuggacgagcgcaucgacaagguccucaacgagaagugcuccgccuacaccguggagcugggcaccgaggugaacgaguucgcgugcgucguggccgacgccgugaucaagacgcugcagccggucagcgagcuccugaccccccuggggaucgaccucgacgagugguccauggccaccuacuaccuguucgacgagagcggcgaguucaagcuggccucccacauguacugcagcuucuacccccccgacgaggacgaggaggagggggacugcgaggaggaggaguucgagccguccacccaguacgaguacggcacggaggacgacuaccagggcaagccccucgaguucggggcgaccagcgccgcccugcagcccgaggaggagcaggaggaggacuggcuggacgacgacucccagcagaccgugggccagcaggacgggagcgaggacaaccagaccacgaccauccagaccaucguggagguccagccccagcucgagauggagcugaccccgguggugcagacgaucgaggucaacuccuucagcggcuaccugaagcucaccgacaacguguacaucaagaacgccgacaucguggaggaggcgaagaaggucaagcccaccgugguggucaacgccgccaacguguaccugaagcacgggggcggcguggccggggcccugaacaaggcgaccaacaacgccaugcaggucgaguccgacgacuacaucgccacgaacggcccccucaagguggggggcagcugcguccuguccggccacaaccuggccaagcacugccuccacgugguggggcccaacgucaacaagggcgaggacauccagcugcugaagagcgccuacgagaacuucaaccagcacgaggugcuccuggcgccgcugcucuccgccgggaucuucggcgccgaccccauccacagccugcgggugugcgucgacaccgugcgcaccaacguguaccuggccgucuucgacaagaaccucuacgacaagcugguguccagcuuccuggagaugaagagcgagaagcagguggagcagaagaucgccgagauccccaaggaggaggucaagcccuucaucaccgaguccaagccgagcguggagcagcggaagcaggacgacaagaagaucaaggcgugcguggaggaggucacgaccacccucgaggagaccaaguuccugacggagaaccugcuccuguacaucgacaucaacgggaaccugcaccccgacuccgccacccucgugagcgacaucgacaucaccuuccugaagaaggacgcccccuacaucgugggcgacgucgugcaggagggcgugcugaccgccgucgugauccccacgaagaaggccgggggcaccaccgagaugcucgcgaaggcccugcgcaaggugccgaccgacaacuacaucacgaccuaccccgggcagggccugaacggguacaccgucgaggaggccaagaccgugcucaagaagugcaaguccgccuucuacauccugcccagcaucaucuccaacgagaagcaggagauccugggcaccgugagcuggaaccuccgggagaugcuggcgcacgccgaggagacgcgcaagcugaugcccgucugcguggagaccaaggccaucguguccaccauccagcggaaguacaagggcaucaagauccaggagggggucguggacuacggcgcccgcuucuacuucuacaccagcaagacgaccguggccucccugaucaacacccucaacgaccugaacgagacccuggucacgaugccgcucggguacgugacccacggccugaaccuggaggaggcggcccgguacaugcgcagccucaaggugcccgccaccgucuccgugagcucccccgacgccgugaccgccuacaacggguaccugacgagcuccagcaagacccccgaggagcacuucaucgagaccaucucccuggcgggcagcuacaaggacuggagcuacuccggccagagcacccagcucgggaucgaguuccugaagcggggcgacaaguccgucuacuacacgagcaacccgaccaccuuccaccuggacggggaggugaucaccuucgacaaccucaagacgcugcugucccuccgcgaggugcggaccaucaaggucuucaccaccguggacaacaucaaccugcacacgcagguggucgacaugagcaugaccuacggccagcaguucggccccaccuaccuggacggggccgacgugaccaagaucaagccccacaacucccacgagggcaagacguucuacgugcucccgaacgacgacacccugcgcgucgaggccuucgaguacuaccacaccaccgaccccagcuuccuggggcgguacauguccgcccucaaccacacgaagaaguggaaguacccccaggugaacggccugaccagcaucaagugggccgacaacaacugcuaccuggcgaccgcccuccugacccugcagcagaucgagcucaaguucaaccccccggcccugcaggacgccuacuaccgcgcgcgggccggggaggccgccaacuucugcgcccugauccucgcguacugcaacaagacggugggcgagcugggcgacguccgcgagaccauguccuaccuguuccagcacgccaaccucgacagcugcaagcgggugcugaacgucgugugcaagaccugcgggcagcagcagaccacccugaagggcguggaggccgucauguacauggggacgcucuccuacgagcaguucaagaagggcgugcagauccccugcaccugcgggaagcaggccaccaaguaccuggugcagcaggagagccccuucgucaugauguccgcccccccggcgcaguacgagcugaagcacggcaccuucacgugcgccagcgaguacaccggcaacuaccagugcgggcacuacaagcacaucaccuccaaggagacccucuacugcaucgacggcgcccugcugacgaagagcagcgaguacaaggggcccaucaccgacguguucuacaaggagaacuccuacaccaccacgaucaagcccgugaccuacaagcucgacggcgucgugugcaccgagaucgaccccaagcuggacaacuacuacaagaaggacaacagcuacuucaccgagcagccgaucgaccuggugcccaaccagcccuaccccaacgccuccuucgacaacuucaaguucgucugcgacaacaucaaguucgccgacgaccucaaccagcugacgggguacaagaagccggcgagccgcgagcugaaggugaccuucuuccccgaccucaacggcgacguggucgccaucgacuacaagcacuacacccccuccuucaagaagggcgccaagcugcugcacaagcccaucguguggcacgugaacaacgccaccaacaaggcgacguacaagccgaacaccuggugcauccggugccucuggagcaccaagcccgucgagaccuccaacagcuucgacgugcugaaguccgaggacgcccaggggauggacaaccuggccugcgaggaccucaagcccgugagcgaggaggucguggagaaccccacgauccagaaggacgugcuggagugcaacgucaagaccaccgagguggugggcgacaucauccugaagccggccaacaacucccucaagaucaccgaggaggucgggcacacggaccugauggccgcguacguggacaacagcucccugaccaucaagaagcccaacgagcucagccgcgugcugggccugaagacccucgccacccacgggcuggccgccgucaacuccgugcccugggacacgaucgccaacuacgcgaagccguuccugaacaagguggucagcaccaccaccaacaucgugacgcgcugccucaaccgggugugcaccaacuacaugcccuacuucuucacccugcugcuccagcugugcaccuucacccgcggcacgaacucccggaucaaggccagcaugcccaccaccaucgccaagaacaccgucaaguccgugggcaaguucugccuggaggccagcuucaacuaccucaagagccccaacuucuccaagcugaucaacaucaucaucugguuccugcuccugagcgugugccuggggucccucaucuacagcacggccgcgcugggcguccugauguccaaccucgggaugccgagcuacugcaccggcuaccgcgagggcuaccugaacuccaccaacgugaccaucgccacguacugcaccgggagcauccccugcuccgugugccugagcggccucgacucccuggacaccuaccccagccuggagaccauccagaucacgaucuccagcuucaagugggaccucaccgccuucgggcuggucgccgagugguuccuggccuacauccucuucacccgguucuucuacgugcugggccuggcggccaucaugcagcucuucuucuccuacuucgccgugcacuucaucagcaacuccuggcugauguggcugaucaucaaccugguccagauggcccccaucagcgcgauggugcgcauguacaucuucuucgccuccuucuacuacguguggaagagcuacguccacgugguggacgggugcaacagcuccaccugcaugaugugcuacaagcggaaccgcgccacgcgggucgagugcaccaccaucgugaacggcguccgccggagcuucuacguguacgccaacggcgggaagggcuucugcaagcuccacaacuggaacugcgugaacugcgacaccuucugcgccggguccacguucaucagcgacgaggucgcgcgcgaccugucccugcaguucaagcggccgaucaaccccaccgaccagagcuccuacaucguggacagcgugaccgucaagaacggcuccauccaccucuacuucgacaaggccgggcagaagaccuacgagcgccacagccugucccacuucgugaaccuggacaaccuccgggccaacaacacgaagggcagccugcccaucaacgugaucgucuucgacggcaaguccaagugcgaggagagcuccgccaagagcgccuccguguacuacagccagcugaugugccagcccauccuccugcuggaccaggcgcucguguccgacgucggggacagcgccgagguggccgugaagauguucgacgccuacgucaacaccuucagcuccaccuucaacgugccgauggagaagcugaagacccugguggccacggcggaggccgagcucgccaagaacgucagccuggacaacgugcuguccaccuucaucagcgccgcgcgccagggcuucguggacuccgacgucgagaccaaggacgugguggagugccucaagcugagccaccaguccgacaucgaggucaccggggacagcugcaacaacuacaugcugacguacaacaagguggagaacaugaccccccgggaccucggcgccugcaucgacugcuccgcccgccacaucaacgcccagguggccaagagccacaacaucgcgcugaucuggaacgucaaggacuucaugucccugagcgagcagcuccggaagcagauccgcuccgccgccaagaagaacaaccugcccuucaagcugaccugcgccaccacgcgccagguggugaacgucgugaccaccaagaucgcccucaaggggggcugaggacuaguuauaagacugacuagcccgaugggccucccaacgggcccuccuccccuccuugcaccgagauuaauaaaaaaaaaaaaaaaaaaaaaaaaaaaaaaaaaaaaaaaaaaaaaaaaaaaaaaaaaaaaaaaaugcaucccccccccccccccccccccccccccccccaaaggcucuuuucagagccaccagaauu

SEQ ID NO: 21900 - RNA, 6058 nt, Artificial Sequence
  SARS-CoV-2__MT520353.1__non-structural protein 3 (NSP3) mRNA gc
aggagaaagcuuaccauggcccccaccaaggugaccuucggcgacgacacggucaucgaggugcagggguacaagagcgugaacaucaccuucgagcuggacgagcgcaucgacaagguccucaacgagaagugcuccgccuacaccguggagcugggcaccgaggugaacgaguucgcgugcgucguggccgacgccgugaucaagacgcugcagccggucagcgagcuccugaccccccuggggaucgaccucgacgagugguccauggccaccuacuaccuguucgacgagagcggcgaguucaagcuggccucccacauguacugcagcuucuacccccccgacgaggacgaggaggagggggacugcgaggaggaggaguucgagccguccacccaguacgaguacggcacggaggacgacuaccagggcaagccccucgaguucggggcgaccagcgccgcccugcagcccgaggaggagcaggaggaggacuggcuggacgacgacucccagcagaccgugggccagcaggacgggagcgaggacaaccagaccacgaccauccagaccaucguggagguccagccccagcucgagauggagcugaccccgguggugcagacgaucgaggucaacuccuucagcggcuaccugaagcucaccgacaacguguacaucaagaacgccgacaucguggaggaggcgaagaaggucaagcccaccgugguggucaacgccgccaacguguaccugaagcacgggggcggcguggccggggcccugaacaaggcgaccaacaacgccaugcaggucgaguccgacgacuacaucgccacgaacggcccccucaagguggggggcagcugcguccuguccggccacaaccuggccaagcacugccuccacgugguggggcccaacgucaacaagggcgaggacauccagcugcugaagagcgccuacgagaacuucaaccagcacgaggugcuccuggcgccgcugcucuccgccgggaucuucggcgccgaccccauccacagccugcgggugugcgucgacaccgugcgcaccaacguguaccuggccgucuucgacaagaaccucuacgacaagcugguguccagcuuccuggagaugaagagcgagaagcagguggagcagaagaucgccgagauccccaaggaggaggucaagcccuucaucaccgaguccaagccgagcguggagcagcggaagcaggacgacaagaagaucaaggcgugcguggaggaggucacgaccacccucgaggagaccaaguuccugacggagaaccugcuccuguacaucgacaucaacgggaaccugcaccccgacuccgccacccucgugagcgacaucgacaucaccuuccugaagaaggacgcccccuacaucgugggcgacgucgugcaggagggcgugcugaccgccgucgugauccccacgaagaaggccgggggcaccaccgagaugcucgcgaaggcccugcgcaaggugccgaccgacaacuacaucacgaccuaccccgggcagggccugaacggguacaccgucgaggaggccaagaccgugcucaagaagugcaaguccgccuucuacauccugcccagcaucaucuccaacgagaagcaggagauccugggcaccgugagcuggaaccuccgggagaugcuggcgcacgccgaggagacgcgcaagcugaugcccgucugcguggagaccaaggccaucguguccaccauccagcggaaguacaagggcaucaagauccaggagggggucguggacuacggcgcccgcuucuacuucuacaccagcaagacgaccguggccucccugaucaacacccucaacgaccugaacgagacccuggucacgaugccgcucggguacgugacccacggccugaaccuggaggaggcggcccgguacaugcgcagccucaaggugcccgccaccgucuccgugagcucccccgacgccgugaccgccuacaacggguaccugacgagcuccagcaagacccccgaggagcacuucaucgagaccaucucccuggcgggcagcuacaaggacuggagcuacuccggccagagcacccagcucgggaucgaguuccugaagcggggcgacaaguccgucuacuacacgagcaacccgaccaccuuccaccuggacggggaggugaucaccuucgacaaccucaagacgcugcugucccuccgcgaggugcggaccaucaaggucuucaccaccguggacaacaucaaccugcacacgcagguggucgacaugagcaugaccuacggccagcaguucggccccaccuaccuggacggggccgacgugaccaagaucaagccccacaacucccacgagggcaagacguucuacgugcucccgaacgacgacacccugcgcgucgaggccuucgaguacuaccacaccaccgaccccagcuuccuggggcgguacauguccgcccucaaccacacgaagaaguggaaguacccccaggugaacggccugaccagcaucaagugggccgacaacaacugcuaccuggcgaccgcccuccugacccugcagcagaucgagcucaaguucaaccccccggcccugcaggacgccuacuaccgcgcgcgggccggggaggccgccaacuucugcgcccugauccucgcguacugcaacaagacggugggcgagcugggcgacguccgcgagaccauguccuaccuguuccagcacgccaaccucgacagcugcaagcgggugcugaacgucgugugcaagaccugcgggcagcagcagaccacccugaagggcguggaggccgucauguacauggggacgcucuccuacgagcaguucaagaagggcgugcagauccccugcaccugcgggaagcaggccaccaaguaccuggugcagcaggagagccccuucgucaugauguccgcccccccggcgcaguacgagcugaagcacggcaccuucacgugcgccagcgaguacaccggcaacuaccagugcgggcacuacaagcacaucaccuccaaggagacccucuacugcaucgacggcgcccugcugacgaagagcagcgaguacaaggggcccaucaccgacguguucuacaaggagaacuccuacaccaccacgaucaagcccgugaccuacaagcucgacggcgucgugugcaccgagaucgaccccaagcuggacaacuacuacaagaaggacaacagcuacuucaccgagcagccgaucgaccuggugcccaaccagcccuaccccaacgccuccuucgacaacuucaaguucgucugcgacaacaucaaguucgccgacgaccucaaccagcugacgggguacaagaagccggcgagccgcgagcugaaggugaccuucuuccccgaccucaacggcgacguggucgccaucgacuacaagcacuacacccccuccuucaagaagggcgccaagcugcugcacaagcccaucguguggcacgugaacaacgccaccaacaaggcgacguacaagccgaacaccuggugcauccggugccucuggagcaccaagcccgucgagaccuccaacagcuucgacgugcugaaguccgaggacgcccaggggauggacaaccuggccugcgaggaccucaagcccgugagcgaggaggucguggagaaccccacgauccagaaggacgugcuggagugcaacgucaagaccaccgagguggugggcgacaucauccugaagccggccaacaacucccucaagaucaccgaggaggucgggcacacggaccugauggccgcguacguggacaacagcucccugaccaucaagaagcccaacgagcucagccgcgugcugggccugaagacccucgccacccacgggcuggccgccgucaacuccgugcccuggggcacgaucgccaacuacgcgaagccguuccugaacaagguggucagcaccaccaccaacaucgugacgcgcugccucaaccgggugugcaccaacuacaugcccuacuucuucacccugcugcuccagcugugcaccuucacccgcuccacgaacagccggaucaaggccuccaugcccaccaccaucgccaagaacaccgucaagagcgugggcaaguucugccuggaggccagcuucaacuaccucaagucccccaacuucagcaagcugaucaacaucaucaucugguuccugcuccuguccgugugccuggggagccucaucuacuccacggccgcgcugggcguccugaugagcaaccucgggaugccguccuacugcaccggcuaccgcgagggcuaccugaacagcaccaacgugaccaucgccacguacugcaccggguccauccccugcagcgugugccuguccggccucgacagccuggacaccuaccccucccuggagaccauccagaucacgaucagcuccuucaagugggaccucaccgccuucgggcuggucgccgagugguuccuggccuacauccucuucacccgguucuucuacgugcugggccuggcggccaucaugcagcucuucuucagcuacuucgccgugcacuucaucuccaacagcuggcugauguggcugaucaucaaccugguccagauggcccccaucuccgcgauggugcgcauguacaucuucuucgccagcuucuacuacguguggaagagcuacguccacgugguggacgggugcaacuccagcaccugcaugaugugcuacaagcggaaccgcgccacgcgggucgagugcaccaccaucgugaacggcguccgccgguccuucuacguguacgccaacggcgggaagggcuucugcaagcuccacaacuggaacugcgugaacugcgacaccuucugcgccgggagcacguucaucuccgacgaggucgcgcgcgaccugagccugcaguucaagcggccgaucaaccccaccgaccaguccagcuacaucguggacuccgugaccgucaagaacggcagcauccaccucuacuucgacaaggccgggcagaagaccuacgagcgccacucccugagccacuucgugaaccuggacaaccuccgggccaacaacacgaagggcucccugcccaucaacgugaucgucuucgacggcaagagcaagugcgaggaguccagcgccaaguccgccagcguguacuacucccagcugaugugccagcccauccuccugcuggaccaggcgcucgugagcgacgucggggacagcgccgagguggccgugaagauguucgacgccuacgucaacaccuucuccagcaccuucaacgugccgauggagaagcugaagacccugguggccacggcggaggccgagcucgccaagaacgucucccuggacaacgugcugagcaccuucaucuccgccgcgcgccagggcuucguggacagcgacgucgagaccaaggacgugguggagugccucaagcugucccaccagagcgacaucgaggucaccggggacuccugcaacaacuacaugcugacguacaacaagguggagaacaugaccccccgggaccucggcgccugcaucgacugcagcgcccgccacaucaacgcccagguggccaagucccacaacaucgcgcugaucuggaacgucaaggacuucaugagccuguccgagcagcuccggaagcagauccgcagcgccgccaagaagaacaaccugcccuucaagcugaccugcgccaccacgcgccagguggugaacgucgugaccaccaagaucgcccucaaggggggcugaggacuaguuauaagacugacuagcccgaugggccucccaacgggcccuccuccccuccuugcaccgagauuaauaaaaaaaaaaaaaaaaaaaaaaaaaaaaaaaaaaaaaaaaaaaaaaaaaaaaaaaaaaaaaaaaugcaucccccccccccccccccccccccccccccccaaaggcucuuuucagagccaccagaauu

SEQ ID NO: 21901 - RNA, 6058 nt, Artificial Sequence
  SARS-CoV-2__MT520369.1__non-structural protein 3 (NSP3) mRNA gc
aggagaaagcuuaccauggcccccaccaaggugaccuucggcgacgacacggucaucgaggugcagggguacaagagcgugaacaucaccuucgagcuggacgagcgcaucgacaagguccucaacgagaagugcuccgccuacaccguggagcugggcaccgaggugaacgaguucgcgugcgucguggccgacgccgugaucaagacgcugcagccggucagcgagcuccugaccccccuggggaucgaccucgacgagugguccauggccaccuacuaccuguucgacgagagcggcgaguucaagcuggccucccacauguacugcagcuucuacccccccgacgaggacgaggaggagggggacugcgaggaggaggaguucgagccguccacccaguacgaguacggcacggaggacgacuaccagggcaagccccucgaguucggggcgaccagcgccgcccugcagcccgaggaggagcaggaggaggacuggcuggacgacgacucccagcagaccgugggccagcaggacgggagcgaggacaaccagaccacgaccauccagaccaucguggagguccagccccagcucgagauggagcugaccccgguggugcagacgaucgaggucaacuccuucagcggcuaccugaagcucaccgacaacguguacaucaagaacgccgacaucguggaggaggcgaagaaggucaagcccaccgugguggucaacgccgccaacguguaccugaagcacgggggcggcguggccggggcccugaacaaggcgaccaacaacgccaugcaggucgaguccgacgacuacaucgccacgaacggcccccucaagguggggggcagcugcguccuguccggccacaaccuggccaagcacugccuccacgugguggggcccaacgucaacaagggcgaggacauccagcugcugaagagcgccuacgagaacuucaaccagcacgaggugcuccuggcgccgcugcucuccgccgggaucuucggcgccgaccccauccacagccugcgggugugcgucgacaccgugcgcaccaacguguaccuggccgucuucgacaagaaccucuacgacaagcugguguccagcuuccuggagaugaagagcgagaagcagguggagcagaagaucgccgagauccccaaggacgaggucaagcccuucaucaccgaguccaagccgagcguggagcagcggaagcaggacgacaagaagaucaaggcgugcguggaggaggucacgaccacccucgaggagaccaaguuccugacggagaaccugcuccuguacaucgacaucaacgggaaccugcaccccgacuccgccacccucgugagcgacaucgacaucaccuuccugaagaaggacgcccccuacaucgugggcgacgucgugcaggagggcgugcugaccgccgucgugauccccacgaagaaggccgggggcaccaccgagaugcucgcgaaggcccugcgcaaggugccgaccgacaacuacaucacgaccuaccccgggcagggccugaacggguacaccgucgaggaggccaagaccgugcucaagaagugcaaguccgccuucuacauccugcccagcaucaucuccaacgagaagcaggagauccugggcaccgugagcuggaaccuccgggagaugcuggcgcacgccgaggagacgcgcaagcugaugcccgucugcguggagaccaaggccaucguguccaccauccagcggaaguacaagggcaucaagauccaggagggggucguggacuacggcgcccgcuucuacuucuacaccagcaagacgaccguggccucccugaucaacacccucaacgaccugaacgagacccuggucacgaugccgcucggguacgugacccacggccugaaccuggaggaggcggcccgguacaugcgcagccucaaggugcccgccaccgucuccgugagcucccccgacgccgugaccgccuacaacggguaccugacgagcuccagcaagacccccgaggagcacuucaucgagaccaucucccuggcgggcagcuacaaggacuggagcuacuccggccagagcacccagcucgggaucgaguuccugaagcggggcgacaaguccgucuacuacacgagcaacccgaccaccuuccaccuggacggggaggugaucaccuucgacaaccucaagacgcugcugucccuccgcgaggugcggaccaucaaggucuucaccaccguggacaacaucaaccugcacacgcagguggucgacaugagcaugaccuacggccagcaguucggccccaccuaccuggacggggccgacgugaccaagaucaagccccacaacucccacgagggcaagacguucuacgugcucccgaacgacgacacccugcgcgucgaggccuucgaguacuaccacaccaccgaccccagcuuccuggggcgguacauguccgcccucaaccacacgaagaaguggaaguacccccaggugaacggccugaccagcaucaagugggccgacaacaacugcuaccuggcgaccgcccuccugacccugcagcagaucgagcucaaguucaaccccccggcccugcaggacgccuacuaccgcgcgcgggccggggaggccgccaacuucugcgcccugauccucgcguacugcaacaagacggugggcgagcugggcgacguccgcgagaccauguccuaccuguuccagcacgccaaccucgacagcugcaagcgggugcugaacgucgugugcaagaccugcgggcagcagcagaccacccugaagggcguggaggccgucauguacauggggacgcucuccuacgagcaguucaagaagggcgugcagauccccugcaccugcgggaagcaggccaccaaguaccuggugcagcaggagagccccuucgucaugauguccgcccccccggcgcaguacgagcugaagcacggcaccuucacgugcgccagcgaguacaccggcaacuaccagugcgggcacuacaagcacaucaccuccaaggagacccucuacugcaucgacggcgcccugcugacgaagagcagcgaguacaaggggcccaucaccgacguguucuacaaggagaacuccuacaccaccacgaucaagcccgugaccuacaagcucgacggcgucgugugcaccgagaucgaccccaagcuggacaacuacuacaagaaggacaacagcuacuucaccgagcagccgaucgaccuggugcccaaccagcccuaccccaacgccuccuucgacaacuucaaguucgucugcgacaacaucaaguucgccgacgaccucaaccagcugacgggguacaagaagccggcgagccgcgagcugaaggugaccuucuuccccgaccucaacggcgacguggucgccaucgacuacaagcacuacacccccuccuucaagaagggcgccaagcugcugcacaagcccaucguguggcacgugaacaacgccaccaacaaggcgacguacaagccgaacaccuggugcauccggugccucuggagcaccaagcccgucgagaccuccaacagcuucgacgugcugaaguccgaggacgcccaggggauggacaaccuggccugcgaggaccucaagcccgugagcgaggaggucguggagaaccccacgauccagaaggacgugcuggagugcaacgucaagaccaccgagguggugggcgacaucauccugaagccggccaacaacucccucaagaucaccgaggaggucgggcacacggaccugauggccgcguacguggacaacagcucccugaccaucaagaagcccaacgagcucagccgcgugcugggccugaagacccucgccacccacgggcuggccgccgucaacuccgugcccugggacacgaucgccaacuacgcgaagccguuccugaacaagguggucagcaccaccaccaacaucgugacgcgcugccucaaccgggugugcaccaacuacaugcccuacuucuucacccugcugcuccagcugugcaccuucacccgcuccacgaacagccggaucaaggccuccaugcccaccaccaucgccaagaacaccgucaagagcgugggcaaguucugccuggaggccagcuucaacuaccucaagucccccaacuucagcaagcugaucaacaucaucaucugguuccugcuccuguccgugugccugggcagccucaucuacuccacggccgcgcuggggguccugaugagcaaccucggcaugccguccuacugcaccggguaccgcgagggcuaccugaacagcaccaacgugaccaucgccacguacugcaccggcuccauccccugcagcgugugccuguccgggcucgacagccuggacaccuaccccucccuggagaccauccagaucacgaucagcuccuucaagugggaccucaccgccuucggccuggucgccgagugguuccuggccuacauccucuucacccgguucuucuacgugcuggggcuggcggccaucaugcagcucuucuucagcuacuucgccgugcacuucaucuccaacagcuggcugauguggcugaucaucaaccugguccagauggcccccaucuccgcgauggugcgcauguacaucuucuucgccagcuucuacuacguguggaagagcuacguccacgugguggacggcugcaacuccagcaccugcaugaugugcuacaagcggaaccgcgccacgcgggucgagugcaccaccaucgugaacgggguccgccgguccuucuacguguacgccaacggcggcaagggguucugcaagcuccacaacuggaacugcgugaacugcgacaccuucugcgccggcagcacguucaucuccgacgaggucgcgcgcgaccugagccugcaguucaagcggccgaucaaccccaccgaccaguccagcuacaucguggacuccgugaccgucaagaacgggagcauccaccucuacuucgacaaggccggccagaagaccuacgagcgccacucccugagccacuucgugaaccuggacaaccuccgggccaacaacacgaaggggucccugcccaucaacgugaucgucuucgacggcaagagcaagugcgaggaguccagcgugaaguccgccagcguguacuacucccagcugaugugccagcccauccuccugcuggaccaggcccucgucagcgacgugggcgacagcgcggagguggccgucaagauguucgacgccuacgugaacaccuucuccagcaccuucaacgugccgauggagaagcugaagacccuggucgccacggccgaggcggagcucgccaagaacgugucccuggacaacgugcugagcaccuucaucuccgccgcccgccagggguucgucgacagcgacguggagaccaaggacguggucgagugccucaagcugucccaccagagcgacaucgaggugaccggcgacuccugcaacaacuacaugcugacguacaacaagguggagaacaugaccccccgggaccucggggcgugcaucgacugcagcgcccgccacaucaacgcccaggucgccaagucccacaacaucgcccugaucuggaacgugaaggacuucaugagccuguccgagcagcuccggaagcagauccgcagcgcggccaagaagaacaaccugcccuucaagcugaccugcgccaccacgcgccagguggucaacguggugaccaccaagaucgcccucaagggcgggugaggacuaguuauaagacugacuagcccgaugggccucccaacgggcccuccuccccuccuugcaccgagauuaauaaaaaaaaaaaaaaaaaaaaaaaaaaaaaaaaaaaaaaaaaaaaaaaaaaaaaaaaaaaaaaaaugcaucccccccccccccccccccccccccccccccaaaggcucuuuucagagccaccagaauu

SEQ ID NO: 21902 - RNA, 6058 nt, Artificial Sequence
  SARS-CoV-2__MT520390.1__non-structural protein 3 (NSP3) mRNA gc
aggagaaagcuuaccauggcccccaccaaggugaccuucggcgacgacacggucaucgaggugcagggguacaagagcgugaacaucaccuucgagcuggacgagcgcaucgacaagguccucaacgagaagugcuccgccuacaccguggagcugggcaccgaggugaacgaguucgcgugcgucguggccgacgccgugaucaagacgcugcagccggucagcgagcuccugaccccccuggggaucgaccucgacgagugguccauggccaccuacuaccuguucgacgagagcggcgaguucaagcuggccucccacauguacugcagcuucuacccccccgacgaggacgaggaggagggggacugcgaggaggaggaguucgagccguccacccaguacgaguacggcacggaggacgacuaccagggcaagccccucgaguucggggcgaccagcgccgcccugcagcccgaggaggagcaggaggaggacuggcuggacgacgacucccagcagaccgugggccagcaggacgggagcgaggacaaccagaccacgaccauccagaccaucguggagguccagccccagcucgagauggagcugaccccgguggugcagacgaucgaggucaacuccuucagcggcuaccugaagcucaccgacaacguguacaucaagaacgccgacaucguggaggaggcgaagaaggucaagcccaccgugguggucaacgccgccaacguguaccugaagcacgggggcggcguggccggggcccugaacaaggcgaccaacaacgccaugcaggucgaguccgacgacuacaucgccacgaacggcccccucaagguggggggcagcugcguccuguccggccacaaccuggccaagcacugccuccacgugguggggcccaacgucaacaagggcgaggacauccagcugcugaagagcgccuacgagaacuucaaccagcacgaggugcuccuggcgccgcugcucuccgccgggaucuucggcgccgaccccauccacagccugcgggugugcgucgacaccgugcgcaccaacguguaccuggccgucuucgacaagaaccucuacgacaagcugguguccagcuuccuggagaugaagagcgagaagcagguggagcagaagaucgccgagauccccaaggaggaggucaagcccuucaucaccgaguccaagccgagcguggagcagcggaagcaggacgacaagaagaucaaggcgugcguggaggaggucacgaccacccucgaggagaccaaguuccugacggagaaccugcuccuguacaucgacaucaacgggaaccugcaccccgacuccgccacccucgugagcgacaucgacaucaccuuccugaagaaggacgcccccuacaucgugggcgacgucgugcaggagggcgugcugaccgccgucgugauccccacgaagaaggccgggggcaccaccgagaugcucgcgaaggcccugcgcaaggugccgaccgacaacuacaucacgaccuaccccgggcagggccugaacggguacaccgucgaggaggccaagaccgugcucaagaagugcaaguccgccuucuacauccugcccagcaucaucuccaacgagaagcaggagauccugggcaccgugagcuggaaccuccgggagaugcuggcgcacgccgaggagacgcgcaagcugaugcccgucugcguggagaccaaggccaucguguccaccauccagcggaaguacaagggcaucaagauccaggagggggucguggacuacggcgcccgcuucuacuucuacaccagcaagacgaccguggccucccugaucaacacccucaacgaccugaacgagacccuggucacgaugccgcucggguacgugacccacggccugaaccuggaggaggcggcccgguacaugcgcagccucaaggugcccgccaccgucuccgugagcucccccgacgccgugaccgccuacaacggguaccugacgagcuccagcaagacccccgaggagcacuucaucgagaccaucucccuggcgggcagcuacaaggacuggagcuacuccggccagagcacccagcucgggaucgaguuccugaagcggggcgacaaguccgucuacuacacgagcaacccgaccaccuuccaccuggacggggaggugaucaccuucgacaaccucaagacgcugcugucccuccgcgaggugcggaccaucaaggucuucaccaccguggacaacaucaaccugcacacgcagguggucgacaugagcaugaccuacggccagcaguucggccccaccuaccuggacggggccgacgugaccaagaucaagccccacaacucccacgagggcaagacguucuacgugcucccgaacgacgacacccugcgcgucgaggccuucgaguacuaccacaccaccgaccccagcuuccuggggcgguacauguccgcccucaaccacacgaagaaguggaaguacccccaggugaacggccugaccagcaucaagugggccgacaacaacugcuaccuggcgaucgcccuccugacccugcagcagaucgagcucaaguucaaccccccggcccugcaggacgccuacuaccgcgcgcgggccggggaggccgccaacuucugcgcccugauccucgcguacugcaacaagaccgugggcgagcugggcgacguccgcgagacgauguccuaccuguuccagcacgccaaccucgacagcugcaagcgggugcugaacgucgugugcaagaccugcgggcagcagcagaccacccugaagggcguggaggccgucauguacauggggacccucuccuacgagcaguucaagaagggcgugcagauccccugcacgugcgggaagcaggccaccaaguaccuggugcagcaggagagccccuucgucaugauguccgcccccccggcgcaguacgagcugaagcacggcaccuucaccugcgccagcgaguacacgggcaacuaccagugcgggcacuacaagcacaucaccuccaaggagacccucuacugcaucgacggcgcccugcugaccaagagcagcgaguacaaggggcccaucacggacguguucuacaaggagaacuccuacaccaccaccaucaagcccgugacguacaagcucgacggcgucgugugcaccgagaucgaccccaagcuggacaacuacuacaagaaggacaacagcuacuucaccgagcagccgaucgaccuggugcccaaccagcccuaccccaacgccuccuucgacaacuucaaguucgucugcgacaacaucaaguucgccgacgaccucaaccagcugaccggguacaagaagccggcgagccgcgagcugaaggugacguucuuccccgaccucaacggcgacguggucgccaucgacuacaagcacuacacccccuccuucaagaagggcgccaagcugcugcacaagcccaucguguggcacgugaacaacgccaccaacaaggcgaccuacaagccgaacacguggugcauccggugccucuggagcaccaagcccgucgagaccuccaacagcuucgacgugcugaaguccgaggacgcccaggggauggacaaccuggugugcgaggaccucaagcccgucagcgaggaggugguggagaaccccaccauccagaaggacguccuggagugcaacgugaagacgaccgagguggucggcgacaucauccugaagccggccaacaacucccucaagaucaccgaggagguggggcacaccgaccugauggccgccuacguggacaacagcucccugacgaucaagaagcccaacgagcucagccgcguccugggccugaagacccucgcgacccacgggcuggccgccgugaacuccgugcccugggacaccaucgccaacuacgccaagccguuccugaacaaggucgugagcacgaccaccaacaucgugacccgcugccucaaccgggucugcacgaacuacaugcccuacuucuucacccugcugcuccagcugugcaccuucacccgcuccaccaacagccggaucaaggcguccaugcccacgaccaucgccaagaacaccgugaagagcgugggcaaguucugccuggaggccagcuucaacuaccucaagucccccaacuucagcaagcugaucaacaucaucaucugguuccugcuccuguccgucugccugggcagccucaucuacuccaccgccgcccugggggugcugaugagcaaccucggcaugccguccuacugcacgggguaccgcgagggcuaccugaacagcaccaacgugaccaucgcgaccuacugcacgggcuccauccccugcagcgucugccuguccgggcucgacagccuggacaccuaccccucccuggagaccauccagaucaccaucagcuccuucaagugggaccucacggccuucggccugguggccgagugguuccuggccuacauccucuucacccgguucuucuacgugcuggggcuggccgcgaucaugcagcucuucuucagcuacuucgccguccacuucaucuccaacagcuggcugauguggcugaucaucaaccuggugcagauggcccccaucuccgccauggugcgcauguacaucuucuucgcgagcuucuacuacgucuggaagagcuacgugcacguggucgacggcugcaacuccagcaccugcaugaugugcuacaagcggaaccgcgccacccggguggagugcacgaccaucgucaacggggugcgccgguccuucuacguguacgccaacggcggcaagggguucugcaagcuccacaacuggaacugcgucaacugcgacaccuucugcgccggcagcaccuucaucuccgacgagguggcccgcgaccugagccugcaguucaagcggccgaucaaccccacggaccaguccagcuacaucguggacuccgucaccgugaagaacgggagcauccaccucuacuucgacaaggcgggccagaagaccuacgagcgccacucccugagccacuucgugaaccuggacaaccuccgggccaacaacaccaaggggucccugcccaucaacgucaucguguucgacggcaagagcaagugcgaggaguccagcgccaaguccgccagcguguacuacucccagcugaugugccagcccauccuccugcuggaccaggcccucgucagcgacgugggcgacagcgcggagguggccgucaagauguucgacgccuacgugaacacguucuccagcaccuucaacgugccgauggagaagcugaagacccuggucgccaccgccgaggcggagcucgccaagaacgugucccuggacaacgugcugagcacguucaucuccgccgcccgccagggguucgucgacagcgacguggagaccaaggacguggucgagugccucaagcugucccaccagagcgacaucgaggugaccggcgacuccugcaacaacuacaugcugaccuacaacaagguggagaacaugacgccccgggaccucggggcgugcaucgacugcagcgcccgccacaucaacgcccaggucgccaagucccacaacaucgcccugaucuggaacgugaaggacuucaugagccuguccgagcagcuccggaagcagauccgcagcgcggccaagaagaacaaccugcccuucaagcugaccugcgccaccacccgccagguggucaacguggugacgaccaagaucgcccucaagggcgggugaggacuaguuauaagacugacuagcccgaugggccucccaacgggcccuccuccccuccuugcaccgagauuaauaaaaaaaaaaaaaaaaaaaaaaaaaaaaaaaaaaaaaaaaaaaaaaaaaaaaaaaaaaaaaaaaugcaucccccccccccccccccccccccccccccccaaaggcucuuuucagagccaccagaauu

SEQ ID NO: 21903 - RNA, 6058 nt, Artificial Sequence
  SARS-CoV-2__MT520466.1__non-structural protein 3 (NSP3) mRNA gc
aggagaaagcuuaccauggcccccaccaaggugaccuucggcgacgacacggucaucgaggugcagggguacaagagcgugaacaucaccuucgagcuggacgagcgcaucgacaagguccucaacgagaagugcuccgccuacaccguggagcugggcaccgaggugaacgaguucgcgugcgucguggccgacgccgugaucaagacgcugcagccggucagcgagcuccugaccccccuggggaucgaccucgacgagugguccauggccaccuacuaccuguucgacgagagcggcgaguucaagcuggccucccacauguacugcagcuucuacccccccgacgaggacgaggaggagggggacugcgaggaggaggaguucgagccguccacccaguacgaguacggcacggaggacgacuaccagggcaagccccucgaguucggggcgaccagcgccgcccugcagcccgaggaggagcaggaggaggacuggcuggacgacgacucccagcagaccgugggccagcaggacgggagcgaggacaaccagaccacgaccauccagaccaucguggagguccagccccagcucgagauggagcugaccccgguggugcagacgaucgaggucaacuccuucagcggcuaccugaagcucaccgacaacguguacaucaagaacgccgacaucguggaggaggcgaagaaggucaagcccaccgugguggucaacgccgccaacguguaccugaagcacgggggcggcguggccggggcccugaacaaggcgaccaacaacgccaugcaggucgaguccgacgacuacaucgccacgaacggcccccucaagguggggggcagcugcguccuguccggccacaaccuggccaagcacugccuccacgugguggggcccaacgucaacaagggcgaggacauccagcugcugaagagcgccuacgagaacuucaaccagcacgaggugcuccuggcgccgcugcucuccgccgggaucuucggcgccgaccccauccacagccugcgggugugcgucgacaccgugcgcaccaacguguaccuggccgucuucgacaagaaccucuacgacaagcugguguccagcuuccuggagaugaagagcgagaagcagguggagcagaagaucgccgagauccccaaggaggaggucaagcccuucaucaccgaguccaagccgagcguggagcagcggaagcaggacgacaagaagaucaaggcgugcguggaggaggucacgaccacccucgaggagaccaaguuccugacggagaaccugcuccuguacaucgacaucaacgggaaccugcaccccgacuccgccacccucgugagcgacaucgacaucaccuuccugaagaaggacgcccccuacaucgugggcgacgucgugcaggagggcgugcugaccgccgucgugauccccacgaagaaggccgggggcaccaccgagaugcucgcgaaggcccugcgcaaggugccgaccgacaacuacaucacgaccuaccccgggcagggccugaacggguacaccgucgaggaggccaagaccgugcucaagaagugcaaguccgccuucuacauccugcccagcaucaucuccaacgagaagcaggagauccugggcaccgugagcuggaaccuccgggagaugcuggcgcacgccgaggagacgcgcaagcugaugcccgucugcguggagaccaaggccaucguguccaccauccagcggaaguacaagggcaucaagauccaggagggggucguggacuacggcgcccgcuucuacuucuacaccagcaagacgaccguggccucccugaucaacacccucaacgaccugaacgagacccuggucacgaugccgcucggguacgugacccacggccugaaccuggaggaggcggcccgguacaugcgcagccucaaggugcccgccaccgucuccgugagcucccccgacgccgugaccgccuacaacggguaccugacgagcuccagcaagacccccgaggagcacuucaucgagaccaucucccuggcgggcagcuacaaggacuggagcuacuccggccagagcacccagcucgggaucgaguuccugaagcggggcgacaaguccgucuacuacacgagcaacccgaccaccuuccaccuggacggggaggugaucaccuucgacaaccucaagacgcugcugucccuccgcgaggugcggaccaucaaggucuucaccaccguggacaacaucaaccugcacacgcagguggucgacaugagcaugaccuacggccagcaguucggccccaccuaccuggacggggccgacgugaccaagaucaagccccacaacucccacgagggcaagacguucuacgugcucccgaacgacgacacccugcgcgucgaggccuucgaguacuaccacaccaccgaccccagcuuccuggggcgguacauguccgcccucaaccacacgaagaaguggaaguacccccaggugaacggccugaccagcaucaagugggccgacaacaacugcuaccuggcgaccgcccuccugacccugcagcagaucgagcucaaguucaaccccccggcccugcaggacgccuacuaccgcgcgcgggccggggaggccgccaacuucugcgcccugauccucgcguacugcaacaagacggugggcgagcugggcgacguccgcgagaccauguccuaccuguuccagcacgccaaccucgacagcugcaagcgggugcugaacgucgugugcaagaccugcgggcagcagcagaccacccugaagggcguggaggccgucauguacauggggacgcucuccuacgagcaguucaagaagggcgugcagauccccugcaccugcgggaagcaggccaccaaguaccuggugcagcaggagagccccuucgucaugauguccgcccccccggcgcaguacgagcugaagcacggcaccuucacgugcgccagcgaguacaccggcaacuaccagugcgggcacuacaagcacaucaccuccaaggagacccucuacugcaucgacggcgcccugcugacgaagagcagcgaguacaaggggcccaucaccgacguguucuacaaggagaacuccuacaccaccacgaucaagcccgugaccuacaagcucgacggcgucgugugcaccgagaucgaccccaagcuggacaacuacuacaagaaggacaacagcuacuucaccgagcagccgaucgaccuggugcccaaccagcccuaccccaacgccuccuucgacaacuucaaguucgucugcgacaacaucaaguucgccgacgaccucaaccagcugacgggguacaagaagccggcgagccgcgagcugaaggugaccuucuuccccgaccucaacggcgacguggucgccaucgacuacaagcacuacacccccuccuucaagaagggcgccaagcugcugcacaagcccaucguguggcacgugaacaacgccaccaacaaggcgacguacaagccgaacaccuggugcauccggugccucuggagcaccaagcccgucgagaccuccaacagcuucgacgugcugaaguccgaggacgcccaggggauggacaaccuggccugcgaggaccucaagcccgugagcgaggaggucguggagaaccccacgauccagaaggacgugcuggagugcaacgucaagaccaccgagguggugggcgacaucauccugaagccggccaacaacucccucaagaucaccgaggaggucgggcacacggaccugauggccgcguacguggacaacagcucccugaccaucaagaagcccaacgagcucagccgcgugcugggccugaagacccucgccacccacgggcuggccgccgucaacuccgugcccugggacacgaucgccaacuacgcgaagccguuccugaacaagguggucagcaccaccaccaacaucgugacgcgcugccucaaccgggugugcaucaacuacaugcccuacuucuucacccugcugcuccagcugugcaccuucacccgcuccaccaacagccggaucaaggccuccaugcccacgaccaucgccaagaacaccgucaagagcgugggcaaguucugccuggaggccagcuucaacuaccucaagucccccaacuucagcaagcugaucaacaucaucaucugguuccugcuccuguccgugugccugggcagccucaucuacuccaccgccgcgcuggggguccugaugagcaaccucggcaugccguccuacugcacgggguaccgcgagggcuaccugaacagcaccaacgugaccaucgccaccuacugcacgggcuccauccccugcagcgugugccuguccgggcucgacagccuggacaccuaccccucccuggagaccauccagaucaccaucagcuccuucaagugggaccucacggccuucggccuggucgccgagugguuccuggccuacauccucuucacccgguucuucuacgugcuggggcuggcggccaucaugcagcucuucuucagcuacuucgccgugcacuucaucuccaacagcuggcugauguggcugaucaucaaccugguccagauggcccccaucuccgcgauggugcgcauguacaucuucuucgccagcuucuacuacguguggaagagcuacguccacgugguggacggcugcaacuccagcaccugcaugaugugcuacaagcggaaccgcgccacccgggucgagugcacgaccaucgugaacgggguccgccgguccuucuacguguacgccaacggcggcaagggguucugcaagcuccacaacuggaacugcgugaacugcgacaccuucugcgccggcagcaccuucaucuccgacgaggucgcgcgcgaccugagccugcaguucaagcggccgaucaaccccacggaccaguccagcuacaucguggacuccgugaccgucaagaacgggagcauccaccucuacuucgacaaggccggccagaagaccuacgagcgccacucccugagccacuucgugaaccuggacaaccuccgggccaacaacaccaaggggucccugcccaucaacgugaucgucuucgacggcaagagcaagugcgaggaguccagcgccaaguccgccagcguguacuacucccagcugaugugccagcccauccuccugcuggaccaggcgcucgugagcgacgucggcgacagcgccgagguggccgugaagauguucgacgccuacgucaacacguucuccagcaccuucaacgugccgauggagaagcugaagacccugguggccaccgcggaggccgagcucgccaagaacgucucccuggacaacgugcugagcacguucaucuccgccgcgcgccagggguucguggacagcgacgucgagaccaaggacgugguggagugccucaagcugucccaccagagcgacaucgaggucaccggcgacuccugcaacaacuacaugcugaccuacaacaagguggagaacaugacgccccgggaccucggggccugcaucgacugcagcgcccgccacaucaacgcccagguggccaagucccacaacaucgcgcugaucuggaacgucaaggacuucaugagccuguccgagcagcuccggaagcagauccgcagcgccgccaagaagaacaaccugcccuucaagcugaccugcgccaccacccgccagguggugaacgucgugacgaccaagaucgcccucaagggcgggugaggacuaguuauaagacugacuagcccgaugggccucccaacgggcccuccuccccuccuugcaccgagauuaauaaaaaaaaaaaaaaaaaaaaaaaaaaaaaaaaaaaaaaaaaaaaaaaaaaaaaaaaaaaaaaaaugcaucccccccccccccccccccccccccccccccaaaggcucuuuucagagccaccagaauu

SEQ ID NO: 21904 - RNA, 6058 nt, Artificial Sequence
  SARS-CoV-2__MT520472.1__non-structural protein 3 (NSP3) mRNA gc
aggagaaagcuuaccauggcccccaccaaggugaccuucggcgacgacacggucaucgaggugcagggguacaagagcgugaacaucaccuucgagcuggacgagcgcaucgacaagguccucaacgagaagugcuccgccuacaccguggagcugggcaccgaggugaacgaguucgcgugcgucguggccgacgccgugaucaagacgcugcagccggucagcgagcuccugaccccccuggggaucgaccucgacgagugguccauggccaccuacuaccuguucgacgagagcggcgaguucaagcuggccucccacauguacugcagcuucuacccccccgacgaggacgaggaggagggggacugcgaggaggaggaguucgagccguccacccaguacgaguacggcacggaggacgacuaccagggcaagccccucgaguucggggcgaccagcgccgcccugcagcccgaggaggagcaggaggaggacuggcuggacgacgacucccagcagaccgugggccagcaggacgggagcgaggacaaccagaccacgaccauccagaccaucguggagguccagccccagcucgagauggagcugaccccgguggugcagacgaucgaggucaacuccuucagcggcuaccugaagcucaccgacaacguguacaucaagaacgccgacaucguggaggaggcgaagaaggucaagcccaccgugguggucaacgccgccaacguguaccugaagcacgggggcggcguggccggggcccugaacaaggcgaccaacaacgccaugcaggucgaguccgacgacuacaucgccacgaacggcccccucaagguggggggcagcugcguccuguccggccacaaccuggccaagcacugccuccacgugguggggcccaacgucaacaagggcgaggacauccagcugcugaagagcgccuacgagaacuucaaccagcacgaggugcuccuggcgccgcugcucuccgccgggaucuucggcgccgaccccauccacagccugcgggugugcgucgacaccgugcgcaccaacguguaccuggccgucuucgacaagaaccucuacgacaagcugguguccagcuuccuggagaugaagagcgagaagcagguggagcagaagaucgccgagauccccaaggaggaggucaagcccuucaucaccgaguccaagccgagcguggagcagcggaagcaggacgacaagaagaucaaggcgugcguggaggaggucacgaccacccucgaggagaccaaguuccugacggagaaccugcuccuguacaucgacaucaacgggaaccugcaccccgacuccgccacccucgugagcgacaucgacaucaccuuccugaagaaggacgcccccuacaucgugggcgacgucgugcaggagggcgugcugaccgccgucgugauccccacgaagaaggccgggggcaccaccgagaugcucgcgaaggcccugcgcaaggugccgaccgacaacuacaucacgaccuaccccgggcagggccugaacggguacaccgucgaggaggccaagaccgugcucaagaagugcaaguccgccuucuacauccugcccagcaucaucuccaacgagaagcaggagauccugggcaccgugagcuggaaccuccgggagaugcuggcgcacgccgaggagacgcgcaagcugaugcccgucugcguggagaccaaggccaucguguccaccauccagcggaaguacaagggcaucaagauccaggagggggucguggacuacggcgcccgcuucuacuucuacaccagcaagacgaccguggccucccugaucaacacccucaacgaccugaacgagacccuggucacgaugccgcucggguacgugacccacggccugaaccuggaggaggcggcccgguacaugcgcagccucaaggugcccgccaccgucuccgugagcucccccgacgccgugaccgccuacaacggguaccugacgagcuccagcaagacccccgaggagcacuucaucgagaccaucucccuggcgggcagcuacaaggacuggagcuacuccggccagagcacccagcucgggaucgaguuccugaagcggggcgacaaguccgucuacuacacgagcaacccgaccaccuuccaccuggacggggaggugaucaccuucgacaaccucaagacgcugcugucccuccgcgaggugcggaccaucaaggucuucaccaccguggacaacaucaaccugcacacgcagguggucgacaugagcaugaccuacggccagcaguucggccccaccuaccuggacggggccgacgugaccaagaucaagccccacaacucccacgagggcaagacguucuacgugcucccgaacgacgacacccugcgcgucgaggccuucgaguacuaccacaccaccgaccccagcuuccuggggcgguacauguccgcccucaaccacacgaagaaguggaaguacccccaggugaacggccugaccagcaucaagugggccgacaacaacugcuaccuggcgaccgcccuccugacccugcagcagaucgagcucaaguucaaccccccggcccugcaggacgccuacuaccgcgcgcgggccggggaggccgccaacuucugcgcccugauccucgcguacugcaacaagacggugggcgagcugggcgacguccgcgagaccaucuccuaccuguuccagcacgccaaccucgacagcugcaagcgggugcugaacgucgugugcaagaccugcgggcagcagcagaccacccugaagggcguggaggccgucauguacauggggacgcucuccuacgagcaguucaagaagggcgugcagauccccugcaccugcgggaagcaggccaccaaguaccuggugcagcaggagagccccuucgucaugauguccgcccccccggcgcaguacgagcugaagcacggcaccuucacgugcgccagcgaguacaccggcaacuaccagugcgggcacuacaagcacaucaccuccaaggagacccucuacugcaucgacggcgcccugcugacgaagagcagcgaguacaaggggcccaucaccgacguguucuacaaggagaacuccuacaccaccacgaucaagcccgugaccuacaagcucgacggcgucgugugcaccgagaucgaccccaagcuggacaacuacuacaagaaggacaacagcuacuucaccgagcagccgaucgaccuggugcccaaccagcccuaccccaacgccuccuucgacaacuucaaguucgucugcgacaacaucaaguucgccgacgaccucaaccagcugacgggguacaagaagccggcgagccgcgagcugaaggugaccuucuuccccgaccucaacggcgacguggucgccaucgacuacaagcacuacacccccuccuucaagaagggcgccaagcugcugcacaagcccaucguguggcacgugaacaacgccaccaacaaggcgacguacaagccgaacaccuggugcauccggugccucuggagcaccaagcccgucgagaccuccaacagcuucgacgugcugaaguccgaggacgcccaggggauggacaaccuggccugcgaggaccucaagcccgugagcgaggaggucguggagaaccccacgauccagaaggacgugcuggagugcaacgucaagaccaccgagguggugggcgacaucauccugaagccggccaacaacucccucaagaucaccgaggaggucgggcacacggaccugauggccgcguacguggacaacagcucccugaccaucaagaagcccaacgagcucagccgcgugcugggccugaagacccucgccacccacgggcuggccgccgucaacuccgugcccugggacacgaucgccaacuacgcgaagccguuccugaacaagguggucagcaccaccaccaacaucgugacgcgcugccucaaccgggugugcaccaacuacaugcccuacuucuucacccugcugcuccagcugugcaccuucacccgcuccacgaacagccggaucaaggccuccaugcccaccaccaucgccaagaacaccgucaagagcgugggcaaguucugccuggaggccagcuucaacuaccucaagucccccaacuucagcaagcugaucaacaucaucaucugguuccugcuccuguccgugugccugggcagccucaucuacuccacggccgcgcuggggguccugaugagcaaccucggcaugccguccuacugcaccggguaccgcgagggcuaccugaacagcaccaacgugaccaucgccacguacugcaccggcuccauccccugcagcgugugccuguccgggcucgacagccuggacaccuaccccucccuggagaccauccagaucacgaucagcuccuucaagugggaccucaccgccuucggccuggucgccgagugguuccuggccuacauccucuucacccgguucuucuacgugcuggggcuggcggccaucaugcagcucuucuucagcuacuucgccgugcacuucaucuccaacagcuggcugauguggcugaucaucaaccugguccagauggcccccaucuccgcgauggugcgcauguacaucuucuucgccagcuucuacuacguguggaagagcuacguccacgugguggacggcugcaacuccagcaccugcaugaugugcuacaagcggaaccgcgccacgcgggucgagugcaccaccaucgugaacgggguccgccgguccuucuacguguacgccaacggcggcaagggguucugcaagcuccacaacuggaacugcgugaacugcgacaccuucugcgccggcagcacguucaucuccgacgaggucgcgcgcgaccugagccugcaguucaagcggccgaucaaccccaccgaccaguccagcuacaucguggacuccgugaccgucaagaacgggagcauccaccucuacuucgacaaggccggccagaagaccuacgagcgccacucccugagccacuucgugaaccuggacaaccuccgggccaacaacacgaaggggucccugcccaucaacgugaucgucuucgacggcaagagcaagugcgaggaguccagcgccaaguccgccagcguguacuacucccagcugaugugccagcccauccuccugcuggaccaggcgcucgugagcgacgucggcgacagcgccgagguggccgugaagauguucgacgccuacgucaacaccuucuccagcaccuucaacgugccgauggagaagcugaagacccugguggccacggcggaggccgagcucgccaagaacgucucccuggacaacgugcugagcaccuucaucuccgccgcgcgccagggguucguggacagcgacgucgagaccaaggacgugguggagugccucaagcugucccaccagagcgacaucgaggucaccggcgacuccugcaacaacuacaugcugacguacaacaagguggagaacaugaccccccgggaccucggggccugcaucgacugcagcgcccgccacaucaacgcccagguggccaagucccacaacaucgcgcugaucuggaacgucaaggacuucaugagccuguccgagcagcuccggaagcagauccgcagcgccgccaagaagaacaaccugcccuucaagcugaccugcgccaccacgcgccagguggugaacgucgugaccaccaagaucgcccucaagggcgggugaggacuaguuauaagacugacuagcccgaugggccucccaacgggcccuccuccccuccuugcaccgagauuaauaaaaaaaaaaaaaaaaaaaaaaaaaaaaaaaaaaaaaaaaaaaaaaaaaaaaaaaaaaaaaaaaugcaucccccccccccccccccccccccccccccccaaaggcucuuuucagagccaccagaauu

SEQ ID NO: 21905 - RNA, 6058 nt, Artificial Sequence
  SARS-CoV-2__MT520486.1__non-structural protein 3 (NSP3) mRNA gc
aggagaaagcuuaccauggcccccaccaaggugaccuucggcgacgacacggucaucgaggugcagggguacaagagcgugaacaucaccuucgagcuggacgagcgcaucgacaagguccucaacgagaagugcuccgccuacaccguggagcugggcaccgaggugaacgaguucgcgugcgucguggccgacgccgugaucaagacgcugcagccggucagcgagcuccugaccccccuggggaucgaccucgacgagugguccauggccaccuacuaccuguucgacgagagcggcgaguucaagcuggccucccacauguacugcagcuucuacccccccgacgaggacgaggaggagggggacugcgaggaggaggaguucgagccguccacccaguacgaguacggcacggaggacgacuaccagggcaagccccucgaguucggggcgaccagcgccgcccugcagcccgaggaggagcaggaggaggacuggcuggacgacgacucccagcagaccgugggccagcaggacgggagcgaggacaaccagaccacgaccauccagaccaucguggagguccagccccagcucgagauggagcugaccccgguggugcagacgaucgaggucaacuccuucagcggcuaccugaagcucaccgacaacguguacaucaagaacgccgacaucguggaggaggcgaagaaggucaagcccaccgugguggucaacgccgccaacguguaccugaagcacgggggcggcguggccggggcccugaacaaggcgaccaacaacgccaugcaggucgaguccgacgacuacaucgccacgaacggcccccucaagguggggggcagcugcguccuguccggccacaaccuggccaagcacugccuccacgugguggggcccaacgucaacaagggcgaggacauccagcugcugaagagcgccuacgagaacuucaaccagcacgaggugcuccuggcgccgcugcucuccgccgggaucuucggcgccgaccccauccacagccugcgggugugcgucgacaccgugcgcaccaacguguaccuggccgucuucgacaagaaccucuacgacaagcugguguccagcuuccuggagaugaagagcgagaagcagguggagcagaagaucgccaagcccuucaucaccgaguccaagcccagcgucgagcagcggaagcaggacgacaagaagaucaaggcgugcguggaggaggugacgaccacccucgaggagaccaaguuccugacggagaaccugcuccuguacaucgacaucaacgggaaccugcacccggacuccgccacccucgucagcgacaucgacaucaccuuccugaagaaggacgcccccuacaucgugggcgacgugguccaggagggcgugcugaccgccguggucauccccacgaagaaggccgggggcaccaccgagaugcucgcgaaggcccugcgcaaggugcccaccgacaacuacaucacgaccuacccggggcagggccugaacggguacaccguggaggaggccaagaccguccucaagaagugcaaguccgccuucuacauccugcccagcaucaucuccaacgagaagcaggagauccugggcaccgugagcuggaaccuccgggagaugcuggcgcacgccgaggagacgcgcaagcugaugcccgugugcgucgagaccaaggccaucguguccaccauccagcggaaguacaagggcaucaagauccaggaggggguggucgacuacggcgcccgcuucuacuucuacaccagcaagacgaccguggccucccugaucaacacccucaacgaccugaacgagacccuggugacgaugccccucggguacgucacccacggccugaaccuggaggaggcggcccgguacaugcgcagccucaaggugccggccaccguguccgucagcucccccgacgccgugaccgccuacaacggguaccugacgagcuccagcaagacccccgaggagcacuucaucgagaccaucucccuggcgggcagcuacaaggacuggagcuacuccggccagagcacccagcucgggaucgaguuccugaagcggggcgacaaguccguguacuacacgagcaaccccaccaccuuccaccuggacggggaggucaucaccuucgacaaccucaagacgcugcugucccuccgcgaggugcggaccaucaagguguucaccaccgucgacaacaucaaccugcacacgcaggugguggacaugagcaugaccuacggccagcaguucggcccgaccuaccuggacggggccgacgucaccaagaucaagccccacaacucccacgagggcaagacguucuacgugcuccccaacgacgacacccugcgcguggaggccuucgaguacuaccacaccaccgacccgagcuuccuggggcgguacauguccgcccucaaccacacgaagaaguggaaguacccccaggucaacggccugaccagcaucaagugggccgacaacaacugcuaccuggcgaccgcccuccugacccugcagcagaucgagcucaaguucaacccccccgcccugcaggacgccuacuaccgcgcgcgggccggggaggccgccaacuucugcgcccugauccucgcguacugcaacaagacggugggcgagcugggcgacgugcgcgagaccauguccuaccuguuccagcacgccaaccucgacagcugcaagcggguccugaacguggucugcaagaccugcgggcagcagcagaccacccugaagggcguggaggccgugauguacauggggacgcucuccuacgagcaguucaagaagggcguccagaucccgugcaccugcgggaagcaggccaccaaguaccuggugcagcaggagagccccuucgugaugauguccgccccccccgcgcaguacgagcugaagcacggcaccuucacgugcgccagcgaguacaccggcaacuaccagugcgggcacuacaagcacaucaccuccaaggagacccucuacugcaucgacggcgcccugcugacgaagagcagcgaguacaaggggccgaucaccgacgucuucuacaaggagaacuccuacaccaccacgaucaagcccgugaccuacaagcucgacggcguggucugcaccgagaucgaccccaagcuggacaacuacuacaagaaggacaacagcuacuucaccgagcagcccaucgaccuggugccgaaccagcccuaccccaacgccuccuucgacaacuucaaguucgugugcgacaacaucaaguucgccgacgaccucaaccagcugacgggguacaagaagcccgcgagccgcgagcugaaggucaccuucuucccggaccucaacggcgacgugguggccaucgacuacaagcacuacacccccuccuucaagaagggcgccaagcugcugcacaagcccaucgucuggcacgugaacaacgccaccaacaaggcgacguacaagcccaacaccuggugcauccggugccucuggagcaccaagccgguggagaccuccaacagcuucgacguccugaaguccgaggacgcccaggggauggacaaccuggccugcgaggaccucaagcccgugagcgaggagguggucgagaaccccacgauccagaaggacgugcuggagugcaacgugaagaccaccgaggucgugggcgacaucauccugaagcccgccaacaacucccucaagaucaccgaggagguggggcacacggaccugauggccgcguacgucgacaacagcucccugaccaucaagaagccgaacgagcucagccgcgugcugggccugaagacccucgccacccacgggcuggccgccgugaacuccguccccugggacacgaucgccaacuacgcgaagcccuuccugaacaagguggugagcaccaccaccaacaucgucacgcgcugccucaaccgggugugcaccaacuacaugccguacuucuucacccugcugcuccagcugugcaccuucacccgcuccacgaacagccggaucaaggccuccaugcccaccaccaucgccaagaacaccgugaagagcgucggcaaguucugccuggaggccagcuucaacuaccucaagucccccaacuucagcaagcugaucaacaucaucaucugguuccugcuccuguccgugugccugggcagccucaucuacuccacggccgcgcugggggugcugaugagcaaccucggcaugcccuccuacugcaccggguaccgcgagggcuaccugaacagcaccaacgucaccaucgccacguacugcaccggcuccaucccgugcagcgugugccuguccgggcucgacagccuggacaccuaccccucccuggagaccauccagaucacgaucagcuccuucaagugggaccucaccgccuucggccugguggccgagugguuccuggccuacauccucuucacccgguucuucuacguccuggggcuggcggccaucaugcagcucuucuucagcuacuucgccgugcacuucaucuccaacagcuggcugauguggcugaucaucaaccuggugcagauggcccccaucuccgcgaugguccgcauguacaucuucuucgccagcuucuacuacguguggaagagcuacgugcacgucguggacggcugcaacuccagcaccugcaugaugugcuacaagcggaaccgcgccacgcggguggagugcaccaccaucgucaacggggugcgccgguccuucuacgucuacgccaacggcggcaagggguucugcaagcuccacaacuggaacugcgugaacugcgacaccuucugcgccggcagcacguucaucuccgacgagguggcgcgcgaccugagccugcaguucaagcggcccaucaacccgaccgaccaguccagcuacaucgucgacuccgugaccgugaagaacgggagcauccaccucuacuucgacaaggccggccagaagaccuacgagcgccacucccugagccacuucgucaaccuggacaaccuccgggccaacaacacgaaggggucccugcccaucaacgugaucguguucgacggcaagagcaagugcgaggaguccagcgccaaguccgccagcgucuacuacucccagcugaugugccagcccauccuccugcuggaccaggcgcucgugagcgacgugggcgacagcgccgaggucgccgugaagauguucgacgccuacgugaacaccuucuccagcaccuucaacguccccauggagaagcugaagacccugguggccacggcggaggccgagcucgccaagaacgugucccuggacaacguccugagcaccuucaucuccgccgcgcgccagggguucguggacagcgacguggagaccaaggacgucguggagugccucaagcugucccaccagagcgacaucgaggugaccggcgacuccugcaacaacuacaugcugacguacaacaaggucgagaacaugaccccgcgggaccucggggccugcaucgacugcagcgcccgccacaucaacgcccagguggccaagucccacaacaucgcgcugaucuggaacgugaaggacuucaugagccuguccgagcagcuccggaagcagauccgcagcgccgccaagaagaacaaccugcccuucaagcugaccugcgccaccacgcgccaggucgugaacguggucaccaccaagaucgcccucaagggcgggaagaucgugaacaacuggcugugaggacuaguuauaagacugacuagcccgaugggccucccaacgggcccuccuccccuccuugcaccgagauuaauaaaaaaaaaaaaaaaaaaaaaaaaaaaaaaaaaaaaaaaaaaaaaaaaaaaaaaaaaaaaaaaaugcaucccccccccccccccccccccccccccccccaaaggcucuuuucagagccaccagaauu

SEQ ID NO: 21906 - RNA, 6058 nt, Artificial Sequence
  SARS-CoV-2__MT520534.1__non-structural protein 3 (NSP3) mRNA gc
aggagaaagcuuaccauggcccccaccaaggugaccuucggcgacgacacggucaucgaggugcagggguacaagagcgugaacaucaccuucgagcuggacgagcgcaucgacaagguccucaacgagaagugcuccgccuacaccguggagcugggcaccgaggugaacgaguucgcgugcgucguggccgacgccgugaucaagacgcugcagccggucagcgagcuccugaccccccuggggaucgaccucgacgagugguccauggccaccuacuaccuguucgacgagagcggcgaguucaagcuggccucccacauguacugcagcuucuacccccccgacgaggacgaggaggagggggacugcgaggaggaggaguucgagccguccacccaguacgaguacggcacggaggacgacuaccagggcaagccccucgaguucggggcgaccagcgccgcccugcagcccgaggaggagcaggaggaggacuggcuggacgacgacucccagcagaccgugggccagcaggacgggagcgaggacaaccagaccacgaccauccagaccaucguggagguccagccccagcucgagauggagcugaccccgguggugcagacgaucgaggucaacuccuucagcggcuaccugaagcucaccgacaacguguacaucaagaacgccgacaucguggaggaggcgaagaaggucaagcccaccgugguggucaacgccgccaacguguaccugaagcacgggggcggcguggccggggcccugaacaaggcgaccaacaacgccaugcaggucgaguccgacgacuacaucgccacgaacggcccccucaagguggggggcagcugcguccuguccggccacaaccuggccaagcacugccuccacgugguggggcccaacgucaacaagggcgaggacauccagcugcugaagagcgccuacgagaacuucaaccagcacgaggugcuccuggcgccgcugcucuccgccgggaucuucggcgccgaccccauccacagccugcgggugugcgucgacaccgugcgcaccaacguguaccuggccgucuucgacaagaaccucuacgacaagcugguguccagcuuccuggagaugaagagcgagaagcagguggagcagaagaucgccgagauccccaaggaggaggucaagcccuucaucaccgaguccaagccgagcguggagcagcggaagcaggacgacaagaagaucaaggcgugcguggaggaggucacgaccacccucgaggagaccaaguuccugacggagaaccugcuccuguacaucgacaucaacgggaaccugcaccccgacuccgccacccucgugagcgacaucgacaucaccuuccugaagaaggacgcccccuacaucgugggcgacgucgugcaggagggcgugcugaccgccgucgugauccccacgaagaaggccgggggcaccaccgagaugcucgcgaaggcccugcgcaaggugccgaccgacaacuacaucacgaccuaccccgggcagggccugaacggguacaccgucgaggaggccaagaccgugcucaagaagugcaaguccgccuucuacauccugcccagcaucaucuccaacgagaagcaggagauccugggcaccgugagcuggaaccuccgggagaugcuggcgcacgccgaggagacgcgcaagcugaugcccgucugcguggagaccaaggccaucguguccaccauccagcggaaguacaagggcaucaagauccaggagggggucguggacuacggcgcccgcuucuacuucuacaccagcaagacgaccguggccucccugaucaacacccucaacgaccugaacgagacccuggucacgaugccgcucggguacgugacccacggccugaaccuggaggaggcggcccgguacaugcgcagccucaaggugcccgccaccgucuccgugagcucccccgacgccgugaccgccuacaacggguaccugacgagcuccagcaagacccccgaggagcacuucaucgagaccaucucccuggcgggcagcuacaaggacuggagcuacuccggccagagcacccagcucgggaucgaguuccugaagcggggcgacaaguccgucuacuacacgagcaacccgaccaccuuccaccuggacggggaggugaucaccuucgacaaccucaagacgcugcugucccuccgcgaggugcggaccaucaaggucuucaccaccguggacaacaucaaccugcacacgcagguggucgacaugagcaugaccuacggccagcaguucggccccaccuaccuggacggggccgacgugaccaagaucaagccccacaacucccacgagggcaagacguucuacgugcucccgaacgacgacacccugcgcgucgaggccuucgaguacuaccacaccaccgaccccagcuuccuggggcgguacauguccgcccucaaccacacgaagaaguggaaguacccccaggugaacggccugaccagcaucaagugggccgacaacaacugcuaccuggcgaccgcccuccugacccugcagcagaucgagcucaaguucaaccccccggcccugcaggacgccuacuaccgcgcgcgggccggggaggccgccaacuucugcgcccugauccucgcguacugcaacaagacggugggcgagcugggcgacguccgcgagaccauguccuaccuguuccagcacgccaaccucgacagcugcaagcgggugcugaacgucgugugcaagaccugcgggcagcagcagaccacccugaagggcguggaggccgucauguacauggggacgcucuccuacgagcaguucaagaagggcgugcagauccccugcaccugcgggaagcaggccaccaaguaccuggugcagcaggagagccccuucgucaugauguccgcccccccggcgcaguacgagcugaagcacggcaccuucacgugcgccagcgaguacaccggcaacuaccagugcgggcacuacaagcacaucaccuccaaggagacccucuacugcaucgacggcgcccugcugacgaagagcagcgaguacaaggggcccaucaccgacguguucuacaaggagaacuccuacaccaccacgaucaagcccgugaccuacaagcucgacggcgucgugugcaccgagaucgaccccaagcuggacaacuacuacaagaaggacaacagcuacuucaccgagcagccgaucgaccuggugcccaaccagcccuaccccaacgccuccuucgacaacuucaaguucgucugcgacaacaucaaguucgccgacgaccucaaccagcugacgggguacaagaagccggcgagccgcgagcugaaggugaccuucuuccccgaccucaacggcgacguggucgccaucgacuacaagcacuacacccccuccuucaagaagggcgccaagcugcugcacaagcccaucguguggcacgugaacaacgccaccaacaaggcgacguacaagccgaacaccuggugcauccggugccucuggagcaccaagcccgucgagaccuccaacagcuucgacgugcugaaguccgaggacgcccaggggauggacaaccuggccugcgaggaccucaagcccgugagcgaggaggucguggagaaccccacgauccagaaggacgugcuggagugcaacgucaagaccaccgagguggugggcgacaucauccugaagccggccaacaacucccucaagaucaccgaggaggucgggcacacggaccugauggccgcguacguggacaacagcucccugaccaucaagaagcccaacgagcucagccgcgugcugggccugaagacccucgccacccacgggcuggccgccgucaacuccgugcccugggacacgaucgccaacuacgcgaagccguuccugaacaagguggucagcaccaccaccaacaucgugacgcgcugccucaaccgggugugcaccaacuacaugcccuacuucuucacccugcugcuccagcugugcaccuucacccgcuccacgaacagccggaucaaggccuccaugcccaccaccaucgccaagaacaccgucaagagcgugggcaaguucugccuggaggccagcuucaacuaccucaagucccccaacuucagcaagcugaucaacaucaucaucugguuccugcuccuguccgugugccugggcagccucaucuacuccacggccgcgcuggggguccugaugagcaaccucggcaugccguccuacugcaccggguaccgcgagggcuaccugaacagcaccaacgugaccaucgccacguacugcaccggcuccauccccugcagcgugugccuguccgggcucgacagccuggacaccuaccccucccuggagaccauccagaucacgaucagcuccuucaagugggaccucaccgccuucggccuggucgccgagugguuccuggccuacauccucuucacccgguucuucuacgugcuggggcuggcggccaucaugcagcucuucuucagcuacuucgccgugcacuucaucuccaacagcuggcugauguggcugaucaucaaccugguccagauggcccccaucuccgcgauggugcgcauguacaucuucuucgccagcuucuacuacguguggaagagcuacguccacgugguggacggcugcaacuccagcaccugcaugaugugcuacaagcggaaccgcgccacgcgggucgagugcaccaccaucgugaacgggguccgccgguccuucuacguguacgccaacggcggcaagggguucugcaagcuccacaacuggaacugcgugaacugcgacaccuucugcgccggcagcacguucaucuccgacgaggucgcgcgcgaccugagccugcaguucaagcggccgaucaaccccaccgaccaguccagcuacaucguggacuccgugaccgucaagaacgggagcauccaccucuacuucgacaaggccggccagaagaccuacgagcgccacucccugagccacuucgugaaccuggacaaccuccgggccaacaacacgaaggggucccugcccaucaacgugaucgucuucgacggcaagagcaagugcgaggaguccagcgccaaguccgccagcguguacuacucccagcugaugugccagcccauccuccugcuggaccaggcgcucgugagcgacgucggcgacagcgccgagguggccgugaagauguucgacgccuacgucaacaccuucuccagcaccuucaacgugccgauggagaagcugaagacccugguggccacggcggaggccgagcucgccaagaacgucucccuggacaacgugcugagcaccuucaucuccgccgcgcgccagggguucguggacagcgacgucgagaccaaggacgugguggagugcuucaagcucucccaccagagcgacaucgaggucaccggcgacuccugcaacaacuacaugcugacguacaacaagguggagaacaugaccccccgggaccugggggccugcaucgacugcagcgcccgccacaucaacgcccagguggccaagucccacaacaucgcgcucaucuggaacgucaaggacuucaugagccuguccgagcagcugcggaagcagauccgcagcgccgccaagaagaacaaccuccccuucaagcugaccugcgccaccacgcgccagguggugaacgucgugaccaccaagaucgcccugaagggcgggugaggacuaguuauaagacugacuagcccgaugggccucccaacgggcccuccuccccuccuugcaccgagauuaauaaaaaaaaaaaaaaaaaaaaaaaaaaaaaaaaaaaaaaaaaaaaaaaaaaaaaaaaaaaaaaaaugcaucccccccccccccccccccccccccccccccaaaggcucuuuucagagccaccagaauu

SEQ ID NO: 21907 - RNA, 6058 nt, Artificial Sequence
  SARS-CoV-2__MT520543.1__non-structural protein 3 (NSP3) mRNA gc
aggagaaagcuuaccauggcccccaccaaggugaccuucggcgacgacacggucaucgaggugcagggguacaagagcgugaacaucaccuucgagcuggacgagcgcaucgacaagguccucaacgagaagugcuccgccuacaccguggagcugggcaccgaggugaacgaguucgcgugcgucguggccgacgccgugaucaagacgcugcagccggucagcgagcuccugaccccccuggggaucgaccucgacgagugguccauggccaccuacuaccuguucgacgagagcggcgaguucaagcuggccucccacauguacugcagcuucuacccccccgacgaggacgaggaggagggggacugcgaggaggaggaguucgagccguccacccaguacgaguacggcacggaggacgacuaccagggcaagccccucgaguucggggcgaccagcgccgcccugcagcccgaggaggagcaggaggaggacuggcuggacgacgacucccagcagaccgugggccagcaggacgggagcgaggacaaccagaccacgaccauccagaccaucguggagguccagccccagcucgagauggagcugaccccgguggugcagacgaucgaggucaacuccuucagcggcuaccugaagcucaccgacaacguguacaucaagaacgccgacaucguggaggaggcgaagaaggucaagcccaccgugguggucaacgccgccaacguguaccugaagcacgggggcggcguggccggggcccugaacaaggcgaccaacaacgccaugcaggucgaguccgacgacuacaucgccacgaacggcccccucaagguggggggcagcugcguccuguccggccacaaccuggccaagcacugccuccacgugguggggcccaacgucaacaagggcgaggacauccagcugcugaagagcgccuacgagaacuucaaccagcacgaggugcuccuggcgccgcugcucuccgccgggaucuucggcgccgaccccauccacagccugcgggugugcgucgacaccgugcgcaccaacguguaccuggccgucuucgacaagaaccucuacgacaagcugguguccagcuuccuggagaugaagagcgagaagcagguggagcagaagaucgccgagauccccaaggaggaggucaagcccuucaucaccgaguccaagccgagcguggagcagcggaagcaggacgacaagaagaucaaggcgugcguggaggaggucacgaccacccucgaggagaccaaguuccugacggagaaccugcuccuguacaucgacaucaacgggaaccugcaccccgacuccgccacccucgugagcgacaucgacaucaccuuccugaagaaggacgcccccuacaucgugggcgacgucgugcaggagggcgugcugaacgccgucgugauccccaccaagaaggccgggggcacgaccgagaugcucgcgaaggcccugcgcaaggugccgaccgacaacuacaucaccacguaccccgggcagggccugaacggguacaccgucgaggaggccaagaccgugcucaagaagugcaaguccgccuucuacauccugcccagcaucaucuccaacgagaagcaggagauccugggcaccgugagcuggaaccuccgggagaugcuggcgcacgccgaggagacccgcaagcugaugcccgucugcguggagacgaaggccaucguguccaccauccagcggaaguacaagggcaucaagauccaggagggggucguggacuacggcgcccgcuucuacuucuacaccagcaagaccacgguggccucccugaucaacacccucaacgaccugaacgagacccuggucaccaugccgcucggguacgugacgcacggccugaaccuggaggaggcggcccgguacaugcgcagccucaaggugcccgccaccgucuccgugagcucccccgacgccgugaccgccuacaacggguaccugaccagcuccagcaagacgcccgaggagcacuucaucgagaccaucucccuggcgggcagcuacaaggacuggagcuacuccggccagagcacccagcucgggaucgaguuccugaagcggggcgacaaguccgucuacuacaccagcaacccgacgaccuuccaccuggacggggaggugaucaccuucgacaaccucaagacccugcugucccuccgcgaggugcggacgaucaaggucuucaccaccguggacaacaucaaccugcacacccagguggucgacaugagcaugacguacggccagcaguucggccccaccuaccuggacggggccgacgugaccaagaucaagccccacaacucccacgagggcaagaccuucuacgugcucccgaacgacgacacgcugcgcgucgaggccuucgaguacuaccacaccaccgaccccagcuuccuggggcgguacauguccgcccucaaccacaccaagaaguggaaguacccccaggugaacggccugacgagcaucaagugggccgacaacaacugcuaccuggcgaccgcccuccugacccugcagcagaucgagcucaaguucaaccccccggcccugcaggacgccuacuaccgcgcgcgggccggggaggccgccaacuucugcgcccugauccucgcguacugcaacaagaccgugggcgagcugggcgacguccgcgagacgauguccuaccuguuccagcacgccaaccucgacagcugcaagcgggugcugaacgucgugugcaagaccugcgggcagcagcagaccacccugaagggcguggaggccgucauguacauggggacccucuccuacgagcaguucaagaagggcgugcagauccccugcacgugcgggaagcaggccaccaaguaccuggugcagcaggagagccccuucgucaugauguccgcccccccggcgcaguacgagcugaagcacggcaccuucaccugcgccagcgaguacacgggcaacuaccagugcgggcacuacaagcacaucaccuccaaggagacccucuacugcaucgacggcgcccugcugaccaagagcagcgaguacaaggggcccaucacggacguguucuacaaggagaacuccuacaccaccaccaucaagcccgugacguacaagcucgacggcgucgugugcaccgagaucgaccccaagcuggacaacuacuacaagaaggacaacagcuacuucaccgagcagccgaucgaccuggugcccaaccagcccuaccccaacgccuccuucgacaacuucaaguucgucugcgacaacaucaaguucgccgacgaccucaaccagcugaccggguacaagaagccggcgagccgcgagcugaaggugacguucuuccccgaccucaacggcgacguggucgccaucgacuacaagcacuacacccccuccuucaagaagggcgccaagcugcugcacaagcccaucguguggcacgugaacaacgccaccaacaaggcgaccuacaagccgaacacguggugcauccggugccucuggagcaccaagcccgucgagaccuccaacagcuucgacgugcugaaguccgaggacgcccaggggauggacaaccuggccugcgaggaccucaagcccgugagcgaggaggucguggagaaccccaccauccagaaggacgugcuggagugcaacgucaagacgaccgagguggugggcgacaucauccugaagccggccaacaacucccucaagaucaccgaggaggucgggcacaccgaccugauggccgcguacguggacaacagcucccugacgaucaagaagcccaacgagcucagccgcgugcugggccugaagacccucgccacccacgggcuggccgccgucaacuccgugcccugggacaccaucgccaacuacgcgaagccguuccugaacaagguggucagcacgaccaccaacaucgugacccgcugccucaaccgggugugcacgaacuacaugcccuacuucuucacccugcugcuccagcugugcaccuucacccgcuccaccaacagccggaucaaggccuccaugcccacgaccaucgccaagaacaccgucaagagcgugggcaaguucugccuggaggccagcuucaacuaccucaagucccccaacuucagcaagcugaucaacaucaucaucugguuccugcuccuguccgugugccugggcagccucaucuacuccaccgccgcgcuggggguccugaugagcaaccucggcaugccguccuacugcacgggguaccgcgagggcuaccugaacagcaccaacgugaccaucgccaccuacugcacgggcuccauccccugcagcgugugccuguccgggcucgacagccuggacaccuaccccucccuggagaccauccagaucaccaucagcuccuucaagugggaccucacggccuucggccuggucgccgagugguuccuggccuacauccucuucacccgguucuucuacgugcuggggcuggcggccaucaugcagcucuucuucagcuacuucgccgugcacuucaucuccaacagcuggcugauguggcugaucaucaaccugguccagauggcccccaucuccgcgauggugcgcauguacaucuucuucgccagcuucuacuacguguggaagagcuacguccacgugguggacggcugcaacuccagcaccugcaugaugugcuacaagcggaaccgcgccacccgggucgagugcacgaccaucgugaacgggguccgccgguccuucuacguguacgccaacggcggcaagggguucugcaagcuccacaacuggaacugcgugaacugcgacaccuucugcgccggcagcaccuucaucuccgacgaggucgcgcgcgaccugagccugcaguucaagcggccgaucaaccccacggaccaguccagcuacaucguggacuccgugaccgucaagaacgggagcauccaccucuacuucgacaaggccggccagaagaccuacgagcgccacucccugagccacuucgugaaccuggacaaccuccgggccaacaacaccaaggggucccugcccaucaacgugaucgucuucgacggcaagagcaagugcgaggaguccagcgccaaguccgccagcguguacuacucccagcugaugugccagcccauccuccugcuggaccaggcgcucgugagcgacgucggcgacagcgccgagguggccgugaagauguucgacgccuacgucaacacguucuccagcaccuucaacgugccgauggagaagcugaagacccugguggccaccgcggaggccgagcucgccaagaacgucucccuggacaacgugcugagcacguucaucuccgccgcgcgccagggguucguggacagcgacgucgagaccaaggacgugguggagugccucaagcugucccaccagagcgacaucgaggucaccggcgacuccugcaacaacuacaugcugaccuacaacaagguggagaacaugacgccccgggaccucggggccugcaucgacugcagcgcccgccacaucaacgcccagguggccaagucccacaacaucgcgcugaucuggaacgucaaggacuucaugagccuguccgagcagcuccggaagcagauccgcagcgccgccaagaagaacaaccugcccuucaagcugaccugcgccaccacccgccagguggugaacgucgugacgaccaagaucgcccucaagggcgggugaggacuaguuauaagacugacuagcccgaugggccucccaacgggcccuccuccccuccuugcaccgagauuaauaaaaaaaaaaaaaaaaaaaaaaaaaaaaaaaaaaaaaaaaaaaaaaaaaaaaaaaaaaaaaaaaugcaucccccccccccccccccccccccccccccccaaaggcucuuuucagagccaccagaauu

SEQ ID NO: 21908 - RNA, 6058 nt, Artificial Sequence
  SARS-CoV-2__MT560667.1__non-structural protein 3 (NSP3) mRNA gc
aggagaaagcuuaccauggcccccaccaaggugaccuucggcgacgacacggucaucgaggugcagggguacaagagcgugaacaucaccuucgagcuggacgagcgcaucgacaagguccucaacgagaagugcuccgccuacaccguggagcugggcaccgaggugaacgaguucgcgugcgucguggccgacgccgugaucaagacgcugcagccggucagcgagcuccugaccccccuggggaucgaccucgacgagugguccauggccaccuacuaccuguucgacgagagcggcgaguucaagcuggccucccacauguacugcagcuucuacccccccgacgaggacgaggaggagggggacugcgaggaggaggaguucgagccguccacccaguacgaguacggcacggaggacgacuaccagggcaagccccucgaguucggggcgaccagcgccgcccugcagcccgaggaggagcaggaggaggacuggcuggacgacgacucccagcagaccgugggccagcaggacgggagcgaggacaaccagaccacgaccauccagaccaucguggagguccagccccagcucgagauggagcugaccccgguggugcagacgaucgaggucaacuccuucagcggcuaccugaagcucaccgacaacguguacaucaagaacgccgacaucguggaggaggcgaagaaggucaagcugaccgugguggucaacgccgccaacguguaccugaagcacgggggcggcguggccggggcccucaacaaggcgaccaacaacgccaugcaggucgaguccgacgacuacaucgccacgaacggcccccugaagguggggggcagcugcguccuguccggccacaaccucgccaagcacugccugcacgugguggggcccaacgucaacaagggcgaggacauccagcugcucaagagcgccuacgagaacuucaaccagcacgaggugcugcuggcgccccuccuguccgccgggaucuucggcgccgacccgauccacagccugcgggugugcgucgacaccgugcgcaccaacguguaccucgccgucuucgacaagaaccuguacgacaagcugguguccagcuuccucgagaugaagagcgagaagcagguggagcagaagaucgccgagauccccaaggaggaggucaagcccuucaucaccgaguccaagcccagcguggagcagcggaagcaggacgacaagaagaucaaggcgugcguggaggaggucacgaccacccuggaggagaccaaguuccugacggagaaccuccugcuguacaucgacaucaacgggaaccuccacccggacuccgccacccuggugagcgacaucgacaucaccuuccugaagaaggacgcccccuacaucgugggcgacgucgugcaggagggcgugcucaccgccgucgugauccccacgaagaaggccgggggcaccaccgagaugcuggcgaaggcccugcgcaaggugcccaccgacaacuacaucacgaccuacccggggcagggccucaacggguacaccgucgaggaggccaagaccgugcugaagaagugcaaguccgccuucuacauccugcccagcaucaucuccaacgagaagcaggagauccucggcaccgugagcuggaaccugcgggagaugcuggcgcacgccgaggagacgcgcaagcugaugcccgucugcguggagaccaaggccaucguguccaccauccagcggaaguacaagggcaucaagauccaggagggggucguggacuacggcgcccgcuucuacuucuacaccagcaagacgaccguggccucccucaucaacacccugaacgaccugaacgagacccucgucacgaugccccugggguacgugacccacggccugaaccucgaggaggcggcccgguacaugcgcagccugaaggugccggccaccgucuccgugagcucccccgacgccgugaccgccuacaacggguaccugacgagcuccagcaagacccccgaggagcacuucaucgagaccaucucccucgcgggcagcuacaaggacuggagcuacuccggccagagcacccagcuggggaucgaguuccugaagcggggcgacaaguccgucuacuacacgagcaaccccaccaccuuccaccucgacggggaggugaucaccuucgacaaccugaagacgcugcucucccugcgcgaggugcggaccaucaaggucuucaccaccguggacaacaucaaccugcacacgcagguggucgacaugagcaugaccuacggccagcaguucggcccgaccuaccucgacggggccgacgugaccaagaucaagccccacaacucccacgagggcaagacguucuacgugcugcccaacgacgacacccugcgcgucgaggccuucgaguacuaccacaccaccgacccgagcuuccucgggcgguacauguccgcccugaaccacacgaagaaguggaaguacccccaggugaacggccugaccagcaucaagugggccgacaacaacugcuaccucgcgaccgcccugcugacccuccagcagaucgagcugaaguucaacccccccgcccugcaggacgccuacuaccgcgcgcgggccggggaggccgccaacuucugcgcccucauccuggcguacugcaacaagacggugggcgagcugggcgacguccgcgagaccauguccuaccucuuccagcacgccaaccuggacagcugcaagcgggugcugaacgucgugugcaagaccugcgggcagcagcagaccacccucaagggcguggaggccgucauguacauggggacgcuguccuacgagcaguucaagaagggcgugcagaucccgugcaccugcgggaagcaggccaccaaguaccuggugcagcaggagagccccuucgucaugauguccgccccccccgcgcaguacgagcucaagcacggcaccuucacgugcgccagcgaguacaccggcaacuaccagugcgggcacuacaagcacaucaccuccaaggagacccuguacugcaucgacggcgcccugcucacgaagagcagcgaguacaaggggccgaucaccgacguguucuacaaggagaacuccuacaccaccacgaucaagcccgugaccuacaagcuggacggcgucgugugcaccgagaucgaccccaagcuggacaacuacuacaagaaggacaacagcuacuucaccgagcagcccaucgaccucgugccgaaccagcccuaccccaacgccuccuucgacaacuucaaguucgucugcgacaacaucaaguucgccgacgaccugaaccagcugacgggguacaagaagcccgcgagccgcgagcucaaggugaccuucuucccggaccugaacggcgacguggucgccaucgacuacaagcacuacacccccuccuucaagaagggcgccaagcugcuccacaagcccaucguguggcacgugaacaacgccaccaacaaggcgacguacaagcccaacaccuggugcauccggugccuguggagcaccaagccggucgagaccuccaacagcuucgacgugcugaaguccgaggacgcccaggggauggacaaccucgccugcgaggaccugaagcccgugagcgaggaggucguggagaaccccacgauccagaaggacgugcuggagugcaacgucaagaccaccgagguggugggcgacaucauccucaagcccgccaacaacucccugaagaucaccgaggaggucgggcacacggaccugauggccgcguacguggacaacagcucccucaccaucaagaagccgaacgagcugagccgcgugcugggccucaagacccuggccacccacgggcuggccgccgucaacuccgugcccugggacacgaucgccaacuacgcgaagcccuuccucaacaagguggucagcaccaccaccaacaucgugacgcgcugccugaaccgggugugcaccaacuacaugccguacuucuucacccugcuccugcagcugugcaccuucacccgcuccacgaacagccggaucaaggccuccaugcccaccaccaucgccaagaacaccgucaagagcgugggcaaguucugccucgaggccagcuucaacuaccugaagucccccaacuucagcaagcugaucaacaucaucaucugguuccuccugcuguccgugugccucggcagccugaucuacuccacggccgcgcuggggguccucaugagcaaccugggcaugcccuccuacugcaccggguaccgcgagggcuaccugaacagcaccaacgugaccaucgccacguacugcaccggcuccaucccgugcagcgugugccucuccgggcuggacagccuggacaccuaccccucccucgagaccauccagaucacgaucagcuccuucaagugggaccugaccgccuucggccuggucgccgagugguuccucgccuacauccuguucacccgguucuucuacgugcuggggcucgcggccaucaugcagcuguucuucagcuacuucgccgugcacuucaucuccaacagcuggcugauguggcugaucaucaaccucguccagauggcccccaucuccgcgauggugcgcauguacaucuucuucgccagcuucuacuacguguggaagagcuacguccacgugguggacggcugcaacuccagcaccugcaugaugugcuacaagcggaaccgcgccacgcgggucgagugcaccaccaucgugaacgggguccgccgguccuucuacguguacgccaacggcggcaagggguucugcaagcugcacaacuggaacugcgugaacugcgacaccuucugcgccggcagcacguucaucuccgacgaggucgcgcgcgaccugagccuccaguucaagcggcccaucaacccgaccgaccaguccagcuacaucguggacuccgugaccgucaagaacgggagcauccaccuguacuucgacaaggccggccagaagaccuacgagcgccacucccugagccacuucgugaaccucgacaaccugcgggccaacaacacgaaggggucccugcccaucaacgugaucgucuucgacggcaagagcaagugcgaggaguccagcgccaaguccgccagcguguacuacucccagcucaugugccagcccauccugcugcucgaccaggcgcuggugagcgacgucggcgacagcgccgagguggccgugaagauguucgacgccuacgucaacaccuucuccagcaccuucaacgugcccauggagaagcugaagacccucguggccacggcggaggccgagcuggccaagaacgucucccuggacaacgugcucagcaccuucaucuccgccgcgcgccagggguucguggacagcgacgucgagaccaaggacgugguggagugccugaagcugucccaccagagcgacaucgaggucaccggcgacuccugcaacaacuacaugcucacguacaacaagguggagaacaugaccccgcgggaccugggggccugcaucgacugcagcgcccgccacaucaacgcccagguggccaagucccacaacaucgcgcugaucuggaacgucaaggacuucaugagccucuccgagcagcugcggaagcagauccgcagcgccgccaagaagaacaaccugcccuucaagcucaccugcgccaccacgcgccagguggugaacgucgugaccaccaagaucgcccugaagggcgggugaggacuaguuauaagacugacuagcccgaugggccucccaacgggcccuccuccccuccuugcaccgagauuaauaaaaaaaaaaaaaaaaaaaaaaaaaaaaaaaaaaaaaaaaaaaaaaaaaaaaaaaaaaaaaaaaugcaucccccccccccccccccccccccccccccccaaaggcucuuuucagagccaccagaauu

SEQ ID NO: 21909 - RNA, 6058 nt, Artificial Sequence
  SARS-CoV-2__MT560679.1__non-structural protein 3 (NSP3) mRNA gc
aggagaaagcuuaccauggcccccaccaaggugaccuucggcgacgacacggucaucgaggugcagggguacaagagcgugaacaucaccuucgagcuggacgagcgcaucgacaagguccucaacgagaagugcuccgccuacaccguggagcugggcaccgaggugaacgaguucgcgugcgucguggccgacgccgugaucaagacgcugcagccggucagcgagcuccugaccccccuggggaucgaccucgacgagugguccauggccaccuacuaccuguucgacgagagcggcgaguucaagcuggccucccacauguacugcagcuucuacccccccgacgaggacgaggaggagggggacugcgaggaggaggaguucgagccguccacccaguacgaguacggcacggaggacgacuaccagggcaagccccucgaguucggggcgaccagcgccgcccugcagcccgaggaggagcaggaggaggacuggcuggacgacgacucccagcagaccgugggccagcaggacgggagcgaggacaaccagaccacgaccauccagaccaucguggagguccagccccagcucgagauggagcugaccccgguggugcagacgaucgaggucaacuccuucagcggcuaccugaagcucaccgacaacguguacaucaagaacgccgacaucguggaggaggcgaagaaggucaagcccaccgugguggucaacgccgccaacguguaccugaagcacgggggcggcguggccggggcccugaacaaggcgaccaacaacgccaugcaggucgaguccgacgacuacaucgccacgaacggcccccucaagguggggggcagcugcguccuguccggccacaaccuggccaagcacugccuccacgugguggggcccaacgucaacaagggcgaggacauccagcugcugaagagcgccuacgagaacuucaaccagcacgaggugcuccuggcgccgcugcucuccgccgggaucuucggcgccgaccccauccacagccugcgggugugcgucgacaccgugcgcaccaacguguaccuggccgucuucgacaagaaccucuacgacaagcugguguccagcuuccuggagaugaagagcgagaagcagguggagcagaagaucgccgagauccccaaggaggaggucaagcccuucaucaccgaguccaagccgagcguggagcagcggaagcaggacgacaagaagaucaaggcgugcguggaggaggucacgaccacccucgaggagaccaaguuccugacggagaaccugcuccuguacaucgacaucaacgggaaccugcaccccgacuccgccacccucgugagcgacaucgacaucaccuuccugaagaaggacgcccccuacaucgugggcgacgucgugcaggagggcgugcugaccgucguggugauccccacgaagaaggccgggggcaccaccgagaugcucgccaaggcgcugcgcaaggucccgaccgacaacuacaucacgaccuaccccgggcagggccugaacggguacaccguggaggaggccaagaccgugcucaagaagugcaaguccgccuucuacauccugcccagcaucaucuccaacgagaagcaggagauccugggcaccgucagcuggaaccuccgggagaugcuggcccacgcggaggagacgcgcaagcugaugcccgugugcguggagaccaaggccaucgucuccaccauccagcggaaguacaagggcaucaagauccaggagggggugguggacuacggcgcccgcuucuacuucuacaccagcaagacgaccgucgccucccugaucaacacccucaacgaccugaacgagacccuggugacgaugccgcucggguacgugacccacggccugaaccuggaggaggccgcgcgguacaugcgcagccucaagguccccgccaccguguccgugagcucccccgacgccgucaccgccuacaacggguaccugacgagcuccagcaagacccccgaggagcacuucaucgagaccaucucccuggccggcagcuacaaggacuggagcuacuccggccagagcacccagcucgggaucgaguuccugaagcggggcgacaaguccguguacuacacgagcaacccgaccaccuuccaccuggacggggaggugaucaccuucgacaaccucaagacgcugcugucccuccgcgagguccggaccaucaagguguucaccaccguggacaacaucaaccugcacacgcaggucguggacaugagcaugaccuacggccagcaguucggccccaccuaccuggacggggcggacgugaccaagaucaagccccacaacucccacgagggcaagacguucuacguccucccgaacgacgacacccugcgcguggaggccuucgaguacuaccacaccaccgaccccagcuuccuggggcgguacauguccgcccucaaccacacgaagaaguggaaguacccccaggugaacggccugaccagcaucaagugggccgacaacaacugcuaccuggccaccgcgcuccugacccugcagcagaucgagcucaaguucaaccccccggcccugcaggacgccuacuaccgcgcccgggcgggggaggccgccaacuucugcgcccugauccucgccuacugcaacaagacggucggcgagcugggcgacgugcgcgagaccauguccuaccuguuccagcacgcgaaccucgacagcugcaagcggguccugaacguggugugcaagaccugcgggcagcagcagaccacccugaagggcgucgaggccgugauguacauggggacgcucuccuacgagcaguucaagaagggcgugcagauccccugcaccugcgggaagcaggccaccaaguaccugguccagcaggagagccccuucgugaugauguccgcccccccggcccaguacgagcugaagcacggcaccuucacgugcgcgagcgaguacaccggcaacuaccagugcgggcacuacaagcacaucaccuccaaggagacccucuacugcaucgacggcgcccugcugaucaagagcagcgaguacaaggggcccaucacggacguguucuacaaggagaacuccuacaccaccaccaucaagcccgucacguacaagcucgacggcguggugugcaccgagaucgaccccaagcuggacaacuacuacaagaaggacaacagcuacuucaccgagcagccgaucgaccugguccccaaccagcccuaccccaacgccuccuucgacaacuucaaguucgugugcgacaacaucaaguucgccgacgaccucaaccagcugaccggguacaagaagccggccagccgcgagcugaaggugacguucuuccccgaccucaacggcgacgucguggcgaucgacuacaagcacuacacccccuccuucaagaagggcgccaagcugcugcacaagcccaucguguggcacgucaacaacgccaccaacaaggccaccuacaagccgaacacguggugcauccggugccucuggagcaccaagcccguggagaccuccaacagcuucgacgugcugaaguccgaggacgcgcaggggauggacaaccuggccugcgaggaccucaagcccgucagcgaggaggugguggagaaccccaccauccagaaggacguccuggagugcaacgugaagacgaccgagguggucggcgacaucauccugaagccggccaacaacucccucaagaucaccgaggagguggggcacaccgaccugauggccgccuacguggacaacagcucccugacgaucaagaagcccaacgagcucagccgcguccugggccugaagacccucgcgacccacgggcuggccgccgugaacuccgugcccugggacaccaucgccaacuacgccaagccguuccugaacaaggucgugagcacgaccaccaacaucgugacccgcugccucaaccgggucugcacgaacuacaugcccuacuucuucacccugcugcuccagcugugcaccuucacccgcuccaccaacagccggaucaaggcguccaugcccacgaccaucgccaagaacaccgugaagagcgugggcaaguucugccuggaggccagcuucaacuaccucaagucccccaacuucagcaagcugaucaacaucaucaucugguuccugcuccuguccgucugccugggcagccucaucuacuccaccgccgcccugggggugcugaugagcaaccucggcaugccguccuacugcacgggguaccgcgagggcuaccugaacagcaccaacgugaccaucgcgaccuacugcacgggcuccauccccugcagcgucugccuguccgggcucgacagccuggacaccuaccccucccuggagaccauccagaucaccaucagcuccuucaagugggaccucacggccuucggccugguggccgagugguuccuggccuacauccucuucacccgguucuucuacgugcuggggcuggccgcgaucaugcagcucuucuucagcuacuucgccguccacuucaucuccaacagcuggcugauguggcugaucaucaaccuggugcagauggcccccaucuccgccauggugcgcauguacaucuucuucgcgagcuucuacuacgucuggaagagcuacgugcacguggucgacggcugcaacuccagcaccugcaugaugugcuacaagcggaaccgcgccacccggguggagugcacgaccaucgucaacggggugcgccgguccuucuacguguacgccaacggcggcaagggguucugcaagcuccacaacuggaacugcgucaacugcgacaccuucugcgccggcagcaccuucaucuccgacgagguggcccgcgaccugagccugcaguucaagcggccgaucaaccccacggaccaguccagcuacaucguggacuccgucaccgugaagaacgggagcauccaccucuacuucgacaaggcgggccagaagaccuacgagcgccacucccugagccacuucgugaaccuggacaaccuccgggccaacaacaccaaggggucccugcccaucaacgucaucguguucgacggcaagagcaagugcgaggaguccagcgccaaguccgccagcguguacuacucccagcugaugugccagcccauccuccugcuggaccaggcccucgucagcgacgugggcgacagcgcggagguggccgucaagauguucgacgccuacgugaacacguucuccagcaccuucaacgugccgauggagaagcugaagacccuggucgccaccgccgaggcggagcucgccaagaacgugucccuggacaacgugcugagcacguucaucuccgccgcccgccagggguucgucgacagcgacguggagaccaaggacguggucgagugccucaagcugucccaccagagcgacaucgaggugaccggcgacuccugcaacaacuacaugcugaccuacaacaagguggagaacaugacgccccgggaccucggggcgugcaucgacugcagcgcccgccacaucaacgcccaggucgccaagucccacaacaucgcccugaucuggaacgugaaggacuucaugagccuguccgagcagcuccggaagcagauccgcagcgcggccaagaagaacaaccugcccuucaagcugaccugcgccaccacccgccagguggucaacguggugacgaccaagaucgcccucaagggcgggugaggacuaguuauaagacugacuagcccgaugggccucccaacgggcccuccuccccuccuugcaccgagauuaauaaaaaaaaaaaaaaaaaaaaaaaaaaaaaaaaaaaaaaaaaaaaaaaaaaaaaaaaaaaaaaaaugcaucccccccccccccccccccccccccccccccaaaggcucuuuucagagccaccagaauu

SEQ ID NO: 21910 - RNA, 6058 nt, Artificial Sequence
  SARS-CoV-2__MT558672.1__non-structural protein 3 (NSP3) mRNA gc
aggagaaagcuuaccauggcccccaccaaggugaccuucggcgacgacacggucaucgaggugcagggguacaagagcgugaacaucaccuucgagcuggacgagcgcaucgacaagguccucaacgagaagugcuccgccuacaccguggagcugggcaccgaggugaacgaguucgcgugcgucguggccgacgccgugaucaagacgcugcagccggucagcgagcuccugaccccccuggggaucgaccucgacgagugguccauggccaccuacuaccuguucgacgagagcggcgaguucaagcuggccucccacauguacugcagcuucuacccccccgacgaggacgaggaggagggggacugcgaggaggaggaguucgagccguccacccaguacgaguacggcacggaggacgacuaccagggcaagccccucgaguucggggcgaccagcgccgcccugcagcccgaggaggagcaggaggaggacuggcuggacgacgacucccagcagaccgugggccagcaggacgggagcgaggacaaccagaccacgaccauccagaccaucguggagguccagccccagcucgagauggagcugaccccgguggugcagacgaucgaggucaacuccuucagcggcuaccugaagcucaccgacaacguguacaucaagaacgccgacaucguggaggaggcgaagaaggucaagcccaccgugguggucaacgccgccaacguguaccugaagcacgggggcggcguggccggggcccugaacaaggcgaccaacaacgccaugcaggucgaguccgacgacuacaucgccacgaacggcccccucaagguggggggcagcugcguccuguccggccacaaccuggccaagcacugccuccacgugguggggcccaacgucaacaagggcgaggacauccagcugcugaagagcgccuacgagaacuucaaccagcacgaggugcuccuggcgccgcugcucuccgccgggaucuucggcgccgaccccauccacagccugcgggugugcgucgacaccgugcgcaccaacguguaccuggccgucuucgacaagaaccucuacgacaagcugguguccagcuuccuggagaugaagagcgagaagcagguggagcagaagaucgccgagauccccaaggaggaggucaagcccuucaucaccgaguccaagccgagcguggagcagcggaagcaggacgacaagaagaucaaggcgugcguggaggaggucacgaccacccucgaggagaccaaguuccugacggagaaccugcuccuguacaucgacaucaacgggaaccugcaccccgacuccgccacccucgugagcgacaucgacaucaccuuccugaagaaggacgcccccuacaucgugggcgacgucgugcaggagggcgugcugaccgccgucgugauccccacgaagaaggccgggggcaccaccgagaugcucgcgaaggcccugcgcaaggugccgaccgacaacuacaucacgaccuaccccgggcagggccugaacggguacaccgucgaggaggccaagaccgugcucaagaagugcaaguccgccuucuacauccugcccagcaucaucuccaacgagaagcaggagauccugggcaccgugagcuggaaccuccgggagaugcuggcgcacgccgaggagacgcgcaagcugaugcccgucugcguggagaccaaggccaucguguccaccauccagcggaaguacaagggcaucaagauccaggagggggucguggacuacggcgcccgcuucuacuucuacaccagcaagacgaccguggccucccugaucaacacccucaacgaccugaacgagacccuggucacgaugccgcucggguacgugacccacggccugaaccuggaggaggcggcccgguacaugcgcagccucaaggugcccgccaccgucuccgugagcucccccgacgccgugaccgccuacaacggguaccugacgagcuccagcaagacccccgaggagcacuucaucgagaccaucucccuggcgggcagcuacaaggacuggagcuacuccggccagagcacccagcucgggaucgaguuccugaagcggggcgacaaguccgucuacuacacgagcaacccgaccaccuuccaccuggacggggaggugaucaccuucgacaaccucaagacgcugcugucccuccgcgaggugcggaccaucaaggucuucaccaccguggacaacaucaaccugcacacgcagguggucgacaugagcaugaccuacggccagcaguucggccccaccuaccuggacggggccgacgugaccaagaucaagccccacaacucccacgagggcaagacguucuacgugcucccgaacgacgacacccugcgcgucgaggccuucgaguacuaccacaccaccgaccccagcuuccuggggcgguacauguccgcccucaaccacacgaagaaguggaaguacccccaggugaacggccugaccagcaucaagugggccgacaacaacugcuaccuggcgaccgcccuccugacccugcagcagaucgagcucaaguucaaccccccggcccugcaggacgccuacuaccgcgcgcgggccggggaggccgccaacuucugcgcccugauccucgcguacugcaacaagacggugggcgagcugggcgacguccgcgagaccauguccuaccuguuccagcacgccaaccucgacagcugcaagcgggugcugaacgucgugugcaagaccugcgggcagcagcagaccacccugaagggcguggaggccgucauguacauggggacgcucuccuacgagcaguucaagaagggcgugcagauccccugcaccugcgggaagcaggccaccaaguaccuggugcagcaggagagccccuucgucaugauguccgcccccccggcgcaguacgagcugaagcacggcaccuucacgugcgccagcgaguacaccggcaacuaccagugcgggcacuacaagcacaucaccuccaaggagacccucuacugcaucgacggcgcccugcugacgaagagcagcgaguacaaggggcccaucaccgacguguucuacaaggagaacuccuacaccaccacgaucaagcccgugaccuacaagcucgacggcgucgugugcaccgagaucgaccccaagcuggacaacuacuacaagaaggacaacagcuacuucaccgagcagccgaucgaccuggugcccaaccagcccuaccccaacgccuccuucgacaacuucaaguucgucugcgacaacaucaaguucgccgacgaccucaaccagcugacgggguacaagaagccggcgagccgcgagcugaaggugaccuucuuccccgaccucaacggcgacguggucgccaucgacuacaagcacuacacccccuccuucaagaagggcgccaagcugcugcacaagcccaucguguggcacgugaacaacgccaccaacaaggcgacguacaagccgaacaccuggugcauccggugccucuggagcaccaagcccgucgagaccuccaacagcuucgacgugcugaaguccgaggacgcccaggggauggacaaccuggccugcgaggaccucaagcccgugagcgaggaggucguggagaaccccacgauccagaaggacgugcuggagugcaacgucaagaccaccgagguggugggcgacaucauccugaagccggccaacaacucccucaagaucaccgaggaggucgggcacacggaccugauggccgcguacguggacaacagcucccugaccaucaagaagcccaacgagcucagccgcgugcugggccugaagacccucgccacccacgggcuggccgccgucaacuccgugcccugggacacgaucgccaacuacgcgaagccguuccugaacaagguggucagcaccaccaccaacaucgugacgcgcugccucaaccgggugugcaccaacuacaugcccuacuucuucacccugcugcuccagcugugcaccuucacccgcuccacgaacagccggaucaaggccuccaugcccaccaccaucgccaagaacaccgucaagagcgugggcaaguucugccuggaggccagcuucaacuaccucaagucccccaacuucagcaagcugaucaacaucaucaucugguuccugcuccuguccgugugccugggcagccucaucuacuccacggccgcgcuggggguccugaugagcaaccucggcaugccguccuacugcaccggguaccgcgagggcuaccugaacagcaccaacgugaccaucgccacguacugcaccggcuccauccccugcagcgugugccuguccgggcucgacagccuggacaccuaccccucccuggagaccauccagaucacgaucagcuccuucaagugggaccucaccgccuucggccuggucgccgagugguuccuggccuacauccucuucacccgguucuucuacgugcuggggcuggcggccaucaugcagcucuucuucagcuacuucgccgugcacuucaucuccaacagcuggcugauguggcugaucaucaaccugguccagauggcccccaucuccgcgauggugcgcauguacaucuucuucgccagcuucuacuacguguggaagagcuacguccacgugguggacggcugcaacuccagcaccugcaugaugugcuacaagcggaaccgcgccacgcgggucgagugcaccaccaucgugaacgggguccgccgguccuucuacguguacgccaacggcggcaagggguucugcaagcuccacaacuggaacugcgugaacugcgacaccuucugcgccggcagcacguucaucuccgacgaggucgcgcgcgaccugagccugcaguucaagcggccgaucaaccccaccgaccaguccagcuacaucguggacuccgugaccgucaagaacgggagcauccaccucuacuucgacaaggccggccagaagaccuacgagcgccacucccugagccacuucgugaaccuggacaaccuccgggccaacaacacgaaggggucccugcccaucaacgugaucgucuucgacggcaagagcaagugcgaggaguccagcgccaaguccgccagcguguacuacucccagcugaugugccagcccauccuccugcuggaccaggcgcucgugagcgacgucggcgacagcgccgagguggccgugaagauguucgacgccuacgucaacaccuucuccagcaccuucaacgugccgauggagaagcugaagacccugguggccacggcggaggccgagcucgccaagaacgucucccuggacaacgugcugagcaccuucaucuccgccgcgcgccagggguucguggacagcgacgucgagaccaaggacgugguggagugccucaagcuguccuaccagagcgacaucgaggucaccggcgacuccugcaacaacuacaugcugacguacaacaagguggagaacaugaccccccgggaccucggggccugcaucgacugcagcgcccgccacaucaacgcccagguggccaagucccacaacaucgcgcugaucuggaacgucaaggacuucaugagccuguccgagcagcuccggaagcagauccgcagcgccgccaagaagaacaaccugcccuucaagcugaccugcgccaccacgcgccagguggugaacgucgugaccaccaagaucgcccucaagggcgggugaggacuaguuauaagacugacuagcccgaugggccucccaacgggcccuccuccccuccuugcaccgagauuaauaaaaaaaaaaaaaaaaaaaaaaaaaaaaaaaaaaaaaaaaaaaaaaaaaaaaaaaaaaaaaaaaugcaucccccccccccccccccccccccccccccccaaaggcucuuuucagagccaccagaauu

SEQ ID NO: 21911 - RNA, 6058 nt, Artificial Sequence
  SARS-CoV-2__MT558681.1__non-structural protein 3 (NSP3) mRNA gc
aggagaaagcuuaccauggcccccaccaaggugaccuucggcgacgacacggucaucgaggugcagggguacaagagcgugaacaucaccuucgagcuggacgagcgcaucgacaagguccucaacgagaagugcuccgccuacaccguggagcugggcaccgaggugaacgaguucgcgugcgucguggccgacgccgugaucaagacgcugcagccggucagcgagcuccugaccccccuggggaucgaccucgacgagugguccauggccaccuacuaccuguucgacgagagcggcgaguucaagcuggccucccacauguacugcagcuucuacccccccgacgaggacgaggaggagggggacugcgaggaggaggaguucgagccguccacccaguacgaguacggcacggaggacgacuaccagggcaagccccucgaguucggggcgaccagcgccgcccugcagcccgaggaggagcaggaggaggacuggcuggacgacgacucccagcagaccgugggccagcaggacgggagcgaggacaaccagaccacgaccauccagaccaucguggagguccagccccagcucgagauggagcugaccccgguggugcagacgaucgaggucaacuccuucagcggcuaccugaagcucaccgacaacguguacaucaagaacgccgacaucguggaggaggcgaagaaggucaagcccaccgugguggucaacgccgccaacguguaccugaagcacgggggcggcguggccggggcccugaacaaggcgaccaacaacgccaugcaggucgaguccgacgacuacaucgccacgaacggcccccucaagguggggggcagcugcguccuguccggccacaaccuggccaagcacugccuccacgugguggggcccaacgucaacaagggcgaggacauccagcugcugaagagcgccuacgagaacuucaaccagcacgaggugcuccuggcgccgcugcucuccgccgggaucuucggcgccgaccccauccacagccugcgggugugcgucgacaccgugcgcaccaacguguaccuggccgucuucgacaagaaccucuacgacaagcugguguccagcuuccuggagaugaagagcgagaagcagguggagcagaagaucgccgagauccccaaggaggaggucaagcccuucaucaccgaguccaagccgagcguggagcagcggaagcaggacgacaagaagaucaaggcgugcguggaggaggucacgaccacccucgaggagaccaaguuccugacggagaaccugcuccuguacaucgacaucaacgggaaccugcaccccgacuccgccacccucgugagcgacaucgacaucaccuuccugaagaaggacgcccccuacaucgugggcgacgucgugcaggagggcgugcugaccgccgucgugauccccacgaagaaggccgggggcaccaccgagaugcucgcgaaggcccugcgcaaggugccgaccgacaacuacaucacgaccuaccccgggcagggccugaacggguacaccgucgaggaggccaagaccgugcucaagaagugcaaguccgccuucuacauccugcccagcaucaucuccaacgagaagcaggagauccugggcaccgugagcuggaaccuccgggagaugcuggcgcacgccgaggagacgcgcaagcugaugcccgucugcguggagaccaaggccaucguguccaccauccagcggaaguacaagggcaucaagauccaggagggggucguggacuacggcgcccgcuucuacuucuacaccagcaagacgaccguggccucccugaucaacacccucaacgaccugaacgagacccuggucacgaugccgcucggguacgugacccacggccugaaccuggaggaggcggcccgguacaugcgcagccucaaggugcccgccaccgucuccgugagcucccccgacgccgugaccgccuacaacggguaccugacgagcuccagcaagacccccgaggagcacuucaucgagaccaucucccuggcgggcagcuacaaggacuggagcuacuccggccagagcacccagcucgggaucgaguuccugaagcggggcgacaaguccgucuacuacacgagcaacccgaccaccuuccaccuggacggggaggugaucaccuucgacaaccucaagacgcugcugucccuccgcgaggugcggaccaucaaggucuucaccaccguggacaacaucaaccugcacacgcagguggucgacaugagcaugaccuacggccagcaguucggccccaccuaccuggacggggccgacgugaccaagaucaagccccacaacucccacgagggcaagacguucuacgugcucccgaacgacgacacccugcgcgucgaggccuucgaguacuaccacaccaccgaccccagcuuccuggggcgguacauguccgcccucaaccacacgaagaaguggaaguacccccaggugaacggccugaccagcaucaagugggccgacaacaacugcuaccuggcgaccgcccuccugacccugcagcagaucgagcucaaguucaaccccccggcccugcaggacgccuacuaccgcgcgcgggccggggaggccgccaacuucugcgcccugauccucgcguacugcaacaagacggugggcgagcugggcgacguccgcgagaccauguccuaccuguuccagcacgccaaccucgacagcugcaagcgggugcugaacgucgugugcaagaccugcgggcagcagcagaccacccugaagggcguggaggccgucauguacauggggacgcucuccuacgagcaguucaagaagggcgugcagauccccugcaccugcgggaagcaggccaccaaguaccuggugcagcaggagagccccuucgucaugauguccgcccccccggcgcaguacgagcugaagcacggcaccuucacgugcgccagcgaguacaccggcaacuaccagugcgggcacuacaagcacaucaccuccaaggagacccucuacugcaucgacggcgcccugcugacgaagagcagcgaguacaaggggcccaucaccgacguguucuacaaggagaacuccuacaccaccacgaucaagcccgugaccuacaagcucgacggcgucgugugcaccgagaucgaccccaagcuggacaacuacuacaagaaggacaacagcuacuucaccgagcagccgaucgaccuggugcccaaccagcccuaccccaacgccuccuucgacaacuucaaguucgucugcgacaacaucaaguucgccgacgaccucaaccagcugacgggguacaagaagccggcgagccgcgagcugaaggugaccuucuuccccgaccucaacggcgacguggucgccaucgacuacaagcacuacacccccuccuucaagaagggcgccaagcugcugcacaagcccaucguguggcacgugaacaacgccaccaacaaggcgacguacaagccgaacaccuggugcauccggugccucuggagcaccaagcccgucgagaccuccaacagcuucgacgugcugaaguccgaggacgcccaggggauggacaaccuggccugcgaggaccucaagcccgugagcgaggaggucguggagaaccccacgauccagaaggacgugcuggagugcaacgucaagaccaccgagguggugggcgacaucauccugaagccggccaacaacucccucaagaucaccgaggaggucgggcacacggaccugauggccgcguacguggacaacagcucccugaccaucaagaagcccaacgagcucagccgcgugcugggccugaagacccucgccaccuacgggcuggccgccgucaacuccgugcccugggacacgaucgccaacuacgcgaagccguuccugaacaagguggucagcaccaccaccaacaucgugacgcgcugccucaaccgggugugcaccaacuacaugcccuacuucuucacccugcugcuccagcugugcaccuucacccgcuccacgaacagccggaucaaggccuccaugcccaccaccaucgccaagaacaccgucaagagcgugggcaaguucugccuggaggccagcuucaacuaccucaagucccccaacuucagcaagcugaucaacaucaucaucugguuccugcuccuguccgugugccugggcagccucaucuacuccacggccgcgcuggggguccugaugagcaaccucggcaugccguccuacugcaccggguaccgcgagggcuaccugaacagcaccaacgugaccaucgccacguacugcaccggcuccauccccugcagcgugugccuguccgggcucgacagccuggacaccuaccccucccuggagaccauccagaucacgaucagcuccuucaagugggaccucaccgccuucggccuggucgccgagugguuccuggccuacauccucuucacccgguucuucuacgugcuggggcuggcggccaucaugcagcucuucuucagcuacuucgccgugcacuucaucuccaacagcuggcugauguggcugaucaucaaccugguccagauggcccccaucuccgcgauggugcgcauguacaucuucuucgccagcuucuacuacguguggaagagcuacguccacgugguggacggcugcaacuccagcaccugcaugaugugcuacaagcggaaccgcgccacgcgggucgagugcaccaccaucgugaacgggguccgccgguccuucuacguguacgccaacggcggcaagggguucugcaagcuccacaacuggaacugcgugaacugcgacaccuucugcgccggcagcacguucaucuccgacgaggucgcgcgcgaccugagccugcaguucaagcggccgaucaaccccaccgaccaguccagcuacaucguggacuccgugaccgucaagaacgggagcauccaccucuacuucgacaaggccggccagaagaccuacgagcgccacucccugagccacuucgugaaccuggacaaccuccgggccaacaacacgaaggggucccugcccaucaacgugaucgucuucgacggcaagagcaagugcgaggaguccagcgccaaguccgccagcguguacuacucccagcugaugugccagcccauccuccugcuggaccaggcgcucgugagcgacgucggcgacagcgccgagguggccgugaagauguucgacgccuacgucaacaccuucuccagcaccuucaacgugccgauggagaagcugaagacccugguggccacggcggaggccgagcucgccaagaacgucucccuggacaacgugcugagcaccuucaucuccgccgcgcgccagggguucguggacagcgacgucgagaccaaggacgugguggagugccucaagcugucccaccagagcgacaucgaggucaccggcgacuccugcaacaacuacaugcugacguacaacaagguggagaacaugaccccccgggaccucggggccugcaucgacugcagcgcccgccacaucaacgcccagguggccaagucccacaacaucgcgcugaucuggaacgucaaggacuucaugagccuguccgagcagcuccggaagcagauccgcagcgccgccaagaagaacaaccugcccuucaagcugaccugcgccaccacgcgccagguggugaacgucgugaccaccaagaucgcccucaagggcgggugaggacuaguuauaagacugacuagcccgaugggccucccaacgggcccuccuccccuccuugcaccgagauuaauaaaaaaaaaaaaaaaaaaaaaaaaaaaaaaaaaaaaaaaaaaaaaaaaaaaaaaaaaaaaaaaaugcaucccccccccccccccccccccccccccccccaaaggcucuuuucagagccaccagaauu

SEQ ID NO: 21912 - RNA, 6058 nt, Artificial Sequence
  SARS-CoV-2__MT539166.1__non-structural protein 3 (NSP3) mRNA gc
aggagaaagcuuaccauggcccccaccaaggugaccuucggcgacgacacggucaucgaggugcagggguacaagagcgugaacaucaccuucgagcuggacgagcgcaucgacaagguccucaacgagaagugcuccgccuacaccguggagcugggcaccgaggugaacgaguucgcgugcgucguggccgacgccgugaucaagacgcugcagccggucagcgagcuccugaccccccuggggaucgaccucgacgagugguccauggccaccuacuaccuguucgacgagagcggcgaguucaagcuggccucccacauguacugcagcuucuacccccccgacgaggacgaggaggagggggacugcgaggaggaggaguucgagccguccacccaguacgaguacggcacggaggacgacuaccagggcaagccccucgaguucggggcgaccagcgccgcccugcagcccgaggaggagcaggaggaggacuggcuggacgacgacucccagcagaccgugggccagcaggacgggagcgaggacaaccagaccacgaccauccagaccaucguggagguccagccccagcucgagauggagcugaccccgguggugcagacgaucgaggucaacuccuucagcggcuaccugaagcucaccgggaacguguacaucaagaacgccgacaucguggaggaggcgaagaaggucaagcccaccgugguggucaacgccgccaacguguaccugaagcacggcggcgggguggccggcgcccugaacaaggcgaccaacaacgccaugcaggucgaguccgacgacuacaucgccacgaacgggccccucaaggugggcggcagcugcguccuguccgggcacaaccuggccaagcacugccuccacguggugggccccaacgucaacaagggggaggacauccagcugcugaagagcgccuacgagaacuucaaccagcacgaggugcuccuggcgccgcugcucuccgccggcaucuucggggccgaccccauccacagccugcgggugugcgucgacaccgugcgcaccaacguguaccuggccgucuucgacaagaaccucuacgacaagcugguguccagcuuccuggagaugaagagcgagaagcagguggagcagaagaucgccgagauccccaaggaggaggucaagcccuucaucaccgaguccaagccgagcguggagcagcggaagcaggacgacaagaagaucaaggcgugcguggaggaggucacgaccacccucgaggagaccaaguuccugacggagaaccugcuccuguacaucgacaucaacggcaaccugcaccccgacuccgccacccucgugagcgacaucgacaucaccuuccugaagaaggacgcccccuacaucgugggcgacgucgugcaggagggggugcugaccgccgucgugauccccacgaagaaggccggcgggaccaccgagaugcucgcgaaggcccugcgcaaggugccgaccgacaacuacaucacgaccuaccccggccaggggcugaacggcuacaccgucgaggaggccaagaccgugcucaagaagugcaaguccgccuucuacauccugcccagcaucaucuccaacgagaagcaggagauccugggcaccgugagcuggaaccuccgggagaugcuggcgcacgccgaggagacgcgcaagcugaugcccgucugcguggagaccaaggccaucguguccaccauccagcggaaguacaaggggaucaagauccaggagggcgucguggacuacggggcccgcuucuacuucuacaccagcaagacgaccguggccucccugaucaacacccucaacgaccugaacgagacccuggucacgaugccgcucggcuacgugacccacgggcugaaccuggaggaggcggcccgguacaugcgcagccucaaggugcccgccaccgucuccgugagcucccccgacgccgugaccgccuacaacggcuaccugacgagcuccagcaagacccccgaggagcacuucaucgagaccaucucccuggcgggcagcuacaaggacuggagcuacuccgggcagagcacccagcucggcaucgaguuccugaagcggggggacaaguccgucuacuacacgagcaacccgaccaccuuccaccuggacggcgaggugaucaccuucgacaaccucaagacgcugcugucccuccgcgaggugcggaccaucaaggucuucaccaccguggacaacaucaaccugcacacgcagguggucgacaugagcaugaccuacggccagcaguucgggcccaccuaccuggacggcgccgacgugaccaagaucaagccccacaacucccacgaggggaagacguucuacgugcucccgaacgacgacacccugcgcgucgaggccuucgaguacuaccacaccaccgaccccagcuuccugggccgguacauguccgcccucaaccacacgaagaaguggaaguacccccaggugaacgggcugaccagcaucaagugggccgacaacaacugcuaccuggcgaccgcccuccugacccugcagcagaucgagcucaaguucaaccccccggcccugcaggacgccuacuaccgcgcgcgggccggcgaggccgccaacuucugcgcccugauccucgcguacugcaacaagacggugggcgagcugggggacguccgcgagaccauguccuaccuguuccagcacgccaaccucgacagcugcaagcgggugcugaacgucgugugcaagaccugcggccagcagcagaccacccugaaggggguggaggccgucauguacaugggcacgcucuccuacgagcaguucaagaagggggugcagauccccugcaccugcggcaagcaggccaccaaguaccuggugcagcaggagagccccuucgucaugauguccgcccccccggcgcaguacgagcugaagcacggcaccuucacgugcgccagcgaguacaccgggaacuaccagugcggccacuacaagcacaucaccuccaaggagacccucuacugcaucgacggggcccugcugacgaagagcagcgaguacaagggccccaucaccgacguguucuacaaggagaacuccuacaccaccacgaucaagcccgugaccuacaagcucgacggggucgugugcaccgagaucgaccccaagcuggacaacuacuacaagaaggacaacagcuacuucaccgagcagccgaucgaccuggugcccaaccagcccuaccccaacgccuccuucgacaacuucaaguucgucugcgacaacaucaaguucgccgacgaccucaaccagcugacgggcuacaagaagccggcgagccgcgagcugaaggugaccuucuuccccgaccucaacggcgacguggucgccaucgacuacaagcacuacacccccuccuucaagaagggggccaagcugcugcacaagcccaucguguggcacgugaacaacgccaccaacaaggcgacguacaagccgaacaccuggugcauccggugccucuggagcaccaagcccgucgagaccuccaacagcuucgacgugcugaaguccgaggacgcccagggcauggacaaccuggccugcgaggaccucaagcccgugagcgaggaggucguggagaaccccacgauccagaaggacgugcuggagugcaacgucaagaccaccgagguggugggggacaucauccugaagccggccaacaacucccucaagaucaccgaggaggucggccacacggaccugauggccgcguacguggacaacagcucccugaccaucaagaagcccaacgagcucagccgcgugcuggggcugaagacccucgccacccacggccuggccgccgucaacuccgugcccugggacacgaucgccaacuacgcgaagccguuccugaacaagguggucagcaccaccaccaacaucgugacgcgcugccucaaccgggugugcaccaacuacaugcccuacuucuucacccugcugcuccagcugugcaccuucacccgcuccacgaacagccggaucaaggccuccaugcccaccaccaucgccaagaacaccgucaagagcgugggcaaguucugccuggaggccagcuucaacuaccucaagucccccaacuucagcaagcugaucaacaucaucaucugguuccugcuccuguccgugugccuggggagccucaucuacuccacggccgcgcugggcguccugaugagcaaccucgggaugccguccuacugcaccggcuaccgcgagggcuaccugaacagcaccaacgugaccaucgccacguacugcaccggguccauccccugcagcgugugccuguccggccucgacagccuggacaccuaccccucccuggagaccauccagaucacgaucagcuccuucaagugggaccucaccgccuucgggcuggucgccgagugguuccuggccuacauccucuucacccgguucuucuacgugcugggccuggcggccaucaugcagcucuucuucagcuacuucgccgugcacuucaucuccaacagcuggcugauguggcugaucaucaaccugguccagauggcccccaucuccgcgauggugcgcauguacaucuucuucgccagcuucuacuacguguggaagagcuacguccacgugguggacgggugcaacuccagcaccugcaugaugugcuacaagcggaaccgcgccacgcgggucgagugcaccaccaucgugaacggcguccgccgguccuucuacguguacgccaacggcgggaagggcuucugcaagcuccacaacuggaacugcgugaacugcgacaccuucugcgccgggagcacguucaucuccgacgaggucgcgcgcgaccugagccugcaguucaagcggccgaucaaccccaccgaccaguccagcuacaucguggacuccgugaccgucaagaacggcagcauccaccucuacuucgacaaggccgggcagaagaccuacgagcgccacucccugagccacuucgugaaccuggacaaccuccgggccaacaacacgaagggcucccugcccaucaacgugaucgucuucgacggcaagagcaagugcgaggaguccagcgccaaguccgccagcguguacuacucccagcugaugugccagcccauccuccugcuggaccaggcgcucgugagcgacgucggggacagcgccgagguggccgugaagauguucgacgccuacgucaacaccuucuccagcaccuucaacgugccgauggagaagcugaagacccugguggccacggcggaggccgagcucgccaagaacgucucccuggacaacgugcugagcaccuucaucuccgccgcgcgccagggcuucguggacagcgacgucgagaccaaggacgugguggagugccucaagcugucccaccagagcgacaucgaggucaccggggacuccugcaacaacuacaugcugacguacaacaagguggagaacaugaccccccgggaccucggcgccugcaucgacugcagcgcccgccacaucaacgcccagguggccaagucccacaacaucgcgcugaucuggaacgucaaggacuucaugagccuguccgagcagcuccggaagcagauccgcagcgccgccaagaagaacaaccugcccuucaagcugaccugcgccaccacgcgccagguggugaacgucgugaccaccaagaucgcccucaaggggggcugaggacuaguuauaagacugacuagcccgaugggccucccaacgggcccuccuccccuccuugcaccgagauuaauaaaaaaaaaaaaaaaaaaaaaaaaaaaaaaaaaaaaaaaaaaaaaaaaaaaaaaaaaaaaaaaaugcaucccccccccccccccccccccccccccccccaaaggcucuuuucagagccaccagaauu

SEQ ID NO: 21913 - RNA, 6058 nt, Artificial Sequence
  SARS-CoV-2__MT407653.1__non-structural protein 3 (NSP3) mRNA gc
aggagaaagcuuaccauggcccccaccaaggugaccuucggcgacgacacggucaucgaggugcagggguacaagagcgugaacaucaccuucgagcuggacgagcgcaucgacaagguccucaacgagaagugcuccgccuacaccguggagcugggcaccgaggugaacgaguucgcgugcgucguggccgacgccgugaucaagacgcugcagccggucagcgagcuccugaccccccuggggaucgaccucgacgagugguccauggccaccuacuaccuguucgacgagagcggcgaguucaagcuggccucccacauguacugcagcuucuacccccccgacgaggacgaggaggagggggacugcgaggaggaggaguucgagccguccacccaguacgaguacggcacggaggacgacuaccagggcaagccccucgaguucggggcgaccagcgccgcccugcagcccgaggaggagcaggaggaggacuggcuggacgacgacucccagcagaccgugggccagcaggacgggagcgaggacaaccagaccacgaccauccagaccaucguggagguccagccccagcucgagauggagcugaccccgguggugcagacgaucgaggucaacuccuucagcggcuaccugaagcucaccgacaacgugcacaucaagaacgccgacaucguggaggaggcgaagaaggucaagcccaccgugguggucaacgccgccaacguguaccugaagcacgggggcggcguggccggggcccugaacaaggcgaccaacaacgccaugcaggucgaguccgacgacuacaucgccacgaacggcccccucaagguggggggcagcugcguccuguccggccacaaccuggccaagcacugccuccacgugguggggcccaacgucaacaagggcgaggacauccagcugcugaagagcgccuacgagaacuucaaccagcacgaggugcuccuggcgccgcugcucuccgccgggaucuucggcgccgaccccauccacagccugcgggugugcgucgacaccgugcgcaccaacguguaccuggccgucuucgacaagaaccucuacgacaagcugguguccagcuuccuggagaugaagagcgagaagcagguggagcagaagaucgccgagauccccaaggaggaggucaagcccuucaucaccgaguccaagccgagcguggagcagcggaagcaggacgacaagaagaucaaggcgugcguggaggaggucacgaccacccucgaggagaccaaguuccugacggagaaccugcuccuguacaucgacaucaacgggaaccugcaccccgacuccgccacccucgugagcgacaucgacaucaccuuccugaagaaggacgcccccuacaucgugggcgacgucgugcaggagggcgugcugaccgccgucgugauccccacgaagaaggccgggggcaccaccgagaugcucgcgaaggcccugcgcaaggugccgaccgacaacuacaucacgaccuaccccgggcagggccugaacggguacaccgucgaggaggccaagaccgugcucaagaagugcaaguccgccuucuacauccugcccagcaucaucuccaacgagaagcaggagauccugggcaccgugagcuggaaccuccgggagaugcuggcgcacgccgaggagacgcgcaagcugaugcccgucugcguggagaccaaggccaucguguccaccauccagcggaaguacaagggcaucaagauccaggagggggucguggacuacggcgcccgcuucuacuucuacaccagcaagacgaccguggccucccugaucaacacccucaacgaccugaacgagacccuggucacgaugccgcucggguacgugacccacggccugaaccuggaggaggcggcccgguacaugcgcagccucaaggugcccgccaccgucuccgugagcucccccgacgccgugaccgccuacaacggguaccugacgagcuccagcaagacccccgaggagcacuucaucgagaccaucucccuggcgggcagcuacaaggacuggagcuacuccggccagagcacccagcucgggaucgaguuccugaagcggggcgacaaguccgucuacuacacgagcaacccgaccaccuuccaccuggacggggaggugaucaccuucgacaaccucaagacgcugcugucccuccgcgaggugcggaccaucaaggucuucaccaccguggacaacaucaaccugcacacgcagguggucgacaugagcaugaccuacggccagcaguucggccccaccuaccuggacggggccgacgugaccaagaucaagccccacaacucccacgagggcaagacguucuacgugcucccgaacgacgacacccugcgcgucgaggccuucgaguacuaccacaccaccgaccccagcuuccuggggcgguacauguccgcccucaaccacacgaagaaguggaaguacccccaggugaacggccugaccagcaucaagugggccgacaacaacugcuaccuggcgaccgcccuccugacccugcagcagaucgagcucaaguucaaccccccggcccugcaggacgccuacuaccgcgcgcgggccggggaggccgccaacuucugcgcccugauccucgcguacugcaacaagacggugggcgagcugggcgacguccgcgagaccauguccuaccuguuccagcacgccaaccucgacagcugcaagcgggugcugaacgucgugugcaagaccugcgggcagcagcagaccacccugaagggcguggaggccgucauguacauggggacgcucuccuacgagcaguucaagaagggcgugcagauccccugcaccugcgggaagcaggccaccaaguaccuggugcagcaggagagccccuucgucaugauguccgcccccccggcgcaguacgagcugaagcacggcaccuucacgugcgccagcgaguacaccggcaacuaccagugcgggcacuacaagcacaucaccuccaaggagacccucuacugcaucgacggcgcccugcugacgaagagcagcgaguacaaggggcccaucaccgacguguucuacaaggagaacuccuacaccaccacgaucaagcccgugaccuacaagcucgacggcgucgugugcaccgagaucgaccccaagcuggacaacuacuacaagaaggacaacagcuacuucaccgagcagccgaucgaccuggugcccaaccagcccuaccccaacgccuccuucgacaacuucaaguucgucugcgacaacaucaaguucgccgacgaccucaaccagcugacgggguacaagaagccggcgagccgcgagcugaaggugaccuucuuccccgaccucaacggcgacguggucgccaucgacuacaagcacuacacccccuccuucaagaagggcgccaagcugcugcacaagcccaucguguggcacgugaacaacgccaccaacaaggcgacguacaagccgaacaccuggugcauccggugccucuggagcaccaagcccgucgagaccuccaacagcuucgacgugcugaaguccgaggacgcccaggggauggacaaccuggccugcgaggaccucaagcccgugagcgaggaggucguggagaaccccacgauccagaaggacgugcuggagugcaacgucaagaccaccgagguggugggcgacaucauccugaagccggccaacaacucccucaagaucaccgaggaggucgggcacacggaccugauggccgcguacguggacaacagcucccugaccaucaagaagcccaacgagcucagccgcgugcugggccugaagacccucgccacccacgggcuggccgccgucaacuccgugcccugggacacgaucgccaacuacgcgaagccguuccugaacaagguggucagcaccaccaccaacaucgugacgcgcugccucaaccgggugugcaccaacuacaugcccuacuucuucacccugcugcuccagcugugcaccuucacccgcuccacgaacagccggaucaaggccuccaugcccaccaccaucgccaagaacaccgucaagagcgugggcaaguucugccuggaggccagcuucaacuaccucaagucccccaacuucagcaagcugaucaacaucaucaucugguuccugcuccuguccgugugccugggcagccucaucuacuccacggccgcgcuggggguccugaugagcaaccucggcaugccguccuacugcaccggguaccgcgagggcuaccugaacagcaccaacgugaccaucgccacguacugcaccggcuccauccccugcagcgugugccuguccgggcucgacagccuggacaccuaccccucccuggagaccauccagaucacgaucagcuccuucaagugggaccucaccgccuucggccuggucgccgagugguuccuggccuacauccucuucacccgguucuucuacgugcuggggcuggcggccaucaugcagcucuucuucagcuacuucgccgugcacuucaucuccaacagcuggcugauguggcugaucaucaaccugguccagauggcccccaucuccgcgauggugcgcauguacaucuucuucgccagcuucuacuacguguggaagagcuacguccacgugguggacggcugcaacuccagcaccugcaugaugugcuacaagcggaaccgcgccacgcgggucgagugcaccaccaucgugaacgggguccgccgguccuucuacguguacgccaacggcggcaagggguucugcaagcuccacaacuggaacugcgugaacugcgacaccuucugcgccggcagcacguucaucuccgacgaggucgcgcgcgaccugagccugcaguucaagcggccgaucaaccccaccgaccaguccagcuacaucguggacuccgugaccgucaagaacgggagcauccaccucuacuucgacaaggccggccagaagaccuacgagcgccacucccugagccacuucgugaaccuggacaaccuccgggccaacaacacgaaggggucccugcccaucaacgugaucgucuucgacggcaagagcaagugcgaggaguccagcgccaaguccgccagcguguacuacucccagcugaugugccagcccauccuccugcuggaccaggcgcucgugagcgacgucggcgacagcgccgagguggccgugaagauguucgacgccuacgucaacaccuucuccagcaccuucaacgugccgauggagaagcugaagacccugguggccacggcggaggccgagcucgccaagaacgucucccuggacaacgugcugagcaccuucaucuccgccgcgcgccagggguucguggacagcgacgucgagaccaaggacgugguggagugccucaagcugucccaccagagcgacaucgaggucaccggcgacuccugcaacaacuacaugcugacguacaacaagguggagaacaugaccccccgggaccucggggccugcaucgacugcagcgcccgccacaucaacgcccagguggccaagucccacaacaucgcgcugaucuggaacgucaaggacuucaugagccuguccgagcagcuccggaagcagauccgcagcgccgccaagaagaacaaccugcccuucaagcugaccugcgccaccacgcgccagguggugaacgucgugaccaccaagaucgcccucaagggcgggugaggacuaguuauaagacugacuagcccgaugggccucccaacgggcccuccuccccuccuugcaccgagauuaauaaaaaaaaaaaaaaaaaaaaaaaaaaaaaaaaaaaaaaaaaaaaaaaaaaaaaaaaaaaaaaaaugcaucccccccccccccccccccccccccccccccaaaggcucuuuucagagccaccagaauu

SEQ ID NO: 21914 - RNA, 6058 nt, Artificial Sequence
  SARS-CoV-2__MT534313.1__non-structural protein 3 (NSP3) mRNA gc
aggagaaagcuuaccauggcccccaccaaggugaccuucggcgacgacacggucaucgaggugcagggguacaagagcgugaacaucaccuucgagcuggacgagcgcaucgacaagguccucaacgagaagugcuccgccuacaccguggagcugggcaccgaggugaacgaguucgcgugcgucguggccgacgccgugaucaagacgcugcagccggucagcgagcuccugaccccccuggggaucgaccucgacgagugguccauggccaccuacuaccuguucgacgagagcggcgaguucaagcuggccucccacauguacugcagcuucuacccccccgacgaggacgaggaggagggggacugcgaggaggaggaguucgagccguccacccaguacgaguacggcacggaggacgacuaccagggccggccccucgaguucggggcgaccagcgccgcccugcagcccgaggaggagcaggaggaggacuggcuggacgacgacucccagcagaccgugggccagcaggacgggagcgaggacaaccagaccacgaccauccagaccaucguggagguccagccccagcucgagauggagcugaccccgguggugcagacgaucgaggucaacuccuucagcggcuaccugaagcucaccgacaacguguacaucaagaacgccgacaucguggaggaggcgaagaaggucaagcccaccgugguggucaacgccgccaacguguaccugaagcacgggggcggcguggccggggcccugaacaaggcgaccaacaacgccaugcaggucgaguccgacgacuacaucgccacgaacggcccccucaagguggggggcagcugcguccuguccggccacaaccuggccaagcacugccuccacgugguggggcccaacgucaacaagggcgaggacauccagcugcugaagagcgccuacgagaacuucaaccagcacgaggugcuccuggcgccgcugcucuccgccgggaucuucggcgccgaccccauccacagccugcgcgugugcgucgacaccgugcggaccaacguguaccuggccgucuucgacaagaaccucuacgacaagcugguguccagcuuccuggagaugaagagcgagaagcagguggagcagaagaucgccgagauccccaaggaggaggucaagcccuucaucaccgaguccaagccgagcguggagcagcgcaagcaggacgacaagaagaucaaggcgugcguggaggaggucacgaccacccucgaggagaccaaguuccugacggagaaccugcuccuguacaucgacaucaacgggaaccugcaccccgacuccgccacccucgugagcgacaucgacaucaccuuccugaagaaggacgcccccuacaucgugggcgacgucgugcaggagggcgugcugaccgccgucgugauccccacgaagaaggccgggggcaccaccgagaugcucgcgaaggcccugcggaaggugccgaccgacaacuacaucacgaccuaccccgggcagggccugaacggguacaccgucgaggaggccaagaccgugcucaagaagugcaaguccgccuucuacauccugcccagcaucaucuccaacgagaagcaggagauccugggcaccgugagcuggaaccuccgcgagaugcuggcgcacgccgaggagacgcggaagcugaugcccgucugcguggagaccaaggccaucguguccaccauccagcgcaaguacaagggcaucaagauccaggagggggucguggacuacggcgcccgguucuacuucuacaccagcaagacgaccguggccucccugaucaacacccucaacgaccugaacgagacccuggucacgaugccgcucggguacgugacccacggccugaaccuggaggaggcggcccgcuacaugcggagccucaaggugcccgccaccgucuccgugagcucccccgacgccgugaccgccuacaacggguaccugacgagcuccagcaagacccccgaggagcacuucaucgagaccaucucccuggcgggcagcuacaaggacuggagcuacuccggccagagcacccagcucgggaucgaguuccugaagcgcggcgacaaguccgucuacuacacgagcaacccgaccaccuuccaccuggacggggaggugaucaccuucgacaaccucaagacgcugcugucccuccgggaggugcgcaccaucaaggucuucaccaccguggacaacaucaaccugcacacgcagguggucgacaugagcaugaccuacggccagcaguucggccccaccuaccuggacggggccgacgugaccaagaucaagccccacaacucccacgagggcaagacguucuacgugcucccgaacgacgacacccugcgggucgaggccuucgaguacuaccacaccaccgaccccagcuuccuggggcgcuacauguccgcccucaaccacacgaagaaguggaaguacccccaggugaacggccugaccagcaucaagugggccgacaacaacugcuaccuggcgaccgcccuccugacccugcagcagaucgagcucaaguucaaccccccggcccugcaggacgccuacuaccgggcgcgcgccggggaggccgccaacuucugcgcccugauccucgcguacugcaacaagacggugggcgagcugggcgacguccgggagaccauguccuaccuguuccagcacgccaaccucgacagcugcaagcgcgugcugaacgucgugugcaagaccugcgggcagcagcagaccacccugaagggcguggaggccgucauguacauggggacgcucuccuacgagcaguucaagaagggcgugcagauccccugcaccugcgggaagcaggccaccaaguaccuggugcagcaggagagccccuucgucaugauguccgcccccccggcgcaguacgagcugaagcacggcaccuucacgugcgccagcgaguacaccggcaacuaccagugcgggcacuacaagcacaucaccuccaaggagacccucuacugcaucgacggcgcccugcugacgaagagcagcgaguacaaggggcccaucaccgacguguucuacaaggagaacuccuacaccaccacgaucaagcccgugaccuacaagcucgacggcgucgugugcaccgagaucgaccccaagcuggacaacuacuacaagaaggacaacagcuacuucaccgagcagccgaucgaccuggugcccaaccagcccuaccccaacgccuccuucgacaacuucaaguucgucugcgacaacaucaaguucgccgacgaccucaaccagcugacgggguacaagaagccggcgagccgggagcugaaggugaccuucuuccccgaccucaacggcgacguggucgccaucgacuacaagcacuacacccccuccuucaagaagggcgccaagcugcugcacaagcccaucguguggcacgugaacaacgccaccaacaaggcgacguacaagccgaacaccuggugcauccgcugccucuggagcaccaagcccgucgagaccuccaacagcuucgacgugcugaaguccgaggacgcccaggggauggacaaccuggccugcgaggaccucaagcccgugagcgaggaggucguggagaaccccacgauccagaaggacgugcuggagugcaacgucaagaccaccgagguggugggcgacaucauccugaagccggccaacaacucccucaagaucaccgaggaggucgggcacacggaccugauggccgcguacguggacaacagcucccugaccaucaagaagcccaacgagcucagccgcgugcugggccugaagacccucgccacccacgggcuggccgccgucaacuccgugcccugggacacgaucgccaacuacgcgaagccguuccugaacaagguggucagcaccaccaccaacaucgugacgcggugccucaaccgcgugugcaccaacuacaugcccuacuucuucacccugcugcuccagcugugcaccuucacccgguccacgaacagccgcaucaaggccuccaugcccaccaccaucgccaagaacaccgucaagagcgugggcaaguucugccuggaggccagcuucaacuaccucaagucccccaacuucagcaagcugaucaacaucaucaucugguuccugcuccuguccgugugccugggcagccucaucuacuccacggccgcgcuggggguccugaugagcaaccucggcaugccguccuacugcaccggguaccgggagggcuaccugaacagcaccaacgugaccaucgccacguacugcaccggcuccauccccugcagcgugugccuguccgggcucgacagccuggacaccuaccccucccuggagaccauccagaucacgaucagcuccuucaagugggaccucaccgccuucggccuggucgccgagugguuccuggccuacauccucuucacccgcuucuucuacgugcuggggcuggcggccaucaugcagcucuucuucagcuacuucgccgugcacuucaucuccaacagcuggcugauguggcugaucaucaaccugguccagauggcccccaucuccgcgauggugcggauguacaucuucuucgccagcuucuacuacguguggaagagcuacguccacgugguggacggcugcaacuccagcaccugcaugaugugcuacaagcgcaaccgggccacgcgcgucgagugcaccaccaucgugaacgggguccggcgcuccuucuacguguacgccaacggcggcaagggguucugcaagcuccacaacuggaacugcgugaacugcgacaccuucugcgccggcagcacguucaucuccgacgaggucgcgcgggaccugagccugcaguucaagcgcccgaucaaccccaccgaccaguccagcuacaucguggacuccgugaccgucaagaacgggagcauccaccucuacuucgacaaggccggccagaagaccuacgagcggcacucccugagccacuucgugaaccuggacaaccuccgcgccaacaacacgaaggggucccugcccaucaacgugaucgucuucgacggcaagagcaagugcgaggaguccagcgccaaguccgccagcguguacuacucccagcugaugugccagcccauccuccugcuggaccaggcgcucgugagcgacgucggcgacagcgccgagguggccgugaagauguucgacgccuacgucaacaccuucuccagcaccuucaacgugccgauggagaagcugaagacccugguggccacggcggaggccgagcucgccaagaacgucucccuggacaacgugcugagcaccuucaucuccgccgcgcggcagggguucguggacagcgacgucgagaccaaggacgugguggagugccucaagcugucccaccagagcgacaucgaggucaccggcgacuccugcaacaacuacaugcugacguacaacaagguggagaacaugaccccccgcgaccucggggccugcaucgacugcagcgcccggcacaucaacgcccagguggccaagucccacaacaucgcgcugaucuggaacgucaaggacuucaugagccuguccgagcagcuccgcaagcagauccgcagcgccgccaagaagaacaaccugcccuucaagcugaccugcgccaccacgcggcagguggugaacgucgugaccaccaagaucgcccucaagggcgggugaggacuaguuauaagacugacuagcccgaugggccucccaacgggcccuccuccccuccuugcaccgagauuaauaaaaaaaaaaaaaaaaaaaaaaaaaaaaaaaaaaaaaaaaaaaaaaaaaaaaaaaaaaaaaaaaugcaucccccccccccccccccccccccccccccccaaaggcucuuuucagagccaccagaauu

SEQ ID NO: 21915 - RNA, 6058 nt, Artificial Sequence
  SARS-CoV-2__MT536961.1__non-structural protein 3 (NSP3) mRNA gc
aggagaaagcuuaccauggcccccaccaaggugaccuucggcgacgacacggucaucgaggugcagggguacaagagcgugaacaucaccuucgagcuggacgagcgcaucgacaagguccucaacgagaagugcuccgccuacaccguggagcugggcaccgaggugaacgaguucgcgugcgucguggccgacgccgugaucaagacgcugcagccggucagcgagcuccugaccccccuggggaucgaccucgacgagugguccauggccaccuacuaccuguucgacgagagcggcgaguucaagcuggccucccacauguacugcagcuucuacccccccgacgaggacgaggaggagggggacugcgaggaggaggaguucgagccguccacccaguacgaguacggcacggaggacgacuaccagggcaagccccucgaguucggggcgaccagcgccgcccugcagcccgaggaggagcaggaggaggacuggcuggacgacgacucccagcagaccgugggccagcaggacgggagcgaggacaaccagaccacgaccauccagaccaucguggagguccagccccagcucgagauggagcugaccccgguggugcagacgaucgaggucaacuccuucagcggcuaccugaagcucaccgacaacguguacaucaagaacgccgacaucguggaggaggcgaagaaggucaagcccaccgugguggucaacgccgccaacguguaccugaagcacgggggcggcguggccggggcccugaacaaggcgaccaacaacgccaugcaggucgaguccgacgacuacaucgccacgaacggcccccucaagguggggggcagcugcguccuguccggccacaaccuggccaagcacugccuccacgugguggggcccaacgucaacaagggcgaggacauccagcugcugaagagcgccuacgagaacuucaaccagcacgaggugcuccuggcgccgcugcucuccgccgggaucuucggcgccgaccccauccacagccugcgggugugcgucgacaccgugcgcaccaacguguaccuggccgucuucgacaagaaccucuacgacaagcugguguccagcuuccuggagaugaagagcgagaagcagguggagcagaagaucgccgagauccccaaggaggaggucaagcccuucaucaccgaguccaagccgagcguggagcagcggaagcaggacgacaagaagaucaaggcgugcguggaggaggucacgaccacccucgaggagaccaaguuccugacggagaaccugcuccuguacaucgacaucaacgggaaccugcaccccgacuccgccacccucgugagcgacaucgacaucaccuuccugaagaaggacgcccccuacaucgugggcgacgucgugcaggagggcgugcugaccgccgucgugauccccacgaagaaggccgggggcaccaccgagaugcucgcgaaggcccugcgcaaggugccgaccgacaacuacaucacgaccuaccccgggcagggccugaacggguacaccgucgaggaggccaagaccgugcucaagaagugcaaguccgccuucuacauccugcccagcaucaucuccaacgagaagcaggagauccugggcaccgugagcuggaaccuccgggagaugcuggcgcacgccgaggagacgcgcaagcugaugcccgucugcguggagaccaaggccaucguguccaccauccagcggaaguacaagggcaucaagauccaggagggggucguggacuacggcgcccgcuucuacuucuacaccagcaagacgaccguggccucccugaucaacacccucaacgaccugaacgagacccuggucacgaugccgcucggguacgugacccacggccugaaccuggaggaggcggcccgguacaugcgcagccucaaggugcccgccaccgucuccgugagcucccccgacgccgugaccgccuacaacggguaccugacgagcuccagcaagacccccgaggagcacuucaucgagaccaucucccuggcgggcagcuacaaggacuggagcuacuccggccagagcacccagcucgggaucgaguuccugaagcggggcgacaaguccgucuacuacacgagcaacccgaccaccuuccaccuggacggggaggugaucaccuucgacaaccucaagacgcugcugucccuccgcgaggugcggaccaucaaggucuucaccaccguggacaacaucaaccugcacacgcagguggucgacaugagcaugaccuacggccagcaguucggccccaccuaccuggacggggccgacgugaccaagaucaagccccacaacucccacgagggcaagacguucuacgugcucccgaacgacgacacccugcgcgucgaggccuucgaguacuaccacaccaccgaccccagcuuccuggggcgguacauguccgcccucaaccacacgaagaaguggaaguacccccaggugaacggccugaccagcaucaagugggccgacaacaacugcuaccuggcgaccgcccuccugacccugcagcagaucgagcucaaguucaaccccccggcccugcaggacgccuacuaccgcgcgcgggccggggaggccgccaacuucugcgcccugauccucgcguacugcaacaagacggugggcgagcugggcgacguccgcgagaccauguccuaccuguuccagcacgccaaccucgacagcugcaagcgggugcugaacgucgugugcaagaccugcgggcagcagcagaccacccugaagggcguggaggccgucauguacauggggacgcucuccuacgagcaguucaagaagggcgugcagauccccugcaccugcgggaagcaggccaccaaguaccuggugcagcaggagagccccuucgucaugauguccgcccccccggcgcaguacgagcugaagcacggcaccuucacgugcgccagcgaguacaccggcaacuaccagugcgggcacuacaagcacaucaccuccaaggagacccucuacugcaucgacggcgcccugcugacgaagagcagcgaguacaaggggcccaucaccgacguguucuacaaggagaacuccuacaccaccacgaucaagcccgugaccuacaagcucgacggcgucgugugcaccgagaucgaccccaagcuggacaacuacuacaagaaggacaacagcuacuucaccgagcagccgaucgaccuggugcccaaccagcccuaccccaacgccuccuucgacaacuucaaguucgucugcgacaacaucaaguucgccgacgaccucaaccagcugacgggguacaagaagccggcgagccgcgagcugaaggugaccuucuuccccgaccucaacggcgacguggucgccaucgacuacaagcacuacacccccuccuucaagaagggcgccaagcugcugcacaagcccaucguguggcacgugaacaacgccaccaacaaggcgacguacaagccgaacaccuggugcauccggugccucuggagcaccaagcccgucgagaccuccaacagcuucgacgugcugaaguccgaggacgcccaggggauggacaaccuggccugcgaggaccucaagcccgugagcgaggaggucguggagaaccccacgauccagaaggacgugcuggagugcaacgucaagaccaccgagguggugggcgacaucauccugaagccggccaacaaccgccucaagaucaccgaggaggucgggcacacggaccugauggccgcguacguggacaacuccagccugaccaucaagaagcccaacgagcucucccgcgugcugggccugaagacccucgccacccacgggcuggccgccgucaacagcgugcccugggacacgaucgccaacuacgcgaagccguuccugaacaagguggucuccaccaccaccaacaucgugacgcggugccucaaccgcgugugcaccaacuacaugcccuacuucuucacccugcugcuccagcugugcaccuucacccggagcacgaacucccgcaucaaggccagcaugcccaccaccaucgccaagaacaccgucaaguccgugggcaaguucugccuggaggccagcuucaacuaccucaagagccccaacuucuccaagcugaucaacaucaucaucugguuccugcuccugagcgugugccugggcucccucaucuacagcacggccgcgcuggggguccugauguccaaccucggcaugccgagcuacugcaccggguaccgggagggcuaccugaacuccaccaacgugaccaucgccacguacugcaccggcagcauccccugcuccgugugccugagcgggcucgacucccuggacaccuaccccagccuggagaccauccagaucacgaucuccagcuucaagugggaccucaccgccuucggccuggucgccgagugguuccuggccuacauccucuucacccgcuucuucuacgugcuggggcuggcggccaucaugcagcucuucuucuccuacuucgccgugcacuucaucagcaacuccuggcugauguggcugaucaucaaccugguccagauggcccccaucagcgcgauggugcggauguacaucuucuucgccuccuucuacuacguguggaagagcuacguccacgugguggacggcugcaacagcuccaccugcaugaugugcuacaagcgcaaccgggccacgcgcgucgagugcaccaccaucgugaacgggguccggcgcagcuucuacguguacgccaacggcggcaagggguucugcaagcuccacaacuggaacugcgugaacugcgacaccuucugcgccggcuccacguucaucagcgacgaggucgcgcgggaccugucccugcaguucaagcgcccgaucaaccccaccgaccagagcuccuacaucguggacagcgugaccgucaagaacggguccauccaccucuacuucgacaaggccggccagaagaccuacgagcggcacagccugucccacuucgugaaccuggacaaccuccgcgccaacaacacgaaggggagccugcccaucaacgugaucgucuucgacggcaaguccaagugcgaggagagcuccgccaagagcgccuccguguacuacagccagcugaugugccagcccauccuccugcuggaccaggcgcucguguccgacgucggcgacagcgccgagguggccgugaagauguucgacgccuacgucaacaccuucagcuccaccuucaacgugccgauggagaagcugaagacccugguggccacggcggaggccgagcucgccaagaacgucagccuggacaacgugcuguccaccuucaucagcgccgcgcggcagggguucguggacuccgacgucgagaccaaggacgugguggagugccucaagcugagccaccaguccgacaucgaggucaccggcgacagcugcaacaacuacaugcugacguacaacaagguggagaacaugaccccccgcgaccucggggccugcaucgacugcuccgcccggcacaucaacgcccagguggccaagagccacaacaucgcgcugaucuggaacgucaaggacuucaugucccugagcgagcagcuccgcaagcagauccgcuccgccgccaagaagaacaaccugcccuucaagcugaccugcgccaccacgcggcagguggugaacgucgugaccaccaagaucgcccucaagggcgggugaggacuaguuauaagacugacuagcccgaugggccucccaacgggcccuccuccccuccuugcaccgagauuaauaaaaaaaaaaaaaaaaaaaaaaaaaaaaaaaaaaaaaaaaaaaaaaaaaaaaaaaaaaaaaaaaugcaucccccccccccccccccccccccccccccccaaaggcucuuuucagagccaccagaauu

SEQ ID NO: 21916 - RNA, 6058 nt, Artificial Sequence
  SARS-CoV-2__MT536977.1__non-structural protein 3 (NSP3) mRNA gc
aggagaaagcuuaccauggcccccaccaaggugaccuucggcgacgacacggucaucgaggugcagggguacaagagcgugaacaucaccuucgagcuggacgagcgcaucgacaagguccucaacgagaagugcuccgccuacaccguggagcugggcaccgaggugaacgaguucgcgugcgucguggccgacgccgugaucaagacgcugcagccggucagcgagcuccugaccccccuggggaucgaccucgacgagugguccauggccaccuacuaccuguucgacgagagcggcgaguucaagcuggccucccacauguacugcagcuucuacccccccgacgaggacgaggaggagggggacugcgaggaggaggaguucgagccguccacccaguacgaguacggcacggaggacgacuaccagggcaagccccucgaguucggggcgaccagcgccgcccugcagcccgaggaggagcaggaggaggacuggcuggacgacgacucccagcagaccgugggccagcaggacgggagcgaggacaaccagaccacgaccauccagaccaucguggagguccagccccagcucgagauggagcugaccccgguggugcagacgaucgaggucaacuccuucagcggcuaccugaagcucaccgacaacguguacaucaagaacgccgacaucguggaggaggcgaagaaggucaagcccaccgugguggucaacgccgccaacguguaccugaagcacgggggcggcguggccggggcccugaacaaggcgaccaacaacgccaugcaggucgaguccgacgacuacaucgccacgaacggcccccucaagguggggggcagcugcguccuguccggccacaaccuggccaagcacugccuccacgugguggggcccaacgucaacaagggcgaggacauccagcugcugaagagcgccuacgagaacuucaaccagcacgaggugcuccuggcgccgcugcucuccgccgggaucuucggcgccgaccccauccacagccugcgggugugcgucgacaccgugcgcaccaacguguaccuggccgucuucgacaagaaccucuacgacaagcugguguccagcuuccuggagaugaagagcgagaagcagguggagcagaagaucgccgagauccccaaggaggaggucaagcccuucaucaccgaguccaagccgagcguggagcagcggaagcaggacgacaagaagaucaaggcgugcguggaggaggucacgaccacccucgaggagaccaaguuccugacggagaaccugcuccuguacaucgacaucaacgggaaccugcaccccgacuccgccacccucgugagcgacaucgacaucaccuuccugaagaaggacgcccccuacaucgugggcgacgucgugcaggagggcgugcugaccgccgucgugauccccacgaagaaggccgggggcaccaccgagaugcucgcgaaggcccugcgcaaggugccgaccgacaacuacaucacgaccuaccccgggcagggccugaacggguacaccgucgaggaggccaagaccgugcucaagaagugcaaguccgccuucuacauccugcccagcaucaucuccaacgagaagcaggagauccugggcaccgugagcuggaaccuccgggagaugcuggcgcacgccgaggagacgcgcaagcugaugcccgucugcguggagaccaaggccaucguguccaccauccagcggaaguacaagggcaucaagauccaggagggggucguggacuacggcgcccgcuucuacuucuacaccagcaagacgaccguggccucccugaucaacacccucaacgaccugaacgagacccuggucacgaugccgcucggguacgugacccacggccugaaccuggaggaggcggcccgguacaugcgcagccucaaggugcccgccaccgucuccgugagcucccccgacgccgugaccgccuacaacggguaccugacgagcuccagcaagacccccgaggagcacuucaucgagaccaucucccuggcgggcagcuacaaggacuggagcuacuccggccagagcacccagcucgggaucgaguuccugaagcggggcgacaaguccgucuacuacacgagcaacccgaccaccuuccaccuggacggggaggugaucaccuucgacaaccucaagacgcugcugucccuccgcgaggugcggaccaucaaggucuucaccaccguggacaacaucaaccugcacacgcagguggucgacaugagcaugaccuacggccagcaguucggccccaccuaccuggacggggccgacgugaccaagaucaagccccacaacucccacgagggcaagacguucuacgugcucccgaacgacgacacccugcgcgucgaggccuucgaguacuaccacaccaccgaccccagcuuccuggggcgguacauguccgcccucaaccacacgaagaaguggaaguacccccaggugaacggccugaccagcaucaagugggccgacaacaacugcuaccuggcgaccgcccuccugacccugcagcagaucgagcucaaguucaaccccccggcccugcaggacgccuacuaccgcgcgcgggccggggaggccgccaacuucugcgcccugauccucgcguacugcaacaagacggugggcgagcugggcgacguccgcgagaccauguccuaccuguuccagcacgccaaccucgacagcugcaagcgggugcugaacgucgugugcaagaccugcgggcagcagcagaccacccugaagggcguggaggccgucauguacauggggacgcucuccuacgagcaguucaagaagggcgugcagauccccugcaccugcgggaagcaggccaccaaguaccuggugcagcaggagagccccuucgucaugauguccgcccccccggcgcaguacgagcugaagcacggcaccuucacgugcgccagcgaguacaccggcaacuaccagugcgggcacuacaagcacaucaccuccaaggagacccucuacugcaucgacggcgcccugcugacgaagagcagcgaguacaaggggcccaucaccgacguguucuacaaggagaacuccuacaccaccacgaucaagcccgugaccuacaagcucgacggcgucgugugcaccgagaucgaccccaagcuggacaacuacuacaagaaggacaacagcuacuucaccgagcagccgaucgaccuggugcccaaccagcccuaccccaacgccuccuucgacaacuucaaguucgucugcgacaacaucaaguucgccgacgaccucaaccagcugacgggguacaagaagccggcgagccgcgagcugaaggugaccuucuuccccgaccucaacggcgacguggucgccaucgacuacaagcacuacacccccuccuucaagaagggcgccaagcugcugcacaagcccaucguguggcacgugaacaacgccaccaacaaggcgacguacaagccgaacaccuggugcauccggugccucuggagcaccaagcccgucgagaccuccaacagcuucgacgugcugaaguccgaggacgcccaggggauggacaaccuggccugcgaggaccucaagcccgugagcgaggagguccuggagaaccccacgauccagaaggacgugcuggagugcaacgugaagaccaccgaggucgugggcgacaucauccucaagccggccaacaacucccugaagaucaccgaggagguggggcacacggaccugauggccgcguacgucgacaacagcucccucaccaucaagaagcccaacgagcugagccgcgugcugggccucaagacccuggccacccacgggcuggccgccgugaacuccguccccugggacacgaucgccaacuacgcgaagccguuccucaacaagguggugagcaccaccaccaacaucgucacgcgcugccugaaccgggugugcaccaacuacaugcccuacuucuucacccugcuccugcagcugugcaccuucacccgcuccacgaacagccggaucaaggccuccaugcccaccaccaucgccaagaacaccgugaagagcgucggcaaguucugccucgaggccagcuucaacuaccugaagucccccaacuucagcaagcugaucaacaucaucaucugguuccuccugcuguccgugugccucggcagccugaucuacuccacggccgcgcugggggugcucaugagcaaccugggcaugccguccuacugcaccggguaccgcgagggcuaccugaacagcaccaacgucaccaucgccacguacugcaccggcuccauccccugcagcgugugccucuccgggcuggacagccuggacaccuaccccucccucgagaccauccagaucacgaucagcuccuucaagugggaccugaccgccuucggccugguggccgagugguuccucgccuacauccuguucacccgguucuucuacguccuggggcucgcggccaucaugcagcuguucuucagcuacuucgccgugcacuucaucuccaacagcuggcugauguggcugaucaucaaccucgugcagauggcccccaucuccgcgaugguccgcauguacaucuucuucgccagcuucuacuacguguggaagagcuacgugcacgucguggacggcugcaacuccagcaccugcaugaugugcuacaagcggaaccgcgccacgcggguggagugcaccaccaucgucaacggggugcgccgguccuucuacgucuacgccaacggcggcaagggguucugcaagcugcacaacuggaacugcgugaacugcgacaccuucugcgccggcagcacguucaucuccgacgagguggcgcgcgaccugagccuccaguucaagcggccgaucaaccccaccgaccaguccagcuacaucgucgacuccgugaccgugaagaacgggagcauccaccuguacuucgacaaggccggccagaagaccuacgagcgccacucccugagccacuucgucaaccucgacaaccugcgggccaacaacacgaaggggucccugcccaucaacgugaucguguucgacggcaagagcaagugcgaggaguccagcgccaaguccgccagcgucuacuacucccagcucaugugccagcccauccugcugcucgaccaggcgcuggugagcgacgugggcgacagcgccgaggucgccgugaagauguucgacgccuacgugaacaccuucuccagcaccuucaacgucccgauggagaagcugaagacccucguggccacggcggaggccgagcuggccaagaacgugucccuggacaacguccucagcaccuucaucuccgccgcgcgccagggguucguggacagcgacguggagaccaaggacgucguggagugccugaagcugucccaccagagcgacaucgaggugaccggcgacuccugcaacaacuacaugcucacguacaacaaggucgagaacaugaccccccgggaccugggggccugcaucgacugcagcgcccgccacaucaacgcccagguggccaagucccacaacaucgcgcugaucuggaacgugaaggacuucaugagccucuccgagcagcugcggaagcagauccgcagcgccgccaagaagaacaaccugcccuucaagcucaccugcgccaccacgcgccaggucgugaacguggucaccaccaagaucgcccugaagggcgggugaggacuaguuauaagacugacuagcccgaugggccucccaacgggcccuccuccccuccuugcaccgagauuaauaaaaaaaaaaaaaaaaaaaaaaaaaaaaaaaaaaaaaaaaaaaaaaaaaaaaaaaaaaaaaaaaugcaucccccccccccccccccccccccccccccccaaaggcucuuuucagagccaccagaauu

SEQ ID NO: 21917 - RNA, 6058 nt, Artificial Sequence
  SARS-CoV-2__MT532437.1__non-structural protein 3 (NSP3) mRNA gc
aggagaaagcuuaccauggcccccaccaaggugaccuucggcgacgacacggucaucgaggugcagggguacaagagcgugaacaucaccuucgagcuggacgagcgcaucgacaagguccucaacgagaagugcuccgccuacaccguggagcugggcaccgaggugaacgaguucgcgugcgucguggccgacgccgugaucaagacgcugcagccggucagcgagcuccugaccccccuggggaucgaccucgacgagugguccauggccaccuacuaccuguucgacgagagcggcgaguucaagcuggccucccacauguacugcagcuucuacccccccgacgaggacgaggaggagggggacugcgaggaggaggaguucgagccguccacccaguacgaguacggcacggaggacgacuaccagggcaagccccucgaguucggggcgaccagcgccgcccugcagcccgaggaggagcaggaggaggacuggcuggacgacgacucccagcagaccgugggccagcaggacgggagcgaggacaaccagaccacgaccauccagaccaucguggagguccagccccagcucgagauggagcugaccccgguggugcagacgaucgaggucaacuccuucagcggcuaccugaagcucaccgacaacguguacaucaagaacgccgacaucguggaggaggcgaagaaggucaagcccaccgugguggucaacgccgccaacguguaccugaagcacgggggcggcguggccggggcccugaacaaggcgaccaacaacgccaugcaggucgaguccgacgacuacaucgccacgaacggcccccucaagguggggggcagcugcguccuguccggccacaaccuggccaagcacugccuccacgugguggggcccaacgucaacaagggcgaggacauccagcugcugaagagcgccuacgagaacuucaaccagcacgaggugcuccuggcgccgcugcucuccgccgggaucuucggcgccgaccccauccacagccugcgggugugcgucgacaccgugcgcaccaacguguaccuggccgucuucgacaagaaccucuacgacaagcugguguccagcuuccuggagaugaagagcgagaagcagguggagcagaagaucgccgagauccccaaggaggaggucaagcccuucaucaccgaguccaagccgagcguggagcagcggaagcaggacgacaagaagaucaaggcgugcguggaggaggucacgaccacccucgaggagaccaaguuccugacggagaaccugcuccuguacaucgacaucaacgggaaccugcaccccgacuccgccacccucgugagcgacaucgacaucaccuuccugaagaaggacgcccccuacaucgugggcgacgucgugcaggagggcgugcugaccgccgucgugauccccacgaagaaggccgggggcaccaccgagaugcucgcgaaggcccugcgcaaggugccgaccgacaacuacaucacgaccuaccccgggcagggccugaacggguacaccgucgaggaggccaagaccgugcucaagaagugcaaguccgccuucuacauccugcccagcaucaucuccaacgagaagcaggagauccugggcaccgugagcuggaaccuccgggagaugcuggcgcacgccgaggagacgcgcaagcugaugcccgucugcguggagaccaaggccaucguguccaccauccagcggaaguacaagggcaucaagauccaggagggggucguggacuacggcgcccgcuucuacuucuacaccagcaagacgaccguggccucccugaucaacacccucaacgaccugaacgagacccuggucacgaugccgcucggguacgugacccacggccugaaccuggaggaggcggcccgguacaugcgcagccucaaggugcccgccaccgucuccgugagcucccccgacgccgugaccgccuacaacggguaccugacgagcuccagcaagacccccgaggagcacuucaucgagaccaucucccuggcgggcagcuacaaggacuggagcuacuccggccagagcacccagcucgggaucgaguuccugaagcggggcgacaaguccgucuacuacacgagcaacccgaccaccuuccaccuggacggggaggugaucaccuucgacaaccucaagacgcugcugucccuccgcgaggugcggaccaucaaggucuucaccaccguggacaacaucaaccugcacacgcagguggucgacaugagcaugaccuacggccagcaguucggccccaccuaccuggacggggccgacgugaccaagaucaagccccacaacucccacgagggcaagacguucuacgugcucccgaacgacgacacccugcgcgucgaggccuucgaguacuaccacaccaccgaccccagcuuccuggggcgguacauguccgcccucaaccacacgaagaaguggaaguacccccaggugaacggccugaccagcaucaagugggccgacaacaacugcuaccuggcgaccgcccuccugacccugcagcagaucgagcucaaguucaaccccccggcccugcaggacgccuacuaccgcgcgcgggccggggaggccgccaacuucugcgcccugauccucgcguacugcaacaagacggugggcgagcugggcgacguccgcgagaccauguccuaccuguuccagcacgccaaccucgacagcugcaagcgggugcugaacgucgugugcaagaccugcgggcagcagcagaccacccugaagggcguggaggccgucauguacauggggacgcucuccuacgagcaguucaagaagggcgugcagauccccugcaccugcgggaagcaggccaccaaguaccuggugcagcaggagagccccuucgucaugauguccgcccccccggcgcaguacgagcugaagcacggcaccuucacgugcgccagcgaguacaccggcaacuaccagugcgggcacuacaagcacaucaccuccaaggagacccucuacugcaucgacggcgcccugcugacgaagagcagcgaguacaaggggcccaucaccgacguguucuacaaggagaacuccuacaccaccacgaucaagcccgugaccuacaagcucgacggcgucgugugcaccgagaucgaccccaagcuggacaacuacuacaagaaggacaacagcuacuucaccgagcagccgaucgaccuggugcccaaccagcccuaccccaacgccuccuucgacaacuucaaguucgucugcgacaacaucaaguucgccgacgaccucaaccagcugacgggguacaagaagccggcgagccgcgagcugaaggugaccuucuuccccgaccucaacggcgacguggucgccaucgacuacaagcacuacacccccuccuucaagaagcgggccaagcugcugcacaagcccaucguguggcacgugaacaacgccaccaacaaggcgacguacaagccgaacaccuggugcauccgcugccucuggagcaccaagcccgucgagaccuccaacagcuucgacgugcugaaguccgaggacgcccagggcauggacaaccuggccugcgaggaccucaagcccgugagcgaggaggucguggagaaccccacgauccagaaggacgugcuggagugcaacgucaagaccaccgagguggugggggacaucauccugaagccggccaacaacucccucaagaucaccgaggaggucggccacacggaccugauggccgcguacguggacaacagcucccugaccaucaagaagcccaacgagcucagccgcgugcuggggcugaagacccucgccacccacggccuggccgccgucaacuccgugcccugggacacgaucgccaacuacgcgaagccguuccugaacaagguggucagcaccaccaccaacaucgugacgcggugccucaaccgcgugugcaccaacuacaugcccuacuucuucacccugcugcuccagcugugcaccuucacccgguccacgaacagccgcaucaaggccuccaugcccaccaccaucgccaagaacaccgucaagagcguggggaaguucugccuggaggccagcuucaacuaccucaagucccccaacuucagcaagcugaucaacaucaucaucugguuccugcuccuguccgugugccugggcagccucaucuacuccacggccgcgcugggcguccugaugagcaaccucgggaugccguccuacugcaccggcuaccgggagggguaccugaacagcaccaacgugaccaucgccacguacugcaccggcuccauccccugcagcgugugccuguccggccucgacagccuggacaccuaccccucccuggagaccauccagaucacgaucagcuccuucaagugggaccucaccgccuucgggcuggucgccgagugguuccuggccuacauccucuucacccgcuucuucuacgugcugggccuggcggccaucaugcagcucuucuucagcuacuucgccgugcacuucaucuccaacagcuggcugauguggcugaucaucaaccugguccagauggcccccaucuccgcgauggugcggauguacaucuucuucgccagcuucuacuacguguggaagagcuacguccacgugguggacgggugcaacuccagcaccugcaugaugugcuacaagcgcaaccgggccacgcgcgucgagugcaccaccaucgugaacggcguccggcgcuccuucuacguguacgccaacgggggcaagggcuucugcaagcuccacaacuggaacugcgugaacugcgacaccuucugcgccgggagcacguucaucuccgacgaggucgcgcgggaccugagccugcaguucaagcgcccgaucaaccccaccgaccaguccagcuacaucguggacuccgugaccgucaagaacggcagcauccaccucuacuucgacaaggccgggcagaagaccuacgagcggcacucccugagccacuucgugaaccuggacaaccuccgcgccaacaacacgaagggcucccugcccaucaacgugaucgucuucgacgggaagagcaagugcgaggaguccagcgccaaguccgccagcguguacuacucccagcugaugugccagcccauccuccugcuggaccaggcgcucgugagcgacgucggcgacagcgccgagguggccgugaagauguucgacgccuacgucaacaccuucuccagcaccuucaacgugccgauggagaagcugaagacccugguggccacggcggaggccgagcucgccaagaacgucucccuggacaacgugcugagcaccuucaucuccgccgcgcggcagggcuucguggacagcgacgucgagaccaaggacgugguggagugccucaagcugucccaccagagcgacaucgaggucaccggggacuccugcaacaacuacaugcugacguacaacaagguggagaacaugaccccccgcgaccucggcgccugcaucgacugcagcgcccggcacaucaacgcccagguggccaagucccacaacaucgcgcugaucuggaacgucaaggacuucaugagccuguccgagcagcuccgcaagcagauccgcagcgccgccaagaagaacaaccugcccuucaagcugaccugcgccaccacgcggcagguggugaacgucgugaccaccaagaucgcccucaaggggggcugaggacuaguuauaagacugacuagcccgaugggccucccaacgggcccuccuccccuccuugcaccgagauuaauaaaaaaaaaaaaaaaaaaaaaaaaaaaaaaaaaaaaaaaaaaaaaaaaaaaaaaaaaaaaaaaaugcaucccccccccccccccccccccccccccccccaaaggcucuuuucagagccaccagaauu

SEQ ID NO: 21918 - RNA, 6058 nt, Artificial Sequence
  SARS-CoV-2__MT517420.1__non-structural protein 3 (NSP3) mRNA gc
aggagaaagcuuaccauggcccccaccaaggugaccuucggcgacgacacggucaucgaggugcagggguacaagagcgugaacaucaccuucgagcuggacgagcgcaucgacaagguccucaacgagaagugcuccgccuacaccguggagcugggcaccgaggugaacgaguucgcgugcgucguggccgacgccgugaucaagacgcugcagccggucagcgagcuccugaccccccuggggaucgaccucgacgagugguccauggccaccuacuaccuguucgacgagagcggcgaguucaagcuggccucccacauguacugcagcuucuacccccccgacgaggacgaggaggagggggacugcgaggaggaggaguucgagccguccacccaguacgaguacggcacggaggacgacuaccagggcaagccccucgaguucggggcgaccagcgccgcccugcagcacgaggaggagcaggaggaggacuggcuggacgacgacucccagcagaccgugggccagcaggacgggagcgaggacaaccagaccacgaccauccagaccaucguggagguccagccccagcucgagauggagcugacccccguggugcagacgaucgaggucaacuccuucagcggcuaccugaagcucaccgacaacguguacaucaagaacgccgacaucguggaggaggcgaagaaggucaagccgaccgugguggucaacgccgccaacguguaccugaagcacgggggcggcguggccggggcccugaacaaggcgaccaacaacgccaugcaggucgaguccgacgacuacaucgccacgaacggcccccucaagguggggggcagcugcguccuguccggccacaaccuggccaagcacugccuccacgugguggggcccaacgucaacaagggcgaggacauccagcugcugaagagcgccuacgagaacuucaaccagcacgaggugcuccuggcgccccugcucuccgccgggaucuucggcgccgacccgauccacagccugcgggugugcgucgacaccgugcgcaccaacguguaccuggccgucuucgacaagaaccucuacgacaagcugguguccagcuuccuggagaugaagagcgagaagcagguggagcagaagaucgccgagauccccaaggaggaggucaagcccuucaucaccgaguccaagcccagcguggagcagcggaagcaggacgacaagaagaucaaggcgugcguggaggaggucacgaccacccucgaggagaccaaguuccugacggagaaccugcuccuguacaucgacaucaacgggaaccugcacccggacuccgccacccucgugagcgacaucgacaucaccuuccugaagaaggacgcccccuacaucgugggcgacgucgugcaggagggcgugcugaccgccgucgugauccccacgaagaaggccgggggcaccaccgagaugcucgcgaaggcccugcgcaaggugcccaccgacaacuacaucacgaccuacccggggcagggccugaacggguacaccgucgaggaggccaagaccgugcucaagaagugcaaguccgccuucuacauccugcccagcaucaucuccaacgagaagcaggagauccugggcaccgugagcuggaaccuccgggagaugcuggcgcacgccgaggagacgcgcaagcugaugcccgucugcguggagaccaaggccaucguguccaccauccagcggaaguacaagggcaucaagauccaggagggggucguggacuacggcgcccgcuucuacuucuacaccagcaagacgaccguggccucccugaucaacacccucaacgaccugaacgagacccuggucacgaugccccucggguacgugacccacggccugaaccuggaggaggcggcccgguacaugcgcagccucaaggugccggccaccgucuccgugagcucccccgacgccgugaccgccuacaacggguaccugacgagcuccagcaagacccccgaggagcacuucaucgagaccaucucccuggcgggcagcuacaaggacuggagcuacuccggccagagcacccagcucgggaucgaguuccugaagcggggcgacaaguccgucuacuacacgagcaaccccaccaccuuccaccuggacggggaggugaucaccuucgacaaccucaagacgcugcugucccuccgcgaggugcggaccaucaaggucuucaccaccguggacaacaucaaccugcacacgcagguggucgacaugagcaugaccuacggccagcaguucggcccgaccuaccuggacggggccgacgugaccaagaucaagccccacaacucccacgagggcaagacguucuacgugcuccccaacgacgacacccugcgcgucgaggccuucgaguacuaccacaccaccgacccgagcuuccuggggcgguacauguccgcccucaaccacacgaagaaguggaaguacccccaggugaacggccugaccagcaucaagugggccgacaacaacugcuaccuggcgaccgcccuccugacccugcagcagaucgagcucaaguucaacccccccgcccugcaggacgccuacuaccgcgcgcgggccggggaggccgccaacuucugcgcccugauccucgcguacugcaacaagacggugggcgagcugggcgacguccgcgagaccauguccuaccuguuccagcacgccaaccucgacagcugcaagcgggugcugaacgucgugugcaagaccugcgggcagcagcagaccacccugaagggcguggaggccgucauguacauggggacgcucuccuacgagcaguucaagaagggcgugcagaucccgugcaccugcgggaagcaggccaccaaguaccuggugcagcaggagagccccuucgucaugauguccgccccccccgcgcaguacgagcugaagcacggcaccuucacgugcgccagcgaguacaccggcaacuaccagugcgggcacuacaagcacaucaccuccaaggagacccucuacugcaucgacggcgcccugcugacgaagagcagcgaguacaaggggccgaucaccgacguguucuacaaggagaacuccuacaccaccacgaucaagcccgugaccuacaagcucgacggcgucgugugcaccgagaucgaccccaagcuggacaacuacuacaagaaggacaacagcuacuucaccgagcagcccaucgaccuggugccgaaccagcccuaccccaacgccuccuucgacaacuucaaguucgucugcgacaacaucaaguucgccgacgaccucaaccagcugacgggguacaagaagcccgcgagccgcgagcugaaggugaccuucuucccggaccucaacggcgacguggucgccaucgacuacaagcacuacacccccuccuucaagaagggcgccaagcugcugcacaagcccaucguguggcacgugaacaacgccaccaacaaggcgacguacaagcccaacaccuggugcauccggugccucuggagcaccaagccggucgagaccuccaacagcuucgacgugcugaaguccgaggacgcccaggggauggacaaccuggccugcgaggaccucaagcccgugagcgaggaggucguggagaaccccacgauccagaaggacgugcuggagugcaacgucaagaccaccgagguggugggcgacaucauccugaagcccgccaacaacucccucaagaucaccgaggaggucgggcacacggaccugauggccgcguacguggacaacagcucccugaccaucaagaagccgaacgagcucagccgcgugcugggccugaagacccucgccacccacgggcuggccgccgucaacuccgugcccugggacacgaucgccaacuacgcgaagcccuuccugaacaagguggucagcaccaccaccaacaucgugacgcgcugccucaaccgggugugcaccaacuacaugccguacuucuucacccugcugcuccagcugugcaccuucacccgcuccacgaacagccggaucaaggccuucaugcccaccaccaucgccaagaacaccgucaaguccgugggcaaguucugccuggaggccagcuucaacuaccucaagagccccaacuucuccaagcugaucaacaucaucaucugguuccugcuccugagcgugugccugggcucccucaucuacagcacggccgcgcuggggguccugauguccaaccucggcaugcccagcuacugcaccggguaccgcgagggcuaccugaacuccaccaacgugaccaucgccacguacugcaccggcagcaucccgugcuccgugugccugagcgggcucgacucccuggacaccuaccccagccuggagaccauccagaucacgaucuccagcuucaagugggaccucaccgccuucggccuggucgccgagugguuccuggccuacauccucuucacccgguucuucuacgugcuggggcuggcggccaucaugcagcucuucuucuccuacuucgccgugcacuucaucagcaacuccuggcugauguggcugaucaucaaccugguccagauggcccccaucagcgcgauggugcgcauguacaucuucuucgccuccuucuacuacguguggaagagcuacguccacgugguggacggcugcaacagcuccaccugcaugaugugcuacaagcggaaccgcgccacgcgggucgagugcaccaccaucgugaacgggguccgccggagcuucuacguguacgccaacggcggcaagggguucugcaagcuccacaacuggaacugcgugaacugcgacaccuucugcgccggcuccacguucaucagcgacgaggucgcgcgcgaccugucccugcaguucaagcggcccaucaacccgaccgaccagagcuccuacaucguggacagcgugaccgucaagaacggguccauccaccucuacuucgacaaggccggccagaagaccuacgagcgccacagccugucccacuucgugaaccuggacaaccuccgggccaacaacacgaaggggagccugcccaucaacgugaucgucuucgacggcaaguccaagugcgaggagagcuccgccaagagcgccuccguguacuacagccagcugaugugccagcccauccuccugcuggaccaggcgcucguguccgacgucggcgacagcgccgagguggccgugaagauguucgacgccuacgucaacaccuucagcuccaccuucaacgugcccauggagaagcugaagacccugguggccacggcggaggccgagcucgccaagaacgucagccuggacaacgugcuguccaccuucaucagcgccgcgcgccagggguucguggacuccgacgucgagaccaaggacgugguggagugccucaagcugagccaccaguccgacaucgaggucaccggcgacagcugcaacaacuacaugcugacguacaacaagguggagaacaugaccccgcgggaccucggggccugcaucgacugcuccgcccgccacaucaacgcccagguggccaagagccacaacaucgcgcugaucuggaacgucaaggacuucaugucccugagcgagcagcuccggaagcagauccgcuccgccgccaagaagaacaaccugcccuucaagcugaccugcgccaccacgcgccagguggugaacgucgugaccaccaagaucgcccucaagggcgggugaggacuaguuauaagacugacuagcccgaugggccucccaacgggcccuccuccccuccuugcaccgagauuaauaaaaaaaaaaaaaaaaaaaaaaaaaaaaaaaaaaaaaaaaaaaaaaaaaaaaaaaaaaaaaaaaugcaucccccccccccccccccccccccccccccccaaaggcucuuuucagagccaccagaauu

SEQ ID NO: 21919 - RNA, 6058 nt, Artificial Sequence
  SARS-CoV-2__MT517423.1__non-structural protein 3 (NSP3) mRNA gc
aggagaaagcuuaccauggcccccaccaaggugaccuucggcgacgacacggucaucgaggugcagggguacaagagcgugaacaucaccuucgagcuggacgagcgcaucgacaagguccucaacgagaagugcuccgccuacaccguggagcugggcaccgaggugaacgaguucgcgugcgucguggccgacgccgugaucaagacgcugcagccggucagcgagcuccugaccccccuggggaucgaccucgacgagugguccauggccaccuacuaccuguucgacgagagcggcgaguucaagcuggccucccacauguacugcagcuucuacccccccgacgaggacgaggaggagggggacugcgaggaggaggaguucgagccguccacccaguacgaguacggcacggaggacgacuaccagggcaagccccucgaguucggggcgaccagcgccgcccugcagcccgaggaggagcaggaggaggacuggcuggacgacgacucccagcagaccgugggccagcaggacgggagcgaggacaaccagaccacgaccauccagaccaucguggagguccagccccagcucgagauggagcugaccccgguggugcagacgaucgaggucaacuccuucagcggcuaccugaagcucaccgacaacguguacaucaagaacgccgacaucguggaggaggcgaagaaggucaagcccaccgugguggucaacgccgccaacguguaccugaagcacgggggcggcguggccggggcccugaacaaggcgaccaacaacgccaugcaggucgaguccgacgacuacaucgccacgaacggcccccucaagguggggggcagcugcguccuguccggccacaaccuggccaagcacugccuccacgugguggggcccaacgucaacaagggcgaggacauccagcugcugaagagcgccuacgagaacuucaaccagcacgaggugcuccuggcgccgcugcucuccgccgggaucuucggcgccgaccccauccacagccugcgggugugcgucgacaccgugcgcaccaacguguaccuggccgucuucgacaagaaccucuacgacaagcugguguccagcuuccuggagaugaagagcgagaagcagguggagcagaagaucgccgagauccccaaggaggaggucaagcccuucaucaccgaguccaagccgagcguggagcagcggaagcaggacgacaacaagaucaaggcgugcguggaggaggucacgaccacccucgaggagaccaaguuccugacggagaaccugcuccuguacaucgacaucaacgggaaccugcaccccgacuccgccacccucgugagcgacaucgacaucaccuuccugaagaaggacgcccccuacaucgugggcgacgucgugcaggagggcgugcugaccgccgucgugauccccacgaagaaggccgggggcaccaccgagaugcucgcgaaggcccugcgcaaggugccgaccgacaacuacaucacgaccuaccccgggcagggccugaacggguacaccgucgaggaggccaagaccgugcucaagaagugcaaguccgccuucuacauccugcccagcaucaucuccaacgagaagcaggagauccugggcaccgugagcuggaaccuccgggagaugcuggcgcacgccgaggagacgcgcaagcugaugcccgucugcguggagaccaaggccaucguguccaccauccagcggaaguacaagggcaucaagauccaggagggggucguggacuacggcgcccgcuucuacuucuacaccagcaagacgaccguggccucccugaucaacacccucaacgaccugaacgagacccuggucacgaugccgcucggguacgugacccacggccugaaccuggaggaggcggcccgguacaugcgcagccucaaggugcccgccaccgucuccgugagcucccccgacgccgugaccgccuacaacggguaccugacgagcuccagcaagacccccgaggagcacuucaucgagaccaucucccuggcgggcagcuacaaggacuggagcuacuccggccagagcacccagcucgggaucgaguuccugaagcggggcgacaaguccgucuacuacacgagcaacccgaccaccuuccaccuggacggggaggugaucaccuucgacaaccucaagacguuccugucccugcgcgaggugcggaccaucaaggucuucaccaccguggacaacaucaaccuccacacgcagguggucgacaugagcaugaccuacggccagcaguucggccccaccuaccuggacggggccgacgugaccaagaucaagccccacaacucccacgagggcaagacguucuacgugcugccgaacgacgacacccuccgcgucgaggccuucgaguacuaccacaccaccgaccccagcuuccuggggcgguacauguccgcccugaaccacacgaagaaguggaaguacccccaggugaacggccucaccagcaucaagugggccgacaacaacugcuaccuggcgaccgcccugcucacccugcagcagaucgagcugaaguucaaccccccggcccuccaggacgccuacuaccgcgcgcgggccggggaggccgccaacuucugcgcccugauccuggcguacugcaacaagacggugggcgagcucggcgacguccgcgagaccauguccuaccuguuccagcacgccaaccuggacagcugcaagcgggugcucaacgucgugugcaagaccugcgggcagcagcagaccacccugaagggcguggaggccgucauguacauggggacgcuguccuacgagcaguucaagaagggcgugcagauccccugcaccugcgggaagcaggccaccaaguaccucgugcagcaggagagccccuucgucaugauguccgcccccccggcgcaguacgagcugaagcacggcaccuucacgugcgccagcgaguacaccggcaacuaccagugcgggcacuacaagcacaucaccuccaaggagacccuguacugcaucgacggcgcccuccugacgaagagcagcgaguacaaggggcccaucaccgacguguucuacaaggagaacuccuacaccaccacgaucaagcccgugaccuacaagcuggacggcgucgugugcaccgagaucgaccccaagcucgacaacuacuacaagaaggacaacagcuacuucaccgagcagccgaucgaccuggugcccaaccagcccuaccccaacgccuccuucgacaacuucaaguucgucugcgacaacaucaaguucgccgacgaccugaaccagcucacgggguacaagaagccggcgagccgcgagcugaaggugaccuucuuccccgaccugaacggcgacguggucgccaucgacuacaagcacuacacccccuccuucaagaagggcgccaagcuccugcacaagcccaucguguggcacgugaacaacgccaccaacaaggcgacguacaagccgaacaccuggugcauccggugccuguggagcaccaagcccgucgagaccuccaacagcuucgacgugcucaaguccgaggacgcccaggggauggacaaccuggccugcgaggaccugaagcccgugagcgaggaggucguggagaaccccacgauccagaaggacgugcucgagugcaacgucaagaccaccgagguggugggcgacaucauccugaagccggccaacaacucccugaagaucaccgaggaggucgggcacacggaccucauggccgcguacguggacaacagcucccugaccaucaagaagcccaacgagcugagccgcgugcucggccugaagacccuggccacccacgggcucgccgccgucaacuccgugcccugggacacgaucgccaacuacgcgaagccguuccugaacaagguggucagcaccaccaccaacaucgugacgcgcugccugaaccgggugugcaccaacuacaugcccuacuucuucacccuccugcugcagcucugcaccuucacccgcuccacgaacagccggaucaaggccuccaugcccaccaccaucgccaagaacaccgucaagagcgugggcaaguucugccuggaggccagcuucaacuaccugaagucccccaacuucagcaagcucaucaacaucaucaucugguuccugcugcucuccgugugccugggcagccugaucuacuccacggccgcgcucgggguccugaugagcaaccugggcaugccguccuacugcaccggguaccgcgagggcuaccucaacagcaccaacgugaccaucgccacguacugcaccggcuccauccccugcagcgugugccuguccgggcuggacagccucgacaccuaccccucccuggagaccauccagaucacgaucagcuccuucaagugggaccugaccgccuucggccucgucgccgagugguuccuggccuacauccuguucacccgguucuucuacgugcucgggcuggcggccaucaugcagcuguucuucagcuacuucgccgugcacuucaucuccaacagcuggcucauguggcugaucaucaaccugguccagauggcccccaucuccgcgauggugcgcauguacaucuucuucgccagcuucuacuacguguggaagagcuacguccacgugguggacggcugcaacuccagcaccugcaugaugugcuacaagcggaaccgcgccacgcgggucgagugcaccaccaucgugaacgggguccgccgguccuucuacguguacgccaacggcggcaagggguucugcaagcugcacaacuggaacugcgugaacugcgacaccuucugcgccggcagcacguucaucuccgacgaggucgcgcgcgaccucagccugcaguucaagcggccgaucaaccccaccgaccaguccagcuacaucguggacuccgugaccgucaagaacgggagcauccaccuguacuucgacaaggccggccagaagaccuacgagcgccacucccucagccacuucgugaaccuggacaaccugcgggccaacaacacgaaggggucccuccccaucaacgugaucgucuucgacggcaagagcaagugcgaggaguccagcgccaaguccgccagcguguacuacucccagcugaugugccagcccauccugcuccuggaccaggcgcuggugagcgacgucggcgacagcgccgagguggccgugaagauguucgacgccuacgucaacaccuucuccagcaccuucaacgugccgauggagaagcucaagacccugguggccacggcggaggccgagcuggccaagaacgucucccucgacaacgugcugagcaccuucaucuccgccgcgcgccagggguucguggacagcgacgucgagaccaaggacgugguggagugccugaagcucucccaccagagcgacaucgaggucaccggcgacuccugcaacaacuacaugcugacguacaacaagguggagaacaugaccccccgggaccugggggccugcaucgacugcagcgcccgccacaucaacgcccagguggccaagucccacaacaucgcgcucaucuggaacgucaaggacuucaugagccuguccgagcagcugcggaagcagauccgcagcgccgccaagaagaacaaccuccccuucaagcugaccugcgccaccacgcgccagguggugaacgucgugaccaccaagaucgcccugaagggcgggugaggacuaguuauaagacugacuagcccgaugggccucccaacgggcccuccuccccuccuugcaccgagauuaauaaaaaaaaaaaaaaaaaaaaaaaaaaaaaaaaaaaaaaaaaaaaaaaaaaaaaaaaaaaaaaaaugcaucccccccccccccccccccccccccccccccaaaggcucuuuucagagccaccagaauu

SEQ ID NO: 21920 - RNA, 6058 nt, Artificial Sequence
  SARS-CoV-2__MT517424.1__non-structural protein 3 (NSP3) mRNA gc
aggagaaagcuuaccauggcccccaccaaggugaccuucggcgacgacacggucaucgaggugcagggguacaagagcgugaacaucaccuucgagcuggacgagcgcaucgacaagguccucaacgagaagugcuccgccuacaccguggagcugggcaccgaggugaacgaguucgcgugcgucguggccgacgccgugaucaagacgcugcagccggucagcgagcuccugaccccccuggggaucgaccucgacgagugguccauggccaccuacuaccuguucgacgagagcggcgaguucaagcuggccucccacauguacugcagcuucuacccccccgacgaggacgaggaggagggggacugcgaggaggaggaguucgagccguccacccaguacgaguacggcacggaggacgacuaccagggcaagccccucgaguucggggcgaccagcgccgcccugcagcacgaggaggagcaggaggaggacuggcuggacgacgacucccagcagaccgugggccagcaggacgggagcgaggacaaccagaccacgaccauccagaccaucguggagguccagccccagcucgagauggagcugacccccguggugcagacgaucgaggucaacuccuucagcggcuaccugaagcucaccgacaacguguacaucaagaacgccgacaucguggaggaggcgaagaaggucaagccgaccgugguggucaacgccgccaacguguaccugaagcacgggggcggcguggccggggcccugaacaaggcgaccaacaacgccaugcaggucgaguccgacgacuacaucgccacgaacggcccccucaagguggggggcagcugcguccuguccggccacaaccuggccaagcacugccuccacgugguggggcccaacgucaacaagggcgaggacauccagcugcugaagagcgccuacgagaacuucaaccagcacgaggugcuccuggcgccccugcucuccgccgggaucuucggcgccgacccgauccacagccugcgggugugcgucgacaccgugcgcaccaacguguaccuggccgucuucgacaagaaccucuacgacaagcugguguccagcuuccuggagaugaagagcgagaagcagguggagcagaagaucgccgagauccccaaggaggaggucaagcccuucaucaccgaguccaagcccagcguggagcagcggaagcaggacgacaagaagaucaaggcgugcguggaggaggucacgaccacccucgaggagaccaaguuccugacggagaaccugcuccuguacaucgacaucaacgggaaccugcacccggacuccgccacccucgugagcgacaucgacaucaccuuccugaagaaggacgcccccuacaucgugggcgacgucgugcaggagggcgugcugaccgccgucgugauccccacgaagaaggccgggggcaccaccgagaugcucgcgaaggcccugcgcaaggugcccaccgacaacuacaucacgaccuacccggggcagggccugaacggguacaccgucgaggaggccaagaccgugcucaagaagugcaaguccgccuucuacauccugcccagcaucaucuccaacgagaagcaggagauccugggcaccgugagcuggaaccuccgggagaugcuggcgcacgccgaggagacgcgcaagcugaugcccgucugcguggagaccaaggccaucguguccaccauccagcggaaguacaagggcaucaagauccaggagggggucguggacuacggcgcccgcuucuacuucuacaccagcaagacgaccguggccucccugaucaacacccucaacgaccugaacgagacccuggucacgaugccccucggguacgugacccacggccugaaccuggaggaggcggcccgguacaugcgcagccucaaggugccggccaccgucuccgugagcucccccgacgccgugaccgccuacaacggguaccugacgagcuccagcaagacccccgaggagcacuucaucgagaccaucucccuggcgggcagcuacaaggacuggagcuacuccggccagagcacccagcucgggaucgaguuccugaagcggggcgacaaguccgucuacuacacgagcaaccccaccaccuuccaccuggacggggaggugaucaccuucgacaaccucaagacgcugcugucccuccgcgaggugcggaccaucaaggucuucaccaccguggacaacaucaaccugcacacgcagguggucgacaugagcaugaccuacggccagcaguucggcccgaccuaccuggacggggccgacgugaccaagaucaagccccacaacucccacgagggcaagacguucuacgugcuccccaacgacgacacccugcgcgucgaggccuucgaguacuaccacaccaccgacccgagcuuccuggggcgguacauguccgcccucaaccacacgaagaaguggaaguacccccaggugaacggccugaccagcaucaagugggccgacaacaacugcuaccuggcgaccgcccuccugacccugcagcagaucgagcucaaguucaacccccccgcccugcaggacgccuacuaccgcgcgcgggccggggaggccgccaacuucugcgcccugauccucgcguacugcaacaagacggugggcgagcugggcgacguccgcgagaccauguccuaccuguuccagcacgccaaccucgacagcugcaagcgggugcugaacgucgugugcaagaccugcgggcagcagcagaccacccugaagggcguggaggccgucauguacauggggacgcucuccuacgagcaguucaagaagggcgugcagaucccgugcaccugcgggaagcaggccaccaaguaccuggugcagcaggagagccccuucgucaugauguccgccccccccgcgcaguacgagcugaagcacggcaccuucacgugcgccagcgaguacaccggcaacuaccagugcgggcacuacaagcacaucaccuccaaggagacccucuacugcaucgacggcgcccugcugacgaagagcagcgaguacaaggggccgaucaccgacguguucuacaaggagaacuccuacaccaccacgaucaagcccgugaccuacaagcucgacggcgucgugugcaccgagaucgaccccaagcuggacaacuacuacaagaaggacaacagcuacuucaccgagcagcccaucgaccuggugccgaaccagcccuaccccaacgccuccuucgacaacuucaaguucgucugcgacaacaucaaguucgccgacgaccucaaccagcugacgggguacaagaagcccgcgagccgcgagcugaaggugaccuucuucccggaccucaacggcgacguggucgccaucgacuacaagcacuacacccccuccuucaagaagggcgccaagcugcugcacaagcccaucguguggcacgugaacaacgccaccaacaaggcgacguacaagcccaacaccuggugcauccggugccucuggagcaccaagccggucgagaccuccaacagcuucgacgugcugaaguccgaggacgcccaggggauggacaaccuggccugcgaggaccucaagcccgugagcgaggaggucguggagaaccccacgauccagaaggacgugcuggagugcaacgucaagaccaccgagguggugggcgacaucauccugaagcccgccaacaacucccucaagaucaccgaggaggucgggcacacggaccugauggccgcguacguggacaacagcucccugaccaucaagaagccgaacgagcucagccgcgugcugggccugaagacccucgccacccacgggcuggccgccgucaacuccgugcccugggacacgaucgccaacuacgcgaagcccuuccugaacaagguggucagcaccaccaccaacaucgugacgcgcugccucaaccgggugugcaccaacuacaugccguacuucuucacccugcugcuccagcugugcaccuucacccgcuccacgaacagccggaucaaggccuccaugcccaccaccaucgccaagaacaccgucaagagcgugggcaaguucugccuggaggccagcuucaacuaccucaagucccccaacuucagcaagcugaucaacaucaucaucugguuccugcuccuguccgugugccugggcagccucaucuacuccacggccgcgcuggggguccugaugagcaaccucggcaugcccuccuacugcaccggguaccgcgagggcuaccugaacagcaccaacgugaccaucgccacguacugcaccggcuccaucccgugcagcgugugccuguccgggcucgacagccuggacaccuaccccucccuggagaccauccagaucacgaucagcuccuucaagugggaccucaccgccuucggccuggucgccgagugguuccuggccuacauccucuucacccgguucuucuacgugcuggggcuggcggccaucaugcagcucuucuucagcuacuucgccgugcacuucaucuccaacagcuggcugauguggcugaucaucaaccugguccagauggcccccaucuccgcgauggugcgcauguacaucuucuucgccagcuucuacuacguguggaagagcuacguccacgugguggacggcugcaacuccagcaccugcaugaugugcuacaagcggaaccgcgccacgcgggucgagugcaccaccaucgugaacgggguccgccgguccuucuacguguacgccaacggcggcaagggguucugcaagcuccacaacuggaacugcgugaacugcgacaccuucugcgccggcagcacguucaucuccgacgaggucgcgcgcgaccugagccugcaguucaagcggcccaucaacccgaccgaccaguccagcuacaucguggacuccgugaccgucaagaacgggagcauccaccucuacuucgacaaggccggccagaagaccuacgagcgccacucccugagccacuucgugaaccuggacaaccuccgggccaacaacacgaaggggucccugcccaucaacgugaucgucuucgacggcaagagcaagugcgaggaguccagcgccaaguccgccagcguguacuacucccagcugaugugccagcccauccuccugcuggaccaggcgcucgugagcgacgucggcgacagcgccgagguggccgugaagauguucgacgccuacgucaacaccuucuccagcaccuucaacgugcccauggagaagcugaagacccugguggccacggcggaggccgagcucgccaagaacgucucccuggacaacgugcugagcaccuucaucuccgccgcgcgccagggguucguggacagcgacgucgagaccaaggacgugguggagugccucaagcugucccaccagagcgacaucgaggucaccggcgacuccugcaacaacuacaugcugacguacaacaagguggagaacaugaccccgcgggaccucggggccugcaucgacugcagcgcccgccacaucaacgcccagguggccaagucccacaacaucgcgcugaucuggaacgucaaggacuucaugagccuguccgagcagcuccggaagcagauccgcagcgccgccaagaagaacaaccugcccuucaagcugaccugcgccaccacgcgccagguggugaacgucgugaccaccaagaucgcccucaagggcgggugaggacuaguuauaagacugacuagcccgaugggccucccaacgggcccuccuccccuccuugcaccgagauuaauaaaaaaaaaaaaaaaaaaaaaaaaaaaaaaaaaaaaaaaaaaaaaaaaaaaaaaaaaaaaaaaaugcaucccccccccccccccccccccccccccccccaaaggcucuuuucagagccaccagaauu

SEQ ID NO: 21921 - RNA, 6058 nt, Artificial Sequence
  SARS-CoV-2__MT517425.1__non-structural protein 3 (NSP3) mRNA gc
aggagaaagcuuaccauggcccccaccaaggugaccuucggcgacgacacggucaucgaggugcagggguacaagagcgugaacaucaccuucgagcuggacgagcgcaucgacaagguccucaacgagaagugcuccgccuacaccguggagcugggcaccgaggugaacgaguucgcgugcgucguggccgacgccgugaucaagacgcugcagccggucagcgagcuccugaccccccuggggaucgaccucgacgagugguccauggccaccuacuaccuguucgacgagagcggcgaguucaagcuggccucccacauguacugcagcuucuacccccccgacgaggacgaggaggagggggacugcgaggaggaggaguucgagccguccacccaguacgaguacggcacggaggacgacuaccagggcaagccccucgaguucggggcgaccagcgccgcccugcagcccgaggaggagcaggaggaggacuggcuggacgacgacucccagcagaccgugggccagcaggacgggagcgaggacaaccagaccacgaccauccagaccaucguggagguccagccccagcucgagauggagcugaccccgguggugcagacgaucgaggucaacuccuucagcggcuaccugaagcucaccgacaacguguacaucaagaacgccgacaucguggaggaggcgaagaaggucaagcccaccgugguggucaacgccgccaacguguaccugaagcacgggggcggcguggccggggcccugaacaaggcgaccaacaacgccaugcaggucgaguccgacgacuacaucgccacgaacggcccccucaagguggggggcagcugcguccuguccggccacaaccuggccaagcacugccuccacgugguggggcccaacgucaacaagggcgaggacauccagcugcugaagagcgccuacgagaacuucaaccagcacgaggugcuccuggcgccgcugcucuccgccgggaucuucggcgccgaccccauccacagccugcgggugugcgucgacaccgugcgcaccaacguguaccuggccgucuucgacaagaaccucuacgacaagcugguguccagcuuccuggagaugaagagcgagaagcagguggagcagaagaucgccgagauccccaaggaggaggucaagcccuucaucaccgaguccaagccgagcguggagcagcggaagcaggacgacaagaagaucaaggcgugcguggaggaggucacgaccacccucgaggagaccaaguuccugacggagaaccugcuccuguacaucgacaucaacgggaaccugcaccccgacuccgccacccucgugagcgacaucgacaucaccuuccugaagaaggacgcccccuacaucgugggcgacgucgugcaggagggcgugcugaccgccgucgugauccccacgaagaaggccgggggcaccaccgagaugcucgcgaaggcccugcgcaaggugccgaccgacaacuacaucacgaccuaccccgggcagggccugaacggguacaccgucgaggaggccaagaccgugcucaagaagugcaaguccgccuucuacauccugcccagcaucaucuccaacgagaagcaggagauccugggcaccgugagcuggaaccuccgggagaugcuggcgcacgccgaggagacgcgcaagcugaugcccgucugcguggagaccaaggccaucguguccaccauccagcggaaguacaagggcaucaagauccaggagggggucguggacuacggcgcccgcuucuacuucuacaccagcaagacgaccguggccucccugaucaacacccucaacgaccugaacgagacccuggucacgaugccgcucggguacgugacccacggccugaaccuggaggaggcggcccgguacaugcgcagccucaaggugcccgccaccgucuccgugagcucccccgacgccgugaccgccuacaacggguaccugacgagcuccagcaagacccccgaggagcacuucaucgagaccaucucccuggcgggcagcuacaaggacuggagcuacuccggccagagcacccagcucgggaucgaguuccugaagcggggcgacaaguccgucuacuacacgagcaacccgaccaccuuccaccuggacggggaggugaucaccuucgacaaccucaagacgcugcugucccuccgcgaggugcggaccaucaaggucuucaccaccguggacaacaucaaccugcacacgcagguggucgacaugagcaugaccuacggccagcaguucggccccaccuaccuggacggggccgacgugaccaagaucaagccccacaacucccacgagggcaagacguucuacgugcucccgaacgacgacacccugcgcgucgaggccuucgaguacuaccacaccaccgaccccagcuuccuggggcgguacauguccgcccucaaccacacgaagaaguggaaguacccccaggugaacggccugaccagcaucaagugggccgacaacaacugcuaccuggcgaccgcccuccugacccugcagcagaucgagcucaaguucaaccccccggcccugcaggacgccuacuaccgcgcgcgggccggggaggccgccaacuucugcgcccugauccucgcguacugcaacaagacggugggcgagcugggcgacguccgcgagaccauguccuaccuguuccagcacgccaaccucgacagcugcaagcgggugcugaacgucgugugcaagaccugcgggcagcagcagaccacccugaagggcguggaggccgucauguacauggggacgcucuccuacgagcaguucaagaagggcgugcagauccccugcaccugcgggaagcaggccaccaaguaccuggugcagcaggagagccccuucgucaugauguccgcccccccggcgcaguacgagcugaagcacggcaccuucacgugcgccagcgaguacaccggcaacuaccagugcgggcacuacaagcacaucaccuccaaggagacccucuacugcaucgacggcgcccugcugacgaagagcagcgaguacaaggggcccaucaccgacguguucuacaaggagaacuccuacaccaccacgaucaagcccgugaccuacaagcucgacggcgucgugugcaccgagaucgaccccaagcuggacaacuacuacaagaaggacaacagcuacuucaccgagcagccgaucgaccuggugcccaaccagcccuaccccaacgccuccuucgacaacuucaaguucgucugcgacaacaucaaguucgccgacgaccucaaccagcugacgggguacaagaagccggcgagccgcgagcugaaggugaccuucuuccccgaccucaacggcgacguggucgccaucgacuacaagcacuacacccccuccuucaagaagggcgccaagcugcugcacaagcccaucguguggcacgugaacaacgccaccaacaaggcgacguacaagccgaacaccuggugcauccggugccucuggagcaccaagcccgucgagaccuccaacagcuucgacgugcugaaguccgaggacgcccaggggauggacaaccuggccugcgaggaccucaagcccgugagcgaggaggucguggagaaccccacgauccagaaggacgugcuggagugcaacgucaagaccaccgagguggugggcgacaucauccugaagccggccaacaacucccucaagaucaccgaggaggucgggcacacggaccugaugguggccuacguggacaacagcucccugaccaucaagaagcccaacgagcucagccgcguccugggccugaagacccucgcgacccacgggcuggccgccgugaacuccgugcccugggacacgaucgccaacuacgccaagccguuccugaacaaggucgugagcaccaccaccaacaucgugacgcgcugccucaaccgggucugcaccaacuacaugcccuacuucuucacccugcugcuccagcugugcaccuucacccgcuccacgaacagccggaucaaggcguccaugcccaccaccaucgccaagaacaccgugaagagcgugggcaaguucugccuggaggccagcuucaacuaccucaagucccccaacuucagcaagcugaucaacaucaucaucugguuccugcuccuguccgucugccugggcagccucaucuacuccacggccgcccugggggugcugaugagcaaccucggcaugccguccuacugcaccggguaccgcgagggcuaccugaacagcaccaacgugaccaucgcgacguacugcaccggcuccauccccugcagcgucugccuguccgggcucgacagccuggacaccuaccccucccuggagaccauccagaucacgaucagcuccuucaagugggaccucaccgccuucggccugguggccgagugguuccuggccuacauccucuucacccgguucuucuacgugcuggggcuggccgcgaucaugcagcucuucuucagcuacuucgccguccacuucaucuccaacagcuggcugauguggcugaucaucaaccuggugcagauggcccccaucuccgccauggugcgcauguacaucuucuucgcgagcuucuacuacgucuggaagagcuacgugcacguggucgacggcugcaacuccagcaccugcaugaugugcuacaagcggaaccgcgccacgcggguggagugcaccaccaucgucaacggggugcgccgguccuucuacguguacgccaacggcggcaagggguucugcaagcuccacaacuggaacugcgucaacugcgacaccuucugcgccggcagcacguucaucuccgacgagguggcccgcgaccugagccugcaguucaagcggccgaucaaccccaccgaccaguccagcuacaucguggacuccgucaccgugaagaacgggagcauccaccucuacuucgacaaggcgggccagaagaccuacgagcgccacucccugagccacuucgugaaccuggacaaccuccgggccaacaacacgaaggggucccugcccaucaacgucaucguguucgacggcaagagcaagugcgaggaguccagcgccaaguccgccagcguguacuacucccagcugaugugccagcccauccuccugcuggaccaggcccucgucagcgacgugggcgacagcgcggagguggccgucaagauguucgacgccuacgugaacaccuucuccagcaccuucaacgugccgauggagaagcugaagacccuggucgccacggccgaggcggagcucgccaagaacgugucccuggacaacgugcugagcaccuucaucuccgccgcccgccagggguucgucgacagcgacguggagaccaaggacguggucgagugccucaagcugucccaccagagcgacaucgaggugaccggcgacuccugcaacaacuacaugcugacguacaacaagguggagaacaugaccccccgggaccucggggcgugcaucgacugcagcgcccgccacaucaacgcccaggucgccaagucccacaacaucgcccugaucuggaacgugaaggacuucaugagccuguccgagcagcuccggaagcagauccgcagcgcggccaagaagaacaaccugcccuucaagcugaccugcgccaccacgcgccagguggucaacguggugaccaccaagaucgcccucaagggcgggugaggacuaguuauaagacugacuagcccgaugggccucccaacgggcccuccuccccuccuugcaccgagauuaauaaaaaaaaaaaaaaaaaaaaaaaaaaaaaaaaaaaaaaaaaaaaaaaaaaaaaaaaaaaaaaaaugcaucccccccccccccccccccccccccccccccaaaggcucuuuucagagccaccagaauu

SEQ ID NO: 21922 - RNA, 6058 nt, Artificial Sequence
  SARS-CoV-2__MT517427.1__non-structural protein 3 (NSP3) mRNA gc
aggagaaagcuuaccauggcccccaccaaggugaccuucggcgacgacacggucaucgaggugcagggguacaagagcgugaacaucaccuucgagcuggacgagcgcaucgacaagguccucaacgagaagugcuccgccuacaccguggagcugggcaccgaggugaacgaguucgcgugcgucguggccgacgccgugaucaagacgcugcagccggucagcgagcuccugaccccccuggggaucgaccucgacgagugguccauggccaccuacuaccuguucgacgagagcggcgaguucaagcuggccucccacauguacugcagcuucuacccccccgacgaggacgaggaggagggggacugcgaggaggaggaguucgagccguccacccaguacgaguacggcacggaggacgacuaccagggcaagccccucgaguucggggcgaccagcgccgcccugcagcccgaggaggagcaggaggaggacuggcuggacgacgacucccagcagaccgugggccagcaggacgggagcgaggacaaccagaccacgaccauccagaccaucguggagguccagccccagcucgagauggagcugaccccgguggugcagacgaucgaggucaacuccuucagcggcuaccugaagcucaccgacaacguguacaucaagaacgccgacaucguggaggaggcgaagaaggucaagcccaccgugguggucaacgccgccaacguguaccugaagcacgggggcggcguggccggggcccugaacaaggcgaccaacaacgccaugcaggucgaguccgacgacuacaucgccacgaacggcccccucaagguggggggcagcugcguccuguccggccacaaccuggccaagcacugccuccacgugguggggcccaacgucaacaagggcgaggacauccagcugcugaagagcgccuacgagaacuucaaccagcacgaggugcuccuggcgccgcugcucuccgccgggaucuucggcgccgaccccauccacagccugcggguguucgucgacaccgugcgcaccaacguguaccuggccgucuucgacaagaaccucuacgacaagcugguguccagcuuccuggagaugaagagcgagaagcagguggagcagaagaucgccgagauccccaaggaggaggucaagcccuucaucaccgaguccaagccgagcguggagcagcggaagcaggacgacaagaagaucaaggcgugcguggaggaggucacgaccacccucgaggagaccaaguuccugacggagaaccugcuccuguacaucgacaucaacgggaaccugcaccccgacuccgccacccucgugagcgacaucgacaucaccuuccugaagaaggacgcccccuacaucgugggcgacgucgugcaggagggcgugcugaccgccgucgugauccccacgaagaaggccgggggcaccaccgagaugcucgcgaaggcccugcgcaaggugccgaccgacaacuacaucacgaccuaccccgggcagggccugaacggguacaccgucgaggaggccaagaccgugcucaagaagugcaaguccgccuucuacauccugcccagcaucaucuccaacgagaagcaggagauccugggcaccgugagcuggaaccuccgggagaugcuggcgcacgccgaggagacgcgcaagcugaugcccgucugcguggagaccaaggccaucguguccaccauccagcggaaguacaagggcaucaagauccaggagggggucguggacuacggcgcccgcuucuacuucuacaccagcaagacgaccguggccucccugaucaacacccucaacgaccugaacgagacccuggucacgaugccgcucggguacgugacccacggccugaaccuggaggaggcggcccgguacaugcgcagccucaaggugcccgccaccgucuccgugagcucccccgacgccgugaccgccuacaacggguaccugacgagcuccagcaagacccccgaggagcacuucaucgagaccaucucccuggcgggcagcuacaaggacuggagcuacuccggccagagcacccagcucgggaucgaguuccugaagcggggcgacaaguccgucuacuacacgagcaacccgaccaccuuccaccuggacggggaggugaucaccuucgacaaccucaagacgcugcugucccuccgcgaggugcggaccaucaaggucuucaccaccguggacaacaucaaccugcacacgcagguggucgacaugagcaugaccuacggccagcaguucggccccaccuaccuggacggggccgacgugaccaagaucaagccccacaacucccacgagggcaagacguucuacgugcucccgaacgacgacacccugcgcgucgaggccuucgaguacuaccacaccaccgaccccagcuuccuggggcgguacauguccgcccucaaccacacgaagaaguggaaguacccccaggugaacggccugaccagcaucaagugggccgacaacaacugcuaccuggcgaccgcccuccugacccugcagcagaucgagcucaaguucaaccccccggcccugcaggacgccuacuaccgcgcgcgggccggggaggccgccaacuucugcgcccugauccucgcguacugcaacaagacggugggcgagcugggcgacguccgcgagaccauguccuaccuguuccagcacgccaaccucgacagcugcaagcgggugcugaacgucgugugcaagaccugcgggcagcagcagaccacccugaagggcguggaggccgucauguacauggggacgcucuccuacgagcaguucaagaagggcgugcagauccccugcaccugcgggaagcaggccaccaaguaccuggugcagcaggagagccccuucgucaugauguccgcccccccggcgcaguacgagcugaagcacggcaccuucacgugcgccagcgaguacaccggcaacuaccagugcgggcacuacaagcacaucaccuccaaggagacccucuacugcaucgacggcgcccugcugacgaagagcagcgaguacaaggggcccaucaccgacguguucuacaaggagaacuccuacaccaccacgaucaagcccgugaccuacaagcucgacggcgucgugugcaccgagaucgaccccaagcuggacaacuacuacaagaaggacaacagcuacuucaccgagcagccgaucgaccuggugcccaaccagcccuaccccaacgccuccuucgacaacuucaaguucgucugcgacaacaucaaguucgccgacgaccucaaccagcugacgggguacaagaagccggcgagccgcgagcugaaggugaccuucuuccccgaccucaacggcgacguggucgccaucgacuacaagcacuacacccccuccuucaagaagggcgccaagcugcugcacaagcccaucguguggcacgugaacaacgccaccaacaaggcgacguacaagccgaacaccuggugcauccggugccucuggagcaccaagcccgucgagaccuccaacagcuucgacgugcugaaguccgaggacgcccaggggauggacaaccuggccugcgaggaccucaagcccgugagcgaggaggucguggagaaccccacgauccagaaggacgugcuggagugcaacgucaagaccaccgagguggugggcgacaucauccugaagccggccaacaacucccucaagaucaccgaggaggucgggcacacggaccugauggccgcguacguggacaacagcucccugaccaucaagaagcccaacgagcucagccgcgugcugggccugaagacccucgccacccacgggcuggccgccgucaacuccgugcccugggacacgaucgccaacuacgcgaagccguuccugaacaagguggucagcaccaccaccaacaucgugacgcgcugccucaaccgggugugcaccaacuacaugcccuacuucuucacccugcugcuccagcugugcaccuucacccgcuccacgaacagccggaucaaggccuccaugcccaccaccaucgccaagaacaccgucaagagcgugggcaaguucugccuggaggccagcuucaacuaccucaagucccccaacuucagcaagcugaucaacaucaucaucugguuccugcuccuguccgugugccugggcagccucaucuacuccacggccgcgcuggggguccugaugagcaaccucggcaugccguccuacugcaccggguaccgcgagggcuaccugaacagcaccaacgugaccaucgccacguacugcaccggcuccauccccugcagcgugugccuguccgggcucgacagccuggacaccuaccccucccuggagaccauccagaucacgaucagcuccuucaagugggaccucaccgccuucggccuggucgccgagugguuccuggccuacauccucuucacccgguucuucuacgugcuggggcuggcggccaucaugcagcucuucuucagcuacuucgccgugcacuucaucuccaacagcuggcugauguggcugaucaucaaccugguccagauggcccccaucuccgcgauggugcgcauguacaucuucuucgccagcuucuacuacguguggaagagcuacguccacgugguggacggcugcaacuccagcaccugcaugaugugcuacaagcggaaccgcgccacgcgggucgagugcaccaccaucgugaacgggguccgccgguccuucuacguguacgccaacggcggcaagggguucugcaagcuccacaacuggaacugcgugaacugcgacaccuucugcgccggcagcacguucaucuccgacgaggucgcgcgcgaccugagccugcaguucaagcggccgaucaaccccaccgaccaguccagcuacaucguggacuccgugaccgucaagaacgggagcauccaccucuacuucgacaaggccggccagaagaccuacgagcgccacucccugagccacuucgugaaccuggacaaccuccgggccaacaacacgaaggggucccugcccaucaacgugaucgucuucgacggcaagagcaagugcgaggaguccagcgccaaguccgccagcguguacuacucccagcugaugugccagcccauccuccugcuggaccaggcgcucgugagcgacgucggcgacagcgccgagguggccgugaagauguucgacgccuacgucaacaccuucuccagcaccuucaacgugccgauggagaagcugaagacccugguggccacggcggaggccgagcucgccaagaacgucucccuggacaacgugcugagcaccuucaucuccgccgcgcgccagggguucguggacagcgacgucgagaccaaggacgugguggagugccucaagcugucccaccagagcgacaucgaggucaccggcgacuccugcaacaacuacaugcugacguacaacaagguggagaacaugaccccccgggaccucggggccugcaucgacugcagcgcccgccacaucaacgcccagguggccaagucccacaacaucgcgcugaucuggaacgucaaggacuucaugagccuguccgagcagcuccggaagcagauccgcagcgccgccaagaagaacaaccugcccuucaagcugaccugcgccaccacgcgccagguggugaacgucgugaccaccaagaucgcccucaagggcgggugaggacuaguuauaagacugacuagcccgaugggccucccaacgggcccuccuccccuccuugcaccgagauuaauaaaaaaaaaaaaaaaaaaaaaaaaaaaaaaaaaaaaaaaaaaaaaaaaaaaaaaaaaaaaaaaaugcaucccccccccccccccccccccccccccccccaaaggcucuuuucagagccaccagaauu

SEQ ID NO: 21923 - RNA, 6058 nt, Artificial Sequence
  SARS-CoV-2__MT511066.1__non-structural protein 3 (NSP3) mRNA gc
aggagaaagcuuaccauggcccccaccaaggugaccuucggcgacgacacggucaucgaggugcagggguacaagagcgugaacaucaccuucgagcuggacgagcgcaucgacaagguccucaacgagaagugcuccgccuacaccguggagcugggcaccgaggugaacgaguucgcgugcgucguggccgacgccgugaucaagacgcugcagccggucagcgagcuccugaccccccuggggaucgaccucgacgagugguccauggccaccuacuaccuguucgacgagagcggcgaguucaagcuggccucccacauguacugcagcuucuacccccccgacgaggacgaggaggagggggacugcgaggaggaggaguucgagccguccacccaguacgaguacggcacggaggacgacuaccagggcaagccccucgaguucggggcgaccagcgccgcccugcagcccgaggaggagcaggaggaggacuggcuggacgacgacucccagcagaccgugggccagcaggacgggagcgaggacaaccagaccacgaccauccagaccaucguggagguccagccccagcucgagauggagcugaccccgguggugcagacgaucgaggucaacuccuucagcggcuaccugaagcucaccgacaacguguacaucaagaacgccgacaucguggaggaggcgaagaaggucaagcccaccgugguggucaacgccgccaacguguaccugaagcacgggggcggcguggccggggcccugaacaaggcgaccaacaacgccaugcaggucgaguccgacgacuacaucgccacgaacggcccccucaagguggggggcagcugcguccuguccggccacaaccuggccaagcacugccuccacgugguggggcccaacgucaacaagggcgaggacauccagcugcugaagagcgccuacgagaacuucaaccagcacgaggugcuccuggcgccgcugcucuccgccgggaucuucggcgccgaccccauccacagccugcgggugugcgucgacaccgugcgcaccaacguguaccuggccgucuucgacaagaaccucuacgacaagcugguguccagcuuccuggagaugaagagcgagaagcagguggagcagaagaucgccgagauccccaaggaggaggucaagcccuucaucaccgaguccaagccgagcguggagcagcggaagcaggacgacaagaagaucaaggcgugcguggaggaggucacgaccacccucgaggagaccaaguuccugacggagaaccugcuccuguacaucgacaucaacgggaaccugcaccccgacuccgccacccucgugagcgacaucgacaucaccuuccugaagaaggacgcccccuacaucgugggcgacgucgugcaggagggcgugcugaccgccgucgugauccccacgaagaaggccgggggcaccaccgagaugcucgcgaaggcccugcgcaaggugccgaccgacaacuacaucacgaccuaccccgggcagggccugaacggguacaccgucgaggaggccaagaccgugcucaagaagugcaaguccgccuucuacauccugcccagcaucaucuccaacgagaagcaggagauccugggcaccgugagcuggaaccuccgggagaugcuggcgcacgccgaggagacgcgcaagcugaugcccgucugcguggagaccaaggccaucguguccaccauccagcggaaguacaagggcaucaagauccaggagggggucguggacuacggcgcccgcuucuacuucuacaccagcaagacgaccguggccucccugaucaacacccucaacgaccugaacgagacccuggucacgaugccgcucggguacgugacccacggccugaaccuggaggaggcggcccgguacaugcgcagccucaaggugcccgccaccgucuccgugagcucccccgacgccgugaccgccuacaacggguaccugacgagcuccagcaagacccccgaggagcacuucaucgagaccaucucccuggcgggcagcuacaaggacuggagcuacuccggccagagcacccagcucgggaucgaguuccugaagcggggcgacaaguccgucuacuacacgagcaacccgaccaccuuccaccuggacggggaggugaucaccuucgacaaccucaagacgcugcugucccuccgcgaggugcggaccaucaaggucuucaccaccguggacaacaucaaccugcacacgcagguggucgacaugagcaugaccuacggccagcaguucggccccaccuaccuggacggggccgacgugaccaagaucaagccccacaacucccacgagggcaagacguucuacgugcucccgaacgacgacacccugcgcgucgaggccuucgaguacuaccacaccaccgaccccagcuuccuggggcgguacauguccgcccucaaccacacgaagaaguggaaguacccccaggugaacggccugaccagcaucaagugggccgacaacaacugcuaccuggcgaccgcccuccugacccugcagcagaucgagcucaaguucaaccccccggcccugcaggacgccuacuaccgcgcgcgggccggggaggccgccaacuucugcgcccugauccucgcguacugcaacaagacggugggcgagcugggcgacguccgcgagaccauguccuaccuguuccagcacgccaaccucgacagcugcaagcgggugcugaacgucgugugcaagaccugcgggcagcagcagaccacccugaagggcguggaggccgucauguacauggggacgcucuccuacgagcaguucaagaagggcgugcagauccccugcaccugcgggaagcaggccaccaaguaccuggugcagcaggagagccccuucgucaugauguccgcccccccggcgcaguacgagcugaagcacggcaccuucacgugcgccagcgaguacaccggcaacuaccagugcgggcacuacaagcacaucaccuccaaggagacccucuacugcaucgacggcgcccugcugacgaagagcagcgaguacaaggggcccaucaccgacguguucuacaaggagaacuccuacaccaccacgaucaagcccgugaccuacaagcucgacggcgucgugugcaccgagaucgaccccaagcuggacaacuacuacaagaaggacaacagcuacuucaccgagcagccgaucgaccuggugcccaaccagcccuaccccaacgccuccuucgacaacuucaaguucgucugcgacaacaucaaguucgccgacgaccucaaccagcugacgggguacaagaagccggcgagccgcgagcugaaggugaccuucuuccccgaccucaacggcgacguggucgccaucgacuacaagcacuacacccccuccuucaagaagggcgccaagcugcugcacaagcccaucguguggcacgugaacaacgccaccaacaaggcgacguacaagccgaacaccuggugcauccggugccucuggagcaccaagcccgucgagaccuccaacagcuucgacgugcugaaguccgaggacgcccaggggauggacaaccuggccugcgaggaccucaagcccgugagcgaggaggucguggagaaccccacgauccagaaggacgugcuggagugcaacgucaagaccaccgagguggugggcgacaucauccugaagccggccaacaacucccucaagaucaccgaggaggucgggcacacggaccugauggccgcguacguggacaacagcucccugaccaucaagaagcccaacgagcucagccgcgugcugggccugaagacccucgccacccacgggcuggccgccgucaacuccgugcccugggacacgaucgccaacuacgcgaagccguuccugaacaagguggucagcaccaccaccaacaucgugacgcgcugccucaaccgggugugcaccaacuacaugcccuacuucuucacccugcugcuccagcugugcaccuucacccgcuccacgaacagccggaucaaggccuccaugcccaccaccaucgccaagaacaccgucaagagcgugggcaaguucugccuggaggccagcuucaacuaccucaagucccccaacuucagcaagcugaucaacaucaucaucugguuccugcuccuguccgugugccugggcagccucaucuacuccacggccgcgcuggggguccugaugagcaaccucggcaugccguccuacugcaccggguaccgcgagggcuaccugaacagcaccaacgugaccaucgccacguacugcaccggcuccauccccugcagcgugugccuguccgggcucgacagccuggacaccuaccccucccuggagaccauccagaucacgaucagcuccuucaagugggaccucaccgccuucggccuggucgccgagugguuccuggccuacauccucuucacccgguucuucuacgugcuggggcuggcggccaucaugcagcucuucuucagcuacuucgccgugcacuucaucuccaacagcuggcugauguggcugaucaucaaccugguccagauggcccccaucuccgcgauggugcgcauguacaucuucuucgccagcuucuacuacguguggaagagcuacguccacgugguggacggcugcaacuccagcaccugcaugaugugcuacaagcggaaccgcgccacgcgggucgagugcaccaccaucgugaacgggguccgccgguccuucuacguguacgccaacggcggcaagggguucugcaagcuccacaacuggaacugcgugaacugcgacaccuucugcgccggcagcacguucaucuccgacgaggucgcgcgcgaccugagccugcaguucaagcggccgaucaaccccaccgaccaguccagcuacaucguggacuccgugaccgucaagaacgggagcauccaccucuacuucgacaaggccggccagaagaccuacgagcgccacucccugagccacuucgugaaccuggacaaccuccgggccaacaacacgaaggggucccugcccaucaacgugaucgucuucgacggcaagagcaagugcgaggaguccagcgccaaguccgccagcguguacuacucccagcugaugugccagcccauccuccugcuggaccaggcgcucgugagcgacgucggcgacagcgccgagguggccgugaagauguucgacgccuacgucaacaccuucuccagcaccuucgacgugccgauggagaagcugaagacccugguggccacggcggaggccgagcucgccaagaacgucucccuggacaacgugcugagcaccuucaucuccgccgcgcgccagggguucguggacagcgacgucgagaccaaggacgugguggagugccucaagcugucccaccagagcgacaucgaggucaccggcgacuccugcaacaacuacaugcugacguacaacaagguggagaacaugaccccccgggaccucggggccugcaucgacugcagcgcccgccacaucaacgcccagguggccaagucccacaacaucgcgcugaucuggaacgucaaggacuucaugagccuguccgagcagcuccggaagcagauccgcagcgccgccaagaagaacaaccugcccuucaagcugaccugcgccaccacgcgccagguggugaacgucgugaccaccaagaucgcccucaagggcgggugaggacuaguuauaagacugacuagcccgaugggccucccaacgggcccuccuccccuccuugcaccgagauuaauaaaaaaaaaaaaaaaaaaaaaaaaaaaaaaaaaaaaaaaaaaaaaaaaaaaaaaaaaaaaaaaaugcaucccccccccccccccccccccccccccccccaaaggcucuuuucagagccaccagaauu

SEQ ID NO: 21924 - RNA, 6058 nt, Artificial Sequence
  SARS-CoV-2__MT511068.1__non-structural protein 3 (NSP3) mRNA gc
aggagaaagcuuaccauggcccccaccaaggugaccuucggcgacgacacggucaucgaggugcagggguacaagagcgugaacaucaccuucgagcuggacgagcgcaucgacaagguccucaacgagaagugcuccgccuacaccguggagcugggcaccgaggugaacgaguucgcgugcgucguggccgacgccgugaucaagacgcugcagccggucagcgagcuccugaccccccuggggaucgaccucgacgagugguccauggccaccuacuaccuguucgacgagagcggcgaguucaagcuggccucccacauguacugcagcuucuacccccccgacgaggacgaggaggagggggacugcgaggaggaggaguucgagccguccacccaguacgaguacggcacggaggacgacuaccagggcaagccccucgaguucggggcgaccagcgccgcccugcagcccgaggaggagcaggaggaggacuggcuggacgacgacucccagcagaccgugggccagcaggacgggagcgaggacaaccagaccacgaccauccagaccaucguggagguccagccccagcucgagauggagcugaccccgguggugcagacgaucgaggucaacuccuucagcggcuaccugaagcucaccgacaacguguacaucaagaacgccgacaucguggaggaggcgaagaaggucaagcccaccgugguggucaacgccgccaacguguaccugaagcacgggggcggcguggccggggcccugaacaaggcgaccaacaacgccaugcaggucgaguccgacgacuacaucgccacgaacggcccccucaagguggggggcagcugcguccuguccggccacaaccuggccaagcacugccuccacgugguggggcccaacgucaacaagggcgaggacauccagcugcugaagagcgccuacgagaacuucaaccagcacgaggugcuccuggcgccgcugcucuccgccgggaucuucggcgccgaccccauccacagccugcgggugugcgucgacaccgugcgcaccaacguguaccuggccgucuucgacaagaaccucuacgacaagcugguguccagcuuccuggagaugaagagcgagaagcagguggagcagaagaucgccgagauccccaaggaggaggucaagcccuucaucaccgaguccaagccgagcguggagcagcggaagcaggacgacaagaagaucaaggcgugcguggaggaggucacgaccacccucgaggagaccaaguuccugacggagaaccugcuccuguacaucgacaucaacgggaaccugcaccccgacuccgccacccucgugagcgacaucgacaucaccuuccugaagaaggacgcccccuacaucgugggcgacgucgugcaggagggcgugcugaccgccgucgugauccccacgaagaaggccgggggcaccaccgagaugcucgcgaaggcccugcgcaaggugccgaccgacaacuacaucacgaccuaccccgggcagggccugaacggguacaccgucgaggaggccaagaccgugcucaagaagugcaaguccgccuucuacauccugcccagcaucaucuccaacgagaagcaggagauccugggcaccgugagcuggaaccuccgggagaugcuggcgcacgccgaggagacgcgcaagcugaugcccgucugcguggagaccaaggccaucguguccaccauccagcggaaguacaagggcaucaagauccaggagggggucguggacuacggcgcccgcuucuacuucuacaccagcaagacgaccguggccucccugaucaacacccucaacgaccugaacgagacccuggucacgaugccgcucggguacgugacccacggccugaaccuggaggaggcggcccgguacaugcgcagccucaaggugcccgccaccgucuccgugagcucccccgacgccgugaccgccuacaacggguaccugacgagcuccagcaagacccccgaggagcacuucaucgagaccaucucccuggcgggcagcuacaaggacuggagcuacuccggccagagcacccagcucgggaucgaguuccugaagcggggcgacaaguccgucuacuacacgagcaacccgaccaccuuccaccuggacggggaggugaucaccuucgacaaccucaagacgcugcugucccuccgcgaggugcggaccaucaaggucuucaccaccguggacaacaucaaccugcacacgcagguggucgacaugagcaugaccuacggccagcaguucggccccaccuaccuggacggggccgacgugaccaagaucaagccccacaacucccacgagggcaagacguucuacgugcucccgaacgacgacacccugcgcgucgaggccuucgaguacuaccacaccaccgaccccagcuuccuggggcgguacauguccgcccucaaccacacgaagaaguggaaguacccccaggugaacggccugaccagcaucaagugggccgacaacaacugcuaccuggcgaccgcccuccugacccugcagcagaucgagcucaaguucaaccccccggcccugcaggacgccuacuaccgcgcgcgggccggggaggccgccaacuucugcgcccugauccucgcguacugcaacaagacggugggcgagcugggcgacguccgcgagaccauguccuaccuguuccagcacgccaaccucgacagcugcaagcgggugcugaacgucgugugcaagaccugcgggcagcagcagaccacccugaagggcguggaggccgucauguacauggggacgcucuccuacgagcaguucaagaagggcgugcagauccccugcaccugcgggaagcaggccaccaaguaccuggugcagcaggagagccccuucgucaugauguccgcccccccggcgcaguacgagcugaagcacggcaccuucacgugcgccagcgaguacaccggcaacuaccagugcgggcacuacaagcacaucaccuccaaggagacccucuacugcaucgacggcgcccugcugacgaagagcagcgaguacaaggggcccaucaccgacguguucuacaaggagaacuccuacaccaccacgaucaagcccgugaccuacaagcucgacggcgucgugugcaccgagaucgaccccaagcuggacaacuacuacaagaaggacaacagcuacuucaccgagcagccgaucgaccuggugcccaaccagcccuaccccaacgccuccuucgacaacuucaaguucgucugcgacaacaucaaguucgccgacgaccucaaccagcugacgggguacaagaagccggcgagccgcgagcugaaggugaccuucuuccccgaccucaacggcgacguggucgccaucgacuacaagcacuacacccccuccuucaagaagggcgccaagcugcugcacaagcccaucguguggcacgugaacaacgccaccaacaaggcgacguacaagccgaacaccuggugcauccggugccucuggagcaccaagcccgucgagaccuccaacagcuucgacgugcugaaguccgaggacgcccaggggauggacaaccuggccugcgaggaccucaagcccgugagcgaggaggucguggagaaccccacgauccagaaggacgugcuggagugcaacgucaagaccaccgagguggugggcgacaucauccugaagccggccaacaacucccucaagaucaccgaggaggucgggcacacggaccugauggccgcguacguggacaacagcucccugaccaucaagaagcccaacgagcucagccgcgugcugggccugaagacccucgccacccacgggcuggccgccgucaacuccgugcccugggacacgaucgccaacuacgcgaagccguuccugaacaagguggucagcaccaccaccaacaucgugacgcgcugccucaaccgggugugcaccaacuacaugcccuacuucuucacccugcugcuccagcugugcaccuucacccgcuccacgaacagccggaucaaggccuccaugcccaccaccaucgccaagaacaccgucaagagcgugggcaaguucugccuggaggccagcuucaacuaccucaagucccccaacuucagcaagcugaucaacaucaucaucugguuccugcuccuguccgugugccugggcagccucaucuacuccacggccgcgcuggggguccugaugagcaaccucggcaugccguccuacugcaccggguaccgcgagggcuaccugaacagcaccaacgugaccaucgccacguacugcaccggcuccauccccugcagcgugugccuguccgggcucgacagccuggacaccuaccccucccuggagaccauccagaucacgaucagcuccuucaagugggaccucaccgccuucggccuggucgccgagugguuccuggccuacauccucuucacccgguucuucuacgugcuggggcuggcggccaucaugcagcucuucuucagcuacuucgccgugcacuucaucuccaacagcuggcugauguggcugaucaucaaccugguccagauggcccccaucuccgcgauggugcgcauguacaucuucuucgccagcuucuacuacguguggaagagcuacguccacgugguggacggcugcaacuccagcaccugcaugaugugcuacaagcggaaccgcgccacgcgggucgagugcaccaccaucgugaacgggguccgccgguccuucuacguguacgccaacggcggcaagggguucugcaagcuccacaacuggaacugcgugaacugcgacaccuucugcgccggcagcacguucaucuccgacgaggucgcgcgcgaccugagccugcaguucaagcggccgaucaaccccaccgaccaguccagcuacaucguggacuccgugaccgucaagaacgggagcauccaccucuacuucgacaaggccggccagaagaccuacgagcgccacucccugagccacuucgugaaccuggacaaccuccgggccaacaacacgaaggggucccugcccaucaacgugaucgucuucgacggcaagagcaagugcgaggaguccagcgccaaguccgccagcguguacuacucccagcugaugugccagcccauccuccugcuggaccaggcgcucgugagcgacgucggcgacagcgccgaggugguggucaagauguucgacgccuacgugaacaccuucuccagcaccuucgacgugccgauggagaagcugaagacccuggucgccacggccgaggcggagcucgccaagaacgugucccuggacaacgugcugagcaccuucaucuccgccgcccgccagggguucgucgacagcgacguggagaccaaggacguggucgagugccucaagcugucccaccagagcgacaucgaggugaccggcgacuccugcaacaacuacaugcugacguacaacaagguggagaacaugaccccccgggaccucggggcgugcaucgacugcagcgcccgccacaucaacgcccaggucgccaagucccacaacaucgcccugaucuggaacgugaaggacuucaugagccuguccgagcagcuccggaagcagauccgcagcgcggccaagaagaacaaccugcccuucaagcugaccugcgccaccacgcgccagguggucaacguggugaccaccaagaucgcccucaagggcgggugaggacuaguuauaagacugacuagcccgaugggccucccaacgggcccuccuccccuccuugcaccgagauuaauaaaaaaaaaaaaaaaaaaaaaaaaaaaaaaaaaaaaaaaaaaaaaaaaaaaaaaaaaaaaaaaaugcaucccccccccccccccccccccccccccccccaaaggcucuuuucagagccaccagaauu

SEQ ID NO: 21925 - RNA, 6058 nt, Artificial Sequence
  SARS-CoV-2__MT511069.1__non-structural protein 3 (NSP3) mRNA gc
aggagaaagcuuaccauggcccccaccaaggugaccuucggcgacgacacggucaucgaggugcagggguacaagagcgugaacaucaccuucgagcuggacgagcgcaucgacaagguccucaacgagaagugcuccgccuacaccguggagcugggcaccgaggugaacgaguucgcgugcgucguggccgacgccgugaucaagacgcugcagccggucagcgagcuccugaccccccuggggaucgaccucgacgagugguccauggccaccuacuaccuguucgacgagagcggcgaguucaagcuggccucccacauguacugcagcuucuacccccccgacgaggacgaggaggagggggacugcgaggaggaggaguucgagccguccacccaguacgaguacggcacggaggacgacuaccagggcaagccccucgaguucggggcgaccagcgccgcccugcagcccgaggaggagcaggaggaggacuggcuggacgacgacucccagcagaccgugggccagcaggacgggagcgaggacaaccagaccacgaccauccagaccaucguggagguccagccccagcucgagauggagcugaccccgguggugcagacgaucgaggucaacuccuucagcggcuaccugaagcucaccgacaacguguacaucaagaacgccgacaucguggaggaggcgaagaaggucaagcccaccgugguggucaacgccgccaacguguaccugaagcacgggggcggcguggccggggcccugaacaaggcgaccaacaacgccaugcaggucgaguccgacgacuacaucgccacgaacggcccccucaagguggggggcagcugcguccuguccggccacaaccuggccaagcacugccuccacgugguggggcccaacgucaacaagggcgaggacauccagcugcugaagagcgccuacgagaacuucaaccagcacgaggugcuccuggcgccgcugcucuccgccgggaucuucggcgccgaccccauccacagccugcgggugugcgucgacaccgugcgcaccaacguguaccuggccgucuucgacaagaaccucuacgacaagcugguguccagcuuccuggagaugaagagcgagaagcagguggagcagaagaucgccgagauccccaaggaggaggucaagcccuucaucaccgaguccaagccgagcguggagcagcggaagcaggacgacaagaagaucaaggcgugcguggaggaggucacgaccacccucgaggagaccaaguuccugacggagaaccugcuccuguacaucgacaucaacgggaaccugcaccccgacuccgccacccucgugagcgacaucgacaucaccuuccugaagaaggacgcccccuacaucgugggcgacgucgugcaggagggcgugcugaccgccgucgugauccccacgaagaacgccgggggcaccaccgagaugcucgcgaaggcccugcgcaaggugccgaccgacaacuacaucacgaccuaccccgggcagggccugaacggguacaccgucgaggaggccaagaccgugcucaagaagugcaaguccgccuucuacauccugcccagcaucaucuccaacgagaagcaggagauccugggcaccgugagcuggaaccuccgggagaugcuggcgcacgccgaggagacgcgcaagcugaugcccgucugcguggagaccaaggccaucguguccaccauccagcggaaguacaagggcaucaagauccaggagggggucguggacuacggcgcccgcuucuacuucuacaccagcaagacgaccguggccucccugaucaacacccucaacgaccugaacgagacccuggucacgaugccgcucggguacgugacccacggccugaaccuggaggaggcggcccgguacaugcgcagccucaaggugcccgccaccgucuccgugagcucccccgacgccgugaccgccuacaacggguaccugacgagcuccagcaagacccccgaggagcacuucaucgagaccaucucccuggcgggcagcuacaaggacuggagcuacuccggccagagcacccagcucgggaucgaguuccugaagcggggcgacaaguccgucuacuacacgagcaacccgaccaccuuccaccuggacggggaggugaucaccuucgacaaccucaagacgcugcugucccuccgcgaggugcggaccaucaaggucuucaccaccguggacaacaucaaccugcacacgcagguggucgacaugagcaugaccuacggccagcaguucggccccaccuaccuggacggggccgacgugaccaagaucaagccccacaacucccacgagggcaagacguucuacgugcucccgaacgacgacacccugcgcgucgaggccuucgaguacuaccacaccaccgaccccagcuuccuggggcgguacauguccgcccucaaccacacgaagaaguggaaguacccccaggugaacggccugaccagcaucaagugggccgacaacaacugcuaccuggcgaccgcccuccugacccugcagcagaucgagcucaaguucaaccccccggcccugcaggacgccuacuaccgcgcgcgggccggggaggccgccaacuucugcgcccugauccucgcguacugcaacaagacggugggcgagcugggcgacguccgcgagaccauguccuaccuguuccagcacgccaaccucgacagcugcaagcgggugcugaacgucgugugcaagaccugcgggcagcagcagaccacccugaagggcguggaggccgucauguacauggggacgcucuccuacgagcaguucaagaagggcgugcagauccccugcaccugcgggaagcaggccaccaaguaccuggugcagcaggagagccccuucgucaugauguccgcccccccggcgcaguacgagcugaagcacggcaccuucacgugcgccagcgaguacaccggcaacuaccagugcgggcacuacaagcacaucaccuccaaggagacccucuacugcaucgacggcgcccugcugacgaagagcagcgaguacaaggggcccaucaccgacguguucuacaaggagaacuccuacaccaccacgaucaagcccgugaccuacaagcucgacggcgucgugugcaccgagaucgaccccaagcuggacaacuacuacaagaaggacaacagcuacuucaccgagcagccgaucgaccuggugcccaaccagcccuaccccaacgccuccuucgacaacuucaaguucgucugcgacaacaucaaguucgccgacgaccucaaccagcugacgggguacaagaagccggcgagccgcgagcugaaggugaccuucuuccccgaccucaacggcgacguggucgccaucgacuacaagcacuacacccccuccuucaagaagggcgccaagcugcugcacaagcccaucguguggcacgugaacaacgccaccaacaaggcgacguacaagccgaacaccuggugcauccggugccucuggagcaccaagcccgucgagaccuccaacagcuucgacgugcugaaguccgaggacgcccaggggauggacaaccuggccugcgaggaccucaagcccgugagcgaggaggucguggagaaccccacgauccagaaggacgugcuggagugcaacgucaagaccaccgagguggugggcgacaucauccugaagccggccaacaacucccucaagaucaccgaggaggucgggcacacggaccugauggccgcguacguggacaacagcucccugaccaucaagaagcccaacgagcucagccgcgugcugggccugaagacccucgccacccacgggcuggccgccgucaacuccgugcccugggacacgaucgccaacuacgcgaagccguuccugaacaagguggucagcaccaccaccaacaucgugacgcgcugccucaaccgggugugcaccaacuacaugcccuacuucuucacccugcugcuccagcugugcaccuucacccgcuccacgaacagccggaucaaggccuccaugcccaccaccaucgccaagaacaccgucaagagcgugggcaaguucugccuggaggccagcuucaacuaccucaagucccccaacuucagcaagcugaucaacaucaucaucugguuccugcuccuguccgugugccugggcagccucaucuacuccacggccgcgcuggggguccugaugagcaaccucggcaugccguccuacugcaccggguaccgcgagggcuaccugaacagcaccaacgugaccaucgccacguacugcaccggcuccauccccugcagcgugugccuguccgggcucgacagccuggacaccuaccccucccuggagaccauccagaucacgaucagcuccuucaagugggaccucaccgccuucggccuggucgccgagugguuccuggccuacauccucuucacccgguucuucuacgugcuggggcuggcggccaucaugcagcucuucuucagcuacuucgccgugcacuucaucuccaacagcuggcugauguggcugaucaucaaccugguccagauggcccccaucuccgcgauggugcgcauguacaucuucuucgccagcuucuacuacguguggaagagcuacguccacgugguggacggcugcaacuccagcaccugcaugaugugcuacaagcggaaccgcgccacgcgggucgagugcaccaccaucgugaacgggguccgccgguccuucuacguguacgccaacggcggcaagggguucugcaagcuccacaacuggaacugcgugaacugcgacaccuucugcgccggcagcacguucaucuccgacgaggucgcgcgcgaccugagccugcaguucaagcggccgaucaaccccaccgaccaguccagcuacaucguggacuccgugaccgucaagaacgggagcacccaccucuacuucgacaaggccggccagaagacguacgagcgccacucccugagccacuucgugaaccuggacaaccuccgggccaacaacaccaaggggucccugcccaucaacgugaucgucuucgacggcaagagcaagugcgaggaguccagcgccaaguccgccagcguguacuacucccagcugaugugccagcccauccuccugcuggaccaggcgcucgugagcgacgucggcgacagcgccgagguggccgugaagauguucgacgccuacgucaacaccuucuccagcaccuucaacgugccgauggagaagcugaagacgcugguggccaccgcggaggccgagcucgccaagaacgucucccuggacaacgugcugagcaccuucaucuccgccgcgcgccagggguucguggacagcgacgucgagaccaaggacgugguggagugccucaagcugucccaccagagcgacaucgaggucacgggcgacuccugcaacaacuacaugcugaccuacaacaagguggagaacaugaccccccgggaccucggggccugcaucgacugcagcgcccgccacaucaacgcccagguggccaagucccacaacaucgcgcugaucuggaacgucaaggacuucaugagccuguccgagcagcuccggaagcagauccgcagcgccgccaagaagaacaaccugcccuucaagcugaccugcgccacgacccgccagguggugaacgucgugaccaccaagaucgcccucaagggcgggugaggacuaguuauaagacugacuagcccgaugggccucccaacgggcccuccuccccuccuugcaccgagauuaauaaaaaaaaaaaaaaaaaaaaaaaaaaaaaaaaaaaaaaaaaaaaaaaaaaaaaaaaaaaaaaaaugcaucccccccccccccccccccccccccccccccaaaggcucuuuucagagccaccagaauu

SEQ ID NO: 21926 - RNA, 6058 nt, Artificial Sequence
  SARS-CoV-2__MT509958.1__non-structural protein 3 (NSP3) mRNA gc
aggagaaagcuuaccauggcccccaccaaggugaccuucggcgacgacacggucaucgaggugcagggguacaagagcgugaacaucaccuucgagcuggacgagcgcaucgacaagguccucaacgagaagugcuccgccuacaccguggagcugggcaccgaggugaacgaguucgcgugcgucguggccgacgccgugaucaagacgcugcagccggucagcgagcuccugaccccccuggggaucgaccucgacgagugguccauggccaccuacuaccuguucgacgagagcggcgaguucaagcuggccucccacauguacugcagcuucuacccccccgacgaggacgaggaggagggggacugcgaggaggaggaguucgagccguccacccaguacgaguacggcacggaggacgacuaccagggcaagccccucgaguucggggcgaccagcgccgcccugcagcccgaggaggagcaggaggaggacuggcuggacgacgacucccagcagaccgugggccagcaggacgggagcgaggacaaccagaccacgaccauccagaccaucguggagguccagccccagcucgagauggagcugaccccgguggugcagacgaucgaggucaacuccuucagcggcuaccugaagcucaccgacaacguguacaucaagaacgccgacaucguggaggaggcgaagaaggucaagcccaccgugguggucaacgccgccaacguguaccugaagcacgggggcggcguggccggggcccugaacaaggcgaccaacaacgccaugcaggucgaguccgacgacuacaucgccacgaacggcccccucaagguggggggcagcugcguccuguccggccacaaccuggccaagcacugccuccacgugguggggcccaacgucaacaagggcgaggacauccagcugcugaagagcgccuacgagaacuucaaccagcacgaggugcuccuggcgccgcugcucuccgccgggaucuucggcgccgaccccauccacagccugcgggugugcgucgacaccgugcgcaccaacguguaccuggccgucuucgacaagaaccucuacgacaagcugguguccagcuuccuggagaugaagagcgagaagcagguggagcagaagaucgccgagauccccaaggaggaggucaagcccuucaucaccgaguccaagccgagcguggagcagcggaagcaggacgacaagaagaucaaggcgugcguggaggaggucacgaccacccucgaggagaccaaguuccugacggagaaccugcuccuguacaucgacaucaacgggaaccugcaccccgacuccgccacccucgugagcgacaucgacaucaccuuccugaagaaggacgcccccuacaucgugggcgacgucgugcaggagggcgugcugaccgccgucgugauccccacgaagaaggccgggggcaccaccgagaugcucgcgaaggcccugcgcaaggugccgaccgacaacuacaucacgaccuaccccgggcagggccugaacggguacaccgucgaggaggccaagaccgugcucaagaagugcaaguccgccuucuacauccugcccagcaucaucuccaacgagaagcaggagauccugggcaccgugagcuggaaccuccgggagaugcuggcgcacgccgaggagacgcgcaagcugaugcccgucugcguggagaccaaggccaucguguccaccauccagcggaaguacaagggcaucaagauccaggagggggucguggacuacggcgcccgcuucuacuucuacaccagcaagacgaccguggccucccugaucaacacccucaacgaccugaacgagacccuggucacgaugccgcucggguacgugacccacggccugaaccuggaggaggcggcccgguacaugcgcagccucaaggugcccgccaccgucuccgugagcucccccgacgccgugaccgccuacaacggguaccugacgagcuccagcaagacccccgaggagcacuucaucgagaccaucucccuggcgggcagcuacaaggacuggagcuacuccggccagagcacccagcucgggaucgaguuccugaagcggggcgacaaguccgucuacuacacgagcaacccgaccaccuuccaccuggacggggaggugaucaccuucgacaaccucaagacgcugcugucccuccgcgaggugcggaccaucaaggucuucaccaccguggacaacaucaaccugcacacgcagguggucgacaugagcaugaccuacggccagcaguucggccccaccuaccuggacggggccgacgugaccaagaucaagccccacaacucccacgagggcaagacguucuacgugcucccgaacgacgacacccugcgcgucgaggccuucgaguacuaccacaccaccgaccccagcuuccuggggcgguacauguccgcccucaaccacacgaagaaguggaaguacccccaguucaacggccugaccagcaucaagugggccgacaacaacugcuaccuggcgaccgcccuccugacccugcagcagaucgagcucaaguucaaccccccggcccugcaggacgccuacuaccgcgcgcgggccggggagguggccaacuucugcgcccugauccucgccuacugcaacaagacggugggcgagcugggcgacguccgcgagaccauguccuaccuguuccagcacgcgaaccucgacagcugcaagcgggugcugaacgucgugugcaagaccugcgggcagcagcagaccacccugaagggcguggaggccgucauguacauggggacgcucuccuacgagcaguucaagaagggcgugcagauccccugcaccugcgggaagcaggccaccaaguaccuggugcagcaggagagccccuucgucaugauguccgcccccccggcccaguacgagcugaagcacggcaccuucacgugcgcgagcgaguacaccggcaacuaccagugcgggcacuacaagcacaucaccuccaaggagacccucuacugcaucgacggcgcccugcugacgaagagcagcgaguacaaggggcccaucaccgacguguucuacaaggagaacuccuacaccaccacgaucaagcccgugaccuacaagcucgacggcgucgugugcaccgagaucgaccccaagcuggacaacuacuacaagaaggacaacagcuacuucaccgagcagccgaucgaccuggugcccaaccagcccuaccccaacgccuccuucgacaacuucaaguucgucugcgacaacaucaaguucgccgacgaccucaaccagcugacgggguacaagaagccggccagccgcgagcugaaggugaccuucuuccccgaccucaacggcgacguggucgcgaucgacuacaagcacuacacccccuccuucaagaagggcgccaagcugcugcacaagcccaucguguggcacgugaacaacgccaccaacaaggccacguacaagccgaacaccuggugcauccggugccucuggagcaccaagcccgucgagaccuccaacagcuucgacgugcugaaguccgaggacgcgcaggggauggacaaccuggccugcgaggaccucaagcccgugagcgaggaggucguggagaaccccacgauccagaaggacgugcuggagugcaacgucaagaccaccgagguggugggcgacaucauccugaagccggccaacaacucccucaagaucaccgaggaggucgggcacacggaccugauggccgccuacguggacaacagcucccugaccaucaagaagcccaacgagcucagccgcgugcugggccugaagacccucgcgacccacgggcuggccgccgucaacuccgugcccugggacacgaucgccaacuacgccaagccguuccugaacaagguggucagcaccaccaccaacaucgugacgcgcugccucaaccgggugugcaccaacuacaugcccuacuucuucacccugcugcuccagcugugcaccuucacccgcuccacgaacagccggaucaaggcguccaugcccaccaccaucgccaagaacaccgucaagagcgugggcaaguucugccuggaggccagcuucaacuaccucaagucccccaacuucagcaagcugaucaacaucaucaucugguuccugcuccuguccgugugccugggcagccucaucuacuccacggccgcccuggggguccugaugagcaaccucggcaugccguccuacugcaccggguaccgcgagggcuaccugaacagcaccaacgugaccaucgcgacguacugcaccggcuccauccccugcagcgugugccuguccgggcucgacagccuggacaccuaccccucccuggagaccauccagaucacgaucagcuccuucaagugggaccucaccgccuucggccuggucgccgagugguuccuggccuacauccucuucacccgguucuucuacgugcuggggcuggccgcgaucaugcagcucuucuucagcuacuucgccgugcacuucaucuccaacagcuggcugauguggcugaucaucaaccugguccagauggcccccaucuccgccauggugcgcauguacaucuucuucgcgagcuucuacuacguguggaagagcuacguccacgugguggacggcugcaacuccagcaccugcaugaugugcuacaagcggaaccgcgccacgcgggucgagugcaccaccaucgugaacgggguccgccgguccuucuacguguacgccaacggcggcaagggguucugcaagcuccacaacuggaacugcgugaacugcgacaccuucugcgccggcagcacguucaucuccgacgaggucgcccgcgaccugagccugcaguucaagcggccgaucaaccccaccgaccaguccagcuacaucguggacuccgugaccgucaagaacgggagcauccaccucuacuucgacaaggcgugccagaagaccuacgagcgccacucccugagccacuucgugaaccuggacaaccuccgggccaacaacacgaagggcucccugcccaucaacgugaucgucuucgacgggaagagcaagugcgaggaguccagcgccaaguccgccagcguguacuacucccagcugaugugccagcccauccuccugcuggaccaggcccucgugagcgacgucggcgacagcgcggagguggccgugaagauguucgacgccuacgucaacaccuucuccagcaccuucaacgugccgauggagaagcugaagacccugguggccacggccgaggcggagcucgccaagaacgucucccuggacaacgugcugagcaccuucaucuccaccgcccgccagggcuucguggacagcgacgucgagaccaaggacgugguggagugccucaagcugucccaccagagcgacaucgaggucacgggggacuccugcaacaacuacaugcugaccuacaacaagguggagaacaugaccccccgggaccucggcgccugcaucgacugcagcgcgcgccacaucaacgcccagguggccaagucccacaacaucgcccugaucuggaacgucaaggacuucaugagccuguccgagcagcuccggaagcagauccgcagcgccgcgaagaagaacaaccugcccuucaagcugaccugcgccacgacccgccagguggugaacgucgugaccaccaagaucgcccucaaggggggcugaggacuaguuauaagacugacuagcccgaugggccucccaacgggcccuccuccccuccuugcaccgagauuaauaaaaaaaaaaaaaaaaaaaaaaaaaaaaaaaaaaaaaaaaaaaaaaaaaaaaaaaaaaaaaaaaugcaucccccccccccccccccccccccccccccccaaaggcucuuuucagagccaccagaauu

SEQ ID NO: 21927 - RNA, 6058 nt, Artificial Sequence
  SARS-CoV-2__MT509657.1__non-structural protein 3 (NSP3) mRNA gc
aggagaaagcuuaccauggcccccaccaaggugaccuucggcgacgacacggucaucgaggugcagggguacaagagcgugaacaucaccuucgagcuggacgagcgcaucgacaagguccucaacgagaagugcuccgccuacaccguggagcugggcaccgaggugaacgaguucgcgugcgucguggccgacgccgugaucaagacgcugcagccggucagcgagcuccugaccccccuggggaucgaccucgacgagugguccauggccaccuacuaccuguucgacgagagcggcgaguucaagcuggccucccacauguacugcagcuucuacccccccgacgaggacgaggaggagggggacugcgaggaggaggaguucgagccguccacccaguacgaguacggcacggaggacgacuaccagggcaagccccucgaguucggggcgaccagcgccgcccugcagcccgaggaggagcaggaggaggacuggcuggacgacgacucccagcagaccgugggccagcaggacgggagcgaggacaaccagaccacgaccauccagaccaucguggagguccagccccagcucgagauggagcugaccccgguggugcagacgaucgaggucaacuccuucagcggcuaccugaagcucaccgacaacguguacaucaagaacgccgacaucguggaggaggcgaagaaggucaagcccaccgugguggucaacgccgccaacguguaccugaagcacgggggcggcguggccggggcccugaacaaggcgaccaacaacgccaugcaggucgaguccgacgacuacaucgccacgaacggcccccucaagguggggggcagcugcguccuguccggccacaaccuggccaagcacugccuccacgugguggggcccaacgucaacaagggcgaggacauccagcugcugaagagcgccuacgagaacuucaaccagcacgaggugcuccuggcgccgcugcucuccgccgggaucuucggcgccgaccccauccacagccugcgggugugcgucgacaccgugcgcaccaacguguaccuggccgucuucgacaagaaccucuacgacaagcugguguccagcuuccuggagaugaagagcgagaagcagguggagcagaagaucgccgagauccccaaggaggaggucaagcccuucaucaccgaguccaagccgagcguggagcagcggaagcaggacgacaagaagaucaaggcgugcguggaggaggucacgaccacccucgaggagaccaaguuccugacggagaaccugcuccuguacaucgacaucaacgggaaccugcaccccgacuccgccacccucgugagcgacaucgacaucaccuuccugaagaaggacgcccccuacaucgugggcgacgucgugcaggagggcgugcugaccgccgucgugauccccacgaagaaggccgggggcaccaccgagaugcucgcgaaggcccugcgcaaggugccgaccgacaacuacaucacgaccuaccccgggcagggccugaacggguacaccgucgaggaggccaagaccgugcucaagaagugcaaguccgccuucuacauccugcccagcaucaucuccaacgagaagcaggagauccugggcaccgugagcuggaaccuccgggagaugcuggcgcacgccgaggagacgcgcaagcugaugcccgucugcguggagaccaaggccaucguguccaccauccagcggaaguacaagggcaucaagauccaggagggggucguggacuacggcgcccgcuucuacuucuacaccagcaagacgaccguggccucccugaucaacacccucaacgaccugaacgagacccuggucacgaugccgcucggguacgugacccacggccugaaccuggaggaggcggcccgguacaugcgcagccucaaggugcccgccaccgucuccgugagcucccccgacgccgugaccgccuacaacggguaccugacgagcuccagcaagacccccgaggagcacuucaucgagaccaucucccuggcgggcagcuacaaggacuggagcuacuccggccagagcacccagcucgggaucgaguuccugaagcggggcgacaaguccgucuacuacacgagcaacccgaccaccuuccaccuggacggggaggugaucaccuucgacaaccucaagacgcugcugucccuccgcgaggugcggaccaucaaggucuucaccaccguggacaacaucaaccugcacacgcagguggucgacaugagcaugaccuacggccagcaguucggccccaccuaccuggacggggccgacgugaccaagaucaagccccacaacucccacgagggcaagacguucuacgugcucccgaacgacgacacccugcgcgucgaggccuucgaguacuaccacaccaccgaccccagcuuccuggggcgguacauguccgcccucaaccacacgaagaaguggaaguacccccaggugaacggccugaccagcaucaagugggccgacaacaacugcuaccuggcgaccgcccuccugacccugcagcagaucgagcucaaguucaaccccccggcccugcaggacgccuacuaccgcgcgcgggccggggaggccgccaacuucugcgcccugauccucgcguacugcaacaagacggugggcgagcugggcgacguccgcgagaccauguccuaccuguuccagcacgccaaccucgacagcugcaagcgggugcugaacgucgugugcaagaccugcgggcagcagcagaccacccugaagggcguggaggccgucauguacauggggacgcucuccuacgagcaguucaagaagggcgugcagauccccugcaccugcgggaagcaggccaccaaguaccuggugcagcaggagagccccuucgucaugauguccgcccccccggcgcaguacgagcugaagcacggcaccuucacgugcgccagcgaguacaccggcaacuaccagugcgggcacuacaagcacaucaccuccaaggagacccucuacugcaucgacggcgcccugcugacgaagagcagcgaguacaaggggcccaucaccgacguguucuacaaggagaacuccuacaccaccacgaucaagcccgugaccuacaagcucgacggcgucgugugcaccgagaucgaccccaagcuggacaacuacuacaagaaggacaacagcuacuucaccgagcagccgaucgaccuggugcccaaccagcccuaccccaacgccuccuucgacaacuucaaguucgucugcgacaacaucaaguucgccgacgaccucaaccagcugacgggguacaagaagccggcgagccgcgagcugaaggugaccuucuuccccgaccucaacggcgacguggucgccaucgacuacaagcacuacacccccuccuucaagaagggcgccaagcugcugcacaagcccaucguguggcacgugaacaacgccaccaacaaggcgacguacaagccgaacaccuggugcauccggugccucuggcgcaagaagcccgucgagaccagcaacuccuucgacgugcugaagagcgaggacgcccaggggauggacaaccuggccugcgaggaccucaagcccguguccgaggaggucguggagaaccccaccauccagaaggacgugcuggagugcaacgucaagacgaccgagguggugggcgacaucauccugaagccggccaacaacagccucaagaucaccgaggaggucgggcacaccgaccugauggccgcguacguggacaacuccagccugacgaucaagaagcccaacgagcucucccgcgugcugggccugaagacccucgccacccacgggcuggccgccgucaacagcgugcccugggacaccaucgccaacuacgcgaagccguuccugaacaagguggucuccacgaccaccaacaucgugacccggugccucaaccgcgugugcacgaacuacaugcccuacuucuucacccugcugcuccagcugugcaccuucacccggagcaccaacucccgcaucaaggccagcaugcccacgaccaucgccaagaacaccgucaaguccgugggcaaguucugccuggaggccagcuucaacuaccucaagagccccaacuucuccaagcugaucaacaucaucaucugguuccugcuccugagcgugugccugggcucccucaucuacagcaccgccgcgcuggggguccugauguccaaccucggcaugccgagcuacugcacgggguaccgggagggcuaccugaacuccaccaacgugaccaucgccaccuacugcacgggcagcauccccugcuccgugugccugagcgggcucgacucccuggacaccuaccccagccuggagaccauccagaucaccaucuccagcuucaagugggaccucacggccuucggccuggucgccgagugguuccuggccuacauccucuucacccgcuucuucuacgugcuggggcuggcggccaucaugcagcucuucuucuccuacuucgccgugcacuucaucagcaacuccuggcugauguggcugaucaucaaccugguccagauggcccccaucagcgcgauggugcggauguacaucuucuucgccuccuucuacuacguguggaagagcuacguccacgugguggacggcugcaacagcuccaccugcaugaugugcuacaagcgcaaccgggccacccgcgucgagugcacgaccaucgugaacgggguccggcgcagcuucuacguguacgccaacggcggcaagggguucugcaagcuccacaacuggaacugcgugaacugcgacaccuucugcgccggcuccaccuucaucagcgacgaggucgcgcgggaccugucccugcaguucaagcgcccgaucaaccccacggaccagagcuccuacaucguggacagcgugaccgucaagaacggguccauccaccucuacuucgacaaggccggccagaagaccuacgagcggcacagccugucccacuucgugaaccuggacaaccuccgcgccaacaacaccaaggggagccugcccaucaacgugaucgucuucgacggcaaguccaagugcgaggagagcuccgccaagagcgccuccguguacuacagccagcugaugugccagcccauccuccugcuggaccaggcgcucguguccgacgucggcgacagcgccgagguggccgugaagauguucgacgccuacgucaacacguucagcuccaccuucaacgugccgauggagaagcugaagacccugguggccaccgcggaggccgagcucgccaagaacgucagccuggacaacgugcuguccacguucaucagcgccgcgcggcagggguucguggacuccgacgucgagaccaaggacgugguggagugccucaagcugagccaccaguccgacaucgaggucaccggcgacagcugcaacaacuacaugcugaccuacaacaagguggagaacaugacgccccgcgaccucggggccugcaucgacugcuccgcccggcacaucaacgcccagguggccaagagccacaacaucgcgcugaucuggaacgucaaggacuucaugucccugagcgagcagcuccgcaagcagauccgcuccgccgccaagaagaacaaccugcccuucaagcugaccugcgccaccacccggcagguggugaacgucgugacgaccaagaucgcccucaagggcgggugaggacuaguuauaagacugacuagcccgaugggccucccaacgggcccuccuccccuccuugcaccgagauuaauaaaaaaaaaaaaaaaaaaaaaaaaaaaaaaaaaaaaaaaaaaaaaaaaaaaaaaaaaaaaaaaaugcaucccccccccccccccccccccccccccccccaaaggcucuuuucagagccaccagaauu

SEQ ID NO: 21928 - RNA, 6058 nt, Artificial Sequence
  SARS-CoV-2__MT509497.1__non-structural protein 3 (NSP3) mRNA gc
aggagaaagcuuaccauggcccccaccaaggugaccuucggcgacgacacggucaucgaggugcagggguacaagagcgugaacaucaccuucgagcuggacgagcgcaucgacaagguccucaacgagaagugcuccgccuacaccguggagcugggcaccgaggugaacgaguucgcgugcgucguggccgacgccgugaucaagacgcugcagccggucagcgagcuccugaccccccuggggaucgaccucgacgagugguccauggccaccuacuaccuguucgacgagagcggcgaguucaagcuggccucccacauguacugcagcuucuacccccccgacgaggacgaggaggagggggacugcgaggaggaggaguucgagccguccacccaguacgaguacggcacggaggacgacuaccagggcaagccccucgaguucggggcgaccagcgccgcccugcagcccgaggaggagcaggaggaggacuggcuggacgacgacucccagcagaccgugggccagcaggacgggagcgaggacaaccagaccacgaccauccagaccaucguggagguccagccccagcucgagauggagcugaccccgguggugcagacgaucgaggucaacuccuucagcggcuaccugaagcucaccgacaacguguacaucaagaacgccgacaucguggaggaggcgaagaaggucaagcccaccgugguggucaacgccgccaacguguaccugaagcacgggggcggcguggccggggcccugaacaaggcgaccaacaacgccaugcaggucgaguccgacgacuacaucgccacgaacggcccccucaagguggggggcagcugcguccuguccggccacaaccuggccaagcacugccuccacgugguggggcccaacgucaacaagggcgaggacauccagcugcugaagagcgccuacgagaacuucaaccagcacgaggugcuccuggcgccgcugcucuccgccgggaucuucggcgccgaccccauccacagccugcgggugugcgucgacaccgugcgcaccaacguguaccuggccgucuucgacaagaaccucuacgacaagcugguguccagcuuccuggagaugaagagcgagaagcagguggagcagaagaucgccgagauccccaaggaggaggucaagcccuucaucaccgaguccaagccgagcguggagcagcggaagcaggacgacaagaagaucaaggcgugcguggaggaggucacgaccacccucgaggagaccaaguuccugacggagaaccugcuccuguacaucgacaucaacgggaaccugcaccccgacuccgccacccucgugagcgacaucgacaucaccuuccugaagaaggacgcccccuacaucgugggcgacgucgugcaggagggcgugcugaccgccgucgugauccccacgaagaaggccgggggcaccaccgagaugcucgcgaaggcccugcgcaaggugccgaccgacaacuacaucacgaccuaccccgggcagggccugaacggguacaccgucgaggaggccaagaccgugcucaagaagugcaaguccgccuucuacauccugcccagcaucaucuccaacgagaagcaggagauccugggcaccgugagcuggaaccuccgggagaugcuggcgcacgccgaggagacgcgcaagcugaugcccgucugcguggagaccaaggccaucguguccaccauccagcggaaguacaagggcaucaagauccaggagggggucguggacuacggcgcccgcuucuacuucuacaccagcaagacgaccguggccucccugaucaacacccucaacgaccugaacgagacccuggucacgaugccgcucggguacgugacccacggccugaaccuggaggaggcggcccgguacaugcgcagccucaaggugcccgccaccgucuccgugagcucccccgacgccgugaccgccuacaacggguaccugacgagcuccagcaagacccccgaggagcacuucaucgagaccaucucccuggcgggcagcuacaaggacuggagcuacuccggccagagcacccagcucgggaucgaguuccugaagcggggcgacaaguccgucuacuacacgagcaacccgaccaccuuccaccuggacggggaggugaucaccuucgacaaccucaagacgcugcugucccuccgcgaggugcggaccaucaaggucuucaccaccguggacaacaucaaccugcacacgcagguggucgacaugagcaugaccuacggccagcaguucggccccaccuaccuggacggggccgacgugaccaagaucaagccccacaacucccacgagggcaagacguucuacgugcucccgaacgacgacacccugcgcgucgaggccuucgaguacuaccacaccaccgaccccagcuuccuggggcgguacauguccgcccucaaccacacgaagaaguggaaguacccccaggugaacggccugaccagcaucaagugggccgacaacaacugcuaccuggcgaccgcccuccugacccugcagcagaucgagcucaaguucaaccccccggcccugcaggacgccuacuaccgcgcgcgggccggggaggccgccaacuucugcgcccugauccucgcguacugcaacaagacggugggcgagcugggcgacguccgcgagaccauguccuaccuguuccagcacgccaaccucgacagcugcaagcgggugcugaacgucgugugcaagaccugcgggcagcagcagaccacccugaagggcguggaggccgucauguacauggggacgcucuccuacgagcaguucaagaagggcgugcagauccccugcaccugcgggaagcaggccaccaaguaccuggugcagcaggagagccccuucgucaugauguccgcccccccggcgcaguacgagcugaagcacggcaccuucacgugcgccagcgaguacaccggcaacuaccagugcgggcacuacaagcacaucaccuccaaggagacccucuacugcaucgacggcgcccugcugacgaagagcagcgaguacaaggggcccaucaccgacguguucuacaaggagaacuccuacaccaccacgaucaagcccgugaccuacaagcucgacggcgucgugugcaccgagaucgaccccaagcuggacaacuacuacaagaaggacaacagcuacuucaccgagcagccgaucgaccuggugcccaaccagcccuaccccaacgccuccuucgacaacuucaaguucgucugcgacaacaucaaguucgccgacgaccucaaccagcugacgggguacaagaagccggcgagccgcgagcugaaggugaccuucuuccccgaccucaacggcgacguggucgccaucgacuacaagcacuacacccccuccuucaagaagggcgccaagcugcugcacaagcccaucguguggcacgugaacaacgccaccaacaaggcgacguacaagccgaacaccuggugcauccggugccucuggcgcaagaagcccgucgagaccagcaacuccuucgacgugcugaagagcgaggacgcccaggggauggacaaccuggccugcgaggaccucaagcccguguccgaggaggucguggagaaccccaccauccagaaggacgugcuggagugcaacgucaagacgaccgagguggugggcgacaucauccugaagccggccaacaacagccucaagaucaccgaggaggucgggcacaccgaccugauggccgcguacguggacaacuccagccugacgaucaagaagcccaacgagcucucccgcgugcugggccugaagacccucgccacccacgggcuggccgccgucaacagcgugcccugggacaccaucgccaacuacgcgaagccguuccugaacaagguggucuccacgaccaccaacaucgugacccggugccucaaccgcgugugcacgaacuacaugcccuacuucuucacccugcugcuccagcugugcaccuucacccggagcaccaacucccgcaucaaggccagcaugcccacgaccaucgccaagaacaccgucaaguccgugggcaaguucugccuggaggccagcuucaacuaccucaagagccccaacuucuccaagcugaucaacaucaucaucugguuccugcuccugagcgugugccugggcucccucaucuacagcaccgccgcgcuggggguccugauguccaaccucggcaugccgagcuacugcacgggguaccgggagggcuaccugaacuccaccaacgugaccaucgccaccuacugcacgggcagcauccccugcuccgugugccugagcgggcucgacucccuggacaccuaccccagccuggagaccauccagaucaccaucuccagcuucaagugggaccucacggccuucggccuggucgccgagugguuccuggccuacauccucuucacccgcuucuucuacgugcuggggcuggcggccaucaugcagcucuucuucuccuacuucgccgugcacuucaucagcaacuccuggcugauguggcugaucaucaaccugguccagauggcccccaucagcgcgauggugcggauguacaucuucuucgccuccuucuacuacguguggaagagcuacguccacgugguggacggcugcaacagcuccaccugcaugaugugcuacaagcgcaaccgggccacccgcgucgagugcacgaccaucgugaacgggguccggcgcagcuucuacguguacgccaacggcggcaagggguucugcaagcuccacaacuggaacugcgugaacugcgacaccuucugcgccggcuccaccuucaucagcgacgaggucgcgcgggaccugucccugcaguucaagcgcccgaucaaccccacggaccagagcuccuacaucguggacagcgugaccgucaagaacggguccauccaccucuacuucgacaaggccggccagaagaccuacgagcggcacagccugucccacuucgugaaccuggacaaccuccgcgccaacaacaccaaggggagccugcccaucaacgugaucgucuucgacggcaaguccaagugcgaggagagcuccgccaagagcgccuccguguacuacagccagcugaugugccagcccauccuccugcuggaccaggcgcucguguccgacgucggcgacagcgccgagguggccgugaagauguucgacgccuacgucaacacguucagcuccaccuucaacgugccgauggagaagcugaagacccugguggccaccgcggaggccgagcucgccaagaacgucagccuggacaacgugcuguccacguucaucagcgccgcgcggcagggguucguggacuccgacgucgagaccaaggacgugguggagugccucaagcugagccaccaguccgacaucgaggucaccggcgacagcugcaacaacuacaugcugaccuacaacaagguggagaacaugacgccccgcgaccucggggccugcaucgacugcuccgcccggcacaucaacgcccagguggccaagagccacaacaucgcgcugaucuggaacgucaaggacuucaugucccugagcgagcagcuccgcaagcagauccgcuccgccgccaagaagaacaaccugcuguucaagcucaccugcgccaccacccggcagguggugaacgucgugacgaccaagaucgcccugaagggcgggugaggacuaguuauaagacugacuagcccgaugggccucccaacgggcccuccuccccuccuugcaccgagauuaauaaaaaaaaaaaaaaaaaaaaaaaaaaaaaaaaaaaaaaaaaaaaaaaaaaaaaaaaaaaaaaaaugcaucccccccccccccccccccccccccccccccaaaggcucuuuucagagccaccagaauu

SEQ ID NO: 21929 - RNA, 6058 nt, Artificial Sequence
  SARS-CoV-2__MT509504.1__non-structural protein 3 (NSP3) mRNA gc
aggagaaagcuuaccauggcccccaccaaggugaccuucggcgacgacacggucaucgaggugcagggguacaagagcgugaacaucaccuucgagcuggacgagcgcaucgacaagguccucaacgagaagugcuccgccuacaccguggagcugggcaccgaggugaacgaguucgcgugcgucguggccgacgccgugaucaagacgcugcagccggucagcgagcuccugaccccccuggggaucgaccucgacgagugguccauggccaccuacuaccuguucgacgagagcggcgaguucaagcuggccucccacauguacugcagcuucuacccccccgacgaggacgaggaggagggggacugcgaggaggaggaguucgagccguccacccaguacgaguacggcacggaggacgacuaccagggcaagccccucgaguucggggcgaccagcgccgcccugcagcccgaggaggagcaggaggaggacuggcuggacgacgacucccagcagaccgugggccagcaggacgggagcgaggacaaccagaccacgaccauccagaccaucguggagguccagccccagcucgagauggagcugaccccgguggugcagacgaucgaggucaacuccuucagcggcuaccugaagcucaccgacaacguguacaucaagaacgccgacaucguggaggaggcgaagaaggucaagcccaccgugguggucaacgccgccaacguguaccugaagcacgggggcggcguggccggggcccugaacaaggcgaccaacaacgccaugcaggucgaguccgacgacuacaucgccacgaacggcccccucaagguggggggcagcugcguccuguccggccacaaccuggccaagcacugccuccacgugguggggcccaacgucaacaagggcgaggacauccagcugcugaagagcgccuacgagaacuucaaccagcacgaggugcuccuggcgccgcugcucuccgccgggaucuucggcgccgaccccauccacagccugcgggugugcgucgacaccgugcgcaccaacguguaccuggccgucuucgacaagaaccucuacgacaagcugguguccagcuuccuggagaugaagagcgagaagcagguggagcagaagaucgccgagauccccaaggaggaggucaagcccuucaucaccgaguccaagccgagcguggagcagcggaagcaggacgacaagaagaucaaggcgugcguggaggaggucacgaccacccucgaggagaccaaguuccugacggagaaccugcuccuguacaucgacaucaacgggaaccugcaccccgacuccgccacccucgugagcgacaucgacaucaccuuccugaagaaggacgcccccuacaucgugggcgacgucgugcaggagggcgugcugaccgccgucgugauccccacgaagaaggccgggggcaccaccgagaugcucgcgaaggcccugcgcaaggugccgaccgacaacuacaucacgaccuaccccgggcagggccugaacggguacaccgucgaggaggccaagaccgugcucaagaagugcaaguccgccuucuacauccugcccagcaucaucuccaacgagaagcaggagauccugggcaccgugagcuggaaccuccgggagaugcuggcgcacgccgaggagacgcgcaagcugaugcccgucugcguggagaccaaggccaucguguccaccauccagcggaaguacaagggcaucaagauccaggagggggucguggacuacggcgcccgcuucuacuucuacaccagcaagacgaccguggccucccugaucaacacccucaacgaccugaacgagacccuggucacgaugccgcucggguacgugacccacggccugaaccuggaggaggcggcccgguacaugcgcagccucaaggugcccgccaccgucuccgugagcucccccgacgccgugaccgccuacaacggguaccugacgagcuccagcaagacccccgaggagcacuucaucgagaccaucucccuggcgggcagcuacaaggacuggagcuacuccggccagagcacccagcucgggaucgaguuccugaagcggggcgacaagaucgucuacuacacguccaacccgaccaccuuccaccuggacggggaggugaucaccuucgacaaccucaagacgcugcugagccuccgcgaggugcggaccaucaaggucuucaccaccguggacaacaucaaccugcacacgcagguggucgacauguccaugaccuacggccagcaguucggccccaccuaccuggacggggccgacgugaccaagaucaagccccacaacagccacgagggcaagacguucuacgugcucccgaacgacgacacccugcgcgucgaggccuucgaguacuaccacaccaccgaccccuccuuccuggggcgguacaugagcgcccucaaccacacgaagaaguggaaguacccccaggugaacggccugaccuccaucaagugggccgacaacaacugcuaccuggcgaccgcccuccugacccugcagcagaucgagcucaaguucaaccccccggcccugcaggacgccuacuaccgcgcgcgggccggggaggccgccaacuucugcgcccugauccucgcguacugcaacaagacggugggcgagcugggcgacguccgcgagaccaugagcuaccuguuccagcacgccaaccucgacuccugcaagcgggugcugaacgucgugugcaagaccugcgggcagcagcagaccacccugaagggcguggaggccgucauguacauggggacgcucagcuacgagcaguucaagaagggcgugcagauccccugcaccugcgggaagcaggccaccaaguaccuggugcagcaggagucccccuucgucaugaugagcgcccccccggcgcaguacgagcugaagcacggcaccuucacgugcgccuccgaguacaccggcaacuaccagugcgggcacuacaagcacaucaccagcaaggagacccucuacugcaucgacggcgcccugcugacgaaguccagcgaguacaaggggcccaucaccgacguguucuacaaggagaacagcuacaccaccacgaucaagcccgugaccuacaagcucgacggcgucgugugcaccgagaucgaccccaagcuggacaacuacuacaagaaggacaacuccuacuucaccgagcagccgaucgaccuggugcccaaccagcccuaccccaacgccagcuucgacaacuucaaguucgucugcgacaacaucaaguucgccgacgaccucaaccagcugacgggguacaagaagccggcgucccgcgagcugaaggugaccuucuuccccgaccucaacggcgacguggucgccaucgacuacaagcacuacacccccagcuucaagaagggcgccaagcugcugcacaagcccaucguguggcacgugaacaacgccaccaacaaggcgacguacaagccgaacaccuggugcauccggugccucugguccaccaagcccgucgagaccagcaacuccuucgacgugcugaagagcgaggacgcccaggggauggacaaccuggccugcgaggaccucaagcccguguccgaggaggucguggagaaccccacgauccagaaggacgugcuggagugcaacgucaagaccaccgagguggugggcgacaucauccugaagccggccaacaacagccucaagaucaccgaggaggucgggcacacggaccugauggccgcguacguggacaacuccagccugaccaucaagaagcccaacgagcucucccgcgugcugggccugaagacccucgccacccacgggcuggccgccgucaacagcgugcccugggacacgaucgccaacuacgcgaagccguuccugaacaagguggucuccaccaccaccaacaucgugacgcgcugccucaaccgggugugcaccaacuacaugcccuacuucuucacccugcugcuccagcugugcaccuucacccgcagcacgaacucccggaucaaggccagcaugcccaccaccaucgccaagaacaccgucaaguccgugggcaaguucugccuggaggccagcuucaacuaccucaagagccccaacuucuccaagcugaucaacaucaucaucugguuccugcuccugagcgugugccugggcucccucaucuacagcacggccgcgcuggggguccugauguccaaccucggcaugccgagcuacugcaccggguaccgcgagggcuaccugaacuccaccaacgugaccaucgccacguacugcaccggcagcauccccugcuccgugugccugagcgggcucgacucccuggacaccuaccccagccuggagaccauccagaucacgaucuccagcuucaagugggaccucaccgccuucggccuggucgccgagugguuccuggccuacauccucuucacccgguucuucuacgugcuggggcuggcggccaucaugcagcucuucuucuccuacuucgccgugcacuucaucagcaacuccuggcugauguggcugaucaucaaccugguccagauggcccccaucagcgcgauggugcgcauguacaucuucuucgccuccuucuacuacguguggaagagcuacguccacgugguggacggcugcaacagcuccaccugcaugaugugcuacaagcggaaccgcgccacgcgggucgagugcaccaccaucgugaacgggguccgccggagcuucuacguguacgccaacggcggcaagggguucugcaagcuccacaacuggaacugcgugaacugcgacaccuucugcgccggcuccacguucaucagcgacgaggucgcgcgcgaccugucccugcaguucaagcggccgaucaaccccaccgaccagagcuccuacaucguggacagcgugaccgucaagaacggguccauccaccucuacuucgacaaggccggccagaagaccuacgagcgccacagccugucccacuucgugaaccuggacaaccuccgggccaacaacacgaaggggagccugcccaucaacgugaucgucuucgacggcaaguccaagugcgaggagagcuccgccaagagcgccuccguguacuacagccagcugaugugccagcccauccuccugcuggaccaggcgcucguguccgacgucggcgacagcgccgagguggccgugaagauguucgacgccuacgucaacaccuucagcuccaccuucaacgugccgauggagaagcugaagacccugguggccacggcggaggccgagcucgccaagaacgucagccuggacaacgugcuguccaccuucaucagcgccgcgcgccagggguucguggacuccgacgucgagaccaaggacgugguggagugccucaagcugagccaccaguccgacaucgaggucaccggcgacagcugcaacaacuacaugcugacguacaacaagguggagaacaugaccccccgggaccucggggccugcaucgacugcuccgcccgccacaucaacgcccagguggccaagagccacaacaucgcgcugaucuggaacgucaaggacuucaugucccugagcgagcagcuccggaagcagauccgcuccgccgccaagaagaacaaccugcccuucaagcugaccugcgccaccacgcgccagguggugaacgucgugaccaccaagaucgcccucaagggcgggugaggacuaguuauaagacugacuagcccgaugggccucccaacgggcccuccuccccuccuugcaccgagauuaauaaaaaaaaaaaaaaaaaaaaaaaaaaaaaaaaaaaaaaaaaaaaaaaaaaaaaaaaaaaaaaaaugcaucccccccccccccccccccccccccccccccaaaggcucuuuucagagccaccagaauu

SEQ ID NO: 21930 - RNA, 6058 nt, Artificial Sequence
  SARS-CoV-2__MT509503.1__non-structural protein 3 (NSP3) mRNA gc
aggagaaagcuuaccauggcccccaccaaggugaccuucggcgacgacacggucaucgaggugcagggguacaagagcgugaacaucaccuucgagcuggacgagcgcaucgacaagguccucaacgagaagugcuccgccuacaccguggagcugggcaccgaggugaacgaguucgcgugcgucguggccgacgccgugaucaagacgcugcagccggucagcgagcuccugaccccccuggggaucgaccucgacgagugguccauggccaccuacuaccuguucgacgagagcggcgaguucaagcuggccucccacauguacugcagcuucuacccccccgacgaggacgaggaggagggggacugcgaggaggaggaguucgagccguccacccaguacgaguacggcacggaggacgacuaccagggcaagccccucgaguucggggcgaccagcgccgcccugcagcccgaggaggagcaggaggaggacuggcuggacgacgacucccagcagaccgugggccagcaggacgggagcgaggacaaccagaccacgaccauccagaccaucguggagguccagccccagcucgagauggagcugaccccgguggugcagacgaucgaggucaacuccuucagcggcuaccugaagcucaccgacaacguguacaucaagaacgccgacaucguggaggaggcgaagaaggucaagcccaccgugguggucaacgccgccaacguguaccugaagcacgggggcggcguggccggggcccugaacaaggcgaccaacaacgccaugcaggucgaguccgacgacuacaucgccacgaacggcccccucaagguggggggcagcugcguccuguccggccacaaccuggccaagcacugccuccacgugguggggcccaacgucaacaagggcgaggacauccagcugcugaagagcgccuacgagaacuucaaccagcacgaggugcuccuggcgccgcugcucuccgccgggaucuucggcgccgaccccauccacagccugcgggugugcgucgacaccgugcgcaccaacguguaccuggccgucuucgacaagaaccucuacgacaagcugguguccagcuuccuggagaugaagagcgagaagcagguggagcagaagaucgccgagauccccaaggaggaggucaagcccuucaucaccgaguccaagccgagcguggagcagcggaagcaggacgacaagaagaucaaggcgugcguggaggaggucacgaccacccucgaggagaccaaguuccugacggagaaccugcuccuguacaucgacaucaacgggaaccugcaccccgacuccgccacccucgugagcgacaucgacaucaccuuccugaagaaggacgcccccuacaucgugggcgacgucgugcaggagggcgugcugaccgccgucgugauccccacgaagaaggccgggggcaccaccgagaugcucgcgaaggcccugcgcaaggugccgaccgacaacuacaucacgaccuaccccgggcagggccugaacggguacaccgucgaggaggccaagaccgugcucaagaagugcaaguccgccuucuacauccugcccagcaucaucuccaacgagaagcaggagauccugggcaccgugagcuggaaccuccgggagaugcuggcgcacgccgaggagacgcgcaagcugaugcccgucugcguggagaccaaggccaucguguccaccauccagcggaaguacaagggcaucaagauccaggagggggucguggacuacggcgcccgcuucuacuucuacaccagcaagacgaccguggccucccugaucaacacccucaacgaccugaacgagacccuggucacgaugccgcucggguacgugacccacggccugaaccuggaggaggcggcccgguacaugcgcagccucaaggugcccgccaccgucuccgugagcucccccgacgccgugaccgccuacaacggguaccugacgagcuccagcaagacccccgaggagcacuucaucgagaccaucucccuggcgggcagcuacaaggacuggagcuacuccggccagagcacccagcucgggaucgaguuccugaagcggggcgacaaguccgucuacuacacgagcaacccgaccaccuuccaccuggacggggaggugaucaccuucgacaaccucaagacgcugcugucccuccgcgaggugcggaccaucaaggucuucaccaccguggacaacaucaaccugcacacgcagguggucgacaugagcaugaccuacggccagcaguucggccccaccuaccuggacggggccgacgugaccaagaucaagccccacaacucccacgagggcaagacguucuacgugcucccgaacgacgacacccugcgcgucgaggccuucgaguacuaccacaccaccgaccccagcuuccuggggcgguacauguccgcccucaaccacacgaagaaguggaaguacccccaggugaacggccugaccagcaucaagugggccgacaacaacugcuaccuggcgaccgcccuccugacccugcagcagaucgagcucaaguucaaccccccggcccugcaggacgccuacuaccgcgcgcgggccggggaggccgccaacuucugcgcccugauccucgcguacugcaacaagacggugggcgagcugggcgacguccgcgagaccauguccuaccuguuccagcacgccaaccucgacagcugcaagcgggugcugaacgucgugugcaagaccugcgggcagcagcagaccacccugaagggcguggaggccgucauguacauggggacgcucuccuacgagcaguucaagaagggcgugcagauccccugcaccugcgggaagcaggccaccaaguaccuggugcagcaggagagccccuucgucaugauguccgcccccccggcgcaguacgagcugaagcacggcaccuucacgugcgccagcgaguacaccggcaacuaccagugcgggcacuacaagcacaucaccuccaaggagacccucuacugcaucgacggcgcccugcugacgaagagcagcgaguacaaggggcccaucaccgacguguucuacaaggagaacuccuacaccaccacgaucaagcccgugaccuacaagcucgacggcgucgugugcaccgagaucgaccccaagcuggacaacuacuacaagaaggacaacagcuacuucaccgagcagccgaucgaccuggugcccaaccagcccuaccccaacgccuccuucgacaacuucaaguucgucugcgacaacaucaaguucgccgacgaccucaaccagcugacgggguacaagaagccggcgagccgcgagcugaaggugaccuucuuccccgaccucaacggcgacguggucgccaucgacuacaagcacuacacccccuccuucaagaagggcgccaagcugcugcacaagcccaucguguggcacgugaacaacgccaccaacaaggcgacguacaagccgaacaccuggugcauccggugccucuggagcaccaagcccgucgagaccuccaacagcuucgacgugcuggaguccgaggacgcccaggggauggacaaccuggccugcgaggaccucaagcccgugagcgaggaggucguggagaaccccacgauccagaaggacgugcuggagugcaacgucaagaccaccgagguggugggcgacaucauccugaagccggccaacaacucccucaagaucaccgaggaggucgggcacacggaccugauggccgcguacguggacaacagcucccugaccaucaagaagcccaacgagcucagccgcgugcugggccugaagacccucgccacccacgggcuggccgccgucaacuccgugcccugggacacgaucgccaacuacgcgaagccguuccugaacaagguggucagcaccaccaccaacaucgugacgcgcugccucaaccgggugugcaccaacuacaugcccuacuucuucacccugcugcuccagcugugcaccuucacccgcuccacgaacagccggaucaaggccuccaugcccaccaccaucgccaagaacaccgucaagagcgugggcaaguucugccuggaggccagcuucaacuaccucaagucccccaacuucagcaagcugaucaacaucaucaucugguuccugcuccuguccgugugccugggcagccucaucuacuccacggccgcgcuggggguccugaugagcaaccucggcaugccguccuacugcaccggguaccgcgagggcuaccugaacagcaccaacgugaccaucgccacguacugcaccggcuccauccccugcagcgugugccuguccgggcucgacagccuggacaccuaccccucccuggagaccauccagaucacgaucagcuccuucaagugggaccucaccgccuucggccuggucgccgagugguuccuggccuacauccucuucacccgguucuucuacgugcuggggcuggcggccaucaugcagcucuucuucagcuacuucgccgugcacuucaucuccaacagcuggcugauguggcugaucaucaaccugguccagauggcccccaucuccgcgauggugcgcauguacaucuucuucgccagcuucuacuacguguggaagagcuacguccacgugguggacggcugcaacuccagcaccugcaugaugugcuacaagcggaaccgcgccacgcgggucgagugcaccaccaucgugaacgggguccgccgguccuucuacguguacgccaacggcggcaagggguucugcaagcuccacaacuggaacugcgugaacugcgacaccuucugcgccggcagcacguucaucuccgacgaggucgcgcgcgaccugagccugcaguucaagcggccgaucaaccccaccgaccaguccagcuacaucguggacuccgugaccgucaagaacgggagcauccaccucuacuucgacaaggccggccagaagaccuacgagcgccacucccugagccacuucgugaaccuggacaaccuccgggccaacaacacgaaggggucccugcccaucaacgugaucgucuucgacggcaagagcaagugcgaggaguccagcgccaaguccgccagcguguacuacucccagcugaugugccagcccauccuccugcuggaccaggcgcucgugagcgacgucggcgacagcgccgagguggccgugaagauguucgacgccuacgucaacaccuucuccagcaccuucaacgugccgauggagaagcugaagacccugguggccacggcggaggccgagcucgccaagaacgucucccuggacaacgugcugagcaccuucaucuccgccgcgcgccagggguucguggacagcgacgucgagaccaaggacgugguggagugccucaagcugucccaccagagcgacaucgaggucaccggcgacuccugcaacaacuacaugcugacguacaacaagguggagaacaugaccccccgggaccucggggccugcaucgacugcagcgcccgccacaucaacgcccagguggccaagucccacaacaucgcgcugaucuggaacgucaaggacuucaugagccuguccgagcagcuccggaagcagauccgcagcgccgccaagaagaacaaccugcccuucaagcugaccugcgccaccacgcgccagguggugaacgucgugaccaccaagaucgcccucaagggcgggugaggacuaguuauaagacugacuagcccgaugggccucccaacgggcccuccuccccuccuugcaccgagauuaauaaaaaaaaaaaaaaaaaaaaaaaaaaaaaaaaaaaaaaaaaaaaaaaaaaaaaaaaaaaaaaaaugcaucccccccccccccccccccccccccccccccaaaggcucuuuucagagccaccagaauu

SEQ ID NO: 21931 - RNA, 6058 nt, Artificial Sequence
  SARS-CoV-2__MT506571.1__non-structural protein 3 (NSP3) mRNA gc
aggagaaagcuuaccauggcccccaccaaggugaccuucggcgacgacacggucaucgaggugcagggguacaagagcgugaacaucaccuucgagcuggacgagcgcaucgacaagguccucaacgagaagugcuccgccuacaccguggagcugggcaccgaggugaacgaguucgcgugcgucguggccgacgccgugaucaagacgcugcagccggucagcgagcuccugaccccccuggggaucgaccucgacgagugguccauggccaccuacuaccuguucgacgagagcggcgaguucaagcuggccucccacauguacugcagcuucuacccccccgacgaggacgaggaggagggggacugcgaggaggaggaguucgagccguccacccaguacgaguacggcacggaggacgacuaccagggcaagccccucgaguucggggcgaccagcgccgcccugcagcccgaggaggagcaggaggaggacuggcuggacgacgacucccagcagaccgugggccagcaggacgggagcgaggacaaccagaccacgaccauccagaccaucguggagguccagccccagcucgagauggagcugaccccgguggugcagacgaucgaggucaacuccuucagcggcuaccugaagcucaccgacaacguguacaucaagaacgccgacaucguggaggaggcgaagaaggucaagcccaccgugguggucaacgccgccaacguguaccugaagcacgggggcggcguggccggggcccugaacaaggcgaccaacaacgccaugcaggucgaguccgacgacuacaucgccacgaacggcccccucaagguggggggcagcugcguccuguccggccacaaccuggccaagcacugccuccacgugguggggcccaacgucaacaagggcgaggacauccagcugcugaagagcgccuacgagaacuucaaccagcacgaggugcuccuggcgccgcugcucuccgccgggaucuucggcgccgaccccauccacagccugcgggugugcgucgacaccgugcgcaccaacguguaccuggccgucuucgacaagaaccucuacgacaagcugguguccagcuuccuggagaugaagagcgagaagcagguggagcagaagaucgccgagauccccaaggaggaggucaagcccuucaucaccgaguccaagccgagcguggagcagcggaagcaggacgacaagaagaucaaggcgugcguggaggaggucacgaccacccucgaggagaccaaguuccugacggagaaccugcuccuguacaucgacaucaacgggaaccugcaccccgacuccgccacccucgugagcgacaucgacaucaccuuccugaagaaggacgcccccuacaucgugggcgacgucgugcaggagggcgugcugaccgccgucgugauccccacgaagaaggccgggggcaccaccgagaugcucgcgaaggcccugcgcaaggugccgaccgacaacuacaucacgaccuaccccgggcagggccugaacggguacaccgucgaggaggccaagaccgugcucaagaagugcaaguccgccuucuacauccugcccagcaucaucuccaacgagaagcaggagauccugggcaccgugagcuggaaccuccgggagaugcuggcgcacgccgaggagacgcgcaagcugaugcccgucugcguggagaccaaggccaucguguccaccauccagcggaaguacaagggcaucaagauccaggagggggucguggacuacggcgcccgcuucuacuucuacaccagcaagacgaccguggccucccugaucaacacccucaacgaccugaacgagacccuggucacgaugccgcucggguacgugacccacggccugaaccuggaggaggcggcccgguacaugcgcagccucaaggugcccgccaccgucuccgugagcucccccgacgccgugaccgccuacaacggguaccugacgagcuccagcaagacccccgaggagcacuucaucgagaccaucucccuggcgggcagcuacaaggacuggagcuacuccggccagagcacccagcucgggaucgaguuccugaagcggggcgacaaguccgucuacuacacgagcaacccgaccaccuuccaccuggacggggaggugaucaccuucgacaaccucaagacgcugcugucccuccgcgaggugcggaccaucaaggucuucaccaccguggacaacaucaaccugcacacgcagguggucgacaugagcaugaccuacggccagcaguucggccccaccuaccuggacggggccgacgugaccaagaucaagccccacaacucccacgagggcaagacguucuacgugcucccgaacgacgacacccugcgcgucgaggccuucgaguacuaccacaccaccgaccccagcuuccuggggcgguacauguccgcccucaaccacacgaagaaguggaaguacccccaggugaacggccugaccagcaucaagugggccgacaacaacugcuaccuggcgaccgcccuccugacccugcagcagaucgagcucaaguucaaccccccggcccugcaggacgccuacuaccgcgcgcgggccggggaggccgccaacuucugcgcccugauccucgcguacugcaacaagacggugggcgagcugggcgacguccgcgagaccauguccuaccuguuccagcacgccaaccucgacagcugcaagcgggugcugaacgucgugugcaagaccugcgggcagcagcagaccacccugaagggcguggaggccgucauguacauggggacgcucuccuacgagcaguucaagaagggcgugcagauccccugcaccugcgggaagcaggccaccaaguaccuggugcagcaggagagccccuucgucaugauguccgcccccccggcgcaguacgagcugaagcacggcaccuucacgugcgccagcgaguacaccggcaacuaccagugcgggcacuacaagcacaucaccuccaaggagacccucuacugcaucgacggcgcccugcugacgaagagcagcgaguacaaggggcccaucaccgacguguucuacaaggagaacuccuacaccaccacgaucaagcccgugaccuacaagcucgacggcgucgugugcaccgagaucgaccccaagcuggacaacuacuacaagaaggacaacagcuacuucaccgagcagccgaucgaccuggugcccaaccagcccuaccccaacgccuccuucgacaacuucaaguucgucugcgacaacaucaaguucgccgacgaccucaaccagcugacgggguacaagaagccggcgagccgcgagcugaaggugaccuucuuccccgaccucaacggcgacguggucgccaucgacuacaagcacuacacccccuccuucaagaagggcgccaagcugcugcacaagcccaucguguggcacgugaacaacgccaccaacaaggcgacguacaagccgaacaccuggugcauccggugccucuggagcaccaagcccgucgagaccuccaacagcuucgacgugcugaaguccgaggacgcccaggggauggacaaccuggccugcgaggaccucaagcccgugagcgaggaggucguggagaaccccacgauccagaaggacgugcuggagugcaacgucaagaccaccgagguggugggcgacaucauccugaagccggccaacaacucccucaagaucaccgaggaggucgggcacacggaccugauggccgcguacguggacaacagcucccugaccaucaagaagcccaacgagcucagccgcgugcugggccugaagacccucgccacccacgggcuggccgccgucaacuccgugcccugggacacgaucgccaacuacgcgaagccguuccugaacaagguggucagcaccaccaccaacaucgugacgcgcugccucaaccgggugugcaccaacuacaugcccuacuucuucacccugcugcuccagcugugcaccuucacccgcuccacgaacagccggaucaaggccuccaugcccaccaccaucgccaagaacaccgucaagagcgugggcaaguucugccuggaggccagcuucaacuaccucaagucccccaacuucagcaagcugaucaacaucaucaucugguuccugcuccuguccgugugccugggcagccucaucuacuccacggccgcgcuggggguccugaugagcaaccucggcaugccguccuacugcaccggguaccgcgagggcuaccugaacagcaccaacgugaccaucgccacguacugcaccggcuccauccccugcagcgugugccuguccgggcucgacagccuggacaccuaccccucccuggagaccauccagaucacgaucagcuccuucaagugggaccucaccgccuucggccuggucgccgagugguuccuggccuacauccucuucacccgguucuucuacgugcuggggcuggcggccaucaugcagcucuucuucagcuacuucgccgugcacuucaucuccaacagcuggcugauguggcugaucaucaaccugguccagauggcccccaucuccgcgauggugcgcauguacaucuucuucgccagcuucuacuacguguggaagagcuacguccacgugguggacggcugcaacuccagcaccugcaugaugugcuacaagcggaaccgcgccacgcgggucgagugcaccaccaucgugaacgggguccgccgguccuucuacguguacgccaacggcggcaagggguucugcaagcuccacaacuggaacugcgugaacugcgacaccuucugcgccggcagcacguucaucuccgacgaggucgcgcgcgaccugagccugcaguucaagcggccgaucaaccccaccgaccaguccagcuacaucguggacuccgugaccgucaagaacgggagcauccaccucuacuucgacaaggccggccagaagaccuacgagcgccacucccugagccacuucgugaaccuggacaaccuccgggccaacaacacgaaggggucccugcccaucaacgugaucgucuucgacggcaagagcaagugcgaggaguccagcgccaaguccgccagcguguacuacucccagcugaugugccagcccauccuccugcuggaccaggcgcucgugagcgacgucggcgacagcgccgagguggccgugaagauguucgacgccuacgucaacaccuucuccagcaccuucaacgugccgauggagaagcugaagacccugguggccacggcggaggccgagcucgccaagaacgucucccuggacaacgugcugagcaccuucaucuccgccgcgcgccagggguucguggacagcgacgucgagaccaaggacgugguggagugccucaagcugucccaccagagcgacaucgaggucaccggcgacuccugcaacaacuacaugcugacguacaacaagguggagaacaugaccccccgggaccucggggccugcaucgacugcagcgcccgccacaucaacgugcaggucgccaagucccacaacaucgcccugaucuggaacgugaaggacuucaugagccuguccgagcagcuccggaagcagauccgcagcgcggccaagaagaacaaccugcccuucaagcugaccugcgccaccacgcgccagguggucaacguggugaccaccaagaucgcccucaagggcgggugaggacuaguuauaagacugacuagcccgaugggccucccaacgggcccuccuccccuccuugcaccgagauuaauaaaaaaaaaaaaaaaaaaaaaaaaaaaaaaaaaaaaaaaaaaaaaaaaaaaaaaaaaaaaaaaaugcaucccccccccccccccccccccccccccccccaaaggcucuuuucagagccaccagaauu

SEQ ID NO: 21932 - RNA, 6058 nt, Artificial Sequence
  SARS-CoV-2__MT507793.1__non-structural protein 3 (NSP3) mRNA gc
aggagaaagcuuaccauggcccccaccaaggugaccuucggcgacgacacggucaucgaggugcagggguacaagagcgugaacaucaccuucgagcuggacgagcgcaucgacaagguccucaacgagaagugcuccgccuacaccguggagcugggcaccgaggugaacgaguucgcgugcgucguggccgacgccgugaucaagacgcugcagccggucagcgagcuccugaccccccuggggaucgaccucgacgagugguccauggccaccuacuaccuguucgacgagagcggcgaguucaagcuggccucccacauguacugcagcuucuacccccccgacgaggacgaggaggagggggacugcgaggaggaggaguucgagccguccacccaguacgaguacggcacggaggacgacuaccagggcaagccccucgaguucggggcgaccagcgccgcccugcagcccgaggaggagcaggaggaggacuggcuggacgacgacucccagcagaccgugggccagcaggacgggagcgaggacaaccagaccacgaccauccagaccaucguggagguccagccccagcucgagauggagcugaccccgguggugcagacgaucgaggucaacuccuucagcggcuaccugaagcucaccgacaacguguacaucaagaacgccgacaucguggaggaggcgaagaaggucaagcccaccgugguggucaacgccgccaacguguaccugaagcacgggggcggcguggccggggcccugaacaaggcgaccaacaacgccaugcaggucgaguccgacgacuacaucgccacgaacggcccccucaagguggggggcagcugcguccuguccggccacaaccuggccaagcacugccuccacgugguggggcccaacgucaacaagggcgaggacauccagcugcugaagagcgccuacgagaacuucaaccagcacgaggugcuccuggcgccgcugcucuccgccgggaucuucggcgccgaccccauccacagccugcgggugugcgucgacaccgugcgcaccaacguguaccuggccgucuucgacaagaaccucuacgacaagcugguguccagcuuccuggagaugaagagcgagaagcagguggagcagaagaucgccgagauccccaaggaggaggucaagcccuucaucaccgaguccaagccgagcguggagcagcggaagcaggacgacaagaagaucaaggcgugcguggaggaggucacgaccacccucgaggagaccaaguuccugacggagaaccugcuccuguacaucgacaucaacgggaaccugcaccccgacuccgccacccucgugagcgacaucgacaucaccuuccugaagaaggacgcccccuacaucgugggcgacgucgugcaggagggcgugcugaccgccgucgugauccccacgaagaaggccgggggcaccaccgagaugcucgcgaaggcccugcgcaaggugccgaccgacaacuacaucacgaccuaccccgggcagggccugaacggguacaccgucgaggaggccaagaccgugcucaagaagugcaaguccgccuucuacauccugcccagcaucaucuccaacgagaagcaggagauccugggcaccgugagcuggaaccuccgggagaugcuggcgcacgccgaggagacgcgcaagcugaugcccgucugcguggagaccaaggccaucguguccaccauccagcggaaguacaagggcaucaagauccaggagggggucguggacuacggcgcccgcuucuacuucuacaccagcaagacgaccguggccucccugaucaacacccucaacgaccugaacgagacccuggucacgaugccgcucggguacgugacccacggccugaaccuggaggaggcggcccgguacaugcgcagccucaaggugcccgccaccgucuccgugagcucccccgacgccgugaccgccuacaacggguaccugacgagcuccagcaagacccccgaggagcacuucaucgagaccaucucccuggcgggcagcuacaaggacuggagcuacuccggccagagcacccagcucgggaucgaguuccugaagcggggcgacaaguccgucuacuacacgagcaacccgaccaccuuccaccuggacggggaggugaucaccuucgacaaccucaagacgcugcugucccuccgcgaggugcggaccaucaaggucuucaccaccguggacaacaucaaccugcacacgcagguggucgacaugagcaugaccuacggccagcaguucggccccaccuaccuggacggggccgacgugaccaagaucaagccccacaacucccacgagggcaagacguucuacgugcucccgaacgacgacacccugcgcgucgaggccuucgaguacuaccacaccaccgaccccagcuuccuggggcgguacauguccgcccucaaccacacgaagaaguggaaguacccccaggugaacggccugaccagcaucaagugggccgacaacaacugcuaccuggcgaccgcccuccugacccugcagcagaucgagcucaaguucaaccccccggcccugcaggacgccuacuaccgcgcgcgggccggggaggccgccaacuucugcgcccugauccucgcguacugcaacaagacggugggcgagcugggcgacguccgcgagaccauguccuaccuguuccagcacgccaaccucgacagcugcaagcgggugcugaacgucgugugcaagaccugcgggcagcagcagaccacccugaagggcguggaggccgucauguacauggggacgcucuccuacgagcaguucaagaagggcgugcagauccccugcaccugcgggaagcaggccaccaaguaccuggugcagcaggagagccccuucgucaugauguccgcccccccggcgcaguacgagcugaagcacggcaccuucacgugcgccagcgaguacaccggcaacuaccagugcgggcacuacaagcacaucaccuccaaggagacccucuacugcaucgacggcgcccugcugacgaagagcagcgaguacaaggggcccaucaccgacguguucuacaaggagaacuccuacaccaccacgaucaagcccgugaccuacaagcucgacggcgucgugugcaccgagaucgaccccaagcuggacaacuacuacaagaaggacaacagcuacuucaccgagcagccgaucgaccuggugcccaaccagcccuaccccaacgccuccuucgacaacuucaaguucgucugcgacaacaucaaguucgccgacgaccucaaccagcugacgggguacaagaagccggcgagccgcgagcugaaggugaccuucuuccccgaccucaacggcgacguggucgccaucgacuacaagcacuacacccccuccuucaagaagggcgccaagcugcugcacaagcccaucguguggcacgugaacaacgccaccaacaaggcgacguacaagccgaacaccuggugcauccggugccucuggagcaccaagcccgucgagaccuccaacagcuucgacgugcugaaguccgaggacgcccaggggauggacaaccuggccugcgaggaccucaagcccgugagcgaggaggucguggagaaccccacgauccagaaggacgugcuggagugcaacgucaagaccaccgagguggugggcgacaucauccugaagccggccaacaacucccucaagaucaccgaggaggucgggcacacggaccugauggccgcguacguggacaacagcucccugaccaucaacaagcccaacgagcucagccgcgugcugggccugaagacccucgccacccacgggcuggccgccgucaacuccgugcccugggacacgaucgccaacuacgcgaagccguuccugaacaagguggucagcaccaccaccaacaucgugacgcgcugccucaaccgggugugcaccaacuacaugcccuacuucuucacccugcugcuccagcugugcaccuucacccgcuccacgaacagccggaucaaggccuccaugcccaccaccaucgccaagaacaccgucaagagcgugggcaaguucugccuggaggccagcuucaacuaccucaagucccccaacuucagcaagcugaucaacaucaucaucugguuccugcuccuguccgugugccugggcagccucaucuacuccacggccgcgcuggggguccugaugagcaaccucggcaugccguccuacugcaccggguaccgcgagggcuaccugaacagcaccaacgugaccaucgccacguacugcaccggcuccauccccugcagcgugugccuguccgggcucgacagccuggacaccuaccccucccuggagaccauccagaucacgaucagcuccuucaagugggaccucaccgccuucggccuggucgccgagugguuccuggccuacauccucuucacccgguucuucuacgugcuggggcuggcggccaucaugcagcucuucuucagcuacuucgccgugcacuucaucuccaacagcuggcugauguggcugaucaucaaccugguccagauggcccccaucuccgcgauggugcgcauguacaucuucuucgccagcuucuacuacguguggaagagcuacguccacgugguggacggcugcaacuccagcaccugcaugaugugcuacaagcggaaccgcgccacgcgggucgagugcaccaccaucgugaacgggguccgccgguccuucuacguguacgccaacggcggcaagggguucugcaagcuccacaacuggaacugcgugaacugcgacaccuucugcgccggcagcacguucaucuccgacgaggucgcgcgcgaccugagccugcaguucaagcggccgaucaaccccaccgaccaguccagcuacaucguggacuccgugaccgucaagaacgggagcauccaccucuacuucgacaaggccggccagaagaccuacgagcgccacucccugagccacuucgugaaccuggacaaccuccgggccaacaacacgaaggggucccugcccaucaacgugaucgucuucgacggcaagagcaagugcgaggaguccagcgccaaguccgccagcguguacuacucccagcugaugugccagcccauccuccugcuggaccaggcgcucgugagcgacgucggcgacagcgccgagguggccgugaagauguucgacgccuacgucaacaccuucuccagcaccuucaacgugccgauggagaagcugaagacccugguggccacggcggaggccgagcucgccaagaacgucucccuggacaacgugcugagcaccuucaucuccgccgcgcgccagggguucguggacagcgacgucgagaccaaggacgugguggagugccucaagcugucccaccagagcgacaucgaggucaccggcgacuccugcaacaacuacaugcugacguacaacaagguggagaacaugaccccccgggaccucggggccugcaucgacugcagcgcccgccacaucaacgcccagguggccaagucccacaacaucgcgcugaucuggaacgucaaggacuucaugagccuguccgagcagcuccggaagcagauccgcagcgccgccaagaagaacaaccugcccuucaagcugaccugcgccaccacgcgccagguggugaacgucgugaccaccaagaucgcccucaagggcgggugaggacuaguuauaagacugacuagcccgaugggccucccaacgggcccuccuccccuccuugcaccgagauuaauaaaaaaaaaaaaaaaaaaaaaaaaaaaaaaaaaaaaaaaaaaaaaaaaaaaaaaaaaaaaaaaaugcaucccccccccccccccccccccccccccccccaaaggcucuuuucagagccaccagaauu

SEQ ID NO: 21933 - RNA, 6058 nt, Artificial Sequence
  SARS-CoV-2__MT499208.1__non-structural protein 3 (NSP3) mRNA gc
aggagaaagcuuaccauggcccccaccaaggugaccuucggcgacgacacggucaucgaggugcagggguacaagagcgugaacaucaccuucgagcuggacgagcgcaucgacaagguccucaacgagaagugcuccgccuacaccguggagcugggcaccgaggugaacgaguucgcgugcgucguggccgacgccgugaucaagacgcugcagccggucagcgagcuccugaccccccuggggaucgaccucgacgagugguccauggccaccuacuaccuguucgacgagagcggcgaguucaagcuggccucccacauguacugcagcuucuacccccccgacgaggacgaggaggagggggacugcgaggaggaggaguucgagccguccacccaguacgaguacggcacggaggacgacuaccagggcaagccccucgaguucggggcgaccagcgccgcccugcagcccgaggaggagcaggaggaggacuggcuggacgacgacucccagcagaccgugggccagcaggacgggagcgaggacaaccagaccacgaccauccagaccaucguggagguccagccccagcucgagauggagcugaccccgguggugcagacgaucgaggucaacuccuucagcggcuaccugaagcucaccgacaacguguacaucaagaacgccgacaucguggaggaggcgaagaaggucaagcccaccgugguggucaacgccgccaacguguaccugaagcacgggggcggcguggccggggcccugaacaaggcgaccaacaacgccaugcaggucgaguccgacgacuacaucgccacgaacggcccccucaagguggggggcagcugcguccuguccggccacaaccuggccaagcacugccuccacgugguggggcccaacgucaacaagggcgaggacauccaguuccugaagagcgccuacgagaacuucaaccagcacgaggugcugcucgcgccgcugcuguccgccgggaucuucggcgccgaccccauccacagccuccgggugugcgucgacaccgugcgcaccaacguguaccuggccgucuucgacaagaaccuguacgacaagcucguguccagcuuccuggagaugaagagcgagaagcagguggagcagaagaucgccgagauccccaaggaggaggucaagcccuucaucaccgaguccaagccgagcguggagcagcggaagcaggacgacaagaagaucaaggcgugcguggaggaggucacgaccacccuggaggagaccaaguuccucacggagaaccugcugcucuacaucgacaucaacgggaaccugcaccccgacuccgccacccuggugagcgacaucgacaucaccuuccucaagaaggacgcccccuacaucgugggcgacgucgugcaggagggcgugcugaccgccgucgugauccccacgaagaaggccgggggcaccaccgagaugcuggcgaaggcccuccgcaaggugccgaccgacaacuacaucacgaccuaccccgggcagggccugaacggguacaccgucgaggaggccaagaccgugcugaagaagugcaaguccgccuucuacauccuccccagcaucaucuccaacgagaagcaggagauccugggcaccgugagcuggaaccugcgggagaugcucgcgcacgccgaggagacgcgcaagcugaugcccgucugcguggagaccaaggccaucguguccaccauccagcggaaguacaagggcaucaagauccaggagggggucguggacuacggcgcccgcuucuacuucuacaccagcaagacgaccguggccucccugaucaacacccugaacgaccucaacgagacccuggucacgaugccgcugggguacgugacccacggccucaaccuggaggaggcggcccgguacaugcgcagccugaaggugcccgccaccgucuccgugagcucccccgacgccgugaccgccuacaacggguaccucacgagcuccagcaagacccccgaggagcacuucaucgagaccaucucccuggcgggcagcuacaaggacuggagcuacuccggccagagcacccagcuggggaucgaguuccucaagcggggcgacaaguccgucuacuacacgagcaacccgaccaccuuccaccuggacggggaggugaucaccuucgacaaccugaagacgcuccugucccugcgcgaggugcggaccaucaaggucuucaccaccguggacaacaucaaccuccacacgcagguggucgacaugagcaugaccuacggccagcaguucggccccaccuaccuggacggggccgacgugaccaagaucaagccccacaacucccacgagggcaagacguucuacgugcugccgaacgacgacacccuccgcgucgaggccuucgaguacuaccacaccaccgaccccagcuuccuggggcgguacauguccgcccugaaccacacgaagaaguggaaguacccccaggugaacggccucaccagcaucaagugggccgacaacaacugcuaccuggcgaccgcccugcucacccugcagcagaucgagcugaaguucaaccccccggcccuccaggacgccuacuaccgcgcgcgggccggggaggccgccaacuucugcgcccugauccuggcguacugcaacaagacggugggcgagcucggcgacguccgcgagaccauguccuaccuguuccagcacgccaaccuggacagcugcaagcgggugcucaacgucgugugcaagaccugcgggcagcagcagaccacccugaagggcguggaggccgucaucuacauggggacgcuguccuacgagcaguucaagaagggcgugcagauccccugcaccugcgggaagcaggccaccaaguaccucgugcagcaggagagccccuucgucaugauguccgcccccccggcgcaguacgagcugaagcacggcaccuucacgugcgccagcgaguacaccggcaacuaccagugcgggcacuacaagcacaucaccuccaaggagacccuguacugcaucgacggcgcccuccugacgaagagcagcgaguacaaggggcccaucaccgacguguucuacaaggagaacuccuacaccaccacgaucaagcccgugaccuacaagcuggacggcgucgugugcaccgagaucgaccccaagcucgacaacuacuacaagaaggacaacagcuacuucaccgagcagccgaucgaccuggugcccaaccagcccuaccccaacgccuccuucgacaacuucaaguucgucugcgacaacaucaaguucgccgacgaccugaaccagcucacgggguacaagaagccggcgagccgcgagcugaaggugaccuucuuccccgaccugaacggcgacguggucgccaucgacuacaagcacuacacccccuccuucaagaagggcgccaagcuccugcacaagcccaucguguggcacgugaacaacgccaccaacaaggcgacguacaagccgaacaccuggugcauccggugccuguggagcaccaagcccgucgagaccuccaacagcuucgacgugcucaaguccgaggacgcccaggggauggacaaccuggccugcgaggaccugaagcccgugagcgaggaggucguggagaaccccacgauccagaaggacgugcucgagugcaacgucaagaccaccgagguggugggcgacaucauccugaagccggccaacaacucccugaagaucaccgaggaggucgggcacacggaccucauggccgcguacguggacaacagcucccugaccaucaagaagcccaacgagcugagccgcgugcucggccugaagacccuggccacccacgggcucgccgccgucaacuccgugcccugggacacgaucgccaacuacgcgaagccguuccugaacaagguggucagcaccaccaccaacaucgugacgcgcugccugaaccgggugugcaccaacuacaugcccuacuucuucacccuccugcugcagcucugcaccuucacccgcuccacgaacagccggaucaaggccuccaugcccaccaccaucgccaagaacaccgucaagagcgugggcaaguucugccuggaggccagcuucaacuaccugaagucccccaacuucagcaagcucaucaacaucaucaucugguuccugcugcucuccgugugccugggcagccugaucuacuccacggccgcgcucgggguccugaugagcaaccugggcaugccguccuacugcaccggguaccgcgagggcuaccucaacagcaccaacgugaccaucgccacguacugcaccggcuccauccccugcagcgugugccuguccgggcuggacagccucgacaccuaccccucccuggagaccauccagaucacgaucagcuccuucaagugggaccugaccgccuucggccucgucgccgagugguuccuggccuacauccuguucacccgguucuucuacgugcucgggcuggcggccaucaugcagcuguucuucagcuacuucgccgugcacuucaucuccaacagcuggcucauguggcugaucaucaaccugguccagauggcccccaucuccgcgauggugcgcauguacaucuucuucgccagcuucuacuacguguggaagagcuacguccacgugguggacggcugcaacuccagcaccugcaugaugugcuacaagcggaaccgcgccacgcgggucgagugcaccaccaucgugaacgggguccgccgguccuucuacguguacgccaacggcggcaagggguucugcaagcugcacaacuggaacugcgugaacugcgacaccuucugcgccggcagcacguucaucuccgacgaggucgcgcgcgaccucagccugcaguucaagcggccgaucaaccccaccgaccaguccagcuacaucguggacuccgugaccgucaagaacgggagcauccaccuguacuucgacaaggccggccagaagaccuacgagcgccacucccucagccacuucgugaaccuggacaaccugcgggccaacaacacgaaggggucccuccccaucaacgugaucgucuucgacggcaagagcaagugcgaggaguccagcgccaaguccgccagcguguacuacucccagcugaugugccagcccauccugcuccuggaccaggcgcuggugagcgacgucggcgacagcgccgagguggccgugaagauguucgacgccuacgucaacaccuucuccagcaccuucaacgugccgauggagaagcucaagacccugguggccacggcggaggccgagcuggccaagaacgucucccucgacaacgugcugagcaccuucaucuccgccgcgcgccagggguucguggacagcgacgucgagaccaaggacgugguggagugccugaagcucucccaccagagcgacaucgaggucaccggcgacuccugcaacaacuacaugcugacguacaacaagguggagaacaugaccccccgggaccugggggccugcaucgacugcagcgcccgccacaucaacgcccagguggccaagucccacaacaucgcgcucaucuggaacgucaaggacuucaugagccuguccgagcagcugcggaagcagauccgcagcgccgccaagaagaacaaccuccccuucaagcugaccugcgccaccacgcgccagguggugaacgucgugaccaccaagaucgcccugaagggcgggugaggacuaguuauaagacugacuagcccgaugggccucccaacgggcccuccuccccuccuugcaccgagauuaauaaaaaaaaaaaaaaaaaaaaaaaaaaaaaaaaaaaaaaaaaaaaaaaaaaaaaaaaaaaaaaaaugcaucccccccccccccccccccccccccccccccaaaggcucuuuucagagccaccagaauu

SEQ ID NO: 21934 - RNA, 6058 nt, Artificial Sequence
  SARS-CoV-2__MT270104.1__non-structural protein 3 (NSP3) mRNA gc
aggagaaagcuuaccauggcccccaccaaggugaccuucggcgacgacacggucaucgaggugcagggguacaagagcgugaacaucaccuucgagcuggacgagcgcaucgacaagguccucaacgagaagugcuccgccuacaccguggagcugggcaccgaggugaacgaguucgcgugcgucguggccgacgccgugaucaagacgcugcagccggucagcgagcuccugaccccccuggggaucgaccucgacgagugguccauggccaccuacuaccuguucgacgagagcggcgaguucaagcuggccucccacauguacugcagcuucuacccccccgacgaggacgaggaggagggggacugcgaggaggaggaguucgagccguccacccaguacgaguacggcacggaggacgacuaccagggcaagccccucgaguucggggcgaccagcgccgcccugcagcccgaggaggagcaggaggaggacuggcuggacgacgacucccagcagaccgugggccagcaggacgggagcgaggacaaccagaccacgaccauccagaccaucguggagguccagccccagcucgagauggagcugaccccgguggugcagacgaucgaggucaacuccuucagcggcuaccugaagcucaccgacaacguguacaucaagaacgccgacaucguggaggaggcgaagaaggucaagcccaccgugguggucaacgccgccaacguguaccugaagcacgggggcggcguggccggggcccugaacaaggcgaccaacaacgccaugcaggucgaguccgacgacuacaucgccacgaacggcccccucaagguggggggcagcugcguccuguccggccacaaccuggccaagcacugccuccacgugguggggcccaacgucaacaagggcgaggacauccagcugcugaagagcgccuacgagaacuucaaccagcacgaggugcuccuggcgccgcugcucuccgccgggaucuucggcgccgaccccauccacagccugcgggugugcgucgacaccgugcgcaccaacguguaccuggccgucuucgacaagaaccucuacgacaagcugguguccagcuuccuggagaugaagagcgagaagcagguggagcagaagaucgccgagauccccaaggaggaggucaagcccuucaucaccgaguccaagccgagcguggagcagcggaagcaggacgacaagaagaucaaggcgugcguggaggaggucacgaccacccucgaggagaccaaguuccugacggagaaccugcuccuguacaucgacaucaacgggaaccugcaccccgacuccgccacccucgugagcgacaucgacaucaccuuccugaagaaggacgcccccuacaucgugggcgacgucgugcaggagggcgugcugaccgccgucgugauccccacgaagaaggccgggggcaccaccgagaugcucgcgaaggcccugcgcaaggugccgaccgacaacuacaucacgaccuaccccgggcagggccugaacggguacaccgucgaggaggccaagaccgugcucaagaagugcaaguccgccuucuacauccugcccagcaucaucuccaacgagaagcaggagauccugggcaccgugagcuggaaccuccgggagaugcuggcgcacgccgaggagacgcgcaagcugaugcccgucugcguggagaccaaggccaucguguccaccauccagcggaaguacaagggcaucaagauccaggagggggucguggacuacggcgcccgcuucuacuucuacaccagcaagacgaccguggccucccugaucaacacccucaacgaccugaacgagacccuggucacgaugccgcucggguacgugacccacggccugaaccuggaggaggcggcccgguacaugcgcagccucaaggugcccgccaccgucuccgugagcucccccgacgccgugaccgccuacaacggguaccugacgagcuccagcaagacccccgaggagcacuucaucgagaccaucucccuggcgggcagcuacaaggacuggagcuacuccggccagagcacccagcucgggaucgaguuccugaagcggggcgacaaguccgucuacuacacgagcaacccgaccaccuuccaccuggacggggaggugaucaccuucgacaaccucaagacgcugcugucccuccgcgaggugcggaccaucaaggucuucaccaccguggacaacaucaaccugcacacgcagguggucgacaugagcaugaccuacggccagcaguucggccccaccuaccuggacggggccgacgugaccaagaucaagccccacaacucccacgagggcaagacguucuacgugcucccgaacgacgacacccugcgcgucgaggccuucgaguacuaccacaccaccgaccccagcuuccuggggcgguacauguccgcccucaaccacacgaagaaguggaaguacccccaggugaacggccugaccagcaucaagugggccgacaacaacugcuaccuggcgaccgcccuccugacccugcagcagaucgagcucaaguucaaccccccggcccugcaggacgccuacuaccgcgcgcgggccggggaggccgccaacuucugcgcccugauccucgcguacugcaacaagacggugggcgagcugggcgacguccgcgagaccauguccuaccuguuccagcacgccaaccucgacagcugcaagcgggugcugaacgucgugugcaagaccugcgggcagcagcagaccacccugaagggcguggaggccgucauguacauggggacgcucuccuacgagcaguucaagaagggcgugcagauccccugcaccugcgggaagcaggccaccaaguaccuggugcagcaggagagccccuucgucaugauguccgcccccccggcgcaguacgagcugaagcacggcaccuucacgugcgccagcgaguacaccggcaacuaccagugcgggcacuacaagcacaucaccuccaaggagacccucuacugcaucgacggcgcccugcugacgaagagcagcgaguacaaggggcccaucaccgacguguucuacaaggagaacuccuacaccaccacgaucaagcccgugaccuacaagcucgacggcgucgugugcaccgagaucgaccccaagcuggacaacuacuacaagaaggacaacagcuacuucaccgagcagccgaucgaccuggugcccaaccagcccuaccccaacgccuccuucgacaacuucaaguucgucugcgacaacaucaaguucgccgacgaccucaaccagcugacgggguacaagaagccggcgagccgcgagcugaaggugaccuucuuccccgaccucaacggcgacguggucgccaucgacuacaagcacuacacccccuccuucaagaagggcgccaagcugcugcacaagcccaucguguggcacgugaacaacgccaccaacaaggcgacguacaagccgaacaccuggugcauccggugccucuggagcaccaagcccgucgagaccuccaacagcuucgacgugcugaaguccgaggacgcccaggggauggacaaccuggccugcgaggaccucaagcccgugagcgaggaggucguggagaaccccacgauccagaaggacauccuggagugcaacgugaagaccaccgaggucgugggcgacaucauccugaagccggccaacaacucccucaagaucaccgaggagguggggcacacggaccugauggccgcguacgucgacaacagcucccugaccaucaagaagcccaacgagcucagccgcgugcugggccugaagacccucgccacccacgggcuggccgccgugaacuccguccccugggacacgaucgccaacuacgcgaagccguuccugaacaagguggugagcaccaccaccaacaucgucacgcgcugccucaaccgggugugcaccaacuacaugcccuacuucuucacccugcugcuccagcugugcaccuucacccgcuccacgaacagccggaucaaggccuccaugcccaccaccaucgccaagaacaccgugaagagcgucggcaaguucugccuggaggccagcuucaacuaccucaagucccccaacuucagcaagcugaucaacaucaucaucugguuccugcuccuguccgugugccugggcagccucaucuacuccacggccgcgcugggggugcugaugagcaaccucggcaugccguccuacugcaccggguaccgcgagggcuaccugaacagcaccaacgucaccaucgccacguacugcaccggcuccauccccugcagcgugugccuguccgggcucgacagccuggacaccuaccccucccuggagaccauccagaucacgaucagcuccuucaagugggaccucaccgccuucggccugguggccgagugguuccuggccuacauccucuucacccgguucuucuacguccuggggcuggcggccaucaugcagcucuucuucagcuacuucgccgugcacuucaucuccaacagcuggcugauguggcugaucaucaaccuggugcagauggcccccaucuccgcgaugguccgcauguacaucuucuucgccagcuucuacuacguguggaagagcuacgugcacgucguggacggcugcaacuccagcaccugcaugaugugcuacaagcggaaccgcgccacgcggguggagugcaccaccaucgucaacggggugcgccgguccuucuacgucuacgccaacggcggcaagggguucugcaagcuccacaacuggaacugcgugaacugcgacaccuucugcgccggcagcacguucaucuccgacgagguggcgcgcgaccugagccugcaguucaagcggccgaucaaccccaccgaccaguccagcuacaucgucgacuccgugaccgugaagaacgggagcauccaccucuacuucgacaaggccggccagaagaccuacgagcgccacucccugagccacuucgucaaccuggacaaccuccgggccaacaacacgaaggggucccugcccaucaacgugaucguguucgacggcaagagcaagugcgaggaguccagcgccaaguccgccagcgucuacuacucccagcugaugugccagcccauccuccugcuggaccaggcgcucgugagcgacgugggcgacagcgccgaggucgccgugaagauguucgacgccuacgugaacaccuucuccagcaccuucaacgucccgauggagaagcugaagacccugguggccacggcggaggccgagcucgccaagaacgugucccuggacaacguccugagcaccuucaucuccgccgcgcgccagggguucguggacagcgacguggagaccaaggacgucguggagugccucaagcugucccaccagagcgacaucgaggugaccggcgacuccugcaacaacuacaugcugacguacaacaaggucgagaacaugaccccccgggaccucggggccugcaucgacugcagcgcccgccacaucaacgcccagguggccaagucccacaacaucgcgcugaucuggaacgugaaggacuucaugagccuguccgagcagcuccggaagcagauccgcagcgccgccaagaagaacaaccugcccuucaagcugaccugcgccaccacgcgccaggucgugaacguggucaccaccaagaucgcccucaagggcgggugaggacuaguuauaagacugacuagcccgaugggccucccaacgggcccuccuccccuccuugcaccgagauuaauaaaaaaaaaaaaaaaaaaaaaaaaaaaaaaaaaaaaaaaaaaaaaaaaaaaaaaaaaaaaaaaaugcaucccccccccccccccccccccccccccccccaaaggcucuuuucagagccaccagaauu

SEQ ID NO: 21935 - RNA, 6058 nt, Artificial Sequence
  SARS-CoV-2__MT477835.1__non-structural protein 3 (NSP3) mRNA gc
aggagaaagcuuaccauggcccccaccaaggugaccuucggcgacgacacggucaucgaggugcagggguacaagagcgugaacaucaccuucgagcuggacgagcgcaucgacaagguccucaacgagaagugcuccgccuacaccguggagcugggcaccgaggugaacgaguucgcgugcgucguggccgacgccgugaucaagacgcugcagccggucagcgagcuccugaccccccuggggaucgaccucgacgagugguccauggccaccuacuaccuguucgacgagagcggcgaguucaagcuggccucccacauguacugcagcuucuacccccccgacgaggacgaggaggagggggacugcgaggaggaggaguucgagccguccacccaguacgaguacggcacggaggacgacuaccagggcaagccccucgaguucggggcgaccagcgccgcccugcagcccgaggaggagcaggaggaggacuggcuggacgacgacucccagcagaccgugggccagcaggacgggagcgaggacaaccagaccacgaccauccagaccaucguggagguccagccccagcucgagauggagcugaccccgguggugcagacgaucgaggucaacuccuucagcggcuaccugaagcucaccgacaacguguacaucaagaacgccgacaucguggaggaggcgaagaaggucaagcccaccgugguggucaacgccgccaacguguaccugaagcacgggggcggcguggccggggcccugaacaaggcgaccaacaacgccaugcaggucgaguccgacgacuacaucgccacgaacggcccccucaagguggggggcagcugcguccuguccggccacaaccuggccaagcacugccuccacgugguggggcccaacgucaacaagggcgaggacauccagcugcugaagagcgccuacgagaacuucaaccagcacgaggugcuccuggcgccgcugcucuccgccgggaucuucggcgccgaccccauccacagccugcgggugugcgucgacaccgugcgcaccaacguguaccuggccgucuucgacaagaaccucuacgacaagcugguguccagcuuccuggagaugaagagcgagaagcagguggagcagaagaucgccgagauccccaaggaggaggucaagcccuucaucaccgaguccaagccgagcguggagcagcggaagcaggacgacaagaagaucaaggcgugcguggaggaggucacgaccacccucgaggagaccaaguuccugacggagaaccugcuccuguacaucgacaucaacgggaaccugcaccccgacuccgccacccucgugagcgacaucgacaucaccuuccugaagaaggacgcccccuacaucgugggcgacgucgugcaggagggcgugcugaccgccgucgugauccccacgaagaaggccgggggcaccaccgagaugcucgcgaaggcccugcgcaaggugccgaccgacaacuacaucacgaccuaccccgggcagggccugaacggguacaccgucgaggaggccaagaccgugcucaagaagugcaaguccgccuucuacauccugcccagcaucaucuccaacgagaagcaggagauccugggcaccgugagcuggaaccuccgggagaugcuggcgcacgccgaggagacgcgcaagcugaugcccgucugcguggagaccaaggccaucguguccaccauccagcggaaguacaagggcaucaagauccaggagggggucguggacuacggcgcccgcuucuacuucuacaccagcaagacgaccguggccucccugaucaacacccucaacgaccugaacgagacccuggucacgaugccgcucggguacgugacccacggccugaaccuggaggaggcggcccgguacaugcgcagccucaaggugcccgccaccgucuccgugagcucccccgacgccgugaccgccuacaacggguaccugacgagcuccagcaagacccccgaggagcacuucaucgagaccaucucccuggcgggcagcuacaaggacuggagcuacuccggccagagcacccagcucgggaucgaguuccugaagcggggcgacaaguccgucuacuacacgagcaacccgaccaccuuccaccuggacggggaggugaucaccuucgacaaccucaagacgcugcugucccuccgcgaggugcggaccaucaaggucuucaccaccguggacaacaucaaccugcacacgcagguggucgacaugagcaugaccuacggccagcaguucggccccaccuaccuggacggggccgacgugaccaagaucaagccccacaacucccacgagggcaagacguucuacgugcucccgaacgacgacacccugcgcgucgaggccuucgaguacuaccacaccaccgaccccagcuuccuggggcgguacauguccgcccucaaccacacgaagaaguggaaguacccccaggugaacggccugaccagcaucaagugggccgacaacaacugcuaccuggcgaccgcccuccugacccugcagcagaucgagcucaaguucaaccccccggcccugcaggacgccuacuaccgcgcgcgggccggggaggccgccaacuucugcgcccugauccucgcguacugcaacaagacggugggcgagcugggcgacguccgcgagaccauguccuaccuguuccagcacgccaaccucgacagcugcaagcgggugcugaacgucgugugcaagaccugcgggcagcagcagaccacccugaagggcguggaggccgucauguacauggggacgcucuccuacgagcaguucaagaagggcgugcagauccccugcaccugcgggaagcaggccaccaaguaccuggugcagcaggagagccccuucgucaugauguccgcccccccggcgcaguacgagcugaagcacggcaccuucacgugcgccagcgaguacaccggcaacuaccagugcgggcacuacaagcacaucaccuccaaggagacccucuacugcaucgacggcgcccugcugacgaagagcagcgaguacaaggggcccaucaccgacguguucuacaaggagaacuccuacaccaccacgaucaagcccgugaccuacaagcucgacggcgucgugugcaccgagaucgaccccaagcuggacaacuacuacaagaaggacaacagcuacuucaccgagcagccgaucgaccuggugcccaaccagcccuaccccaacgccuccuucgacaacuucaaguucgucugcgacaacaucaaguucgccgacgaccucaaccagcugacgggguacaagaagccggcgagccgcgagcugaaggugaccuucuuccccgaccucaacggcgacguggucgccaucgacuacaagcacuacacccccuccuucaagaagggcgccaagcugcugcacaagcccaucguguggcacgugaacaacgccaccaacaaggcgacguacaagccgaacaccuggugcauccggugccucuggagcaccaagcccgucgagaccuccaacagcuucgacgugcugaaguccgaggacgcccaggggauggacaaccuggccugcgaggaccucaagcccgugagcgaggaggucguggagaaccccacgauccagaaggacgugcuggagugcaacgucaagaccaccgagguggugggcgacaucauccugaagccggucaacaacucccucaagaucaccgaggagguggggcacacggaccugauggccgccuacguggacaacagcucccugaccaucaagaagcccaacgagcucagccgcguccugggccugaagacccucgcgacccacgggcuggccgccgugaacuccgugcccugggacacgaucgccaacuacgccaagccguuccugaacaaggucgugagcaccaccaccaacaucgugacgcgcugccucaaccgggucugcaccaacuacaugcccuacuucuucacccugcugcuccagcugugcaccuucacccgcuccacgaacagccggaucaaggcguccaugcccaccaccaucgccaagaacaccgugaagagcgugggcaaguucugccuggaggccagcuucaacuaccucaagucccccaacuucagcaagcugaucaacaucaucaucugguuccugcuccuguccgucugccugggcagccucaucuacuccacggccgcccugggggugcugaugagcaaccucggcaugccguccuacugcaccggguaccgcgagggcuaccugaacagcaccaacgugaccaucgcgacguacugcaccggcuccauccccugcagcgucugccuguccgggcucgacagccuggacaccuaccccucccuggagaccauccagaucacgaucagcuccuucaagugggaccucaccgccuucggccugguggccgagugguuccuggccuacauccucuucacccgguucuucuacgugcuggggcuggccgcgaucaugcagcucuucuucagcuacuucgccguccacuucaucuccaacagcuggcugauguggcugaucaucaaccuggugcagauggcccccaucuccgccauggugcgcauguacaucuucuucgcgagcuucuacuacgucuggaagagcuacgugcacguggucgacggcugcaacuccagcaccugcaugaugugcuacaagcggaaccgcgccacgcggguggagugcaccaccaucgucaacggggugcgccgguccuucuacguguacgccaacggcggcaagggguucugcaagcuccacaacuggaacugcgucaacugcgacaccuucugcgccggcagcacguucaucuccgacgagguggcccgcgaccugagccugcaguucaagcggccgaucaaccccaccgaccaguccagcuacaucguggacuccgucaccgugaagaacgggagcauccaccucuacuucgacaaggcgggccagaagaccuacgagcgccacucccugagccacuucgugaaccuggacaaccuccgggccaacaacacgaaggggucccugcccaucaacgucaucguguucgacggcaagagcaagugcgaggaguccagcgccaaguccgccagcguguacuacucccagcugaugugccagcccauccuccugcuggaccaggcccucgucagcgacgugggcgacagcgcggagguggccgucaagauguucgacgccuacgugaacaccuucuccagcaccuucaacgugccgauggagaagcugaagacccuggucgccacggccgaggcggagcucgccaagaacgugucccuggacaacgugcugagcaccuucaucuccgccgcccgccagggguucgucgacagcgacguggagaccaaggacguggucgagugccucaagcugucccaccagagcgacaucgaggugaccggcgacuccugcaacaacuacaugcugacguacaacaagguggagaacaugaccccccgggaccucggggcgugcaucgacugcagcgcccgccacaucaacgcccaggucgccaagucccacaacaucgcccugaucuggaacgugaaggacuucaugagccuguccgagcagcuccggaagcagauccgcagcgcggccaagaagaacaaccugcccuucaagcugaccugcgccaccacgcgccagguggucaacguggugaccaccaagaucgcccucaagggcgggugaggacuaguuauaagacugacuagcccgaugggccucccaacgggcccuccuccccuccuugcaccgagauuaauaaaaaaaaaaaaaaaaaaaaaaaaaaaaaaaaaaaaaaaaaaaaaaaaaaaaaaaaaaaaaaaaugcaucccccccccccccccccccccccccccccccaaaggcucuuuucagagccaccagaauu

SEQ ID NO: 21936 - RNA, 6058 nt, Artificial Sequence
  SARS-CoV-2__MT477844.1__non-structural protein 3 (NSP3) mRNA gc
aggagaaagcuuaccauggcccccaccaaggugaccuucggcgacgacacggucaucgaggugcagggguacaagagcgugaacaucaccuucgagcuggacgagcgcaucgacaagguccucaacgagaagugcuccgccuacaccguggagcugggcaccgaggugaacgaguucgcgugcgucguggccgacgccgugaucaagacgcugcagccggucagcgagcuccugaccccccuggggaucgaccucgacgagugguccauggccaccuacuaccuguucgacgagagcggcgaguucaagcuggccucccacauguacugcagcuucuacccccccgacgaggacgaggaggagggggacugcgaggaggaggaguucgagccguccacccaguacgaguacggcacggaggacgacuaccagggcaagccccucgaguucggggcgaccagcgccgcccugcagcccgaggaggagcaggaggaggacuggcuggacgacgacucccagcagaccgugggccagcaggacgggagcgaggacaaccagaccacgaccauccagaccaucguggagguccagucccagcucgagauggagcugacccccguggugcagacgaucgaggucaacagcuucuccggcuaccugaagcucaccgacaacguguacaucaagaacgccgacaucguggaggaggcgaagaaggucaagccgaccgugguggucaacgccgccaacguguaccugaagcacgggggcggcguggccggggcccugaacaaggcgaccaacaacgccaugcaggucgagagcgacgacuacaucgccacgaacggcccccucaagguggggggcuccugcguccugagcggccacaaccuggccaagcacugccuccacgugguggggcccaacgucaacaagggcgaggacauccagcugcugaaguccgccuacgagaacuucaaccagcacgaggugcuccuggcgccccugcucagcgccgggaucuucggcgccgacccgauccacucccugcgggugugcgucgacaccgugcgcaccaacguguaccuggccgucuucgacaagaaccucuacgacaagcuggugagcagcuuccuggagaugaaguccgagaagcagguggagcagaagaucgccgagauccccaaggaggaggucaagcccuucaucaccgagagcaagcccuccguggagcagcggaagcaggacgacaagaagaucaaggcgugcguggaggaggucacgaccacccucgaggagaccaaguuccugacggagaaccugcuccuguacaucgacaucaacgggaaccugcacccggacagcgccacccucguguccgacaucgacaucaccuuccugaagaaggacgcccccuacaucgugggcgacgucgugcaggagggcgugcugaccgccgucgugauccccacgaagaaggccgggggcaccaccgagaugcucgcgaaggcccugcgcaaggugcccaccgacaacuacaucacgaccuacccggggcagggccugaacggguacaccgucgaggaggccaagaccgugcucaagaagugcaagagcgccuucuacauccugcccuccaucaucagcaacgagaagcaggagauccugggcaccguguccuggaaccuccgggagaugcuggcgcacgccgaggagacgcgcaagcugaugcccgucugcguggagaccaaggccaucgugagcaccauccagcggaaguacaagggcaucaagauccaggagggggucguggacuacggcgcccgcuucuacuucuacaccuccaagacgaccguggccagccugaucaacacccucaacgaccugaacgagacccuggucacgaugccccucggguacgugacccacggccugaaccuggaggaggcggcccgguacaugcgcucccucaaggugccggccaccgucagcguguccagccccgacgccgugaccgccuacaacggguaccugacguccagcuccaagacccccgaggagcacuucaucgagaccaucagccuggcgggcagcuacaaggacugguccuacagcggccaguccacccagcucgggaucgaguuccugaagcggggcgacaagagcgucuacuacacguccaaccccaccaccuuccaccuggacggggaggugaucaccuucgacaaccucaagacgcugcugagccuccgcgaggugcggaccaucaaggucuucaccaccguggacaacaucaaccugcacacgcagguggucgacauguccaugaccuacggccagcaguucggcccgaccuaccuggacggggccgacgugaccaagaucaagccccacaacagccacgagggcaagacguucuacgugcuccccaacgacgacacccugcgcgucgaggccuucgaguacuaccacaccaccgacccguccuuccuggggcgguacaugagcgcccucaaccacacgaagaaguggaaguacccccaggugaacggccugaccuccaucaagugggccgacaacaacugcuaccuggcgaccgcccuccugacccugcagcagaucgagcucaaguucaacccccccgcccugcaggacgccuacuaccgcgcgcgggccggggaggccgccaacuucugcgcccugauccucgcguacugcaacaagacggugggcgagcugggcgacguccgcgagaccaugagcuaccuguuccagcacgccaaccucgacuccugcaagcgggugcugaacgucgugugcaagaccugcgggcagcagcagaccacccugaagggcguggaggccgucauguacauggggacgcucagcuacgagcaguucaagaagggcgugcagaucccgugcaccugcgggaagcaggccaccaaguaccuggugcagcaggagucccccuucgucaugaugagcgccccccccgcgcaguacgagcugaagcacggcaccuucacgugcgccuccgaguacaccggcaacuaccagugcgggcacuacaagcacaucaccagcaaggagacccucuacugcaucgacggcgcccugcugacgaagagcuccgaguacaaggggccgaucaccgacguguucuacaaggagaacagcuacaccaccacgaucaagcccgugaccuacaagcucgacggcgucgugugcaccgagaucgaccccaagcuggacaacuacuacaagaaggacaacuccuacuucaccgagcagcccaucgaccuggugccgaaccagcccuaccccaacgccagcuucgacaacuucaaguucgucugcgacaacaucaaguucgccgacgaccucaaccagcugacgggguacaagaagcccgcgucccgcgagcugaaggugaccuucuucccggaccucaacggcgacguggucgccaucgacuacaagcacuacacccccagcuucaagaagggcgccaagcugcugcacaagcccaucguguggcacgugaacaacgccaccaacaaggcgacguacaagcccaacaccuggugcauccggugccucugguccaccaagccggucgagaccagcaacuccuucgacgugcugaagagcgaggacgcccaggggauggacaaccuggccugcgaggaccucaagcccguguccgaggaggucguggagaaccccacgauccagaaggacgugcuggagugcaacgucaagaccaccgagguggugggcgacaucauccugaagcccgccaacaacagccucaagaucaccgaggaggucgggcacacggaccugauggccgcguacguggacaacuccagccugaccaucaagaagccgaacgagcucucccgcgugcugggccugaagacccucgccacccacgggcuggccgccgucaacagcgugcccugggacacgaucgccaacuacgcgaagcccuuccugaacaagguggucuccaccaccaccaacaucgugacgcgcugccucaaccgggugugcaccaacuacaugccguacuucuucacccugcugcuccagcugugcaccuucacccgcagcacgaacucccggaucaaggccagcaugcccaccaccaucgccaagaacaccgucaagagcgugggcaaguucugccuggaggccuccuucaacuaccucaagagccccaacuucuccaagcugaucaacaucaucaucugguuccugcuccugagcgugugccugggcucccucaucuacagcacggccgcgcuggggguccugauguccaaccucggcaugcccagcuacugcaccggguaccgcgagggcuaccugaacuccaccaacgugaccaucgccacguacugcaccggcagcaucccgugcuccgugugccugagcgggcucgacucccuggacaccuaccccagccuggagaccauccagaucacgaucuccagcuucaagugggaccucaccgccuucggccuggucgccgagugguuccuggccuacauccucuucacccgguucuucuacgugcuggggcuggcggccaucaugcagcucuucuucuccuacuucgccgugcacuucaucagcaacuccuggcugauguggcugaucaucaaccugguccagauggcccccaucagcgcgauggugcgcauguacaucuucuucgccagcuucuacuacguguggaaguccuacguccacgugguggacggcugcaacagcuccaccugcaugaugugcuacaagcggaaccgcgccacgcgggucgagugcaccaccaucgugaacgggguccgccggagcuucuacguguacgccaacggcggcaagggguucugcaagcuccacaacuggaacugcgugaacugcgacaccuucugcgccggcuccacguucaucagcgacgaggucgcgcgcgaccugucccugcaguucaagcggcccaucaacccgaccgaccagagcuccuacaucguggacagcgugaccgucaagaacggguccauccaccucuacuucgacaaggccggccagaagaccuacgagcgccacagccugucccacuucgugaaccuggacaaccuccgggccaacaacacgaaggggagccugcccaucaacgugaucgucuucgacggcaaguccaagugcgaggagagcuccgccaagagcgccuccguguacuacagccagcugaugugccagcccauccuccugcuggaccaggcgcucgugagcgacgucggcgacuccgccgagguggccgugaagauguucgacgccuacgucaacaccuucagcuccaccuucaacgugcccauggagaagcugaagacccugguggccacggcggaggccgagcucgccaagaacgucagccuggacaacgugcuguccaccuucaucagcgccgcgcgccagggguucguggacuccgacgucgagaccaaggacgugguggagugccucaagcugagccaccaguccgacaucgaggucaccggcgacagcugcaacaacuacaugcugacguacaacaagguggagaacaugaccccgcgggaccucggggccugcaucgacugcuccgcccgccacaucaacgcccagguggccaagagccacaacaucgcgcugaucuggaacgucaaggacuucaugucccugagcgagcagcuccggaagcagauccgcuccgccgccaagaagaacaaccugcccuucaagcugaccugcgccaccacgcgccagguggugaacgucgugaccaccaagaucgcccucaagggcgggugaggacuaguuauaagacugacuagcccgaugggccucccaacgggcccuccuccccuccuugcaccgagauuaauaaaaaaaaaaaaaaaaaaaaaaaaaaaaaaaaaaaaaaaaaaaaaaaaaaaaaaaaaaaaaaaaugcaucccccccccccccccccccccccccccccccaaaggcucuuuucagagccaccagaauu

SEQ ID NO: 21937 - RNA, 6058 nt, Artificial Sequence
  SARS-CoV-2__MT482113.1__non-structural protein 3 (NSP3) mRNA gc
aggagaaagcuuaccauggcccccaccaaggugaccuucggcgacgacacggucaucgaggugcagggguacaagagcgugaacaucaccuucgagcuggacgagcgcaucgacaagguccucaacgagaagugcuccgccuacaccguggagcugggcaccgaggugaacgaguucgcgugcgucguggccgacgccgugaucaagacgcugcagccggucagcgagcuccugaccccccuggggaucgaccucgacgagugguccauggccaccuacuaccuguucgacgagagcggcgaguucaagcuggccucccacauguacugcagcuucuacccccccgacgaggacgaggaggagggggacugcgaggaggaggaguucgagccguccacccaguacgaguacggcacggaggacgacuaccagggcaagccccucgaguucggggcgaccagcgccgcccugcagcccgaggaggagcaggaggaggacuggcuggacgacgacucccagcagaccgugggccagcaggacgggagcgaggacaaccagaccacgaccauccagaccaucguggagguccagccccagcucgagauggagcugaccccgguggugcagacgaucgaggucaacuccuucagcggcuaccugaagcucaccgacaacguguacaucaagaacgccgacaucguggaggaggcgaagaaggucaagcccaccgugguggucaacgccgccaacguguaccugaagcacgggggcggcguggccggggcccugaacaaggcgaccaacaacgccaugcaggucgaguccgacgacuacaucgccacgaacggcccccucaagguggggggcagcugcguccuguccggccacaaccuggccaagcacugccuccacgugguggggcccaacgucaacaagggcgaggacauccagcugcugaagagcgccuacgagaacuucaaccagcacgaggugcuccuggcgccgcugcucuccgccgggaucuucggcgccgaccccauccacagccugcgggugugcgucgacaccgugcgcaccaacguguaccuggccgucuucgacaagaaccucuacgacaagcugguguccagcuuccuggagaugaagagcgagaagcagguggagcagaagaucgccgagauccccaaggaggaggucaagcccuucaucaccgaguccaagccgagcguggagcagcggaagcaggacgacaagaagaucaaggcgugcguggaggaggucacgaccacccucgaggagaccaaguuccugacggagaaccugcuccuguacaucgacaucaacgggaaccugcaccccgacuccgccacccucgugagcgacaucgacaucaccuuccugaagaaggacgcccccuacaucgugggcgacgucgugcaggagggcgugcugaccgccgucgugauccccacgaagaaggccgggggcaccaccgagaugcucgcgaaggcccugcgcaaggugccgaccgacaacuacaucacgaccuaccccgggcagggccugaacggguacaccgucgaggaggccaagaccgugcucaagaagugcaaguccgccuucuacauccugcccagcaucaucuccaacgagaagcaggagauccugggcaccgugagcuggaaccuccgggagaugcuggcgcacgccgaggagacgcgcaagcugaugcccgucugcguggagaccaaggccaucguguccaccauccagcggaaguacaagggcaucaagauccaggagggggucguggacuacggcgcccgcuucuacuucuacaccagcaagacgaccguggccucccugaucaacacccucaacgaccugaacgagacccuggucacgaugccgcucggguacgugacccacggccugaaccuggaggaggcggcccgguacaugcgcagccucaaggugcccgccaccgucuccgugagcucccccgacgccgugaccgccuacaacggguaccugacgagcuccagcaagacccccgaggagcacuucaucgagaccaucucccuggcgggcagcuacaaggacuggagcuacuccggccagagcacccagcucgggaucgaguuccugaagcggggcgacaaguccgucuacuacacgagcaacccgaccaccuuccaccuggacggggaggugaucaccuucgacaaccucaagacgcugcugucccuccgcgaggugcggaccaucaaggucuucaccaccguggacaacaucaaccugcacacgcagguggucgacaugagcaugaccuacggccagcaguucggccccaccuaccuggacggggccgacgugaccaagaucaagccccacaacucccacgagggcaagacguucuacgugcucccgaacgacgacacccugcgcgucgaggccuucgaguacuaccacaccaccgaccccagcuuccuggggcgguacauguccgcccucaaccacacgaagaaguggaaguacccccaggugaacggccugaccagcaucaagugggccgacaacaacugcuaccuggcgaccgcccuccugacccugcagcagaucgagcucaaguucucccccccggcccugcaggacgccuacuaccgcgcgcgggccggggaggccgccaacuucugcgcccugauccucgcguacugcaacaagacggugggcgagcugggcgacguccgcgagaccaugagcuaccuguuccagcacgccaaccucgacuccugcaagcgggugcugaacgucgugugcaagaccugcgggcagcagcagaccacccugaagggcguggaggccgucauguacauggggacgcucagcuacgagcaguucaagaagggcgugcagauccccugcaccugcgggaagcaggccaccaaguaccuggugcagcaggagucccccuucgucaugaugagcgcccccccggcgcaguacgagcugaagcacggcaccuucacgugcgccuccgaguacaccggcaacuaccagugcgggcacuacaagcacaucaccagcaaggagacccucuacugcaucgacggcgcccugcugacgaagagcuccgaguacaaggggcccaucaccgacguguucuacaaggagaacagcuacaccaccacgaucaagcccgugaccuacaagcucgacggcgucgugugcaccgagaucgaccccaagcuggacaacuacuacaagaaggacaacuccuacuucaccgagcagccgaucgaccuggugcccaaccagcccuaccccaacgccagcuucgacaacuucaaguucgucugcgacaacaucaaguucgccgacgaccucaaccagcugacgggguacaagaagccggcgucccgcgagcugaaggugaccuucuuccccgaccucaacggcgacguggucgccaucgacuacaagcacuacacccccagcuucaagaagggcgccaagcugcugcacaagcccaucguguggcacgugaacaacgccaccaacaaggcgacguacaagccgaacaccuggugcauccggugccucugguccaccaagcccgucgagaccagcaacuccuucgacgugcugaagagcgaggacgcccaggggauggacaaccuggccugcgaggaccucaagcccguguccgaggaggucguggagaaccccacgauccagaaggacgugcuggagugcaacgucaagaccaccgagguggugggcgacaucauccugaagccggccaacaacagccucaagaucaccgaggaggucgggcacacggaccugauggccgcguacguggacaacuccagccugaccaucaagaagcccaacgagcucucccgcgugcugggccugaagacccucgccacccacgggcuggccgccgucaacagcgugcccugggacacgaucgccaacuacgcgaagccguuccugaacaagguggucuccaccaccaccaacaucgugacgcgcugccucaaccgggugugcaccaacuacaugcccuacuucuucacccugcugcuccagcugugcaccuucacccgcagcacgaacucccggaucaaggccagcaugcccaccaccaucgccaagaacaccgucaagagcgugggcaaguucugccuggaggccuccuucaacuaccucaagagccccaacuucuccaagcugaucaacaucaucaucugguuccugcuccugagcgugugccugggcucccucaucuacagcacggccgcgcuggggguccugauguccaaccucggcaugccgagcuacugcaccggguaccgcgagggcuaccugaacuccaccaacgugaccaucgccacguacugcaccggcagcauccccugcuccgugugccugagcgggcucgacucccuggacaccuaccccagccuggagaccauccagaucacgaucuccagcuucaagugggaccucaccgccuucggccuggucgccgagugguuccuggccuacauccucuucacccgguucuucuacgugcuggggcuggcggccaucaugcagcucuucuucuccuacuucgccgugcacuucaucagcaacuccuggcugauguggcugaucaucaaccugguccagauggcccccaucagcgcgauggugcgcauguacaucuucuucgccagcuucuacuacguguggaaguccuacguccacgugguggacggcugcaacagcuccaccugcaugaugugcuacaagcggaaccgcgccacgcgggucgagugcaccaccaucgugaacgggguccgccggagcuucuacguguacgccaacggcggcaagggguucugcaagcuccacaacuggaacugcgugaacugcgacaccuucugcgccggcuccacguucaucagcgacgaggucgcgcgcgaccugucccugcaguucaagcggccgaucaaccccaccgaccagagcuccuacaucguggacagcgugaccgucaagaacggguccauccaccucuacuucgacaaggccggccagaagaccuacgagcgccacagccugucccacuucgugaaccuggacaaccuccgggccaacaacacgaaggggagccugcccaucaacgugaucgucuucgacggcaaguccaagugcgaggagagcuccgccaagagcgccuccguguacuacagccagcugaugugccagcccauccuccugcuggaccaggcgcucgugagcgacgucggcgacuccgccgagguggccgugaagauguucgacgccuacgucaacaccuucagcuccaccuucaacgugccgauggagaagcugaagacccugguggccacggcggaggccgagcucgccaagaacgucagccuggacaacgugcuguccaccuucaucagcgccgcgcgccagggguucguggacuccgacgucgagaccaaggacgugguggagugccucaagcugagccaccaguccgacaucgaggucaccggcgacagcugcaacaacuacaugcugacguacaacaagguggagaacaugaccccccgggaccucggggccugcaucgacugcuccgcccgccacaucaacgcccagguggccaagagccacaacaucgcgcugaucuggaacgucaaggacuucaugucccugagcgagcagcuccggaagcagauccgcuccgccgccaagaagaacaaccugcccuucaagcugaccugcgccaccacgcgccagguggugaacgucgugaccaccaagaucgcccucaagggcgggugaggacuaguuauaagacugacuagcccgaugggccucccaacgggcccuccuccccuccuugcaccgagauuaauaaaaaaaaaaaaaaaaaaaaaaaaaaaaaaaaaaaaaaaaaaaaaaaaaaaaaaaaaaaaaaaaugcaucccccccccccccccccccccccccccccccaaaggcucuuuucagagccaccagaauu

SEQ ID NO: 21938 - RNA, 6058 nt, Artificial Sequence
  SARS-CoV-2__MT482134.1__non-structural protein 3 (NSP3) mRNA gc
aggagaaagcuuaccauggcccccaccaaggugaccuucggcgacgacacggucaucgaggugcagggguacaagagcgugaacaucaccuucgagcuggacgagcgcaucgacaagguccucaacgagaagugcuccgccuacaccguggagcugggcaccgaggugaacgaguucgcgugcgucguggccgacgccgugaucaagacgcugcagccggucagcgagcuccugaccccccuggggaucgaccucgacgagugguccauggccaccuacuaccuguucgacgagagcggcgaguucaagcuggccucccacauguacugcagcuucuacccccccgacgaggacgaggaggagggggacugcgaggaggaggaguucgagccguccacccaguacgaguacggcacggaggacgacuaccagggcaagccccucgaguucggggcgaccagcgccgcccugcagcccgaggaggagcaggaggaggacuggcuggacgacgacucccagcagaccgugggccagcaggacgggagcgaggacaaccagaccacgaccauccagaccaucguggagguccagccccagcucgagauggagcugaccccgguggugcagacguccuucagcggcuaccugaagcucaccgacaacgucuacaucaagaacgccgacaucguggaggaggcgaagaaggugaagcccaccgucguggugaacgccgccaacgucuaccugaagcacgggggcggcguggccggggcccugaacaaggcgaccaacaacgccaugcagguggaguccgacgacuacaucgccacgaacggcccccucaaggucgggggcagcugcgugcuguccggccacaaccuggccaagcacugccuccacgucguggggcccaacgugaacaagggcgaggacauccagcugcugaagagcgccuacgagaacuucaaccagcacgagguccuccuggcgccgcugcucuccgccgggaucuucggcgccgaccccauccacagccugcgggugugcguggacaccguccgcaccaacguguaccuggccguguucgacaagaaccucuacgacaagcuggucuccagcuuccuggagaugaagagcgagaagcagguggagcagaagaucgccgagauccccaaggaggaggugaagcccuucaucaccgaguccaagccgagcgucgagcagcggaagcaggacgacaagaagaucaaggcgugcguggaggaggugacgaccacccucgaggagaccaaguuccugacggagaaccugcuccuguacaucgacaucaacgggaaccugcaccccgacuccgccacccucgucagcgacaucgacaucaccuuccugaagaaggacgcccccuacaucgugggcgacgugguccaggagggcgugcugaccgccguggucauccccacgaagaaggccgggggcaccaccgagaugcucgcgaaggcccugcgcaaggugccgaccgacaacuacaucacgaccuaccccgggcagggccugaacggguacaccguggaggaggccaagaccguccucaagaagugcaaguccgccuucuacauccugcccagcaucaucuccaacgagaagcaggagauccugggcaccgugagcuggaaccuccgggagaugcuggcgcacgccgaggagacgcgcaagcugaugcccgugugcgucgagaccaaggccaucguguccaccauccagcggaaguacaagggcaucaagauccaggaggggguggucgacuacggcgcccgcuucuacuucuacaccagcaagacgaccguggccucccugaucaacacccucaacgaccugaacgagacccuggugacgaugccgcucggguacgucacccacggccugaaccuggaggaggcggcccgguacaugcgcagccucaaggugcccgccaccguguccgucagcucccccgacgccgugaccgccuacaacggguaccugacgagcuccagcaagacccccgaggagcacuucaucgagaccaucucccuggcgggcagcuacaaggacuggagcuacuccggccagagcacccagcucgggaucgaguuccugaagcggggcgacaaguccguguacuacacgagcaacccgaccaccuuccaccuggacggggaggucaucaccuucgacaaccucaagacgcugcugucccuccgcgaggugcggaccaucaagguguucaccaccgucgacaacaucaaccugcacacgcaggugguggacaugagcaugaccuacggccagcaguucggccccaccuaccuggacggggccgacgucaccaagaucaagccccacaacucccacgagggcaagacguucuacgugcucccgaacgacgacacccugcgcguggaggccuucgaguacuaccacaccaccgaccccagcuuccuggggcgguacauguccgcccucaaccacacgaagaaguggaaguacccccaggucaacggccugaccagcaucaagugggccgacaacaacugcuaccuggcgaccgcccuccugacccugcagcagaucgagcucaaguucaaccccccggcccugcaggacgccuacuaccgcgcgcgggccggggaggccgccaacuucugcgcccugauccucgcguacugcaacaagacggugggcgagcugggcgacgugcgcgagaccauguccuaccuguuccagcacgccaaccucgacagcugcaagcggguccugaacguggucugcaagaccugcgggcagcagcagaccacccugaagggcguggaggccgugauguacauggggacgcucuccuacgagcaguucaagaagggcguccagauccccugcaccugcgggaagcaggccaccaaguaccuggugcagcaggagagccccuucgugaugauguccgcccccccggcgcaguacgagcugaagcacggcaccuucacgugcgccagcgaguacaccggcaacuaccagugcgggcacuacaagcacaucaccuccaaggagacccucuacugcaucgacggcgcccugcugacgaagagcagcgaguacaaggggcccaucaccgacgucuucuacaaggagaacuccuacaccaccacgaucaagcccgugaccuacaagcucgacggcguggucugcaccgagaucgaccccaagcuggacaacuacuacaagaaggacaacagcuacuucaccgagcagccgaucgaccuggugcccaaccagcccuaccccaacgccuccuucgacaacuucaaguucgugugcgacaacaucaaguucgccgacgaccucaaccagcugacgggguacaagaagccggcgagccgcgagcugaaggucaccuucuuccccgaccucaacggcgacgugguggccaucgacuacaagcacuacacccccuccuucaagaagggcgccaagcugcugcacaagcccaucgucuggcacgugaacaacgccaccaacaaggcgacguacaagccgaacaccuggugcauccggugccucuggagcaccaagcccguggagaccuccaacagcuucgacguccugaaguccgaggacgcccaggggauggacaaccuggccugcgaggaccucaagcccgugagcgaggagguggucgagaaccccacgauccagaaggacgugcuggagugcaacgugaagaccaccgaggucgugggcgacaucauccugaagccggccaacaacucccucaagaucaccgaggagguggggcacacggaccugauggccgcguacgucgacaacagcucccugaccaucaagaagcccaacgagcucagccgcgugcugggccugaagacccucgccacccacgggcuggccgccgugaacuccguccccugggacacgaucgccaacuacgcgaagccguuccugaacaagguggugagcaccaccaccaacaucgucacgcgcugccucaaccgggugugcaccaacuacaugcccuacuucuucacccugcugcuccagcugugcaccuucacccgcuccacgaacagccggaucaaggccuccaugcccaccaccaucgccaagaacaccgugaagagcgucggcaaguucugccuggaggccagcuucaacuaccucaagucccccaacuucagcaagcugaucaacaucaucaucugguuccugcuccuguccgugugccugggcagccucaucuacuccacggccgcgcugggggugcugaugagcaaccucggcaugccguccuacugcaccggguaccgcgagggcuaccugaacagcaccaacgucaccaucgccacguacugcaccggcuccauccccugcagcgugugccuguccgggcucgacagccuggacaccuaccccucccuggagaccauccagaucacgaucagcuccuucaagugggaccucaccgccuucggccugguggccgagugguuccuggccuacauccucuucacccgguucuucuacguccuggggcuggcggccaucaugcagcucuucuucagcuacuucgccgugcacuucaucuccaacagcuggcugauguggcugaucaucaaccuggugcagauggcccccaucuccgcgaugguccgcauguacaucuucuucgccagcuucuacuacguguggaagagcuacgugcacgucguggacggcugcaacuccagcaccugcaugaugugcuacaagcggaaccgcgccacgcggguggagugcaccaccaucgucaacggggugcgccgguccuucuacgucuacgccaacggcggcaagggguucugcaagcuccacaacuggaacugcgugaacugcgacaccuucugcgccggcagcacguucaucuccgacgagguggcgcgcgaccugagccugcaguucaagcggccgaucaaccccaccgaccaguccagcuacaucgucgacuccgugaccgugaagaacgggagcauccaccucuacuucgacaaggccggccagaagaccuacgagcgccacucccugagccacuucgucaaccuggacaaccuccgggccaacaacacgaaggggucccugcccaucaacgugaucguguucgacggcaagagcaagugcgaggaguccagcgccaaguccgccagcgucuacuacucccagcugaugugccagcccauccuccugcuggaccaggcgcucgugagcgacgugggcgacagcgccgaggucgccgugaagauguucgacgccuacgugaacaccuucuccagcaccuucaacgucccgauggagaagcugaagacccugguggccacggcggaggccgagcucgccaagaacgugucccuggacaacguccugagcaccuucaucuccgccgcgcgccagggguucguggacagcgacguggagaccaaggacgucguggagugccucaagcugucccaccagagcgacaucgaggugaccggcgacuccugcaacaacuacaugcugacguacaacaaggucgagaacaugaccccccgggaccucggggccugcaucgacugcagcgcccgccacaucaacgcccagguggccaagucccacaacaucgcgcugaucuggaacgugaaggacuucaugagccuguccgagcagcuccggaagcagauccgcagcgccgccaagaagaacaaccugcccuucaagcugaccugcgccaccacgcgccaggucgugaacguggucaccaccaagaucgcccucaagggcgggaagaucgugaacugaggacuaguuauaagacugacuagcccgaugggccucccaacgggcccuccuccccuccuugcaccgagauuaauaaaaaaaaaaaaaaaaaaaaaaaaaaaaaaaaaaaaaaaaaaaaaaaaaaaaaaaaaaaaaaaaugcaucccccccccccccccccccccccccccccccaaaggcucuuuucagagccaccagaauu

SEQ ID NO: 21939 - RNA, 6058 nt, Artificial Sequence
  SARS-CoV-2__MT482141.1__non-structural protein 3 (NSP3) mRNA gc
aggagaaagcuuaccauggcccccaccaaggugaccuucggcgacgacacggucaucgaggugcagggguacaagagcgugaacaucaccuucgagcuggacgagcgcaucgacaagguccucaacgagaagugcuccgccuacaccguggagcugggcaccgaggugaacgaguucgcgugcgucguggccgacgccgugaucaagacgcugcagccggucagcgagcuccugaccccccuggggaucgaccucgacgagugguccauggccaccuacuaccuguucgacgagagcggcgaguucaagcuggccucccacauguacugcagcuucuacccccccgacgaggacgaggaggagggggacugcgaggaggaggaguucgagccguccacccaguacgaguacggcacggaggacgacuaccagggcaagccccucgaguucggggcgaccagcgccgcccugcagcccgaggaggagcaggaggaggacuggcuggacgacgacucccagcagaccgugggccagcaggacgggagcgaggacaaccagaccacgaccauccagaccaucguggagguccagccccagcucgagauggagcugaccccgguggugcagacgaucgaggucaacuccuucagcggcuaccugaagcucaccgacaacguguacaucaagaacgccgacaucguggaggaggcgaagaaggucaagcccaccgugguggucaacgccgccaacguguaccugaagcacgggggcggcguggccggggcccugaacaaggcgaccaacaacgccaugcaggucgaguccgacgacuacaucgccacgaacggcccccucaagguggggggcagcugcguccuguccggccacaaccuggccaagcacugccuccacgugguggggcccaacgucaacaagggcgaggacauccagcugcugaagagcgccuacgagaacuucaaccagcacgaggugcuccuggcgccgcugcucuccgccgggaucuucggcgccgaccccauccacagccugcgggugugcgucgacaccgugcgcaccaacguguaccuggccgucuucgacaagaaccucuacgacaagcugguguccagcuuccuggagaugaagagcgagaagcagguggagcagaagaucgccgagauccccaaggaggaggucaagcccuucaucaccgaguccaagccgagcguggagcagcggaagcaggacgacaagaagaucaaggcgugcguggaggaggucacgaccacccucgaggagaccaaguuccugacggagaaccugcuccuguacaucgacaucaacgggaaccugcaccccgacuccgccacccucgugagcgacaucgacaucaccuuccugaagaaggacgcccccuacaucgugggcgacgucgugcaggagggcgugcugaccgccgucgugauccccacgaagaaggccgggggcaccaccgagaugcucgcgaaggcccugcgcaaggugccgaccgacaacuacaucacgaccuaccccgggcagggccugaacggguacaccgucgaggaggccaagaccgugcucaagaagugcaaguccgccuucuacauccugcccagcaucaucuccaacgagaagcaggagauccugggcaccgugagcuggaaccuccgggagaugcuggcgcacgccgaggagacgcgcaagcugaugcccgucugcguggagaccaaggccaucguguccaccauccagcggaaguacaagggcaucaagauccaggagggggucguggacuacggcgcccgcuucuacuucuacaccagcaagacgaccguggccucccugaucaacaccuucaacgaccucaacgagacccuggucacgaugccgcugggguacgugacccacggccucaaccuggaggaggcggcccgguacaugcgcagccugaaggugcccgccaccgucuccgugagcucccccgacgccgugaccgccuacaacggguaccucacgagcuccagcaagacccccgaggagcacuucaucgagaccaucucccuggcgggcagcuacaaggacuggagcuacuccggccagagcacccagcuggggaucgaguuccucaagcggggcgacaaguccgucuacuacacgagcaacccgaccaccuuccaccuggacggggaggugaucaccuucgacaaccugaagacgcuccugucccugcgcgaggugcggaccaucaaggucuucaccaccguggacaacaucaaccuccacacgcagguggucgacaugagcaugaccuacggccagcaguucggccccaccuaccuggacggggccgacgugaccaagaucaagccccacaacucccacgagggcaagacguucuacgugcugccgaacgacgacacccuccgcgucgaggccuucgaguacuaccacaccaccgaccccagcuuccuggggcgguacauguccgcccugaaccacacgaagaaguggaaguacccccaggugaacggccucaccagcaucaagugggccgacaacaacugcuaccuggcgaccgcccugcucacccugcagcagaucgagcugaaguucaaccccccggcccuccaggacgccuacuaccgcgcgcgggccggggaggccgccaacuucugcgcccugauccuggcguacugcaacaagacggugggcgagcucggcgacguccgcgagaccauguccuaccuguuccagcacgccaaccuggacagcugcaagcgggugcucaacgucgugugcaagaccugcgggcagcagcagaccacccugaagggcguggaggccgucauguacauggggacgcuguccuacgagcaguucaagaagggcgugcagauccccugcaccugcgggaagcaggccaccaaguaccucgugcagcaggagagccccuucgucaugauguccgcccccccggcgcaguacgagcugaagcacggcaccuucacgugcgccagcgaguacaccggcaacuaccagugcgggcacuacaagcacaucaccuccaaggagacccuguacugcaucgacggcgcccuccugacgaagagcagcgaguacaaggggcccaucaccgacguguucuacaaggagaacuccuacaccaccacgaucaagcccgugaccuacaagcuggacggcgucgugugcaccgagaucgaccccaagcucgacaacuacuacaagaaggacaacagcuacuucaccgagcagccgaucgaccuggugcccaaccagcccuaccccaacgccuccuucgacaacuucaaguucgucugcgacaacaucaaguucgccgacgaccugaaccagcucacgggguacaagaagccggcgagccgcgagcugaaggugaccuucuuccccgaccugaacggcgacguggucgccaucgacuacaagcacuacacccccuccuucaagaagggcgccaagcuccugcacaagcccaucguguggcacgugaacaacgccaccaacaaggcgacguacaagccgaacaccuggugcauccggugccuguggagcaccaagcccgucgagaccuccaacagcuucgacgugcucaaguccgaggacgcccaggggauggacaaccuggccugcgaggaccugaagcccgugagcgaggaggucguggagaaccccacgauccagaaggacgugcucgagugcaacgucaagaccaccgagguggugggcgacaucauccugaagccggccaacaacucccugaagaucaccgaggaggucgggcacacggaccucauggccgcguacguggacaacagcucccugaccaucaagaagcccaacgagcugagccgcgugcucggccugaagacccuggccacccacgggcucgccgccgucaacuccgugcccugggacacgaucgccaacuacgcgaagccguuccugaacaagguggucagcaccaccaccaacaucgugacgcgcugccugaaccgggugugcaccaacuacaugcccuacuucuucacccuccugcugcagcucugcaccuucacccgcuccacgaacagccggaucaaggccuccaugcccaccaccaucgccaagaacaccgucaagagcgugggcaaguucugccuggaggccagcuucaacuaccugaagucccccaacuucagcaagcucaucaacaucaucaucugguuccugcugcucuccgugugccugggcagccugaucuacuccacggccgcgcucgggguccugaugagcaaccugggcaugccguccuacugcaccggguaccgcgagggcuaccucaacagcaccaacgugaccaucgccacguacugcaccggcuccauccccugcagcgugugccuguccgggcuggacagccucgacaccuaccccucccuggagaccauccagaucacgaucagcuccuucaagugggaccugaccgccuucggccucgucgccgagugguuccuggccuacauccuguucacccgguucuucuacgugcucgggcuggcggccaucaugcagcuguucuucagcuacuucgccgugcacuucaucuccaacagcuggcucauguggcugaucaucaaccugguccagauggcccccaucuccgcgauggugcgcauguacaucuucuucgccagcuucuacuacguguggaagagcuacguccacgugguggacggcugcaacuccagcaccugcaugaugugcuacaagcggaaccgcgccacgcgggucgagugcaccaccaucgugaacgggguccgccgguccuucuacguguacgccaacggcggcaagggguucugcaagcugcacaacuggaacugcgugaacugcgacaccuucugcgccggcagcacguucaucuccgacgaggucgcgcgcgaccucagccugcaguucaagcggccgaucaaccccaccgaccaguccagcuacaucguggacuccgugaccgucaagaacgggagcauccaccuguacuucgacaaggccggccagaagaccuacgagcgccacucccucagccacuucgugaaccuggacaaccugcgggccaacaacacgaaggggucccuccccaucaacgugaucgucuucgacggcaagagcaagugcgaggaguccagcgccaaguccgccagcguguacuacucccagcugaugugccagcccauccugcuccuggaccaggcgcuggugagcgacgucggcgacagcgccgagguggccgugaagauguucgacgccuacgucaacaccuucuccagcaccuucaacgugccgauggagaagcucaagacccugguggccacggcggaggccgagcuggccaagaacgucucccucgacaacgugcugagcaccuucaucuccgccgcgcgccagggguucguggacagcgacgucgagaccaaggacgugguggagugccugaagcucucccaccagagcgacaucgaggucaccggcgacuccugcaacaacuacaugcugacguacaacaagguggagaacaugaccccccgggaccugggggccugcaucgacugcagcgcccgccacaucaacgcccagguggccaagucccacaacaucgcgcucaucuggaacgucaaggacuucaugagccuguccgagcagcugcggaagcagauccgcagcgccgccaagaagaacaaccuccccuucaagcugaccugcgccaccacgcgccagguggugaacgucgugaccaccaagaucgcccugaagggcgggugaggacuaguuauaagacugacuagcccgaugggccucccaacgggcccuccuccccuccuugcaccgagauuaauaaaaaaaaaaaaaaaaaaaaaaaaaaaaaaaaaaaaaaaaaaaaaaaaaaaaaaaaaaaaaaaaugcaucccccccccccccccccccccccccccccccaaaggcucuuuucagagccaccagaauu

SEQ ID NO: 21940 - RNA, 6058 nt, Artificial Sequence
  SARS-CoV-2__MT482144.1__non-structural protein 3 (NSP3) mRNA gc
aggagaaagcuuaccauggcccccaccaaggugaccuucggcgacgacacggucaucgaggugcagggguacaagagcgugaacaucaccuucgagcuggacgagcgcaucgacaagguccucaacgagaagugcuccgccuacaccguggagcugggcaccgaggugaacgaguucgcgugcgucguggccgacgccgugaucaagacgcugcagccggucagcgagcuccugaccccccuggggaucgaccucgacgagugguccauggccaccuacuaccuguucgacgagagcggcgaguucaagcuggccucccacauguacugcagcuucuacccccccgacgaggacgaggaggagggggacugcgaggaggaggaguucgagccguccacccaguacgaguacggcacggaggacgacuaccagggcaagccccucgaguucggggcgaccagcgccgcccugcagcccgaggaggagcaggaggaggacuggcuggacgacgacucccagcagaccgugggccagcaggacgggagcgaggacaaccagaccacgaccauccagaccaucguggagguccagccccagcucgagauggagcugaccccgguggugcagacgaucgaggucaacuccuucagcggcuaccugaagcucaccgacaacguguacaucaagaacgccgacaucguggaggaggcgaagaaggucaagcccaccgugguggucaacgccgccaacguguaccugaagcacgggggcggcguggccggggcccugaacaaggcgaccaacaacgccaugcaggucgaguccgacgacuacaucgccacgaacggcccccucaagguggggggcagcugcguccuguccggccacaaccuggccaagcacugccuccacgugguggggcccaacgucaacaagggcgaggacauccagcugcugaagagcgccuacgagaacuucaaccagcacgaggugcuccuggcgccgcugcucuccgccgggaucuucggcgccgaccccauccacagccugcgggugugcgucgacaccgugcgcaccaacguguaccuggccgucuucgacaagaaccucuacgacaagcugguguccagcuuccuggagaugaagagcgagaagcagguggagcagaagaucgccgagauccccaaggaggaggucaagcccuucaucaccgaguccaagccgagcguggagcagcggaagcaggacgacaagaagaucaaggcgugcguggaggaggucacgaccacccucgaggagaccaaguuccugacggagaaccugcuccuguacaucgacaucaacgggaaccugcaccccgacuccgccacccucgugagcgacaucgacaucaccuuccugaagaaggacgcccccuacaucgugggcgacgucgugcaggagggcgugcugaccgccgucgugauccccacgaagaaggccgggggcaccaccgagaugcucgcgaaggcccugcgcaaggugccgaccgacaacuacaucacgaccuaccccgggcagggccugaacggguacaccgucgaggaggccaagaccgugcucaagaagugcaaguccgccuucuacauccugcccagcaucaucuccaacgagaagcaggagauccugggcaccgugagcuggaaccuccgggagaugcuggcgcacgccgaggagacgcgcaagcugaugcccgucugcguggagaccaaggccaucguguccaccauccagcggaaguacaagggcaucaagauccaggagggggucguggacuacggcgcccgcuucuacuucuacaccagcaagacgaccguggccucccugaucaacacccucaacgaccugaacgagacccuggucacgaugccgcucggguacgugacccacggccugaaccuggaggaggcggcccgguacaugcgcagccucaaggugcccgccaccgucuccgugagcucccccgacgccgugaccgccuacaacggguaccugacgagcuccagcaagacccccgaggagcacuucaucgagaccaucucccuggcgggcagcuacaaggacuggagcuacuccggccagagcacccagcucgggaucgaguuccugaagcggggcgacaaguccgucuacuacacgagcaacccgaccaccuuccaccuggacggggaggugaucaccuucgacaaccucaagacgcugcugucccuccgcgaggugcggaccaucaaggucuucaccaccguggacaacaucaaccugcacacgcagguggucgacaugagcaugaccuacggccagcaguucggccccaccuaccuggacggggccgacgugaccaagaucaagccccacaacucccacgagggcaagacguucuacgugcucccgaacgacgacacccugcgcgucgaggccuucgaguacuaccacaccaccgaccccagcuuccuggggcgguacauguccgcccucaaccacacgaagaaguggaaguacccccaggugaacggccugaccagcaucaagugggccgacaacaacugcuaccuggcgaccgcccuccugacccugcagcagaucgagcucaaguucaaccccccggcccugcaggacgccuacuaccgcgcgcgggccggggaggccgccaacuucugcgcccugauccucgcguacugcaacaagacggugggcgagcugggcgacguccgcgagaccauguccuaccuguuccagcacgccaaccucgacagcugcaagcgggugcugaacgucgugugcaagaccugcgggcagcagcagaccacccugaagggcguggaggccgucauguacauggggacgcucuccuacgagcaguucaagaagggcgugcagauccccugcaccugcgggaagcaggccaccaaguaccuggugcagcaggagagccccuucgucaugauguccgcccccccggcgcaguacgagcugaagcacggcaccuucacgugcgccagcgaguacaccggcaacuaccagugcgggcacuacaagcacaucaccuccaaggagacccucuacugcaucgacggcgcccugcugacgaagagcagcgaguacaaggggcccaucaccgacguguucuacaaggagaacuccuacaccaccacgaucaagcccgugaccuacaagcucgacggcgucgugugcaccgagaucgaccccaagcuggacaacuacuacaagaaggacaacagcuacuucaccgagcagccgaucgaccuggugcccaaccagcccuaccucaacgccuccuucgacaacuucaaguucgucugcgacaacaucaaguucgccgacgaccugaaccagcugacgggguacaagaagcccgcgagccgcgagcucaaggugaccuucuucccggaccugaacggcgacguggucgccaucgacuacaagcacuacacccccuccuucaagaagggcgccaagcugcuccacaagcccaucguguggcacgugaacaacgccaccaacaaggcgacguacaagcccaacaccuggugcauccggugccuguggagcaccaagccggucgagaccuccaacagcuucgacgugcugaaguccgaggacgcccaggggauggacaaccucgccugcgaggaccugaagcccgugagcgaggaggucguggagaaccccacgauccagaaggacgugcuggagugcaacgucaagaccaccgagguggugggcgacaucauccucaagcccgccaacaacucccugaagaucaccgaggaggucgggcacacggaccugauggccgcguacguggacaacagcucccucaccaucaagaagccgaacgagcugagccgcgugcugggccucaagacccuggccacccacgggcuggccgccgucaacuccgugcccugggacacgaucgccaacuacgcgaagcccuuccucaacaagguggucagcaccaccaccaacaucgugacgcgcugccugaaccgggugugcaccaacuacaugccguacuucuucacccugcuccugcagcugugcaccuucacccgcuccacgaacagccggaucaaggccuccaugcccaccaccaucgccaagaacaccgucaagagcgugggcaaguucugccucgaggccagcuucaacuaccugaagucccccaacuucagcaagcugaucaacaucaucaucugguuccuccugcuguccgugugccucggcagccugaucuacuccacggccgcgcuggggguccucaugagcaaccugggcaugcccuccuacugcaccggguaccgcgagggcuaccugaacagcaccaacgugaccaucgccacguacugcaccggcuccaucccgugcagcgugugccucuccgggcuggacagccuggacaccuaccccucccucgagaccauccagaucacgaucagcuccuucaagugggaccugaccgccuucggccuggucgccgagugguuccucgccuacauccuguucacccgguucuucuacgugcuggggcucgcggccaucaugcagcuguucuucagcuacuucgccgugcacuucaucuccaacagcuggcugauguggcugaucaucaaccucguccagauggcccccaucuccgcgauggugcgcauguacaucuucuucgccagcuucuacuacguguggaagagcuacguccacgugguggacggcugcaacuccagcaccugcaugaugugcuacaagcggaaccgcgccacgcgggucgagugcaccaccaucgugaacgggguccgccgguccuucuacguguacgccaacggcggcaagggguucugcaagcugcacaacuggaacugcgugaacugcgacaccuucugcgccggcagcacguucaucuccgacgaggucgcgcgcgaccugagccuccaguucaagcggcccaucaacccgaccgaccaguccagcuacaucguggacuccgugaucgucaagaacgggagcauccaccuguacuucgacaaggccggccagaagaccuacgagcgccacucccugagccacuucgugaaccucgacaaccugcgggccaacaacaccaaggggucccugcccaucaacgugaucgucuucgacggcaagagcaagugcgaggaguccagcgccaaguccgccagcguguacuacucccagcucaugugccagcccauccugcugcucgaccaggcgcuggugagcgacgucggcgacagcgccgagguggccgugaagauguucgacgccuacgucaacacguucuccagcaccuucaacgugcccauggagaagcugaagacccucguggccaccgcggaggccgagcuggccaagaacgucucccuggacaacgugcucagcacguucaucuccgccgcgcgccagggguucguggacagcgacgucgagaccaaggacgugguggagugccugaagcugucccaccagagcgacaucgaggucaccggcgacuccugcaacaacuacaugcucaccuacaacaagguggagaacaugacgccgcgggaccugggggccugcaucgacugcagcgcccgccacaucaacgcccagguggccaagucccacaacaucgcgcugaucuggaacgucaaggacuucaugagccucuccgagcagcugcggaagcagauccgcagcgccgccaagaagaacaaccugcccuucaagcucaccugcgccaccacccgccagguggugaacgucgugacgaccaagaucgcccugaagggcgggugaggacuaguuauaagacugacuagcccgaugggccucccaacgggcccuccuccccuccuugcaccgagauuaauaaaaaaaaaaaaaaaaaaaaaaaaaaaaaaaaaaaaaaaaaaaaaaaaaaaaaaaaaaaaaaaaugcaucccccccccccccccccccccccccccccccaaaggcucuuuucagagccaccagaauu

SEQ ID NO: 21941 - RNA, 6058 nt, Artificial Sequence
  SARS-CoV-2__MT358638.1__non-structural protein 3 (NSP3) mRNA gc
aggagaaagcuuaccauggcccccaccaaggugaccuucggcgacgacacggucaucgaggugcagggguacaagagcgugaacaucaccuucgagcuggacgagcgcaucgacaagguccucaacgagaagugcuccgccuacaccguggagcugggcaccgaggugaacgaguucgcgugcgucguggccgacgccgugaucaagacgcugcagccggucagcgagcuccugaccccccuggggaucgaccucgacgagugguccauggccaccuacuaccuguucgacgagagcggcgaguucaagcuggccucccacauguacugcagcuucuacccccccgacgaggacgaggaggagggggacugcgaggaggaggaguucgagccguccacccaguacgaguacggcacggaggacgacuaccagggcaagccccucgaguucggggcgaccagcgccgcccugcagcccgaggaggagcaggaggaggacuggcuggacgacgacucccagcagaccgugggccagcaggacgggagcgaggacaaccagaccacgaccauccagaccaucguggagguccagccccagcucgagauggagcugaccccgguggugcagacgaucgaggucaacuccuucagcggcuaccugaagcucaccgacaacguguacaucaagaacgccgacaucguggaggaggcgaagaaggucaagcccaccgugguggucaacgccgccaacguguaccugaagcacgggggcggcguggccggggcccugaacaaggcgaccaacaacgccaugcaguucgaguccgacgacuacaucgccacgaacggcccccucaaggucgggggcagcugcgugcuguccggccacaaccuggccaagcacugccuccacgucguggggcccaacgugaacaagggcgaggacauccagcugcugaagagcgccuacgagaacuucaaccagcacgagguccuccuggcgccgcugcucuccgccgggaucuucggcgccgaccccauccacagccugcgggugugcguggacaccguccgcaccaacguguaccuggccguguucgacaagaaccucuacgacaagcuggucuccagcuuccuggagaugaagagcgagaagcagguggagcagaagaucgccgagauccccaaggaggaggugaagcccuucaucaccgaguccaagccgagcgucgagcagcggaagcaggacgacaagaagaucaaggcgugcguggaggaggugacgaccacccucgaggagaccaaguuccugacggagaaccugcuccuguacaucgacaucaacgggaaccugcaccccgacuccgccacccucgucagcgacaucgacaucaccuuccugaagaaggacgcccccuacaucgugggcgacgugguccaggagggcgugcugaccgccguggucauccccacgaagaaggccgggggcaccaccgagaugcucgcgaaggcccugcgcaaggugccgaccgacaacuacaucacgaccuaccccgggcagggccugaacggguacaccguggaggaggccaagaccguccucaagaagugcaaguccgccuucuacauccugcccagcaucaucuccaacgagaagcaggagauccugggcaccgugagcuggaaccuccgggagaugcuggcgcacgccgaggagacgcgcaagcugaugcccgugugcgucgagaccaaggccaucguguccaccauccagcggaaguacaagggcaucaagauccaggaggggguggucgacuacggcgcccgcuucuacuucuacaccagcaagacgaccguggccucccugaucaacacccucaacgaccugaacgagacccuggugacgaugccgcucggguacgucacccacggccugaaccuggaggaggcggcccgguacaugcgcagccucaaggugcccgccaccguguccgucagcucccccgacgccgugaccgccuacaacggguaccugacgagcuccagcaagacccccgaggagcacuucaucgagaccaucucccuggcgggcagcuacaaggacuggagcuacuccggccagagcacccagcucgggaucgaguuccugaagcggggcgacaaguccguguacuacacgagcaacccgaccaccuuccaccuggacggggaggucaucaccuucgacaaccucaagacgcugcugucccuccgcgaggugcggaccaucaagguguucaccaccgucgacaacaucaaccugcacacgcaggugguggacaugagcaugaccuacggccagcaguucggccccaccuaccuggacggggccgacgucaccaagaucaagccccacaacucccacgagggcaagacguucuacgugcucccgaacgacgacacccugcgcguggaggccuucgaguacuaccacaccaccgaccccagcuuccuggggcgguacauguccgcccucaaccacacgaagaaguggaaguacccccaggucaacggccugaccagcaucaagugggccgacaacaacugcuaccuggcgaccgcccuccugacccugcagcagaucgagcucaaguucaaccccccggcccugcaggacgccuacuaccgcgcgcgggccggggaggccgccaacuucugcgcccugauccucgcguacugcaacaagacggugggcgagcugggcgacgugcgcgagaccauguccuaccuguuccagcacgccaaccucgacagcugcaagcggguccugaacguggucugcaagaccugcgggcagcagcagaccacccugaagggcguggaggccgugauguacauggggacgcucuccuacgagcaguucaagaagggcguccagauccccugcaccugcgggaagcaggccaccaaguaccuggugcagcaggagagccccuucgugaugauguccgcccccccggcgcaguacgagcugaagcacggcaccuucacgugcgccagcgaguacaccggcaacuaccagugcgggcacuacaagcacaucaccuccaaggagacccucuacugcaucgacggcgcccugcugacgaagagcagcgaguacaaggggcccaucaccgacgucuucuacaaggagaacuccuacaccaccacgaucaagcccgugaccuacaagcucgacggcguggucugcaccgagaucgaccccaagcuggacaacuacuacaagaaggacaacagcuacuucaccgagcagccgaucgaccuggugcccaaccagcccuaccccaacgccuccuucgacaacuucaaguucgugugcgacaacaucaaguucgccgacgaccucaaccagcugacgggguacaagaagccggcgagccgcgagcugaaggucaccuucuuccccgaccucaacggcgacgugguggccaucgacuacaagcacuacacccccuccuucaagaagggcgccaagcugcugcacaagcccaucgucuggcacgugaacaacgccaccaacaaggcgacguacaagccgaacaccuggugcauccggugccucuggagcaccaagcccguggagaccuccaacagcuucgacguccugaaguccgaggacgcccaggggauggacaaccuggccugcgaggaccucaagcccgugagcgaggagguggucgagaaccccacgauccagaaggacgugcuggagugcaacgugaagaccaccgaggucgugggcgacaucauccugaagccggccaacaacucccucaagaucaccgaggagguggggcacacggaccugauggccgcguacgucgacaacagcucccugaccaucaagaagcccaacgagcucagccgcgugcugggccugaagacccucgccacccacgggcuggccgccgugaacuccguccccugggacacgaucgccaacuacgcgaagccguuccugaacaagguggugagcaccaccaccaacaucgucacgcgcugccucaaccgggugugcaccaacuacaugcccuacuucuucacccugcugcuccagcugugcaccuucacccgcuccacgaacagccggaucaaggccuccaugcccaccaccaucgccaagaacaccgugaagagcgucggcaaguucugccuggaggccagcuucaacuaccucaagucccccaacuucagcaagcugaucaacaucaucaucugguuccugcuccuguccgugugccugggcagccucaucuacuccacggccgcgcugggggugcugaugagcaaccucggcaugccguccuacugcaccggguaccgcgagggcuaccugaacagcaccaacgucaccaucgccacguacugcaccggcuccauccccugcagcgugugccuguccgggcucgacagccuggacaccuaccccucccuggagaccauccagaucacgaucagcuccuucaagugggaccucaccgccuucggccugguggccgagugguuccuggccuacauccucuucacccgguucuucuacguccuggggcuggcggccaucaugcagcucuucuucagcuacuucgccgugcacuucaucuccaacagcuggcugauguggcugaucaucaaccuggugcagauggcccccaucuccgcgaugguccgcauguacaucuucuucgccagcuucuacuacguguggaagagcuacgugcacgucguggacggcugcaacuccagcaccugcaugaugugcuacaagcggaaccgcgccacgcggguggagugcaccaccaucgucaacggggugcgccgguccuucuacgucuacgccaacggcggcaagggguucugcaagcuccacaacuggaacugcgugaacugcgacaccuucugcgccggcagcacguucaucuccgacgagguggcgcgcgaccugagccugcaguucaagcggccgaucaaccccaccgaccaguccagcuacaucgucgacuccgugaccgugaagaacgggagcauccaccucuacuucgacaaggccggccagaagaccuacgagcgccacucccugagccacuucgucaaccuggacaaccuccgggccaacaacacgaaggggucccugcccaucaacgugaucguguucgacggcaagagcaagugcgaggaguccagcgccaaguccgccagcgucuacuacucccagcugaugugccagcccauccuccugcuggaccaggcgcucgugagcgacgugggcgacagcgccgaggucgccgugaagauguucgacgccuacgugaacaccuucuccagcaccuucaacgucccgauggagaagcugaagacccugguggccacggcggaggccgagcucgccaagaacgugucccuggacaacguccugagcaccuucaucuccgccgcgcgccagggguucguggacagcgacguggagaccaaggacgucguggagugccucaagcugucccaccagagcgacaucgaggugaccggcgacuccugcaacaacuacaugcugacguacaacaaggucgagaacaugaccccccgggaccucggggccugcaucgacugcagcgcccgccacaucaacgcccagguggccaagucccacaacaucgcgcugaucuggaacgugaaggacuucaugagccuguccgagcagcuccggaagcagauccgcagcgccgccaagaagaacaaccugcccuucaagcugaccugcgccaccacgcgccaggucgugaacguggucaccaccaagaucgcccucaagggcgggugaggacuaguuauaagacugacuagcccgaugggccucccaacgggcccuccuccccuccuugcaccgagauuaauaaaaaaaaaaaaaaaaaaaaaaaaaaaaaaaaaaaaaaaaaaaaaaaaaaaaaaaaaaaaaaaaugcaucccccccccccccccccccccccccccccccaaaggcucuuuucagagccaccagaauu

SEQ ID NO: 21942 - RNA, 6058 nt, Artificial Sequence
  SARS-CoV-2__MT358640.1__non-structural protein 3 (NSP3) mRNA gc
aggagaaagcuuaccauggcccccaccaaggugaccuucggcgacgacacggucaucgaggugcagggguacaagagcgugaacaucaccuucgagcuggacgagcgcaucgacaagguccucaacgagaagugcuccgccuacaccguggagcugggcaccgaggugaacgaguucgcgugcgucguggccgacgccgugaucaagacgcugcagccggucagcgagcuccugaccccccuggggaucgaccucgacgagugguccauggccaccuacuaccuguucgacgagagcggcgaguucaagcuggccucccacauguacugcagcuucuacccccccgacgaggacgaggaggagggggacugcgaggaggaggaguucgagccguccacccaguacgaguacggcacggaggacgacuaccagggcaagccccucgaguucggggcgaccagcgccgcccugcagcccgaggaggagcaggaggaggacuggcuggacgacgacucccagcagaccgugggccagcaggacgggagcgaggacaaccagaccacgaccauccagaccaucguggagguccagccccagcucgagauggagcugaccccgguggugcagacgaucgaggucaacuccuucagcggcuaccugaagcucaccgacaacguguacaucaagaacgccgacaucguggaggaggcgaagaaggucaagcccaccgugguggucaacgccgccaacguguaccugaagcacgggggcggcguggccggggcccugaacaaggcgaccaacaacgccaugcaggucgaguccgacgacuacaucgccacgaacggcccccucaagguggggggcagcugcguccuguccggccacaaccuggccaagcacugccuccacgugguggggcccaacgucaacaagggcgaggacauccagcugcugaagagcgccuacgagaacuucaaccagcacgaggugcuccuggcgccgcugcucuccgccgggaucuucggcgccgaccccauccacagccugcgggugugcgucgacaccgugcgcaccaacguguaccuggccgucuucgacaagaaccucuacgacaagcugguguccagcuuccuggagaugaagagcgagaagcagguggagcagaagaucgccgagauccccaaggaggaggucaagcccuucaucaccgaguccaagccgagcguggagcagcggaagcaggacgacaagaagaucaaggcgugcguggaggaggucacgaccacccucgaggagaccaaguuccugacggagaaccugcuccuguacaucgacaucaacgggaaccugcaccccgacuccgccacccucgugagcgacaucgacaucaccuuccugaagaaggacgcccccuacaucgugggcgacgucgugcaggagggcgugcugaccgccgucgugauccccacgaagaaggccgggggcaccaccgagaugcucgcgaaggcccugcgcaaggugccgaccgacaacuacaucacgaccuaccccgggcagggccugaacggguacaccgucgaggaggccaagaccgugcucaagaagugcaaguccgccuucuacauccugcccagcaucaucuccaacgagaagcaggagauccugggcaccgugagcuggaaccuccgggagaugcuggcgcacgccgaggagacgcgcaagcugaugcccgucugcguggagaccaaggccaucguguccaccauccagcggaaguacaagggcaucaagauccaggagggggucguggacuacggcgcccgcuucuacuucuacaccagcaagacgaccguggccucccugaucaacacccucaacgaccugaacgagacccuggucacgaugccgcucggguacgugacccacggccugaaccuggaggaggcggcccgguacaugcgcagccucaaggugcccgccaccgucuccgugagcucccccgacgccgugaccgccuacaacggguaccugacgagcuccagcaagacccccgaggagcacuucaucgagaccaucucccuggcgggcagcuacaaggacuggagcuacuccggccagagcacccagcucgggaucgaguuccugaagcggggcgacaaguccgucuacuacacgagcaacccgaccaccuuccaccuggacggggaggugaucaccuucgacaaccucaagacgcugcugucccuccgcgaggugcggaccaucaaggucuucaccaccguggacaacaucaaccugcacacgcagguggucgacaugagcaugaccuacggccagcaguucggccccaccuaccuggacggggccgacgugaccaagaucaagccccacaacucccacgagggcaagacguucuacgugcucccgaacgacgacacccugcgcgucgaggccuucgaguacuaccacaccaccgaccccagcuuccuggggcgguacauguccgcccucaaccacacgaagaaguggaaguacccccaggugaacggccugaccagcaucaagugggccgacaacaacugcuaccuggcgaccgcccuccugacccugcagcagaucgagcucaaguucaaccccccggcccugcaggacgccuacuaccgcgcgcgggccggggaggccgccaacuucugcgcccugauccucgcguacugcaacaagacggugggcgagcugggcgacguccgcgagaccauguccuaccuguuccagcacgccaaccucgacagcugcaagcgggugcugaacgucgugugcaagaccugcgggcagcagcagaccacccugaagggcguggaggccgucauguacauggggacgcucuccuacgagcaguucaagaagggcgugcagauccccugcaccugcgggaagcaggccaccaaguaccuggugcagcaggagagccccuucgucaugauguccgcccccccggcgcaguacgagcugaagcacggcaccuucacgugcgccagcgaguacaccggcaacuaccagugcgggcacuacaagcacaucaccuccaaggagacccucuacugcaucgacggcgcccugcugacgaagagcagcgaguacaaggggcccaucaccgacguguucuacaaggagaacuccuacaccaccacgaucaagcccgugaccuacaagcucgacggcgucgugugcaccgagaucgaccccaagcuggacaacuacuacaagaaggacaacagcuacuucaccgagcagccgaucgaccuggugcccaaccagcccuaccccaacgccuccuucgacaacuucaaguucgucugcgacaacaucaaguucgccgacgaccucaaccagcugacgggguacaagaagccggcgagccgcgagcugaaggugaccuucuuccccgaccucaacggcgacguggucgccaucgacuacaagcacuacacccccuccuucaagaagggcgccaagcugcugcaccggcccaucguguggcacgugaacaacgccaccaacaaggcgacguacaagccgaacaccuggugcauccgcugccucuggagcaccaagcccgucgagaccuccaacagcuucgacgugcugaaguccgaggacgcccaggggauggacaaccuggccugcgaggaccucaagcccgugagcgaggaggucguggagaaccccacgauccagaaggacgugcuggagugcaacgucaagaccaccgagguggugggcgacaucauccugaagccggccaacaacucccucaagaucaccgaggaggucgggcacacggaccugauggccgcguacguggacaacagcucccugaccaucaagaagcccaacgagcucagccgcgugcugggccugaagacccucgccacccacgggcuggccgccgucaacuccgugcccugggacacgaucgccaacuacgcgaagccguuccugaacaagguggucagcaccaccaccaacaucgugacgcggugccucaaccgcgugugcaccaacuacaugcccuacuucuucacccugcugcuccagcugugcaccuucacccgguccacgaacagccgcaucaaggccuccaugcccaccaccaucgccaagaacaccgucaagagcgugggcaaguucugccuggaggccagcuucaacuaccucaagucccccaacuucagcaagcugaucaacaucaucaucugguuccugcuccuguccgugugccugggcagccucaucuacuccacggccgcgcuggggguccugaugagcaaccucggcaugccguccuacugcaccggguaccgggagggcuaccugaacagcaccaacgugaccaucgccacguacugcaccggcuccauccccugcagcgugugccuguccgggcucgacagccuggacaccuaccccucccuggagaccauccagaucacgaucagcuccuucaagugggaccucaccgccuucggccuggucgccgagugguuccuggccuacauccucuucacccgcuucuucuacgugcuggggcuggcggccaucaugcagcucuucuucagcuacuucgccgugcacuucaucuccaacagcuggcugauguggcugaucaucaaccugguccagauggcccccaucuccgcgauggugcggauguacaucuucuucgccagcuucuacuacguguggaagagcuacguccacgugguggacggcugcaacuccagcaccugcaugaugugcuacaagcgcaaccgggccacgcgcgucgagugcaccaccaucgugaacgggguccggcgcuccuucuacguguacgccaacggcggcaagggguucugcaagcuccacaacuggaacugcgugaacugcgacaccuucugcgccggcagcacguucaucuccgacgaggucgcgcgggaccugagccugcaguucaagcgcccgaucaaccccaccgaccaguccagcuacaucguggacuccgugaccgucaagaacgggagcauccaccucuacuucgacaaggccggccagaagaccuacgagcggcacucccugagccacuucgugaaccuggacaaccuccgcgccaacaacacgaaggggucccugcccaucaacgugaucgucuucgacggcaagagcaagugcgaggaguccagcgccaaguccgccagcguguacuacucccagcugaugugccagcccauccuccugcuggaccaggcgcucgugagcgacgucggcgacagcgccgagguggccgugaagauguucgacgccuacgucaacaccuucuccagcaccuucaacgugccgauggagaagcugaagacccugguggccacggcggaggccgagcucgccaagaacgucucccuggacaacgugcugagcaccuucaucuccgccgcgcggcagggguucguggacagcgacgucgagaccaaggacgugguggagugccucaagcugucccaccagagcgacaucgaggucaccggcgacuccugcaacaacuacaugcugacguacaacaagguggagaacaugaccccccgcgaccucggggccugcaucgacugcagcgcccggcacaucaacgcccagguggccaagucccacaacaucgcgcugaucuggaacgucaaggacuucaugagccuguccgagcagcuccgcaagcagauccgcagcgccgccaagaagaacaaccugcccuucaagcugaccugcgccaccacgcggcagguggugaacgucgugaccaccaagaucgcccucaagggcgggugaggacuaguuauaagacugacuagcccgaugggccucccaacgggcccuccuccccuccuugcaccgagauuaauaaaaaaaaaaaaaaaaaaaaaaaaaaaaaaaaaaaaaaaaaaaaaaaaaaaaaaaaaaaaaaaaugcaucccccccccccccccccccccccccccccccaaaggcucuuuucagagccaccagaauu

SEQ ID NO: 21943 - RNA, 6058 nt, Artificial Sequence
  SARS-CoV-2__MT467247.1__non-structural protein 3 (NSP3) mRNA gc
aggagaaagcuuaccauggcccccaccaaggugaccuucggcgacgacacggucaucgaggugcagggguacaagagcgugaacaucaccuucgagcuggacgagcgcaucgacaagguccucaacgagaagugcuccgccuacaccguggagcugggcaccgaggugaacgaguucgcgugcgucguggccgacgccgugaucaagacgcugcagccggucagcgagcuccugaccccccuggggaucgaccucgacgagugguccauggccaccuacuaccuguucgacgagagcggcgaguucaagcuggccucccacauguacugcagcuucuacccccccgacgaggacgaggaggagggggacugcgaggaggaggaguucgagccguccacccaguacgaguacggcacggaggacgacuaccagggcaagccccucgaguucggggcgaccagcgccgcccugcagcccgaggaggagcaggaggaggacuggcuggacgacgacucccagcagaccgugggccagcaggacgggagcgaggacaaccagaccacgaccauccagaccaucguggagguccagccccagcucgagauggagcugaccccgguggugcagacgaucgaggucaacuccuucagcggcuaccugaagcucaccgacaacguguacaucaagaacgccgacaucguggaggaggcgaagaaggucaagcccaccgugguggucaacgccgccaacguguaccugaagcacgggggcggcguggccggggcccugaacaaggcgaccaacaacgccaugcaggucgaguccgacgacuacaucgccacgaacggcccccucaagguggggggcagcugcguccuguccggccacaaccuggccaagcacugccuccacgugguggggcccaacgucaacaagggcgaggacauccagcugcugaagagcgccuacgagaacuucaaccagcacgaggugcuccuggcgccgcugcucuccgccgggaucuucggcgccgacagcauccacucccugcgggugugcgucgacaccgugcgcaccaacguguaccuggccgucuucgacaagaaccucuacgacaagcuggugagcagcuuccuggagaugaaguccgagaagcagguggagcagaagaucgccgagauccccaaggaggaggucaagcccuucaucaccgagagcaagcccuccguggagcagcggaagcaggacgacaagaagaucaaggcgugcguggaggaggucacgaccacccucgaggagaccaaguuccugacggagaaccugcuccuguacaucgacaucaacgggaaccugcacccggacagcgccacccucguguccgacaucgacaucaccuuccugaagaaggacgcccccuacaucgugggcgacgucgugcaggagggcgugcugaccgccgucgugauccccacgaagaaggccgggggcaccaccgagaugcucgcgaaggcccugcgcaaggugcccaccgacaacuacaucacgaccuacccggggcagggccugaacggguacaccgucgaggaggccaagaccgugcucaagaagugcaagagcgccuucuacauccugcccuccaucaucagcaacgagaagcaggagauccugggcaccguguccuggaaccuccgggagaugcuggcgcacgccgaggagacgcgcaagcugaugcccgucugcguggagaccaaggccaucgugagcaccauccagcggaaguacaagggcaucaagauccaggagggggucguggacuacggcgcccgcuucuacuucuacaccuccaagacgaccguggccagccugaucaacacccucaacgaccugaacgagacccuggucacgaugccccucggguacgugacccacggccugaaccuggaggaggcggcccgguacaugcgcucccucaaggugccggccaccgucagcguguccagccccgacgccgugaccgccuacaacggguaccugacguccagcuccaagacccccgaggagcacuucaucgagaccaucagccuggcgggcagcuacaaggacugguccuacagcggccaguccacccagcucgggaucgaguuccugaagcggggcgacaagaucgucuacuacacgagcaaccccaccaccuuccaccuggacggggaggugaucaccuucgacaaccucaagacgcugcugucccuccgcgaggugcggaccaucaaggucuucaccaccguggacaacaucaaccugcacacgcagguggucgacaugagcaugaccuacggccagcaguucggcccgaccuaccuggacggggccgacgugaccaagaucaagccccacaacucccacgagggcaagacguucuacgugcuccccaacgacgacacccugcgcgucgaggccuucgaguacuaccacaccaccgacccgagcuuccuggggcgguacauguccgcccucaaccacacgaagaaguggaaguacccccaggugaacggccugaccagcaucaagugggccgacaacaacugcuaccuggcgaccgcccuccugacccugcagcagaucgagcucaaguucaacccccccgcccugcaggacgccuacuaccgcgcgcgggccggggaggccgccaacuucugcgcccugauccucgcguacugcaacaagacggugggcgagcugggcgacguccgcgagaccauguccuaccuguuccagcacgccaaccucgacagcugcaagcgggugcugaacgucgugugcaagaccugcgggcagcagcagaccacccugaagggcguggaggccgucauguacauggggacgcucuccuacgagcaguucaagaagggcgugcagaucccgugcaccugcgggaagcaggccaccaaguaccuggugcagcaggagagccccuucgucaugauguccgccccccccgcgcaguacgagcugaagcacggcaccuucacgugcgccagcgaguacaccggcaacuaccagugcgggcacuacaagcacaucaccuccaaggagacccucuacugcaucgacggcgcccugcugacgaagagcagcgaguacaaggggccgaucaccgacguguucuacaaggagaacuccuacaccaccacgaucaagcccgugaccuacaagcucgacggcgucgugugcaccgagaucgaccccaagcuggacaacuacuacaagaaggacaacagcuacuucaccgagcagcccaucgaccuggugccgaaccagcccuaccccaacgccuccuucgacaacuucaaguucgucugcgacaacaucaaguucgccgacgaccucaaccagcugacgggguacaagaagcccgcgagccgcgagcugaaggugaccuucuucccggaccucaacggcgacguggucgccaucgacuacaagcacuacacccccuccuucaagaagggcgccaagcugcugcacaagcccaucguguggcacgugaacaacgccaccaacaaggcgacguacaagcccaacaccuggugcauccggugccucuggagcaccaagccggucgagaccuccaacagcuucgacgugcugaaguccgaggacgcccaggggauggacaaccuggccugcgaggaccucaagcccgugagcgaggaggucguggagaaccccacgauccagaaggacgugcuggagugcaacgucaagaccaccgagguggugggcgacaucauccugaagcccgccaacaacucccucaagaucaccgaggaggucgggcacacggaccugauggccgcguacguggacaacagcucccugaccaucaagaagccgaacgagcucagccgcgugcugggccugaagacccucgccacccacgggcuggccgccgucaacuccgugcccugggacacgaucgccaacuacgcgaagcccuuccugaacaagguggucagcaccaccaccaacaucgugacgcgcugccucaaccgggugugcaccaacuacaugccguacuucuucacccugcugcuccagcugugcaccuucacccgcuccacgaacagccggaucaaggccuccaugcccaccaccaucgccaagaacaccgucaagagcgugggcaaguucugccuggaggccagcuucaacuaccucaagucccccaacuucagcaagcugaucaacaucaucaucugguuccugcuccuguccgugugccugggcagccucaucuacuccacggccgcgcuggggguccugaugagcaaccucggcaugcccuccuacugcaccggguaccgcgagggcuaccugaacagcaccaacgugaccaucgccacguacugcaccggcuccaucccgugcagcgugugccuguccgggcucgacagccuggacaccuaccccucccuggagaccauccagaucacgaucagcuccuucaagugggaccucaccgccuucggccuggucgccgagugguuccuggccuacauccucuucacccgguucuucuacgugcuggggcuggcggccaucaugcagcucuucuucagcuacuucgccgugcacuucaucuccaacagcuggcugauguggcugaucaucaaccugguccagauggcccccaucuccgcgauggugcgcauguacaucuucuucgccagcuucuacuacguguggaagagcuacguccacgugguggacggcugcaacuccagcaccugcaugaugugcuacaagcggaaccgcgccacgcgggucgagugcaccaccaucgugaacgggguccgccgguccuucuacguguacgccaacggcggcaagggguucugcaagcuccacaacuggaacugcgugaacugcgacaccuucugcgccggcagcacguucaucuccgacgaggucgcgcgcgaccugagccugcaguucaagcggcccaucaacccgaccgaccaguccagcuacaucguggacuccgugaccgucaagaacgggagcauccaccucuacuucgacaaggccggccagaagaccuacgagcgccacucccugagccacuucgugaaccuggacaaccuccgggccaacaacacgaaggggucccugcccaucaacgugaucgucuucgacggcaagagcaagugcgaggaguccagcgccaaguccgccagcguguacuacucccagcugaugugccagcccauccuccugcuggaccaggcgcucgugagcgacgucggcgacagcgccgagguggccgugaagauguucgacgccuacgucaacaccuucuccagcaccuucaacgugcccauggagaagcugaagacccugguggccacggcggaggccgagcucgccaagaacgucucccuggacaacgugcugagcaccuucaucuccgccgcgcgccagggguucguggacagcgacgucgagaccaaggacgugguggagugccucaagcugucccaccagagcgacaucgaggucaccggcgacuccugcaacaacuacaugcugacguacaacaagguggagaacaugaccccgcgggaccucggggccugcaucgacugcagcgcccgccacaucaacgcccagguggccaagucccacaacaucgcgcugaucuggaacgucaaggacuucaugagccuguccgagcagcuccggaagcagauccgcagcgccgccaagaagaacaaccugcccuucaagcugaccugcgccaccacgcgccagguggugaacgucgugaccaccaagaucgcccucaagggcgggugaggacuaguuauaagacugacuagcccgaugggccucccaacgggcccuccuccccuccuugcaccgagauuaauaaaaaaaaaaaaaaaaaaaaaaaaaaaaaaaaaaaaaaaaaaaaaaaaaaaaaaaaaaaaaaaaugcaucccccccccccccccccccccccccccccccaaaggcucuuuucagagccaccagaauu

SEQ ID NO: 21944 - RNA, 6058 nt, Artificial Sequence
  SARS-CoV-2__MT470104.1__non-structural protein 3 (NSP3) mRNA gc
aggagaaagcuuaccauggcccccaccaaggugaccuucggcgacgacacggucaucgaggugcagggguacaagagcgugaacaucaccuucgagcuggacgagcgcaucgacaagguccucaacgagaagugcuccgccuacaccguggagcugggcaccgaggugaacgaguucgcgugcgucguggccgacgccgugaucaagacgcugcagccggucagcgagcuccugaccccccuggggaucgaccucgacgagugguccauggccaccuacuaccuguucgacgagagcggcgaguucaagcuggccucccacauguacugcagcuucuacccccccgacgaggacgaggaggagggggacugcgaggaggaggaguucgagccguccacccaguacgaguacggcacggaggacgacuaccagggcaagccccucgaguucggggcgaccagcgccgcccugcagcccgaggaggagcaggaggaggacuggcuggacgacgacucccagcagaccgugggccagcaggacgggagcgaggacaaccagaccacgaccauccagaccaucguggagguccagccccagcucgagauggagcugaccccgguggugcagacgaucgaggucaacuccuucagcggcuaccugaagcucaccgacaacguguacaucaagaacgccgacaucguggaggaggcgaagaaggucaagcccaccgugguggucaacgccgccaacguguaccugaagcacgggggcggcguggccggggcccugaacaaggcgaccaacaacgccaugcaggucgaguccgacgacuacaucgccacgaacggcccccucaagguggggggcagcugcguccuguccggccacaaccuggccaagcacugccuccacgugguggggcccaacgucaacaagggcgaggacauccagcugcugaagagcgccuacgagaacuucaaccagcacgaggugcuccuggcgccgcugcucuccgccgggaucuucggcgccgaccccauccacagccugcgggugugcgucgacaccgugcgcaccaacguguaccuggccgucuucgacaagaaccucuacgacaagcugguguccagcuuccuggagaugaagagcgagaagcagguggagcagaagaucgccgagauccccaaggaggaggucaagcccuucaucaccgaguccaagccgagcguggagcagcggaagcaggacgacaagaagaucaaggcgugcguggaggaggucacgaccacccucgaggagaccaaguuccugacggagaaccugcuccuguacaucgacaucaacgggaaccugcaccccgacuccgccacccucgugagcgacaucgacaucaccuuccugaagaaggacgcccccuacaucgugggcgacgucgugcaggagggcgugcugaccgccgucgugauccccacgaagaaggccgggggcaccaccgagaugcucgcgaaggcccugcgcaaggugccgaccgacaacuacaucacgaccuaccccgggcagggccugaacggguacaccgucgaggaggccaagaccgugcucaagaagugcaaguccgccuucuacauccugcccagcaucaucuccaacgagaagcaggagauccugggcaccgugagcuggaaccuccgggagaugcuggcgcacgccgaggagacgcgcaagcugaugcccgucugcguggagaccaaggccaucguguccaccauccagcggaaguacaagggcaucaagauccaggagggggucguggacuacggcgcccgcuucuacuucuacaccagcaagacgaccguggccucccugaucaacacccucaacgaccugaacgagacccuggucacgaugccgcucggguacgugacccacggccugaaccuggaggaggcggcccgguacaugcgcagccucaaggugcccgccaccgucuccgugagcucccccgacgccgugaccgccuacaacggguaccugacgagcuccagcaagacccccgaggagcacuucaucgagaccaucucccuggcgggcagcuacaaggacuggagcuacuccggccagagcacccagcucgggaucgaguuccugaagcggggcgacaaguccgucuacuacacgagcaacccgaccaccuuccaccuggacggggaggugaucaccuucgacaaccucaagacgcugcugucccuccgcgaggugcggaccaucaaggucuucaccaccguggacaacaucaaccugcacacgcagguggucgacaugagcaugaccuacggccagcaguucggccccaccuaccuggacggggccgacgugaccaagaucaagccccacaacucccacgagggcaagacguucuacgugcucccgaacgacgacacccugcgcgucgaggccuucgaguacuaccacaccaccgaccccagcuuccuggggcgguacauguccgcccucaaccacacgaagaaguggaaguacccccaggugaacggccugaccagcaucaagugggccgacaacaacugcuaccuggcgaccgcccuccugacccugcagcagaucgagcucaaguucaaccccccggcccugcaggacgccuacuaccgcgcgcgggccggggaggccgccaacuucugcgcccugauccucgcguacugcaacaagacggugggcgagcugggcgacguccgcgagaccauguccuaccuguuccagcacgccaaccucgacagcugcaagcgggugcugaacgucgugugcaagaccugcgggcagcagcagaccacccugaagggcguggaggccgucauguacauggggacgcucuccuacgagcaguucaagaagggcgugcagauccccugcaccugcgggaagcaggccaccaaguaccuggugcagcaggagagccccuucgucaugauguccgcccccccggcgcaguacgagcugaagcacggcaccuucacgugcgccagcgaguacaccggcaacuaccagugcgggcacuacaagcacaucaccuccaaggagacccucuacugcaucgacggcgcccugcugacgaagagcagcgaguacaaggggcccaucaccgacguguucuacaaggagaacuccuacaccaccacgaucaagcccgugaccuacaagcucgacggcgucgugugcaccgagaucgaccccaagcuggacaacuacuacaagaaggacaacagcuacuucaccgagcagccgaucgaccuggugcccaaccagcccuaccccaacgccuccuucgacaacuucaaguucgucugcgacaacaucaaguucgccgacgaccucaaccagcugacgggguacaagaagccggcgagccgcgagcugaaggugaccuucuuccccgaccucaacggcgacguggucgccaucgacuacaagcacuacacccccuccuucaagaagggcgccaagcugcugcacaagcccaucguguggcacgugaacaacgccaccaacaaggcgacguacaagccgaacaccuggugcauccggugccucuggagcaccaagcccgucgagaccuccaacagcuucgacgugcugaaguccgaggacgcccaggggauggacaaccuggccugcgaggaccucaagcccgugagcgaggaggucguggagaaccccacgauccagaaggacgugcuggagugcaacgucaagaccaccgagguggugggcgacaucauccugaagccggccaacaacucccucaagaucaccgaggaggucgggcacacggaccugauggccgcguacguggacaacagcucccugaccaucaagaagcccaacgagcucagccgcgugcugggccugaagacccucgccacccacgggcuggccgccgucaacuccgugcccugggacacgaucgccaacuacgcgaagccguuccugaacaagguggucagcaccaccaccaacaucgugacgcgcugccucaaccgggugugcaccaacuacaugcccuacuucuucacccugcugcuccagcugugcaccuucacccgcuccacgaacagccggaucaaggccuccaugcccaccaccaucgccaagaacaccgucaagagcgugggcaaguucugccuggaggccagcuucaacuaccucaagucccccaacuucagcaagcugaucaacaucaucaucugguuccugcuccuguccgugugccugggcagccucaucuacuccacggccgcgcuggggguccugaugagcaaccucggcaugccguccuacugcaccggguaccgcgagggcuaccugaacagcaccaacgugaccaucgccacguacugcaccggcuccauccccugcagcgugugccuguccgggcucgacagccuggacaccuaccccucccuggagaccauccagaucacgaucagcuccuucaagugggaccucaccgccuucggccuggucgccgagugguuccuggccuacauccucuucacccgguucuucuacgugcuggggcuggcggccaucaugcagcucuucuucagcuacuucgccguguacuucaucuccaacagcuggcugauguggcugaucaucaaccugguccagauggcccccaucuccgcgauggugcgcauguacaucuucuucgccagcuucuacuacguguggaagagcuacguccacgugguggacggcugcuccagcuccaccugcaugaugugcuacaagcggaaccgcgccacgcgggucgagugcaccaccaucgugaacgggguccgccggagcuucuacguguacgccaacggcggcaagggguucugcaagcuccacaacuggaacugcgugaacugcgacaccuucugcgccggcuccacguucaucagcgacgaggucgcgcgcgaccugucccugcaguucaagcggccgaucaaccccaccgaccagagcuccuacaucguggacagcgugaccgucaagaacggguccauccaccucuacuucgacaaggccggccagaagaccuacgagcgccacagccugucccacuucgugaaccuggacaaccuccgggccaacaacacgaaggggagccugcccaucaacgugaucgucuucgacggcaaguccaagugcgaggagagcuccgccaagagcgccuccguguacuacagccagcugaugugccagcccauccuccugcuggaccaggcgcucgugagcgacgucggcgacuccgccgagguggccgugaagauguucgacgccuacgucaacaccuucagcuccaccuucaacgugccgauggagaagcugaagacccugguggccacggcggaggccgagcucgccaagaacgucagccuggacaacgugcuguccaccuucaucagcgccgcgcgccagggguucguggacuccgacgucgagaccaaggacgugguggagugccucaagcugagccaccaguccgacaucgaggucaccggcgacagcugcaacaacuacaugcugacguacaacaagguggagaacaugaccccccgggaccucggggccugcaucgacugcuccgcccgccacaucaacgcccagguggccaagagccacaacaucgcgcugaucuggaacgucaaggacuucaugucccugagcgagcagcuccggaagcagauccgcuccgccgccaagaagaacaaccugcccuucaagcugaccugcgccaccacgcgccagguggugaacgucgugaccaccaagaucgcccucaagggcgggugaggacuaguuauaagacugacuagcccgaugggccucccaacgggcccuccuccccuccuugcaccgagauuaauaaaaaaaaaaaaaaaaaaaaaaaaaaaaaaaaaaaaaaaaaaaaaaaaaaaaaaaaaaaaaaaaugcaucccccccccccccccccccccccccccccccaaaggcucuuuucagagccaccagaauu

SEQ ID NO: 21945 - RNA, 6058 nt, Artificial Sequence
  SARS-CoV-2__MT470114.1__non-structural protein 3 (NSP3) mRNA gc
aggagaaagcuuaccauggcccccaccaaggugaccuucggcgacgacacggucaucgaggugcagggguacaagagcgugaacaucaccuucgagcuggacgagcgcaucgacaagguccucaacgagaagugcuccgccuacaccguggagcugggcaccgaggugaacgaguucgcgugcgucguggccgacgccgugaucaagacgcugcagccggucagcgagcuccugaccccccuggggaucgaccucgacgagugguccauggccaccuacuaccuguucgacgagagcggcgaguucaagcuggccucccacauguacugcagcuucuacccccccgacgaggacgaggaggagggggacugcgaggaggaggaguucgagccguccacccaguacgaguacggcacggaggacgacuaccagggcaagccccucgaguucggggcgaccagcgccgcccugcagcccgaggaggagcaggaggaggacuggcuggacgacgacucccagcagaccgugggccagcaggacgggagcgaggacaaccagaccacgaccauccagaccaucguggagguccagccccagcucgagauggagcugaccccgguggugcagacgaucgaggucaacuccuucagcggcuaccugaagcucaccgacaacguguacaucaagaacgccgacaucguggaggaggcgaagaaggucaagccccccgugguggucaacgccgccaacguguaccugaagcacgggggcggcguggccggggcccugaacaaggcgaccaacaacgccaugcaggucgaguccgacgacuacaucgccaccaacggcccccucaagguggggggcagcugcguccuguccggccacaaccuggccaagcacugccuccacgugguggggccgaacgucaacaagggcgaggacauccagcugcugaagagcgccuacgagaacuucaaccagcacgaggugcuccuggcgccccugcucuccgccgggaucuucggcgccgaccccauccacagccugcgggugugcgucgacacggugcgcaccaacguguaccuggccgucuucgacaagaaccucuacgacaagcugguguccagcuuccuggagaugaagagcgagaagcagguggagcagaagaucgccgagauccccaaggaggaggucaagccguucaucaccgaguccaagcccagcguggagcagcggaagcaggacgacaagaagaucaaggcgugcguggaggaggucaccacgacccucgaggagaccaaguuccugaccgagaaccugcuccuguacaucgacaucaacgggaaccugcaccccgacuccgccacgcucgugagcgacaucgacaucaccuuccugaagaaggacgcccccuacaucgugggcgacgucgugcaggagggcgugcugaccgccgucgugaucccgaccaagaaggccgggggcacgaccgagaugcucgcgaaggcccugcgcaaggugcccaccgacaacuacaucaccacguaccccgggcagggccugaacggguacaccgucgaggaggccaagaccgugcucaagaagugcaaguccgccuucuacauccugcccagcaucaucuccaacgagaagcaggagauccugggcaccgugagcuggaaccuccgggagaugcuggcgcacgccgaggagacccgcaagcugaugccggucugcguggagacgaaggccaucguguccaccauccagcggaaguacaagggcaucaagauccaggagggggucguggacuacggcgcccgcuucuacuucuacaccagcaagaccacgguggccucccugaucaacacccucaacgaccugaacgagacccuggucaccaugccccucggguacgugacgcacggccugaaccuggaggaggcggcccgguacaugcgcagccucaaggugcccgccaccgucuccgugagcucccccgacgccgugaccgccuacaacggguaccugaccagcuccagcaagacgccggaggagcacuucaucgagaccaucucccuggcgggcagcuacaaggacuggagcuacuccggccagagcacccagcucgggaucgaguuccugaagcggggcgacaaguccgucuacuacaccagcaaccccacgaccuuccaccuggacggggaggugaucaccuucgacaaccucaagacccugcugucccuccgcgaggugcggacgaucaaggucuucaccaccguggacaacaucaaccugcacacccagguggucgacaugagcaugacguacggccagcaguucggccccaccuaccuggacggggccgacgugaccaagaucaagccgcacaacucccacgagggcaagaccuucuacgugcuccccaacgacgacacgcugcgcgucgaggccuucgaguacuaccacaccaccgaccccagcuuccuggggcgguacauguccgcccucaaccacaccaagaaguggaaguacccccaggugaacggccugacgagcaucaagugggccgacaacaacugcuaccuggcgaccgcccuccugacccugcagcagaucgagcucaaguucaacccgcccgcccugcaggacgccuacuaccgcgcgcgggccggggaggccgccaacuucugcgcccugauccucgcguacugcaacaagaccgugggcgagcugggcgacguccgcgagacgauguccuaccuguuccagcacgccaaccucgacagcugcaagcgggugcugaacgucgugugcaagaccugcgggcagcagcagaccacccugaagggcguggaggccgucauguacauggggacccucuccuacgagcaguucaagaagggcgugcagauccccugcacgugcgggaagcaggccaccaaguaccuggugcagcaggagagccccuucgucaugauguccgccccgcccgcgcaguacgagcugaagcacggcaccuucaccugcgccagcgaguacacgggcaacuaccagugcgggcacuacaagcacaucaccuccaaggagacccucuacugcaucgacggcgcccugcugaccaagagcagcgaguacaaggggcccaucacggacguguucuacaaggagaacuccuacaccaccaccaucaagcccgugacguacaagcucgacggcgucgugugcaccgagaucgacccgaagcuggacaacuacuacaagaaggacaacagcuacuucaccgagcagcccaucgaccuggugcccaaccagcccuacccgaacgccuccuucgacaacuucaaguucgucugcgacaacaucaaguucgccgacgaccucaaccagcugaccggguacaagaagcccgcgagccgcgagcugaaggugacguucuuccccgaccucaacggcgacguggucgccaucgacuacaagcacuacacccccuccuucaagaagggcgccaagcugcugcacaagccgaucguguggcacgugaacaacgccaccaacaaggcgaccuacaagcccaacacguggugcauccggugccucuggagcaccaagcccgucgagaccuccaacagcuucgacgugcugaaguccgaggacgcccaggggauggacaaccuggccugcgaggaccucaagcccgugagcgaggaggucguggagaacccgaccauccagaaggacgugcuggagugcaacgucaagacgaccgagguggugggcgacaucauccugaagcccgccaacaacucccucaagaucaccgaggaggucgggcacaccgaccugauggccgcguacguggacaacagcucccugacgaucaagaagcccaacgagcucagccgcgugcugggccugaagacccucgccacccacgggcuggccgccgucaacuccgugccgugggacaccaucgccaacuacgcgaagcccuuccugaacaagguggucagcacgaccaccaacaucgugacccgcugccucaaccgggugugcacgaacuacaugcccuacuucuucacccugcugcuccagcugugcaccuucacccgcuccaccaacagccggaucaaggccuccaugcccacgaccaucgccaagaacaccgucaagagcgugggcaaguucugccuggaggccagcuucaacuaccucaaguccccgaacuucagcaagcugaucaacaucaucaucugguuccugcuccuguccgugugccugggcagccucaucuacuccaccgccgcgcuggggguccugaugagcaaccucggcaugcccuccuacugcacgggguaccgcgagggcuaccugaacagcaccaacgugaccaucgccaccuacugcacgggcuccauccccugcagcgugugccuguccgggcucgacagccuggacaccuaccccucccuggagaccauccagaucaccaucagcuccuucaagugggaccucacggccuucggccuggucgccgagugguuccuggccuacauccucuucacccgguucuucuacgugcuggggcuggcggccaucaugcagcucuucuucagcuacuucgccgugcacuucaucuccaacagcuggcugauguggcugaucaucaaccugguccagauggccccgaucuccgcgauggugcgcauguacaucuucuucgccagcuucuacuacguguggaagagcuacguccacgugguggacggcugcaacuccagcaccugcaugaugugcuacaagcggaaccgcgccacccgggucgagugcacgaccaucgugaacgggguccgccgguccuucuacguguacgccaacggcggcaagggguucugcaagcuccacaacuggaacugcgugaacugcgacaccuucugcgccggcagcaccuucaucuccgacgaggucgcgcgcgaccugagccugcaguucaagcggcccaucaaccccacggaccaguccagcuacaucguggacuccgugaccgucaagaacgggagcauccaccucuacuucgacaaggccggccagaagaccuacgagcgccacucccugagccacuucgugaaccuggacaaccuccgggccaacaacaccaaggggucccugcccaucaacgugaucgucuucgacggcaagagcaagugcgaggaguccagcgccaaguccgccagcguguacuacucccagcugaugugccagccgauccuccugcuggaccaggcgcucgugagcgacgucggcgacagcgccgagguggccgugaagauguucgacgccuacgucaacacguucuccagcaccuucaacgugcccauggagaagcugaagacccugguggccaccgcggaggccgagcucgccaagaacgucucccuggacaacgugcugagcacguucaucuccgccgcgcgccagggguucguggacagcgacgucgagaccaaggacgugguggagugccucaagcugucccaccagagcgacaucgaggucaccggcgacuccugcaacaacuacaugcugaccuacaacaagguggagaacaugacgccccgggaccucggggccugcaucgacugcagcgcccgccacaucaacgcccagguggccaagucccacaacaucgcgcugaucuggaacgucaaggacuucaugagccuguccgagcagcuccggaagcagauccgcagcgccgccaagaagaacaaccugcccuucaagcugaccugcgccaccacccgccagguggugaacgucgugacgaccaagaucgcccucaagggcgggugaggacuaguuauaagacugacuagcccgaugggccucccaacgggcccuccuccccuccuugcaccgagauuaauaaaaaaaaaaaaaaaaaaaaaaaaaaaaaaaaaaaaaaaaaaaaaaaaaaaaaaaaaaaaaaaaugcaucccccccccccccccccccccccccccccccaaaggcucuuuucagagccaccagaauu

SEQ ID NO: 21946 - RNA, 6058 nt, Artificial Sequence
  SARS-CoV-2__MT470125.1__non-structural protein 3 (NSP3) mRNA gc
aggagaaagcuuaccauggcccccaccaaggugaccuucggcgacgacacggucaucgaggugcagggguacaagagcgugaacaucaccuucgagcuggacgagcgcaucgacaagguccucaacgagaagugcuccgccuacaccguggagcugggcaccgaggugaacgaguucgcgugcgucguggccgacgccgugaucaagacgcugcagccggucagcgagcuccugaccccccuggggaucgaccucgacgagugguccauggccaccuacuaccuguucgacgagagcggcgaguucaagcuggccucccacauguacugcagcuucuacccccccgacgaggacgaggaggagggggacugcgaggaggaggaguucgagccguccacccaguacgaguacggcacggaggacgacuaccagggcaagccccucgaguucggggcgaccagcgccgcccugcagcccgaggaggagcaggaggaggacuggcuggacgacgacucccagcagaccgugggccagcaggacgggagcgaggacaaccagaccacgaccauccagaccaucguggagguccagccccagcucgagauggagcugaccccgguggugcagacgaucgaggucaacuccuucagcggcuaccugaagcucaccgacaacguguacaucaagaacgccgacaucguggaggaggcgaagaaggucaagcccaccgugguggucaacgccgccaacguguaccugaagcacgggggcggcguggccggggcccugaacaaggcgaccaacaacgccaugcaggucgaguccgacgacuacaucgccacgaacggcccccucaagguggggggcagcugcguccuguccggccacaaccuggccaagcacugccuccacgugguggggcccaacgucaacaagggcgaggacauccagcugcugaagagcgccuacgagaacuucaaccagcacgaggugcuccuggcgccgcugcucuccgccgggaucuucggcgccgaccccauccacagccugcgggugugcgucgacaccgugcgcaccaacguguaccuggccgucuucgacaagaaccucuacgacaagcugguguccagcuuccuggagaugaagagcgagaagcagguggagcagaagaucgccgagauccccaaggaggaggucaagcccuucaucaccgaguccaagccgagcguggagcagcggaagcaggacgacaagaagaucaaggcgugcguggaggaggucacgaccacccucgaggagaccaaguuccugacggagaaccugcuccuguacaucgacaucaacgggaaccugcaccccgacuccgccacccucgugagcgacaucgacaucaccuuccugaagaaggacgcccccuacaucgugggcgacgucgugcaggagggcgugcugaccgccgucgugauccccacgaagaaggccgggggcaccaccgagaugcucgcgaaggcccugcgcaaggugccgaccgacaacuacaucacgaccuaccccgggcagggccugaacggguacaccgucgaggaggccaagaccgugcucaagaagugcaaguccgccuucuacauccugcccagcaucaucuccaacgagaagcaggagauccugggcaccgugagcuggaaccuccgggagaugcuggcgcacgccgaggagacgcgcaagcugaugcccgucugcguggagaccaaggccaucguguccaccauccagcggaaguacaagggcaucaagauccaggagggggucguggacuacggcgcccgcuucuacuucuacaccagcaagacgaccguggccucccugaucaacacccucaacgaccugaacgagacccuggucacgaugccgcucggguacgugacccacggccugaaccuggaggaggcggcccgguacaugcgcagccucaaggugcccgccaccgucuccgugagcucccccgacgccgugaccgccuacaacggguaccugacgagcuccagcaagacccccgaggagcacuucaucgagaccaucucccuggcgggcagcuacaaggacuggagcuacuccggccagagcacccagcucgggaucgaguuccugaagcggggcgacaaguccgucuacuacacgagcaacccgaccaccuuccaccuggacggggaggugaucaccuucgacaaccucaagacgcugcugucccuccgcgaggugcggaccaucaaggucuucaccaccguggacaacaucaaccugcacacgcagguggucgacaugagcaugaccuacggccagcaguucggccccaccuaccuggacggggccgacgugaccaagaucaagccccacaacucccacgagggcaagacguucuacgugcucccgaacgacgacacccugcgcgucgaggccuucgaguacuaccacaccaccgaccccagcuuccuggggcgguacauguccgcccucaaccacacgaagaaguggaaguacccccaggugaacggccugaccagcaucaagugggccgacaacaacugcuaccuggcgaccgcccuccugacccugcagcagaucgagcucaaguucaaccccccggcccugcaggacgccuacuaccgcgcgcgggccggggaggccgccaacuucugcgcccugauccucgcguacugcaacaagacggugggcgagcugggcgacguccgcgagaccauguccuaccuguuccagcacgccaaccucgacagcugcaagcgggugcugaacgucgugugcaagaccugcgggcagcagcagaccacccugaagggcguggaggccgucauguacauggggacgcucuccuacgagcaguucaagaagggcgugcagauccccugcaccugcgggaagcaggccaccaaguaccuggugcagcaggagagccccuucgucaugauguccgcccccccggcgcaguacgagcugaagcacggcaccuucacgugcgccagcgaguacaccggcaacuaccagugcgggcacuacaagcacaucaccuccaaggagacccucuacugcaucgacggcgcccugcugacgaagagcagcgaguacaaggggcccaucaccgacguguucuacaaggagaacuccuacaccaccacgaucaagcccgugaccuacaagcucgacggcgucgugugcaccgagaucgaccccaagcuggacaacuacuacaagaaggacaacagcuacuucaccgagcagccgaucgaccuggugcccaaccagcccuaccccaacgccuccuucgacaacuucaaguucgucugcgacaacaucaaguucgccgacgaccucaaccagcugacgggguacaagaagccggcgagccgcgagcugaaggugaccuucuuccccgaccucaacggcgacguggucgccaucgacuacaagcacuacacccccuccuucaagaagggcgccaagcugcugcacaagcccaucguguggcacgugaacaacgccaccaacaaggcgacguacaagccgaacaccuggugcauccggugccucuggagcaccaagcccgucgagaccuccaacagcuucgacgugcugaaguccgaggacgcccaggggauggacaaccuggccugcgaggaccucaagcccgugagcgaggaggucguggagaaccccacgauccagaaggacgugcuggagugcaacgucaagaccaccgagguggugggcgacaucauccugaagccggccaacaacucccucaagaucaccgaggaggucgggcacacggaccugauggccgcguacguggacaacagcucccugaccaucaagaagcccaacgagcucagccgcgugcugggccugaagacccucgccacccacgggcuggccgccgucaacuccgugcccugggacacgaucgccaacuacgcgaagccguuccugaacaagguggucagcaccaccaccaacaucgugacgcgcugccucaaccgggugugcaccaacuacaugcccuacuucuucacccugcugcuccagcugugcaccuucacccgcuccacgaacagccggaucaaggccuccaugcccaccaccaucgccaagaacaccgucaagagcgugggcaaguucugccuggaggccagcuucaacuaccucaagucccccaacuucagcaagcugaucaacaucaucaucugguuccugcuccuguccgugugccugggcagccucaucuacuccacggccgcgcuggggguccugaugagcaaccucggcaugccguccuacugcaccggguaccgcgagggcuaccugaacagcaccaacgugaccaucgccacguacugcaccggcuccauccccugcagcgugugccuguccgggcucgacagccuggacaccuaccccucccuggagaccauccagaucacgaucagcuccuucaagugggaccucaccgccuucggccuggucgccgagugguuccuggccuacauccucuucacccgguucuucuacgugcuggggcuggcggccaucaugcagcucuucuucagcuacuucgccgugcacuucaucuccaacagcuggcugauguggcugaucaucaaccugguccagauggcccccaucuccgcgauggugcgcauguacaucuucuucgccagcuucuacuacguguggaagagcuacguccacgugguggacggcugcaacuccagcaccugcaugaugugcuacaagcggaaccgcgccacgcgggucgagugcaccaccaucgugaacgggguccgccgguccuucuacguguacgccaacggcggcaagggguucugcaagcuccacaacuggaacugcgugaacugcgacaccuucugcgccggcagcacguucaucuccgacgaggucgcgcgcgaccugagccugcaguucaagcggccgaucaaccccaccgaccaguccagcuacaucguggacuccgugaccgucaagaacgggagcauccaccucuacuucgacaaggccggccagaagaccuacgagcgccacucccugagccacuucgugaaccuggacaaccuccgggccaacaacacgaaggggucccugcccaucaacgugaucgucuucgacggcaagagcaagugcgaggaguccagcgccaaguccgccagcguguacuacucccagcugaugugccagcccauccuccugcuggaccaggcgcucgugagcgacgccggcgacagcgccgaggucgccgugaagauguucgacgccuacgugaacaccuucuccagcaccuucaacgucccgauggagaagcugaagacccugguggcgacggccgaggccgagcucgccaagaacgugucccuggacaacguccugagcaccuucaucuccgcggcccgccagggguucguggacagcgacguggagaccaaggacgucguggagugccucaagcugucccaccagagcgacaucgaggugaccggcgacuccugcaacaacuacaugcugacguacaacaaggucgagaacaugaccccccgggaccucggggccugcaucgacugcagcgcccgccacaucaacgcccagguggcgaagucccacaacaucgcccugaucuggaacgugaaggacuucaugagccuguccgagcagcuccggaagcagauccgcagcgccgccaagaagaacaaccugcccuucaagcugaccugcgccaccacgcgccaggucgugaacguggucaccaccaagaucgcgcucaagggcgggugaggacuaguuauaagacugacuagcccgaugggccucccaacgggcccuccuccccuccuugcaccgagauuaauaaaaaaaaaaaaaaaaaaaaaaaaaaaaaaaaaaaaaaaaaaaaaaaaaaaaaaaaaaaaaaaaugcaucccccccccccccccccccccccccccccccaaaggcucuuuucagagccaccagaauu

SEQ ID NO: 21947 - RNA, 6058 nt, Artificial Sequence
  SARS-CoV-2__MT470127.1__non-structural protein 3 (NSP3) mRNA gc
aggagaaagcuuaccauggcccccaccaaggugaccuucggcgacgacacggucaucgaggugcagggguacaagagcgugaacaucaccuucgagcuggacgagcgcaucgacaagguccucaacgagaagugcuccgccuacaccguggagcugggcaccgaggugaacgaguucgcgugcgucguggccgacgccgugaucaagacgcugcagccggucagcgagcuccugaccccccuggggaucgaccucgacgagugguccauggccaccuacuaccuguucgacgagagcggcgaguucaagcuggccucccacauguacugcagcuucuacccccccgacgaggacgaggaggagggggacugcgaggaggaggaguucgagccguccacccaguacgaguacggcacggaggacgacuaccagggcaagccccucgaguucggggcgaccagcgccgcccugcagcccgaggaggagcaggaggaggacuggcuggacgacgacucccagcagaccgugggccagcaggacgggagcgaggacaaccagaccacgaccauccagaccaucguggagguccagccccagcucgagauggagcugaccccgguggugcagacgaucgaggucaacuccuucagcggcuaccugaagcucaccgacaacguguacaucaagaacgccgacaucguggaggaggcgaagaaggucaagcccaccgugguggucaacgccgccaacguguaccugaagcacgggggcggcguggccggggcccugaacaaggcgaccaacaacgccaugcaggucgaguccgacgacuacaucgccacgaacggcccccucaagguggggggcagcugcguccuguccggccacaaccuggccaagcacugccuccacgugguggggcccaacgucaacaagggcgaggacauccagcugcugaagagcgccuacgagaacuucaaccagcacgaggugcuccuggcgccgcugcucuccgccgggaucuucggcgccgaccccauccacagccugcgggugugcgucgacaccgugcgcaccaacguguaccuggccgucuucgacaagaaccucuacgacaagcugguguccagcuuccuggagaugaagagcgagaagcagguggagcagaagaucgccgagauccccaaggaggaggucaagcccuucaucaccgaguccaagccgagcguggagcagcggaagcaggacgacaagaagaucaaggcgugcguggaggaggucacgaccacccucgaggagaccaaguuccugacggagaaccugcuccuguacaucgacaucaacgggaaccugcaccccgacuccgccacccucgugagcgacaucgacaucaccuuccugaagaaggacgcccccuacaucgugggcgacgucgugcaggagggcgugcugaccgccgucgugauccccacgaagaaggccgggggcaccaccgagaugcucgcgaaggcccugcgcaaggugccgaccgacaacuacaucacgaccuaccccgggcagggccugaacggguacaccgucgaggaggccaagaccgugcucaagaagugcaaguccgccuucuacauccugcccagcaucaucuccaacgagaagcaggagauccugggcaccgugagcuggaaccuccgggagaugcuggcgcacgccgaggagacgcgcaagcugaugcccgucugcguggagaccaaggccaucguguccaccauccagcggaaguacaagggcaucaagauccaggagggggucguggacuacggcgcccgcuucuacuucuacaccagcaagacgaccguggccucccugaucaacacccucaacgaccugaacgagacccuggucacgaugccgcucggguacgugacccacggccugaaccuggaggaggcggcccgguacaugcgcagccucaaggugcccgccaccgucuccgugagcucccccgacgccgugaccgccuacaacggguaccugacgagcuccagcaagacccccgaggagcacuucaucgagaccaucucccuggcgggcagcuacaaggacuggagcuacuccggccagagcacccagcucgggaucgaguuccugaagcggggcgacaaguccgucuacuacacgagcaacccgaccaccuuccaccuggacggggaggugaucaccuucgacaaccucaagacgcugcugucccuccgcgaggugcggaccaucaaggucuucaccaccguggacaacaucaaccugcacacgcagguggucgacaugagcaugaccuacggccagcaguucggccccaccuaccuggacggggccgacgugaccaagaucaagccccacaacucccacgagggcaagacguucuacgugcucccgaacgacgacacccugcgcgucgaggccuucgaguacuaccacaccaccgaccccagcuuccuggggcgguacauguccgcccucaaccacacgaagaaguggaaguacccccaggugaacggccugaccagcaucaagugggccgacaacaacugcuaccuggcgaccgcccuccugacccugcagcagaucgagcucaaguucaaccccccggcccugcaggacgccuacuaccgcgcgcgggccggggaggccgccaacuucugcgcccugauccucgcguacugcaacaagacggugggcgagcugggcgacguccgcgagaccauguccuaccuguuccagcacgccaaccucgacagcugcaagcgggugcugaacgucgugugcaagaccugcgggcagcagcagaccacccugaagggcguggaggccgucauguacauggggacgcucuccuacgagcaguucaagaagggcgugcagauccccugcaccugcgggaagcaggccaccaaguaccuggugcagcaggagagccccuucgucaugauguccgcccccccggcgcaguacgagcugaagcacggcaccuucacgugcgccagcgaguacaccggcaacuaccagugcgggcacuacaagcacaucaccuccaaggagacccucuacugcaucgacggcgcccugcugacgaagagcagcgaguacaaggggcccaucaccgacguguucuacaaggagaacuccuacaccaccacgaucaagcccgugaccuacaagcucgacggcgucgugugcaccgagaucgaccccaagcuggacaacuacuacaagaaggacaacagcuacuucaccgagcagccgaucgaccuggugcccaagcagcccuaccccaacgccuccuucgacaacuucaaguucgucugcgacaacaucaaguucgccgacgaccucaaccagcugacgggguacaagaagccggcgagccgcgagcugaaggugaccuucuuccccgaccucaacggcgacguggucgccaucgacuacaagcacuacacccccuccuucaagaagggcgccaagcugcugcacaagcccaucguguggcacgugaacaacgccaccaacaaggcgacguacaagccgaacaccuggugcauccggugccucuggagcaccaagcccgucgagaccuccaacagcuucgacgugcugaaguccgaggacgcccaggggauggacaaccuggccugcgaggaccucaagcccgugagcgaggaggucguggagaaccccacgauccagaaggacgugcuggagugcaacgucaagaccaccgagguggugggcgacaucauccugaagccggccaacaacucccucaagaucaccgaggaggucgggcacacggaccugauggccgcguacguggacaacagcucccugaccaucaagaagcccaacgagcucagccgcgugcugggccugaagacccucgccacccacgggcuggccgccgucaacuccgugcccugggacacgaucgccaacuacgcgaagccguuccugaacaagguggucagcaccaccaccaacaucgugacgcgcugccucaaccgggugugcaccaacuacaugcccuacuucuucacccugcugcuccagcugugcaccuucacccgcuccacgaacagccggaucaaggccuccaugcccaccaccaucgccaagaacaccgucaagagcgugggcaaguucugccuggaggccagcuucaacuaccucaagucccccaacuucagcaagcugaucaacaucaucaucugguuccugcuccuguccgugugccugggcagccucaucuacuccacggccgcgcuggggguccugaugagcaaccucggcaugccguccuacugcaccggguaccgcgagggcuaccugaacagcaccaacgugaccaucgccacguacugcaccggcuccauccccugcagcgugugccuguccgggcucgacagccuggacaccuaccccucccuggagaccauccagaucacgaucagcuccuucaagugggaccucaccgccuucggccuggucgccgagugguuccuggccuacauccucuucacccgguucuucuacgugcuggggcuggcggccaucaugcagcucuucuucagcuacuucgccgugcacuucaucuccaacagcuggcugauguggcugaucaucaaccugguccagauggcccccaucuccgcgauggugcgcauguacaucuucuucgccagcuucuacuacguguggaagagcuacguccacgugguggacggcugcaacuccagcaccugcaugaugugcuacaagcggaaccgcgccacgcgggucgagugcaccaccaucgugaacgggguccgccgguccuucuacguguacgccaacggcggcaagggguucugcaagcuccacaacuggaacugcgugaacugcgacaccuucugcgccggcagcacguucaucuccgacgaggucgcgcgcgaccugagccugcaguucaagcggccgaucaaccccaccgaccaguccagcuacaucguggacuccgugaccgucaagaacgggagcauccaccucuacuucgacaaggccggccagaagaccuacgagcgccacucccugagccacuucgugaaccuggacaaccuccgggccaacaacacgaaggggucccugcccaucaacgugaucgucuucgacggcaagagcaagugcgaggaguccagcgccaaguccgccagcguguacuacucccagcugaugugccagcccauccuccugcuggaccaggcgcucgugagcgacgucggcgacagcgccgagguggccgugaagauguucgacgccuacgucaacaccuucuccagcaccuucaacgugccgauggagaagcugaagacccugguggccacggcggaggccgagcucgccaagaacgucucccuggacaacgugcugagcaccuucaucuccgccgcgcgccagggguucguggacagcgacgucgagaccaaggacgugguggagugccucaagcugucccaccagagcgacaucgaggucaccggcgacuccugcaacaacuacaugcugacguacaacaagguggagaacaugaccccccgggaccucggggccugcaucgacugcagcgcccgccacaucaacgcccagguggccaagucccacaacaucgcgcugaucuggaacgucaaggacuucaugagccuguccgagcagcuccggaagcagauccgcagcgccgccaagaagaacaaccugcccuucaagcugaccugcgccaccacgcgccagguggugaacgucgugaccaccaagaucgcccucaagggcgggugaggacuaguuauaagacugacuagcccgaugggccucccaacgggcccuccuccccuccuugcaccgagauuaauaaaaaaaaaaaaaaaaaaaaaaaaaaaaaaaaaaaaaaaaaaaaaaaaaaaaaaaaaaaaaaaaugcaucccccccccccccccccccccccccccccccaaaggcucuuuucagagccaccagaauu

SEQ ID NO: 21948 - RNA, 6058 nt, Artificial Sequence
  SARS-CoV-2__MT470134.1__non-structural protein 3 (NSP3) mRNA gc
aggagaaagcuuaccauggcccccaccaaggugaccuucggcgacgacacggucaucgaggugcagggguacaagagcgugaacaucaccuucgagcuggacgagcgcaucgacaagguccucaacgagaagugcuccgccuacaccguggagcugggcaccgaggugaacgaguucgcgugcgucguggccgacgccgugaucaagacgcugcagccggucagcgagcuccugaccccccuggggaucgaccucgacgagugguccauggccaccuacuaccuguucgacgagagcggcgaguucaagcuggccucccacauguacugcagcuucuacccccccgacgaggacgaggaggagggggacugcgaggaggaggaguucgagccguccacccaguacgaguacggcacggaggacgacuaccagggcaagccccucgaguucggggcgaccagcgccgcccugcagcccgaggaggagcaggaggaggacuggcuggacgacgacucccagcagaccgugggccagcaggacgggagcgaggacaaccagaccacgaccauccagaccaucguggagguccagccccagcucgagauggagcugaccccgguggugcagacgaucgaggucaacuccuucagcggcuaccugaagcucaccgacaacguguacaucaagaacgccgacaucguggaggaggcgaagaaggucaagcccaccgugguggucaacgccgccaacguguaccugaagcacgggggcggcguggccggggcccugaacaaggcgaccaacaacgccaugcaggucgaguccgacgacuacaucgccacgaacggcccccucaagguggggggcagcugcguccuguccggccacaaccuggccaagcacugccuccacgugguggggcccaacgucaacaagggcgaggacauccagcugcugaagagcgccuacgagaacuucaaccagcacgaggugcuccuggcgccgcugcucuccgccgggaucuucggcgccgaccccauccacagccugcgggugugcgucgacaccgugcgcaccaacguguaccuggccgucuucgacaagaaccucuacgacaagcugguguccagcuuccuggagaugaagagcgagaagcagguggagcagaagaucgccgagauccccaaggaggaggucaagcccuucaucaccgaguccaagccgagcguggagcagcggaagcaggacgacaagaagaucaaggcgugcguggaggaggucacgaccacccucgaggagaccaaguuccugacggagaaccugcuccuguacaucgacaucaacgggaaccugcaccccgacuccgccacccucgugagcgacaucgacaucaccuuccugaagaaggacgcccccuacaucgugggcgacgucgugcaggagggcgugcugaccgccgucgugauccccacgaagaaggccgggggcaccaccgagaugcucgcgaaggcccugcgcaaggugccgaccgacaacuacaucacgaccuaccccgggcagggccugaacggguacaccgucgaggaggccaagaccgugcucaagaagugcaaguccgccuucuacauccugcccagcaucaucuccaacgagaagcaggagauccugggcaccgugagcuggaaccuccgggagaugcuggcgcacgccgaggagacgcgcaagcugaugcccgucugcguggagaccaaggccaucguguccaccauccagcggaaguacaagggcaucaagauccaggagggggucguggacuacggcgcccgcuucuacuucuacaccagcaagacgaccguggccucccugaucaacacccucaacgaccugaacgagacccuggucacgaugccgcucggguacgugacccacggccugaaccuggaggaggcggcccgguacaugcgcagccucaaggugcccgccaccgucuccgugagcucccccgacgccgugaccgccuacaacggguaccugacgagcuccagcaagacccccgaggagcacuucaucgagaccaucucccuggcgggcagcuacaaggacuggagcuacuccggccagagcacccagcucgggaucgaguuccugaagcggggcgacaaguccgucuacuacacgagcaacccgaccaccuuccaccuggacggggaggugaucaccuucgacaaccucaagacgcugcugucccuccgcgaggugcggaccaucaaggucuucaccaccguggacaacaucaaccugcacacgcagguggucgacaugagcaugaccuacggccagcaguucggccccaccuaccuggacggggccgacgugaccaagaucaagccccacaacucccacgagggcaagacguucuacgugcucccgaacgacgacacccugcgcgucgaggccuucgaguacuaccacaccaccgaccccagcuuccuggggcgguacauguccgcccucaaccacacgaagaaguggaaguacccccaggugaacggccugaccagcaucaagugggccgacaacaacugcuaccuggcgaccgcccuccugacccugcagcagaucgagcucaaguucaaccccccggcccugcaggacgccuacuaccgcgcgcgggccggggaggccgccaacuucugcgcccugauccucgcguacugcaacaagacggugggcgagcugggcgacguccgcgagaccauguccuaccuguuccagcacgccaaccucgacagcugcaagcgggugcugaacgucgugugcaagaccugcgggcagcagcagaccacccugaagggcguggaggccgucauguacauggggacgcucuccuacgagcaguucaagaagggcgugcagauccccugcaccugcgggaagcaggccaccaaguaccuggugcagcaggagagccccuucgucaugauguccgcccccccggcgcaguacgagcugaagcacggcaccuucacgugcgccagcgaguacaccggcaacuaccagugcgggcacuacaagcacaucaccuccaaggagacccucuacugcaucgacggcgcccugcugacgaagagcagcgaguacaaggggcccaucaccgacguguucuacaaggagaacuccuacaccaccacgaucaagcccgugaccuacaagcucgacggcgucgugugcaccgagaucgaccccaagcuggacaacuacuacaagaaggacaacagcuacuucaccgagcagccgaucgaccuggugcccaaccagcccuaccccaacgccuccuucgacaacuucaaguucgucugcgacaacaucaaguucgccgacgaccucaaccagcugacgggguacaagaagccggcgagccgcgagcugaaggugaccuucuuccccgaccucaacggcgacguggucgccaucgacuacaagcacuacacccccuccuucaagaagggcgccaagcugcugcacaagcccaucguguggcacgugaacaacgccaccaacaaggcgacguacaagccgaacaccuggugcauccggugccucuggagcaccaagcccgucgagaccuccaacagcuucgacgugcugaaguccgaggacgcccaggggauggacaaccuggccugcgaggaccucaagcccgugagcgaggaggucguggagaaccccacgauccagaaggacgugcuggagugcaacgucaagaccaccgagguggugggcgacaucauccugaagccggccaacaacucccucaagaucaccgaggaggucgggcacacggaccugauggccgcguacguggacaacagcucccugaccaucaagaagcccaacgagcucagccgcgugcugggccugaagacccucgccacccacgggcuggccgccgucaacuccgugcccugggacacgaucgccaacuacgcgaagccguuccugaacaagguggucagcaccaccaccaacaucgugacgcgcugccucaaccgggugugcaccaacuacaugcccuacuucuucacccugcugcuccagcugugcaccuucacccgcuccacgaacagccggaucaaggccuccaugcccaccaccaucgccaagaacaccgucaagagcgugggcaaguucugccuggaggccagcuucaacuaccucaagucccccaacuucagcaagcugaucaacaucaucaucugguuccugcuccugaucgugugccugggcucccucaucuacagcacggccgcgcuggggguccugauguccaaccucggcaugccgagcuacugcaccggguaccgcgagggcuaccugaacuccaccaacgugaccaucgccacguacugcaccggcagcauccccugcuccgugugccugagcgggcucgacucccuggacaccuaccccagccuggagaccauccagaucacgaucuccagcuucaagugggaccucaccgccuucggccuggucgccgagugguuccuggccuacauccucuucacccgguucuucuacgugcuggggcuggcggccaucaugcagcucuucuucuccuacuucgccgugcacuucaucagcaacuccuggcugauguggcugaucaucaaccugguccagauggcccccaucagcgcgauggugcgcauguacaucuucuucgccuccuucuacuacguguggaagagcuacguccacgugguggacggcugcaacagcuccaccugcaugaugugcuacaagcggaaccgcgccacgcgggucgagugcaccaccaucgugaacgggguccgccggagcuucuacguguacgccaacggcggcaagggguucugcaagcuccacaacuggaacugcgugaacugcgacaccuucugcgccggcuccacguucaucagcgacgaggucgcgcgcgaccugucccugcaguucaagcggccgaucaaccccaccgaccagagcuccuacaucguggacagcgugaccgucaagaacggguccauccaccucuacuucgacaaggccggccagaagaccuacgagcgccacagccugucccacuucgugaaccuggacaaccuccgggccaacaacacgaaggggagccugcccaucaacgugaucgucuucgacggcaaguccaagugcgaggagagcuccgccaagagcgccuccguguacuacagccagcugaugugccagcccauccuccugcuggaccaggcgcucguguccgacgucggcgacagcgccgagguggccgugaagauguucgacgccuacgucaacaccuucagcuccaccuucaacgugccgauggagaagcugaagacccugguggccacggcggaggccgagcucgccaagaacgucagccuggacaacgugcuguccaccuucaucagcgccgcgcgccagggguucguggacuccgacgucgagaccaaggacgugguggagugccucaagcugagccaccaguccgacaucgaggucaccggcgacagcugcaacaacuacaugcugacguacaacaagguggagaacaugaccccccgggaccucggggccugcaucgacugcuccgcccgccacaucaacgcccagguggccaagagccacaacaucgcgcugaucuggaacgucaaggacuucaugucccugagcgagcagcuccggaagcagauccgcuccgccgccaagaagaacaaccugcccuucaagcugaccugcgccaccacgcgccagguggugaacgucgugaccaccaagaucgcccucaagggcgggugaggacuaguuauaagacugacuagcccgaugggccucccaacgggcccuccuccccuccuugcaccgagauuaauaaaaaaaaaaaaaaaaaaaaaaaaaaaaaaaaaaaaaaaaaaaaaaaaaaaaaaaaaaaaaaaaugcaucccccccccccccccccccccccccccccccaaaggcucuuuucagagccaccagaauu

SEQ ID NO: 21949 - RNA, 6058 nt, Artificial Sequence
  SARS-CoV-2__MT459840.1__non-structural protein 3 (NSP3) mRNA gc
aggagaaagcuuaccauggcccccaccaaggugaccuucggcgacgacacggucaucgaggugcagggguacaagagcgugaacaucaccuucgagcuggacgagcgcaucgacaagguccucaacgagaagugcuccgccuacaccguggagcugggcaccgaggugaacgaguucgcgugcgucguggccgacgccgugaucaagacgcugcagccggucagcgagcuccugaccccccuggggaucgaccucgacgagugguccauggccaccuacuaccuguucgacgagagcggcgaguucaagcuggccucccacauguacugcagcuucuacccccccgacgaggacgaggaggagggggacugcgaggaggaggaguucgagccguccacccaguacgaguacggcacggaggacgacuaccagggcaagccccucgaguucggggcgaccagcgccgcccugcagcccgaggaggagcaggaggaggacuggcuggacgacgacucccagcagaccgugggccagcaggacgggagcgaggacaaccagaccacgaccauccagaccaucguggagguccagccccagcucgagauggagcugaccccgguggugcagacgaucgaggucaacuccuucagcggcuaccugaagcucaccgacaacguguacaucaagaacgccgacaucguggaggaggcgaagaaggucaagcccaccgugguggucaacgccgccaacguguaccugaagcacgggggcggcguggccggggcccugaacaaggcgaccaacaacgccaugcaggucgaguccgacgacuacaucgccacgaacggcccccucaagguggggggcagcugcguccuguccggccacaaccuggccaagcacugccuccacgugguggggcccaacgucaacaagggcgaggacauccagcugcugaagagcgccuacgagaacuucaaccagcacgaggugcuccuggcgccgcugcucuccgccgggaucuucggcgccgaccccauccacagccugcgggugugcgucgacaccgugcgcaccaacguguaccuggccgucuucgacaagaaccucuacgacaagcugguguccagcuuccuggagaugaagagcgagaagcagguggagcagaagaucgccgagauccccaaggaggaggucaagcccuucaucaccgaguccaagccgagcguggagcagcggaagcaggacgacaagaagaucaaggcgugcguggaggaggucacgaccacccucgaggagaccaaguuccugacggagaaccugcuccuguacaucgacaucaacgggaaccugcaccccgacuccgccacccucgugagcgacaucgacaucaccuuccugaagaaggacgcccccuacaucgugggcgacgucgugcaggagggcgugcugaccgccgucgugauccccacgaagaaggccgggggcaccaccgagaugcucgcgaaggcccugcgcaaggugccgaccgacaacuacaucacgaccuaccccgggcagggccugaacggguacaccgucgaggaggccaagaccgugcucaagaagugcaaguccgccuucuacauccugcccagcaucaucuccaacgagaagcaggagauccugggcaccgugagcuggaaccuccgggagaugcuggcgcacgccgaggagacgcgcaagcugaugcccgucugcguggagaccaaggccaucguguccaccauccagcggaaguacaagggcaucaagauccaggagggggucguggacuacggcgcccgcuucuacuucuacaccagcaagacgaccguggccucccugaucaacacccucaacgaccugaacgagacccuggucacgaugccgcucggguacgugacccacggccugaaccuggaggaggcggcccgguacaugcgcagccucaaggugcccgccaccgucuccgugagcucccccgacgccgugaccgccuacaacggguaccugacgagcuccagcaagacccccgaggagcacuucaucgagaccaucucccuggcgggcagcuacaaggacuggagcuacuccggccagagcacccagcucgggaucgaguuccugaagcggggcgacaaguccgucuacuacacgagcaacccgaccaccuuccaccuggacggggaggugaucaccuucgacaaccucaagacgcugcugucccuccgcgaggugcggaccaucaaggucuucaccaccguggacaacaucaaccugcacacgcagguggucgacaugagcaugaccuacggccagcaguucggccccaccuaccuggacggggccgacgugaccaagaucaagccccacaacucccacgagggcaagacguucuacgugcucccgaacgacgacacccugcgcgucgaggccuucgaguacuaccacaccaccgaccccagcuuccuggggcgguacauguccgcccucaaccacacgaagaacuggaaguacccccaggugaacggccugaccagcaucaagugggccgacaacaacugcuaccuggcgaccgcccuccugacccugcagcagaucgagcucaaguucaaccccccggcccugcaggacgccuacuaccgcgcgcgggccggggaggccgccaacuucugcgcccugauccucgcguacugcaacaagacggugggcgagcugggcgacguccgcgagaccauguccuaccuguuccagcacgccaaccucgacagcugcaagcgggugcugaacgucgugugcaagaccugcgggcagcagcagaccacccugaagggcguggaggccgucauguacauggggacgcucuccuacgagcaguucaagaagggcgugcagauccccugcaccugcgggaagcaggccaccaaguaccuggugcagcaggagagccccuucgucaugauguccgcccccccggcgcaguacgagcugaagcacggcaccuucacgugcgccagcgaguacaccggcaacuaccagugcgggcacuacaagcacaucaccuccaaggagacccucuacugcaucgacggcgcccugcugacgaagagcagcgaguacaaggggcccaucaccgacguguucuacaaggagaacuccuacaccaccacgaucaagcccgugaccuacaagcucgacggcgucgugugcaccgagaucgaccccaagcuggacaacuacuacaagaaggacaacagcuacuucaccgagcagccgaucgaccuggugcccaaccagcccuaccccaacgccuccuucgacaacuucaaguucgucugcgacaacaucaaguucgccgacgaccucaaccagcugacgggguacaagaagccggcgagccgcgagcugaaggugaccuucuuccccgaccucaacggcgacguggucgccaucgacuacaagcacuacacccccuccuucaagaagggcgccaagcugcugcacaagcccaucguguggcacgugaacaacgccaccaacaaggcgacguacaagccgaacaccuggugcauccggugccucuggagcaccaagcccgucgagaccuccaacagcuucgacgugcugaaguccgaggacgcccaggggauggacaaccuggccugcgaggaccucaagcccgugagcgaggaggucguggagaaccccacgauccagaaggacgugcuggagugcaacgucaagaccaccgagguggugggcgacaucauccugaagccggccaacaacucccucaagaucaccgaggaggucgggcacacggaccugauggccgcguacguggacaacagcucccugaccaucaagaagcccaacgagcucagccgcgugcugggccugaagacccucgccacccacgggcuggccgccgucaacuccgugcccugggacacgaucgccaacuacgcgaagccguuccugaacaagguggucagcaccaccaccaacaucgugacgcgcugccucaaccgggugugcaccaacuacaugcccuacuucuucacccugcugcuccagcugugcaccuucacccgcuccacgaacagccggaucaaggccuccaugcccaccaccaucgccaagaacaccgucaagagcgugggcaaguucugccuggaggccagcuucaacuaccucaagucccccaacuucagcaagcugaucaacaucaucaucugguuccugcuccuguccgugugccugggcagccucaucuacuccacggccgcgcuggggguccugaugagcaaccucggcaugccguccuacugcaccggguaccgcgagggcuaccugaacagcaccaacgugaccaucgccacguacugcaccggcuccauccccugcagcgugugccuguccgggcucgacagccuggacaccuaccccucccuggagaccauccagaucacgaucagcuccuucaagugggaccucaccgccuucggccuggucgccgagugguuccuggccuacauccucuucacccgguucuucuacgugcuggggcuggcggccaucaugcagcucuucuucagcuacuucgccgugcacuucaucuccaacagcuggcugauguggcugaucaucaaccugguccagauggcccccaucuccgcgauggugcgcauguacaucuucuucgccagcuucuacuacguguggaagagcuacguccacgugguggacggcugcaacuccagcaccugcaugaugugcuacaagcggaaccgcgccacgcgggucgagugcaccaccaucgugaacgggguccgccgguccuucuacguguacgccaacggcggcaagggguucugcaagcuccacaacuggaacugcgugaacugcgacaccuucugcgccggcagcacguucaucuccgacgaggucgcgcgcgaccugagccugcaguucaagcggccgaucaaccccaccgaccaguccagcuacaucguggacuccgugaccgucaagaacgggagcauccaccucuacuucgacaaggccggccagaagaccuacgagcgccacucccugagccacuucgugaaccuggacaaccuccgggccaacaacacgaaggggucccugcccaucaacgugaucgucuucgacggcaagagcaagugcgaggaguccagcgccaaguccgccagcguguacuacucccagcugaugugccagcccauccuccugcuggaccaggcgcucgugagcgacgucggcgacagcgccgagguggccgugaagauguucgacgccuacgucaacaccuucuccagcaccuucaacgugccgauggagaagcugaagacccugguggccacggcggaggccgagcucgccaagaacgucucccuggacaacgugcugagcaccuucaucuccgccgcgcgccagggguucguggacagcgacgucgagaccaaggacgugguggagugccucaagcugucccaccagagcgacaucgaggucaccggcgacuccugcaacaacuacaugcugacguacaacaagguggagaacaugaccccccgggaccucggggccugcaucgacugcagcgcccgccacaucaacgcccagguggccaagucccacaacaucgcgcugaucuggaacgucaaggacuucaugagccuguccgagcagcuccggaagcagauccgcagcgccgccaagaagaacaaccugcccuucaagcugaccugcgccaccacgcgccagguggugaacgucgugaccaccaagaucgcccucaagggcgggugaggacuaguuauaagacugacuagcccgaugggccucccaacgggcccuccuccccuccuugcaccgagauuaauaaaaaaaaaaaaaaaaaaaaaaaaaaaaaaaaaaaaaaaaaaaaaaaaaaaaaaaaaaaaaaaaugcaucccccccccccccccccccccccccccccccaaaggcucuuuucagagccaccagaauu

SEQ ID NO: 21950 - RNA, 6058 nt, Artificial Sequence
  SARS-CoV-2__MT459849.1__non-structural protein 3 (NSP3) mRNA gc
aggagaaagcuuaccauggcccccaccaaggugaccuucggcgacgacacggucaucgaggugcagggguacaagagcgugaacaucaccuucgagcuggacgagcgcaucgacaagguccucaacgagaagugcuccgccuacaccguggagcugggcaccgaggugaacgaguucgcgugcgucguggccgacgccgugaucaagacgcugcagccggucagcgagcuccugaccccccuggggaucgaccucgacgagugguccauggccaccuacuaccuguucgacgagagcggcgaguucaagcuggccucccacauguacugcagcuucuacccccccgacgaggacgaggaggagggggacugcgaggaggaggaguucgagccguccacccaguacgaguacggcacggaggacgacuaccagggcaagccccucgaguucggggcgaccagcgccgcccugcagcccgaggaggagcaggaggaggacuggcuggacgacgacucccagcagaccgugggccagcaggacgggagcgaggacaaccagaccacgaccauccagaccaucguggagguccagccccagcucgagauggagcugaccccgguggugcagacgaucgaggucaacuccuucagcggcuaccugaagcucaccgacaacguguacaucaagaacgccgacaucguggaggaggcgaagaaggucaagcccaccgugguggucaacgccgccaacguguaccugaagcacgggggcggcguggccggggcccugaacaaggcgaccaacaacgccaugcaggucgaguccgacgacuacaucgccacgaacggcccccucaagguggggggcagcugcguccuguccggccacaaccuggccaagcacugccuccacgugguggggcccaacgucaacaagggcgaggacauccagcugcugaagagcgccuacgagaacuucaaccagcacgaggugcuccuggcgccgcugcucuccgccgggaucuucggcgccgaccccauccacagccugcgggugugcgucgacaccgugcgcaccaacguguaccuggccgucuucgacaagaaccucuacgacaagcugguguccagcuuccuggagaugaagagcgagaagcagguggagcagaagaucgccgagauccccaaggaggaggucaagcccuucaucaccgaguccaagccgagcguggagcagcggaagcaggacgacaagaagaucaaggcgugcguggaggaggucacgaccacccucgaggagaccaaguuccugacggagaaccugcuccuguacaucgacaucaacgggaaccugcaccccgacuccgccacccucgugagcgacaucgacaucaccuuccugaagaaggacgcccccuacaucgugggcgacgucgugcaggagggcgugcugaccgccgucgugauccccacgaagaaggccgggggcaccaccgagaugcucgcgaaggcccugcgcaaggugccgaccgacaacuacaucacgaccuaccccgggcagggccugaacggguacaccgucgaggaggccaagaccgugcucaagaagugcaaguccgccuucuacauccugcccagcaucaucuccaacgagaagcaggagauccugggcaccgugagcuggaaccuccgggagaugcuggcgcacgccgaggagacgcgcaagcugaugcccgucugcguggagaccaaggccaucguguccaccauccagcggaaguacaagggcaucaagauccaggagggggucguggacuacggcgcccgcuucuacuucuacaccagcaagacgaccguggccucccugaucaacacccucaacgaccugaacgagacccuggucacgaugccgcucggguacgugacccacggccugaaccuggaggaggcggcccgguacaugcgcagccucaaggugcccgccaccgucuccgugagcucccccgacgccgugaccgccuacaacggguaccugacgagcuccagcaagacccccgaggagcacuucaucgagaccaucucccuggcgggcagcuacaaggacuggagcuacuccggccagagcacccagcucgggaucgaguuccugaagcggggcgacaaguccgucuacuacacgagcaacccgaccaccuuccaccuggacggggaggugaucaccuucgacaaccucaagacgcugcugucccuccgcgaggugcggaccaucaaggucuucaccaccguggacaacaucaaccugcacacgcagguggucgacaugagcaugaccuacggccagcaguucggccccaccuaccuggacggggccgacgugaccaagaucaagccccacaacucccacgagggcaagacguucuacgugcucccgaacgacgacacccugcgcgucgaggccuucgaguacuaccacaccaccgaccccagcuuccuggggcgguacauguccgcccucaaccacacgaagaaguggaaguacccccaggugaacggccugaccagcaucaagugggccgacaacaacugcuaccuggcgaccgcccuccugacccugcagcagaucgagcucaaguucaaccccccggcccugcaggacgccuacuaccgcgcgcgggccggggaggccgccaacuucugcgcccugauccucgcguacugcaacaagacggugggcgagcugggcgacguccgcgagaccauguccuaccuguuccagcacgccaaccucgacagcugcaagcgggugcugaacgucgugugcaagaccugcgggcagcagcagaccacccugaagggcguggaggccgucauguacauggggacgcucuccuacgagcaguucaagaagggcgugcagauccccugcaccugcgggaagcaggccaccaaguaccuggugcagcaggagagccccuucgucaugauguccgcccccccggcgcaguacgagcugaagcacggcaccuucacgugcgccagcgaguacaccggcaacuaccagugcgggcacuacaagcacaucaccuccaaggagacccucuacugcaucgacggcgcccugcugacgaagagcagcgaguacaaggggcccaucaccgacguguucuacaaggagaacuccuacaccaccacgaucaagcccgugaccuacaagcucgacggcgucgugugcaccgagaucgaccccaagcuggacaacuacuacaagaaggacaacagcuacuucaccgagcagccgaucgaccuggugcccaaccagcccuaccccaacgccuccuucgacaacuucaaguucgucugcgacaacaucaaguucgccgacgaccucaaccagcugacgggguacaagaagccggcgagccgcgagcugaaggugaccuucuuccccgaccucaacggcgacguggucgccaucgacuacaagcacuacacccccuccuucaagaagggcgccaagcugcugcacaagcccaucguguggcacgugaacaacgccaccaacaaggcgacguacaagccgaacaccuggugcauccggugccucuggagccgcaagcccgucgagaccuccaacagcuucgacgugcugaaguccgaggacgcccaggggauggacaaccuggccugcgaggaccucaagcccgugagcgaggaggucguggagaaccccaccauccagaaggacgugcuggagugcaacgucaagacgaccgagguggugggcgacaucauccugaagccggccaacaacucccucaagaucaccgaggaggucgggcacaccgaccugauggccgcguacguggacaacagcucccugacgaucaagaagcccaacgagcucagccgcgugcugggccugaagacccucgccacccacgggcuggccgccgucaacuccgugcccugggacaccaucgccaacuacgcgaagccguuccugaacaagguggucagcacgaccaccaacaucgugacccggugccucaaccgcgugugcacgaacuacaugcccuacuucuucacccugcugcuccagcugugcaccuucacccgguccaccaacagccgcaucaaggccuccaugcccacgaccaucgccaagaacaccgucaagagcgugggcaaguucugccuggaggccagcuucaacuaccucaagucccccaacuucagcaagcugaucaacaucaucaucugguuccugcuccuguccgugugccugggcagccucaucuacuccaccgccgcgcuggggguccugaugagcaaccucggcaugccguccuacugcacgggguaccgggagggcuaccugaacagcaccaacgugaccaucgccaccuacugcacgggcuccauccccugcagcgugugccuguccgggcucgacagccuggacaccuaccccucccuggagaccauccagaucaccaucagcuccuucaagugggaccucacggccuucggccuggucgccgagugguuccuggccuacauccucuucacccgcuucuucuacgugcuggggcuggcggccaucaugcagcucuucuucagcuacuucgccgugcacuucaucuccaacagcuggcugauguggcugaucaucaaccugguccagauggcccccaucuccgcgauggugcggauguacaucuucuucgccagcuucuacuacguguggaagagcuacguccacgugguggacggcugcaacuccagcaccugcaugaugugcuacaagcgcaaccgggccacccgcgucgagugcacgaccaucgugaacgggguccggcgcuccuucuacguguacgccaacggcggcaagggguucugcaagcuccacaacuggaacugcgugaacugcgacaccuucugcgccggcagcaccuucaucuccgacgaggucgcgcgggaccugagccugcaguucaagcgcccgaucaaccccacggaccaguccagcuacaucguggacuccgugaccgucaagaacgggagcauccaccucuacuucgacaaggccggccagaagaccuacgagcggcacucccugagccacuucgugaaccuggacaaccuccgcgccaacaacaccaaggggucccugcccaucaacgugaucgucuucgacggcaagagcaagugcgaggaguccagcgccaaguccgccagcguguacuacucccagcugaugugccagcccauccuccugcuggaccaggcgcucgugagcgacgucggcgacagcgccgagguggccgugaagauguucgacgccuacgucaacacguucuccagcaccuucaacgugccgauggagaagcugaagacccugguggccaccgcggaggccgagcucgccaagaacgucucccuggacaacgugcugagcacguucaucuccgccgcgcggcagggguucguggacagcgacgucgagaccaaggacgugguggagugccucaagcugucccaccagagcgacaucgaggucaccggcgacuccugcaacaacuacaugcugaccuacaacaagguggagaacaugacgccccgcgaccucggggccugcaucgacugcagcgcccggcacaucaacgcccagguggccaagucccacaacaucgcgcugaucuggaacgucaaggacuucaugagccuguccgagcagcuccgcaagcagauccgcagcgccgccaagaagaacaaccugcccuucaagcugaccugcgccaccacccggcagguggugaacgucgugacgaccaagaucgcccucaagggcgggugaggacuaguuauaagacugacuagcccgaugggccucccaacgggcccuccuccccuccuugcaccgagauuaauaaaaaaaaaaaaaaaaaaaaaaaaaaaaaaaaaaaaaaaaaaaaaaaaaaaaaaaaaaaaaaaaugcaucccccccccccccccccccccccccccccccaaaggcucuuuucagagccaccagaauu

SEQ ID NO: 21951 - RNA, 6058 nt, Artificial Sequence
  SARS-CoV-2__MT459923.1__non-structural protein 3 (NSP3) mRNA gc
aggagaaagcuuaccauggcccccaccaaggugaccuucggcgacgacacggucaucgaggugcagggguacaagagcgugaacaucaccuucgagcuggacgagcgcaucgacaagguccucaacgagaagugcuccgccuacaccguggagcugggcaccgaggugaacgaguucgcgugcgucguggccgacgccgugaucaagacgcugcagccggucagcgagcuccugaccccccuggggaucgaccucgacgagugguccauggccaccuacuaccuguucgacgagagcggcgaguucaagcuggccucccacauguacugcagcuucuacccccccgacgaggacgaggaggagggggacugcgaggaggaggaguucgagccguccacccaguacgaguacggcacggaggacgacuaccagggcaagccccucgaguucggggcgaccagcgccgcccugcagcccgaggaggagcaggaggaggacuggcuggacgacgacucccagcagaccgugggccagcaggacgggagcgaggacaaccagaccacgaccauccagaccaucguggagguccagccccagcucgagauggagcugaccccgguggugcagacgaucgaggucaacuccuucagcggcuaccugaagcucaccgacaacguguacaucaagaacgccgacaucguggaggaggcgaagaaggucaagcccaccgugguggucaacgccgccaacguguaccugaagcacgggggcggcguggccggggcccugaacaaggcgaccaacaacgccaugcaggucgaguccgacgacuacaucgccacgaacggcccccucaagguggggggcagcugcguccuguccggccacaaccuggccaagcacugccuccacgugguggggcccaacgucaacaagggcgaggacauccagcugcugaagagcgccuacgagaacuucaaccagcacgaggugcuccuggcgccgcugcucuccgccgggaucuucggcgccgaccccauccacagccugcgggugugcgucgacaccgugcgcaccaacguguaccuggccgucuucgacaagaaccucuacgacaagcugguguccagcuuccuggagaugaagagcgagaagcagguggagcagaagaucgccgagauccccaaggaggaggucaagcccuucaucaccgaguccaagccgagcguggagcagcggaagcaggacgacaagaagaucaaggcgugcguggaggaggucacgaccacccucgaggagaccaaguuccugacggagaaccugcuccuguacaucgacaucaacgggaaccugcaccccgacuccgccacccucgugagcgacaucgacaucaccuuccugaagaaggacgcccccuacaucgugggcgacgucgugcaggagggcgugcugaccgccgucgugauccccacgaagaaggccgggggcaccaccgagaugcucgcgaaggcccugcgcaaggugccgaccgacaacuacaucacgaccuaccccgggcagggccugaacggguacaccgucgaggaggccaagaccgugcucaagaagugcaaguccgccuucuacauccugcccagcaucaucuccaacgagaagcaggagauccugggcaccgugagcuggaaccuccgggagaugcuggcgcacgccgaggagacgcgcaagcugaugcccgucugcguggagaccaaggccaucguguccaccauccagcggaaguacaagggcaucaagauccaggagggggucguggacuacggcgcccgcuucuacuucuacaccagcaagacgaccguggccucccugaucaacacccucaacgaccugaacgagacccuggucacgaugccgcucggguacgugacccacggccugaaccuggaggaggcggcccgguacaugcgcagccucaaggugcccgccaccgucuccgugagcucccccgacgccgugaccgccuacaacggguaccugacgagcuccagcaagacccccgaggagcacuucaucgagaccaucucccuggcgggcagcuacaaggacuggagcuacuccggccagagcacccagcucgggaucgaguuccugaagcggggcgacaaguccgucuacuacacgagcaacccgaccaccuuccaccuggacggggaggugaucaccuucgacaaccucaagacgcugcugucccuccgcgaggugcggaccaucaaggucuucaccaccguggacaacaucaaccugcacacgcagguggucgacaugagcaugaccuacggccagcaguucggccccaccuaccuggacggggccgacgugaccaagaucaagccccacaacucccacgagggcaagacguucuacgugcucccgaacgacgacacccugcgcgucgaggccuucgaguacuaccacaccaccgaccccagcuuccuggggcgguacauguccgcccucaaccacacgaagaaguggaaguacccccaggugaacggccugaccagcaucaagugggccgacaacaacugcuaccuggcgaccgcccuccugacccugcagcagaucgagcucaaguucaaccccccggcccugcaggacgccuacuaccgcgcgcgggccggggaggccgccaacuucugcgcccugauccucgcguacugcaacaagacggugggcgagcugggcgacguccgcgagaccauguccuaccuguuccagcacgccaaccucgacagcugcaagcgggugcugaacgucgugugcaagaccugcgggcagcagcagaccacccugaagggcguggaggccgucauguacauggggacgcucuccuacgagcaguucaagaagggcgugcagauccccugcaccugcgggaagcaggccaccaaguaccuggugcagcaggagagccccuucgucaugauguccgcccccccggcgcaguacgagcugaagcacggcaccuucacgugcgccagcgaguacaccggcaacuaccagugcgggcacuacaagcacaucaccuccaaggagacccucuacugcaucgacggcgcccugcugacgaagagcagcggguacaagggccccaucaccgacguguucuacaaggagaacuccuacaccaccacgaucaagcccgugaccuacaagcucgacggggucgugugcaccgagaucgaccccaagcuggacaacuacuacaagaaggacaacagcuacuucaccgagcagccgaucgaccuggugcccaaccagcccuaccccaacgccuccuucgacaacuucaaguucgucugcgacaacaucaaguucgccgacgaccucaaccagcugacgggcuacaagaagccggcgagccgcgagcugaaggugaccuucuuccccgaccucaacggcgacguggucgccaucgacuacaagcacuacacccccuccuucaagaagggggccaagcugcugcacaagcccaucguguggcacgugaacaacgccaccaacaaggcgacguacaagccgaacaccuggugcauccggugccucuggagcaccaagcccgucgagaccuccaacagcuucgacgugcugaaguccgaggacgcccagggcauggacaaccuggccugcgaggaccucaagcccgugagcgaggaggucguggagaaccccacgauccagaaggacgugcuggagugcaacgucaagaccaccgagguggugggggacaucauccugaagccggccaacaacucccucaagaucaccgaggaggucggccacacggaccugauggccgcguacguggacaacagcucccugaccaucaagaagcccaacgagcucagccgcgugcuggggcugaagacccucgccacccacggccuggccgccgucaacuccgugcccugggacacgaucgccaacuacgcgaagccguuccugaacaagguggucagcaccaccaccaacaucgugacgcgcugccucaaccgggugugcaccaacuacaugcccuacuucuucacccugcugcuccagcugugcaccuucacccgcuccacgaacagccggaucaaggccuccaugcccaccaccaucgccaagaacaccgucaagagcgugggcaaguucugccuggaggccagcuucaacuaccucaagucccccaacuucagcaagcugaucaacaucaucaucugguuccugcuccuguccgugugccuggggagccucaucuacuccacggccgcgcugggcguccugaugagcaaccucgggaugccguccuacugcaccggcuaccgcgagggcuaccugaacagcaccaacgugaccaucgccacguacugcaccggguccauccccugcagcgugugccuguccggccucgacagccuggacaccuaccccucccuggagaccauccagaucacgaucagcuccuucaagugggaccucaccgccuucgggcuggucgccgagugguuccuggccuacauccucuucacccgguucuucuacgugcugggccuggcggccaucaugcagcucuucuucagcuacuucgccgugcacuucaucuccaacagcuggcugauguggcugaucaucaaccugguccagauggcccccaucuccgcgauggugcgcauguacaucuucuucgccagcuucuacuacguguggaagagcuacguccacgugguggacgggugcaacuccagcaccugcaugaugugcuacaagcggaaccgcgccacgcgggucgagugcaccaccaucgugaacggcguccgccgguccuucuacguguacgccaacggcgggaagggcuucugcaagcuccacaacuggaacugcgugaacugcgacaccuucugcgccgggagcacguucaucuccgacgaggucgcgcgcgaccugagccugcaguucaagcggccgaucaaccccaccgaccaguccagcuacaucguggacuccgugaccgucaagaacggcagcauccaccucuacuucgacaaggccgggcagaagaccuacgagcgccacucccugagccacuucgugaaccuggacaaccuccgggccaacaacacgaagggcucccugcccaucaacgugaucgucuucgacggcaagagcaagugcgaggaguccagcgccaaguccgccagcguguacuacucccagcugaugugccagcccauccuccugcuggaccaggcgcucgugagcgacgucggggacagcgccgagguggccgugaagauguucgacgccuacgucaacaccuucuccagcaccuucaacgugccgauggagaagcugaagacccugguggccacggcgggcgccgagcucgccaagaacgucucccuggacaacgugcugagcaccuucaucuccgccgcgcgccagggguucguggacagcgacgucgagaccaaggacgugguggagugccucaagcugucccaccagagcgacaucgaggucaccggcgacuccugcaacaacuacaugcugacguacaacaagguggagaacaugaccccccgggaccucggggccugcaucgacugcagcgcccgccacaucaacgcccagguggccaagucccacaacaucgcgcugaucuggaacgucaaggacuucaugagccuguccgagcagcuccggaagcagauccgcagcgccgccaagaagaacaaccugcccuucaagcugaccugcgccaccacgcgccagguggugaacgucgugaccaccaagaucgcccucaagggcggcugaggacuaguuauaagacugacuagcccgaugggccucccaacgggcccuccuccccuccuugcaccgagauuaauaaaaaaaaaaaaaaaaaaaaaaaaaaaaaaaaaaaaaaaaaaaaaaaaaaaaaaaaaaaaaaaaugcaucccccccccccccccccccccccccccccccaaaggcucuuuucagagccaccagaauu

SEQ ID NO: 21952 - RNA, 6058 nt, Artificial Sequence
  SARS-CoV-2__MT461613.1__non-structural protein 3 (NSP3) mRNA gc
aggagaaagcuuaccauggcccccaccaaggugaccuucggcgacgacacggucaucgaggugcagggguacaagagcgugaacaucaccuucgagcuggacgagcgcaucgacaagguccucaacgagaagugcuccgccuacaccguggagcugggcaccgaggugaacgaguucgcgugcgucguggccgacgccgugaucaagacgcugcagccggucagcgagcuccugaccccccuggggaucgaccucgacgagugguccauggccaccuacuaccuguucgacgagagcggcgaguucaagcuggccucccacauguacugcagcuucuacccccccgacgaggacgaggaggagggggacugcgaggaggaggaguucgagccguccacccaguacgaguacggcacggaggacgacuaccagggcaagccccucgaguucggggcgaccagcgccgcccugcagcccgaggaggagcaggaggaggacuggcuggacgacgacucccagcagaccgugggccagcaggacgggagcgaggacaaccagaccacgaccauccagaccaucguggagguccagccccagcucgagauggagcugaccccgguggugcagacgaucgaggucaacuccuucagcggcuaccugaagcucaccgacaacguguacaucaagaacgccgacaucguggaggaggcgaagaaggucaagcccaccgugguggucaacgccgccaacguguaccugaagcacgggggcggcguggccggggcccugaacaaggcgaccaacaacgccaugcaggucgaguccgacgacuacaucgccacgaacggcccccuccggguggggggcagcugcguccuguccggccacaaccuggccaagcacugccuccacgugguggggcccaacgucaacaagggcgaggacauccagcugcugaagagcgccuacgagaacuucaaccagcacgaggugcuccuggcgccgcugcucuccgccgggaucuucggcgccgaccccauccacagccugcgcgugugcgucgacaccgugcggaccaacguguaccuggccgucuucgacaagaaccucuacgacaagcugguguccagcuuccuggagaugaagagcgagaagcagguggagcagaagaucgccgagauccccaaggaggaggucaagcccuucaucaccgaguccaagccgagcguggagcagcgcaagcaggacgacaagaagaucaaggcgugcguggaggaggucacgaccacccucgaggagaccaaguuccugacggagaaccugcuccuguacaucgacaucaacgggaaccugcaccccgacuccgccacccucgugagcgacaucgacaucaccuuccugaagaaggacgcccccuacaucgugggcgacgucgugcaggagggcgugcugaccgccgucgugauccccacgaagaaggccgggggcaccaccgagaugcucgcgaaggcccugcggaaggugccgaccgacaacuacaucacgaccuaccccgggcagggccugaacggguacaccgucgaggaggccaagaccgugcucaagaagugcaaguccgccuucuacauccugcccagcaucaucuccaacgagaagcaggagauccugggcaccgugagcuggaaccuccgcgagaugcuggcgcacgccgaggagacgcggaagcugaugcccgucugcguggagaccaaggccaucguguccaccauccagcgcaaguacaagggcaucaagauccaggagggggucguggacuacggcgcccgguucuacuucuacaccagcaagacgaccguggccucccugaucaacacccucaacgaccugaacgagacccuggucacgaugccgcucggguacgugacccacggccugaaccuggaggaggcggcccgcuacaugcggagccucaaggugcccgccaccgucuccgugagcucccccgacgccgugaccgccuacaacggguaccugacgagcuccagcaagacccccgaggagcacuucaucgagaccaucucccuggcgggcagcuacaaggacuggagcuacuccggccagagcacccagcucgggaucgaguuccugaagcgcggcgacaaguccgucuacuacacgagcaacccgaccaccuuccaccuggacggggaggugaucaccuucgacaaccucaagacgcugcugucccuccgggaggugcgcaccaucaaggucuucaccaccguggacaacaucaaccugcacacgcagguggucgacaugagcaugaccuacggccagcaguucggccccaccuaccuggacggggccgacgugaccaagaucaagccccacaacucccacgagggcaagacguucuacgugcucccgaacgacgacacccugcgggucgaggccuucgaguacuaccacaccaccgaccccagcuuccuggggcgcuacauguccgcccucaaccacacgaagaaguggaaguacccccaggugaacggccugaccagcaucaagugggccgacaacaacugcuaccuggcgaccgcccuccugacccugcagcagaucgagcucaaguucaaccccccggcccugcaggacgccuacuaccgggcgcgcgccggggaggccgccaacuucugcgcccugauccucgcguacugcaacaagacggugggcgagcugggcgacguccgggagaccauguccuaccuguuccagcacgccaaccucgacagcugcaagcgcgugcugaacgucgugugcaagaccugcgggcagcagcagaccacccugaagggcguggaggccgucauguacauggggacgcucuccuacgagcaguucaagaagggcgugcagauccccugcaccugcgggaagcaggccaccaaguaccuggugcagcaggagagccccuucgucaugauguccgcccccccggcgcaguacgagcugaagcacggcaccuucacgugcgccagcgaguacaccggcaacuaccagugcgggcacuacaagcacaucaccuccaaggagacccucuacugcaucgacggcgcccugcugacgaagagcagcgaguacaaggggcccaucaccgacguguucuacaaggagaacuccuacaccaccacgaucaagcccgugaccuacaagcucgacggcgucgugugcaccgagaucgaccccaagcuggacaacuacuacaagaaggacaacagcuacuucaccgagcagccgaucgaccuggugcccaaccagcccuaccccaacgccuccuucgacaacuucaaguucgucugcgacaacaucaaguucgccgacgaccucaaccagcugacgggguacaagaagccggcgagccgggagcugaaggugaccuucuuccccgaccucaacggcgacguggucgccaucgacuacaagcacuacacccccuccuucaagaagggcgccaagcugcugcacaagcccaucguguggcacgugaacaacgccaccaacaaggcgacguacaagccgaacaccuggugcauccgcugccucuggagcaccaagcccgucgagaccuccaacagcuucgacgugcugaaguccgaggacgcccaggggauggacaaccuggccugcgaggaccucaagcccgugagcgaggaggucguggagaaccccacgauccagaaggacgugcuggagugcaacgucaagaccaccgagguggugggcgacaucauccugaagccggccaacaacucccucaagaucaccgaggaggucgggcacacggaccugauggccgcguacguggacaacagcucccugaccaucaagaagcccaacgagcucagccgcgugcugggccugaagacccucgccacccacgggcuggccgccgucaacuccgugcccugggacacgaucgccaacuacgcgcggccguuccugaacaagguggucagcaccaccaccaacaucgugacgcgcugccucaaccgggugugcaccaacuacaugcccuacuucuucacccugcugcuccagcugugcaccuucacccgcuccacgaacagccggaucaaggccuccaugcccaccaccaucgccaagaacaccgucaagagcgugggcaaguucugccuggaggccagcuucaacuaccucaagucccccaacuucagcaagcugaucaacaucaucaucugguuccugcuccuguccgugugccugggcagccucaucuacuccacggccgcgcuggggguccugaugagcaaccucggcaugccguccuacugcaccggguaccgcgagggcuaccugaacagcaccaacgugaccaucgccacguacugcaccggcuccauccccugcagcgugugccuguccgggcucgacagccuggacaccuaccccucccuggagaccauccagaucacgaucagcuccuucaagugggaccucaccgccuucggccuggucgccgagugguuccuggccuacauccucuucacccgguucuucuacgugcuggggcuggcggccaucaugcagcucuucuucagcuacuucgccgugcacuucaucuccaacagcuggcugauguggcugaucaucaaccugguccagauggcccccaucuccgcgauggugcgcauguacaucuucuucgccagcuucuacuacguguggaagagcuacguccacgugguggacggcugcaacuccagcaccugcaugaugugcuacaagcggaaccgcgccacgcgggucgagugcaccaccaucgugaacgggguccgccgguccuucuacguguacgccaacggcggcaagggguucugcaagcuccacaacuggaacugcgugaacugcgacaccuucugcgccggcagcacguucaucuccgacgaggucgcgcgcgaccugagccugcaguucaagcggccgaucaaccccaccgaccaguccagcuacaucguggacuccgugaccgucaagaacgggagcauccaccucuacuucgacaaggccggccagaagaccuacgagcgccacucccugagccacuucgugaaccuggacaaccuccgggccaacaacacgaaggggucccugcccaucaacgugaucgucuucgacggcaagagcaagugcgaggaguccagcgccaaguccgccagcguguacuacucccagcugaugugccagcccauccuccugcuggaccaggcgcucgugagcgacgucggcgacagcgccgagguggccgugaagauguucgacgccuacgucaacaccuucuccagcaccuucaacgugccgauggagaagcugaagacccugguggccacggcggaggccgagcucgccaagaacgucucccuggacaacgugcugagcaccuucaucuccgccgcgcgccagggguucguggacagcgacgucgagaccaaggacgugguggagugccucaagcugucccaccagagcgacaucgaggucaccggcgacuccugcaacaacuacaugcugacguacaacaagguggagaacaugaccccccgggaccucggggccugcaucgacugcagcgcccgccacaucaacgcccagguggccaagucccacaacaucgcgcugaucuggaacgucaaggacuucaugagccuguccgagcagcuccgcaagcagauccggagcgccgccaagaagaacaaccugcccuucaagcugaccugcgccaccacgcgccagguggugaacgucgugaccaccaagaucgcccucaagggcgggugaggacuaguuauaagacugacuagcccgaugggccucccaacgggcccuccuccccuccuugcaccgagauuaauaaaaaaaaaaaaaaaaaaaaaaaaaaaaaaaaaaaaaaaaaaaaaaaaaaaaaaaaaaaaaaaaugcaucccccccccccccccccccccccccccccccaaaggcucuuuucagagccaccagaauu

SEQ ID NO: 21953 - RNA, 6058 nt, Artificial Sequence
  SARS-CoV-2__MT461614.1__non-structural protein 3 (NSP3) mRNA gc
aggagaaagcuuaccauggcccccaccaaggugaccuucggcgacgacacggucaucgaggugcagggguacaagagcgugaacaucaccuucgagcuggacgagcgcaucgacaagguccucaacgagaagugcuccgccuacaccguggagcugggcaccgaggugaacgaguucgcgugcgucguggccgacgccgugaucaagacgcugcagccggucagcgagcuccugaccccccuggggaucgaccucgacgagugguccauggccaccuacuaccuguucgacgagagcggcgaguucaagcuggccucccacauguacugcagcuucuacccccccgacgaggacgaggaggagggggacugcgaggaggaggaguucgagccguccacccaguacgaguacggcacggaggacgacuaccagggcaagccccucgaguucggggcgaccagcgccgcccugcagcccgaggaggagcaggaggaggacuggcuggacgacgacucccagcagaccgugggccagcaggacgggagcgaggacaaccagaccacgaccauccagaccaucguggagguccagccccagcucgagauggagcugaccccgguggugcagacgaucgaggucaacuccuucagcggcuaccugaagcucaccgacaacguguacaucaagaacgccgacaucguggaggaggcgaagaaggucaagcccaccgugguggucaacgccgccaacguguaccugaagcacgggggcggcguggccggggcccugaacaaggcgaccaacaacgccaugcaggucgaguccgacgacuacaucgccacgaacggcccccucaagguggggggcagcugcguccuguccggccacaaccuggccaagcacugccuccacgugguggggcccaacgucaacaagggcgaggacauccagcugcugaagagcgccuacgagaacuucaaccagcacgaggugcuccuggcgccgcugcucuccgccgggaucuucggcgccgaccccauccacagccugcgggugugcgucgacaccgugcgcaccaacguguaccuggccgucuucgacaagaaccucuacgacaagcugguguccagcuuccuggagaugaagagcgagaagcagguggagcagaagaucgccgagauccccaaggaggaggucaagcccuucaucaccgaguccaagccgagcguggagcagcggaagcaggacgacaagaagaucaaggcgugcguggaggaggucacgaccacccucgaggagaccaaguuccugacggagaaccugcuccuguacaucgacaucaacgggaaccugcaccccgacuccgccacccucgugagcgacaucgacaucaccuuccugaagaaggacgcccccuacaucgugggcgacgucgugcaggagggcgugcugaccgccgucgugauccccacgaagaaggccgggggcaccaccgagaugcucgcgaaggcccugcgcaaggugccgaccgacaacuacaucacgaccuaccccgggcagggccugaacggguacaccgucgaggaggccaagaccgugcucaagaagugcaaguccgccuucuacauccugcccagcaucaucuccaacgagaagcaggagauccugggcaccgugagcuggaaccuccgggagaugcuggcgcacgccgaggagacgcgcaagcugaugcccgucugcguggagaccaaggccaucguguccaccauccagcggaaguacaagggcaucaagauccaggagggggucguggacuacggcgcccgcuucuacuucuacaccagcaagacgaccguggccucccugaucaacacccucaacgaccugaacgagacccuggucacgaugccgcucggguacgugacccacggccugaaccuggaggaggcggcccgguacaugcgcagccucaaggugcccgccaccgucuccgugagcucccccgacgccgugaccgccuacaacggguaccugacgagcuccagcaagacccccgaggagcacuucaucgagaccaucucccuggcgggcagcuacaaggacuggagcuacuccggccagagcacccagcucgggaucgaguuccugaagcggggcgacaaguccgucuacuacacgagcaacccgaccaccuuccaccuggacggggaggugaucaccuucgacaaccucaagacgcugcugucccuccgcgaggugcggaccaucaaggucuucaccaccguggacaacaucaaccugcacacgcagguggucgacaugagcaugaccuacggccagcaguucggccccaccuaccuggacggggccgacgugaccaagaucaagccccacaacucccacgagggcaagacguucuacgugcucccgaacgacgacacccugcgcgucgaggccuucgaguacuaccacaccaccgaccccagcuuccuggggcgguacauguccgcccucaaccacacgaagaaguggaaguacccccaggugaacggccugaccagcaucaagugggccgacaacaacugcuaccuggcgaccgcccuccugacccugcagcagaucgagcucaaguucaaccccccggcccugcaggacgccuacuaccgcgcgcgggccggggaggccgccaacuucugcgcccugauccucgcguacugcaacaagacggugggcgagcugggcgacguccgcgagaccauguccuaccuguuccagcacgccaaccucgacagcugcaagcgggugcugaacgucgugugcaagaccugcgggcagcagcagaccacccugaagggcguggaggccgucauguacauggggacgcucuccuacgagcaguucaagaagggcgugcagauccccugcaccugcgggaagcaggccaccaaguaccuggugcagcaggagagccccuucgucaugauguccgcccccccggcgcaguacgagcugaagcacggcaccuucacgugcgccagcgaguacaccggcaacuaccagugcgggcacuacaagcacaucaccuccaaggagacccucuacugcaucgacggcgcccugcugacgaagagcagcgaguacaaggggcccaucaccgacguguucuacaaggagaacuccuacaccaccacgaucaagcccgugaccuacaagcucgacggcgucgugugcaccgagaucgaccccaagcuggacaacuacuacaagaaggacaacagcuacuucaccgagcagccgaucgaccuggugcccaaccagcccuaccccaacgccuccuucgacaacuucaaguucgucugcgacaacaucaaguucgccgacgaccucaaccagcugacgggguacaagaagccggcgagccgcgagcugaaggugaccuucuuccccgaccucaacggcgacguggucgccaucgacuacaagcacuacacccccuccuucaagaagggcgccaagcugcugcacaagcccaucguguggcacgugaacaacgccaccaacaaggcgacguacaagccgaacaccuggugcauccggugccucuggagcaccaagcccgucgagaccuccaacagcuucgacgugcugaaguccgaggacgcccaggggauggacaaccuggccugcgaggaccucaagcccgugagcgaggaggucguggagaaccccacgauccagaaggacgugcuggagugcaacgucaagaccaccgagguggugggcgacaucauccugaagccggccaacaacucccucaagaucaccgaggaggucgggcacacggaccugauggccgcguacguggacaacagcucccugaccaucaagaagcccaacgagcucagccgcgugcugggccugaagacccucgccacccacgggcuggccgccgucaacuccgugcccugggacacgaucgccaacuacgcgaagccguuccugaacaagguggucagcaccaccaccaacaucgugacgcgcugccucaaccgggugugcaccaacuacaugcccuacuucuucacccugcugcuccagcugugcaccuucacccgcuccacgaacagccggaucaaggccuccaugcccaccaccaucgccaagaacaccgucaagagcgugggcaaguucugccuggaggccagcuucaacuaccucaagucccccaacuucagcaagcugaucaacaucaucaucugguuccugcuccuguccgugugccugggcagccucaucuacuccacggccgcgcuggggguccugaugagcaaccucggcaugccguccuacugcaccggguaccgcgagggcuaccugaacagcaccaacgugaccaucgccacguacugcaccggcuccauccccugcagcgugugccuguccgggcucgacagccuggacaccuaccccucccuggagaccauccagaucacgaucagcuccuucaagugggaccucaccgccuucggccuggucgccgagugguuccuggccuacauccucuucacccgguucuucuacgugcuggggcuggcggccaucaugcagcucuucuucagcuacuucgccgugcacuucaucuccaacagcuggcugauguggcugaucaucaaccugguccagauggcccccaucuccgcgauggugcgcauguacaucuucuucgccagcuucuacuacguguggaagagcuacguccacgugguggacggcugcaacuccagcaccugcaugaugugcuacaagcggaaccgcgccacgcgggucgagugcaccaccaucgugaacgggguccgccgguccuucuacguguacgccaacggcggcaagggguucugcaagcuccacaacuggaacugcgugaacugcgacaccuucugcgccggcagcacguucaucuccgacgaggucgcgcgcgaccugagccugcaguucaagcggccgaucaaccccaccgaccaguccuacuacaucguggacagcgugaccgucaagaacggguccauccaccucuacuucgacaaggccggccagaagaccuacgagcgccacagccugucccacuucgugaaccuggacaaccuccgggccaacaacacgaaggggagccugcccaucaacgugaucgucuucgacggcaaguccaagugcgaggagagcuccgccaagagcgccuccguguacuacagccagcugaugugccagcccauccuccugcuggaccaggcgcucguguccgacgucggcgacagcgccgagguggccgugaagauguucgacgccuacgucaacaccuucagcuccaccuucaacgugccgauggagaagcugaagacccugguggccacggcggaggccgagcucgccaagaacgucagccuggacaacgugcuguccaccuucaucagcgccgcgcgccagggguucguggacuccgacgucgagaccaaggacgugguggagugccucaagcugagccaccaguccgacaucgaggucaccggcgacagcugcaacaacuacaugcugacguacaacaagguggagaacaugaccccccgggaccucggggccugcaucgacugcuccgcccgccacaucaacgcccagguggccaagagccacaacaucgcgcugaucuggaacgucaaggacuucaugucccugagcgagcagcuccggaagcagauccgcuccgccgccaagaagaacaaccugcccuucaagcugaccugcgccaccacgcgccagguggugaacgucgugaccaccaagaucgcccucaagggcgggugaggacuaguuauaagacugacuagcccgaugggccucccaacgggcccuccuccccuccuugcaccgagauuaauaaaaaaaaaaaaaaaaaaaaaaaaaaaaaaaaaaaaaaaaaaaaaaaaaaaaaaaaaaaaaaaaugcaucccccccccccccccccccccccccccccccaaaggcucuuuucagagccaccagaauu

SEQ ID NO: 21954 - RNA, 6058 nt, Artificial Sequence
  SARS-CoV-2__MT461625.1__non-structural protein 3 (NSP3) mRNA gc
aggagaaagcuuaccauggcccccaccaaggugaccuucggcgacgacacggucaucgaggugcagggguacaagagcgugaacaucaccuucgagcuggacgagcgcaucgacaagguccucaacgagaagugcuccgccuacaccguggagcugggcaccgaggugaacgaguucgcgugcgucguggccgacgccgugaucaagacgcugcagccggucagcgagcuccugaccccccuggggaucgaccucgacgagugguccauggccaccuacuaccuguucgacgagagcggcgaguucaagcuggccucccacauguacugcagcuucuacccccccgacgaggacgaggaggagggggacugcgaggaggaggaguucgagccguccacccaguacgaguacggcacggaggacgacuaccagggcaagccccucgaguucggggcgaccagcgccgcccugcagcccgaggaggagcaggaggaggacuggcuggacgacgacucccagcagaccgugggccagcaggacgggagcgaggacaaccagaccacgaccauccagaccaucguggagguccagccccagcucgagauggagcugaccccgguggugcagacgaucgaggucaacuccuucagcggcuaccugaagcucaccgacaacguguacaucaagaacgccgacaucguggaggaggcgaagaaggucaagcccaccgugguggucaacgccgccaacguguaccugaagcacgggggcggcguggccggggcccugaacaaggcgaccaacaacgccaugcaggucgaguccgacgacuacaucgccacgaacggcccccucaagguggggggcagcugcguccuguccggccacaaccuggccaagcacugccuccacgugguggggcccaacgucaacaagggcgaggacauccagcugcugaagagcgccuacgagaacuucaaccagcacgaggugcuccuggcgccgcugcucuccgccgggaucuucggcgccgaccccauccacagccugcgggugugcgucgacaccgugcgcaccaacguguaccuggccgucuucgacaagaaccucuacgacaagcugguguccagcuuccuggagaugaagagcgagaagcagguggagcagaagaucgccgagauccccaaggaggaggucaagcccuucaucaccgaguccaagccgagcguggagcagcggaagcaggacgacaagaagaucaaggcgugcguggaggaggucacgaccacccucgaggagaccaaguuccugacggagaaccugcuccuguacaucgacaucaacgggaaccugcaccccgacuccgccacccucgugagcgacaucgacaucaccuuccugaagaaggacgcccccuacaucgugggcgacgucgugcaggagggcgugcugaccgccgucgugauccccacgaagaaggccgggggcaccaccgagaugcucgcgaaggcccugcgcaaggugccgaccgacaacuacaucacgaccuaccccgggcagggccugaacggguacaccgucgaggaggccaagaccgugcucaagaagugcaaguccgccuucuacauccugcccagcaucaucuccaacgagaagcaggagauccugggcaccgugagcuggaaccuccgggagaugcuggcgcacgccgaggagacgcgcaagcugaugcccgucugcguggagaccaaggccaucguguccaccauccagcggaaguacaagggcaucaagauccaggagggggucguggacuacggcgcccgcuucuacuucuacaccagcaagacgaccguggccucccugaucaacacccucaacgaccugaacgagacccuggucacgaugccgcucggguacgugacccacggccugaaccuggaggaggcggcccgguacaugcgcagccucaaggugcccgccaccgucuccgugagcucccccgacgccgugaccgccuacaacggguaccugacgagcuccagcaagacccccgaggagcacuucaucgagaccaucucccuggcgggcagcuacaaggacuggagcuacuccggccagagcacccagcucgggaucgaguuccugaagcggggcgacaaguccgucuacuacacgagcaacccgaccaccuuccaccuggacggggaggugaucaccuucgacaaccucaagacgcugcugucccuccgcgaggugcggaccaucaaggucuucaccaccguggacaacaucaaccugcacacgcagguggucgacaugagcaugaccuacggccagcaguucggccccaccuaccuggacggggccgacgugaccaagaucaagccccacaacucccacgagggcaagacguucuacgugcucccgaacgacgacacccugcgcgucgaggccuucgaguacuaccacaccaccgaccccagcuuccuggggcgguacauguccgcccucaaccacacgaagaaguggaaguacccccaggugaacggccugaccagcaucaagugggccgacaacaacugcuaccuggcgaccgcccuccugacccugcagcagaucgagcucaaguucaaccccccggcccugcaggacgccuacuaccgcgcgcgggccggggaggccgccaacuucugcgcccugauccucgcguacugcaacaagacggugggcgagcugggcgacguccgcgagaccauguccuaccuguuccagcacgccaaccucgacagcugcaagcgggugcugaacgucgugugcaagaccugcgggcagcagcagaccacccugaagggcguggaggccgucauguacauggggacgcucuccuacgagcaguucaagaagggcgugcagauccccugcaccugcgggaagcaggccaccaaguaccuggugcagcaggagagccccuucgucaugauguccgcccccccggcgcaguacgagcugaagcacggcaccuucacgugcgccagcgaguacaccggcaacuaccagugcgggcacuacaagcacaucaccuccaaggagacccucuacugcaucgacggcgcccugcugacgaagagcagcgaguacaaggggcccaucaccgacguguucuacaaggagaacuccuacaccaccacgaucaagcccgugaccuacaagcucgacggcgucgugugcaccgagaucgaccccaagcuggacaacuacuacaagaaggacaacagcuacuucaccgagcagccgaucgaccuggugcccaaccagcccuaccccaacgccuccuucgacaacuucaaguucgucugcgacaacaucaaguucgccgacgaccucaaccagcugacgggguacaagaagccggcgagccgcgagcugaaggugaccuucuuccccgaccucaacggcgacguggucgccaucgacuacaagcacuacacccuguccuucaagaagggcgccaagcugcuccacaagcccaucguguggcacgugaacaacgccaccaacaaggcgacguacaagcccaacaccuggugcauccggugccuguggagcaccaagccggucgagaccuccaacagcuucgacgugcugaaguccgaggacgcccaggggauggacaaccucgccugcgaggaccugaagcccgugagcgaggaggucguggagaaccccacgauccagaaggacgugcuggagugcaacgucaagaccaccgagguggugggcgacaucauccucaagcccgccaacaacucccugaagaucaccgaggaggucgggcacacggaccugauggccgcguacguggacaacagcucccucaccaucaagaagccgaacgagcugagccgcgugcugggccucaagacccuggccacccacgggcuggccgccgucaacuccgugcccugggacacgaucgccaacuacgcgaagcccuuccucaacaagguggucagcaccaccaccaacaucgugacgcgcugccugaaccgggugugcaccaacuacaugccguacuucuucacccugcuccugcagcugugcaccuucacccgcuccacgaacagccggaucaaggccuccaugcccaccaccaucgccaagaacaccgucaagagcgugggcaaguucugccucgaggccagcuucaacuaccugaagucccccaacuucagcaagcugaucaacaucaucaucugguuccuccugcuguccgugugccucggcagccugaucuacuccacggccgcgcuggggguccucaugagcaaccugggcaugcccuccuacugcaccggguaccgcgagggcuaccugaacagcaccaacgugaccaucgccacguacugcaccggcuccaucccgugcagcgugugccucuccgggcuggacagccuggacaccuaccccucccucgagaccauccagaucacgaucagcuccuucaagugggaccugaccgccuucggccuggucgccgagugguuccucgccuacauccuguucacccgguucuucuacgugcuggggcucgcggccaucaugcagcuguucuucagcuacuucgccgugcacuucaucuccaacagcuggcugauguggcugaucaucaaccucguccagauggcccccaucuccgcgauggugcgcauguacaucuucuucgccagcuucuacuacguguggaagagcuacguccacgugguggacggcugcaacuccagcaccugcaugaugugcuacaagcggaaccgcgccacgcgggucgagugcaccaccaucgugaacgggguccgccgguccuucuacguguacgccaacggcggcaagggguucugcaagcugcacaacuggaacugcgugaacugcgacaccuucugcgccggcagcacguucaucuccgacgaggucgcgcgcgaccugagccuccaguucaagcggcccaucaacccgaccgaccaguccagcuacaucguggacuccgugaccgucaagaacgggagcauccaccuguacuucgacaaggccggccagaagaccuacgagcgccacucccugagccacuucgugaaccucgacaaccugcgggccaacaacacgaaggggucccugcccaucaacgugaucgucuucgacggcaagagcaagugcgaggaguccagcgccaaguccgccagcguguacuacucccagcucaugugccagcccauccugcugcucgaccaggcgcuggugagcgacgucggcgacagcgccgagguggccgugaagauguucgacgccuacgucaacaccuucuccagcaccuucaacgugcccauggagaagcugaagacccucguggccacggcggaggccgagcuggccaagaacgucucccuggacaacgugcucagcaccuucaucuccgccgcgcgccagggguucguggacagcgacgucgagaccaaggacgugguggagugccugaagcugucccaccagagcgacaucgaggucaccggcgacuccugcaacaacuacaugcucacguacaacaagguggagaacaugaccccgcgggaccugggggccugcaucgacugcagcgcccgccacaucaacgcccagguggccaagucccacaacaucgcgcugaucuggaacgucaaggacuucaugagccucuccgagcagcugcggaagcagauccgcagcgccgccaagaagaacaaccugcccuucaagcucaccugcgccaccacgcgccagguggugaacgucgugaccaccaagaucgcccugaagggcgggugaggacuaguuauaagacugacuagcccgaugggccucccaacgggcccuccuccccuccuugcaccgagauuaauaaaaaaaaaaaaaaaaaaaaaaaaaaaaaaaaaaaaaaaaaaaaaaaaaaaaaaaaaaaaaaaaugcaucccccccccccccccccccccccccccccccaaaggcucuuuucagagccaccagaauu

SEQ ID NO: 21955 - RNA, 6058 nt, Artificial Sequence
  SARS-CoV-2__MT461636.1__non-structural protein 3 (NSP3) mRNA gc
aggagaaagcuuaccauggcccccaccaaggugaccuucggcgacgacacggucaucgaggugcagggguacaagagcgugaacaucaccuucgagcuggacgagcgcaucgacaagguccucaacgagaagugcuccgccuacaccguggagcugggcaccgaggugaacgaguucgcgugcgucguggccgacgccgugaucaagacgcugcagccggucagcgagcuccugaccccccuggggaucgaccucgacgagugguccauggccaccuacuaccuguucgacgagagcggcgaguucaagcuggccucccacauguacugcagcuucuacccccccgacgaggacgaggaggagggggacugcgaggaggaggaguucgagccguccacccaguacgaguacggcacggaggacgacuaccagggcaagccccucgaguucggggcgaccagcgccgcccugcagcccgaggaggagcaggaggaggacuggcuggacgacgacucccagcagaccgugggccagcaggacgggagcgaggacaaccagaccacgaccauccagaccaucguggagguccagccccagcucgagauggagcugaccccgguggugcagacgaucgaggucaacuccuucagcggcuaccugaagcucaccgacaacguguacaucaagaacgccgacaucguggaggaggcgaagaaggucaagcccaccgugguggucaacgccgccaacguguaccugaagcacgggggcggcguggccggggcccugaacaaggcgaccaacaacgccaugcaggucgaguccgacgacuacaucgccacgaacggcccccucaagguggggggcagcugcguccuguccggccacaaccuggccaagcacugccuccacgugguggggcccaacgucaacaagggcgaggacauccagcugcugaagagcgccuacgagaacuucaaccagcacgaggugcuccuggcgccgcugcucuccgccgggaucuucggcgccgaccccauccacagccugcgggugugcgucgacaccgugcgcaccaacguguaccuggccgucuucgacaagaaccucuacgacaagcugguguccagcuuccuggagaugaagagcgagaagcagguggagcagaagaucgccgagauccccaaggaggaggucaagcccuucaucaccgaguccaagccgagcguggagcagcggaagcaggacgacaagaagaucaaggcgugcguggaggaggucacgaccacccucgaggagaccaaguuccugacggagaaccugcuccuguacaucgacaucaacgggaaccugcaccccgacuccgccacccucgugagcgacaucgacaucaccuuccugaagaaggacgcccccuacaucgugggcgacgucgugcaggagggcgugcugaccgccgucgugauccccacgaagaaggccgggggcaccaccgagaugcucgcgaaggcccugcgcaaggugccgaccgacaacuacaucacgaccuaccccgggcagggccugaacggguacaccgucgaggaggccaagaccgugcucaagaagugcaaguccgccuucuacauccugcccagcaucaucuccaacgagaagcaggagauccugggcaccgugagcuggaaccuccgggagaugcuggcgcacgccgaggagacgcgcaagcugaugcccgucugcguggagaccaaggccaucguguccaccauccagcggaaguacaagggcaucaagauccaggagggggucguggacuacggcgcccgcuucuacuucuacaccagcaagacgaccguggccucccugaucaacacccucaacgaccugaacgagacccuggucacgaugccgcucggguacgugacccacggccugaaccuggaggaggcggcccgguacaugcgcagccucaaggugcccgccaccgucuccgugagcucccccgacgccgugaccgccuacaacggguaccugacgagcuccagcaagacccccgaggagcacuucaucgagaccaucucccuggcgggcagcuacaaggacuggagcuacuccggccagagcacccagcucgggaucgaguuccugaagcggggcgacaaguccgucuacuacacgagcaacccgaccaccuuccaccuggacggggaggugaucaccuucgacaaccucaagacgcugcugucccuccgcgaggugcggaccaucaaggucuucaccaccguggacaacaucaaccugcacacgcagguggucgacaugagcaugaccuacggccagcaguucggccccaccuaccuggacggggccgacgugaccaagaucaagccccacaacucccacgagggcaagacguucuacgugcucccgaacgacgacacccugcgcgucgaggccuucgaguacuaccacaccaccgaccccagcuuccuggggcgguacauguccgcccucaaccacacgaagaaguggaaguacccccaggugaacggccugaccagcaucaagugggccgacaacaacugcuaccuggcgaccgcccuccugacccugcagcagaucgagcucaaguucaaccccccggcccugcaggacgccuacuaccgcgcgcgggccggggaggccgccaacuucugcgcccugauccucgcguacugcaacaagacggugggcgagcugggcgacguccgcgagaccauguccuaccuguuccagcacgccaaccucgacagcugcaagcgggugcugaacgucgugugcaagaccugcgggcagcagcagaccacccugaagggcguggaggccgucauguacauggggacgcucuccuacgagcaguucaagaagggcgugcagauccccugcaccugcgggaagcaggccaccaaguaccuggugcagcaggagagccccuucgucaugauguccgcccccccggcgcaguacgagcugaagcacggcaccuucacgugcgccagcgaguacaccggcaacuaccagugcgggcacuacaagcacaucaccuccaaggagacccucuacugcaucgacggcgcccugcugacgaagagcagcgaguacaaggggcccaucaccgacguguucuacaaggagaacuccuacaccaccacgaucaagcccgugaccuacaagcucgacggcgucgugugcaccgagaucgaccccaagcuggacaacuacuacaagaaggacaacagcuacuucaccgagcagccgaucgaccuggugcccaaccagcccuaccccaacgccuccuucgacaacuucaaguucgucugcgacaacaucaaguucgccgacgaccucaaccagcugacgggguacaagaagccggcgagccgcgagcugaaggugaccuucuuccccgaccucaacggcgacguggucgccaucgacuacaagcacuacacccccuccuucaagaagggcgccaagcugcugcacaagcccaucguguggcacgugaacaacgccaccaacaaggcgacguacaagccgaacaccuggugcauccggugccucuggagcaccaagcccgucgagaccuccaacagcuucgacgugcugaaguccgaggacgcccaggggauggacaaccuggccugcgaggaccucaagcccgugagcgaggaggucguggagaaccccacgauccagaaggacgugcuggagugcaacgucaagaccaccgagguggugggcgacaucauccugaagccggccaacaacucccucaagaucaccgaggaggucgggcacacggaccugauggccgcguacguggacaacagcucccugaccaucaagaagcccaacgagcucagccgcgugcugggccugaagacccucgccacccacgggcuggccgccgucaacuccgugcccugggacacgaucgccaacuacgcgaagccguuccugaacaagguggucagcaccaccaccaacaucgugacgcgcugccucaaccgggugugcaccaacuacaugcccuacuucuucacccugcugcuccagcugugcaccuucacccgcuccacgaacagccggaucaaggccuccaugcccaccaccaucgccaagaacaccgucaagagcgugggcaaguucugccuggaggccagcuucaacuaccucaagucccccaacuucagcaagcugaucaacaucaucaucugguuccugcuccuguccgugugccugggcagccucaucuacuccacggccgcgcuggggguccugauguucaaccucggcaugccgagcuacugcaccggguaccgcgagggcuaccugaacuccaccaacgugaccaucgccacguacugcaccggcagcauccccugcuccgugugccugagcgggcucgacucccuggacaccuaccccagccuggagaccauccagaucacgaucuccagcuucaagugggaccucaccgccuucggccuggucgccgagugguuccuggccuacauccucuucacccgguucuucuacgugcuggggcuggcggccaucaugcagcucuucuucuccuacuucgccgugcacuucaucagcaacuccuggcugauguggcugaucaucaaccugguccagauggcccccaucagcgcgauggugcgcauguacaucuucuucgccuccuucuacuacguguggaagagcuacguccacgugguggacggcugcaacagcuccaccugcaugaugugcuacaagcggaaccgcgccacgcgggucgagugcaccaccaucgugaacgggguccgccggagcuucuacguguacgccaacggcggcaagggguucugcaagcuccacaacuggaacugcgugaacugcgacaccuucugcgccggcuccacguucaucagcgacgaggucgcgcgcgaccugucccugcaguucaagcggccgaucaaccccaccgaccagagcuccuacaucguggacagcgugaccgucaagaacggguccauccaccucuacuucgacaaggccggccagaagaccuacgagcgccacagccugucccacuucgugaaccuggacaaccuccgggccaacaacacgaaggggagccugcccaucaacgugaucgucuucgacggcaaguccaagugcgaggagagcuccgccaagagcgccuccguguacuacagccagcugaugugccagcccauccuccugcuggaccaggcgcucguguccgacgucggcgacagcgccgagguggccgugaagauguucgacgccuacgucaacaccuucagcuccaccuucaacgugccgauggagaagcugaagacccugguggccacggcggaggccgagcucgccaagaacgucagccuggacaacgugcuguccaccuucaucagcgccgcgcgccagggguucguggacuccgacgucgagaccaaggacgugguggagugccucaagcugagccaccaguccgacaucgaggucaccggcgacagcugcaacaacuacaugcugacguacaacaagguggagaacaugaccccccgggaccucggggccugcaucgacugcuccgcccgccacaucaacgcccagguggccaagagccacaacaucgcgcugaucuggaacgucaaggacuucaugucccugagcgagcagcuccggaagcagauccgcuccgccgccaagaagaacaaccugcccuucaagcugaccugcgccaccacgcgccagguggugaacgucgugaccaccaagaucgcccucaagggcgggugaggacuaguuauaagacugacuagcccgaugggccucccaacgggcccuccuccccuccuugcaccgagauuaauaaaaaaaaaaaaaaaaaaaaaaaaaaaaaaaaaaaaaaaaaaaaaaaaaaaaaaaaaaaaaaaaugcaucccccccccccccccccccccccccccccccaaaggcucuuuucagagccaccagaauu

SEQ ID NO: 21956 - RNA, 6058 nt, Artificial Sequence
  SARS-CoV-2__MT461641.1__non-structural protein 3 (NSP3) mRNA gc
aggagaaagcuuaccauggcccccaccaaggugaccuucggcgacgacacggucaucgaggugcagggguacaagagcgugaacaucaccuucgagcuggacgagcgcaucgacaagguccucaacgagaagugcuccgccuacaccguggagcugggcaccgaggugaacgaguucgcgugcgucguggccgacgccgugaucaagacgcugcagccggucagcgagcuccugaccccccuggggaucgaccucgacgagugguccauggccaccuacuaccuguucgacgagagcggcgaguucaagcuggccucccacauguacugcagcuucuacccccccgacgaggacgaggaggagggggacugcgaggaggaggaguucgagccguccacccaguacgaguacggcacggaggacgacuaccagggcaagccccucgaguucggggcgaccagcgccgcccugcagcccgaggaggagcaggaggaggacuggcuggacgacgacucccagcagaccgugggccagcaggacgggagcgaggacaaccagaccacgaccauccagaccaucguggagguccagccccagcucgagauggagcugaccccgguggugcagacgaucgaggucaacuccuucagcggcuaccugaagcucaccgacaacguguacaucaagaacgccgacaucguggaggaggcgaagaaggucaagcccaccgugguggucaacgccgccaacguguaccugaagcacgggggcggcguggccggggcccugaacaaggcgaccaacaacgccaugcaggucgaguccgacgacuacaucgccacgaacggcccccucaagguggggggcagcugcguccuguccggccacaaccuggccaagcacugccuccacgugguggggcccaacgucaacaagggcgaggacauccagcugcugaagagcgccuacgagaacuucaaccagcacgaggugcuccuggcgccgcugcucuccgccgggaucuucggcgccgaccccauccacagccugcgggugugcgucgacaccgugcgcaccaacguguaccuggccgucuucgacaagaaccucuacgacaagcugguguccagcuuccuggagaugaagagcgagaagcagguggagcagaagaucgccgagauccccaaggaggaggucaagcccuucaucaccgaguccaagccgagcguggagcagcggaagcaggacgacaagaagaucaaggcgugcguggaggaggucacgaccacccucgaggagaccaaguuccugacggagaaccugcuccuguacaucgacaucaacgggaaccugcaccccgacuccgccacccucgugagcgacaucgacaucaccuuccugaagaaggacgcccccuacaucgugggcgacgucgugcaggagggcgugcugaccgucguggugauccccacgaagaaggccgggggcaccaccgagaugcucgccaaggcgcugcgcaaggucccgaccgacaacuacaucacgaccuaccccgggcagggccugaacggguacaccguggaggaggccaagaccgugcucaagaagugcaaguccgccuucuacauccugcccagcaucaucuccaacgagaagcaggagauccugggcaccgucagcuggaaccuccgggagaugcuggcccacgcggaggagacgcgcaagcugaugcccgugugcguggagaccaaggccaucgucuccaccauccagcggaaguacaagggcaucaagauccaggagggggugguggacuacggcgcccgcuucuacuucuacaccagcaagacgaccgucgccucccugaucaacacccucaacgaccugaacgagacccuggugacgaugccgcucggguacgugacccacggccugaaccuggaggaggccgcgcgguacaugcgcagccucaagguccccgccaccguguccgugagcucccccgacgccgucaccgccuacaacggguaccugacgagcuccagcaagacccccgaggagcacuucaucgagaccaucucccuggccggcagcuacaaggacuggagcuacuccggccagagcacccagcucgggaucgaguuccugaagcggggcgacaaguccguguacuacacgagcaacccgaccaccuuccaccuggacggggaggugaucaccuucgacaaccucaagacgcugcugucccuccgcgagguccggaccaucaagguguucaccaccguggacaacaucaaccugcacacgcacgucguggacaugagcaugaccuacggccagcaguucggccccaccuaccuggacggggcggacgugaccaagaucaagccccacaacucccacgagggcaagacguucuacguccucccgaacgacgacacccugcgcguggaggccuucgaguacuaccacaccaccgaccccagcuuccuggggcgguacauguccgcccucaaccacacgaagaaguggaaguacccccaggugaacggccugaccagcaucaagugggccgacaacaacugcuaccuggccaccgcgcuccugacccugcagcagaucgagcucaaguucaaccccccggcccugcaggacgccuacuaccgcgcccgggcgggggaggccgccaacuucugcgcccugauccucgccuacugcaacaagacggucggcgagcugggcgacgugcgcgagaccauguccuaccuguuccagcacgcgaaccucgacagcugcaagcggguccugaacguggugugcaagaccugcgggcagcagcagaccacccugaagggcgucgaggccgugauguacauggggacgcucuccuacgagcaguucaagaagggcgugcagauccccugcaccugcgggaagcaggccaccaaguaccugguccagcaggagagccccuucgugaugauguccgcccccccggcccaguacgagcugaagcacggcaccuucacgugcgcgagcgaguacaccggcaacuaccagugcgggcacuacaagcacaucaccuccaaggagacccucuacugcaucgacggcgcccugcugacgaagagcagcgaguacaaggggcccaucaccgacguguucuacaaggagaacuccuacaccaccacgaucaagcccgucaccuacaagcucgacggcguggugugcaccgagaucgaccccaagcuggacaacuacuacaagaaggacaacagcuacuucaccgagcagccgaucgaccugguccccaaccagcccuaccccaacgccuccuucgacaacuucaaguucgugugcgacaacaucaaguucgccgacgaccucaaccagcugacgggguacaagaagccggccagccgcgagcugaaggugaccuucuuccccgaccucaacggcgacgucguggcgaucgacuacaagcacuacacccccuccuucaagaagggcgccaagcugcugcacaagcccaucguguggcacgucaacaacgccaccaacaaggccacguacaagccgaacaccuggugcauccggugccucuggagcaccaagcccguggagaccuccaacagcuucgacgugcugaaguccgaggacgcgcaggggauggacaaccuggccugcgaggaccucaagcccgucagcgaggaggugguggagaaccccacgauccagaaggacguccuggagugcaacgugaagaccaccgagguggucggcgacaucauccugaagccggccaacaacucccucaagaucaccgaggagguggggcacacggaccugauggccgccuacguggacaacagcucccugaccaucaagaagcccaacgagcucagccgcguccugggccugaagacccucgcgacccacgggcuggccgccgugaacuccgugcccugggacacgaucgccaacuacgccaagccguuccugaacaaggucgugagcaccaccaccaacaucgugacgcgcugccucaaccgggucugcaccaacuacaugcccuacuucuucacccugcugcuccagcugugcaccuucacccgcuccacgaacagccggaucaaggcguccaugcccaccaccaucgccaagaacaccgugaagagcgugggcaaguucugccuggaggccagcuucaacuaccucaagucccccaacuucagcaagcugaucaacaucaucaucugguuccugcuccuguccgucugccugggcagccucaucuacuccacggccgcccugggggugcugaugagcaaccucggcaugccguccuacugcaccggguaccgcgagggcuaccugaacagcaccaacgugaccaucgcgacguacugcaccggcuccauccccugcagcgucugccuguccgggcucgacagccuggacaccuaccccucccuggagaccauccagaucacgaucagcuccuucaagugggaccucaccgccuucggccugguggccgagugguuccuggccuacauccucuucacccgguucuucuacgugcuggggcuggccgcgaucaugcagcucuucuucagcuacuucgccguccacuucaucuccaacagcuggcugauguggcugaucaucaaccuggugcagauggcccccaucuccgccauggugcgcauguacaucuucuucgcgagcuucuacuacgucuggaagagcuacgugcacguggucgacggcugcaacuccagcaccugcaugaugugcuacaagcggaaccgcgccacgcggguggagugcaccaccaucgucaacggggugcgccgguccuucuacguguacgccaacggcggcaagggguucugcaagcuccacaacuggaacugcgucaacugcgacaccuucugcgccggcagcacguucaucuccgacgagguggcccgcgaccugagccugcaguucaagcggccgaucaaccccaccgaccaguccagcuacaucguggacuccgucaccgugaagaacgggagcauccaccucuacuucgacaaggcgggccagaagaccuacgagcgccacucccugagccacuucgugaaccuggacaaccuccgggccaacaacacgaaggggucccugcccaucaacgucaucguguucgacggcaagagcaagugcgaggaguccagcgccaaguccgccagcguguacuacucccagcugaugugccagcccauccuccugcuggaccaggcccucgucagcgacgugggcgacagcgcggagguggccgucaagauguucgacgccuacgugaacaccuucuccagcaccuucaacgugccgauggagaagcugaagacccuggucgccacggccgaggcggagcucgccaagaacgugucccuggacaacgugcugagcaccuucaucuccgccgcccgccagggguucgucgacagcgacguggagaccaaggacguggucgagugccucaagcugucccaccagagcgacaucgaggugaccggcgacuccugcaacaacuacaugcugacguacaacaagguggagaacaugaccccccgggaccucggggcgugcaucgacugcagcgcccgccacaucaacgcccaggucgccaagucccacaacaucgcccugaucuggaacgugaaggacuucaugagccuguccgagcagcuccggaagcagauccgcagcgcggccaagaagaacaaccugcccuucaagcugaccugcgccaccacgcgccagguggucaacguggugaccaccaagaucgcccucaagggcgggugaggacuaguuauaagacugacuagcccgaugggccucccaacgggcccuccuccccuccuugcaccgagauuaauaaaaaaaaaaaaaaaaaaaaaaaaaaaaaaaaaaaaaaaaaaaaaaaaaaaaaaaaaaaaaaaaugcaucccccccccccccccccccccccccccccccaaaggcucuuuucagagccaccagaauu

SEQ ID NO: 21957 - RNA, 6058 nt, Artificial Sequence
  SARS-CoV-2__MT457391.1__non-structural protein 3 (NSP3) mRNA gc
aggagaaagcuuaccauggcccccaccaaggugaccuucggcgacgacacggucaucgaggugcagggguacaagagcgugaacaucaccuucgagcuggacgagcgcaucgacaagguccucaacgagaagugcuccgccuacaccguggagcugggcaccgaggugaacgaguucgcgugcgucguggccgacgccgugaucaagacgcugcagccggucagcgagcuccugaccccccuggggaucgaccucgacgagugguccauggccaccuacuaccuguucgacgagagcggcgaguucaagcuggccucccacauguacugcagcuucuacccccccgacgaggacgaggaggagggggacugcgaggaggaggaguucgagccguccacccaguacgaguacggcacggaggacgacuaccagggcaagccccucgaguucggggcgaccagcgccgcccugcagcccgaggaggagcaggaggaggacuggcuggacgacgacucccagcagaccgugggccagcaggacgggagcgaggacaaccagaccacgaccauccagaccaucguggagguccagccccagcucgagauggagcugaccccgguggugcagacgaucgaggucaacuccuucagcggcuaccugaagcucaccgacaacguguacaucaagaacgccgacaucguggaggaggcgaagaaggucaagcccaccgugguggucaacgccgccaacguguaccugaagcacgggggcggcguggccggggcccugaacaaggcgaccaacaacgccaugcaggucgaguccgacgacuacaucgccacgaacggcccccucaagguggggggcagcugcguccuguccggccacaaccuggccaagcacugccuccacgugguggggcccaacgucaacaagggcgaggacauccagcugcugaagagcgccuacgagaacuucaaccagcacgaggugcuccuggcgccgcugcucuccgccgggaucuucggcgccgaccccauccacagccugcgggugugcgucgacaccgugcgcaccaacguguaccuggccgucuucgacaagaaccucuacgacaagcugguguccagcuuccuggagaugaagagcgagaagcagguggagcagaagaucgccgagauccccaaggaggaggucaagcccuucaucaccgaguccaagccgagcguggagcagcggaagcaggacgacaagaagaucaaggcgugcguggaggaggucacgaccacccucgaggagaccaaguuccugacggagaaccugcuccuguacaucgacaucaacgggaaccugcaccccgacuccgccacccucgugagcgacaucgacaucaccuuccugaagaaggacgcccccuacaucgugggcgacgucgugcaggagggcgugcugaccgccgucgugauccccacgaagaaggccgggggcaccaccgagaugcucgcgaaggcccugcgcaaggugccgaccgacaacuacaucacgaccuaccccgggcagggccugaacggguacaccgucgaggaggccaagaccgugcucaagaagugcaaguccgccuucuacauccugcccagcaucaucuccaacgagaagcaggagauccugggcaccgugagcuggaaccuccgggagaugcuggcgcacgccgaggagacgcgcaagcugaugcccgucugcguggagaccaaggccaucguguccaccauccagcggaaguacaagggcaucaagauccaggagggggucguggacuacggcgcccgcuucuacuucuacaccagcaagacgaccguggccucccugaucaacacccucaacgaccugaacgagacccuggucacgaugccgcucggguacgugacccacggccugaaccuggaggaggcggcccgguacaugcgcagccucaaggugcccgccaccgucuccgugagcucccccgacgccgugaccgccuacaacggguaccugacgagcuccagcaagacccccgaggagcacuucaucgagaccaucucccuggcgggcagcuacaaggacuggagcuacuccggccagagcacccagcucgggaucgaguuccugaagcggggcgacaaguccgucuacuacacgagcaacccgaccaccuuccaccuggacggggaggugaucaccuucgacaaccucaagacgcugcugucccuccgcgaggugcggaccaucaaggucuucaccaccguggacaacaucaaccugcacacgcagguggucgacaugagcaugaccuacggccagcaguucggccccaccuaccuggacggggccgacgugaccaagaucaagccccacaacucccacgagggcaagacguucuacgugcucccgaacgacgacacccugcgcgucgaggccuucgaguacuaccacaccaccgaccccagcuuccuggggcgguacauguccgcccucaaccacacgaagaaguggaaguacccccaggugaacggccugaccagcaucaagugggccgacaacaacugcuaccuggcgaccgcccuccugacccugcagcagaucgagcucaaguucaaccccccggcccugcaggacgccuacuaccgcgcgcgggccggggaggccgccaacuucugcgcccugauccucgcguacugcaacaagacggugggcgagcugggcgacguccgcgagaccauguccuaccuguuccagcacgccaaccucgacagcugcaagcgggugcugaacgucgugugcaagaccugcgggcagcagcagaccacccugaagggcguggaggccgucauguacauggggacgcucuccuacgagcaguucaagaagggcgugcagauccccugcaccugcgggaagcaggccaccaaguaccuggugcagcaggagagccccuucgucaugauguccgcccccccggcgcaguacgagcugaagcacggcaccuucacgugcgccagcgaguacaccggcaacuaccagugcgggcacuacaagcacaucaccuccaaggagacccucuacugcaucgacggcgcccugcugacgaagagcagcgaguacaaggggcccaucaccgacguguucuacaaggagaacuccuacaccaccacgaucaagcccgugaccuacaagcucgacggcgucgugugcaccgagaucgaccccaagcuggacaacuacuacaagaaggacaacagcuacuucaccgagcagccgaucgaccuggugcccaaccagcccuaccccaacgccuccuucgacaacuucaaguucgucugcgacaacaucaaguucgccgacgaccucaaccagcugacgggguacaagaagccggcgagccgcgagcugaagaucaccuucuuccccgaccucaacggcgacgugguggccaucgacuacaagcacuacacccccuccuucaagaagggcgccaagcugcugcacaagcccaucgucuggcacgugaacaacgccaccaacaaggcgacguacaagccgaacaccuggugcauccggugccucuggagcaccaagcccguggagaccuccaacagcuucgacguccugaaguccgaggacgcccaggggauggacaaccuggccugcgaggaccucaagcccgugagcgaggagguggucgagaaccccacgauccagaaggacgugcuggagugcaacgugaagaccaccgaggucgugggcgacaucauccugaagccggccaacaacucccucaagaucaccgaggagguggggcacacggaccugauggccgcguacgucgacaacagcucccugaccaucaagaagcccaacgagcucagccgcgugcugggccugaagacccucgccacccacgggcuggccgccgugaacuccguccccugggacacgaucgccaacuacgcgaagccguuccugaacaagguggugagcaccaccaccaacaucgucacgcgcugccucaaccgggugugcaccaacuacaugcccuacuucuucacccugcugcuccagcugugcaccuucacccgcuccacgaacagccggaucaaggccuccaugcccaccaccaucgccaagaacaccgugaagagcgucggcaaguucugccuggaggccagcuucaacuaccucaagucccccaacuucagcaagcugaucaacaucaucaucugguuccugcuccuguccgugugccugggcagccucaucuacuccacggccgcgcugggggugcugaugagcaaccucggcaugccguccuacugcaccggguaccgcgagggcuaccugaacagcaccaacgucaccaucgccacguacugcaccggcuccauccccugcagcgugugccuguccgggcucgacagccuggacaccuaccccucccuggagaccauccagaucacgaucagcuccuucaagugggaccucaccgccuucggccugguggccgagugguuccuggccuacauccucuucacccgguucuucuacguccuggggcuggcggccaucaugcagcucuucuucagcuacuucgccgugcacuucaucuccaacagcuggcugauguggcugaucaucaaccuggugcagauggcccccaucuccgcgaugguccgcauguacaucuucuucgccagcuucuacuacguguggaagagcuacgugcacgucguggacggcugcaacuccagcaccugcaugaugugcuacaagcggaaccgcgccacgcggguggagugcaccaccaucgucaacggggugcgccgguccuucuacgucuacgccaacggcggcaagggguucugcaagcuccacaacuggaacugcgugaacugcgacaccuucugcgccggcagcacguucaucuccgacgagguggcgcgcgaccugagccugcaguucaagcggccgaucaaccccaccgaccaguccagcuacaucgucgacuccgugaccgugaagaacgggagcauccaccucuacuucgacaaggccggccagaagaccuacgagcgccacucccugagccacuucgucaaccuggacaaccuccgggccaacaacacgaaggggucccugcccaucaacgugaucguguucgacggcaagagcaagugcgaggaguccagcgccaaguccgccagcgucuacuacucccagcugaugugccagcccauccuccugcuggaccaggcgcucgugagcgacgugggcgacagcgccgaggucgccgugaagauguucgacgccuacgugaacaccuucuccagcaccuucaacgucccgauggagaagcugaagacccugguggccacggcggaggccgagcucgccaagaacgugucccuggacaacguccugagcaccuucaucuccgccgcgcgccagggguucguggacagcgacguggagaccaaggacgucguggagugccucaagcugucccaccagagcgacaucgaggugaccggcgacuccugcaacaacuacaugcugacguacaacaaggucgagaacaugaccccccgggaccucggggccugcaucgacugcagcgcccgccacaucaacgcccagguggccaagucccacaacaucgcgcugaucuggaacgugaaggacuucaugagccuguccgagcagcuccggaagcagauccgcagcgccgccaagaagaacaaccugcccuucaagcugaccugcgccaccacgcgccaggucgugaacguggucaccaccaagaucgcccucaagggcgggugaggacuaguuauaagacugacuagcccgaugggccucccaacgggcccuccuccccuccuugcaccgagauuaauaaaaaaaaaaaaaaaaaaaaaaaaaaaaaaaaaaaaaaaaaaaaaaaaaaaaaaaaaaaaaaaaugcaucccccccccccccccccccccccccccccccaaaggcucuuuucagagccaccagaauu

SEQ ID NO: 21958 - RNA, 6058 nt, Artificial Sequence
  SARS-CoV-2__MT457392.1__non-structural protein 3 (NSP3) mRNA gc
aggagaaagcuuaccauggcccccaccaaggugaccuucggcgacgacacggucaucgaggugcagggguacaagagcgugaacaucaccuucgagcuggacgagcgcaucgacaagguccucaacgagaagugcuccgccuacaccguggagcugggcaccgaggugaacgaguucgcgugcgucguggccgacgccgugaucaagacgcugcagccggucagcgagcuccugaccccccuggggaucgaccucgacgagugguccauggccaccuacuaccuguucgacgagagcggcgaguucaagcuggccucccacauguacugcagcuucuacccccccgacgaggacgaggaggagggggacugcgaggaggaggaguucgagccguccacccaguacgaguacggcacggaggacgacuaccagggcaagccccucgaguucggggcgaccagcgccgcccugcagcccgaggaggagcaggaggaggacuggcuggacgacgacucccagcagaccgugggccagcaggacgggagcgaggacaaccagaccacgaccauccagaccaucguggagguccagccccagcucgagauggagcugaccccgguggugcagacgaucgaggucaacuccuucagcggcuaccugaagcucaccgacaacguguacaucaagaacgccgacaucguggaggaggcgaagaaggucaagcccaccgugguggucaacgccgccaacguguaccugaagcacgggggcggcguggccggggcccugaacaaggcgaccaacaacgccaugcaggucgaguccgacgacuacaucgccacgaacggcccccucaagguggggggcagcugcguccuguccggccacaaccuggccaagcacugccuccacgugguggggcccaacgucaacaagggcgaggacauccagcugcugaagagcgccuacgagaacuucaaccagcacgaggugcuccuggcgccgcugcucuccgccgggaucuucggcgccgaccccauccacagccugcgggugugcgucgacaccgugcgcaccaacguguaccuggccgucuucgacaagaaccucuacgacaagcugguguccagcuuccuggagaugaagagcgagaagcagguggagcagaagaucgccgagauccccaaggaggaggucaagcccuucaucaccgaguccaagccgagcguggagcagcggaagcaggacgacaagaagaucaaggcgugcguggaggaggucacgaccacccucgaggagaccaaguuccugacggagaaccugcuccuguacaucgacaucaacgggaaccugcaccccgacuccgccacccucgugagcgacaucgacaucaccuuccugaagaaggacgcccccuacaucgugggcgacgucgugcaggagggcgugcugaccgccgucgugauccccacgaagaaggccgggggcaccaccgagaugcucgcgaaggcccugcgcaaggugccgaccgacaacuacaucacgaccuaccccgggcagggccugaacggguacaccgucgaggaggccaagaccgugcucaagaagugcaaguccgccuucuacauccugcccagcaucaucuccaacgagaagcaggagauccugggcaccgugagcuggaaccuccgggagaugcuggcgcacgccgaggagacgcgcaagcugaugcccgucugcguggagaccaaggccaucguguccaccauccagcggaaguacaagggcaucaagauccaggagggggucguggacuacggcgcccgcuucuacuucuacaccagcaagacgaccguggccucccugaucaacacccucaacgaccugaacgagacccuggucacgaugccgcucggguacgugacccacggccugaaccuggaggaggcggcccgguacaugcgcagccucaaggugcccgccaccgucuccgugagcucccccgacgccgugaccgccuacaacggguaccugacgagcuccagcaagacccccgaggagcacuucaucgagaccaucucccuggcgggcagcuacaaggacuggagcuacuccggccagagcacccagcucgggaucgaguuccugaagcggggcgacaaguccgucuacuacacgagcaacccgaccaccuuccaccuggacggggaggugaucaccuucgacaaccucaagacgcugcugucccuccgcgaggugcggaccgucaagguguucaccaccguggacaacaucaaccugcacacgcaggucguggacaugagcaugaccuacggccagcaguucggccccaccuaccuggacggggccgacgugaccaagaucaagccccacaacucccacgagggcaagacguucuacguccucccgaacgacgacacccugcgcguggaggccuucgaguacuaccacaccaccgaccccagcuuccuggggcgguacauguccgcccucaaccacacgaagaaguggaaguacccccaggugaacggccugaccagcaucaagugggccgacaacaacugcuaccuggcgaccgcccuccugacccugcagcagaucgagcucaaguucaaccccccggcccugcaggacgccuacuaccgcgcgcgggccggggaggccgccaacuucugcgcccugauccucgcguacugcaacaagacggucggcgagcugggcgacgugcgcgagaccauguccuaccuguuccagcacgccaaccucgacagcugcaagcggguccugaacguggugugcaagaccugcgggcagcagcagaccacccugaagggcgucgaggccgugauguacauggggacgcucuccuacgagcaguucaagaagggcgugcagauccccugcaccugcgggaagcaggccaccaaguaccugguccagcaggagagccccuucgugaugauguccgcccccccggcgcaguacgagcugaagcacggcaccuucacgugcgccagcgaguacaccggcaacuaccagugcgggcacuacaagcacaucaccuccaaggagacccucuacugcaucgacggcgcccugcugacgaagagcagcgaguacaaggggcccaucaccgacguguucuacaaggagaacuccuacaccaccacgaucaagcccgucaccuacaagcucgacggcguggugugcaccgagaucgaccccaagcuggacaacuacuacaagaaggacaacagcuacuucaccgagcagccgaucgaccugguccccaaccagcccuaccccaacgccuccuucgacaacuucaaguucgugugcgacaacaucaaguucgccgacgaccucaaccagcugacgggguacaagaagccggcgagccgcgagcugaaggugaccuucuuccccgaccucaacggcgacgucguggccaucgacuacaagcacuacacccccuccuucaagaagggcgccaagcugcugcacaagcccaucguguggcacgucaacaacgccaccaacaaggcgacguacaagccgaacaccuggugcauccggugccucuggagcaccaagcccguggagaccuccaacagcuucgacgugcugaaguccgaggacgcccaggggauggacaaccuggccugcgaggaccucaagcccgucagcgaggaggugguggagaaccccacgauccagaaggacguccuggagugcaacgugaagaccaccgagguggucggcgacaucauccugaagccggccaacaacucccucaagaucaccgaggagguggggcacacggaccugauggccgcguacguggacaacagcucccugaccaucaagaagcccaacgagcucagccgcguccugggccugaagacccucgccacccacgggcuggccgccgugaacuccgugcccugggacacgaucgccaacuacgcgaagccguuccugaacaaggucgugagcaccaccaccaacaucgugacgcgcugccucaaccgggucugcaccaacuacaugcccuacuucuucacccugcugcuccagcugugcaccuucacccgcuccacgaacagccggaucaaggccuccaugcccaccaccaucgccaagaacaccgugaagagcgugggcaaguucugccuggaggccagcuucaacuaccucaagucccccaacuucagcaagcugaucaacaucaucaucugguuccugcuccuguccgucugccugggcagccucaucuacuccacggccgcgcugggggugcugaugagcaaccucggcaugccguccuacugcaccggguaccgcgagggcuaccugaacagcaccaacgugaccaucgccacguacugcaccggcuccauccccugcagcgucugccuguccgggcucgacagccuggacaccuaccccucccuggagaccauccagaucacgaucagcuccuucaagugggaccucaccgccuucggccugguggccgagugguuccuggccuacauccucuucacccgguucuucuacgugcuggggcuggcggccaucaugcagcucuucuucagcuacuucgccguccacuucaucuccaacagcuggcugauguggcugaucaucaaccuggugcagauggcccccaucuccgcgauggugcgcauguacaucuucuucgccagcuucuacuacgucuggaagagcuacgugcacguggucgacggcugcaacuccagcaccugcaugaugugcuacaagcggaaccgcgccacgcggguggagugcaccaccaucgucaacggggugcgccgguccuucuacguguacgccaacggcggcaagggguucugcaagcuccacaacuggaacugcgucaacugcgacaccuucugcgccggcagcacguucaucuccgacgagguggcgcgcgaccugagccugcaguucaagcggccgaucaaccccaccgaccaguccagcuacaucguggacuccgucaccgugaagaacgggagcauccaccucuacuucgacaaggccggccagaagaccuacgagcgccacucccugagccacuucgugaaccuggacaaccuccgggccaacaacacgaaggggucccugcccaucaacgucaucguguucgacggcaagagcaagugcgaggaguccagcgccaaguccgccagcguguacuacucccagcugaugugccagcccauccuccugcuggaccaggcgcucgucagcgacgugggcgacagcgccgagguggccgucaagauguucgacgccuacgugaacaccuucuccagcaccuucaacgugccgauggagaagcugaagacccuggucgccacggcggaggccgagcucgccaagaacgugucccuggacaacgugcugagcaccuucaucuccgccgcgcgccagggguucgucgacagcgacguggagaccaaggacguggucgagugccucaagcugucccaccagagcgacaucgaggugaccggcgacuccugcaacaacuacaugcugacguacaacaagguggagaacaugaccccccgggaccucggggccugcaucgacugcagcgcccgccacaucaacgcccaggucgccaagucccacaacaucgcgcugaucuggaacgugaaggacuucaugagccuguccgagcagcuccggaagcagauccgcagcgccgccaagaagaacaaccugcccuucaagcugaccugcgccaccacgcgccagguggucaacguggugaccaccaagaucgcccucaagggcgggugaggacuaguuauaagacugacuagcccgaugggccucccaacgggcccuccuccccuccuugcaccgagauuaauaaaaaaaaaaaaaaaaaaaaaaaaaaaaaaaaaaaaaaaaaaaaaaaaaaaaaaaaaaaaaaaaugcaucccccccccccccccccccccccccccccccaaaggcucuuuucagagccaccagaauu

SEQ ID NO: 21959 - RNA, 6058 nt, Artificial Sequence
  SARS-CoV-2__MT457400.1__non-structural protein 3 (NSP3) mRNA gc
aggagaaagcuuaccauggcccccaccaaggugaccuucggcgacgacacggucaucgaggugcagggguacaagagcgugaacaucaccuucgagcuggacgagcgcaucgacaagguccucaacgagaagugcuccgccuacaccguggagcugggcaccgaggugaacgaguucgcgugcgucguggccgacgccgugaucaagacgcugcagccggucagcgagcuccugaccccccuggggaucgaccucgacgagugguccauggccaccuacuaccuguucgacgagagcggcgaguucaagcuggccucccacauguacugcagcuucuacccccccgacgaggacgaggaggagggggacugcgaggaggaggaguucgagccguccacccaguacgaguacggcacggaggacgacuaccagggcaagccccucgaguucggggcgaccagcgccgcccugcagcccgaggaggagcaggaggaggacuggcuggacgacgacucccagcagaccgugggccagcaggacgggagcgaguacaaccagaccacgaccauccagaccaucguggagguccagccccagcucgagauggagcugaccccgguggugcagacgaucgaggucaacuccuucagcggcuaccugaagcucaccgacaacguguacaucaagaacgccgacaucguggaggaggcgaagaaggucaagcccaccgugguggucaacgccgccaacguguaccugaagcacgggggcggcguggccggggcccugaacaaggcgaccaacaacgccaugcaggucgaguccgacgacuacaucgccacgaacggcccccucaagguggggggcagcugcguccuguccggccacaaccuggccaagcacugccuccacgugguggggcccaacgucaacaagggcgaggacauccagcugcugaagagcgccuacgagaacuucaaccagcacgaggugcuccuggcgccgcugcucuccgccgggaucuucggcgccgaccccauccacagccugcgggugugcgucgacaccgugcgcaccaacguguaccuggccgucuucgacaagaaccucuacgacaagcugguguccagcuuccuggagaugaagagcgagaagcagguggagcagaagaucgccgagauccccaaggaggaggucaagcccuucaucaccgaguccaagccgagcguggagcagcggaagcaggacgacaagaagaucaaggcgugcguggaggaggucacgaccacccucgaggagaccaaguuccugacggagaaccugcuccuguacaucgacaucaacgggaaccugcaccccgacuccgccacccucgugagcgacaucgacaucaccuuccugaagaaggacgcccccuacaucgugggcgacgucgugcaggagggcgugcugaccgccgucgugauccccacgaagaaggccgggggcaccaccgagaugcucgcgaaggcccugcgcaaggugccgaccgacaacuacaucacgaccuaccccgggcagggccugaacggguacaccgucgaggaggccaagaccgugcucaagaagugcaaguccgccuucuacauccugcccagcaucaucuccaacgagaagcaggagauccugggcaccgugagcuggaaccuccgggagaugcuggcgcacgccgaggagacgcgcaagcugaugcccgucugcguggagaccaaggccaucguguccaccauccagcggaaguacaagggcaucaagauccaggagggggucguggacuacggcgcccgcuucuacuucuacaccagcaagacgaccguggccucccugaucaacacccucaacgaccugaacgagacccuggucacgaugccgcucggguacgugacccacggccugaaccuggaggaggcggcccgguacaugcgcagccucaaggugcccgccaccgucuccgugagcucccccgacgccgugaccgccuacaacggguaccugacgagcuccagcaagacccccgaggagcacuucaucgagaccaucucccuggcgggcagcuacaaggacuggagcuacuccggccagagcacccagcucgggaucgaguuccugaagcggggcgacaaguccgucuacuacacgagcaacccgaccaccuuccaccuggacggggaggugaucaccuucgacaaccucaagacgcugcugucccuccgcgaggugcggaccaucaaggucuucaccaccguggacaacaucaaccugcacacgcagguggucgacaugagcaugaccuacggccagcaguucggccccaccuaccuggacggggccgacgugaccaagaucaagccccacaacucccacgagggcaagacguucuacgugcucccgaacgacgacacccugcgcgucgaggccuucgaguacuaccacaccaccgaccccagcuuccuggggcgguacauguccgcccucaaccacacgaagaaguggaaguacccccaggugaacggccugaccagcaucaagugggccgacaacaacugcuaccuggcgaccgcccuccugacccugcagcagaucgagcucaaguucaaccccccggcccugcaggacgccuacuaccgcgcgcgggccggggaggccgccaacuucugcgcccugauccucgcguacugcaacaagacggugggcgagcugggcgacguccgcgagaccauguccuaccuguuccagcacgccaaccucgacagcugcaagcgggugcugaacgucgugugcaagaccugcgggcagcagcagaccacccugaagggcguggaggccgucauguacauggggacgcucuccuacgagcaguucaagaagggcgugcagauccccugcaccugcgggaagcaggccaccaaguaccuggugcagcaggagagccccuucgucaugauguccgcccccccggcgcaguacgagcugaagcacggcaccuucacgugcgccagcgaguacaccggcaacuaccagugcgggcacuacaagcacaucaccuccaaggagacccucuacugcaucgacggcgcccugcugacgaagagcagcgaguacaaggggcccaucaccgacguguucuacaaggagaacuccuacaccaccacgaucaagcccgugaccuacaagcucgacggcgucgugugcaccgagaucgaccccaagcuggacaacuacuacaagaaggacaacagcuacuucaccgagcagccgaucgaccuggugcccaaccagcccuaccccaacgccuccuucgacaacuucaaguucgucugcgacaacaucaaguucgccgacgaccucaaccagcugacgggguacaagaagccggcgagccgcgagcugaaggugaccuucuuccccgaccucaacggcgacguggucgccaucgacuacaagcacuacacccccuccuucaagaagggcgccaagcugcugcacaagcccaucguguggcacgugaacaacgccaccaacaaggcgacguacaagccgaacaccuggugcauccggugccucuggagcaccaagcccgucgagaccuccaacagcuucgacgugcugaaguccgaggacgcccaggggauggacaaccuggccugcgaggaccucaagcccgugagcgaggaggucguggagaaccccacgauccagaaggacgugcuggagugcaacgucaagaccaccgagguggugggcgacaucauccugaagccggccaacaacucccucaagaucaccgaggaggucgggcacacggaccugauggccgcguacguggacaacagcucccugaccaucaagaagcccaacgagcucagccgcgugcugggccugaagacccucgccacccacgggcuggccgccgucaacuccgugcccugggacacgaucgccaacuacgcgaagccguuccugaacaagguggucagcaccaccaccaacaucgugacgcgcugccucaaccgggugugcaccaacuacaugcccuacuucuucacccugcugcuccagcugugcaccuucacccgcuccacgaacagccggaucaaggccuccaugcccaccaccaucgccaagaacaccgucaagagcgugggcaaguucugccuggaggccagcuucaacuaccucaagucccccaacuucagcaagcugaucaacaucaucaucugguuccugcuccuguccgugugccugggcagccucaucuacuccacggccgcgcuggggguccugaugagcaaccucggcaugccguccuacugcaccggguaccgcgagggcuaccugaacagcaccaacgugaccaucgccacguacugcaccggcuccauccccugcagcgugugccuguccgggcucgacagccuggacaccuaccccucccuggagaccauccagaucacgaucagcuccuucaagugggaccucaccgccuucggccuggucgccgagugguuccuggccuacauccucuucacccgguucuucuacgugcuggggcuggcggccaucaugcagcucuucuucagcuacuucgccgugcacuucaucuccaacagcuggcugauguggcugaucaucaaccugguccagauggcccccaucuccgcgauggugcgcauguacaucuucuucgccagcuucuacuacguguggaagagcuacguccacgugguggacggcugcaacuccagcaccugcaugaugugcuacaagcggaaccgcgccacgcgggucgagugcaccaccaucgugaacgggguccgccgguccuucuacguguacgccaacggcggcaagggguucugcaagcuccacaacuggaacugcgugaacugcgacaccuucugcgccggcagcacguucaucuccgacgaggucgcgcgcgaccugagccugcaguucaagcggccgaucaaccccaccgaccaguccagcuacaucguggacuccgugaccgucaagaacgggagcauccaccucuacuucgacaaggccggccagaagaccuacgagcgccacucccugagccacuucgugaaccuggacaaccuccgggccaacaacacgaaggggucccugcccaucaacgugaucgucuucgacggcaagagcaagugcgaggaguccagcgccaaguccgccagcguguacuacucccagcugaugugccagcccauccuccugcuggaccaggcgcucgugagcgacgucggcgacagcgccgagguggccgugaagauguucgacgccuacgucaacaccuucuccagcaccuucaacgugccgauggagaagcugaagacccugguggccacggcggaggccgagcucgccaagaacgucucccuggacaacgugcugagcaccuucaucuccgccgcgcgccagggguucguggacagcgacgucgagaccaaggacgugguggagugccucaagcugucccaccagagcgacaucgaggucaccggcgacuccugcaacaacuacaugcugacguacaacaagguggagaacaugaccccccgggaccucggggccugcaucgacugcagcgcccgccacaucaacgcccagguggccaagucccacaacaucgcgcugaucuggaacgucaaggacuucaugagccuguccgagcagcuccggaagcagauccgcagcgccgccaagaagaacaaccugcccuucaagcugaccugcgccaccacgcgccagguggugaacgucgugaccaccaagaucgcccucaagggcgggugaggacuaguuauaagacugacuagcccgaugggccucccaacgggcccuccuccccuccuugcaccgagauuaauaaaaaaaaaaaaaaaaaaaaaaaaaaaaaaaaaaaaaaaaaaaaaaaaaaaaaaaaaaaaaaaaugcaucccccccccccccccccccccccccccccccaaaggcucuuuucagagccaccagaauu

SEQ ID NO: 21960 - RNA, 6058 nt, Artificial Sequence
  SARS-CoV-2__MT457401.1__non-structural protein 3 (NSP3) mRNA gc
aggagaaagcuuaccauggcccccaccaaggugaccuucggcgacgacacggucaucgaggugcagggguacaagagcgugaacaucaccuucgagcuggacgagcgcaucgacaagguccucaacgagaagugcuccgccuacaccguggagcugggcaccgaggugaacgaguucgcgugcgucguggccgacgccgugaucaagacgcugcagccggucagcgagcuccugaccccccuggggaucgaccucgacgagugguccauggccaccuacuaccuguucgacgagagcggcgaguucaagcuggccucccacauguacugcagcuucuacccccccgacgaggacgaggaggagggggacugcgaggaggaggaguucgagccguccacccaguacgaguacggcacggaggacgacuaccagggcaagccccucgaguucggggcgaccagcgccgcccugcagcccgaggaggagcaggaggaggacuggcuggacgacgacucccagcagaccgugggccagcaggacgggagcgaggacaaccagaccacgaccauccagaccaucguggagguccagccccagcucgagauggagcugaccccgguggugcagacgaucgaggucaacuccuucagcggcuaccugaagcucaccgacaacguguacaucaagaacgccgacaucguggaggaggcgaagaaggucaagcccaccgugguggucaacgccgccaacguguaccugaagcacgggggcggcguggccggggcccugaacaaggcgaccaacaacgccaugcaggucgaguccgacgacuacaucgccacgaacggccuccugaagguggggggcagcugcguccuguccggccacaaccucgccaagcacugccugcacgugguggggcccaacgucaacaagggcgaggacauccagcugcucaagagcgccuacgagaacuucaaccagcacgaggugcugcuggcgccccuccuguccgccgggaucuucggcgccgacccgauccacagccugcgggugugcgucgacaccgugcgcaccaacguguaccucgccgucuucgacaagaaccuguacgacaagcugguguccagcuuccucgagaugaagagcgagaagcagguggagcagaagaucgccgagauccccaaggaggaggucaagcccuucaucaccgaguccaagcccagcguggagcagcggaagcaggacgacaagaagaucaaggcgugcguggaggaggucacgaccacccuggaggagaccaaguuccugacggagaaccuccugcuguacaucgacaucaacgggaaccuccacccggacuccgccacccuggugagcgacaucgacaucaccuuccugaagaaggacgcccccuacaucgugggcgacgucgugcaggagggcgugcucaccgccgucgugauccccacgaagaaggccgggggcaccaccgagaugcuggcgaaggcccugcgcaaggugcccaccgacaacuacaucacgaccuacccggggcagggccucaacggguacaccgucgaggaggccaagaccgugcugaagaagugcaaguccgccuucuacauccugcccagcaucaucuccaacgagaagcaggagauccucggcaccgugagcuggaaccugcgggagaugcuggcgcacgccgaggagacgcgcaagcugaugcccgucugcguggagaccaaggccaucguguccaccauccagcggaaguacaagggcaucaagauccaggagggggucguggacuacggcgcccgcuucuacuucuacaccagcaagacgaccguggccucccucaucaacacccugaacgaccugaacgagacccucgucacgaugccccugggguacgugacccacggccugaaccucgaggaggcggcccgguacaugcgcagccugaaggugccggccaccgucuccgugagcucccccgacgccgugaccgccuacaacggguaccugacgagcuccagcaagacccccgaggagcacuucaucgagaccaucucccucgcgggcagcuacaaggacuggagcuacuccggccagagcacccagcuggggaucgaguuccugaagcggggcgacaaguccgucuacuacacgagcaaccccaccaccuuccaccucgacggggaggugaucaccuucgacaaccugaagacgcugcucucccugcgcgaggugcggaccaucaaggucuucaccaccguggacaacaucaaccugcacacgcagguggucgacaugagcaugaccuacggccagcaguucggcccgaccuaccucgacggggccgacgugaccaagaucaagccccacaacucccacgagggcaagacguucuacgugcugcccaacgacgacacccugcgcgucgaggccuucgaguacuaccacaccaccgacccgagcuuccucgggcgguacauguccgcccugaaccacacgaagaaguggaaguacccccaggugaacggccugaccagcaucaagugggccgacaacaacugcuaccucgcgaccgcccugcugacccuccagcagaucgagcugaaguucaacccccccgcccugcaggacgccuacuaccgcgcgcgggccggggaggccgccaacuucugcgcccucauccuggcguacugcaacaagacggugggcgagcugggcgacguccgcgagaccauguccuaccucuuccagcacgccaaccuggacagcugcaagcgggugcugaacgucgugugcaagaccugcgggcagcagcagaccacccucaagggcguggaggccgucauguacauggggacgcuguccuacgagcaguucaagaagggcgugcagaucccgugcaccugcgggaagcaggccaccaaguaccuggugcagcaggagagccccuucgucaugauguccgccccccccgcgcaguacgagcucaagcacggcaccuucacgugcgccagcgaguacaccggcaacuaccagugcgggcacuacaagcacaucaccuccaaggagacccuguacugcaucgacggcgcccugcucacgaagagcagcgaguacaaggggccgaucaccgacguguucuacaaggagaacuccuacaccaccacgaucaagcccgugaccuacaagcuggacggcgucgugugcaccgagaucgaccccaagcuggacaacuacuacaagaaggacaacagcuacuucaccgagcagcccaucgaccucgugccgaaccagcccuaccccaacgccuccuucgacaacuucaaguucgucugcgacaacaucaaguucgccgacgaccugaaccagcugacgggguacaagaagcccgcgagccgcgagcucaaggugaccuucuucccggaccugaacggcgacguggucgccaucgacuacaagcacuacacccccuccuucaagaagggcgccaagcugcuccacaagcccaucguguggcacgugaacaacgccaccaacaaggucacguacaagcccaacaccuggugcauccggugccuguggagcaccaagccgguggagaccuccaacagcuucgacgugcugaaguccgaggacgcgcaggggauggacaaccucgccugcgaggaccugaagcccgucagcgaggaggugguggagaaccccacgauccagaaggacguccuggagugcaacgugaagaccaccgagguggucggcgacaucauccucaagcccgccaacaacucccugaagaucaccgaggagguggggcacacggaccugauggccgccuacguggacaacagcucccucaccaucaagaagccgaacgagcugagccgcguccugggccucaagacccuggcgacccacgggcuggccgccgugaacuccgugcccugggacacgaucgccaacuacgccaagcccuuccucaacaaggucgugagcaccaccaccaacaucgugacgcgcugccugaaccgggucugcaccaacuacaugccguacuucuucacccugcuccugcagcugugcaccuucacccgcuccacgaacagccggaucaaggcguccaugcccaccaccaucgccaagaacaccgugaagagcgugggcaaguucugccucgaggccagcuucaacuaccugaagucccccaacuucagcaagcugaucaacaucaucaucugguuccuccugcuguccgucugccucggcagccugaucuacuccacggccgcccugggggugcucaugagcaaccugggcaugcccuccuacugcaccggguaccgcgagggcuaccugaacagcaccaacgugaccaucgcgacguacugcaccggcuccaucccgugcagcgucugccucuccgggcuggacagccuggacaccuaccccucccucgagaccauccagaucacgaucagcuccuucaagugggaccugaccgccuucggccugguggccgagugguuccucgccuacauccuguucacccgguucuucuacgugcuggggcucgccgcgaucaugcagcuguucuucagcuacuucgccguccacuucaucuccaacagcuggcugauguggcugaucaucaaccucgugcagauggcccccaucuccgccauggugcgcauguacaucuucuucgcgagcuucuacuacgucuggaagagcuacgugcacguggucgacggcugcaacuccagcaccugcaugaugugcuacaagcggaaccgcgccacgcggguggagugcaccaccaucgucaacggggugcgccgguccuucuacguguacgccaacggcggcaagggguucugcaagcugcacaacuggaacugcgucaacugcgacaccuucugcgccggcagcacguucaucuccgacgagguggcccgcgaccugagccuccaguucaagcggcccaucaacccgaccgaccaguccagcuacaucguggacuccgucaccgugaagaacgggagcauccaccuguacuucgacaaggcgggccagaagaccuacgagcgccacucccugagccacuucgugaaccucgacaaccugcgggccaacaacacgaaggggucccugcccaucaacgucaucguguucgacggcaagagcaagugcgaggaguccagcgccaaguccgccagcguguacuacucccagcucaugugccagcccauccugcugcucgaccaggcccuggucagcgacgugggcgacagcgcggagguggccgucaagauguucgacgccuacgugaacaccuucuccagcaccuucaacgugcccauggagaagcugaagacccucgucgccacggccgaggcggagcuggccaagaacgugucccuggacaacgugcucagcaccuucaucuccgccgcccgccagggguucgucgacagcgacguggagaccaaggacguggucgagugccugaagcugucccaccagagcgacaucgaggugaccggcgacuccugcaacaacuacaugcucacguacaacaagguggagaacaugaccccgcgggaccugggggcgugcaucgacugcagcgcccgccacaucaacgcccaggucgccaagucccacaacaucgcccugaucuggaacgugaaggacuucaugagccucuccgagcagcugcggaagcagauccgcagcgcggccaagaagaacaaccugcccuucaagcucaccugcgccaccacgcgccagguggucaacguggugaccaccaagaucgcccugaagggcgggugaggacuaguuauaagacugacuagcccgaugggccucccaacgggcccuccuccccuccuugcaccgagauuaauaaaaaaaaaaaaaaaaaaaaaaaaaaaaaaaaaaaaaaaaaaaaaaaaaaaaaaaaaaaaaaaaugcaucccccccccccccccccccccccccccccccaaaggcucuuuucagagccaccagaauu

SEQ ID NO: 21961 - RNA, 6058 nt, Artificial Sequence
  SARS-CoV-2__MT451874.1__non-structural protein 3 (NSP3) mRNA gc
aggagaaagcuuaccauggcccccaccaaggugaccuucggcgacgacacggucaucgaggugcagggguacaagagcgugaacaucaccuucgagcuggacgagcgcaucgacaagguccucaacgagaagugcuccgccuacaccguggagcugggcaccgaggugaacgaguucgcgugcgucguggccgacgccgugaucaagacgcugcagccggucagcgagcuccugaccccccuggggaucgaccucgacgagugguccauggccaccuacuaccuguucgacgagagcggcgaguucaagcuggccucccacauguacugcagcuucuacccccccgacgaggacgaggaggagggggacugcgaggaggaggaguucgagccguccacccaguacgaguacggcacggaggacgacuaccagggcaagccccucgaguucggggcgaccagcgccgcccugcagcccgaggaggagcaggaggaggacuggcuggacgacgacucccagcagaccgugggccagcaggacgggagcgaggacaaccagaccacgaccauccagaccaucguggagguccagccccagcucgagauggagcugaccccgguggugcagacgaucgaggucaacuccuucagcggcuaccugaagcucaccgacaacguguacaucaagaacgccgacaucguggaggaggcgaagaaggucaagcccaccgugguggucaacgccgccaacguguaccugaagcacgggggcggcguggccggggcccugaacaaggcgaccaacaacgccaugcaggucgaguccgacgacuacaucgccacgaacggcccccucaagguggggggcagcugcguccuguccggccacaaccuggccaagcacugccuccacgugguggggcccaacgucaacaagggcgaggacauccagcugcugaagagcgccuacgagaacuucaaccagcacgaggugcuccuggcgccgcugcucuccgccgggaucuucggcgccgaccccauccacagccugcgggugugcgucgacaccgugcgcaccaacguguaccuggccgucuucgacaagaaccucuacgacaagcugguguccagcuuccuggagaugaagagcgagaagcagguggagcagaagaucgccgagauccccaaggaggaggucaagcccuucaucaccgaguccaagccgagcguggagcagcggaagcaggacgacaagaagaucaaggcgugcguggaggaggucacgaccacccucgaggagaccaaguuccugacggagaaccugcuccuguacaucgacaucaacgggaaccugcaccccgacuccgccacccucgugagcgacaucgacaucaccuuccugaagaaggacgcccccuacaucgugggcgacgucgugcaggagggcgugcugaccgccgucgugauccccacgaagaaggccgggggcaccaccgagaugcucgcgaaggcccugcgcaaggugccgaccgacaacuacaucacgaccuaccccgggcagggccugaacggguacaccgucgaggaggccaagaccgugcucaagaagugcaaguccgccuucuacauccugcccagcaucaucuccaacgagaagcaggagauccugggcaccgugagcuggaaccuccgggagaugcuggcgcacgccgaggagacgcgcaagcugaugcccgucugcguggagaccaaggccaucguguccaccauccagcggaaguacaagggcaucaagauccaggagggggucguggacuacggcgcccgcuucuacuucuacaccagcaagacgaccguggccucccugaucaacacccucaacgaccugaacgagacccuggucacgaugccgcucggguacgugacccacggccugaaccuggaggaggcggcccgguacaugcgcagccucaaggugcccgccaccgucuccgugagcucccccgacgccgugaccgccuacaacggguaccugacgagcuccagcaagacccccgaggagcacuucaucgagaccaucucccuggcgggcagcuacaaggacuggagcuacuccggccagagcacccagcucgggaucgaguuccugaagcggggcgacaaguccgucuacuacacgagcaacccgaccaccuuccaccuggacggggaggugaucaccuucgacaaccucaagacgcugcugucccuccgcgaggugcggaccaucaaggucuucaccaccguggacaacaucaaccugcacacgcagguggucgacaugagcaugaccuacggccagcaguucggccccaccuaccuggacggggccgacgugaccaagaucaagccccacaacucccacgagggcaagacguucuacgugcucccgaacgacgacacccugcgcgucgaggccuucgaguacuaccacaccaccgaccccagcuuccuggggcgguacauguccgcccucaaccacacgaagaaguggaaguacccccaggugaacggccugaccagcaucaagugggccgacaacaacugcuaccuggcgaccgcccuccugacccugcagcagaucgagcucaaguucaaccccccggcccugcaggacgccuacuaccgcgcgcgggccggggaggccgccaacuucugcgcccugauccucgcguacugcaacaagacggugggcgagcugggcgacguccgcgagaccauguccuaccuguuccagcacgccaaccucgacagcugcaagcgggugcugaacgucgugugcaagaccugcgggcagcagcagaccacccugaagggcguggaggccgucauguacauggggacgcucuccuacgagcaguucaagaagggcgugcagauccccugcaccugcgggaagcaggccaccaaguaccuggugcagcaggagagccccuucgucaugauguccgcccccccggcgcaguacgagcugaagcacggcaccuucacgugcgccagcgaguacaccggcaacuaccagugcgggcacuacaagcacaucaccuccaaggagacccucuacugcaucgacggcgcccugcugacgaagagcagcgaguacaaggggcccaucaccgacguguucuacaaggagaacuccuacaccaccacgaucaagcccgugaccuacaagcucgacggcgucgugugcaccgagaucgaccccaagcuggacaacuacuacaagaaggacaacagcuacuucaccgagcagccgaucgaccuggugcccaaccagcccuaccccaacgccuccuucgacaacuucaaguucgucugcgacaacaucaaguucgccgacgaccucaaccagcugacgggguacaagaagccggcgagccgcgagcugaaggugaccuucuuccccgaccucaacggcgacguggucgccaucgacuacaagcacuacacccccuccuucaagaagggcgccaagcugcugcacaagcccaucguguggcacgugaacaacgccaccaacaaggcgacguacaagccgaacaccuggugcauccggugccucuggcgcaagaagcccgucgagaccagcaacuccuucgacgugcugaagagcgaggacgcccaggggauggacaaccuggccugcgaggaccucaagcccguguccgaggaggucguggagaaccccaccauccagaaggacgugcuggagugcaacgucaagacgaccgagguggugggcgacaucauccugaagccggccaacaacagccucaagaucaccgaggaggucgggcacaccgaccugauggccgcguacguggacaacuccagccugacgaucaagaagcccaacgagcucucccgcgugcugggccugaagacccucgccacccacgggcuggccgccgucaacagcgugcccugggacaccaucgccaacuacgcgaagccguuccccaacaagguggucuccacgaccaccaacaucgugacccggugccugaaccgcgugugcacgaacuacaugcccuacuucuucacccuccugcugcagcucugcaccuucacccggagcaccaacucccgcaucaaggccagcaugcccacgaccaucgccaagaacaccgucaaguccgugggcaaguucugccuggaggccagcuucaacuaccugaagagcccgaacuucuccaagcucaucaacaucaucaucugguuccugcugcucagcgugugccugggcucccugaucuacagcaccgccgcgcucgggguccugauguccaaccugggcaugcccagcuacugcacgggguaccgggagggcuaccucaacuccaccaacgugaccaucgccaccuacugcacgggcagcauccccugcuccgugugccugagcgggcuggacucccucgacaccuaccccagccuggagaccauccagaucaccaucuccagcuucaagugggaccugacggccuucggccucgucgccgagugguuccuggccuacauccuguucacccgcuucuucuacgugcucgggcuggcggccaucaugcagcuguucuucuccuacuucgccgugcacuucaucagcaacuccuggcucauguggcugaucaucaaccugguccagauggccccgaucagcgcgauggugcggauguacaucuucuucgccuccuucuacuacguguggaagagcuacguccacgugguggacggcugcaacagcuccaccugcaugaugugcuacaagcgcaaccgggccacccgcgucgagugcacgaccaucgugaacgggguccggcgcagcuucuacguguacgccaacggcggcaagggguucugcaagcugcacaacuggaacugcgugaacugcgacaccuucugcgccggcuccaccuucaucagcgacgaggucgcgcgggaccucucccugcaguucaagcgccccaucaaccccacggaccagagcuccuacaucguggacagcgugaccgucaagaacggguccauccaccuguacuucgacaaggccggccagaagaccuacgagcggcacagccucucccacuucgugaaccuggacaaccugcgcgccaacaacaccaaggggagccuccccaucaacgugaucgucuucgacggcaaguccaagugcgaggagagcuccgccaagagcgccuccguguacuacagccagcugaugugccagccgauccugcuccuggaccaggcgcugguguccgacgucggcgacagcgccgagguggccgugaagauguucgacgccuacgucaacacguucagcuccaccuucaacgugcccauggagaagcucaagacccugguggccaccgcggaggccgagcuggccaagaacgucagccucgacaacgugcuguccacguucaucagcgccgcgcggcagggguucguggacuccgacgucgagaccaaggacgugguggagugccugaagcucagccaccaguccgacaucgaggucaccggcgacagcugcaacaacuacaugcugaccuacaacaagguggagaacaugacgccccgcgaccugggggccugcaucgacugcuccgcccggcacaucaacgcccagguggccaagagccacaacaucgcgcucaucuggaacgucaaggacuucaugucccugagcgagcagcugcgcaagcagauccgcuccgccgccaagaagaacaaccuccccuucaagcugaccugcgccaccacccggcagguggugaacgucgugacgaccaagaucgcccugaagggcgggugaggacuaguuauaagacugacuagcccgaugggccucccaacgggcccuccuccccuccuugcaccgagauuaauaaaaaaaaaaaaaaaaaaaaaaaaaaaaaaaaaaaaaaaaaaaaaaaaaaaaaaaaaaaaaaaaugcaucccccccccccccccccccccccccccccccaaaggcucuuuucagagccaccagaauu

SEQ ID NO: 21962 - RNA, 6058 nt, Artificial Sequence
  SARS-CoV-2__MT451888.1__non-structural protein 3 (NSP3) mRNA gc
aggagaaagcuuaccauggcccccaccaaggugaccuucggcgacgacacggucaucgaggugcagggguacaagagcgugaacaucaccuucgagcuggacgagcgcaucgacaagguccucaacgagaagugcuccgccuacaccguggagcugggcaccgaggugaacgaguucgcgugcgucguggccgacgccgugaucaagacgcugcagccggucagcgagcuccugaccccccuggggaucgaccucgacgagugguccauggccaccuacuaccuguucgacgagagcggcgaguucaagcuggccucccacauguacugcagcuucuacccccccgacgaggacgaggaggagggggacugcgaggaggaggaguucgagccguccacccaguacgaguacggcacggaggacgacuaccagggcaagccccucgaguucggggcgaccagcgccgcccugcagcccgaggaggagcaggaggaggacuggcuggacgacgacucccagcagaccgugggccagcaggacgggagcgaggacaaccagaccacgaccauccagaccaucguggagguccagccccagcucgagauggagcugaccccgguggugcagacgaucgaggucaacuccuucagcggcuaccugaagcucaccgacaacguguacaucaagaacgccgacaucguggaggaggcgaagaaggucaagcccaccgugguggucaacgccgccaacguguaccugaagcacgggggcggcguggccggggcccugaacaaggcgaccaacaacgccaugcaggucgaguccgacgacuacaucgccacgaacggcccccucaagguggggggcagcugcguccuguccggccacaaccuggccaagcacugccuccacgugguggggcccaacgucaacaagggcgaggacauccagcugcugaagagcgccuacgagaacuucaaccagcacgaggugcuccuggcgccgcugcucuccgccgggaucuucggcgccgaccccauccacagccugcgggugugcgucgacaccgugcgcaccaacguguaccuggccgucuucgacaagaaccucuacgacaagcugguguccagcuuccuggagaugaagagcgagaagcagguggagcagaagaucgccgagauccccaaggaggaggucaagcccuucaucaccgaguccaagccgagcguggagcagcggaagcaggacgacaagaagaucaaggcgugcguggaggaggucacgaccacccucgaggagaccaaguuccugacggagaaccugcuccuguacaucgacaucaacgggaaccugcaccccgacuccgccacccucgugagcgacaucgacaucaccuuccugaagaaggacgcccccuacaucgugggcgacgucgugcaggagggcgugcugaccgccgucgugauccccacgaagaaggccgggggcaccaccgagaugcucgcgaaggcccugcgcaaggugccgaccgacaacuacaucacgaccuaccccgggcagggccugaacggguacaccgucgaggaggccaagaccgugcucaagaagugcaaguccgccuucuacauccugcccagcaucaucuccaacgagaagcaggagauccugggcaccgugagcuggaaccuccgggagaugcuggcgcacgccgaggagacgcgcaagcugaugcccgucugcguggagaccaaggccaucguguccaccauccagcggaaguacaagggcaucaagauccaggagggggucguggacuacggcgcccgcuucuacuucuacaccagcaagacgaccguggccucccugaucaacacccucaacgaccugaacgagacccuggucacgaugccgcucggguacgugacccacggccugaaccuggaggaggcggcccgguacaugcgcagccucaaggugcccgccaccgucuccgugagcucccccgacgccgugaccgccuacaacggguaccugacgagcuccagcaagacccccgaggagcacuucaucgagaccaucucccuggcgggcagcuacaaggacuggagcuacuccggccagagcacccagcucgggaucgaguuccugaagcggggcgacaaguccgucuacuacacgagcaacccgaccaccuuccaccuggacggggaggugaucaccuucgacaaccucaagacgcugcugucccuccgcgaggugcggaccaucaaggucuucaccaccguggacaacaucaaccugcacacgcagguggucgacaugagcaugaccuacggccagcaguucggccccaccuaccuggacggggccgacgugaccaagaucaagccccacaacucccacgagggcaagacguucuacgugcucccgaacgacgacacccugcgcgucgaggccuucgaguacuaccacaccaccgaccccagcuuccuggggcgguacauguccgcccucaaccacacgaagaaguggaaguacccccaggugaacggccugaccagcaucaagugggccgacaacaacugcuaccuggcgaccgcccuccugacccugcagcagaucgagcucaaguucaaccccccggcccugcaggacgccuacuaccgcgcgcgggccggggaggccgccaacuucugcgcccugauccucgcguacugcaacaagacggugggcgagcugggcgacguccgcgagaccauguccuaccuguuccagcacgccaaccucgacagcugcaagcgggugcugaacgucgugugcaagaccugcgggcagcagcagaccacccugaagggcguggaggccgucauguacauggggacgcucuccuacgagcaguucaagaagggcgugcagauccccugcaccugcgggaagcaggccaccaaguaccuggugcagcaggagagccccuucgucaugauguccgcccccccggcgcaguacgagcugaagcacggcaccuucacgugcgccagcgaguacaccggcaacuaccagugcgggcacuacaagcacaucaccuccaaggagacccucuacugcaucgacggcgcccugcuggccaagagcagcgaguacaaggggcccaucacggacguguucuacaaggagaacuccuacaccaccaccaucaagcccgugacguacaagcucgacggcgucgugugcaccgagaucgaccccaagcuggacaacuacuacaagaaggacaacagcuacuucaccgagcagccgaucgaccuggugcccaaccagcccuaccccaacgccuccuucgacaacuucaaguucgucugcgacaacaucaaguucgcggacgaccucaaccagcugaccggguacaagaagccggccagccgcgagcugaaggugacguucuuccccgaccucaacggcgacguggucgccaucgacuaccggcacuacacccccuccuucaagaagggcgccaagcugcugcacaagcccaucguguggcacgugaacaacgcgaccaacaaggccaccuacaagccgaacacguggugcauccgcugccucuggagcaccaagcccgucgagaccuccaacagcuucgacgugcugaaguccgaggacgcccaggggauggacaaccuggccugcgaggaccucaagcccgugagcgaggaggucguggagaaccccaccauccagaaggacgugcuggagugcaacgucaagacgaccgagguggugggcgacaucauccugaagccggccaacaacucccucaagaucaccgaggaggucgggcacaccgaccugauggcggccuacguggacaacagcucccugacgaucaagaagcccaacgagcucagccgcgugcugggccugaagacccucgccacccacgggcuggccgccgucaacuccgugcccugggacaccaucgcgaacuacgccaagccguuccugaacaagguggucagcacgaccaccaacaucgugacccggugccucaaccgcgugugcacgaacuacaugcccuacuucuucacccugcugcuccagcugugcaccuucacccgguccaccaacagccgcaucaaggccuccaugcccacgaccaucgccaagaacaccgucaagagcgugggcaaguucugccuggaggccagcuucaacuaccucaagucccccaacuucagcaagcugaucaacaucaucaucugguuccugcuccuguccgugugccugggcagccucaucuacuccaccgcggcccuggggguccugaugagcaaccucggcaugccguccuacugcacgggguaccgggagggcuaccugaacagcaccaacgugaccaucgccaccuacugcacgggcuccauccccugcagcgugugccuguccgggcucgacagccuggacaccuaccccucccuggagaccauccagaucaccaucagcuccuucaagugggaccucacggccuucggccuggucgccgagugguuccuggcguacauccucuucacccgcuucuucuacgugcuggggcuggccgccaucaugcagcucuucuucagcuacuucgccgugcacuucaucuccaacagcuggcugauguggcugaucaucaaccugguccagauggcgcccaucuccgccauggugcggauguacaucuucuucgccagcuucuacuacguguggaagagcuacguccacgugguggacggcugcaacuccagcaccugcaugaugugcuacaagcgcaaccgggccacccgcgucgagugcacgaccaucgugaacgggguccggcgcuccuucuacguguacgccaacggcggcaagggguucugcaagcuccacaacuggaacugcgugaacugcgacaccuucugcgcgggcagcaccuucaucuccgacgaggucgcccgggaccugagccugcaguucaagcgcccgaucaaccccacggaccaguccagcuacaucguggacuccgugaccgucaagaacgggagcauccaccucuacuucgacaaggccggccagaagaccuacgagcggcacucccugagccacuucgugaaccuggacaaccuccgcgccaacaacaccaaggggucccugcccaucaacgugaucgucuucgacggcaagagcaagugcgaggaguccagcgccaaguccgcgagcguguacuacucccagcugaugugccagcccauccuccugcuggaccaggcccucgugagcgacgucggcgacagcgccgagguggccgugaagauguucgacgccuacgucaacacguucuccagcaccuucaacgugccgauggagaagcugaagacccugguggcgaccgccgaggccgagcucgccaagaacgucucccuggacaacgugcugagcacguucaucuccgcggcccggcagggguucguggacagcgacgucgagaccaaggacgugguggagugccucaagcugucccaccagagcgacaucgaggucaccggcgacuccugcaacaacuacaugcugaccuacaacaagguggagaacaugacgccccgcgaccucggggccugcaucgacugcagcgcccggcacaucaacgcccagguggcgaagucccacaacaucgcccugaucuggaacgucaaggacuucaugagccuguccgagcagcuccgcaagcagauccgcagcgccgccaagaagaacaaccugcccuucaagcugaccugcgccaccacccggcagguggugaacgucgugacgaccaagaucgcgcucaagggcgggugaggacuaguuauaagacugacuagcccgaugggccucccaacgggcccuccuccccuccuugcaccgagauuaauaaaaaaaaaaaaaaaaaaaaaaaaaaaaaaaaaaaaaaaaaaaaaaaaaaaaaaaaaaaaaaaaugcaucccccccccccccccccccccccccccccccaaaggcucuuuucagagccaccagaauu

SEQ ID NO: 21963 - RNA, 6058 nt, Artificial Sequence
  SARS-CoV-2__MT451889.1__non-structural protein 3 (NSP3) mRNA gc
aggagaaagcuuaccauggcccccaccaaggugaccuucggcgacgacacggucaucgaggugcagggguacaagagcgugaacaucaccuucgagcuggacgagcgcaucgacaagguccucaacgagaagugcuccgccuacaccguggagcugggcaccgaggugaacgaguucgcgugcgucguggccgacgccgugaucaagacgcugcagccggucagcgagcuccugaccccccuggggaucgaccucgacgagugguccauggccaccuacuaccuguucgacgagagcggcgaguucaagcuggccucccacauguacugcagcuucuacccccccgacgaggacgaggaggagggggacugcgaggaggaggaguucgagccguccacccaguacgaguacggcacggaggacgacuaccagggcaagccccucgaguucggggcgaccagcgccgcccugcagcccgaggaggagcaggaggaggacuggcuggacgacgacucccagcagaccgugggccagcaggacgggagcgaggacaaccagaccacgaccauccagaccaucguggagguccagccccagcucgagauggagcugaccccgguggugcagacgaucgaggucaacuccuucagcggcuaccugaagcucaccgacaacguguacaucaagaacgccgacaucguggaggaggcgaagaaggucaagcccaccgugguggucaacgccgccaacguguaccugaagcacgggggcggcguggccggggcccugaacaaggcgaccaacaacgccaugcaggucgaguccgacgacuacaucgccacgaacggcccccucaagguggggggcagcugcguccuguccggccacaaccuggccaagcacugccuccacgugguggggcccaacgucaacaagggcgaggacauccagcugcugaagagcgccuacgagaacuucaaccagcacgaggugcuccuggcgccgcugcucuccgccgggaucuucggcgccgaccccauccacagccugcgggugugcgucgacaccgugcgcaccaacguguaccuggccgucuucgacaagaaccucuacgacaagcugguguccagcuuccuggagaugaagagcgagaagcagguggagcagaagaucgccgagauccccaaggaggaggucaagcccuucaucaccgaguccaagccgagcguggagcagcggaagcaggacgacaagaagaucaaggcgugcguggaggaggucacgaccacccucgaggagaccaaguuccugacggagaaccugcuccuguacaucgacaucaacgggaaccugcaccccgacuccgccacccucgugagcgacaucgacaucaccuuccugaagaaggacgcccccuacaucgugggcgacgucgugcaggagggcgugcugaccgccgucgugauccccacgaagaaggccgggggcaccaccgagaugcucgcgaaggcccugcgcaaggugccgaccgacaacuacaucacgaccuaccccgggcagggccugaacggguacaccgucgaggaggccaagaccgugcucaagaagugcaaguccgccuucuacauccugcccagcaucaucuccaacgagaagcaggagauccugggcaccgugagcuggaaccuccgggagaugcuggcgcacgccgaggagacgcgcaagcugaugcccgucugcguggagaccaaggccaucguguccaccauccagcggaaguacaagggcaucaagauccaggagggggucguggacuacggcgcccgcuucuacuucuacaccagcaagacgaccguggccucccugaucaacacccucaacgaccugaacgagacccuggucacgaugccgcucggguacgugacccacggccugaaccuggaggaggcggcccgguacaugcgcagccucaaggugcccgccaccgucuccgugagcucccccgacgccgugaccgccuacaacggguaccugacgagcuccagcaagacccccgaggagcacuucaucgagaccaucucccuggcgggcagcuacaaggacuggagcuacuccggccagagcacccagcucgggaucgaguuccugaagcggggcgacaaguccgucuacuacacgagcaacccgaccaccuuccaccuggacggggaggugaucaccuucgacaaccucaagacgcugcugucccuccgcgaggugcggaccaucaaggucuucaccaccguggacaacaucaaccugcacacgcagguggucgacaugagcaugaccuacggccagcaguucggccccaccuaccuggacggggccgacgugaccaagaucaagccccacaacucccacgagggcaagacguucuacgugcucccgaacgacgacacccugcgcgucgaggccuucgaguacuaccacaccaccgaccccagcuuccuggggcgguacauguccgcccucaaccacacgaagaaguggaaguacccccaggugaacggccugaccagcaucaagugggccgacaacaacugcuaccuggcgaccgcccuccugacccugcagcagaucgagcucaaguucaaccccccggcccugcaggacgccuacuaccgcgcgcgggccggggaggccgccaacuucugcgcccugauccucgcguacugcaacaagacggugggcgagcugggcgacguccgcgagaccauguccuaccuguuccagcacgccaaccucgacagcugcaagcgggugcugaacgucgugugcaagaccugcgggcagcagcagaccacccugaagggcguggaggccgucauguacauggggacgcucuccuacgagcaguucaagaagggcgugcagauccccugcaccugcgggaagcaggccaccaaguaccuggugcagcaggagagccccuucgucaugauguccgcccccccggcgcaguacgagcugaagcacggcaccuucacgugcgccagcgaguacaccggcaacuaccagugcgggcacuacaagcacaucaccuccaaggagacccucuacugcaucgacggcgcccugcugacgaagagcagcgaguacaaggggcccaucaccgacguguucuacaaggagaacuccuacaccaccacgaucaagcccgugaccuacaagcucgacggcgucgugugcaccgagaucgaccccaagcuggacaacuacuacaagaaggacaacagcuacuucaccgagcagccgaucgaccuggugcccaaccagcccuaccccaacgccuccuucgacaacuucaaguucgucugcgacaacaucaaguucgccggggaccucaaccagcugacgggcuacaagaagccggcgagccgcgagcugaaggugaccuucuuccccgaccucaacggcgacguggucgccaucgacuacaagcacuacacccccuccuucaagaagggggccaagcugcugcacaagcccaucguguggcacgugaacaacgccaccaacaaggcgacguacaagccgaacaccuggugcauccggugccucuggagcaagaagcccgucgagaccuccaacagcuucgacgugcugaaguccgaggacgcccagggcauggacaaccuggccugcgaggaccucaagcccgugagcgaggaggucguggagaaccccaccauccagaaggacgugcuggagugcaacgucaagacgaccgagguggugggggacaucauccugaagccggccaacaacucccucaagaucaccgaggaggucggccacaccgaccugauggccgcguacguggacaacagcucccugacgaucaagaagcccaacgagcucagccgcgugcuggggcugaagacccucgccacccacggccuggccgccgucaacuccgugcccugggacaccaucgccaacuacgcgaagccguuccugaacaagguggucagcacgaccaccaacaucgugacccgcugccucaaccgggugugcacgaacuacaugcccuacuucuucacccugcugcuccagcugugcaccuucacccgcuccaccaacagccggaucaaggccuccaugcccacgaccaucgccaagaacaccgucaagagcgugggcaaguucugccuggaggccagcuucaacuaccucaagucccccaacuucagcaagcugaucaacaucaucaucugguuccugcuccuguccgugugccuggggccgcucaucuacagcaccgccgcgcugggcguccugauguccaaccucgggaugcccagcuacugcacgggcuaccgcgagggcuaccugaacuccaccaacgugaccaucgccaccuacugcacggggagcauccccugcuccgugugccugagcggccucgacucccuggacaccuaccccagccuggagaccauccagaucaccaucuccagcuucaagugggaccucacggccuucgggcuggucgccgagugguuccuggccuacauccucuucacccgguucuucuacgugcugggccuggcggccaucaugcagcucuucuucuccuacuucgccgugcacuucaucagcaacuccuggcugauguggcugaucaucaaccugguccagauggccccgaucagcgcgauggugcgcauguacaucuucuucgccuccuucuacuacguguggaagagcuacguccacgugguggacgggugcaacagcuccaccugcaugaugugcuacaagcggaaccgcgccacccgggucgagugcacgaccaucgugaacggcguccgccggagcuucuacguguacgccaacggcgggaagggcuucugcaagcuccacaacuggaacugcgugaacugcgacaccuucugcgccggguccaccuucaucagcgacgaggucgcgcgcgaccugucccugcaguucaagcggcccaucaaccccacggaccagagcuccuacaucguggacagcgugaccgucaagaacggcuccauccaccucuacuucgacaaggccgggcagaagaccuacgagcgccacagccugucccacuucgugaaccuggacaaccuccgggccaacaacaccaagggcagccugcccaucaacgugaucgucuucgacggcaaguccaagugcgaggagagcuccgccaagagcgccuccguguacuacagccagcugaugugccagccgauccuccugcuggaccaggcgcucguguccgacgucggggacagcgccgagguggccgugaagauguucgacgccuacgucaacacguucagcuccaccuucaacgugcccauggagaagcugaagacccugguggccaccgcggaggccgagcucgccaagaacgucagccuggacaacgugcuguccacguucaucagcgccgcgcgccagggcuucguggacuccgacgucgagaccaaggacgugguggagugccucaagcugagccaccaguccgacaucgaggucaccggggacagcugcaacaacuacaugcugaccuacaacaagguggagaacaugacgccccgggaccucggcgccugcaucgacugcuccgcccgccacaucaacgcccagguggccaagagccacaacaucgcgcugaucuggaacgucaaggacuucaugucccugagcgagcagcuccggaagcagauccgcuccgccgccaagaagaacaaccugcccuucaagcugaccugcgccaccacccgccagguggugaacgucgugacgaccaagaucgcccucaaggggggcugaggacuaguuauaagacugacuagcccgaugggccucccaacgggcccuccuccccuccuugcaccgagauuaauaaaaaaaaaaaaaaaaaaaaaaaaaaaaaaaaaaaaaaaaaaaaaaaaaaaaaaaaaaaaaaaaugcaucccccccccccccccccccccccccccccccaaaggcucuuuucagagccaccagaauu

SEQ ID NO: 21964 - RNA, 6058 nt, Artificial Sequence
  SARS-CoV-2__MT450936.1__non-structural protein 3 (NSP3) mRNA gc
aggagaaagcuuaccauggcccccaccaaggugaccuucggcgacgacacggucaucgaggugcagggguacaagagcgugaacaucaccuucgagcuggacgagcgcaucgacaagguccucaacgagaagugcuccgccuacaccguggagcugggcaccgaggugaacgaguucgcgugcgucguggccgacgccgugaucaagacgcugcagccggucagcgagcuccugaccccccuggggaucgaccucgacgagugguccauggccaccuacuaccuguucgacgagagcggcgaguucaagcuggccucccacauguacugcagcuucuacccccccgacgaggacgaggaggagggggacugcgaggaggaggaguucgagccguccacccaguacgaguacggcacggaggacgacuaccagggcaagccccucgaguucggggcgaccagcgccgcccugcagcccgaggaggagcaggaggaggacuggcuggacgacgacucccagcagaccgugggccagcaggacgggagcgaggacaaccagaccacgaccauccagaccaucguggagguccagccccagcucgagauggagcugaccccgguggugcagacgaucgaggucaacuccuucagcggcuaccugaagcucaccgacaacguguacaucaagaacgccgacaucguggaggaggcgaagaaggucaagcccaccgugguggucaacgccgccaacguguaccugaagcacgggggcggcguggccggggcccugaacaaggcgaccaacaacgccaugcaggucgaguccgacgacuacaucgccacgaacggcccccucaagguggggggcagcugcguccuguccggccacaaccuggccaagcacugccuccacgugguggggcccaacgucaacaagggcgaggacauccagcugcugaagagcgccuacgagaacuucaaccagcacgaggugcuccuggcgccgcugcucuccgccgggaucuucggcgccgaccccauccacagccugcgggugugcgucgacaccgugcgcaccaacguguaccuggccgucuucgacaagaaccucuacgacaagcugguguccagcuuccuggagaugaagagcgagaagcagguggagcagaagaucgccgagauccccaaggaggaggucaagcccuucaucaccgaguccaagccgagcguggagcagcggaagcaggacgacaagaagaucaaggcgugcguggaggaggucacgaccacccucgaggagaccaaguuccugacggagaaccugcuccuguacaucgacaucaacgggaaccugcaccccgacuccgccacccucgugagcgacaucgacaucaccuuccugaagaaggacgcccccuacaucgugggcgacgucgugcaggagggcgugcugaccgccgucgugauccccacgaagaaggccgggggcaccaccgagaugcucgcgaaggcccugcgcaaggugccgaccgacaacuacaucacgaccuaccccgggcagggccugaacggguacaccgucgaggaggccaagaccgugcucaagaagugcaaguccgccuucuacauccugcccagcaucaucuccaacgagaagcaggagauccugggcaccgugagcuggaaccuccgggagaugcuggcgcacgccgaggagacgcgcaagcugaugcccgucugcguggagaccaaggccaucguguccaccauccagcggaaguacaagggcaucaagauccaggagggggucguggacuacggcgcccgcuucuacuucuacaccagcaagacgaccguggccucccugaucaacacccucaacgaccugaacgagacccuggucacgaugccgcucggguacgugacccacggccugaaccuggaggaggcggcccgguacaugcgcagccucaaggugcccgccaccgucuccgugagcucccccgacgccgugaccgccuacaacggguaccugacgagcuccagcaagacccccgaggagcacuucaucgagaccaucucccuggcgggcagcuacaaggacuggagcuacuccggccagagcacccagcucgggaucgaguuccugaagcggggcgacaaguccgucuacuacacgagcaacccgaccaccuuccaccuggacggggaggugaucaccuucgacaaccucaagacgcugcugucccuccgcgaggugcggaccaucaaggucuucaccaccguggacaacaucaaccugcacacgcagguggucgacaugagcaugaccuacggccagcaguucggccccaccuaccuggacggggccgacgugaccaagaucaagccccacaacucccacgagggcaagacguucuacgugcucccgaacgacgacacccugcgcgucgaggccuucgaguacuaccacaccaccgaccccagcuuccuggggcgguacauguccgcccucaaccacacgaagaaguggaaguacccccaggugaacggccugaccagcaucaagugggccgacaacaacugcuaccuggcgaccgcccuccugacccugcagcagaucgagcucaaguucaaccccccggcccugcaggacgccuacuaccgcgcgcgggccggggaggccgccaacuucugcgcccugauccucgcguacugcaacaagacggugggcgagcugggcgacguccgcgagaccauguccuaccuguuccagcacgccaaccucgacagcugcaagcgggugcugaacgucgugugcaagaccugcgggcagcagcagaccacccugaagggcguggaggccgucauguacauggggacgcucuccuacgagcaguucaagaagggcgugcagauccccugcaccugcgggaagcaggccaccaaguaccuggugcagcaggagagccccuucgucaugauguccgcccccccggcgcaguacgagcugaagcacggcaccuucacgugcgccagcgaguacaccggcaacuaccagugcgggcacuacaagcacaucaccuccaaggagacccucuacugcaucgacggcgcccugcugacgaagagcagcgaguacaaggggcccaucaccgacguguucuacaaggagaacuccuacaccaccacgaucaagcccgugaccuacaagcucgacggcgucgugugcaccgagaucgaccccaagcuggacaacuacuacaagaaggacaacagcuacuucaccgagcagccgaucgaccuggugcccaaccagcccuaccccaacgccuccuucgacaacuucaaguucgucugcgacaacaucaaguucgccgacgaccucaaccagcugacgggguacaagaagccggcgagccgcgagcugaaggugaccuucuuccccgaccucaacggcgacguggucgccaucgacuacaagcacuacacccccuccuucaagaagggcgccaagcugcugcacaagcccaucguguggcacgugaacaacgccaccaacaaggcgacguacaagccgaacaccuggugcauccggugccucuggagcaccaagcccgucgagaccuccaacagcuucgacgugcugaaguccgaggacgcccaggggauggacaaccuggccugcgaggaccucaagcccgugagcgaggaggucguggagaaccccacgauccagaaggacgugcuggagugcaacgucaagaccaccgagguggugggcgacaucauccugaagccggccaacaacucccucaagaucaccgaggaggucgggcacacggaccugauggccgcguacguggacaacagcucccugaccaucaagaagcccaacgagcucagccgcgugcugggccugaagacccucgccacccacgggcuggccgccgucaacuccgugcccugggacacgaucgccaacuacgcgaagccguuccugaacaagguggucagcaccaccaccaacaucgugacgcgcugccucaaccgggugugcaccaacuacaugcccuacuucuucacccugcugcuccagcugugcaccuucacccgcuccacgaacagccggaucaaggccuccaugcccaccaccaucgccaagaacaccgucaagagcgugggcaaguucugccuggaggccagcuucaacuaccucaagucccccaacuucagcaagcugaucaacaucaucaucugguuccugcuccugaucaucugccugggcucccucaucuacagcacggccgcgcugggggugcugauguccaaccucggcaugccgagcuacugcaccggguaccgcgagggcuaccugaacuccaccaacgucaccaucgccacguacugcaccggcagcauccccugcuccgugugccugagcgggcucgacucccuggacaccuaccccagccuggagaccauccagaucacgaucuccagcuucaagugggaccucaccgccuucggccugguggccgagugguuccuggccuacauccucuucacccgguucuucuacguccuggggcuggcggccaucaugcagcucuucuucuccuacuucgccgugcacuucaucagcaacuccuggcugauguggcugaucaucaaccuggugcagauggcccccaucagcgcgaugguccgcauguacaucuucuucgccuccuucuacuacguguggaagagcuacgugcacgucguggacggcugcaacagcuccaccugcaugaugugcuacaagcggaaccgcgccacgcggguggagugcaccaccaucgucaacggggugcgccggagcuucuacgucuacgccaacggcggcaagggguucugcaagcuccacaacuggaacugcgugaacugcgacaccuucugcgccggcuccacguucaucagcgacgagguggcgcgcgaccugucccugcaguucaagcggccgaucaaccccaccgaccagagcuccuacaucgucgacagcgugaccgugaagaacggguccauccaccucuacuucgacaaggccggccagaagaccuacgagcgccacagccugucccacuucgucaaccuggacaaccuccgggccaacaacacgaaggggagccugcccaucaacgugaucguguucgacggcaaguccaagugcgaggagagcuccgccaagagcgccuccgucuacuacagccagcugaugugccagcccauccuccugcuggaccaggcgcucguguccgacgugggcgacagcgccgaggucgccgugaagauguucgacgccuacgugaacaccuucagcuccaccuucaacgucccgauggagaagcugaagacccugguggccacggcggaggccgagcucgccaagaacgugagccuggacaacguccuguccaccuucaucagcgccgcgcgccagggguucguggacuccgacguggagaccaaggacgucguggagugccucaagcugagccaccaguccgacaucgaggugaccggcgacagcugcaacaacuacaugcugacguacaacaaggucgagaacaugaccccccgggaccucggggccugcaucgacugcuccgcccgccacaucaacgcccagguggccaagagccacaacaucgcgcugaucuggaacgugaaggacuucaugucccugagcgagcagcuccggaagcagauccgcuccgccgccaagaagaacaaccugcccuucaagcugaccugcgccaccacgcgccaggucgugaacguggucaccaccaagaucgcccucaagggcgggugaggacuaguuauaagacugacuagcccgaugggccucccaacgggcccuccuccccuccuugcaccgagauuaauaaaaaaaaaaaaaaaaaaaaaaaaaaaaaaaaaaaaaaaaaaaaaaaaaaaaaaaaaaaaaaaaugcaucccccccccccccccccccccccccccccccaaaggcucuuuucagagccaccagaauu

SEQ ID NO: 21965 - RNA, 6058 nt, Artificial Sequence
  SARS-CoV-2__MT450951.1__non-structural protein 3 (NSP3) mRNA gc
aggagaaagcuuaccauggcccccaccaaggugaccuucggcgacgacacggucaucgaggugcagggguacaagagcgugaacaucaccuucgagcuggacgagcgcaucgacaagguccucaacgagaagugcuccgccuacaccguggagcugggcaccgaggugaacgaguucgcgugcgucguggccgacgccgugaucaagacgcugcagccggucagcgagcuccugaccccccuggggaucgaccucgacgagugguccauggccaccuacuaccuguucgacgagagcggcgaguucaagcuggccucccacauguacugcagcuucuacccccccgacgaggacgaggaggagggggacugcgaggaggaggaguucgagccguccacccaguacgaguacggcacggaggacgacuaccagggcaagccccucgaguucggggcgaccagcgccgcccugcagcccgaggaggagcaggaggaggacuggcuggacgacgacucccagcagaccgugggccagcaggacgggagcgaggacaaccagaccacgaccauccagaccaucguggagguccagccccagcucgagauggagcugaccccgguggugcagacgaucgaggucaacuccuucagcggcuaccugaagcucaccgacaacguguacaucaagaacgccgacaucguggaggaggcgaagaaggucaagcccaccgugguggucaacgccgccaacguguaccugaagcacgggggcggcguggccggggcccugaacaaggcgaccaacaacgccaugcaggucgaguccgacgacuacaucgccacgaacggcccccucaagguggggggcagcugcguccuguccggccacaaccuggccaagcacugccuccacgugguggggcccaacgucaacaagggcgaggacauccagcugcugaagagcgccuacgagaacuucaaccagcacgaggugcuccuggcgccgcugcucuccgccgggaucuucggcgccgaccccauccacagccugcgggugugcgucgacaccgugcgcaccaacguguaccuggccgucuucgacaagaaccucuacgacaagcugguguccagcuuccuggagaugaagagcgagaagcagguggagcagaagaucgccgagauccccaaggaggaggucaagcccuucaucaccgaguccaagccgagcguggagcagcggaagcaggacgacaagaagaucaaggcgugcguggaggaggucacgaccacccucgaggagaccaaguuccugacggagaaccugcuccuguacaucgacaucaacgggaaccugcaccccgacuccgccacccucgugagcgacaucgacaucaccuuccugaagaaggacgcccccuacaucgugggcgacgucgugcaggagggcgugcugaccgccgucgugauccccacgaagaaggccgggggcaccaccgagaugcucgcgaaggcccugcgcaaggugccgaccgacaacuacaucacgaccuaccccgggcagggccugaacggguacaccgucgaggaggccaagaccgugcucaagaagugcaaguccgccuucuacauccugcccagcaucaucuccaacgagaagcaggagauccugggcaccgugagcuggaaccuccgggagaugcuggcgcacgccgaggagacgcgcaagcugaugcccgucugcguggagaccaaggccaucguguccaccauccagcggaaguacaagggcaucaagauccaggagggggucguggacuacggcgcccgcuucuacuucuacaccagcaagacgaccguggccucccugaucaacacccucaacgaccugaacgagacccuggucacgaugccgcucggguacgugacccacggccugaaccuggaggaggcggcccgguacaugcgcagccucaaggugcccgccaccgucuccgugagcucccccgacgccgugaccgccuacaacggguaccugacgagcuccagcaagacccccgaggagcacuucaucgagaccaucucccuggcgggcagcuacaaggacuggagcuacuccggccagagcacccagcucgggaucgaguuccugaagcggggcgacaaguccgucuacuacacgagcaacccgaccaccuuccaccuggacggggaggugaucaccuucgacaaccucaagacgcugcugucccuccgcgaggugcggaccaucaaggucuucaccaccguggacaacaucaaccugcacacgcagguggucgacaugagcaugaccuacggccagcaguucggccccaccuaccuggacggggccgacgugaccaagaucaagccccacaacucccacgagggcaagacguucuacgugcucccgaacgacgacacccugcgcgucgaggccuucgaguacuaccacaccaccgaccccagcuuccuggggcgguacauguccgcccucaaccacacgaagaaguggaaguacccccaggugaacggccugaccagcaucaagugggccgacaacaacugcuaccuggcgaccgcccuccugacccugcagcagaucgagcucaaguucaaccccccggcccugcaggacgccuacuaccgcgcgcgggccggggaggccgccaacuucugcgcccugauccucgcguacugcaacaagacggugggcgagcugggcgacguccgcgagaccauguccuaccuguuccagcacgccaaccucgacagcugcaagcgggugcugaacgucgugugcaagaccugcgggcagcagcagaccacccugaagggcguggaggccgucauguacauggggacgcucuccuacgagcaguucaagaagggcgugcagauccccugcaccugcgggaagcaggccaccaaguaccuggugcagcaggagagccccuucgucaugauguccgcccccccggcgcaguacgagcugaagcacggcaccuucacgugcgccagcgaguacaccggcaacuaccagugcgggcacuacaagcacaucaccuccaaggagacccucuacugcaucgacggcgcccugcugacgaagagcagcgaguacaaggggcccaucaccgacguguucuacaaggagaacuccuacaccaccacgaucaagcccgugaccuacaagcucgacggcgucgugugcaccgagaucgaccccaagcuggacaacuacuacaagaaggacaacagcuacuucaccgagcagccgaucgaccuggugcccaaccagcccuaccccaacgccuccuucgacaacuucaaguucgucugcgacaacaucaaguucgccgacgaccucaaccagcugacgggguacaagaagccggcgagccgcgagcugaaggugaccuucuuccccgaccucaacggcgacguggucgccaucgacuacaagcacuacacccccuccuucaagaagggcgccaagcugcugcacaagcccaucguguggcacgugaacaacgccaccaacaaggcgacguacaagccgaacaccuggugcauccggugccucuggagcaccaagcccgucgagaccuccaacagcuucgacgugcugaaguccgaggacgcccaggggauggacaaccuggccugcgaggaccucaagcccgugagcgaggaggucguggagaaccccacgauccagaaggacgugcuggagugcaacgucaagaccaccgagguggugggcgacaucauccugaagccggccaacaacucccucaagaucaccgaggaggucgggcacacggaccugauggccgcguacguggacaacagcucccugaccaucaagaagcccaacgagcucagccgcgugcugggccugaagacccucgccacccacgggcuggccgccgucaacuccgugcccugggacacgaucgccaacuacgcgaagccguuccugaacaagguggucagcaccaccaccaacaucgugacgcgcugccucaaccgggugugcaccaacuacaugcccuacuucuucacccugcugcuccagcugugcaccuucacccgcuccacgaacagccggaucaaggccuccaugcccaccaccaucgccaagaacaccgucaagagcgugggcaaguucugccuggaggccagcuucaacuaccucaagucccccaacuucagcaagcugaucaacaucaucaucugguuccugcuccuguccgugugccugggcagccucaucuacuccacggccgcgcuggggguccugaugagcaaccucggcaugccguccuacugcaccggguaccgcgagggcuaccugaacagcaccaacgugaccaucgccacguacugcaccggcuccauccccuacagcgugugccuguccgggcucgacagccuggacaccuaccccucccuggagaccauccagaucacgaucagcuccuucaagugggaccucaccgccuucggccuggucgccgagugguuccuggccuacauccucuucacccgguucuucuacgugcuggggcuggcggccaucaugcagcucuucuucagcuacuucgccgugcacuucaucuccaacagcuggcugauguggcugaucaucaaccugguccagauggcccccaucuccgcgauggugcgcauguacaucuucuucgccagcuucuacuacguguggaagagcuacguccacgugguggacggcugcaacuccagcaccugcaugaugugcuacaagcggaaccgcgccacgcgggucgagugcaccaccaucgugaacgggguccgccgguccuucuacguguacgccaacggcggcaagggguucugcaagcuccacaacuggaacugcgugaacugcgacaccuucugcgccggcagcacguucaucuccgacgaggucgcgcgcgaccugagccugcaguucaagcggccgaucaaccccaccgaccaguccagcuacaucguggacuccgugaccgucaagaacgggagcauccaccucuacuucgacaaggccggccagaagaccuacgagcgccacucccugagccacuucgugaaccuggacaaccuccgggccaacaacacgaaggggucccugcccaucaacgugaucgucuucgacggcaagagcaagugcgaggaguccagcgccaaguccgccagcguguacuacucccagcugaugugccagcccauccuccugcuggaccaggcgcucgugagcgacgucggcgacagcgccgagguggccgugaagauguucgacgccuacgucaacaccuucuccagcaccuucaacgugccgauggagaagcugaagacccugguggccacggcggaggccgagcucgccaagaacgucucccuggacaacgugcugagcaccuucaucuccgccgcgcgccagggguucguggacagcgacgucgagaccaaggacgugguggagugccucaagcugucccaccagagcgacaucgaggucaccggcgacuccugcaacaacuacaugcugacguacaacaagguggagaacaugaccccccgggaccucggggccugcaucgacugcagcgcccgccacaucaacgcccagguggccaagucccacaacaucgcgcugaucuggaacgucaaggacuucaugagccuguccgagcagcuccggaagcagauccgcagcgccgccaagaagaacaaccugcccuucaagcugaccugcgccaccacgcgccagguggugaacgucgugaccaccaagaucgcccucaagggcgggugaggacuaguuauaagacugacuagcccgaugggccucccaacgggcccuccuccccuccuugcaccgagauuaauaaaaaaaaaaaaaaaaaaaaaaaaaaaaaaaaaaaaaaaaaaaaaaaaaaaaaaaaaaaaaaaaugcaucccccccccccccccccccccccccccccccaaaggcucuuuucagagccaccagaauu

SEQ ID NO: 21966 - RNA, 6058 nt, Artificial Sequence
  SARS-CoV-2__MT451017.1__non-structural protein 3 (NSP3) mRNA gc
aggagaaagcuuaccauggcccccaccaaggugaccuucggcgacgacacggucaucgaggugcagggguacaagagcgugaacaucaccuucgagcuggacgagcgcaucgacaagguccucaacgagaagugcuccgccuacaccguggagcugggcaccgaggugaacgaguucgcgugcgucguggccgacgccgugaucaagacgcugcagccggucagcgagcuccugaccccccuggggaucgaccucgacgagugguccauggccaccuacuaccuguucgacgagagcggcgaguucaagcuggccucccacauguacugcagcuucuacccccccgacgaggacgaggaggagggggacugcgaggaggaggaguucgagccguccacccaguacgaguacggcacggaggacgacuaccagggcaagccccucgaguucggggcgaccagcgccgcccugcagcuggaggaggagcaggaggaggacuggcucgacgacgacucccagcagaccgugggccagcaggacgggagcgaggacaaccagaccacgaccauccagaccaucguggagguccagccccagcuggagauggagcugacccccguggugcagacgaucgaggucaacuccuucagcggcuaccucaagcugaccgacaacguguacaucaagaacgccgacaucguggaggaggcgaagaaggucaagccgaccgugguggucaacgccgccaacguguaccugaagcacgggggcggcguggccggggcccucaacaaggcgaccaacaacgccaugcaggucgaguccgacgacuacaucgccacgaacggcccccugaagguggggggcagcugcguccuguccggccacaaccucgccaagcacugccugcacgugguggggcccaacgucaacaagggcgaggacauccagcugcucaagagcgccuacgagaacuucaaccagcacgaggugcugcuggcgccccuccuguccgccgggaucuucggcgccgacccgauccacagccugcgggugugcgucgacaccgugcgcaccaacguguaccucgccgucuucgacaagaaccuguacgacaagcugguguccagcuuccucgagaugaagagcgagaagcagguggagcagaagaucgccgagauccccaaggaggaggucaagcccuucaucaccgaguccaagcccagcguggagcagcggaagcaggacgacaagaagaucaaggcgugcguggaggaggucacgaccacccuggaggagaccaaguuccugacggagaaccuccugcuguacaucgacaucaacgggaaccuccacccggacuccgccacccuggugagcgacaucgacaucaccuuccugaagaaggacgcccccuacaucgugggcgacgucgugcaggagggcgugcucaccgccgucgugauccccacgaagaaggccgggggcaccaccgagaugcuggcgaaggcccugcgcaaggugcccaccgacaacuacaucacgaccuacccggggcagggccucaacggguacaccgucgaggaggccaagaccgugcugaagaagugcaaguccgccuucuacauccugcccagcaucaucuccaacgagaagcaggagauccucggcaccgugagcuggaaccugcgggagauguucgcgcacgccgaggagacgcgcaagcugaugcccgucugcguggagaccaaggccaucguguccaccauccagcggaaguacaagggcaucaagauccaggagggggucguggacuacggcgcccgcuucuacuucuacaccagcaagacgaccguggccucccugaucaacacccucaacgaccugaacgagacccuggucacgaugccccucggguacgugacccacggccugaaccuggaggaggcggcccgguacaugcgcagccucaaggugccggccaccgucuccgugagcucccccgacgccgugaccgccuacaacggguaccugacgagcuccagcaagacccccgaggagcacuucaucgagaccaucucccuggcgggcagcuacaaggacuggagcuacuccggccagagcacccagcucgggaucgaguuccugaagcggggcgacaaguccgucuacuacacgagcaaccccaccaccuuccaccuggacggggaggugaucaccuucgacaaccucaagacgcugcugucccuccgcgaggugcggaccaucaaggucuucaccaccguggacaacaucaaccugcacacgcagguggucgacaugagcaugaccuacggccagcaguucggcccgaccuaccuggacggggccgacgugaccaagaucaagccccacaacucccacgagggcaagacguucuacgugcuccccaacgacgacacccugcgcgucgaggccuucgaguacuaccacaccaccgacccgagcuuccuggggcgguacauguccgcccucaaccacacgaagaaguggaaguacccccaggugaacggccugaccagcaucaagugggccgacaacaacugcuaccuggcgaccgcccuccugacccugcagcagaucgagcucaaguucaacccccccgcccugcaggacgccuacuaccgcgcgcgggccggggaggccgccaacuucugcgcccugauccucgcguacugcaacaagacggugggcgagcugggcgacguccgcgagaccauguccuaccuguuccagcacgccaaccucgacagcugcaagcgggugcugaacgucgugugcaagaccugcgggcagcagcagaccacccugaagggcguggaggccgucauguacauggggacgcucuccuacgagcaguucaagaagggcgugcagaucccgugcaccugcgggaagcaggccaccaaguaccuggugcagcaggagagccccuucgucaugauguccgccccccccgcgcaguacgagcugaagcacggcaccuucacgugcgccagcgaguacaccggcaacuaccagugcgggcacuacaagcacaucaccuccaaggagacccucuacugcaucgacggcgcccugcugacgaagagcagcgaguacaaggggccgaucaccgacguguucuacaaggagaacuccuacaccaccacgaucaagcccgugaccuacaagcucgacggcgucgugugcaccgagaucgaccccaagcuggacaacuacuacaagaaggacaacagcuacuucaccgagcagcccaucgaccuggugccgaaccagcccuaccccaacgccuccuucgacaacuucaaguucgucugcgacaacaucaaguucgccgacgaccucaaccagcugacgggguacaagaagcccgcgagccgcgagcugaaggugaccuucuucccggaccucaacggcgacguggucgccaucgacuacaagcacuacacccccuccuucaagaagggcgccaagcugcugcacaagcccaucguguggcacgugaacaacgccaccaacaaggcgacguacaagcccaacaccuggugcauccggugccucuggagcaccaagccggucgagaccuccaacagcuucgacgugcugaaguccgaggacgcccaggggauggacaaccuggccugcgaggaccucaagcccgugagcgaggaggucguggagaaccccacgauccagaaggacgugcuggagugcaacgucaagaccaccgagguggugggcgacaucauccugaagcccgccaacaacucccucaagaucaccgaggaggucgggcacacggaccugauggccgcguacguggacaacagcucccugaccaucaagaagccgaacgagcucagccgcgugcugggccugaagacccucgccacccacgggcuggccgccgucaacuccgugcccugggacacgaucgccaacuacgcgaagcccuuccugaacaagguggucagcaccaccaccaacaucgugacgcgcugccucaaccgggugugcaccaacuacaugccguacuucuucacccugcugcuccagcugugcaccuucacccgcuccacgaacagccggaucaaggccuccaugcccaccaccaucgccaagaacaccgucaagagcgugggcaaguucugccuggaggccagcuucaacuaccucaagucccccaacuucagcaagcugaucaacaucaucaucugguuccugcuccuguccgugugccugggcagccucaucuacuccacggccgcgcuggggguccugaugagcaaccucggcaugcccuccuacugcaccggguaccgcgagggcuaccugaacagcaccaacgugaccaucgccacguacugcaccggcuccaucccgugcagcgugugccuguccgggcucgacagccuggacaccuaccccucccuggagaccauccagaucacgaucagcuccuucaagugggaccucaccgccuucggccuggucgccgagugguuccuggccuacauccucuucacccgguucuucuacgugcuggggcuggcggccaucaugcagcucuucuucagcuacuucgccgugcacuucaucuccaacagcuggcugauguggcugaucaucaaccugguccagauggcccccaucuccgcgauggugcgcauguacaucuucuucgccagcuucuacuacguguggaagagcuacguccacgugguggacggcugcaacuccagcaccugcaugaugugcuacaagcggaaccgcgccacgcgggucgagugcaccaccaucgugaacgggguccgccgguccuucuacguguacgccaacggcggcaagggguucugcaagcuccacaacuggaacugcgugaacugcgacaccuucugcgccggcagcacguucaucuccgacgaggucgcgcgcgaccugagccugcaguucaagcggcccaucaacccgaccgaccaguccagcuacaucguggacuccgugaccgucaagaacgggagcauccaccucuacuucgacaaggccggccagaagaccuacgagcgccacucccugagccacuucgugaaccuggacaaccuccgggccaacaacacgaaggggucccugcccaucaacgugaucgucuucgacggcaagagcaagugcgaggaguccagcgccaaguccgccagcguguacuacucccagcugaugugccagcccauccuccugcuggaccaggcgcucgugagcgacgucggcgacagcgccgagguggccgugaagauguucgacgccuacgucaacaccuucuccagcaccuucaacgugcccauggagaagcugaagacccugguggccacggcggaggccgagcucgccaagaacgucucccuggacaacgugcugagcaccuucaucuccgccgcgcgccagggguucguggacagcgacgucgagaccaaggacgugguggagugccucaagcugucccaccagagcgacaucgaggucaccggcgacuccugcaacaacuacaugcugacguacaacaagguggagaacaugaccccgcgggaccucggggccugcaucgacugcagcgcccgccacaucaacgcccagguggccaagucccacaacaucgcgcugaucuggaacgucaaggacuucaugagccuguccgagcagcuccggaagcagauccgcagcgccgccaagaagaacaaccugcccuucaagcugaccugcgccaccacgcgccagguggugaacgucgugaccaccaagaucgcccucaagggcgggugaggacuaguuauaagacugacuagcccgaugggccucccaacgggcccuccuccccuccuugcaccgagauuaauaaaaaaaaaaaaaaaaaaaaaaaaaaaaaaaaaaaaaaaaaaaaaaaaaaaaaaaaaaaaaaaaugcaucccccccccccccccccccccccccccccccaaaggcucuuuucagagccaccagaauu

SEQ ID NO: 21967 - RNA, 6058 nt, Artificial Sequence
  SARS-CoV-2__MT451142.1__non-structural protein 3 (NSP3) mRNA gc
aggagaaagcuuaccauggcccccaccaaggugaccuucggcgacgacacggucaucgaggugcagggguacaagagcgugaacaucaccuucgagcuggacgagcgcaucgacaagguccucaacgagaagugcuccgccuacaccguggagcugggcaccgaggugaacgaguucgcgugcgucguggccgacgccgugaucaagacgcugcagccggucagcgagcuccugaccccccuggggaucgaccucgacgagugguccauggccaccuacuaccuguucgacgagagcggcgaguucaagcugaccucccacauguacugcagcuucuacccccccgacgaggacgaggaggagggggacugcgaggaggaggaguucgagccguccacgcaguacgaguacggcaccgaggacgacuaccagggcaagccccucgaguucggggccaccagcgcggcccugcagcccgaggaggagcaggaggaggacuggcuggacgacgacucccagcagaccgugggccagcaggacgggagcgaggacaaccagacgaccaccauccagaccaucguggagguccagccccagcucgagauggagcugacgccgguggugcagaccaucgaggucaacuccuucagcggcuaccugaagcucaccgacaacguguacaucaagaacgccgacaucguggaggaggccaagaaggucaagcccaccgugguggucaacgcggccaacguguaccugaagcacgggggcggcguggccggggcccugaacaaggccacgaacaacgcgaugcaggucgaguccgacgacuacaucgccaccaacggcccccucaagguggggggcagcugcguccuguccggccacaaccuggccaagcacugccuccacgugguggggcccaacgucaacaagggcgaggacauccagcugcugaagagcgccuacgagaacuucaaccagcacgaggugcuccuggccccgcugcucuccgcggggaucuucggcgccgaccccauccacagccugcgggugugcgucgacaccgugcgcaccaacguguaccuggccgucuucgacaagaaccucuacgacaagcugguguccagcuuccuggagaugaagagcgagaagcagguggagcagaagaucgccgagauccccaaggaggaggucaagcccuucaucacggaguccaagccgagcguggagcagcggaagcaggacgacaagaagaucaaggccugcguggaggaggucaccaccacccucgaggagacgaaguuccugaccgagaaccugcuccuguacaucgacaucaacgggaaccugcaccccgacuccgcgacccucgugagcgacaucgacaucaccuuccugaagaaggacgcccccuacaucgugggcgacgucgugcaggagggcgugcugacggccgucgugauccccaccaagaaggccgggggcaccaccgagaugcucgccaaggcgcugcgcaaggugccgacggacaacuacaucaccaccuaccccgggcagggccugaacggguacaccgucgaggaggccaagaccgugcucaagaagugcaaguccgccuucuacauccugcccagcaucaucuccaacgagaagcaggagauccugggcacggugagcuggaaccuccgggagaugcuggcccacgcggaggagacccgcaagcugaugcccgucugcguggagaccaaggccaucguguccaccauccagcggaaguacaagggcaucaagauccaggagggggucguggacuacggcgcccgcuucuacuucuacacgagcaagaccaccguggccucccugaucaacacccucaacgaccugaacgagacgcuggucaccaugccgcucggguacgugacccacggccugaaccuggaggaggccgcgcgguacaugcgcagccucaaggugcccgccaccgucuccgugagcucccccgacgccgugacggccuacaacggguaccugaccagcuccagcaagacccccgaggagcacuucaucgagaccaucucccuggccggcagcuacaaggacuggagcuacuccggccagagcacgcagcucgggaucgaguuccugaagcggggcgacaaguccgucuacuacaccagcaacccgaccaccuuccaccuggacggggaggugaucacguucgacaaccucaagacccugcugucccuccgcgaggugcggaccaucaaggucuucaccacgguggacaacaucaaccugcacacccagguggucgacaugagcaugaccuacggccagcaguucggccccaccuaccuggacggggcggacgugacgaagaucaagccccacaacucccacgagggcaagaccuucuacgugcucccgaacgacgacacccugcgcgucgaggccuucgaguacuaccacaccacggaccccagcuuccuggggcgguacauguccgcccucaaccacaccaagaaguggaaguacccccaggugaacggccugaccagcaucaagugggccgacaacaacugcuaccuggccaccgcgcuccugacgcugcagcagaucgagcucaaguucaaccccccggcccugcaggacgccuacuaccgcgcccgggcgggggaggccgccaacuucugcgcccugauccucgccuacugcaacaagaccgugggcgagcugggcgacguccgcgagaccauguccuaccuguuccagcacgcgaaccucgacagcugcaagcgggugcugaacgucgugugcaagaccugcgggcagcagcagaccacgcugaagggcguggaggccgucauguacauggggacccucuccuacgagcaguucaagaagggcgugcagauccccugcaccugcgggaagcaggccaccaaguaccuggugcagcaggagagccccuucgucaugauguccgcccccccggcccaguacgagcugaagcacggcacguucaccugcgcgagcgaguacaccggcaacuaccagugcgggcacuacaagcacaucaccuccaaggagacgcucuacugcaucgacggcgcccugcugaccaagagcagcgaguacaaggggcccaucaccgacguguucuacaaggagaacuccuacaccacgaccaucaagcccgugaccuacaagcucgacggcgucgugugcaccgagaucgaccccaagcuggacaacuacuacaagaaggacaacagcuacuucacggagcagccgaucgaccuggugcccaaccagcccuaccccaacgccuccuucgacaacuucaaguucgucugcgacaacaucaaguucgccgacgaccucaaccagcugaccggguacaagaagccggccagccgcgagcugaaggugaccuucuuccccgaccucaacggcgacguggucgcgaucgacuacaagcacuacacccccuccuucaagaagggcgccaagcugcugcacaagcccaucguguggcacgugaacaacgccacgaacaaggccaccuacaagccgaacaccuggugcauccggugccucuggagcaccaagcccgucgagacguccaacagcuucgacgugcugaaguccgaggacgcgcaggggauggacaaccuggccugcgaggaccucaagcccgugagcgaggaggucguggagaaccccaccauccagaaggacgugcuggagugcaacgucaagaccaccgagguggugggcgacaucauccugaagccggccaacaacucccucaagaucacggaggaggucgggcacaccgaccugauggccgccuacguggacaacagcucccugaccaucaagaagcccaacgagcucagccgcgugcugggccugaagacccucgcgacgcacgggcuggccgccgucaacuccgugcccugggacaccaucgccaacuacgccaagccguuccugaacaagguggucagcaccaccacgaacaucgugacccgcugccucaaccgggugugcaccaacuacaugcccuacuucuucacccugcugcuccagcugugcaccuucacgcgcuccaccaacagccggaucaaggcguccaugcccaccaccaucgccaagaacacggucaagagcgugggcaaguucugccuggaggccagcuucaacuaccucaagucccccaacuucagcaagcugaucaacaucaucaucugguuccugcuccuguccgugugccugggcagccucaucuacuccaccgccgcccuggggguccugaugagcaaccucggcaugccguccuacugcaccggguaccgcgagggcuaccugaacagcaccaacgugacgaucgcgaccuacugcaccggcuccauccccugcagcgugugccuguccgggcucgacagccuggacaccuaccccucccuggagacgauccagaucaccaucagcuccuucaagugggaccucaccgccuucggccuggucgccgagugguuccuggccuacauccucuucacccgguucuucuacgugcuggggcuggccgcgaucaugcagcucuucuucagcuacuucgccgugcacuucaucuccaacagcuggcugauguggcugaucaucaaccugguccagauggcccccaucuccgccauggugcgcauguacaucuucuucgcgagcuucuacuacguguggaagagcuacguccacgugguggacggcugcaacuccagcacgugcaugaugugcuacaagcggaaccgcgccacccgggucgagugcaccaccaucgugaacgggguccgccgguccuucuacguguacgccaacggcggcaagggguucugcaagcuccacaacuggaacugcgugaacugcgacacguucugcgccggcagcaccuucaucuccgacgaggucgcccgcgaccugagccugcaguucaagcggccgaucaaccccaccgaccaguccagcuacaucguggacuccgugaccgucaagaacgggagcauccaccucuacuucgacaaggcgggccagaagacguacgagcgccacucccugagccacuucgugaaccuggacaaccuccgggccaacaacaccaaggggucccugcccaucaacgugaucgucuucgacggcaagagcaagugcgaggaguccagcgccaaguccgccagcguguacuacucccagcugaugugccagcccauccuccugcuggaccaggcccucgugagcgacgucggcgacagcgcggagguggccgugaagauguucgacgccuacgucaacaccuucuccagcaccuucaacgugccgauggagaagcugaagacgcugguggccaccgccgaggcggagcucgccaagaacgucucccuggacaacgugcugagcaccuucaucuccgccgcccgccagggguucguggacagcgacgucgagaccaaggacgugguggagugccucaagcugucccaccagagcgacaucgaggucacgggcgacuccugcaacaacuacaugcugaccuacaacaagguggagaacaugaccccccgggaccucggggcgugcaucgacugcagcgcccgccacaucaacgcccagguggccaagucccacaacaucgcccugaucuggaacgucaaggacuucaugagccuguccgagcagcuccggaagcagauccgcagcgcggccaagaagaacaaccugcccuucaagcugaccugcgccacgacccgccagguggugaacgucgugaccaccaagaucgcccucaagggcgggugaggacuaguuauaagacugacuagcccgaugggccucccaacgggcccuccuccccuccuugcaccgagauuaauaaaaaaaaaaaaaaaaaaaaaaaaaaaaaaaaaaaaaaaaaaaaaaaaaaaaaaaaaaaaaaaaugcaucccccccccccccccccccccccccccccccaaaggcucuuuucagagccaccagaauu

SEQ ID NO: 21968 - RNA, 6058 nt, Artificial Sequence
  SARS-CoV-2__MT451146.1__non-structural protein 3 (NSP3) mRNA gc
aggagaaagcuuaccauggcccccaccaaggugaccuucggcgacgacacggucaucgaggugcagggguacaagagcgugaacaucaccuucgagcuggacgagcgcaucgacaagguccucaacgagaagugcuccgccuacaccguggagcugggcaccgaggugaacgaguucgcgugcgucguggccgacgccgugaucaagacgcugcagccggucagcgagcuccugaccccccuggggaucgaccucgacgagugguccauggccaccuacuaccuguucgacgagagcggcgaguucaagcuggccucccacauguacugcagcuucuacccccccgacgaggacgaggaggagggggacugcgaggaggaggaguucgagccguccacccaguacgaguacggcacggaggacgacuaccagggcaagccccucgaguucggggcgaccagcgccgcccugcagcccgaggaggagcaggaggaggacuggcuggacgacgacucccagcagaccgugggccagcaggacgggagcgaggacaaccagaccacgaccauccagaccaucguggagguccagccccagcucgagauggagcugaccccgguggugcagacgaucgaggucaacuccuucagcggcuaccugaagcucaccgacaacguguacaucaagaacgccgacaucguggaggaggcgaagaagaucaagcccaccgucguggugaacgccgccaacgucuaccugaagcacgggggcggcguggccggggcccugaacaaggcgaccaacaacgccaugcagguggaguccgacgacuacaucgccacgaacggcccccucaaggucgggggcagcugcgugcuguccggccacaaccuggccaagcacugccuccacgucguggggcccaacgugaacaagggcgaggacauccagcugcugaagagcgccuacgagaacuucaaccagcacgagguccuccuggcgccgcugcucuccgccgggaucuucggcgccgaccccauccacagccugcgggugugcguggacaccguccgcaccaacguguaccuggccguguucgacaagaaccucuacgacaagcuggucuccagcuuccuggagaugaagagcgagaagcagguggagcagaagaucgccgagauccccaaggaggaggugaagcccuucaucaccgaguccaagccgagcgucgagcagcggaagcaggacgacaagaagaucaaggcgugcguggaggaggugacgaccacccucgaggagaccaaguuccugacggagaaccugcuccuguacaucgacaucaacgggaaccugcaccccgacuccgccacccucgucagcgacaucgacaucaccuuccugaagaaggacgcccccuacaucgugggcgacgugguccaggagggcgugcugaccgccguggucauccccacgaagaaggccgggggcaccaccgagaugcucgcgaaggcccugcgcaaggugccgaccgacaacuacaucacgaccuaccccgggcagggccugaacggguacaccguggaggaggccaagaccguccucaagaagugcaaguccgccuucuacauccugcccagcaucaucuccaacgagaagcaggagauccugggcaccgugagcuggaaccuccgggagaugcuggcgcacgccgaggagacgcgcaagcugaugcccgugugcgucgagaccaaggccaucguguccaccauccagcggaaguacaagggcaucaagauccaggaggggguggucgacuacggcgcccgcuucuacuucuacaccagcaagacgaccguggccucccugaucaacacccucaacgaccugaacgagacccuggugacgaugccgcucggguacgucacccacggccugaaccuggaggaggcggcccgguacaugcgcagccucaaggugcccgccaccguguccgucagcucccccgacgccgugaccgccuacaacggguaccugacgagcuccagcaagacccccgaggagcacuucaucgagaccaucucccuggcgggcagcuacaaggacuggagcuacuccggccagagcacccagcucgggaucgaguuccugaagcggggcgacaaguccguguacuacacgagcaacccgaccaccuuccaccuggacggggaggucaucaccuucgacaaccucaagacgcugcugucccuccgcgaggugcggaccaucaagguguucaccaccgucgacaacaucaaccugcacacgcaggugguggacaugagcaugaccuacggccagcaguucggccccaccuaccuggacggggccgacgucaccaagaucaagccccacaacucccacgagggcaagacguucuacgugcucccgaacgacgacacccugcgcguggaggccuucgaguacuaccacaccaccgaccccagcuuccuggggcgguacauguccgcccucaaccacacgaagaaguggaaguacccccaggucaacggccugaccagcaucaagugggccgacaacaacugcuaccuggcgaccgcccuccugacccugcagcagaucgagcucaaguucaaccccccggcccugcaggacgccuacuaccgcgcgcgggccggggaggccgccaacuucugcgcccugauccucgcguacugcaacaagacggugggcgagcugggcgacgugcgcgagaccauguccuaccuguuccagcacgccaaccucgacagcugcaagcggguccugaacguggucugcaagaccugcgggcagcagcagaccacccugaagggcguggaggccgugauguacauggggacgcucuccuacgagcaguucaagaagggcguccagauccccugcaccugcgggaagcaggccaccaaguaccuggugcagcaggagagccccuucgugaugauguccgcccccccggcgcaguacgagcugaagcacggcaccuucacgugcgccagcgaguacaccggcaacuaccagugcgggcacuacaagcacaucaccuccaaggagacccucuacugcaucgacggcgcccugcugacgaagagcagcgaguacaaggggcccaucaccgacgucuucuacaaggagaacuccuacaccaccacgaucaagcccgugaccuacaagcucgacggcguggucugcaccgagaucgaccccaagcuggacaacuacuacaagaaggacaacagcuacuucaccgagcagccgaucgaccuggugcccaaccagcccuaccccaacgccuccuucgacaacuucaaguucgugugcgacaacaucaaguucgccgacgaccucaaccagcugacgggguacaagaagccggcgagccgcgagcugaaggucaccuucuuccccgaccucaacggcgacgugguggccaucgacuacaagcacuacacccccuccuucaagaagggcgccaagcugcugcacaagcccaucgucuggcacgugaacaacgccaccaacaaggcgacguacaagccgaacaccuggugcauccggugccucuggagcaccaagcccguggagaccuccaacagcuucgacguccugaaguccgaggacgcccaggggauggacaaccuggccugcgaggaccucaagcccgugagcgaggagguggucgagaaccccacgauccagaaggacgugcuggagugcaacgugaagaccaccgaggucgugggcgacaucauccugaagccggccaacaacucccucaagaucaccgaggagguggggcacacggaccugauggccgcguacgucgacaacagcucccugaccaucaagaagcccaacgagcucagccgcgugcugggccugaagacccucgccacccacgggcuggccgccgugaacuccguccccugggacacgaucgccaacuacgcgaagccguuccugaacaagguggugagcaccaccaccaacaucgucacgcgcugccucaaccgggugugcaccaacuacaugcccuacuucuucacccugcugcuccagcugugcaccuucacccgcuccacgaacagccggaucaaggccuccaugcccaccaccaucgccaagaacaccgugaagagcgucggcaaguucugccuggaggccagcuucaacuaccucaagucccccaacuucagcaagcugaucaacaucaucaucugguuccugcuccuguccgugugccugggcagccucaucuacuccacggccgcgcugggggugcugaugagcaaccucggcaugccguccuacugcaccggguaccgcgagggcuaccugaacagcaccaacgucaccaucgccacguacugcaccggcuccauccccugcagcgugugccuguccgggcucgacagccuggacaccuaccccucccuggagaccauccagaucacgaucagcuccuucaagugggaccucaccgccuucggccugguggccgagugguuccuggccuacauccucuucacccgguucuucuacguccuggggcuggcggccaucaugcagcucuucuucagcuacuucgccgugcacuucaucuccaacagcuggcugauguggcugaucaucaaccuggugcagauggcccccaucuccgcgaugguccgcauguacaucuucuucgccagcuucuacuacguguggaagagcuacgugcacgucguggacggcugcaacuccagcaccugcaugaugugcuacaagcggaaccgcgccacgcggguggagugcaccaccaucgucaacggggugcgccgguccuucuacgucuacgccaacggcggcaagggguucugcaagcuccacaacuggaacugcgugaacugcgacaccuucugcgccggcagcacguucaucuccgacgagguggcgcgcgaccugagccugcaguucaagcggccgaucaaccccaccgaccaguccagcuacaucgucgacuccgugaccgugaagaacgggagcauccaccucuacuucgacaaggccggccagaagaccuacgagcgccacucccugagccacuucgucaaccuggacaaccuccgggccaacaacacgaaggggucccugcccaucaacgugaucguguucgacggcaagagcaagugcgaggaguccagcgccaaguccgccagcgucuacuacucccagcugaugugccagcccauccuccugcuggaccaggcgcucgugagcgacgugggcgacagcgccgaggucgccgugaagauguucgacgccuacgugaacaccuucuccagcaccuucaacgucccgauggagaagcugaagacccugguggccacggcggaggccgagcucgccaagaacgugucccuggacaacguccugagcaccuucaucuccgccgcgcgccagggguucguggacagcgacguggagaccaaggacgucguggagugccucaagcugucccaccagagcgacaucgaggugaccggcgacuccugcaacaacuacaugcugacguacaacaaggucgagaacaugaccccccgggaccucggggccugcaucgacugcagcgcccgccacaucaacgcccagguggccaagucccacaacaucgcgcugaucuggaacgugaaggacuucaugagccuguccgagcagcuccggaagcagauccgcagcgccgccaagaagaacaaccugcccuucaagcugaccugcgccaccacgcgccaggucgugaacguggucaccaccaagaucgcccucaagggcgggugaggacuaguuauaagacugacuagcccgaugggccucccaacgggcccuccuccccuccuugcaccgagauuaauaaaaaaaaaaaaaaaaaaaaaaaaaaaaaaaaaaaaaaaaaaaaaaaaaaaaaaaaaaaaaaaaugcaucccccccccccccccccccccccccccccccaaaggcucuuuucagagccaccagaauu

SEQ ID NO: 21969 - RNA, 6058 nt, Artificial Sequence
  SARS-CoV-2__MT451231.1__non-structural protein 3 (NSP3) mRNA gc
aggagaaagcuuaccauggcccccaccaaggugaccuucggcgacgacacggucaucgaggugcagggguacaagagcgugaacaucaccuucgagcuggacgagcgcaucgacaagguccucaacgagaagugcuccgccuacaccguggagcugggcaccgaggugaacgaguucgcgugcgucguggccgacgccgugaucaagacgcugcagccggucagcgagcuccugaccccccuggggaucgaccucgacgagugguccauggccaccuacuaccuguucgacgagagcggcgaguucaagcuggccucccacauguacugcagcuucuacccccccgacgaggacgaggaggagggggacugcgaggaggaggaguucgagccguccacccaguacgaguacggcacggaggacgacuaccagggcaagccccucgaguucggggcgaccagcgccgcccugcagcccgaggaggagcaggaggaggacuggcuggacgacgacucccagcagaccgugggccagcaggacgggagcgaggacaaccagaccacgaccauccagaccaucguggagguccagccccagcucgagauggagcugaccccgguggugcagacgaucgaggucaacuccuucagcggcuaccugaagcucaccgacaacguguacaucaagaacgccgacaucguggaggaggcgaagaaggucaagcccaccgugguggucaacgccgccaacguguaccugaagcacgggggcggcguggccggggcccugaacaaggcgaccaacaacgccaugcaggucgaguccgacgacuacaucgccacgaacggcccccucaagguggggggcagcugcguccuguccggccacaaccuggccaagcacugccuccacgugguggggcccaacgucaacaagggcgaggacauccagcugcugaagagcgccuacgagaacuucaaccagcacgaggugcuccuggcgccgcugcucuccgccgggaucuucggcgccgaccccauccacagccugcgggugugcgucgacaccgugcgcaccaacguguaccuggccgucuucgacaagaaccucuacgacaagcugguguccagcuuccuggagaugaagagcgagaagcagguggagcagaagaucgccgagauccccaaggaggaggucaagcccuucaucaccgaguccaagccgagcguggagcagcggaagcaggacgacaagaagaucaaggcgugcguggaggaggucacgaccacccucgaggagaccaaguuccugacggagaaccugcuccuguacaucgacaucaacgggaaccugcaccccgacuccgccacccucgugagcgacaucgacaucaccuuccugaagaaggacgcccccuacaucgugggcgacgucgugcaggagggcgugcugaccgccgucgugauccccacgaagaaggccgggggcaccaccgagaugcucgcgaaggcccugcgcaaggugccgaccgacaacuacaucacgaccuaccccgggcagggccugaacggguacaccgucgaggaggccaagaccgugcucaagaagugcaaguccgccuucuacauccugcccagcaucaucuccaacgagaagcaggagauccugggcaccgugagcuggaaccuccgggagaugcuggcgcacgccgaggagacgcgcaagcugaugcccgucugcguggagaccaaggccaucguguccaccauccagcggaaguacaagggcaucaagauccaggagggggucguggacuacggcgcccgcuucuacuucuacaccagcaagacgaccguggccucccugaucaacacccucaacgaccugaacgagacccuggucacgaugccgcucggguacgugacccacggccugaaccuggaggaggcggcccgguacaugcgcagccucaaggugcccgccaccgucuccgugagcucccccgacgccgugaccgccuacaacggguaccugacgagcuccagcaagacccccgaggagcacuucaucgagaccaucucccuggcgggcagcuacaaggacuggagcuacuccggccagagcacccagcucgggaucgaguuccugaagcggggcgacaaguccgucuacuacacgagcaacccgaccaccuuccaccuggacggggaggugaucaccuucgacaaccucaagacgcugcugucccuccgcgaggugcggaccaucaaggucuucaccaccguggacaacaucaaccugcacacgcagguggucgacaugagcaugaccuacggccagcaguucggccccaccuaccuggacggggccgacgugaccaagaucaagccccacaacucccacgagggcaagacguucuacgugcucccgaacgacgacacccugcgcgucgaggccuucgaguacuaccacaccaccgaccccagcuuccuggggcgguacauguccgcccucaaccacacgaagaaguggaaguacccccaggugaacggccugaccagcaucaagugggccgacaacaacugcuaccuggcgaccgcccuccugacccugcagcagaucgagcucaaguucaaccccccggcccugcaggacgccuacuaccgcgcgcgggccggggaggccgccaacuucugcgcccugauccucgcguacugcaacaagacggugggcgagcugggcgacguccgcgagaccauguccuaccuguuccagcacgccaaccucgacagcugcaagcgggugcugaacgucgugugcaagaccugcgggcagcagcagaccacccugaagggcguggaggccgucauguacauggggacgcucuccuacgagcaguucaagaagggcgugcagauccccugcaccugcgggaagcaggccaccaaguaccuggugcagcaggagagccccuucgucaugauguccgcccccccggcgcaguacgagcugaagcacggcaccuucacgugcgccagcgaguacaccggcaacuaccagugcgggcacuacaagcacaucaccuccaaggagacccucuacugcaucgacggcgcccugcugacgaagagcagcgaguacaaggggcccaucaccgacguguucuacaaggagaacuccuacaccaccacgaucaagcccgugaccuacaagcucgacggcgucgugugcaccgagaucgaccccaagcuggacaacuacuacaagaaggacaacagcuacuucaccgagcagccgaucgaccuggugcccaaccagcccuaccccaacgccuccuucgacaacuucaaguucgucugcgacaacaucaaguucgccgacgaccucaaccagcugacgggguacaagaagccggcgagccgcgagcugaaggugaccuucuuccccgaccucaacggcgacguggucgccaucgacuacaagcacuacacccccuccuucaagaagggcgccaagcugcugcacaagcccaucguguggcacgugaacaacgccaccaacaaggcgacguacaagccgaacaccuggugcauccggugccucuggagcaccaagcccgucgagaccuccaacagcuucgacgugcugaaguccgaggacgcccaggggauggacaaccuggccugcgaggaccucaagcccgugagcgaggaggucguggagaaccccacgauccagaaggacgugcuggagugcaacgucaagaccaccgagguggugggcgacaucauccugaagccggccaacaacucccucaagaucaccgaggaggucgggcacacggaccugauggccgcguacguggacaacagcucccugaccaucaagaagcccaacgagcucagccgcgugcugggccugaagacccucgccacccacgggcuggccgccgucaacuccgugcccugggacacgaucgccaacuacgcgaagccguuccugaacaagguggucagcaccaccaccaacaucgugacgcgcugccucaaccgggugugcaccaacuacaugcccuacuucuucacccugcugcuccagcugugcaccuucacccgcuccacgaacagccggaucaaggccuccaugcccaccaccaucgccaagaacaccgucaagagcgugggcaaguucugccuggaggccagcuucaacuaccucaagucccccaacuucagcaagcugaucaacaucaucaucugguuccugcuccuguccgugugccugggcagccucaucuacuccacggccguccugggggugcugaugagcaaccucggcaugccguccuacugcaccggguaccgcgagggcuaccugaacagcaccaacgugaccaucgcgacguacugcaccggcuccauccccugcagcgucugccuguccgggcucgacagccuggacaccuaccccucccuggagaccauccagaucacgaucagcuccuucaagugggaccucaccgccuucggccugguggccgagugguuccuggccuacauccucuucacccgguucuucuacgugcuggggcuggccgcgaucaugcagcucuucuucagcuacuucgccguccacuucaucuccaacagcuggcugauguggcugaucaucaaccuggugcagauggcccccaucuccgccauggugcgcauguacaucuucuucgcgagcuucuacuacgucuggaagagcuacgugcacguggucgacggcugcaacuccagcaccugcaugaugugcuacaagcggaaccgcgccacgcggguggagugcaccaccaucgucaacggggugcgccgguccuucuacguguacgccaacggcggcaagggguucugcaagcuccacaacuggaacugcgucaacugcgacaccuucugcgccggcagcacguucaucuccgacgagguggcccgcgaccugagccugcaguucaagcggccgaucaaccccaccgaccaguccagcuacaucguggacuccgucaccgugaagaacgggagcauccaccucuacuucgacaaggcgggccagaagaccuacgagcgccacucccugagccacuucgugaaccuggacaaccuccgggccaacaacacgaaggggucccugcccaucaacgucaucguguucgacggcaagagcaagugcgaggaguccagcgccaaguccgccagcguguacuacucccagcugaugugccagcccauccuccugcuggaccaggcccucgucagcgacgugggcgacagcgcggagguggccgucaagauguucgacgccuacgugaacaccuucuccagcaccuucaacgugccgauggagaagcugaagacccuggucgccacggccgaggcggagcucgccaagaacgugucccuggacaacgugcugagcaccuucaucuccgccgcccgccagggguucgucgacagcgacguggagaccaaggacguggucgagugccucaagcugucccaccagagcgacaucgaggugaccggcgacuccugcaacaacuacaugcugacguacaacaagguggagaacaugaccccccgggaccucggggcgugcaucgacugcagcgcccgccacaucaacgcccaggucgccaagucccacaacaucgcccugaucuggaacgugaaggacuucaugagccuguccgagcagcuccggaagcagauccgcagcgcggccaagaagaacaaccugcccuucaagcugaccugcgccaccacgcgccagguggucaacguggugaccaccaagaucgcccucaagggcgggugaggacuaguuauaagacugacuagcccgaugggccucccaacgggcccuccuccccuccuugcaccgagauuaauaaaaaaaaaaaaaaaaaaaaaaaaaaaaaaaaaaaaaaaaaaaaaaaaaaaaaaaaaaaaaaaaugcaucccccccccccccccccccccccccccccccaaaggcucuuuucagagccaccagaauu

SEQ ID NO: 21970 - RNA, 6058 nt, Artificial Sequence
  SARS-CoV-2__MT451236.1__non-structural protein 3 (NSP3) mRNA gc
aggagaaagcuuaccauggcccccaccaaggugaccuucggcgacgacacggucaucgaggugcagggguacaagagcgugaacaucaccuucgagcuggacgagcgcaucgacaagguccucaacgagaagugcuccgccuacaccguggagcugggcaccgaggugaacgaguucgcgugcgucguggccgacgccgugaucaagacgcugcagccggucagcgagcuccugaccccccuggggaucgaccucgacgagugguccauggccaccuacuaccuguucgacgagagcggcgaguucaagcuggccucccacauguacugcagcuucuacccccccgacgaggacgaggaggagggggacugcgaggaggaggaguucgagccguccacccaguacgaguacggcacggaggacgacuaccagggcaagccccucgaguucggggcgaccagcgccgcccugcagcccgaggaggagcaggaggaggacuggcuggacgacgacucccagcagaccgugggccagcaggacgggagcaaggacaaccagaccacgaccauccagaccaucguggagguccagccccagcucgagauggagcugaccccgguggugcagacgaucgaggucaacuccuucagcggcuaccugaagcucaccgacaacguguacaucaagaacgccgacaucguggaggaggcgaagaaggucaagcccaccgugguggucaacgccgccaacguguaccugaagcacgggggcggcguggccggggcccugaacaaggcgaccaacaacgccaugcaggucgaguccgacgacuacaucgccacgaacggcccccucaagguggggggcagcugcguccuguccggccacaaccuggccaagcacugccuccacgugguggggcccaacgucaacaagggcgaggacauccagcugcugaagagcgccuacgagaacuucaaccagcacgaggugcuccuggcgccgcugcucuccgccgggaucuucggcgccgaccccauccacagccugcgggugugcgucgacaccgugcgcaccaacguguaccuggccgucuucgacaagaaccucuacgacaagcugguguccagcuuccuggagaugaagagcgagaagcagguggagcagaagaucgccgagauccccaaggaggaggucaagcccuucaucaccgaguccaagccgagcguggagcagcggaagcaggacgacaagaagaucaaggcgugcguggaggaggucacgaccacccucgaggagaccaaguuccugacggagaaccugcuccuguacaucgacaucaacgggaaccugcaccccgacuccgccacccucgugagcgacaucgacaucaccuuccugaagaaggacgcccccuacaucgugggcgacgucgugcaggagggcgugcugaccgccgucgugauccccacgaagaaggccgggggcaccaccgagaugcucgcgaaggcccugcgcaaggugccgaccgacaacuacaucacgaccuaccccgggcagggccugaacggguacaccgucgaggaggccaagaccgugcucaagaagugcaaguccgccuucuacauccugcccagcaucaucuccaacgagaagcaggagauccugggcaccgugagcuggaaccuccgggagaugcuggcgcacgccgaggagacgcgcaagcugaugcccgucugcguggagaccaaggccaucguguccaccauccagcggaaguacaagggcaucaagauccaggagggggucguggacuacggcgcccgcuucuacuucuacaccagcaagacgaccguggccucccugaucaacacccucaacgaccugaacgagacccuggucacgaugccgcucggguacgugacccacggccugaaccuggaggaggcggcccgguacaugcgcagccucaaggugcccgccaccgucuccgugagcucccccgacgccgugaccgccuacaacggguaccugacgagcuccagcaagacccccgaggagcacuucaucgagaccaucucccuggcgggcagcuacaaggacuggagcuacuccggccagagcacccagcucgggaucgaguuccugaagcggggcgacaaguccgucuacuacacgagcaacccgaccaccuuccaccuggacggggaggugaucaccuucgacaaccucaagacgcugcugucccuccgcgaggugcggaccaucaaggucuucaccaccguggacaacaucaaccugcacacgcagguggucgacaugagcaugaccuacggccagcaguucggccccaccuaccuggacggggccgacgugaccaagaucaagccccacaacucccacgagggcaagacguucuacgugcucccgaacgacgacacccugcgcgucgaggccuucgaguacuaccacaccaccgaccccagcuuccuggggcgguacauguccgcccucaaccacacgaagaaguggaaguacccccaggugaacggccugaccagcaucaagugggccgacaacaacugcuaccuggcgaccgcccuccugacccugcagcagaucgagcucaaguucaaccccccggcccugcaggacgccuacuaccgcgcgcgggccggggaggccgccaacuucugcgcccugauccucgcguacugcaacaagacggugggcgagcugggcgacguccgcgagaccauguccuaccuguuccagcacgccaaccucgacagcugcaagcgggugcugaacgucgugugcaagaccugcgggcagcagcagaccacccugaagggcguggaggccgucauguacauggggacgcucuccuacgagcaguucaagaagggcgugcagauccccugcaccugcgggaagcaggccaccaaguaccuggugcagcaggagagccccuucgucaugauguccgcccccccggcgcaguacgagcugaagcacggcaccuucacgugcgccagcgaguacaccggcaacuaccagugcgggcacuacaagcacaucaccuccaaggagacccucuacugcaucgacggcgcccugcugacgaagagcagcgaguacaaggggcccaucaccgacguguucuacaaggagaacuccuacaccaccacgaucaagcccgugaccuacaagcucgacggcgucgugugcaccgagaucgaccccaagcuggacaacuacuacaagaaggacaacagcuacuucaccgagcagccgaucgaccuggugcccaaccagcccuaccccaacgccuccuucgacaacuucaaguucgucugcgacaacaucaaguucgccgacgaccucaaccagcugacgggguacaagaagccggcgagccgcgagcugaaggugaccuucuuccccgaccucaacggcgacguggucgccaucgacuacaagcacuacacccccuccuucaagaagggcgccaagcugcugcacaagcccaucguguggcacgugaacaacgccaccaacaaggcgacguacaagccgaacaccuggugcauccggugccucuggagcaccaagcccgucgagaccuccaacagcuucgacgugcugaaguccgaggacgcccaggggauggacaaccuggccugcgaggaccucaagcccgugagcgaggaggucguggagaaccccacgauccagaaggacgugcuggagugcaacgucaagaccaccgagguggugggcgacaucauccugaagccggccaacaacucccucaagaucaccgaggaggucgggcacacggaccugauggccgcguacguggacaacagcucccugaccaucaagaagcccaacgagcucagccgcgugcugggccugaagacccucgccacccacgggcuggccgccgucaacuccgugcccugggacacgaucgccaacuacgcgaagccguuccugaacaagguggucagcaccaccaccaacaucgugacgcgcugccucaaccgggugugcaccaacuacaugcccuacuucuucacccugcugcuccagcugugcaccuucacccgcuccacgaacagccggaucaaggccuccaugcccaccaccaucgccaagaacaccgucaagagcgugggcaaguucugccuggaggccagcuucaacuaccucaagucccccaacuucagcaagcugaucaacaucaucaucugguuccugcuccuguccgugugccugggcagccucaucuacuccacggccgcgcuggggguccugaugagcaaccucggcaugccguccuacugcaccggguaccgcgagggcuaccugaacagcaccaacgugaccaucgccacguacugcaccggcuccauccccugcagcgugugccuguccgggcucgacagccuggacaccuaccccucccuggagaccauccagaucacgaucagcuccuucaagugggaccucaccgccuucggccuggucgccgagugguuccuggccuacauccucuucacccgguucuucuacgugcuggggcuggcggccaucaugcagcucuucuucagcuacuucgccgugcacuucaucuccaacagcuggcugauguggcugaucaucaaccugguccagauggcccccaucuccgcgauggugcgcauguacaucuucuucgccagcuucuacuacguguggaagagcuacguccacgugguggacggcugcaacuccagcaccugcaugaugugcuacaagcggaaccgcgccacgcgggucgagugcaccaccaucgugaacgggguccgccgguccuucuacguguacgccaacggcggcaagggguucugcaagcuccacaacuggaacugcgugaacugcgacaccuucugcgccggcagcacguucaucuccgacgaggucgcgcgcgaccugagccugcaguucaagcggccgaucaaccccaccgaccaguccagcuacaucguggacuccgugaccgucaagaacgggagcauccaccucuacuucgacaaggccggccagaagaccuacgagcgccacucccugagccacuucgugaaccuggacaaccuccgggccaacaacacgaaggggucccugcccaucaacgugaucgucuucgacggcaagagcaagugcgaggaguccagcgccaaguccgccagcguguacuacucccagcugaugugccagcccauccuccugcuggaccaggcgcucgugagcgacgucggcgacagcgccgagguggccgugaagauguucgacgccuacgucaacaccuucuccagcaccuucaacgugccgauggagaagcugaagacccugguggccacggcggaggccgagcucgccaagaacgucucccuggacaacgugcugagcaccuucaucuccgccgcgcgccagggguucguggacagcgacgucgagaccaaggacgugguggagugccucaagcugucccaccagagcgacaucgaggucaccggcgacuccugcaacaacuacaugcugacguacaacaagguggagaacaugaccccccgggaccucggggccugcaucgacugcagcgcccgccacaucaacgcccagguggccaagucccacaacaucgcgcugaucuggaacgucaaggacuucaugagccuguccgagcagcuccggaagcagauccgcagcgccgccaagaagaacaaccugcccuucaagcugaccugcgccaccacgcgccagguggugaacgucgugaccaccaagaucgcccucaagggcgggugaggacuaguuauaagacugacuagcccgaugggccucccaacgggcccuccuccccuccuugcaccgagauuaauaaaaaaaaaaaaaaaaaaaaaaaaaaaaaaaaaaaaaaaaaaaaaaaaaaaaaaaaaaaaaaaaugcaucccccccccccccccccccccccccccccccaaaggcucuuuucagagccaccagaauu

SEQ ID NO: 21971 - RNA, 6058 nt, Artificial Sequence
  SARS-CoV-2__MT451238.1__non-structural protein 3 (NSP3) mRNA gc
aggagaaagcuuaccauggcccccaccaaggugaccuucggcgacgacacggucaucgaggugcagggguacaagagcgugaacaucaccuucgagcuggacgagcgcaucgacaagguccucaacgagaagugcuccgccuacaccguggagcugggcaccgaggugaacgaguucgcgugcgucguggccgacgccgugaucaagacgcugcagccggucagcgagcuccugaccccccuguccaucgaccucgacgaguggagcauggccaccuacuaccuguucgacgaguccggggaguucaagcuggccagccacauguacugcuccuucuacccccccgacgaggacgaggaggagggcgacugcgaggaggaggaguucgagccgagcacccaguacgaguacgggacggaggacgacuaccagggcaagccccucgaguucggcgcgaccuccgccgcccugcagcccgaggaggagcaggaggaggacuggcuggacgacgacagccagcagaccguggggcagcaggacggcuccgaggacaaccagaccacgaccauccagaccaucguggagguccagccccagcucgagauggagcugaccccgguggugcagacgaucgaggucaacagcuucuccggguaccugaagcucaccgacaacguguacaucaagaacgccgacaucguggaggaggcgaagaaggucaagcccaccgugguggucaacgccgccaacguguaccugaagcacggcgggggcguggccggcgcccugaacaaggcgaccaacaacgccaugcaggucgagagcgacgacuacaucgccacgaacgggccccucaaggugggcggguccugcguccugagcggccacaaccuggccaagcacugccuccacguggugggccccaacgucaacaagggggaggacauccagcugcugaaguccgccuacgagaacuucaaccagcacgaggugcuccuggcgccgcugcucagcgccggcaucuucggggccgaccccauccacucccugcgggugugcgucgacaccgugcgcaccaacguguaccuggccgucuucgacaagaaccucuacgacaagcuggugagcagcuuccuggagaugaaguccgagaagcagguggagcagaagaucgccgagauccccaaggaggaggucaagcccuucaucaccgagagcaagccguccguggagcagcggaagcaggacgacaagaagaucaaggcgugcguggaggaggucacgaccacccucgaggagaccaaguuccugacggagaaccugcuccuguacaucgacaucaacggcaaccugcaccccgacagcgccacccucguguccgacaucgacaucaccuuccugaagaaggacgcccccuacaucgugggggacgucgugcaggagggcgugcugaccgccgucgugauccccacgaagaaggccggcgggaccaccgagaugcucgcgaaggcccugcgcaaggugccgaccgacaacuacaucacgaccuaccccggccaggggcugaacggcuacaccgucgaggaggccaagaccgugcucaagaagugcaagagcgccuucuacauccugcccuccaucaucagcaacgagaagcaggagauccuggggaccguguccuggaaccuccgggagaugcuggcgcacgccgaggagacgcgcaagcugaugcccgucugcguggagaccaaggccaucgugagcaccauccagcggaaguacaagggcaucaagauccaggagggcgucguggacuacggggcccgcuucuacuucuacaccuccaagacgaccguggccagccugaucaacacccucaacgaccugaacgagacccuggucacgaugccgcucggcuacgugacccacgggcugaaccuggaggaggcggcccgguacaugcgcucccucaaggugcccgccaccgucagcguguccagccccgacgccgugaccgccuacaacggcuaccugacguccagcuccaagacccccgaggagcacuucaucgagaccaucagccuggcggggagcuacaaggacugguccuacagcggccaguccacccagcucggcaucgaguuccugaagcggggggacaagagcgucuacuacacguccaacccgaccaccuuccaccuggacggcgaggugaucaccuucgacaaccucaagacgcugcugagccuccgcgaggugcggaccaucaaggucuucaccaccguggacaacaucaaccugcacacgcagguggucgacauguccaugaccuacgggcagcaguucggccccaccuaccuggacggcgccgacgugaccaagaucaagccccacaacagccacgaggggaagacguucuacgugcucccgaacgacgacacccugcgcgucgaggccuucgaguacuaccacaccaccgaccccuccuuccugggccgguacaugagcgcccucaaccacacgaagaaguggaaguacccccaggugaacgggcugaccuccaucaagugggccgacaacaacugcuaccuggcgaccgcccuccugacccugcagcagaucgagcucaaguucaaccccccggcccugcaggacgccuacuaccgcgcgcgggccggcgaggccgccaacuucugcgcccugauccucgcguacugcaacaagacggugggggagcugggcgacguccgcgagaccaugagcuaccuguuccagcacgccaaccucgacuccugcaagcgggugcugaacgucgugugcaagaccugcggccagcagcagaccacccugaaggggguggaggccgucauguacaugggcacgcucagcuacgagcaguucaagaagggggugcagauccccugcaccugcggcaagcaggccaccaaguaccuggugcagcaggagucccccuucgucaugaugagcgcccccccggcgcaguacgagcugaagcacgggaccuucacgugcgccuccgaguacaccggcaacuaccagugcggccacuacaagcacaucaccagcaaggagacccucuacugcaucgacggggcccugcugacgaagagcuccgaguacaagggccccaucaccgacguguucuacaaggagaacagcuacaccaccacgaucaagcccgugaccuacaagcucgacggggucgugugcaccgagaucgaccccaagcuggacaacuacuacaagaaggacaacuccuacuucaccgagcagccgaucgaccuggugcccaaccagcccuaccccaacgccagcuucgacaacuucaaguucgucugcgacaacaucaaguucgccgacgaccucaaccagcugacgggcuacaagaagccggcgucccgcgagcugaaggugaccuucuuccccgaccucaacggggacguggucgccaucgacuacaagcacuacacccccagcuucaagaagggcgccaagcugcugcacaagcccaucguguggcacgugaacaacgccaccaacaaggcgacguacaagccgaacaccuggugcauccggugccucugguccaccaagcccgucgagaccagcaacuccuucgacgugcugaagagcgaggacgcccagggcauggacaaccuggccugcgaggaccucaagcccguguccgaggaggucguggagaaccccacgauccagaaggacgugcuggagugcaacgucaagaccaccgagguggugggggacaucauccugaagccggccaacaacagccucaagaucaccgaggaggucggccacacggaccugauggccgcguacguggacaacuccagccugaccaucaagaagcccaacgagcucucccgcgugcuggggcugaagacccucgccacccacggccuggccgccgucaacagcgugcccugggacacgaucgccaacuacgcgaagccguuccugaacaagguggucuccaccaccaccaacaucgugacgcgcugccucaaccgggugugcaccaacuacaugcccuacuucuucacccugcugcuccagcugugcaccuucacccgcagcacgaacucccggaucaaggccagcaugcccaccaccaucgccaagaacaccgucaagagcguggggaaguucugccuggaggccuccuucaacuaccucaagagccccaacuucuccaagcugaucaacaucaucaucugguuccugcuccugagcgugugccugggcucccucaucuacagcacggccgcgcugggcguccugauguccaaccucgggaugccgagcuacugcaccggcuaccgcgagggguaccugaacuccaccaacgugaccaucgccacguacugcaccggcagcauccccugcuccgugugccugagcggccucgacucccuggacaccuaccccagccuggagaccauccagaucacgaucuccagcuucaagugggaccucaccgccuucgggcuggucgccgagugguuccuggccuacauccucuucacccgguucuucuacgugcugggccuggcggccaucaugcagcucuucuucuccuacuucgccgugcacuucaucagcaacuccuggcugauguggcugaucaucaaccugguccagauggcccccaucagcgcgauggugcgcauguacaucuucuucgccagcuucuacuacguguggaaguccuacguccacgugguggacgggugcaacagcuccaccugcaugaugugcuacaagcggaaccgcgccacgcgggucgagugcaccaccaucgugaacggcguccgccggagcuucuacguguacgccaacgggggcaagggcuucugcaagcuccacaacuggaacugcgugaacugcgacaccuucugcgccggguccacguucaucagcgacgaggucgcgcgcgaccugucccugcaguucaagcggccgaucaaccccaccgaccagagcuccuacaucguggacagcgugaccgucaagaacggcuccauccaccucuacuucgacaaggccgggcagaagaccuacgagcgccacagccugucccacuucgugaaccuggacaaccuccgggccaacaacacgaagggcagccugcccaucaacgugaucgucuucgacgggaaguccaagugcgaggagagcuccgccaagagcgccuccguguacuacagccagcugaugugccagcccauccuccugcuggaccaggcgcucgugagcgacgucggcgacuccgccgagguggccgugaagauguucgacgccuacgucaacaccuucagcuccaccuucaacgugccgauggagaagcugaagacccugguggccacggcggaggccgagcucgccaagaacgucagccuggacaacgugcuguccaccuucaucagcgccgcgcgccagggcuucguggacuccgacgucgagaccaaggacgugguggagugccucaagcugagccaccaguccgacaucgaggucaccggggacagcugcaacaacuacaugcugacguacaacaagguggagaacaugaccccccgggaccucggcgccugcaucgacugcuccgcccgccacaucaacgcccagguggccaagagccacaacaucgcgcugaucuggaacgucaaggacuucaugucccugagcgagcagcuccggaagcagauccgcuccgccgccaagaagaacaaccugcccuucaagcugaccugcgccaccacgcgccagguggugaacgucgugaccaccaagaucgcccucaaggggggcugaggacuaguuauaagacugacuagcccgaugggccucccaacgggcccuccuccccuccuugcaccgagauuaauaaaaaaaaaaaaaaaaaaaaaaaaaaaaaaaaaaaaaaaaaaaaaaaaaaaaaaaaaaaaaaaaugcaucccccccccccccccccccccccccccccccaaaggcucuuuucagagccaccagaauu

SEQ ID NO: 21972 - RNA, 6058 nt, Artificial Sequence
  SARS-CoV-2__MT451255.1__non-structural protein 3 (NSP3) mRNA gc
aggagaaagcuuaccauggcccccaccaaggugaccuucggcgacgacacggucaucgaggugcagggguacaagagcgugaacaucaccuucgagcuggacgagcgcaucgacaagguccucaacgagaagugcuccgccuacaccguggagcugggcaccgaggugaacgaguucgcgugcgucguggccgacgccgugaucaagacgcugcagccggucagcgagcuccugaccccccuggggaucgaccucgacgagugguccauggccaccuacuaccuguucgacgagagcggcgaguucaagcuggccucccacauguacugcagcuucuacccccccgacgaggacgaggaggagggggacugcgaggaggaggaguucgagccguccacccaguacgaguacggcacggaggacgacuaccagggcaagccccucgaguucggggcgaccagcgccgcccugcagcccgaggaggagcaggaggaggacuggcuggacgacgacucccagcagaccgugggccagcaggacgggagcgaggacaaccagaccacgaccauccagaccaucguggagguccagccccagcucgagauggagcugaccccgguggugcagacgaucgaggucaacuccuucagcggcuaccugaagcucaccgacaacguguacaucaagaacgccgacaucguggaggaggcgaagaaggucaagcccaccgugguggucaacgccgccaacguguaccugaagcacgggggcggcguggccggggcccugaacaaggcgaccaacaacgccaugcaggucgaguccgacgacuacaucgccacgaacggcccccucaagguggggggcagcugcguccuguccggccacaaccuggccaagcacugccuccacgugguggggcccaacgucaacaagggcgaggacauccagcugcugaagagcgccuacgagaacuucaaccagcacgaggugcuccuggcgccgcugcucuccgccgggaucuucggcgccgaccccauccacagccugcgggugugcgucgacaccgugcgcaccaacguguaccuggccgucuucgacaagaaccucuacgacaagcugguguccagcuuccuggagaugaagagcgagaagcagguggagcagaagaucgccgagauccccaaggaggaggucaagcccuucaucaccgaguccaagccgagcguggagcagcggaagcaggacgacaagaagaucaaggcgugcguggaggaggucacgaccacccucgaggagaccaaguuccugacggagaaccugcuccuguacaucgacaucaacgggaaccugcaccccgacuccgccacccucgugagcgacaucgacaucaccuuccugaagaaggacgcccccuacaucgugggcgacgucgugcaggagggcgugcugaccgccgucgugauccccacgaagaaggccgggggcaccaccgagaugcucgcgaaggcccugcgcaaggugccgaccgacaacuacaucacgaccuaccccgggcagggccugaacggguacaccgucgaggaggccaagaccgugcucaagaagugcaaguccgccuucuacauccugcccagcaucaucuccaacgagaagcaggagauccugggcaccgugagcuggaaccuccgggagaugcuggcgcacgccgaggagacgcgcaagcugaugcccgucugcguggagaccaaggccaucguguccaccauccagcggaaguacaagggcaucaagauccaggagggggucguggacuacggcgcccgcuucuacuucuacaccagcaagacgaccguggccucccugaucaacacccucaacgaccugaacgagacccuggucacgaugccgcucggguacgugacccacggccugaaccuggaggaggcggcccgguacaugcgcagccucaaggugcccgccaccgucuccgugagcucccccgacgccgugaccgccuacaacggguaccugacgagcuccagcaagacccccgaggagcacuucaucgagaccaucucccuggcgggcagcuacaaggacuggagcuacuccggccagagcacccagcucgggaucgaguuccugaagcggggcgacaaguccgucuacuacacgagcaacccgaccaccuuccaccuggacggggaggugaucaccuucgacaaccucaagacgcugcugucccuccgcgaggugcggaccaucaaggucuucaccaccguggacaacaucaaccugcacacgcagguggucgacaugagcaugaccuacggccagcaguucggccccaccuaccuggacggggccgacgugaccaagaucaagccccacaacucccacgagggcaagacguucuacgugcucccgaacgacgacacccugcgcgucgaggccuucgaguacuaccacaccaccgaccccagcuuccuggggcgguacauguccgcccucaaccacacgaagaaguggaaguacccccaggugaacggccugaccagcaucaagugggccgacaacaacugcuaccuggcgaccgcccuccugacccugcagcagaucgagcucaaguucaaccccccggcccugcaggacgccuacuaccgcgcgcgggccggggaggccgccaacuucugcgcccugauccucgcguacugcaacaagacggugggcgagcugggcgacguccgcgagaccauguccuaccuguuccagcacgccaaccucgacagcugcaagcgggugcugaacgucgugugcaagaccugcgggcagcagcagaccacccugaagggcguggaggccgucauguacauggggacgcucuccuacgagcaguucaagaagggcgugcagauccccugcaccugcgggaagcaggccaccaaguaccuggugcagcaggagagccccuucgucaugauguccgcccccccggcgcaguacgagcugaagcacggcaccuucacgugcgccagcgaguacaccggcaacuaccagugcgggcacuacaagcacaucaccuccaaggagacccucuacugcaucgacggcgcccugcugacgaagagcagcgaguacaaggggcccaucaccgacguguucuacaaggagaacuccuacaccaccacgaucaagcccgugaccuacaagcucgacggcgucgugugcaccgagaucgaccccaagcuggacaacuacuacaagaaggacaacagcuacuucaccgagcagccgaucgaccuggugcccaaccagcccuaccccaacgccuccuucgacaacuucaaguucgucugcgacaacaucaaguucgccgacgaccucaaccagcugacgggguacaagaagccggcgagccgcgagcugaaggugaccuucuuccccgaccucaacggcgacguggucgccaucgacuacaagcacuacacccccuccuucaagaagggcgccaagcugcugcacaagcccaucguguggcacgugaacaacgccaccaacaaggcgacguacaagccgaacaccuggugcauccggugccucuggagcaccaagcccgucgagaccuccaacagcuucgacgugcugaaguccgaggacgcccaggggauggacaaccuggccugcgaggaccucaagcccgugagcgaggaggucguggagaaccccacgauccagaaggacgugcuggagugcaacgucaagaccaccgagguggugggcgacaucauccugaagccggccaacaacucccucaagaucaccgaggaggucgggcacacggaccugauggccgcguacguggacaacagcucccugaccaucaagaagcccaacgagcucagccgcgugcugggccugaagacccucgccacccacgggcuggccgccgucaacuccgugcccugggacacgaucgccaacuacgcgaagccguuccugaacaagguggucagcaccaccaccaacaucgugacgcgcugccucaaccgggugugcaccaacuacaugcccuacuucuucacccugcugcuccagcugugcaccuucacccgcuccacgaacagccggaucaaggccuccaugcccaccaccaucgccaagaacaccgucaagagcgugggcaaguucugccuggaggccagcuucaacuaccucaagucccccaacuucuucaagcugaucaacaucaucaucugguuccugcuccugagcgugugccugggcucccucaucuacagcacggccgcgcuggggguccugauguccaaccucggcaugccgagcuacugcaccggguaccgcgagggcuaccugaacuccaccaacgugaccaucgccacguacugcaccggcagcauccccugcuccgugugccugagcgggcucgacucccuggacaccuaccccagccuggagaccauccagaucacgaucuccagcuucaagugggaccucaccgccuucggccuggucgccgagugguuccuggccuacauccucuucacccgguucuucuacgugcuggggcuggcggccaucaugcagcucuucuucuccuacuucgccgugcacuucaucagcaacuccuggcugauguggcugaucaucaaccugguccagauggcccccaucagcgcgauggugcgcauguacaucuucuucgccuccuucuacuacguguggaagagcuacguccacgugguggacggcugcaacagcuccaccugcaugaugugcuacaagcggaaccgcgccacgcgggucgagugcaccaccaucgugaacgggguccgccggagcuucuacguguacgccaacggcggcaagggguucugcaagcuccacaacuggaacugcgugaacugcgacaccuucugcgccggcuccacguucaucagcgacgaggucgcgcgcgaccugucccugcaguucaagcggccgaucaaccccaccgaccagagcuccuacaucguggacagcgugaccgucaagaacggguccauccaccucuacuucgacaaggccggccagaagaccuacgagcgccacagccugucccacuucgugaaccuggacaaccuccgggccaacaacacgaaggggagccugcccaucaacgugaucgucuucgacggcaaguccaagugcgaggagagcuccgccaagagcgccuccguguacuacagccagcugaugugccagcccauccuccugcuggaccaggcgcucguguccgacgucggcgacagcgccgagguggccgugaagauguucgacgccuacgucaacaccuucagcuccaccuucaacgugccgauggagaagcugaagacccugguggccacggcggaggccgagcucgccaagaacgucagccuggacaacgugcuguccaccuucaucagcgccgcgcgccagggguucguggacuccgacgucgagaccaaggacgugguggagugccucaagcugagccaccaguccgacaucgaggucaccggcgacagcugcaacaacuacaugcugacguacaacaagguggagaacaugaccccccgggaccucggggccugcaucgacugcuccgcccgccacaucaacgcccagguggccaagagccacaacaucgcgcugaucuggaacgucaaggacuucaugucccugagcgagcagcuccggaagcagauccgcuccgccgccaagaagaacaaccugcccuucaagcugaccugcgccaccacgcgccagguggugaacgucgugaccaccaagaucgcccucaagggcgggugaggacuaguuauaagacugacuagcccgaugggccucccaacgggcccuccuccccuccuugcaccgagauuaauaaaaaaaaaaaaaaaaaaaaaaaaaaaaaaaaaaaaaaaaaaaaaaaaaaaaaaaaaaaaaaaaugcaucccccccccccccccccccccccccccccccaaaggcucuuuucagagccaccagaauu

SEQ ID NO: 21973 - RNA, 6058 nt, Artificial Sequence
  SARS-CoV-2__MT451356.1__non-structural protein 3 (NSP3) mRNA gc
aggagaaagcuuaccauggcccccaccaaggugaccuucggcgacgacacggucaucgaggugcagggguacaagagcgugaacaucaccuucgagcuggacgagcgcaucgacaagguccucaacgagaagugcuccgccuacaccguggagcugggcaccgaggugaacgaguucgcgugcgucguggccgacgccgugaucaagacgcugcagccggucagcgagcuccugaccccccuggggaucgaccucgacgagugguccauggccaccuacuaccuguucgacgagagcggcgaguucaagcuggccucccacauguacugcagcuucuacccccccgacgaggacgaggaggagggggacugcgaggaggaggaguucgagccguccacccaguacgaguacggcacggaggacgacuaccagggcaagccccucgaguucggggcgaccagcgccgcccugcagcccgaggaggagcaggaggaggacuggcuggacgacgacucccagcagaccgugggccagcaggacgggagcgaggacaaccagaccacgaccauccagaccaucguggagguccagccccagcucgagauggagcugaccccgguggugcagacgaucgaggucaacuccuucagcggcuaccugaagcucaccgacaacguguacaucaagaacgccgacaucguggaggaggcgaagaaggucaagcccaccgugguggucaacgccgccaacguguaccugaagcacgggggcggcguggccggggcccugaacaaggcgaccaacaacgccaugcaggucgaguccgacgacuacaucgccacgaacggcccccucaagguggggggcagcugcguccuguccggccacaaccuggccaagcacugccuccacgugguggggcccaacgucaacaagggcgaggacauccagcugcugaagagcgccuacgagaacuucaaccagcacgaggugcuccuggcgccgcugcucuccgccgggaucuucggcgccgaccccauccacagccugcgggugugcgucgacaccgugcgcaccaacguguaccuggccgucuucgacaagaaccucuacgacaagcugguguccagcuuccuggagaugaagagcgagaagcagguggagcagaagaucgccgagauccccaaggaggaggucaagcccuucaucaccgaguccaagccgagcguggagcagcggaagcaggacgacaagaagaucaaggcgugcguggaggaggucacgaccacccucgaggagaccaaguuccugacggagaaccugcuccuguacaucgacaucaacgggaaccugcaccccgacuccgccacccucgugagcgacaucgacaucaccuuccugaagaaggacgcccccuacaucgugggcgacgucgugcaggagggcgugcugaccgccgucgugauccccacgaagaaggccgggggcaccaccgagaugcucgcgaaggcccugcgcaaggugccgaccgacaacuacaucacgaccuaccccgggcagggccugaacggguacaccgucgaggaggccaagaccgugcucaagaagugcaaguccgccuucuacauccugcccagcaucaucuccaacgagaagcaggagauccugggcaccgugagcuggaaccuccgggagaugcuggcgcacgccgaggagacgcgcaagcugaugcccgucugcguggagaccaaggccaucguguccaccauccagcggaaguacaagggcaucaagauccaggagggggucguggacuacggcgcccgcuucuacuucuacaccagcaagacgaccguggccucccugaucaacacccucaacgaccugaacgagacccuggucacgaugccgcucggguacgugacccacggccugaaccuggaggaggcggcccgguacaugcgcagccucaaggugcccgccaccgucuccgugagcucccccgacgccgugaccgccuacaacggguaccugacgagcuccagcaagacccccgaggagcacuucaucgagaccaucucccuggcgggcagcuacaaggacuggagcuacuccggccagagcacccagcucgggaucgaguuccugaagcggggcgacaaguccgucuacuacacgagcaacccgaccaccuuccaccuggacggggaggugaucaccuucgacaaccucaagacgcugcugucccuccgcgaggugcggaccaucaaggucuucaccaccguggacaacaucaaccugcacacgcagguggucgacaugagcaugaccuacggccagcaguucggccccaccuaccuggacggggccgacgugaccaagaucaagccccacaacucccacgagggcaagacguucuacgugcucccgaacgacgacacccugcgcgucgaggccuucgaguacuaccacaccaccgaccccagcuuccuggggcgguacauguccgcccucaaccacacgaagaaguggaaguacccccaggugaacggccugaccagcaucaagugggccgacaacaacugcuaccuggcgaccgcccuccugacccugcagcagaucgagcucaaguucaaccccccggcccugcaggacgccuacuaccgcgcgcgggccggggaggccgccaacuucugcgcccugauccucgcguacugcaacaagacggugggcgagcugggcgacguccgcgagaccauguccuaccuguuccagcacgccaaccucgacagcugcaagcgggugcugaacgucgugugcaagaccugcgggcagcagcagaccacccugaagggcguggaggccgucauguacauggggacgcucuccuacgagcaguucaagaagggcgugcagauccccugcaccugcgggaagcaggccaccaaguaccuggugcagcaggagagccccuucgucaugauguccgcccccccggcgcaguacgagcugaagcacggcaccuucacgugcgccagcgaguacaccggcaacuaccagugcgggcacuacaagcacaucaccuccaaggagacccucuacugcaucgacggcgcccugcugacgaagagcagcgaguacaaggggcccaucaccgacguguucuacaaggagaacuccuacaccaccacgaucaagcccgugaccuacaagcucgacggcgucgugugcaccgagaucgaccccaagcuggacaacuacuacaagaaggacaacagcuacuucaccgagcagccgaucgaccuggugcccaaccagcccuaccccaacgccuccuucgacaacuucaaguucgucugcgacaacaucaaguucgccgacgaccucaaccagcugacgggguacaagaagccggcgagccgcgagcugaaggugaccuucuuccccgaccucaacggcgacguggucgccaucgacuacaagcacuacacccccuccuucaagaagggcgccaagcugcugcacaagcccaucguguggcacgugaacaacgccaccaacaaggcgacguacaagccgaacaccuggugcauccggugccucuggagcaccaagcccgucgagaccuccaacagcuucgacgugcugaaguccgaggacgcccaggggauggacaaccuggccugcgaggaccucaagcccgugagcgaggaggucguggagaaccccacgauccagaaggacgugcuggagugcaacgucaagaccaccgagguggugggcgacaucauccugaagccggccaacaacucccucaagaucaccgaggaggucgggcacacggaccugauggccgcguacguggacaacagcucccugaccaucaagaagcccaacgagcucagccgcgugcugggccugaagacccucgccacccacgggcuggccgccgucaacuccgugcccugggacacgaucgccaacuacgcgaagccguuccugaacaagguggucagcaccaucaccaacaucgugacccgcugccucaaccgggugugcacgaacuacaugcccuacuucuucacccugcugcuccagcugugcaccuucacccgcuccaccaacagccggaucaaggccuccaugcccacgaccaucgccaagaacaccgucaagagcgugggcaaguucugccuggaggccagcuucaacuaccucaagucccccaacuucagcaagcugaucaacaucaucaucugguuccugcuccuguccgugugccugggcagccucaucuacuccaccgccgcgcuggggguccugaugagcaaccucggcaugccguccuacugcacgggguaccgcgagggcuaccugaacagcaccaacgugaccaucgccaccuacugcacgggcuccauccccugcagcgugugccuguccgggcucgacagccuggacaccuaccccucccuggagaccauccagaucaccaucagcuccuucaagugggaccucacggccuucggccuggucgccgagugguuccuggccuacauccucuucacccgguucuucuacgugcuggggcuggcggccaucaugcagcucuucuucagcuacuucgccgugcacuucaucuccaacagcuggcugauguggcugaucaucaaccugguccagauggcccccaucuccgcgauggugcgcauguacaucuucuucgccagcuucuacuacguguggaagagcuacguccacgugguggacggcugcaacuccagcaccugcaugaugugcuacaagcggaaccgcgccacccgggucgagugcacgaccaucgugaacgggguccgccgguccuucuacguguacgccaacggcggcaagggguucugcaagcuccacaacuggaacugcgugaacugcgacaccuucugcgccggcagcaccuucaucuccgacgaggucgcgcgcgaccugagccugcaguucaagcggccgaucaaccccacggaccaguccagcuacaucguggacuccgugaccgucaagaacgggagcauccaccucuacuucgacaaggccggccagaagaccuacgagcgccacucccugagccacuucgugaaccuggacaaccuccgggccaacaacaccaaggggucccugcccaucaacgugaucgucuucgacggcaagagcaagugcgaggaguccagcgccaaguccgccagcguguacuacucccagcugaugugccagcccauccuccugcuggaccaggcgcucgugagcgacgucggcgacagcgccgagguggccgugaagauguucgacgccuacgucaacacguucuccagcaccuucaacgugccgauggagaagcugaagacccugguggccaccgcggaggccgagcucgccaagaacgucucccuggacaacgugcugagcacguucaucuccgccgcgcgccagggguucguggacagcgacgucgagaccaaggacgugguggagugccucaagcugucccaccagagcgacaucgaggucaccggcgacuccugcaacaacuacaugcugaccuacaacaagguggagaacaugacgccccgggaccucggggccugcaucgacugcagcgcccgccacaucaacgcccagguggccaagucccacaacaucgcgcugaucuggaacgucaaggacuucaugagccuguccgagcagcuccggaagcagauccgcagcgccgccaagaagaacaaccugcccuucaagcugaccugcgccaccacccgccagguggugaacgucgugacgaccaagaucgcccucaagggcgggugaggacuaguuauaagacugacuagcccgaugggccucccaacgggcccuccuccccuccuugcaccgagauuaauaaaaaaaaaaaaaaaaaaaaaaaaaaaaaaaaaaaaaaaaaaaaaaaaaaaaaaaaaaaaaaaaugcaucccccccccccccccccccccccccccccccaaaggcucuuuucagagccaccagaauu

SEQ ID NO: 21974 - RNA, 6058 nt, Artificial Sequence
  SARS-CoV-2__MT451466.1__non-structural protein 3 (NSP3) mRNA gc
aggagaaagcuuaccauggcccccaccaaggugaccuucggcgacgacacggucaucgaggugcagggguacaagagcgugaacaucaccuucgagcuggacgagcgcaucgacaagguccucaacgagaagugcuccgccuacaccguggagcugggcaccgaggugaacgaguucgcgugcgucgugacggacgccgugaucaagacccugcagccggucagcgagcuccugaccccccuggggaucgaccucgacgagugguccauggccaccuacuaccuguucgacgagagcggcgaguucaagcuggccucccacauguacugcagcuucuacccccccgacgaggacgaggaggagggggacugcgaggaggaggaguucgagccguccacgcaguacgaguacggcaccgaggacgacuaccagggcaagccccucgaguucggggccaccagcgcggcccugcagcccgaggaggagcaggaggaggacuggcuggacgacgacucccagcagaccgugggccagcaggacgggagcgaggacaaccagacgaccaccauccagaccaucguggagguccagccccagcucgagauggagcugacgccgguggugcagaccaucgaggucaacuccuucagcggcuaccugaagcucaccgacaacguguacaucaagaacgccgacaucguggaggaggccaagaaggucaagcccaccgugguggucaacgcggccaacguguaccugaagcacgggggcggcguggccggggcccugaacaaggccacgaacaacgcgaugcaggucgaguccgacgacuacaucgccaccaacggcccccucaagguggggggcagcugcguccuguccggccacaaccuggccaagcacugccuccacgugguggggcccaacgucaacaagggcgaggacauccagcugcugaagagcgccuacgagaacuucaaccagcacgaggugcuccuggccccgcugcucuccgcggggaucuucggcgccgaccccauccacagccugcgggugugcgucgacaccgugcgcaccaacguguaccuggccgucuucgacaagaaccucuacgacaagcugguguccagcuuccuggagaugaagagcgagaagcagguggagcagaagaucgccgagauccccaaggaggaggucaagcccuucaucacggaguccaagccgagcguggagcagcggaagcaggacgacaagaagaucaaggccugcguggaggaggucaccaccacccucgaggagacgaaguuccugaccgagaaccugcuccuguacaucgacaucaacgggaaccugcaccccgacuccgcgacccucgugagcgacaucgacaucaccuuccugaagaaggacgcccccuacaucgugggcgacgucgugcaggagggcgugcugacggccgucgugauccccaccaagaaggccgggggcaccaccgagaugcucgccaaggcgcugcgcaaggugccgacggacaacuacaucaccaccuaccccgggcagggccugaacggguacaccgucgaggaggccaagaccgugcucaagaagugcaaguccgccuucuacauccugcccagcaucaucuccaacgagaagcaggagauccugggcacggugagcuggaaccuccgggagaugcuggcccacgcggaggagacccgcaagcugaugcccgucugcguggagaccaaggccaucguguccaccauccagcggaaguacaagggcaucaagauccaggagggggucguggacuacggcgcccgcuucuacuucuacacgagcaagaccaccguggccucccugaucaacacccucaacgaccugaacgagacgcuggucaccaugccgcucggguacgugacccacggccugaaccuggaggaggccgcgcgguacaugcgcuuccucaaggugcccgccaccgucagcguguccagccccgacgccgugacggccuacaacggguaccugaccuccagcuccaagacccccgaggagcacuucaucgagaccaucagccuggccggcuccuacaaggacuggagcuacagcggccaguccacgcagcucgggaucgaguuccugaagcggggcgacaagagcgucuacuacaccuccaacccgaccaccuuccaccuggacggggaggugaucacguucgacaaccucaagacccugcugagccuccgcgaggugcggaccaucaaggucuucaccacgguggacaacaucaaccugcacacccagguggucgacauguccaugaccuacggccagcaguucggccccaccuaccuggacggggcggacgugacgaagaucaagccccacaacagccacgagggcaagaccuucuacgugcucccgaacgacgacacccugcgcgucgaggccuucgaguacuaccacaccacggaccccuccuuccuggggcgguacaugagcgcccucaaccacaccaagaaguggaaguacccccaggugaacggccugaccuccaucaagugggccgacaacaacugcuaccuggccaccgcgcuccugacgcugcagcagaucgagcucaaguucaaccccccggcccugcaggacgccuacuaccgcgcccgggcgggggaggccgccaacuucugcgcccugauccucgccuacugcaacaagaccgugggcgagcugggcgacguccgcgagaccaugagcuaccuguuccagcacgcgaaccucgacuccugcaagcgggugcugaacgucgugugcaagaccugcgggcagcagcagaccacgcugaagggcguggaggccgucauguacauggggacccucagcuacgagcaguucaagaagggcgugcagauccccugcaccugcgggaagcaggccaccaaguaccuggugcagcaggagucccccuucgucaugaugagcgcccccccggcccaguacgagcugaagcacggcacguucaccugcgcguccgaguacaccggcaacuaccagugcgggcacuacaagcacaucaccagcaaggagacgcucuacugcaucgacggcgcccugcugaccaaguccagcgaguacaaggggcccaucaccgacguguucuacaaggagaacagcuacaccacgaccaucaagcccgugaccuacaagcucgacggcgucgugugcaccgagaucgaccccaagcuggacaacuacuacaagaaggacaacuccuacuucacggagcagccgaucgaccuggugcccaaccagcccuaccccaacgccagcuucgacaacuucaaguucgucugcgacaacaucaaguucgccgacgaccucaaccagcugaccggguacaagaagccggccucccgcgagcugaaggugaccuucuuccccgaccucaacggcgacguggucgcgaucgacuacaagcacuacacccccagcuucaagaagggcgccaagcugcugcacaagcccaucguguggcacgugaacaacgccacgaacaaggccaccuacaagccgaacaccuggugcauccggugccucugguccaccaagcccgucgagacgagcaacuccuucgacgugcugaagagcgaggacgcgcaggggauggacaaccuggccugcgaggaccucaagcccguguccgaggaggucguggagaaccccaccauccagaaggacgugcuggagugcaacgucaagaccaccgagguggugggcgacaucauccugaagccggccaacaacagccucaagaucacggaggaggucgggcacaccgaccugauggccgccuacguggacaacuccagccugaccaucaagaagcccaacgagcucucccgcgugcugggccugaagacccucgcgacgcacgggcuggccgccgucaacagcgugcccugggacaccaucgccaacuacgccaagccguuccugaacaagguggucuccaccaccacgaacaucgugacccgcugccucaaccgggugugcaccaacuacaugcccuacuucuucacccugcugcuccagcugugcaccuucacgcgcagcaccaacucccggaucaaggcgagcaugcccaccaccaucgccaagaacacggucaaguccgugggcaaguucugccuggaggccagcuucaacuaccucaagagccccaacuucuccaagcugaucaacaucaucaucugguuccugcuccugagcgugugccugggcucccucaucuacagcaccgccgcccuggggguccugauguccaaccucggcaugccgagcuacugcaccggguaccgcgagggcuaccugaacuccaccaacgugacgaucgcgaccuacugcaccggcagcauccccugcuccgugugccugagcgggcucgacucccuggacaccuaccccagccuggagacgauccagaucaccaucuccagcuucaagugggaccucaccgccuucggccuggucgccgagugguuccuggccuacauccucuucacccgguucuucuacgugcuggggcuggccgcgaucaugcagcucuucuucuccuacuucgccgugcacuucaucagcaacuccuggcugauguggcugaucaucaaccugguccagauggcccccaucagcgccauggugcgcauguacaucuucuucgcguccuucuacuacguguggaagagcuacguccacgugguggacggcugcaacagcuccacgugcaugaugugcuacaagcggaaccgcgccacccgggucgagugcaccaccaucgugaacgggguccgccggagcuucuacguguacgccaacggcggcaagggguucugcaagcuccacaacuggaacugcgugaacugcgacacguucugcgccggcuccaccuucaucagcgacgaggucgcccgcgaccugucccugcaguucaagcggccgaucaaccccaccgaccagagcuccuacaucguggacagcgugaccgucaagaacggguccauccaccucuacuucgacaaggcgggccagaagacguacgagcgccacagccugucccacuucgugaaccuggacaaccuccgggccaacaacaccaaggggagccugcccaucaacgugaucgucuucgacggcaaguccaagugcgaggagagcuccgccaagagcgccuccguguacuacagccagcugaugugccagcccauccuccugcuggaccaggcccucguguccgacgucggcgacagcgcggagguggccgugaagauguucgacgccuacgucaacaccuucagcuccaccuucaacgugccgauggagaagcugaagacgcugguggccaccgccgaggcggagcucgccaagaacgucagccuggacaacgugcuguccaccuucaucagcgccgcccgccagggguucguggacuccgacgucgagaccaaggacgugguggagugccucaagcugagccaccaguccgacaucgaggucacgggcgacagcugcaacaacuacaugcugaccuacaacaagguggagaacaugaccccccgggaccucggggcgugcaucgacugcuccgcccgccacaucaacgcccagguggccaagagccacaacaucgcccugaucuggaacgucaaggacuucaugucccugagcgagcagcuccggaagcagauccgcuccgcggccaagaagaacaaccugcccuucaagcugaccugcgccacgacccgccagguggugaacgucgugaccaccaagaucgcccucaagggcgggugaggacuaguuauaagacugacuagcccgaugggccucccaacgggcccuccuccccuccuugcaccgagauuaauaaaaaaaaaaaaaaaaaaaaaaaaaaaaaaaaaaaaaaaaaaaaaaaaaaaaaaaaaaaaaaaaugcaucccccccccccccccccccccccccccccccaaaggcucuuuucagagccaccagaauu

SEQ ID NO: 21975 - RNA, 6058 nt, Artificial Sequence
  SARS-CoV-2__MT451470.1__non-structural protein 3 (NSP3) mRNA gc
aggagaaagcuuaccauggcccccaccaaggugaccuucggcgacgacacggucaucgaggugcagggguacaagagcgugaacaucaccuucgagcuggacgagcgcaucgacaagguccucaacgagaagugcuccgccuacaccguggagcugggcaccgaggugaacgaguucgcgugcgucguggccgacgccgugaucaagacgcugcagccggucagcgagcuccugaccccccuggggaucgaccucgacgagugguccauggccaccuacuaccuguucgacgagagcggcgaguucaagcuggccucccacauguacugcagcuucuacccccccgacgaggacgaggaggagggggacugcgaggaggaggaguucgagccguccacccaguacgaguacggcacggaggacgacuaccagggcaagccccucgaguucggggcgaccagcgccgcccugcagcccgaggaggagcaggaggaggacuggcuggacgacgacucccagcagaccgugggccagcaggacgggagcgaggacaaccagaccacgaccauccagaccaucguggagguccagccccagcucgagauggagcugaccccgguggugcagacgaucgaggucaacuccuucagcggcuaccugaagcucaccgacaacguguacaucaagaacgccgacaucguggaggaggcgaagaaggucaagcccaccgugguggucaacgccgccaacguguaccugaagcacgggggcggcguggccggggcccugaacaaggcgaccaacaacgccaugcaggucgaguccgacgacuacaucgccacgaacggcccccucaagguggggggcagcugcguccuguccggccacaaccuggccaagcacugccuccacgugguggggcccaacgucaacaagggcgaggacauccagcugcugaagagcgccuacgagaacuucaaccagcacgaggugcuccuggcgccgcugcucuccgccgggaucuucggcgccgaccccauccacagccugcgggugugcgucgacaccgugcgcaccaacguguaccuggccgucuucgacaagaaccucuacgacaagcugguguccagcuuccuggagaugaagagcgagaagcagguggagcagaagaucgccgagauccccaaggaggaggucaagcccuucaucaccgaguccaagccgagcguggagcagcggaagcaggacgacaagaagaucaaggcgugcguggaggaggucacgaccacccucgaggagaccaaguuccugacggagaaccugcuccuguacaucgacaucaacgggaaccugcaccccgacuccgccacccucgugagcgacaucgacaucaccuuccugaagaaggacgcccccuacaucgugggcgacgucgugcaggagggcgugcugaccgccgucgugauccccacgaagaaggccgggggcaccaccgagaugcucgcgaaggcccugcgcaaggugccgaccgacaacuacaucacgaccuaccccgggcagggccugaacggguacaccgucgaggaggccaagaccgugcucaagaagugcaaguccgccuucuacauccugcccagcaucaucuccaacgagaagcaggagauccugggcaccgugagcuggaaccuccgggagaugcuggcgcacgccgaggagacgcgcaagcugaugcccgucugcguggagaccaaggccaucguguccaccauccagcggaaguacaagggcaucaagauccaggagggggucguggacuacggcgcccgcuucuacuucuacaccagcaagacgaccguggccucccugaucaacacccucaacgaccugaacgagacccuggucacgaugccgcucggguacgugacccacggccugaaccuggaggaggcggcccgguacaugcgcagccucaaggugcccgccaccgucuccgugagcucccccgacgccgugaccgccuacaacggguaccugacgagcuccagcaagacccccgaggagcacuucaucgagaccaucucccuggcgggcagcuacaaggacuggagcuacuccggccagagcacccagcucgggaucgaguuccugaagcggggcgacaaguccgucuacuacacgagcaacccgaccaccuuccaccuggacggggaggugaucaccuucgacaaccucaagacgcugcugucccuccgcgaggugcggaccaucaaggucuucaccaccguggacaacaucaaccugcacacgcagguggucgacaugagcaugaccuacggccagcaguucggccccaccuaccuggacggggccgacgugaccaagaucaagccccacaacucccacgagggcaagacguucuacgugcucccgaacgacgacacccugcgcgucgaggccuucgaguacuaccacaccaccgaccccagcuuccuggggcgguacauguccgcccucaaccacacgaagaaguggaaguacccccaggugaacggccugaccagcaucaagugggccgacaacaacugcuaccuggcgaccgcccuccugacccugcagcagaucgagcucaaguucaaccccccggcccugcaggacgccuacuaccgcgcgcgggccggggaggccgccaacuucugcgcccugauccucgcguacugcaacaagacggugggcgagcugggcgacguccgcgagaccauguccuaccuguuccagcacgccaaccucgacagcugcaagcgggugcugaacgucgugugcaagaccugcgggcagcagcagaucacccugaagggcguggaggccgucauguacauggggacccucuccuacgagcaguucaagaagggcgugcagauccccugcacgugcgggaagcaggccaccaaguaccuggugcagcaggagagccccuucgucaugauguccgcccccccggcgcaguacgagcugaagcacggcaccuucaccugcgccagcgaguacacgggcaacuaccagugcgggcacuacaagcacaucaccuccaaggagacccucuacugcaucgacggcgcccugcugaccaagagcagcgaguacaaggggcccaucacggacguguucuacaaggagaacuccuacaccaccaccaucaagcccgugacguacaagcucgacggcgucgugugcaccgagaucgaccccaagcuggacaacuacuacaagaaggacaacagcuacuucaccgagcagccgaucgaccuggugcccaaccagcccuaccccaacgccuccuucgacaacuucaaguucgucugcgacaacaucaaguucgccgacgaccucaaccagcugaccggguacaagaagccggcgagccgcgagcugaaggugacguucuuccccgaccucaacggcgacguggucgccaucgacuacaagcacuacacccccuccuucaagaagggcgccaagcugcugcacaagcccaucguguggcacgugaacaacgccaccaacaaggcgaccuacaagccgaacacguggugcauccggugccucuggagcaccaagcccgucgagaccuccaacagcuucgacgugcugaaguccgaggacgcccaggggauggacaaccuggccugcgaggaccucaagcccgugagcgaggaggucguggagaaccccaccauccagaaggacgugcuggagugcaacgucaagacgaccgagguggugggcgacaucauccugaagccggccaacaacucccucaagaucaccgaggaggucgggcacaccgaccugauggccgcguacguggacaacagcucccugacgaucaagaagcccaacgagcucagccgcgugcugggccugaagacccucgccacccacgggcuggccgccgucaacuccgugcccugggacaccaucgccaacuacgcgaagccguuccugaacaagguggucagcacgaccaccaacaucgugacccgcugccucaaccgggugugcacgaacuacaugcccuacuucuucacccugcugcuccagcugugcaccuucacccgcuccaccaacagccggaucaaggccuccaugcccacgaccaucgccaagaacaccgucaagagcgugggcaaguucugccuggaggccagcuucaacuaccucaagucccccaacuucagcaagcugaucaacaucaucaucugguuccugcuccuguccgugugccugggcagccucaucuacuccaccgccgcgcuggggguccugaugagcaaccucggcaugccguccuacugcacgggguaccgcgagggcuaccugaacagcaccaacgugaccaucgccaccuacugcacgggcuccauccccugcagcgugugccuguccgggcucgacagccuggacaccuaccccucccuggagaccauccagaucaccaucagcuccuucaagugggaccucacggccuucggccuggucgccgagugguuccuggccuacauccucuucacccgguucuucuacgugcuggggcuggcggccaucaugcagcucuucuucagcuacuucgccgugcacuucaucuccaacagcuggcugauguggcugaucaucaaccugguccagauggcccccaucuccgcgauggugcgcauguacaucuucuucgccagcuucuacuacguguggaagagcuacguccacgugguggacggcugcaacuccagcaccugcaugaugugcuacaagcggaaccgcgccacccgggucgagugcacgaccaucgugaacgggguccgccgguccuucuacguguacgccaacggcggcaagggguucugcaagcuccacaacuggaacugcgugaacugcgacaccuucugcgccggcagcaccuucaucuccgacgaggucgcgcgcgaccugagccugcaguucaagcggccgaucaaccccacggaccaguccagcuacaucguggacuccgugaccgucaagaacgggagcauccaccucuacuucgacaaggccggccagaagaccuacgagcgccacucccugagccacuucgugaaccuggacaaccuccgggccaacaacaccaaggggucccugcccaucaacgugaucgucuucgacggcaagagcaagugcgaggaguccagcgccaaguccgccagcguguacuacucccagcugaugugccagcccauccuccugcuggaccaggcgcucgugagcgacgucggcgacagcgccgagguggccgugaagauguucgacgccuacgucaacacguucuccagcaccuucaacgugccgauggagaagcugaagacccugguggccaccgcggaggccgagcucgccaagaacgucucccuggacaacgugcugagcacguucaucuccgccgcgcgccagggguucguggacagcgacgucgagaccaaggacgugguggagugccucaagcugucccaccagagcgacaucgaggucaccggcgacuccugcaacaacuacaugcugaccuacaacaagguggagaacaugacgccccgggaccucggggccugcaucgacugcagcgcccgccacaucaacgcccagguggccaagucccacaacaucgcgcugaucuggaacgucaaggacuucaugagccuguccgagcagcuccggaagcagauccgcagcgccgccaagaagaacaaccugcccuucaagcugaccugcgccaccacccgccagguggugaacgucgugacgaccaagaucgcccucaagggcgggugaggacuaguuauaagacugacuagcccgaugggccucccaacgggcccuccuccccuccuugcaccgagauuaauaaaaaaaaaaaaaaaaaaaaaaaaaaaaaaaaaaaaaaaaaaaaaaaaaaaaaaaaaaaaaaaaugcaucccccccccccccccccccccccccccccccaaaggcucuuuucagagccaccagaauu

SEQ ID NO: 21976 - RNA, 6058 nt, Artificial Sequence
  SARS-CoV-2__MT451708.1__non-structural protein 3 (NSP3) mRNA gc
aggagaaagcuuaccauggcccccaccaaggugaccuucggcgacgacacggucaucgaggugcagggguacaagagcgugaacaucaccuucgagcuggacgagcgcaucgacaagguccucaacgagaagugcuccgccuacaccguggagcugggcaccgaggugaacgaguucgcgugcgucguggccgacgccgugaucaagacgcugcagccggucagcgagcuccugaccccccuggggaucgaccucgacgagugguccauggccaccuacuaccuguucgacgagagcggcgaguucaagcuggccucccacauguacugcagcuucuacccccccgacgaggacgaggaggagggggacugcgaggaggaggaguucgagccguccacccaguacgaguacggcacggaggacgacuaccagggcaagccccucgaguucggggcgaccagcgccgcccugcagcccgaggaggagcaggaggaggacuggcuggacgacgacucccagcagaccgugggccagcaggacgggagcgaggacaaccagaucaccacgauccagaccaucguggagguccagccccagcucgagauggagcugaccccgguggugcagaccaucgaggucaacuccuucagcggcuaccugaagcucacggacaacguguacaucaagaacgccgacaucguggaggaggcgaagaaggucaagcccaccgugguggucaacgccgccaacguguaccugaagcacgggggcggcguggccggggcccugaacaaggcgaccaacaacgccaugcaggucgaguccgacgacuacaucgccaccaacggcccccucaagguggggggcagcugcguccuguccggccacaaccuggccaagcacugccuccacgugguggggcccaacgucaacaagggcgaggacauccagcugcugaagagcgccuacgagaacuucaaccagcacgaggugcuccuggcgccgcugcucuccgccgggaucuucggcgccgaccccauccacagccugcgggugugcgucgacacggugcgcaccaacguguaccuggccgucuucgacaagaaccucuacgacaagcugguguccagcuuccuggagaugaagagcgagaagcagguggagcagaagaucgccgagauccccaaggaggaggucaagcccuucaucaccgaguccaagccgagcguggagcagcggaagcaggacgacaagaagaucaaggcgugcguggaggaggucaccacgacccucgaggagaccaaguuccugaccgagaaccugcuccuguacaucgacaucaacgggaaccugcaccccgacuccgccacgcucgugagcgacaucgacaucaccuuccugaagaaggacgcccccuacaucgugggcgacgucgugcaggagggcgugcugaccgccgucgugauccccaccaagaaggccgggggcacgaccgagaugcucgcgaaggcccugcgcaaggugccgaccgacaacuacaucaccacguaccccgggcagggccugaacggguacaccgucgaggaggccaagaccgugcucaagaagugcaaguccgccuucuacauccugcccagcaucaucuccaacgagaagcaggagauccugggcaccgugagcuggaaccuccgggagaugcuggcgcacgccgaggagacccgcaagcugaugcccgucugcguggagacgaaggccaucguguccaccauccagcggaaguacaagggcaucaagauccaggagggggucguggacuacggcgcccgcuucuacuucuacaccagcaagaccacgguggccucccugaucaacacccucaacgaccugaacgagacccuggucaccaugccgcucggguacgugacgcacggccugaaccuggaggaggcggcccgguacaugcgcagccucaaggugcccgccaccgucuccgugagcucccccgacgccgugaccgccuacaacggguaccugaccagcuccagcaagacgcccgaggagcacuucaucgagaccaucucccuggcgggcagcuacaaggacuggagcuacuccggccagagcacccagcucgggaucgaguuccugaagcggggcgacaaguccgucuacuacaccagcaacccgacgaccuuccaccuggacggggaggugaucaccuucgacaaccucaagacccugcugucccuccgcgaggugcggacgaucaaggucuucaccaccguggacaacaucaaccugcacacccagguggucgacaugagcaugacguacggccagcaguucggccccaccuaccuggacggggccgacgugaccaagaucaagccccacaacucccacgagggcaagaccuucuacgugcucccgaacgacgacacgcugcgcgucgaggccuucgaguacuaccacaccaccgaccccagcuuccuggggcgguacauguccgcccucaaccacaccaagaaguggaaguacccccaggugaacggccugacgagcaucaagugggccgacaacaacugcuaccuggcgaccgcccuccugacccugcagcagaucgagcucaaguucaaccccccggcccugcaggacgccuacuaccgcgcgcgggccggggaggccgccaacuucugcgcccugauccucgcguacugcaacaagaccgugggcgagcugggcgacguccgcgagacgauguccuaccuguuccagcacgccaaccucgacagcugcaagcgggugcugaacgucgugugcaagaccugcgggcagcagcagaccacccugaagggcguggaggccgucauguacauggggacccucuccuacgagcaguucaagaagggcgugcagauccccugcacgugcgggaagcaggccaccaaguaccuggugcagcaggagagccccuucgucaugauguccgcccccccggcgcaguacgagcugaagcacggcaccuucaccugcgccagcgaguacacgggcaacuaccagugcgggcacuacaagcacaucaccuccaaggagacccucuacugcaucgacggcgcccugcugaccaagagcagcgaguacaaggggcccaucacggacguguucuacaaggagaacuccuacaccaccaccaucaagcccgugacguacaagcucgacggcgucgugugcaccgagaucgaccccaagcuggacaacuacuacaagaaggacaacagcuacuucaccgagcagccgaucgaccuggugcccaaccagcccuaccccaacgccuccuucgacaacuucaaguucgucugcgacaacaucaaguucgccgacgaccucaaccagcugaccggguacaagaagccggcgagccgcgagcugaaggugacguucuuccccgaccucaacggcgacguggucgccaucgacuacaagcacuacacccccuccuucaagaagggcgccaagcugcugcacaagcccaucguguggcacgugaacaacgccaccaacaaggcgaccuacaagccgaacacguggugcauccggugccucuggagcaccaagcccgucgagaccuccaacagcuucgacgugcugaaguccgaggacgcccaggggauggacaaccuggccugcgaggaccucaagcccgugagcgaggaggucguggagaaccccaccauccagaaggacgugcuggagugcaacgucaagacgaccgagguggugggcgacaucauccugaagccggccaacaacucccucaagaucaccgaggaggucgggcacaccgaccugauggccgcguacguggacaacagcucccugacgaucaagaagcccaacgagcucagccgcgugcugggccugaagacccucgccacccacgggcuggccgccgucaacuccgugcccugggacaccaucgccaacuacgcgaagccguuccugaacaagguggucagcacgaccaccaacaucgugacccgcugccucaaccgggugugcacgaacuacaugcccuacuucuucacccugcugcuccagcugugcaccuucacccgcuccaccaacagccggaucaaggccuccaugcccacgaccaucgccaagaacaccgucaagagcgugggcaaguucugccuggaggccagcuucaacuaccucaagucccccaacuucagcaagcugaucaacaucaucaucugguuccugcuccuguccgugugccugggcagccucaucuacuccaccgccgcgcuggggguccugaugagcaaccucggcaugccguccuacugcacgggguaccgcgagggcuaccugaacagcaccaacgugaccaucgccaccuacugcacgggcuccauccccugcagcgugugccuguccgggcucgacagccuggacaccuaccccucccuggagaccauccagaucaccaucagcuccuucaagugggaccucacggccuucggccuggucgccgagugguuccuggccuacauccucuucacccgguucuucuacgugcuggggcuggcggccaucaugcagcucuucuucagcuacuucgccgugcacuucaucuccaacagcuggcugauguggcugaucaucaaccugguccagauggcccccaucuccgcgauggugcgcauguacaucuucuucgccagcuucuacuacguguggaagagcuacguccacgugguggacggcugcaacuccagcaccugcaugaugugcuacaagcggaaccgcgccacccgggucgagugcacgaccaucgugaacgggguccgccgguccuucuacguguacgccaacggcggcaagggguucugcaagcuccacaacuggaacugcgugaacugcgacaccuucugcgccggcagcaccuucaucuccgacgaggucgcgcgcgaccugagccugcaguucaagcggccgaucaaccccacggaccaguccagcuacaucguggacuccgugaccgucaagaacgggagcauccaccucuacuucgacaaggccggccagaagaccuacgagcgccacucccugagccacuucgugaaccuggacaaccuccgggccaacaacaccaaggggucccugcccaucaacgugaucgucuucgacggcaagagcaagugcgaggaguccagcgccaaguccgccagcguguacuacucccagcugaugugccagcccauccuccugcuggaccaggcgcucgugagcgacgucggcgacagcgccgagguggccgugaagauguucgacgccuacgucaacacguucuccagcaccuucaacgugccgauggagaagcugaagacccugguggccaccgcggaggccgagcucgccaagaacgucucccuggacaacgugcugagcacguucaucuccgccgcgcgccagggguucguggacagcgacgucgagaccaaggacgugguggagugccucaagcugucccaccagagcgacaucgaggucaccggcgacuccugcaacaacuacaugcugaccuacaacaagguggagaacaugacgccccgggaccucggggccugcaucgacugcagcgcccgccacaucaacgcccagguggccaagucccacaacaucgcgcugaucuggaacgucaaggacuucaugagccuguccgagcagcuccggaagcagauccgcagcgccgccaagaagaacaaccugcccuucaagcugaccugcgccaccacccgccagguggugaacgucgugacgaccaagaucgcccucaagggcgggugaggacuaguuauaagacugacuagcccgaugggccucccaacgggcccuccuccccuccuugcaccgagauuaauaaaaaaaaaaaaaaaaaaaaaaaaaaaaaaaaaaaaaaaaaaaaaaaaaaaaaaaaaaaaaaaaugcaucccccccccccccccccccccccccccccccaaaggcucuuuucagagccaccagaauu

SEQ ID NO: 21977 - RNA, 6058 nt, Artificial Sequence
  SARS-CoV-2__MT452576.1__non-structural protein 3 (NSP3) mRNA gc
aggagaaagcuuaccauggcccccaccaaggugaccuucggcgacgacacggucaucgaggugcagggguacaagagcgugaacaucaccuucgagcuggacgagcgcaucgacaagguccucaacgagaagugcuccgccuacaccguggagcugggcaccgaggugaacgaguucgcgugcgucguggccgacgccgugaucaagacgcugcagccggucagcgagcuccugaccccccuggggaucgaccucgacgagugguccauggccaccuacuaccuguucgacgagagcggcgaguucaagcuggccucccacauguacugcagcuucuacccccccgacgaggacgaggaggagggggacugcgaggaggaggaguucgagccguccacccaguacgaguacggcacggaggacgacuaccagggcaagccccucgaguucggggcgaccagcgccgcccugcagcccgaggaggagcaggaggaggacuggcuggacgacgacucccagcagaccgugggccagcaggacgggagcgaggacaaccagaccacgaccauccagaccaucguggagguccagccccagcucgagauggagcugaccccgguggugcagacgaucgaggucaacuccuucagcggcuaccugaagcucaccgacaacguguacaucaagaacgccgacaucguggaggaggcgaagaaggucaagcccaccgugguggucaacgccgccaacguguaccugaagcacgggggcggcguggccggggcccugaacaaggcgaccaacaacgccaugcaggucgaguccgacgacuacaucgccacgaacggcccccucaagguggggggcagcugcguccuguccggccacaaccuggccaagcacugccuccacgugguggggcccaacgucaacaagggcgaggacauccagcugcugaagagcgccuacgagaacuucaaccagcacgaggugcuccuggcgccgcugcucuccgccgggaucuucggcgccgaccccauccacagccugcgggugugcgucgacaccgugcgcaccaacguguaccuggccgucuucgacaagaaccucuacgacaagcugguguccagcuuccuggagaugaagagcgagaagcagguggagcagaagaucgccgagauccccaaggaggaggucaagcccuucaucaccgaguccaagccgagcguggagcagcggaagcaggacgacaagaagaucaaggcgugcguggaggaggucacgaccacccucgaggagaccaaguuccugacggagaaccugcuccuguacaucgacaucaacgggaaccugcaccccgacuccgccacccucgugagcgacaucgacaucaccuuccugaagaaggacgcccccuacaucgugggcgacgucgugcaggagggcgugcugaccgccgucgugauccccacgaagaaggccgggggcaccaccgagaugcucgcgaaggcccugcgcaaggugccgaccgacaacuacaucacgaccuaccccgggcagggccugaacggguacaccgucgacgaggccaagaccgugcucaagaagugcaaguccgccuucuacauccugcccagcaucaucuccaacgagaagcaggagauccugggcaccgugagcuggaaccuccgggagaugcuggcgcacgccgaggagacgcgcaagcugaugcccgucugcguggagaccaaggccaucguguccaccauccagcggaaguacaagggcaucaagauccaggagggggucguggacuacggcgcccgcuucuacuucuacaccagcaagacgaccguggccucccugaucaacacccucaacgaccugaacgagacccuggucacgaugccgcucggguacgugacccacggccugaaccuggaggaggcggcccgguacaugcgcagccucaaggugcccgccaccgucuccgugagcucccccgacgccgugaccgccuacaacggguaccugacgagcuccagcaagacccccgaggagcacuucaucgagaccaucucccuggcgggcagcuacaaggacuggagcuacuccggccagagcacccagcucgggaucgaguuccugaagcggggcgacaaguccgucuacuacacgagcaacccgaccaccuuccaccuggacggggaggugaucaccuucgacaaccucaagacgcugcugucccuccgcgaggugcggaccaucaaggucuucaccaccguggacaacaucaaccugcacacgcagguggucgacaugagcaugaccuacggccagcaguucggccccaccuaccuggacggggccgacgugaccaagaucaagccccacaacucccacgagggcaagacguucuacgugcucccgaacgacgacacccugcgcgucgaggccuucgaguacuaccacaccaccgaccccagcuuccuggggcgguacauguccgcccucaaccacacgaagaaguggaaguacccccaggugaacggccugaccagcaucaagugggccgacaacaacugcuaccuggcgaccgcccuccugacccugcagcagaucgagcucaaguucaaccccccggcccugcaggacgccuacuaccgcgcgcgggccggggaggccgccaacuucugcgcccugauccucgcguacugcaacaagacggugggcgagcugggcgacguccgcgagaccauguccuaccuguuccagcacgccaaccucgacagcugcaagcgggugcugaacgucgugugcaagaccugcgggcagcagcagaccacccugaagggcguggaggccgucauguacauggggacgcucuccuacgagcaguucaagaagggcgugcagauccccugcaccugcgggaagcaggccaccaaguaccuggugcagcaggagagccccuucgucaugauguccgcccccccggcgcaguacgagcugaagcacggcaccuucacgugcgccagcgaguacaccggcaacuaccagugcgggcacuacaagcacaucaccuccaaggagacccucuacugcaucgacggcgcccugcugacgaagagcagcgaguacaaggggcccaucaccgacguguucuacaaggagaacuccuacaccaccacgaucaagcccgugaccuacaagcucgacggcgucgugugcaccgagaucgaccccaagcuggacaacuacuacaagaaggacaacagcuacuucaccgagcagccgaucgaccuggugcccaaccagcccuaccccaacgccuccuucgacaacuucaaguucgucugcgacaacaucaaguucgccgacgaccucaaccagcugacgggguacaagaagccggcgagccgcgagcugaaggugaccuucuuccccgaccucaacggcgacguggucgccaucgacuacaagcacuacacccccuccuucaagaagggcgccaagcugcugcacaagcccaucguguggcacgugaacaacgccaccaacaaggcgacguacaagccgaacaccuggugcauccggugccucuggagcaccaagcccgucgagaccuccaacagcuucgacgugcugaaguccgaggacgcccaggggauggacaaccuggccugcgaggaccucaagcccgugagcgaggaggucguggagaaccccacgauccagaaggacgugcuggagugcaacgucaagaccaccgagguggugggcgacaucauccugaagccggccaacaacucccucaagaucaccgaggaggucgggcacacggaccugauggccgcguacguggacaacagcucccugaccaucaagaagcccaacgagcucagccgcgugcugggccugaagacccucgccacccacgggcuggccgccgucaacuccgugcccugggacacgaucgccaacuacgcgaagccguuccugaacaagguggucagcaccaccaccaacaucgugacgcgcugccucaaccgggugugcaccaacuacaugcccuacuucuucacccugcugcuccagcugugcaccuucacccgcuccacgaacagccggaucaaggccuccaugcccaccaccaucgccaagaacaccgucaagagcgugggcaaguucugccuggaggccagcuucaacuaccucaagucccccaacuucagcaagcugaucaacaucaucaucugguuccugcuccuguccgugugccugggcagccucaucuacuccacggccgcgcuggggguccugaugagcaaccucggcaugccguccuacugcaccggguaccgcgagggcuaccugaacagcaccaacgugaccaucgccacguacugcaccggcuccauccccugcagcgugugccuguccgggcucgacagccuggacaccuaccccucccuggagaccauccagaucacgaucagcuccuucaagugggaccucaccgccuucggccuggucgccgagugguuccuggccuacauccucuucacccgguucuucuacgugcuggggcuggcggccaucaugcagcucuucuucagcuacuucgccgugcacuucaucuccaacagcuggcugauguggcugaucaucaaccugguccagauggcccccaucuccgcgauggugcgcauguacaucuucuucgccagcuucuacuacguguggaagagcuacguccacgugguggacggcugcaacuccagcaccugcaugaugugcuacaagcggaaccgcgccacgcgggucgagugcaccaccaucgugaacgggguccgccgguccuucuacguguacgccaacggcggcaagggguucugcaagcuccacaacuggaacugcgugaacugcgacaccuucugcgccggcagcacguucaucuccgacgaggucgcgcgcgaccugagccugcaguucaagcggccgaucaaccccaccgaccaguccagcuacaucguggacuccgugaccgucaagaacgggagcauccaccucuacuucgacaaggccggccagaagaccuacgagcgccacucccugagccacuucgugaaccuggacaaccuccgggccaacaacacgaaggggucccugcccaucaacgugaucgucuucgacggcaagagcaagugcgaggaguccagcgccaaguccgccagcguguacuacucccagcugaugugccagcccauccuccugcuggaccaggcgcucgugagcgacgucggcgacagcgccgagguggccgugaagauguucgacgccuacgucaacaccuucuccagcaccuucaacgugccgauggagaagcugaagacccugguggccacggcggaggccgagcucgccaagaacgucucccuggacaacgugcugagcaccuucaucuccgccgcgcgccagggguucguggacagcgacgucgagaccaaggacgugguggagugccucaagcugucccaccagagcgacaucgaggucaccggcgacuccugcaacaacuacaugcugacguacaacaagguggagaacaugaccccccgggaccucggggccugcaucgacugcagcgcccgccacaucaacgcccagguggccaagucccacaacaucgcgcugaucuggaacgucaaggacuucaugagccuguccgagcagcuccggaagcagauccgcagcgccgccaagaagaacaaccugcccuucaagcugaccugcgccaccacgcgccagguggugaacgucgugaccaccaagaucgcccucaagggcgggugaggacuaguuauaagacugacuagcccgaugggccucccaacgggcccuccuccccuccuugcaccgagauuaauaaaaaaaaaaaaaaaaaaaaaaaaaaaaaaaaaaaaaaaaaaaaaaaaaaaaaaaaaaaaaaaaugcaucccccccccccccccccccccccccccccccaaaggcucuuuucagagccaccagaauu

SEQ ID NO: 21978 - RNA, 6058 nt, Artificial Sequence
  SARS-CoV-2__MT446312.1__non-structural protein 3 (NSP3) mRNA gc
aggagaaagcuuaccauggcccccaccaaggugaccuucggcgacgacacggucaucgaggugcagggguacaagagcgugaacaucaccuucgagcuggacgagcgcaucgacaagguccucaacgagaagugcuccgccuacaccguggagcugggcaccgaggugaacgaguucgcgugcgucguggccgacgccgugaucaagacgcugcagccggucagcgagcuccugaccccccuggggaucgaccucgacgagugguccauggccaccuacuaccuguucgacgagagcggcgaguucaagcuggccucccacauguacugcagcuucuacccccccgacgaggacgaggaggagggggacugcgaggaggaggaguucgagccguccacccaguacgaguacggcacggaggacgacuaccagggcaagccccucgaguucggggcgaccagcgccgcccugcagcccgaggaggagcaggaggaggacuggcuggacgacgacucccagcagaccgugggccagcaggacgggagcgaggacaaccagaccacgaccauccagaccaucguggagguccagccccagcucgagauggagcugaccccgguggugcagacgaucgaggucaacuccuucagcggcuaccugaagcucaccgacaacguguacaucaagaacgccgacaucguggaggaggcgaagaaggucaagcccaccgugguggucaacgccgccaacguguaccugaagcacgggggcggcguggccggggcccugaacaaggcgaccaacaacgccaugcaggucgaguccgacgacuacaucgccacgaacggcccccucaagguggggggcagcugcguccuguccggccacaaccuggccaagcacugccuccacgugguggggcccaacgucaacaagggcgaggacauccagcugcugaagagcgccuacgagaacuucaaccagcacgaggugcuccuggcgccgcugcucuccgccgggaucuucggcgccgaccccauccacagccugcgggugugcgucgacaccgugcgcaccaacguguaccuggccgucuucgacaagaaccucuacgacaagcugguguccagcuuccuggagaugaagagcgagaagcagguggagcagaagaucgccgagauccccaaggaggaggucaagcccuucaucaccgaguccaagccgagcguggagcagcggaagcaggacgacaagaagaucaaggcgugcguggaggaggucacgaccacccucgaggagaccaaguuccugacggagaaccugcuccuguacaucgacaucaacgggaaccugcaccccgacuccgccacccucgugagcgacaucgacaucaccuuccugaagaaggacgcccccuacaucgugggcgacgucgugcaggagggcgugcugaccgccgucgugauccccacgaagaaggccgggggcaccaccgagaugcucgcgaaggcccugcgcaaggugccgaccgacaacuacaucacgaccuaccccgggcagggccugaacggguacaccgucgaggaggccaagaccgugcucaagaagugcaaguccgccuucuacauccugcccagcaucaucuccaacgagaagcaggagauccugggcaccgugagcuggaaccuccgggagaugcuggcgcacgccgaggagacgcgcaagcugaugcccgucugcguggagaccaaggccaucguguccaccauccagcggaaguacaagggcaucaagauccaggagggggucguggacuacggcgcccgcuucuacuucuacaccagcaagacgaccguggccucccugaucaacacccucaacgaccugaacgagacccuggucacgaugccgcucggguacgugacccacggccugaaccuggaggaggcggcccgguacaugcgcagccucaaggugcccgccaccgucuccgugagcucccccgacgccgugaccgccuacaacggguaccugacgagcuccagcaagacccccgaggagcacuucaucgagaccaucucccuggcgggcagcuacaaggacuggagcuacuccggccagagcacccagcucgggaucgaguuccugaagcggggcgacaaguccgucuacuacacgagcaacccgaccaccuuccaccuggacggggaggugaucaccuucgacaaccucaagacgcugcugucccuccgcgaggugcggaccaucaaggucuucaccaccguggacaacaucaaccugcacacgcagguggucgacaugagcaugaccuacggccagcaguucggccccaccuaccuggacggggccgacgugaccaagaucaagccccacaacucccacgagggcaagacguucuacgugcucccgaacgacgacacccugcgcgucgaggccuucgaguacuaccacaccaccgaccccagcuuccuggggcgguacauguccgcccucaaccacacgaagaaguggaaguacccccaggugaacggccugaccagcaucaagugggccgacaacaacugcuaccuggcgaccgcccuccugacccugcagcagaucgagcucaaguucaaccccccggcccugcaggacgccuacuaccgcgcgcgggccggggaggccgccaacuucugcgcccugauccucgcguacugcaacaagacggugggcgagcugggcgacguccgcgagaccauguccuaccuguuccagcacgccaaccucgacagcugcaagcgggugcugaacgucgugugcaagaccugcgggcagcagcagaccacccugaagggcguggaggccgucauguacauggggacgcucuccuacgagcaguucaagaagggcgugcagauccccugcaccugcgggaagcaggccaccaaguaccuggugcagcaggagagccccuucgucaugauguccgcccccccggcgcaguacgagcugaagcacggcaccuucacgugcgccagcgaguacaccggcaacuaccagugcgggcacuacaagcacaucaccuccaaggagacccucuacugcaucgacggcgcccugcugacgaagagcagcgaguacaaggggcccaucaccgacguguucuacaaggagaacuccuacaccaccacgaucaagcccgugaccuacaagcucgacggcgucgugugcaccgagaucgaccccaagcuggacaacuacuacaagaaggacaacagcuacuucaccgagcagccgaucgaccuggugcccaaccagcccuaccccaacgccuccuucgacaacuucaaguucgucugcgacaacaucaaguucgccgacgaccucaaccagcugacgggguacaagaagccggcgagccgcgagcugaaggugaccuucuuccccgaccucaacggcgacguggucgccaucgacuacaagcacuacacccccuccuucaagaagggcgccaagcugcugcacaagcccaucguguggcacgugaacaacgccaccaacaaggcgacguacaagccgaacaccuggugcauccggugccucuggagcaccaagcccgucgagaccuccaacagcuucgacgugcugaaguccgaggacgcccaggggauggacaaccuggccugcgaggaccucaagcccgugagcgaggaggucguggagaaccccacgauccagaaggacgugcuggagugcaacgucaagaccaccgagguggugggcgacaucauccugaagccggccaacaacucccucaagaucaccgaggaggucgggcacacggaccugauggccgcguacguggacaacagcucccugaccaucaagaagcccaacgagcucagccgcgugcugggccugaagacccucgccacccacgggcuggccgccgucaacuccgugcccugggacacgaucgccaacuacgcgaagccguuccugaacaagguggucagcaccaccaccaacaucgugacgcgcugccucaaccgggugugcaccaacuacaugcccuacuucuucacccugcugcuccagcugugcaccuucacccgcaucacgaacucccggaucaaggccagcaugcccaccaccaucgccaagaacaccgucaaguccgugggcaaguucugccuggaggccagcuucaacuaccucaagagccccaacuucuccaagcugaucaacaucaucaucugguuccugcuccugagcgugugccugggcucccucacguacagcaccgccgcgcuggggguccugauguccaaccucggcaugccgagcuacugcaccggguaccgcgagggcuaccugaacuccaccaacgugacgaucgccaccuacugcaccggcagcauccccugcuccgugugccugagcgggcucgacucccuggacaccuaccccagccuggagacgauccagaucaccaucuccagcuucaagugggaccucaccgccuucggccuggucgccgagugguuccuggccuacauccucuucacccgguucuucuacgugcuggggcuggcggccaucaugcagcucuucuucuccuacuucgccgugcacuucaucagcaacuccuggcugauguggcugaucaucaaccugguccagauggcccccaucagcgcgauggugcgcauguacaucuucuucgccuccuucuacuacguguggaagagcuacguccacgugguggacggcugcaacagcuccacgugcaugaugugcuacaagcggaaccgcgccacccgggucgagugcaccaccaucgugaacgggguccgccggagcuucuacguguacgccaacggcggcaagggguucugcaagcuccacaacuggaacugcgugaacugcgacacguucugcgccggcuccaccuucaucagcgacgaggucgcgcgcgaccugucccugcaguucaagcggccgaucaaccccaccgaccagagcuccuacaucguggacagcgugaccgucaagaacggguccauccaccucuacuucgacaaggccggccagaagacguacgagcgccacagccugucccacuucgugaaccuggacaaccuccgggccaacaacaccaaggggagccugcccaucaacgugaucgucuucgacggcaaguccaagugcgaggagagcuccgccaagagcgccuccguguacuacagccagcugaugugccagcccauccuccugcuggaccaggcgcucguguccgacgucggcgacagcgccgagguggccgugaagauguucgacgccuacgucaacaccuucagcuccaccuucaacgugccgauggagaagcugaagacgcugguggccaccgcggaggccgagcucgccaagaacgucagccuggacaacgugcuguccaccuucaucagcgccgcgcgccagggguucguggacuccgacgucgagaccaaggacgugguggagugccucaagcugagccaccaguccgacaucgaggucacgggcgacagcugcaacaacuacaugcugaccuacaacaagguggagaacaugaccccccgggaccucggggccugcaucgacugcuccgcccgccacaucaacgcccagguggccaagagccacaacaucgcgcugaucuggaacgucaaggacuucaugucccugagcgagcagcuccggaagcagauccgcuccgccgccaagaagaacaaccugcccuucaagcugaccugcgccacgacccgccagguggugaacgucgugaccaccaagaucgcccucaagggcgggugaggacuaguuauaagacugacuagcccgaugggccucccaacgggcccuccuccccuccuugcaccgagauuaauaaaaaaaaaaaaaaaaaaaaaaaaaaaaaaaaaaaaaaaaaaaaaaaaaaaaaaaaaaaaaaaaugcaucccccccccccccccccccccccccccccccaaaggcucuuuucagagccaccagaauu

SEQ ID NO: 21979 - RNA, 6058 nt, Artificial Sequence
  SARS-CoV-2__MT446357.1__non-structural protein 3 (NSP3) mRNA gc
aggagaaagcuuaccauggcccccaccaaggugaccuucggcgacgacacggucaucgaggugcagggguacaagagcgugaacaucaccuucgagcuggacgagcgcaucgacaagguccucaacgagaagugcuccgccuacaccguggagcugggcaccgaggugaacgaguucgcgugcgucguggccgacgccgugaucaagacgcugcagccggucagcgagcuccugaccccccuggggaucgaccucgacgagugguccauggccaccuacuaccuguucgacgagagcggcgaguucaagcuggccucccacauguacugcagcuucuacccccccgacgaggacgaggaggagggggacugcgaggaggaggaguucgagccguccacccaguacgaguacggcacggaggacgacuaccagggcaagccccucgaguucggggcgaccagcgccgcccugcagcccgaggaggagcaggaggaggacuggcuggacgacgacucccagcagaccgugggccagcaggacgggagcgaggacaaccagaccacgaccauccagaccaucguggagguccagccccagcucgagauggagcugaccccgguggugcagacgaucgaggucaacuccuucagcggcuaccugaagcucaccgacaacguguacaucaagaacgccgacaucguggaggaggcgaagaaggucaagcccaccgugguggucaacgccgccaacguguaccugaagcacgggggcggcguggccggggcccugaacaaggcgaccaacaacgccaugcaggucgaguccgacgacuacaucgccacgaacggcccccucaagguggggggcagcugcguccuguccggccacaaccuggccaagcacugccuccacgugguggggcccaacgucaacaagggcgaggacauccagcugcugaagagcgccuacgagaacuucaaccagcacgaggugcuccuggcgccgcugcucuccgccgggaucuucggcgccgaccccauccacagccugcgggugugcgucgacaccgugcgcaccaacguguaccuggccgucuucgacaagaaccucuacgacaagcugguguccagcuuccuggagaugaagagcgagaagcagguggagcagaagaucgccgagauccccaaggaggaggucaagcccuucaucaccgaguccaagccgagcguggagcagcggaagcaggacgacaagaagaucaaggcgugcguggaggaggucacgaccacccucgaggagaccaaguuccugacggagaaccugcuccuguacaucgacaucaacgggaaccugcaccccgacuccgccacccucgugagcgacaucgacaucaccuuccugaagaaggacgcccccuacaucgugggcgacgucgugcaggagggcgugcugaccgccgucgugauccccacgaagaaggccgggggcaccaccgagaugcucgcgaaggcccugcgcgaggugccgaccgacaacuacaucacgaccuaccccgggcagggccugaacggguacaccgucgaggaggccaagaccgugcucaagaagugcaaguccgccuucuacauccugcccagcaucaucuccaacgagaagcaggagauccugggcaccgugagcuggaaccuccgggagaugcuggcgcacgccgaggagacgcgcaagcugaugcccgucugcguggagaccaaggccaucguguccaccauccagcggaaguacaagggcaucaagauccaggagggggucguggacuacggcgcccgcuucuacuucuacaccagcaagacgaccguggccucccugaucaacacccucaacgaccugaacgagacccuggucacgaugccgcucggguacgugacccacggccugaaccuggaggaggcggcccgguacaugcgcagccucaaggugcccgccaccgucuccgugagcucccccgacgccgugaccgccuacaacggguaccugacgagcuccagcaagacccccgaggagcacuucaucgagaccaucucccuggcgggcagcuacaaggacuggagcuacuccggccagagcacccagcucgggaucgaguuccugaagcggggcgacaaguccgucuacuacacgagcaacccgaccaccuuccaccuggacggggaggugaucaccuucgacaaccucaagacgcugcugucccuccgcgaggugcggaccaucaaggucuucaccaccguggacaacaucaaccugcacacgcagguggucgacaugagcaugaccuacggccagcaguucggccccaccuaccuggacggggccgacgugaccaagaucaagccccacaacucccacgagggcaagacguucuacgugcucccgaacgacgacacccugcgcgucgaggccuucgaguacuaccacaccaccgaccccagcuuccuggggcgguacauguccgcccucaaccacacgaagaaguggaaguacccccaggugaacggccugaccagcaucaagugggccgacaacaacugcuaccuggcgaccgcccuccugacccugcagcagaucgagcucaaguucaaccccccggcccugcaggacgccuacuaccgcgcgcgggccggggaggccgccaacuucugcgcccugauccucgcguacugcaacaagacggugggcgagcugggcgacguccgcgagaccauguccuaccuguuccagcacgccaaccucgacagcugcaagcgggugcugaacgucgugugcaagaccugcgggcagcagcagaccacccugaagggcguggaggccgucauguacauggggacgcucuccuacgagcaguucaagaagggcgugcagauccccugcaccugcgggaagcaggccaccaaguaccuggugcagcaggagagccccuucgucaugauguccgcccccccggcgcaguacgagcugaagcacggcaccuucacgugcgccagcgaguacaccggcaacuaccagugcgggcacuacaagcacaucaccuccaaggagacccucuacugcaucgacggcgcccugcugacgaagagcagcgaguacaaggggcccaucaccgacguguucuacaaggagaacuccuacaccaccacgaucaagcccgugaccuacaagcucgacggcgucgugugcaccgagaucgaccccaagcuggacaacuacuacaagaaggacaacagcuacuucaccgagcagccgaucgaccuggugcccaaccagcccuaccccaacgccuccuucgacaacuucaaguucgucugcgacaacaucaaguucgccgacgaccucaaccagcugacgggguacaagaagccggcgagccgcgagcugaaggugaccuucuuccccgaccucaacggcgacguggucgccaucgacuacaagcacuacacccccuccuucaagaagggcgccaagcugcugcacaagcccaucguguggcacgugaacaacgccaccaacaaggcgacguacaagccgaacaccuggugcauccggugccucuggagcaccaagcccgucgagaccuccaacagcuucgacgugcugaaguccgaggacgcccaggggauggacaaccuggccugcgaggaccucaagcccgugagcgaggaggucguggagaaccccacgauccagaaggacgugcuggagugcaacgucaagaccaccgagguggugggcgacaucauccugaagccggccaacaacucccucaagaucaccgaggaggucgggcacacggaccugauggccgcguacguggacaacagcucccugaccaucaagaagcccaacgagcucagccgcgugcugggccugaagacccucgccacccacgggcuggccgccgucaacuccgugcccugggacacgaucgccaacuacgcgaagccguuccugaacaagguggucagcaccaccaccaacaucgugacgcgcugccucaaccgggugugcaccaacuacaugcccuacuucuucacccugcugcuccagcugugcaccuucacccgcuccacgaacagccggaucaaggccuccaugcccaccaccaucgccaagaacaccgucaagagcgugggcaaguucugccuggaggccagcuucaacuaccucaagucccccaacuucagcaagcugaucaacaucaucaucugguuccugcuccuguccgugugccugggcagccucaucuacuccacggccgcgcuggggguccugaugagcaaccucggcaugccguccuacugcaccggguaccgcgagggcuaccugaacagcaccaacgugaccaucgccacguacugcaccggcuccauccccugcagcgugugccuguccgggcucgacagccuggacaccuaccccucccuggagaccauccagaucacgaucagcuccuucaagugggaccucaccgccuucggccuggucgccgagugguuccuggccuacauccucuucacccgguucuucuacgugcuggggcuggcggccaucaugcagcucuucuucagcuacuucgccgugcacuucaucuccaacagcuggcugauguggcugaucaucaaccugguccagauggcccccaucuccgcgauggugcgcauguacaucuucuucgccagcuucuacuacguguggaagagcuacguccacgugguggacggcugcaacuccagcaccugcaugaugugcuacaagcggaaccgcgccacgcgggucgagugcaccaccaucgugaacgggguccgccgguccuucuacguguacgccaacggcggcaagggguucugcaagcuccacaacuggaacugcgugaacugcgacaccuucugcgccggcagcacguucaucuccgacgaggucgcgcgcgaccugagccugcaguucaagcggccgaucaaccccaccgaccaguccagcuacaucguggacuccgugaccgucaagaacgggagcauccaccucuacuucgacaaggccggccagaagaccuacgagcgccacucccugagccacuucgugaaccuggacaaccuccgggccaacaacacgaaggggucccugcccaucaacgugaucgucuucgacggcaagagcaagugcgaggaguccagcgccaaguccgccagcguguacuacucccagcugaugugccagcccauccuccugcuggaccaggcgcucgugagcgacgucggcgacagcgccgagguggccgugaagauguucgacgccuacgucaacaccuucuccagcaccuucaacgugccgauggagaagcugaagacccugguggccacggcggaggccgagcucgccaagaacgucucccuggacaacgugcugagcaccuucaucuccgccgcgcgccagggguucguggacagcgacgucgagaccaaggacgugguggagugccucaagcugucccaccagagcgacaucgaggucaccggcgacuccugcaacaacuacaugcugacguacaacaagguggagaacaugaccccccgggaccucggggccugcaucgacugcagcgcccgccacaucaacgcccagguggccaagucccacaacaucgcgcugaucuggaacgucaaggacuucaugagccuguccgagcagcuccggaagcagauccgcagcgccgccaagaagaacaaccugcccuucaagcugaccugcgccaccacgcgccagguggugaacgucgugaccaccaagaucgcccucaagggcgggugaggacuaguuauaagacugacuagcccgaugggccucccaacgggcccuccuccccuccuugcaccgagauuaauaaaaaaaaaaaaaaaaaaaaaaaaaaaaaaaaaaaaaaaaaaaaaaaaaaaaaaaaaaaaaaaaugcaucccccccccccccccccccccccccccccccaaaggcucuuuucagagccaccagaauu

SEQ ID NO: 21980 - RNA, 6058 nt, Artificial Sequence
  SARS-CoV-2__MT447165.1__non-structural protein 3 (NSP3) mRNA gc
aggagaaagcuuaccauggcccccaccaaggugaccuucggcgacgacacggucaucgaggugcagggguacaagagcgugaacaucaccuucgagcuggacgagcgcaucgacaagguccucaacgagaagugcuccgccuacaccguggagcugggcaccgaggugaacgaguucgcgugcgucguggccgacgccgugaucaagacgcugcagccggucagcgagcuccugaccccccuggggaucgaccucgacgagugguccauggccaccuacuaccuguucgacgagagcggcgaguucaagcuggccucccacauguacugcagcuucuacccccccgacgaggacgaggaggagggggacugcgaggaggaggaguucgagccguccacccaguacgaguacggcacggaggacgacuaccagggcaagccccucgaguucggggcgaccagcgccgcccugcagcccgaggaggagcaggaggaggacuggcuggacgacgacucccagcagaccgugggccagcaggacgggagcgaggacaaccagaccacgaccauccagaccaucguggagguccagccccagcucgagauggagcugaccccgguggugcagacgaucgaggucaacuccuucagcggcuaccugaagcucaccgacaacguguacaucaagaacgccgacaucguggaggaggcgaagaaggucaagcccaccgugguggucaacgccgccaacguguaccugaagcacgggggcggcguggccggggcccugaacaaggcgaccaacaacgccaugcaggucgaguccgacgacuacaucgccacgaacggcccccucaagguggggggcagcugcguccuguccggccacaaccuggccaagcacugccuccacgugguggggcccaacgucaacaagggcgaggacauccagcugcugaagagcgccuacgagaacuucaaccagcacgaggugcuccuggcgccgcugcucuccgccgggaucuucggcgccgaccccauccacagccugcgggugugcgucgacaccgugcgcaccaacguguaccuggccgucuucgacaagaaccucuacgacaagcugguguccagcuuccuggagaugaagagcgagaagcagguggagcagaagaucgccgagauccccaaggaggaggucaagcccuucaucaccgaguccaagccgagcguggagcagcggaagcaggacgacaagaagaucaaggcgugcguggaggaggucacgaccacccucgaggagaccaaguuccugacggagaaccugcuccuguacaucgacaucaacgggaaccugcaccccgacuccgccacccucgugagcgacaucgacaucaccuuccugaagaaggacgcccccuacaucgugggcgacgucgugcaggagggcgugcugaccgccgucgugauccccacgaagaaggccgggggcaccaccgagaugcucgcgaaggcccugcgcaaggugccgaccgacaacuacaucacgaccuaccccgggcagggccugaacggguacaccgucgaggaggccaagaccgugcucaagaagugcaaguccgccuucuacauccugcccagcaucaucuccaacgagaagcaggagauccugggcaccgugagcuggaacuuccgggagaugcucgcgcacgccgaggagacgcgcaagcugaugcccgucugcguggagaccaaggccaucguguccaccauccagcggaaguacaagggcaucaagauccaggagggggucguggacuacggcgcccgcuucuacuucuacaccagcaagacgaccguggccucccugaucaacacccugaacgaccucaacgagacccuggucacgaugccgcugggguacgugacccacggccucaaccuggaggaggcggcccgguacaugcgcagccugaaggugcccgccaccgucuccgugagcucccccgacgccgugaccgccuacaacggguaccucacgagcuccagcaagacccccgaggagcacuucaucgagaccaucucccuggcgggcagcuacaaggacuggagcuacuccggccagagcacccagcuggggaucgaguuccucaagcggggcgacaaguccgucuacuacacgagcaacccgaccaccuuccaccuggacggggaggugaucaccuucgacaaccugaagacgcuccugucccugcgcgaggugcggaccaucaaggucuucaccaccguggacaacaucaaccuccacacgcagguggucgacaugagcaugaccuacggccagcaguucggccccaccuaccuggacggggccgacgugaccaagaucaagccccacaacucccacgagggcaagacguucuacgugcugccgaacgacgacacccuccgcgucgaggccuucgaguacuaccacaccaccgaccccagcuuccuggggcgguacauguccgcccugaaccacacgaagaaguggaaguacccccaggugaacggccucaccagcaucaagugggccgacaacaacugcuaccuggcgaccgcccugcucacccugcagcagaucgagcugaaguucaaccccccggcccuccaggacgccuacuaccgcgcgcgggccggggaggccgccaacuucugcgcccugauccuggcguacugcaacaagacggugggcgagcucggcgacguccgcgagaccauguccuaccuguuccagcacgccaaccuggacagcugcaagcgggugcucaacgucgugugcaagaccugcgggcagcagcagaccacccugaagggcguggaggccgucauguacauggggacgcuguccuacgagcaguucaagaagggcgugcagauccccugcaccugcgggaagcaggccaccaaguaccucgugcagcaggagagccccuucgucaugauguccgcccccccggcgcaguacgagcugaagcacggcaccuucacgugcgccagcgaguacaccggcaacuaccagugcgggcacuacaagcacaucaccuccaaggagacccuguacugcaucgacggcgcccuccugacgaagagcagcgaguacaaggggcccaucaccgacguguucuacaaggagaacuccuacaccaccacgaucaagcccgugaccuacaagcuggacggcgucgugugcaccgagaucgaccccaagcucgacaacuacuacaagaaggacaacagcuacuucaccgagcagccgaucgaccuggugcccaaccagcccuaccccaacgccuccuucgacaacuucaaguucgucugcgacaacaucaaguucgccgacgaccugaaccagcucacgggguacaagaagccggcgagccgcgagcugaaggugaccuucuuccccgaccugaacggcgacguggucgccaucgacuacaagcacuacacccccuccuucaagaagggcgccaagcuccugcacaagcccaucguguggcacgugaacaacgccaccaacaaggcgacguacaagccgaacaccuggugcauccggugccuguggagcaccaagcccgucgagaccuccaacagcuucgacgugcucaaguccgaggacgcccaggggauggacaaccuggccugcgaggaccugaagcccgugagcgaggaggucguggagaaccccacgauccagaaggacgugcucgagugcaacgucaagaccaccgagguggugggcgacaucauccugaagccggccaacaacucccugaagaucaccgaggaggucgggcacacggaccucauggccgcguacguggacaacagcucccugaccaucaagaagcccaacgagcugagccgcgugcucggccugaagacccuggccacccacgggcucgccgccgucaacuccgugcccugggacacgaucgccaacuacgcgaagccguuccugaacaagguggucagcaccaccaccaacaucgugacgcgcugccugaaccgggugugcaccaacuacaugcccuacuucuucacccuccugcugcagcucugcaccuucacccgcuccacgaacagccggaucaaggccuccaugcccaccaccaucgccaacaacaccgucaagagcgugggcaaguucugccuggaggccagcuucaacuaccugaagucccccaacuucagcaagcucaucaacaucaucaucugguuccugcugcucuccgugugccugggcagccugaucuacuccacggccgcgcucgggguccugaugagcaaccugggcaugccguccuacugcaccggguaccgcgagggcuaccucaacagcaccaacgugaccaucgccacguacugcaccggcuccauccccugcagcgugugccuguccgggcuggacagccucgacaccuaccccucccuggagaccauccagaucacgaucagcuccuucaagugggaccugaccgccuucggccucgucgccgagugguuccuggccuacauccuguucacccgguucuucuacgugcucgggcuggcggccaucaugcagcuguucuucagcuacuucgccgugcacuucaucuccaacagcuggcucauguggcugaucaucaaccugguccagauggcccccaucuccgcgauggugcgcauguacaucuucuucgccagcuucuacuacguguggaagagcuacguccacgugguggacggcugcaacuccagcaccugcaugaugugcuacaagcggaaccgcgccacgcgggucgagugcaccaccaucgugaacgggguccgccgguccuucuacguguacgccaacggcggcaagggguucugcaagcugcacaacuggaacugcgugaacugcgacaccuucugcgccggcagcacguucaucuccgacgaggucgcgcgcgaccucagccugcaguucaagcggccgaucaaccccaccgaccaguccagcuacaucguggacuccgugaccgucaagaacgggagcauccaccuguacuucgacaaggccggccagaagaccuacgagcgccacucccucagccacuucgugaaccuggacaaccugcgggccaacaacacgaaggggucccuccccaucaacgugaucgucuucgacggcaagagcaagugcgaggaguccagcgccaaguccgccagcguguacuacucccagcugaugugccagcccauccugcuccuggaccaggcgcuggugagcgacgucggcgacagcgccgagguggccgugaagauguucgacgccuacgucaacaccuucuccagcaccuucaacgugccgauggagaagcucaagacccugguggccacggcggaggccgagcuggccaagaacgucucccucgacaacgugcugagcaccuucaucuccgccgcgcgccagggguucguggacagcgacgucgagaccaaggacgugguggagugccugaagcucucccaccagagcgacaucgaggucaccggcgacuccugcaacaacuacaugcugacguacaacaagguggagaacaugaccccccgggaccugggggccugcaucgacugcagcgcccgccacaucaacgcccagguggccaagucccacaacaucgcgcucaucuggaacgucaaggacuucaugagccuguccgagcagcugcggaagcagauccgcagcgccgccaagaagaacaaccuccccuucaagcugaccugcgccaccacgcgccagguggugaacgucgugaccaccaagaucgcccugaagggcgggugaggacuaguuauaagacugacuagcccgaugggccucccaacgggcccuccuccccuccuugcaccgagauuaauaaaaaaaaaaaaaaaaaaaaaaaaaaaaaaaaaaaaaaaaaaaaaaaaaaaaaaaaaaaaaaaaugcaucccccccccccccccccccccccccccccccaaaggcucuuuucagagccaccagaauu

SEQ ID NO: 21981 - RNA, 6058 nt, Artificial Sequence
  SARS-CoV-2__MT447171.1__non-structural protein 3 (NSP3) mRNA gc
aggagaaagcuuaccauggcccccaccaaggugaccuucggcgacgacacggucaucgaggugcagggguacaagagcgugaacaucaccuucgagcuggacgagcgcaucgacaagguccucaacgagaagugcuccgccuacaccguggagcugggcaccgaggugaacgaguucgcgugcgucguggccgacgccgugaucaagacgcugcagccggucagcgagcuccugaccccccuggggaucgaccucgacgagugguccauggccaccuacuaccuguucgacgagagcggcgaguucaagcuggccucccacauguacugcagcuucuacccccccgacgaggacgaggaggagggggacugcgaggaggaggaguucgagccguccacccaguacgaguacggcacggaggacgacuaccagggcaagccccucgaguucggggcgaccagcgccgcccugcagcccgaggaggagcaggaggaggacuggcuggacgacgacucccagcagaccgugggccagcaggacgggagcgaggacaaccagaccacgaccauccagaccaucguggagguccagccccagcucgagauggagcugaccccgguggugcagacgaucgaggucaacuccuucagcggcuaccugaagcucaccgacaacguguacaucaagaacgccgacaucguggaggaggcgaagaaggucaagcccaccgugguggucaacgccgccaacguguaccugaagcacgggggcggcguggccggggcccugaacaaggcgaccaacaacgccaugcaggucgaguccgacgacuacaucgccacgaacggcccccucaagguggggggcagcugcguccuguccggccacaaccuggccaagcacugccuccacgugguggggcccaacgucaacaagggcgaggacauccagcugcugaagagcgccuacgagaacuucaaccagcacgaggugcuccuggcgccgcugcucuccgccgggaucuucggcgccgaccccauccacagccugcgggugugcgucgacaucgugcgcaccaacguguaccuggccgucuucgacaagaaccucuacgacaagcugguguccagcuuccuggagaugaagagcgagaagcagguggagcagaagaucgccgagauccccaaggaggaggucaagcccuucaucaccgaguccaagccgagcguggagcagcggaagcaggacgacaagaagaucaaggcgugcguggaggaggucaccacgacccucgaggagaccaaguuccugaccgagaaccugcuccuguacaucgacaucaacgggaaccugcaccccgacuccgccacgcucgugagcgacaucgacaucaccuuccugaagaaggacgcccccuacaucgugggcgacgucgugcaggagggcgugcugaccgccgucgugauccccaccaagaaggccgggggcacgaccgagaugcucgcgaaggcccugcgcaaggugccgaccgacaacuacaucaccacguaccccgggcagggccugaacggguacaccgucgaggaggccaagaccgugcucaagaagugcaaguccgccuucuacauccugcccagcaucaucuccaacgagaagcaggagauccugggcaccgugagcuggaacuuccgggagaugcucgcgcacgccgaggagacccgcaagcugaugcccgucugcguggagacgaaggccaucguguccaccauccagcggaaguacaagggcaucaagauccaggagggggucguggacuacggcgcccgcuucuacuucuacaccagcaagaccacgguggccucccugaucaacacccugaacgaccucaacgagacccuggucaccaugccgcugggguacgugacgcacggccucaaccuggaggaggcggcccgguacaugcgcagccugaaggugcccgccaccgucuccgugagcucccccgacgccgugaccgccuacaacggguaccucaccagcuccagcaagacgcccgaggagcacuucaucgagaccaucucccuggcgggcagcuacaaggacuggagcuacuccggccagagcacccagcuggggaucgaguuccucaagcggggcgacaaguccgucuacuacaccagcaacccgacgaccuuccaccuggacggggaggugaucaccuucgacaaccugaagacccuccugucccugcgcgaggugcggacgaucaaggucuucaccaccguggacaacaucaaccuccacacccagguggucgacaugagcaugacguacggccagcaguucggccccaccuaccuggacggggccgacgugaccaagaucaagccccacaacucccacgagggcaagaccuucuacgugcugccgaacgacgacacgcuccgcgucgaggccuucgaguacuaccacaccaccgaccccagcuuccuggggcgguacauguccgcccugaaccacaccaagaaguggaaguacccccaggugaacggccucacgagcaucaagugggccgacaacaacugcuaccuggcgaccgcccugcucacccugcagcagaucgagcugaaguucaaccccccggcccuccaggacgccuacuaccgcgcgcgggccggggaggccgccaacuucugcgcccugauccuggcguacugcaacaagaccgugggcgagcucggcgacguccgcgagacgauguccuaccuguuccagcacgccaaccuggacagcugcaagcgggugcucaacgucgugugcaagaccugcgggcagcagcagaccacccugaagggcguggaggccgucauguacauggggacccuguccuacgagcaguucaagaagggcgugcagauccccugcacgugcgggaagcaggccaccaaguaccucgugcagcaggagagccccuucgucaugauguccgcccccccggcgcaguacgagcugaagcacggcaccuucaccugcgccagcgaguacacgggcaacuaccagugcgggcacuacaagcacaucaccuccaaggagacccuguacugcaucgacggcgcccuccugaccaagagcagcgaguacaaggggcccaucacggacguguucuacaaggagaacuccuacaccaccaccaucaagcccgugacguacaagcuggacggcgucgugugcaccgagaucgaccccaagcucgacaacuacuacaagaaggacaacagcuacuucaccgagcagccgaucgaccuggugcccaaccagcccuaccccaacgccuccuucgacaacuucaaguucgucugcgacaacaucaaguucgccgacgaccugaaccagcucaccggguacaagaagccggcgagccgcgagcugaaggugacguucuuccccgaccugaacggcgacguggucgccaucgacuacaagcacuacacccccuccuucaagaagggcgccaagcuccugcacaagcccaucguguggcacgugaacaacgccaccaacaaggcgaccuacaagccgaacacguggugcauccggugccuguggagcaccaagcccgucgagaccuccaacagcuucgacgugcucaaguccgaggacgcccaggggauggacaaccuggccugcgaggaccugaagcccgugagcgaggaggucguggagaaccccaccauccagaaggacgugcucgagugcaacgucaagacgaccgagguggugggcgacaucauccugaagccggccaacaacucccugaagaucaccgaggaggucgggcacaccgaccucauggccgcguacguggacaacagcucccugacgaucaagaagcccaacgagcugagccgcgugcucggccugaagacccuggccacccacgggcucgccgccgucaacuccgugcccugggacaccaucgccaacuacgcgaagccguuccugaacaagguggucagcacgaccaccaacaucgugacccgcugccugaaccgggugugcacgaacuacaugcccuacuucuucacccuccugcugcagcucugcaccuucacccgcuccaccaacagccggaucaaggccuccaugcccacgaccaucgccaagaacaccgucaagagcgugggcaaguucugccuggaggccagcuucaacuaccugaagucccccaacuucagcaagcucaucaacaucaucaucugguuccugcugcucuccgugugccugggcagccugaucuacuccaccgccgcgcucgggguccugaugagcaaccugggcaugccguccuacugcacgggguaccgcgagggcuaccucaacagcaccaacgugaccaucgccaccuacugcacgggcuccauccccugcagcgugugccuguccgggcuggacagccucgacaccuaccccucccuggagaccauccagaucaccaucagcuccuucaagugggaccugacggccuucggccucgucgccgagugguuccuggccuacauccuguucacccgguucuucuacgugcucgggcuggcggccaucaugcagcuguucuucagcuacuucgccgugcacuucaucuccaacagcuggcucauguggcugaucaucaaccugguccagauggcccccaucuccgcgauggugcgcauguacaucuucuucgccagcuucuacuacguguggaagagcuacguccacgugguggacggcugcaacuccagcaccugcaugaugugcuacaagcggaaccgcgccacccgggucgagugcacgaccaucgugaacgggguccgccgguccuucuacguguacgccaacggcggcaagggguucugcaagcugcacaacuggaacugcgugaacugcgacaccuucugcgccggcagcaccuucaucuccgacgaggucgcgcgcgaccucagccugcaguucaagcggccgaucaaccccacggaccaguccagcuacaucguggacuccgugaccgucaagaacgggagcauccaccuguacuucgacaaggccggccagaagaccuacgagcgccacucccucagccacuucgugaaccuggacaaccugcgggccaacaacaccaaggggucccuccccaucaacgugaucgucuucgacggcaagagcaagugcgaggaguccagcgccaaguccgccagcguguacuacucccagcugaugugccagcccauccugcuccuggaccaggcgcuggugagcgacgucggcgacagcgccgagguggccgugaagauguucgacgccuacgucaacacguucuccagcaccuucaacgugccgauggagaagcucaagacccugguggccaccgcggaggccgagcuggccaagaacgucucccucgacaacgugcugagcacguucaucuccgccgcgcgccagggguucguggacagcgacgucgagaccaaggacgugguggagugccugaagcucucccaccagagcgacaucgaggucaccggcgacuccugcaacaacuacaugcugaccuacaacaagguggagaacaugacgccccgggaccugggggccugcaucgacugcagcgcccgccacaucaacgcccagguggccaagucccacaacaucgcgcucaucuggaacgucaaggacuucaugagccuguccgagcagcugcggaagcagauccgcagcgccgccaagaagaacaaccuccccuucaagcugaccugcgccaccacccgccagguggugaacgucgugacgaccaagaucgcccugaagggcgggugaggacuaguuauaagacugacuagcccgaugggccucccaacgggcccuccuccccuccuugcaccgagauuaauaaaaaaaaaaaaaaaaaaaaaaaaaaaaaaaaaaaaaaaaaaaaaaaaaaaaaaaaaaaaaaaaugcaucccccccccccccccccccccccccccccccaaaggcucuuuucagagccaccagaauu

SEQ ID NO: 21982 - RNA, 6058 nt, Artificial Sequence
  SARS-CoV-2__MT439297.1__non-structural protein 3 (NSP3) mRNA gc
aggagaaagcuuaccauggcccccaccaaggugaccuucggcgacgacacggucaucgaggugcagggguacaagagcgugaacaucaccuucgagcuggacgagcgcaucgacaagguccucaacgagaagugcuccgccuacaccguggagcugggcaccgaggugaacgaguucgcgugcgucguggccgacgccgugaucaagacgcugcagccggucagcgagcuccugaccccccuggggaucgaccucgacgagugguccauggccaccuacuaccuguucgacgagagcggcgaguucaagcuggccucccacauguacugcagcuucuacccccccgacgaggacgaggaggagggggacugcgaggaggaggaguucgagccguccacccaguacgaguacggcacggaggacgacuaccagggcaagccccucgaguucggggcgaccagcgccgcccugcagcccgaggaggagcaggaggaggacuggcuggacgacgacucccagcagaccgugggccagcaggacgggagcgaggacaaccagaccacgaccauccagaccaucguggagguccagccccagcucgagauggagcugaccccgguggugcagacgaucgaggucaacuccuucagcggcuaccugaagcucaccgacaacguguacaucaagaacgccgacaucguggaggaggcgaagaaggucaagcccaccgugguggucaacgccgccaacguguaccugaagcacgggggcggcguggccggggcccugaacaaggcgaccaacaacgccaugcaggucgaguccgacgacuacaucgccacgaacggcccccucaagguggggggcagcugcguccuguccggccacaaccuggccaagcacugccuccacgugguggggcccaacgucaacaagggcgaggacauccagcugcugaagagcgccuacgagaacuucaaccagcacgaggugcuccuggcgccgcugcucuccgccgggaucuucggcgccgaccccauccacagccugcgggugugcgucgacaccgugcgcaccaacguguaccuggccgucuucgacaagaaccucuacgacaagcugguguccagcuuccuggagaugaagagcgagaagcagguggagcagaagaucgccgagauccccaaggaggaggucaagcccuucaucaccgaguccaagccgagcguggagcagcggaagcaggacgacaagaagaucaaggcgugcguggaggaggucacgaccacccucgaggagaccaaguuccugacggagaaccugcuccuguacaucgacaucaacgggaaccugcaccccgacuccgccacccucgugagcgacaucgacaucaccuuccugaagaaggacgcccccuacaucgugggcgacgucgugcaggagggcgugcugaccgccgucgugauccccacgaagaaggccgggggcaccaccgagaugcucgcgaaggcccugcgcaaggugccgaccgacaacuacaucacgaccuaccccgggcagggccugaacggguacaccgucgaggaggccaagaccgugcucaagaagugcaaguccgccuucuacauccugcccagcaucaucuccaacgagaagcaggagauccugggcaccgugagcuggaaccuccgggagaugcuggcgcacgccgaggagacgcgcaagcugaugcccgucugcguggagaccaaggccaucguguccaccauccagcggaaguacaagggcaucaagauccaggagggggucguggacuacggcgcccgcuucuacuucuacaccagcaagacgaccguggccucccugaucaacacccucaacgaccugaacgagacccuggucacgaugccgcucggguacgugacccacggccugaaccuggaggaggcggcccgguacaugcgcagccucaaggugcccgccaccgucuccgugagcucccccgacgccgugaccgccuacaacggguaccugacgagcuccagcaagacccccgaggagcacuucaucgagaccaucucccuggcgggcagcuacaaggacuggagcuacuccggccagagcacccagcucgggaucgaguuccugaagcggggcgacaaguccgucuacuacacgagcaacccgaccaccuuccaccuggacggggaggugaucaccuucgacaaccucaagacgcugcugucccuccgcgaggugcggaccaucaaggucuucaccaccguggacaacaucaaccugcacacgcagguggucgacaugagcaugaccuacggccagcaguucggccccaccuaccuggacggggccgacgugaccaagaucaagccccacaacucccacgagggcaagacguucuacgugcucccgaacgacgacacccugcgcgucgaggccuucgaguacuaccacaccaccgaccccagcuuccuggggcgguacauguccgcccucaaccacacgaagaaguggaaguacccccaggugaacggccugaccagcaucaagugggccgacaacaacugcuaccuggcgaccgcccuccugacccugcagcagaucgagcucaaguucaaccccccggcccugcaggacgccuacuaccgcgcgcgggccggggaggccgccaacuucugcgcccugauccucgcguacugcaacaagacggugggcgagcugggcgacguccgcgagaccauguccuaccuguuccagcacgccaaccucgacagcugcaagcgggugcugaacgucgugugcaagaccugcgggcagcagcagaccacccugaagggcguggaggccgucauguacauggggacgcucuccuacgagcaguucaagaagggcgugcagauccccugcaccugcgggaagcaggccaccaaguaccuggugcagcaggagagccccuucgucaugauguccgcccccccggcgcaguacgagcugaagcacggcaccuucacgugcgccagcgaguacaccggcaacuaccagugcgggcacuacaagcacaucaccuccaaggagacccucuacugcaucgacggcgcccugcugacgaagagcagcgaguacaaggggcccaucaccgacguguucuacaaggagaacuccuacaccaccacgaucaagcccgugaccuacaagcucgacggcgucgugugcaccgagaucgaccccaagcuggacaacuacuacaagaaggacaacagcuacuucaccgagcagccgaucgaccuggugcccaaccagcccuaccccaacgccuccuucgacaacuucaaguucgucugcgacaacaucaaguucgccgacgaccucaaccagcugacgggguacaagaagccggcgagccgcgagcugaaggugaccuucuuccccgaccucaacggcgacguggucgccaucgacuacaagcacuacacccccuccuucaagaagggcgccaagcugcugcacaagcccaucguguggcacgugaacaacgccaccaacaaggcgacguacaagccgaacaccuggugcauccggugccucuggagcaccaagcccgucgagaccuccaacagcuucgacgugcugaaguccgaggacgcccaggggauggacaaccuggccugcgaggaccucaagcccgugagcgaggaggucguggagaaccccacgauccagaaggacgugcuggagugcaacgucaagaccaccgagguggugggcgacaucauccugaagccggccaacaacucccucaagaucaccgaggaggucgggcacacggaccugauggccgcguacguggacaacagcucccugaccaucaagaagcccaacgagcucagccgcgugcugggccugaagacccucgccacccacgggcuggccgccgucaacuccgugcccugggacacgaucgccaacuacgcgaagccguuccugaacaagguggucagcaccaccaccaacaucgugacgcgcugccucaaccgggugugcaccaacuacaugcccuacuucuucacccugcugcuccagcugugcaccuucacccgcuccacgaacagccggaucaaggccuccaugcccaccaccaucgccaagaacaccgucaagagcgugggcaaguucugccuggaggccgccuucaacuaccucaagagccccaacuucuccaagcugaucaacaucaucaucugguuccugcuccugagcgugugccugggcucccucaucuacagcacggcggcccuggggguccugauguccaaccucggcaugccgagcuacugcaccggguaccgcgagggcuaccugaacuccaccaacgugaccaucgccacguacugcaccggcagcauccccugcuccgugugccugagcgggcucgacucccuggacaccuaccccagccuggagaccauccagaucacgaucuccagcuucaagugggaccucaccgccuucggccuggucgccgagugguuccuggcguacauccucuucacccgguucuucuacgugcuggggcuggccgccaucaugcagcucuucuucuccuacuucgccgugcacuucaucagcaacuccuggcugauguggcugaucaucaaccugguccagauggcgcccaucagcgccauggugcgcauguacaucuucuucgccuccuucuacuacguguggaagagcuacguccacgugguggacggcugcaacagcuccaccugcaugaugugcuacaagcggaaccgcgccacgcgggucgagugcaccaccaucgugaacgggguccgccggagcuucuacguguacgccaacggcggcaagggguucugcaagcuccacaacuggaacugcgugaacugcgacaccuucugcgcgggcuccacguucaucagcgacgaggucgcccgcgaccugucccugcaguucaagcggccgaucaaccccaccgaccagagcuccuacaucguggacagcgugaccgucaagaacggguccauccaccucuacuucgacaaggccggccagaagaccuacgagcgccacagccugucccacuucgugaaccuggacaaccuccgggccaacaacacgaaggggagccugcccaucaacgugaucgucuucgacggcaaguccaagugcgaggagagcuccgccaagagcgcguccguguacuacagccagcugaugugccagcccauccuccugcuggaccaggcccucguguccgacgucggcgacagcgccgagguggccgugaagauguucgacgccuacgucaacaccuucagcuccaccuucaacgugccgauggagaagcugaagacccugguggcgacggccgaggccgagcucgccaagaacgucagccuggacaacgugcuguccaccuucaucagcgcggcccgccagggguucguggacuccgacgucgagaccaaggacgugguggagugccucaagcugagccaccaguccgacaucgaggucaccggcgacagcugcaacaacuacaugcugacguacaacaagguggagaacaugaccccccgggaccucggggccugcaucgacugcuccgcccgccacaucaacgcccagguggcgaagagccacaacaucgcccugaucuggaacgucaaggacuucaugucccugagcgagcagcuccggaagcagauccgcuccgccgccaagaagaacaaccugcccuucaagcugaccugcgccaccacgcgccagguggugaacgucgugaccaccaagaucgcgcucaagggcgggugaggacuaguuauaagacugacuagcccgaugggccucccaacgggcccuccuccccuccuugcaccgagauuaauaaaaaaaaaaaaaaaaaaaaaaaaaaaaaaaaaaaaaaaaaaaaaaaaaaaaaaaaaaaaaaaaugcaucccccccccccccccccccccccccccccccaaaggcucuuuucagagccaccagaauu

SEQ ID NO: 21983 - RNA, 6058 nt, Artificial Sequence
  SARS-CoV-2__MT434786.1__non-structural protein 3 (NSP3) mRNA gc
aggagaaagcuuaccauggcccccaccaaggugaccuucggcgacgacacggucaucgaggugcagggguacaagagcgugaacaucaccuucgagcuggacgagcgcaucgacaagguccucaacgagaagugcuccgccuacaccguggagcugggcaccgaggugaacgaguucgcgugcgucguggccgacgccgugaucaagacgcugcagccggucagcgagcuccugaccccccuggggaucgaccucgacgagugguccauggccaccuacuaccuguucgacgagagcggcgaguucaagcuggccucccacauguacugcagcuucuacccccccgacgaggacgaggaggagggggacugcgaggaggaggaguucgagccguccacccaguacgaguacggcacggaggacgacuaccagggcaagccccucgaguucggggcgaccagcgccgcccugcagcccgaggaggagcaggaggaggacuggcuggacgacgacucccagcagaccgugggccagcaggacgggagcgaggacaaccagaccacgaccauccagaccaucguggagguccagccccagcucgagauggagcugaccccgguggugcagacgaucgaggucaacuccuucagcggcuaccugaagcucaccgacaacguguacaucaagaacgccgacaucguggaggaggcgaagaaggucaagcccaccgugguggucaacgccgccaacguguaccugaagcacgggggcggcguggccggggcccugaacaaggcgaccaacaacgccaugcaggucgaguccgacgacuacaucgccacgaacggcccccucaagguggggggcagcugcguccuguccggccacaaccuggccaagcacugccuccacgugguggggcccaacgucaacaagggcgaggacauccagcugcugaagagcgccuacgagaacuucaaccagcacgaggugcuccuggcgccgcugcucuccgccgggaucuucggcgccgaccccauccacagccugcgggugugcgucgacaccgugcgcaccaacguguaccuggccgucuucgacaagaaccucuacgacaagcugguguccagcuuccuggagaugaagagcgagaagcagguggagcagaagaucgccgagauccccaaggaggaggucaagcccuucaucaccgaguccaagccgagcguggagcagcggaagcaggacgacaagaagaucaaggcgugcguggaggaggucacgaccacccucgaggagaccaaguuccugacggagaaccugcuccuguacaucgacaucaacgggaaccugcaccccgacuccgccacccucgugagcgacaucgacaucaccuuccugaagaaggacgcccccuacaucgugggcgacgucgugcaggagggcgugcugaccgccgucgugauccccacgaagaaggccgggggcaccaccgagaugcucgcgaaggcccugcgcaaggugccgaccgacaacuacaucacgaccuaccccgggcagggccugaacggguacaccgucgaggaggccaagaccgugcucaagaagugcaaguccgccuucuacauccugcccagcaucaucuccaacgagaagcaggagauccugggcaccgugagcuggaaccuccgggagaugcuggcgcacgccgaggagacgcgcaagcugaugcccgucugcguggagaccaaggccaucguguccaccauccagcggaaguacaagggcaucaagauccaggagggggucguggacuacggcgcccgcuucuacuucuacaccagcaagacgaccguggccucccugaucaacacccucaacgaccugaacgagacccuggucacgaugccgcucggguacgugacccacggccugaaccuggaggaggcggcccgguacaugcgcagccucaaggugcccgccaccgucuccgugagcucccccgacgccgugaccgccuacaacggguaccugacgagcuccagcaagacccccgaggagcacuucaucgagaccaucucccuggcgggcagcuacaaggacuggagcuacuccggccagagcacccagcucgggaucgaguuccugaagcggggcgacaaguccgucuacuacacgagcaacccgaccaccuuccaccuggacggggaggugaucaccuucgacaaccucaagacgcugcugucccuccgcgaggugcggaccaucaaggucuucaccaccguggacaacaucaaccugcacacgcagguggucgacaugagcaugaccuacggccagcaguucggccccaccuaccuggacggggccgacgugaccaagaucaagccccacaacucccacgagggcaagacguucuacgugcucccgaacgacgacacccugcgcgucgaggccuucgaguacuaccacaccaccgaccccagcuuccuggggcgguacauguccgcccucaaccacacgaagaaguggaaguacccccaggugaacggccugaccagcaucaagugggccgacaacaacugcuaccuggcgaccgcccuccugacccugcagcagaucgagcucaaguucaaccccccggcccugcaggacgccuacuaccgcgcgcgggccggggaggccgccaacuucugcgcccugauccucgcguacugcaacaagacggugggcgagcugggcgacguccgcgagaccauguccuaccuguuccagcacgccaaccucgacagcugcaagcgggugcugaacgucgugugcaagaccugcgggcagcagcagaccacccugaagggcguggaggccgucauguacauggggacgcucuccuacgagcaguucaagaagggcgugcagauccccugcaccugcgggaagcaggccaccaaguaccuggugcagcaggagagccccuucgucaugauguccgcccccccggcgcaguacgagcugaagcacggcaccuucacgugcgccagcgaguacaccggcaacuaccagugcgggcacuacaagcacaucaccuccaaggagacccucuacugcaucgacggcgcccugcugacgaagagcagcgaguacaaggggcccaucaccgacguguucuacaaggagaacuccuacaccaccacgaucaagcccgugaccuacaagcucgacggcgucgugugcaccgagaucgaccccaagcuggacaacuacuacaagaaggacaacagcuacuucaccgagcagccgaucgaccuggugcccaaccagcccuaccccaacgccuccuucgacaacuucaaguucgucugcgacaacaucaaguucgccgacgaccucaaccagcugacgggguacaagaagccggcgagccgcgagcugaaggugaccuucuuccccgaccucaacggcgacguggucgccaucgacuacaagcacuacacccccuccuucaagaagggcgccaagcugcugcacaagcccaucguguggcacgugaacaacgccaccaacaaggcgacguacaagccgaacaccuggugcauccggugccucuggagcaccaagcccgucgagaccuccaacagcuucgacgugcugaaguccgaggacgcccaggggauggacaaccuggccugcgaggaccucaagcccgugagcgaggaggucguggagaaccccacgauccagaaggacgugcuggagugcaacgucaagaccaccgagguggugggcgacaucauccugaagccggccaacaacucccucaagaucaccgaggaggucgggcacacggaccugauggccgcguacguggacaacagcucccugaccaucaagaagcccaacgagcucagccgcgugcugggccugaagacccucgccacccgcgggcuggccgccgucaacuccgugcccugggacacgaucgccaacuacgcgaagccguuccugaacaagguggucagcaccaccaccaacaucgugacgcggugccucaaccgcgugugcaccaacuacaugcccuacuucuucacccugcugcuccagcugugcaccuucacccgguccacgaacagccgcaucaaggccuccaugcccaccaccaucgccaagaacaccgucaagagcgugggcaaguucugccuggaggccagcuucaacuaccucaagucccccaacuucagcaagcugaucaacaucaucaucugguuccugcuccuguccgugugccugggcagccucaucuacuccacggccgcgcuggggguccugaugagcaaccucggcaugccguccuacugcaccggguaccgggagggcuaccugaacagcaccaacgugaccaucgccacguacugcaccggcuccauccccugcagcgugugccuguccgggcucgacagccuggacaccuaccccucccuggagaccauccagaucacgaucagcuccuucaagugggaccucaccgccuucggccuggucgccgagugguuccuggccuacauccucuucacccgcuucuucuacgugcuggggcuggcggccaucaugcagcucuucuucagcuacuucgccgugcacuucaucuccaacagcuggcugauguggcugaucaucaaccugguccagauggcccccaucuccgcgauggugcggauguacaucuucuucgccagcuucuacuacguguggaagagcuacguccacgugguggacggcugcaacuccagcaccugcaugaugugcuacaagcgcaaccgggccacgcgcgucgagugcaccaccaucgugaacgggguccggcgcuccuucuacguguacgccaacggcggcaagggguucugcaagcuccacaacuggaacugcgugaacugcgacaccuucugcgccggcagcacguucaucuccgacgaggucgcgcgggaccugagccugcaguucaagcgcccgaucaaccccaccgaccaguccagcuacaucguggacuccgugaccgucaagaacgggagcauccaccucuacuucgacaaggccggccagaagaccuacgagcggcacucccugagccacuucgugaaccuggacaaccuccgcgccaacaacacgaaggggucccugcccaucaacgugaucgucuucgacggcaagagcaagugcgaggaguccagcgccaaguccgccagcguguacuacucccagcugaugugccagcccauccuccugcuggaccaggcgcucgugagcgacgucggcgacagcgccgagguggccgugaagauguucgacgccuacgucaacaccuucuccagcaccuucaacgugccgauggagaagcugaagacccugguggccacggcggaggccgagcucgccaagaacgucucccuggacaacgugcugagcaccuucaucuccgccgcgcggcagggguucguggacagcgacgucgagaccaaggacgugguggagugccucaagcugucccaccagagcgacaucgaggucaccggcgacuccugcaacaacuacaugcugacguacaacaagguggagaacaugaccccccgcgaccucggggccugcaucgacugcagcgcccggcacaucaacgcccagguggccaagucccacaacaucgcgcugaucuggaacgucaaggacuucaugagccuguccgagcagcuccgcaagcagauccgcagcgccgccaagaagaacaaccugcccuucaagcugaccugcgccaccacgcggcagguggugaacgucgugaccaccaagaucgcccucaagggcgggugaggacuaguuauaagacugacuagcccgaugggccucccaacgggcccuccuccccuccuugcaccgagauuaauaaaaaaaaaaaaaaaaaaaaaaaaaaaaaaaaaaaaaaaaaaaaaaaaaaaaaaaaaaaaaaaaugcaucccccccccccccccccccccccccccccccaaaggcucuuuucagagccaccagaauu

SEQ ID NO: 21984 - RNA, 6058 nt, Artificial Sequence
  SARS-CoV-2__MT365032.1__non-structural protein 3 (NSP3) mRNA gc
aggagaaagcuuaccauggcccccaccaaggugaccuucggcgacgacacggucaucgaggugcagggguacaagagcgugaacaucaccuucgagcuggacgagcgcaucgacaagguccucaacgagaagugcuccgccuacaccguggagcugggcaccgaggugaacgaguucgcgugcgucguggccgacgccgugaucaagacgcugcagccggucagcgagcuccugaccccccuggggaucgaccucgacgagugguccauggccaccuacuaccuguucgacgagagcggcgaguucaagcuggccucccacauguacugcagcuucuacccccccgacgaggacgaggaggagggggacugcgaggaggaggaguucgagccguccacccaguacgaguacggcacggaggacgacuaccagggcaagccccucgaguucggggcgaccagcgccgcccugcagcccgaggaggagcaggaggaggacuggcuggacgacgacucccagcagaccgugggccagcaggacgggagcgaggacaaccagaccacgaccauccagaccaucguggagguccagccccagcucgagauggagcugaccccgguggugcagacgaucgaggucaacuccuucagcggcuaccugaagcucaccgacaacguguacaucaagaacgccgacaucguggaggaggcgaagaaggucaagcccaccgugguggucaacgccgccaacguguaccugaagcacgggggcggcguggccggggcccugaacaaggcgaccaacaacgccaugcaggucgaguccgacgacuacaucgccacgaacggcccccucaagguggggggcagcugcguccuguccggccacaaccuggccaagcacugccuccacgugguggggcccaacgucaacaagggcgaggacauccagcugcugaagagcgccuacgagaacuucaaccagcacgaggugcuccuggcgccgcugcucuccgccgggaucuucggcgccgaccccauccacagccugcgggugugcgucgacaccgugcgcaccaacguguaccuggccgucuucgacaagaaccucuacgacaagcugguguccagcuuccuggagaugaagagcgagaagcagguggagcagaagaucgccgagauccccaaggaggaggucaagcccuucaucaccgaguccaagccgagcguggagcagcggaagcaggacgacaagaagaucaaggcgugcguggaggaggucacgaccacccucgaggagaccaaguuccugacggagaaccugcuccuguacaucgacaucaacgggaaccugcaccccgacuccgccacccucgugagcgacaucgacaucaccuuccugaagaaggacgcccccuacaucgugggcgacgucgugcaggagggcgugcugaccgucguggugauccccacgaagaaggccgggggcaccaccgagaugcucgccaaggcgcugcgcaaggucccgaccgacaacuacaucacgaccuaccccgggcagggccugaacggguacaccguggaggaggccaagaccgugcucaagaagugcaaguccgccuucuacauccugcccagcaucaucuccaacgagaagcaggagauccugggcaccgucagcuggaaccuccgggagaugcuggcccacgcggaggagacgcgcaagcugaugcccgugugcguggagaccaaggccaucgucuccaccauccagcggaaguacaagggcaucaagauccaggagggggugguggacuacggcgcccgcuucuacuucuacaccagcaagacgaccgucgccucccugaucaacacccucaacgaccugaacgagacccuggugacgaugccgcucggguacgugacccacggccugaaccuggaggaggccgcgcgguacaugcgcagccucaagguccccgccaccguguccgugagcucccccgacgccgucaccgccuacaacggguaccugacgagcuccagcaagacccccgaggagcacuucaucgagaccaucucccuggccggcagcuacaaggacuggagcuacuccggccagagcacccagcucgggaucgaguuccugaagcggggcgacaaguccguguacuacacgagcaacccgaccaccuuccaccuggacggggaggugaucaccuucgacaaccucaagacgcugcugucccuccgcgagguccggaccaucaagguguucaccaccguggacaacaucaaccugcacacgcaggucguggacaugagcaugaccuacggccagcaguucggccccaccuaccuggacggggcggacgugaccaagaucaagccccacaacucccacgagggcaagacguucuacguccucccgaacgacgacacccugcgcguggaggccuucgaguacuaccacaccaccgaccccagcuuccuggggcgguacauguccgcccucaaccacacgaagaaguggaaguacccccaggugaacggccugaccagcaucaagugggccgacaacaacugcuaccuggccaccgcgcuccugacccugcagcagaucgagcucaaguucaaccccccggcccugcaggacgccuacuaccgcgcccgggcgggggaggccgccaacuucugcgcccugauccucgccuacugcaacaagacggucggcgagcugggcgacgugcgcgagaccauguccuaccuguuccagcacgcgaaccucgacagcugcaagcggguccugaacguggugugcaagaccugcgggcagcagcagaccacccugaagggcgucgaggccgugauguacauggggacgcucuccuacgagcaguucaagaagggcgugcagauccccugcaccugcgggaagcaggccaccaaguaccugguccagcaggagagccccuucgugaugauguccgcccccccggcccaguacgagcugaagcacggcaccuucacgugcgcgagcgaguacaccggcaacuaccagugcgggcacuacaagcacaucaccuccaaggagacccucuacugcaucgacggcgcccugcugacgaagagcagcgaguacaaggggcccaucaccgacguguucuacaaggagaacuccuacaccaccacgaucaagcccgucaccuacaagcucgacggcguggugugcaccgagaucgaccccaagcuggacaacuacuacaagaaggacaacagcuacuucaccgagcagccgaucgaccugguccccaaccagcccuaccccaacgccuccuucgacaacuucaaguucgugugcgacaacaucaaguucgccgacgaccucaaccagcugacgggguacaagaagccggccagccgcgagcugaaggugaccuucuuccccgaccucaacggcgacgucguggcgaucgacuacaagcacuacacccccuccuucaagaagggcgccaagcugcugcacaagcccaucguguggcacgucaacaacgccaccaacaaggccacguacaagccgaacaccuggugcauccggugccucuggagcaccaagcccguggagaccuccaacagcuucgacgugcugaaguccgaggacgcgcaggggauggacaaccuggccugcgaggaccucaagcccgucagcgaggaggugguggagaaccccacgauccagaaggacguccuggagugcaacgugaagaccaccgagguggucggcgacaucauccugaagccggccaacaacucccucaagaucaccgaggagguggggcacacggaccugauggccgccuacguggacaacagcucccugaccaucaagaagcccaacgagcucagccgcguccugggccugaagacccucgcgacccacgggcuggccgccgugaacuccgugcccugggacacgaucgccaacuacgccaagccguuccugaacaaggucgugagcaccaccaccaacaucgugacgcgcugccucaaccgggucugcaccaacuacaugcccuacuucuucacccugcugcuccagcugugcaccuucacccgcuccacgaacagccggaucaaggcguccaugcccaccaccaucgccaagaacaccgugaagagcgugggcaaguucugccuggaggccagcuucaacuaccucaagucccccaacuucagcaagcugaucaacaucaucaucugguuccugcuccuguccgucugccugggcagccucaucuacuccacggccgcccugggggugcugaugagcaaccucggcaugccguccuacugcaccggguaccgcgagggcuaccugaacagcaccaacgugaccaucgcgacguacugcaccggcuccauccccugcagcgucugccuguccgggcucgacagccuggacaccuaccccucccuggagaccauccagaucacgaucagcuccuucaagugggaccucaccgccuucggccugguggccgagugguuccuggccuacauccucuucacccgguucuucuacgugcuggggcuggccgcgaucaugcagcucuucuucagcuacuucgccguccacuucaucuccaacagcuggcugauguggcugaucaucaaccuggugcagauggcccccaucuccgccauggugcgcauguacaucuucuucgcgagcuucuacuacgucuggaagagcuacgugcacguggucgacggcugcaacuccagcaccugcaugaugugcuacaagcggaaccgcgccacgcggguggagugcaccaccaucgucaacggggugcgccgguccuucuacguguacgccaacggcggcaagggguucugcaagcuccacaacuggaacugcgucaacugcgacaccuucugcgccggcagcacguucaucuccgacgagguggcccgcgaccugagccugcaguucaagcggccgaucaaccccaccgaccaguccagcuacaucguggacuccgucaccgugaagaacgggagcauccaccucuacuucgacaaggcgggccagaagaccuacgagcgccacucccugagccacuucgugaaccuggacaaccuccgggccaacaacacgaaggggucccugcccaucaacgucaucguguucgacggcaagagcaagugcgaggaguccagcgccaaguccgccagcguguacuacucccagcugaugugccagcccauccuccugcuggaccaggcccucgucagcgacgugggcgacagcgcggagguggccgucaagauguucgacgccuacgugaacaccuucuccagcaccuucaacgugccgauggagaagcugaagacccuggucgccacggccgaggcggagcucgccaagaacgugucccuggacaacgugcugagcaccuucaucuccgccgcccgccagggguucgucgacagcgacguggagaccaaggacguggucgagugccucaagcugucccaccagagcgacaucgaggugaccggcgacuccugcaacaacuacaugcugacguacaacaagguggagaacaugaccccccgggaccucggggcgugcaucgacugcagcgcccgccacaucaacgcccaggucgccaagucccacaacaucgcccugaucuggaacgugaaggacuucaugagccuguccgagcagcuccggaagcagauccgcagcgcggccaagaagaacaaccugcccuucaagcugaccugcgccaccacgcgccagguggucaacguggugaccaccaagaucgcccucaagggcgggugaggacuaguuauaagacugacuagcccgaugggccucccaacgggcccuccuccccuccuugcaccgagauuaauaaaaaaaaaaaaaaaaaaaaaaaaaaaaaaaaaaaaaaaaaaaaaaaaaaaaaaaaaaaaaaaaugcaucccccccccccccccccccccccccccccccaaaggcucuuuucagagccaccagaauu

SEQ ID NO: 21985 - RNA, 6058 nt, Artificial Sequence
  SARS-CoV-2__MT428551.1__non-structural protein 3 (NSP3) mRNA gc
aggagaaagcuuaccauggcccccaccaaggugaccuucggcgacgacacggucaucgaggugcagggguacaagagcgugaacaucaccuucgagcuggacgagcgcaucgacaagguccucaacgagaagugcuccgccuacaccguggagcugggcaccgaggugaacgaguucgcgugcgucguggccgacgccgugaucaagacgcugcagccggucagcgagcuccugaccccccuggggaucgaccucgacgagugguccauggccaccuacuaccuguucgacgagagcggcgaguucaagcuggccucccacauguacugcagcuucuacccccccgacgaggacgaggaggagggggacugcgaggaggaggaguucgagccguccacccaguacgaguacggcacggaggacgacuaccagggcaagccccucgaguucggggcgaccagcgccgcccugcagcccgaggaggagcaggaggaggacuggcuggacgacgacucccagcagaccgugggccagcaggacgggagcgaggacaaccagaccacgaccauccagaccaucguggagguccagccccagcucgagauggagcugaccccgguggugcagacgaaggucaacuccuucagcggcuaccugaagcucaccgacaacguguacaucaagaacgccgacaucguggaggaggcgaagaaggucaagcccaccgugguggucaacgccgccaacguguaccugaagcacgggggcggcguggccggggcccugaacaaggcgaccaacaacgccaugcaggucgaguccgacgacuacaucgccacgaacggcccccucaagguggggggcagcugcguccuguccggccacaaccuggccaagcacugccuccacgugguggggcccaacgucaacaagggcgaggacauccagcugcugaagagcgccuacgagaacuucaaccagcacgaggugcuccuggcgccgcugcucuccgccgggaucuucggcgccgaccccauccacagccugcgggugugcgucgacaccgugcgcaccaacguguaccuggccgucuucgacaagaaccucuacgacaagcugguguccagcuuccuggagaugaagagcgagaagcagguggagcagaagaucgccgagauccccaaggaggaggucaagcccuucaucaccgaguccaagccgagcguggagcagcggaagcaggacgacaagaagaucaaggcgugcguggaggaggucacgaccacccucgaggagaccaaguuccugacggagaaccugcuccuguacaucgacaucaacgggaaccugcaccccgacuccgccacccucgugagcgacaucgacaucaccuuccugaagaaggacgcccccuacaucgugggcgacgucgugcaggagggcgugcugaccgccgucgugauccccacgaagaaggccgggggcaccaccgagaugcucgcgaaggcccugcgcaaggugccgaccgacaacuacaucacgaccuaccccgggcagggccugaacggguacaccgucgaggaggccaagaccgugcucaagaagugcaaguccgccuucuacauccugcccagcaucaucuccaacgagaagcaggagauccugggcaccgugagcuggaaccuccgggagaugcuggcgcacgccgaggagacgcgcaagcugaugcccgucugcguggagaccaaggccaucguguccaccauccagcggaaguacaagggcaucaagauccaggagggggucguggacuacggcgcccgcuucuacuucuacaccagcaagacgaccguggccucccugaucaacacccucaacgaccugaacgagacccuggucacgaugccgcucggguacgugacccacggccugaaccuggaggaggcggcccgguacaugcgcagccucaaggugcccgccaccgucuccgugagcucccccgacgccgugaccgccuacaacggguaccugacgagcuccagcaagacccccgaggagcacuucaucgagaccaucucccuggcgggcagcuacaaggacuggagcuacuccggccagagcacccagcucgggaucgaguuccugaagcggggcgacaaguccgucuacuacacgagcaacccgaccaccuuccaccuggacggggaggugaucaccuucgacaaccucaagacgcugcugucccuccgcgaggugcggaccaucaaggucuucaccaccguggacaacaucaaccugcacacgcagguggucgacaugagcaugaccuacggccagcaguucggccccaccuaccuggacggggccgacgugaccaagaucaagccccacaacucccacgagggcaagacguucuacgugcucccgaacgacgacacccugcgcgucgaggccuucgaguacuaccacaccaccgaccccagcuuccuggggcgguacauguccgcccucaaccacacgaagaaguggaaguacccccaggugaacggccugaccagcaucaagugggccgacaacaacugcuaccuggcgaccgcccuccugacccugcagcagaucgagcucaaguucaaccccccggcccugcaggacgccuacuaccgcgcgcgggccggggaggccgccaacuucugcgcccugauccucgcguacugcaacaagacggugggcgagcugggcgacguccgcgagaccauguccuaccuguuccagcacgccaaccucgacagcugcaagcgggugcugaacgucgugugcaagaccugcgggcagcagcagaccacccugaagggcguggaggccgucauguacauggggacgcucuccuacgagcaguucaagaagggcgugcagauccccugcaccugcgggaagcaggccaccaaguaccuggugcagcaggagagccccuucgucaugauguccgcccccccggcgcaguacgagcugaagcacggcaccuucacgugcgccagcgaguacaccggcaacuaccagugcgggcacuacaagcacaucaccuccaaggagacccucuacugcaucgacggcgcccugcugacgaagagcagcgaguacaaggggcccaucaccgacguguucuacaaggagaacuccuacaccaccacgaucaagcccgugaccuacaagcucgacggcgucgugugcaccgagaucgaccccaagcuggacaacuacuacaagaaggacaacagcuacuucaccgagcagccgaucgaccuggugcccaaccagcccuaccccaacgccuccuucgacaacuucaaguucgucugcgacaacaucaaguucgccgacgaccucaaccagcugacgggguacaagaagccggcgagccgcgagcugaaggugaccuucuuccccgaccucaacggcgacguggucgccaucgacuacaagcacuacacccccuccuucaagaagggcgccaagcugcugcacaagcccaucguguggcacgugaacaacgccaccaacaaggcgacguacaagccgaacaccuggugcauccggugccucuggagcaccaagcccgucgagaccuccaacagcuucgacgugcugaaguccgaggacgcccaggggauggacaaccuggccugcgaggaccucaagcccgugagcgaggaggucguggagaaccccacgauccagaaggacgugcuggagugcaacgucaagaccaccgagguggugggcgacaucauccugaagccggccaacaacucccucaagaucaccgaggaggucgggcacacggaccugauggccgcguacguggacaacagcucccugaccaucaagaagcccaacgagcucagccgcgugcugggccugaagacccucgccacccacgggcuggccgccgucaacuccgugcccugggacacgaucgccaacuacgcgaagccguuccugaacaagguggucagcaccaccaccaacaucgugacgcgcugccucaaccgggugugcaccaacuacaugcccuacuucuucacccugcugcuccagcugugcaccuucacccgcuccacgaacagccggaucaaggccuccaugcccaccaccaucgccaagaacaccgucaagagcgugggcaaguucugccuggaggccagcuucaacuaccucaagucccccaacuucagcaagcugaucaacaucaucaucugguuccugcuccuguccgugugccugggcagccucaucuacuccacggccgcgcuggggguccugaugagcaaccucggcaugccguccuacugcaccggguaccgcgagggcuaccugaacagcaccaacgugaccaucgccacguacugcaccggcuccauccccugcagcgugugccuguccgggcucgacagccuggacaccuaccccucccuggagaccauccagaucacgaucagcuccuucaagugggaccucaccgccuucggccuggucgccgagugguuccuggccuacauccucuucacccgguucuucuacgugcuggggcuggcggccaucaugcagcucuucuucagcuacuucgccgugcacuucaucuccaacagcuggcugauguggcugaucaucaaccugguccagauggcccccaucuccgcgauggugcgcauguacaucuucuucgccagcuucuacuacguguggaagagcuacguccacgugguggacggcugcaacuccagcaccugcaugaugugcuacaagcggaaccgcgccacgcgggucgagugcaccaccaucgugaacgggguccgccgguccuucuacguguacgccaacggcggcaagggguucugcaagcuccacaacuggaacugcgugaacugcgacaccuucugcgccggcagcacguucaucuccgacgaggucgcgcgcgaccugagccugcaguucaagcggccgaucaaccccaccgaccaguccagcuacaucguggacuccgugaccgucaagaacgggagcauccaccucuacuucgacaaggccggccagaagaccuacgagcgccacucccugagccacuucgugaaccuggacaaccuccgggccaacaacacgaaggggucccugcccaucaacgugaucgucuucgacggcaagagcaagugcgaggaguccagcgccaaguccgccagcguguacuacucccagcugaugugccagcccauccuccugcuggaccaggcgcucgugagcgacgucggcgacagcgccgagguggccgugaagauguucgacgccuacgucaacaccuucuccagcaccuucaacgugccgauggagaagcugaagacccugguggccacggcggaggccgagcucgccaagaacgucucccuggacaacgugcugagcaccuucaucuccgccgcgcgccagggguucguggacagcgacgucgagaccaaggacgugguggagugccucaagcugucccaccagagcgacaucgaggucaccggcgacuccugcaacaacuacaugcugacguacaacaagguggagaacaugaccccccgggaccucggggccugcaucgacugcagcgcccgccacaucaacgcccagguggccaagucccacaacaucgcgcugaucuggaacgucaaggacuucaugagccuguccgagcagcuccggaagcagauccgcagcgccgccaagaagaacaaccugcccuucaagcugaccugcgccaccacgcgccagguggugaacgucgugaccaccaagaucgcccucaagggcgggaagugaggacuaguuauaagacugacuagcccgaugggccucccaacgggcccuccuccccuccuugcaccgagauuaauaaaaaaaaaaaaaaaaaaaaaaaaaaaaaaaaaaaaaaaaaaaaaaaaaaaaaaaaaaaaaaaaugcaucccccccccccccccccccccccccccccccaaaggcucuuuucagagccaccagaauu

SEQ ID NO: 21986 - RNA, 6058 nt, Artificial Sequence
  SARS-CoV-2__MT419842.1__non-structural protein 3 (NSP3) mRNA gc
aggagaaagcuuaccauggcccccaccaaggugaccuucggcgacgacacggucaucgaggugcagggguacaagagcgugaacaucaccuucgagcuggacgagcgcaucgacaagguccucaacgagaagugcuccgccuacaccguggagcugggcaccgaggugaacgaguucgcgugcgucguggccgacgccgugaucaagacgcugcagccggucagcgagcuccugaccccccuggggaucgaccucgacgagugguccauggccaccuacuaccuguucgacgagagcggcgaguucaagcuggccucccacauguacugcagcuucuacccccccgacgaggacgaggaggagggggacugcgaggaggaggaguucgagccguccacccaguacgaguacggcacggaggacgacuaccagggcaagccccucgaguucggggcgaccagcgccgcccugcagcccgaggaggagcaggaggaggacuggcuggacgacgacucccagcagaccgugggccagcaggacgggagcgaggacaaccagaccacgaccauccagaccaucguggagguccagccccagcucgagauggagcugaccccgguggugcagacgaucgaggucaacuccuucagcggcuaccugaagcucaccgacaacguguacaucaagaacgccgacaucguggaggaggcgaagaaggucaagcccaccgugguggucaacgccgccaacguguaccugaagcacgggggcggcguggccggggcccugaacaaggcgaccaacaacgccaugcaggucgaguccgacgacuacaucgccacgaacggcccccucaagguggggggcagcugcguccuguccggccacaaccuggccaagcacugccuccacgugguggggcccaacgucaacaagggcgaggacauccagcugcugaagagcgccuacgagaacuucaaccagcacgaggugcuccuggcgccgcugcucuccgccgggaucuucggcgccgaccccauccacagccugcgggugugcgucgacaccgugcgcaccaacguguaccuggccgucuucgacaagaaccucuacgacaagcugguguccagcuuccuggagaugaagagcgagaagcagguggagcagaagaucgccgagauccccaaggaggaggucaagcccuucaucaccgaguccaagccgagcguggagcagcggaagcaggacgacaagaagaucaaggcgugcguggaggaggucacgaccacccucgaggagaccaaguuccugacggagaaccugcuccuguacaucgacaucaacgggaaccugcaccccgacuccgccacccucgugagcgacaucgacaucaccuuccugaagaaggacgcccccuacaucgugggcgacgucgugcaggagggcgugcugaccgccgucgugauccccacgaagaaggccgggggcaccaccgagaugcucgcgaaggcccugcgcaaggugccgaccgacaacuacaucacgaccuaccccgggcagggccugaacggguacaccgucgaggaggccaagaccgugcucaagaagugcaaguccgccuucuacauccugcccagcaucaucuccaacgagaagcaggagauccugggcaccgugagcuggaaccuccgggagaugcuggcgcacgccgaggagacgcgcaagcugaugcccgucugcguggagaccaaggccaucguguccaccauccagcggaaguacaagggcaucaagauccaggagggggucguggacuacggcgcccgcuucuacuucuacaccagcaagacgaccguggccucccugaucaacacccucaacgaccugaacgagacccuggucacgaugccgcucggguacgugacccacggccugaaccuggaggaggcggcccgguacaugcgcagccucaaggugcccgccaccgucuccgugagcucccccgacgccgugaccgccuacaacggguaccugacgagcuccagcaagacccccgaggagcacuucaucgagaccaucucccuggcgggcagcuacaaggacuggagcuacuccggccagagcacccagcucgggaucgaguuccugaagcggggcgacaaguccgucuacuacacgagcaacccgaccaccuuccaccuggacggggaggugaucaccuucgacaaccucaagacgcugcugucccuccgcgaggugcggaccaucaaggucuucaccaccguggacaacaucaaccugcacacgcagguggucgacaugagcaugaccuacggccagcaguucggccccaccuaccuggacggggccgacgugaccaagaucaagccccacaacucccacgagggcaagacguucuacgugcucccgaacgacgacacccugcgcgucgaggccuucgaguacuaccacaccaccgaccccagcuuccuggggcgguacauguccgcccucaaccacacgaagaaguggaaguacccccaggugaacggccugaccagcaucaagugggccgacaacaacugcuaccuggcgaccgcccuccugacccugcagcagaucgagcucaaguucaaccccccggcccugcaggacgccuacuaccgcgcgcgggccggggaggccgccaacuucugcgcccugauccucgcguacugcaacaagacggugggcgagcugggcgacguccgcgagaccauguccuaccuguuccagcacgccaaccucgacagcugcaagcgggugcugaacgucgugugcaagaccugcgggcagcagcagaccacccugaagggcguggaggccgucauguacauggggacgcucuccuacgagcaguucaagaagggcgugcagauccccugcaccugcgggaagcaggccaccaaguaccuggugcagcaggagagccccuucgucaugauguccgcccccccggcgcaguacgagcugaagcacggcaccuucacgugcgccagcgaguacaccggcaacuaccagugcgggcacuacaagcacaucaccuccaaggagacccucuacugcaucgacggcgcccugcugacgaagagcagcgaguacaaggggcccaucaccgacguguucuacaaggagaacuccuacaccaccacgaucaagcccgugaccuacaagcucgacggcgucgugugcaccgagaucgaccccaagcuggacaacuacuacaagaaggacaacagcuacuucaccgagcagccgaucgaccuggugcccaaccagcccuaccccaacgccuccuucgacaacuucaaguucgucugcgacaacaucaaguucgccgacgaccucaaccagcugacgggguacaagaagccggcgagccgcgagcugaaggugaccuucuuccccgaccucaacggcgacguggucgccaucgacuacaagcacuacacccccuccuucaagaagggcgccaagcugcugcacaagcccaucguguggcacgugaacaacgccaccaacaaggcgacguacaagccgaacaccuggugcauccggugccucuggagcaccaagcccgucgagaccuccaacagcuucgacgugcugaaguccgaggacgcccaggggauggacaaccuggccugcgaggaccucaagcccgugagcgaggaggucguggagaaccccacgauccagaaggacgugcuggagugcaacgucaagaccaccgagguggugggcgacaucauccugaagccggccaacaacucccucaagaucaccgaggaggucgggcacacggaccugauggccgcguacguggacaacagcucccugaccaucaagaagcccaacgagcucagccgcgugcugggccugaagacccucgccacccacgggcuggccgccgucaacuccgugcccugggacacgaucgccaacuacgcgaagccguuccugaacaagguggucagcaccaccaccaacaucgugacgcgcugccucaaccgggugugcaccaacuacaugcccuacuucuucacccugcugcuccagcugugcaccuucacccgcuccacgaacagccggaucaaggccuccaugcccaccaccaucgccaagaacaccgucaagagcgugggcaaguucugccuggaggccagcuucaacuaccucaagucccccaacuucagcaagcugaucaacaucaucaucugguuccugcuccuguccgugugccugggcagccucaucuacuccacggccgcgcuggggguccugaugagcaaccucggcaugccguccuacugcaccggguaccgcgagggcuaccugaacagcaccaacgugaccaucgccacguacugcaccggcuccauccccugcagcgugugccuguccgggcucgacagccuggacaccuaccccucccuggagaccauccagaucacgaucagcuccuucaagugggaccucaccgccuucggccuggucgccgagugguuccuggccuacauccucuucacccgguucuucuacgugcuggggcuggcggccaucaugcagcucuucuucagcuacuucgccgugcacuucaucuccaacagcuggcugauguggcugaucaucaaccugguccagauggcccccaucuccgcgauggugcgcauguacaucuucuucgccagcuucuacuacguguggaagagcuacguccacgugguggacggcugcaacuccagcaccugcaugaugugcuacaagcggaaccgcgccacgcgggucgagugcaccaccaucgugaacgggguccgccgguccuucuacguguacgccaacggcggcaagggguucugcaagcuccacaacuggaacugcgugaacugcgacaccuucugcgccggcagcacguucaucuccgacgaggucgcgcgcgaccugagccugcaguucaagcggccgaucaaccccaccgaccaguccagcuacaucguggacuccgugaccgucaagaacgggagcauccaccucuacuucgacaaggccggccagaagaccuacgagcgccacuuccugucccacuucgugaaccuggacaaccuccgggccaacaacacgaaggggagccugcccaucaacgugaucgucuucgacggcaaguccaagugcgaggagagcuccgccaagagcgccuccguguacuacagccagcugaugugccagcccauccuccugcuggaccaggcgcucguguccgacgucggcgacagcgccgagguggccgugaagauguucgacgccuacgucaacaccuucagcuccaccuucaacgugccgauggagaagcugaagacccugguggccacggcggaggccgagcucgccaagaacgucagccuggacaacgugcuguccaccuucaucagcgccgcgcgccagggguucguggacuccgacgucgagaccaaggacgugguggagugccucaagcugagccaccaguccgacaucgaggucaccggcgacagcugcaacaacuacaugcugacguacaacaagguggagaacaugaccccccgggaccucggggccugcaucgacugcuccgcccgccacaucaacgcccagguggccaagagccacaacaucgcgcugaucuggaacgucaaggacuucaugucccugagcgagcagcuccggaagcagauccgcuccgccgccaagaagaacaaccugcccuucaagcugaccugcgccaccacgcgccagguggugaacgucgugaccaccaagaucgcccucaagggcgggugaggacuaguuauaagacugacuagcccgaugggccucccaacgggcccuccuccccuccuugcaccgagauuaauaaaaaaaaaaaaaaaaaaaaaaaaaaaaaaaaaaaaaaaaaaaaaaaaaaaaaaaaaaaaaaaaugcaucccccccccccccccccccccccccccccccaaaggcucuuuucagagccaccagaauu

SEQ ID NO: 21987 - RNA, 6058 nt, Artificial Sequence
  SARS-CoV-2__MT412134.1__non-structural protein 3 (NSP3) mRNA gc
aggagaaagcuuaccauggcccccaccaaggugaccuucggcgacgacacggucaucgaggugcagggguacaagagcgugaacaucaccuucgagcuggacgagcgcaucgacaagguccucaacgagaagugcuccgccuacaccguggagcugggcaccgaggugaacgaguucgcgugcgucguggccgacgccgugaucaagacgcugcagccggucagcgagcuccugaccccccuggggaucgaccucgacgagugguccauggccaccuacuaccuguucgacgagagcggcgaguucaagcuggccucccacauguacugcagcuucuacccccccgacgaggacgaggaggagggggacugcgaggaggaggaguucgagccguccacccaguacgaguacggcacggaggacgacuaccagggcaagccccucgaguucggggcgaccagcgccgcccugcagcccgaggaggagcaggaggaggacuggcuggacgacgacucccagcagaccgugggccagcaggacgggagcgaggacaaccagaccacgaccauccagaccaucguggagguccagccccagcucgagauggagcugaccccgguggugcagacgaucgaggucaacuccuucagcggcuaccugaagcucaccgacaacguguacaucaagaacgccgacaucguggaggaggcgaagaaggucaagcccaccgugguggucaacgccgccaacguguaccugaagcacgggggcggcguggccggggcccugaacaaggcgaccaacaacgccaugcaggucgaguccgacgacuacaucgccacgaacggcccccucaagguggggggcagcugcguccuguccggccacaaccuggccaagcacugccuccacgugguggggcccaacgucaacaagggcgaggacauccagcugcugaagagcgccuacgagaacuucaaccagcacgaggugcuccuggcgccgcugcucuccgccgggaucuucggcgccgaccccauccacagccugcgggugugcgucgacaccgugcgcaccaacguguaccuggccgucuucgacaagaaccucuacgacaagcugguguccagcuuccuggagaugaagagcgagaagcagguggagcagaagaucgccgagauccccaaggaggaggucaagcccuucaucaccgaguccaagccgagcguggagcagcggaagcaggacgacaagaagaucaaggcgugcguggaggaggucacgaccacccucgaggagaccaaguuccugacggagaaccugcuccuguacaucgacaucaacgggaaccugcaccccgacuccgccacccucgugagcgacaucgacaucaccuuccugaagaaggacgcccccuacaucgugggcgacgucgugcaggagggcgugcugaccgccgucgugauccccacgaagaaggccgggggcaccaccgagaugcucgcgaaggcccugcgcaaggugccgaccgacaacuacaucacgaccuaccccgggcagggccugaacggguacaccgucgaggaggccaagaccgugcucaagaagugcaaguccgccuucuacauccugcccagcaucaucuccaacgagaagcaggagauccugggcaccgugagcuggaaccuccgggagaugcuggcgcacgccgaggagacgcgcaagcugaugcccgucugcguggagaccaaggccaucguguccaccauccagcggaaguacaagggcaucaagauccaggagggggucguggacuacggcgcccgcuucuacuucuacaccagcaagacgaccguggccucccugaucaacacccucaacgaccugaacgagacccuggucacgaugccgcucggguacgugacccacggccugaaccuggaggaggcggcccgguacaugcgcagccucaaggugcccgccaccgucuccgugagcucccccgacgccgugaccgccuacaacggguaccugacgagcuccagcaagacccccgaggagcacuucaucgagaccaucucccuggcgggcagcuacaaggacuggagcuacuccggccagagcacccagcucgggaucgaguuccugaagcggggcgacaaguccgucuacuacacgagcaacccgaccaccuuccaccuggacggggaggugaucaccuucgacaaccucaagacgcugcugucccuccgcgaggugcggaccaucaaggucuucaccaccguggacaacaucaaccugcacacgcagguggucgacaugagcaugaccuacggccagcaguucggccccaccuacuucgacggggccgacgugaccaagaucaagccccacaacucccacgagggcaagacguucuacgugcugccgaacgacgacacccuccgcgucgaggccuucgaguacuaccacaccaccgaccccagcuuccuggggcgguacauguccgcccugaaccacacgaagaaguggaaguacccccaggugaacggccucaccagcaucaagugggccgacaacaacugcuaccuggcgaccgcccugcucacccugcagcagaucgagcugaaguucaaccccccggcccuccaggacgccuacuaccgcgcgcgggccggggaggccgccaacuucugcgcccugauccuggcguacugcaacaagacggugggcgagcucggcgacguccgcgagaccauguccuaccuguuccagcacgccaaccuggacagcugcaagcgggugcucaacgucgugugcaagaccugcgggcagcagcagaccacccugaagggcguggaggccgucauguacauggggacgcuguccuacgagcaguucaagaagggcgugcagauccccugcaccugcgggaagcaggccaccaaguaccucgugcagcaggagagccccuucgucaugauguccgcccccccggcgcaguacgagcugaagcacggcaccuucacgugcgccagcgaguacaccggcaacuaccagugcgggcacuacaagcacaucaccuccaaggagacccuguacugcaucgacggcgcccuccugacgaagagcagcgaguacaaggggcccaucaccgacguguucuacaaggagaacuccuacaccaccacgaucaagcccgugaccuacaagcuggacggcgucgugugcaccgagaucgaccccaagcucgacaacuacuacaagaaggacaacagcuacuucaccgagcagccgaucgaccuggugcccaaccagcccuaccccaacgccuccuucgacaacuucaaguucgucugcgacaacaucaaguucgccgacgaccugaaccagcucacgggguacaagaagccggcgagccgcgagcugaaggugaccuucuuccccgaccugaacggcgacguggucgccaucgacuacaagcacuacacccccuccuucaagaagggcgccaagcuccugcacaagcccaucguguggcacgugaacaacgccaccaacaaggcgacguacaagccgaacaccuggugcauccggugccuguggagcaccaagcccgucgagaccuccaacagcuucgacgugcucaaguccgaggacgcccaggggauggacaaccuggccugcgaggaccugaagcccgugagcgaggaggucguggagaaccccacgauccagaaggacgugcucgagugcaacgucaagaccaccgagguggugggcgacaucauccugaagccggccaacaacucccugaagaucaccgaggaggucgggcacacggaccucauggccgcguacguggacaacagcucccugaccaucaagaagcccaacgagcugagccgcgugcucggccugaagacccuggccacccacgggcucgccgccgucaacuccgugcccugggacacgaucgccaacuacgcgaagccguuccugaacaagguggucagcaccaccaccaacaucgugacgcgcugccugaaccgggugugcaccaacuacaugcccuacuucuucacccuccugcugcagcucugcaccuucacccgcuccacgaacagccggaucaaggccuccaugcccaccaccaucgccaagaacaccgucaagagcgugggcaaguucugccuggaggccagcuucaacuaccugaagucccccaacuucagcaagcucaucaacaucaucaucugguuccugcugcucuccgugugccugggcagccugaucuacuccacggccgcgcucgggguccugaugagcaaccugggcaugccguccuacugcaccggguaccgcgagggcuaccucaacagcaccaacgugaccaucgccacguacugcaccggcuccauccccugcagcgugugccuguccgggcuggacagccucgacaccuaccccucccuggagaccauccagaucacgaucagcuccuucaagugggaccugaccgccuucggccucgucgccgagugguuccuggccuacauccuguucacccgguucuucuacgugcucgggcuggcggccaucaugcagcuguucuucagcuacuucgccgugcacuucaucuccaacagcuggcucauguggcugaucaucaaccugguccagauggcccccaucuccgcgauggugcgcauguacaucuucuucgccagcuucuacuacguguggaagagcuacguccacgugguggacggcugcaacuccagcaccugcaugaugugcuacaagcggaaccgcgccacgcgggucgagugcaccaccaucgugaacgggguccgccgguccuucuacguguacgccaacggcggcaagggguucugcaagcugcacaacuggaacugcgugaacugcgacaccuucugcgccggcagcacguucaucuccgacgaggucgcgcgcgaccucagccugcaguucaagcggccgaucaaccccaccgaccaguccagcuacaucguggacuccgugaccgucaagaacgggagcauccaccuguacuucgacaaggccggccagaagaccuacgagcgccacucccucagccacuucgugaaccuggacaaccugcgggccaacaacacgaaggggucccuccccaucaacgugaucgucuucgacggcaagagcaagugcgaggaguccagcgccaaguccgccagcguguacuacucccagcugaugugccagcccauccugcuccuggaccaggcgcuggugagcgacgucggcgacagcgccgagguggccgugaagauguucgacgccuacgucaacaccuucuccagcaccuucaacgugccgauggagaagcucaagacccugguggccacggcggaggccgagcuggccaagaacgucucccucgacaacgugcugagcaccuucaucuccgccgcgcgccagggguucguggacagcgacgucgagaccaaggacgugguggagugccugaagcucucccaccagagcgacaucgaggucaccggcgacuccugcaacaacuacaugcugacguacaacaagguggagaacaugaccccccgggaccugggggccugcaucgacugcagcgcccgccacaucaacgcccagguggccaagucccacaacaucgcgcucaucuggaacgucaaggacuucaugagccuguccgagcagcugcggaagcagauccgcagcgccgccaagaagaacaaccuccccuucaagcugaccugcgccaccacgcgccagguggugaacgucgugaccaccaagaucgcccugaagggcgggugaggacuaguuauaagacugacuagcccgaugggccucccaacgggcccuccuccccuccuugcaccgagauuaauaaaaaaaaaaaaaaaaaaaaaaaaaaaaaaaaaaaaaaaaaaaaaaaaaaaaaaaaaaaaaaaaugcaucccccccccccccccccccccccccccccccaaaggcucuuuucagagccaccagaauu

SEQ ID NO: 21988 - RNA, 6058 nt, Artificial Sequence
  SARS-CoV-2__MT412226.1__non-structural protein 3 (NSP3) mRNA gc
aggagaaagcuuaccauggcccccaccaaggugaccuucggcgacgacacggucaucgaggugcagggguacaagagcgugaacaucaccuucgagcuggacgagcgcaucgacaagguccucaacgagaagugcuccgccuacaccguggagcugggcaccgaggugaacgaguucgcgugcgucguggccgacgccgugaucaagacgcugcagccggucagcgagcuccugaccccccuggggaucgaccucgacgagugguccauggccaccuacuaccuguucgacgagagcggcgaguucaagcuggccucccacauguacugcagcuucuacccccccgacgaggacgaggaggagggggacugcgaggaggaggaguucgagccguccacccaguacgaguacggcacggaggacgacuaccagggcaagccccucgaguucggggcgaccagcgccgcccugcagcccgaggaggagcaggaggaggacuggcuggacgacgacucccagcagaccgugggccagcaggacgggagcgaggacaaccagaccacgaccauccagaccaucguggagguccagccccagcucgagauggagcugaccccgguggugcagacgaucgaggucaacuccuucagcggcuaccugaagcucaccgacaacguguacaucaagaacgccgacaucguggaggaggcgaagaaggucaagcccaccgugguggucaacgccgccaacguguaccugaagcacgggggcggcguggccggggcccugaacaaggcgaccaacaacgccaugcaggucgaguccgacgacuacaucgccacgaacggcccccucaagguggggggcagcugcguccuguccggccacaaccuggccaagcacugccuccacgugguggggcccaacgucaacaagggcgaggacauccagcugcugaagagcgccuacgagaacuucaaccagcacgaggugcuccuggcgccgcugcucuccgccgggaucuucggcgccgaccccauccacagccugcgggugugcgucgacaccgugcgcaccaacguguaccuggccgucuucgacaagaaccucuacgacaagcugguguccagcuuccuggagaugaagagcgagaagcagguggagcagaagaucgccgagauccccaaggaggaggucaagcccuucaucaccgaguccaagccgagcguggagcagcggaagcaggacgacaagaagaucaaggcgugcguggaggaggucacgaccacccucgaggagaccaaguuccugacggagaaccugcuccuguacaucgacaucaacgggaaccugcaccccgacuccgccacccucgugagcgacaucgacaucaccuuccugaagaaggacgcccccuacaucgugggcgacgucgugcaggagggcgugcugaccgccgucgugauccccacgaagaaggccgggggcaccaccgagaugcucgcgaaggcccugcgcaaggugccgaccgacaacuacaucacgaccuaccccgggcagggccugaacggguacaccgucgaggaggccaagaccgugcucaagaagugcaaguccgccuucuacauccugcccagcaucaucuccaacgagaagcaggagauccugggcaccgugagcuggaaccuccgggagaugcuggcgcacgccgaggagacgcgcaagcugaugcccgucugcguggagaccaaggccaucguguccaccauccagcggaaguacaagggcaucaagauccaggagggggucguggacuacggcgcccgcuucuacuucuacaccagcaagacgaccguggccucccugaucaacacccucaacgaccugaacgagacccuggucacgaugccgcucggguacgugacccacggccugaaccuggaggaggcggcccgguacaugcgcagccucaaggugcccgccaccgucuccgugagcucccccgacgccgugaccgccuacaacggguaccugacgagcuccagcaagacccccgaggagcacuucaucgagaccaucucccuggcgggcagcuacaaggacuggagcuacuccggccagagcacccagcucgggaucgaguuccugaagcggggcgacaaguccgucuacuacacgagcaacccgaccaccuuccaccuggacggggaggugaucaccuucgacaaccucaagacgcugcugucccuccgcgaggugcggaccaucaaggucuucaccaccguggacaacaucaaccugcacacgcagguggucgacaugagcaugaccuacggccagcaguucggccccaccuaccuggacggggccgacgugaccaagaucaagccccacaacucccacgagggcaagacguucuacgugcucccgaacgacgacacccugcgcgucgaggccuucgaguacuaccacaccaccgaccccagcuuccuggggcgguacauguccgcccucaaccacacgaagaaguggaaguacccccaggugaacggccugaccagcaucaagugggccgacaacaacugcuaccuggcgaccgcccuccugacccugcagcagaucgagcucaaguucaaccccccggcccugcaggacgccuacuaccgcgcgcgggccggggaggccgccaacuucugcgcccugauccucgcguacugcaacaagacggugggcgagcugggcgacguccgcgagaccauguccuaccuguuccagcacgccaaccucgacagcugcaagcgggugcugaacgucgugugcaagaccugcgggcagcagcagaccacccugaagggcguggaggccgucauguacauggggacgcucuccuacgagcaguucaagaagggcgugcagauccccugcaccugcgggaagcaggccaccaaguaccuggugcagcaggagagccccuucgucaugauguccgcccccccggcgcaguacgagcugaagcacggcaccuucacgugcgccagcgaguacaccggcaacuaccagugcgggcacuacaagcacaucaccuccaaggagacccucuacugcaucgacggcgcccugcugacgaagagcagcgaguacaaggggcccaucaccgacguguucuacaaggagaacuccuacaccaccacgaucaagcccgugaccuacaagcucgacggcgucgugugcaccgagaucgaccccaagcuggacaacuacuacaagaaggacaacagcuacuucaccgagcagccgaucgaccuggugcccaaccagcccuaccccaacgccuccuucgacaacuucaaguucgucugcgacaacaucaaguucgccgacgaccucaaccagcugacgggguacaagaagccggcgagccgcgagcugaaggugaccuucuuccccgaccucaacggcgacguggucgccaucgacuacaagcacuacacccccuccuucaagaagggcgccaagcugcugcacaagcccaucguguggcacgugaacaacgccaccaacaaggcgacguacaagccgaacaccuggugcauccggugccucuggagcaccaagcccgucgagaccuccaacagcuucgacgugcugaaguccgaggacgcccaggggauggacaaccuggccugcgaggaccucaagcccgugagcgaggaggucguggagaaccccacgauccagaaggacgugcuggagugcaacgucaagaccaccgagguggugggcgacaucauccugaagccggccaacaacucccucaagaucaccgaggaggucgggcacacggaccugauggccgcguacguggacaacagcucccugaccaucaagaagcccaacgagcucagccgcgugcugggccugaagacccucgccacccacgggcuggccgccgucaacuccgugcccugggacacgaucgccaacuacgcgaagccguuccugaacaagguggucagcaccaccaccacgaucgugacccgcugccucaaccgggugugcaccaacuacaugcccuacuucuucacccugcugcuccagcugugcaccuucacgcgcuccaccaacagccggaucaaggccuccaugcccaccaccaucgccaagaacacggucaagagcgugggcaaguucugccuggaggccagcuucaacuaccucaagucccccaacuucagcaagcugaucaacaucaucaucugguuccugcuccuguccgugugccugggcagccucaucuacuccaccgccgcgcuggggguccugaugagcaaccucggcaugccguccuacugcaccggguaccgcgagggcuaccugaacagcaccaacgugacgaucgccaccuacugcaccggcuccauccccugcagcgugugccuguccgggcucgacagccuggacaccuaccccucccuggagacgauccagaucaccaucagcuccuucaagugggaccucaccgccuucggccuggucgccgagugguuccuggccuacauccucuucacccgguucuucuacgugcuggggcuggcggccaucaugcagcucuucuucagcuacuucgccgugcacuucaucuccaacagcuggcugauguggcugaucaucaaccugguccagauggcccccaucuccgcgauggugcgcauguacaucuucuucgccagcuucuacuacguguggaagagcuacguccacgugguggacggcugcaacuccagcacgugcaugaugugcuacaagcggaaccgcgccacccgggucgagugcaccaccaucgugaacgggguccgccgguccuucuacguguacgccaacggcggcaagggguucugcaagcuccacaacuggaacugcgugaacugcgacacguucugcgccggcagcaccuucaucuccgacgaggucgcgcgcgaccugagccugcaguucaagcggccgaucaaccccaccgaccaguccagcuacaucguggacuccgugaccgucaagaacgggagcauccaccucuacuucgacaaggccggccagaagacguacgagcgccacucccugagccacuucgugaaccuggacaaccuccgggccaacaacaccaaggggucccugcccaucaacgugaucgucuucgacggcaagagcaagugcgaggaguccagcgccaaguccgccagcguguacuacucccagcugaugugccagcccauccuccugcuggaccaggcgcucgugagcgacgucggcgacagcgccgagguggccgugaagauguucgacgccuacgucaacaccuucuccagcaccuucaacgugccgauggagaagcugaagacgcugguggccaccgcggaggccgagcucgccaagaacgucucccuggacaacgugcugagcaccuucaucuccgccgcgcgccagggguucguggacagcgacgucgagaccaaggacgugguggagugccucaagcugucccaccagagcgacaucgaggucacgggcgacuccugcaacaacuacaugcugaccuacaacaagguggagaacaugaccccccgggaccucggggccugcaucgacugcagcgcccgccacaucaacgcccagguggccaagucccacaacaucgcgcugaucuggaacgucaaggacuucaugagccuguccgagcagcuccggaagcagauccgcagcgccgccaagaagaacaaccugcccuucaagcugaccugcgccacgacccgccagguggugaacgucgugaccaccaagaucgcccucaagggcgggugaggacuaguuauaagacugacuagcccgaugggccucccaacgggcccuccuccccuccuugcaccgagauuaauaaaaaaaaaaaaaaaaaaaaaaaaaaaaaaaaaaaaaaaaaaaaaaaaaaaaaaaaaaaaaaaaugcaucccccccccccccccccccccccccccccccaaaggcucuuuucagagccaccagaauu

SEQ ID NO: 21989 - RNA, 6058 nt, Artificial Sequence
  SARS-CoV-2__MT412324.1__non-structural protein 3 (NSP3) mRNA gc
aggagaaagcuuaccauggcccccaccaaggugaccuucggcgacgacacggucaucgaggugcagggguacaagagcgugaacaucaccuucgagcuggacgagcgcaucgacaagguccucaacgagaagugcuccgccuacaccguggagcugggcaccgaggugaacgaguucgcgugcgucguggccgacgccgugaucaagacgcugcagccggucagcgagcuccugaccccccuggggaucgaccucgacgagugguccauggccaccuacuaccuguucgacgagagcggcgaguucaagcuggccucccacauguacugcagcuucuacccccccgacgaggacgaggaggagggggacugcgaggaggaggaguucgagccguccacccaguacgaguacggcacggaggacgacuaccagggcaagccccucgaguucggggcgaccagcgccgcccugcagcccgaggaggagcaggaggaggacuggcuggacgacgacucccagcagaccgugggccagcaggacgggagcgaggacaaccagaccacgaccauccagaccaucguggagguccagccccagcucgagauggagcugaccccgguggugcagacgaucgaggucaacuccuucagcggcuaccugaagcucaccgacaacguguacaucaagaacgccgacaucguggaggaggcgaagaaggucaagcccaccgugguggucaacgccgccaacguguaccugaagcacgggggcggcguggccggggcccugaacaaggcgaccaacaacgccaugcaggucgaguccgacgacuacaucgccacgaacggcccccucaagguggggggcagcugcguccuguccggccacaaccuggccaagcacugccuccacgugguggggcccaacgucaacaagggcgaggacauccagcugcugaagagcgccuacgagaacuucaaccagcacgaggugcuccuggcgccgcugcucuccgccgggaucuucggcgccgaccccauccacagccugcgggugugcgucgacaccgugcgcaccaacguguaccuggccgucuucgacaagaaccucuacgacaagcugguguccagcuuccuggagaugaagagcgagaagcagguggagcagaagaucgccgagauccccaaggaggaggucaagcccuucaucaccgaguccaagccgagcguggagcagcggaagcaggacgacaagaagaucaaggcgugcguggaggaggucacgaccacccucgaggagaccaaguuccugacggagaaccugcuccuguacaucgacaucaacgggaaccugcaccccgacuccgccacccucgugagcgacaucgacaucaccuuccugaagaaggacgcccccuacaucgugggcgacgucgugcaggagggcgugcugaccgccgucgugauccccacgaagaaggccgggggcaccaccgagaugcucgcgaaggcccugcgcaaggugccgaccgacaacuacaucacgaccuaccccgggcagggccugaacggguacaccgucgaggaggccaagaccgugcucaagaagugcaaguccgccuucuacauccugcccagcaucaucuccaacgagaagcaggagauccugggcaccgugagcuggaaccuccgggagaugcuggcgcacgccgaggagacgcgcaagcugaugcccgucugcguggagaccaaggccaucguguccaccauccagcggaaguacaagggcaucaagauccaggagggggucguggacuacggcgcccgcuucuacuucuacaccagcaagacgaccguggccucccugaucaacacccucaacgaccugaacgagacccuggucacgaugccgcucggguacgugacccacggccugaaccuggaggaggcggcccgguacaugcgcagccucaaggugcccgccaccgucuccgugagcucccccgacgccgugaccgccuacaacggguaccugacgagcuccagcaagacccccgaggagcacuucaucgagaccaucucccuggcgggcagcuacaaggacuggagcuacuccggccagagcacccagcucgggaucgaguuccugaagcggggcgacaaguccgucuacuacacgagcaacccgaccaccuuccaccuggacggggaggugaucaccuucgacaaccucaagacgcugcugucccuccgcgaggugcggaccaucaaggucuucaccaccguggacaacaucaaccugcacacgcagguggucgacaugagcaugaccuacggccagcaguucggccccaccuaccuggacggggccgacgugaccaagaucaagccccacaacucccacgagggcaagacguucuacgugcucccgaacgacgacacccugcgcgucgaggccuucgaguacuaccacaccaccgaccccagcuuccuggggcgguacauguccgcccucaaccacacgaagaaguggaaguacgcccaggugaacggccugaccagcaucaagugggcggacaacaacugcuaccuggccaccgcccuccugacccugcagcagaucgagcucaaguucaacccccccgcccugcaggacgcguacuaccgcgcccgggccggggaggccgccaacuucugcgcgcugauccucgccuacugcaacaagacggugggcgagcugggcgacguccgcgagaccauguccuaccuguuccagcacgccaaccucgacagcugcaagcgggugcugaacgucgugugcaagaccugcgggcagcagcagaccacccugaagggcguggaggccgucauguacauggggacgcucuccuacgagcaguucaagaagggcgugcagaucccgugcaccugcgggaagcaggccaccaaguaccuggugcagcaggagagccccuucgucaugauguccgcgccccccgcccaguacgagcugaagcacggcaccuucacgugcgccagcgaguacaccggcaacuaccagugcgggcacuacaagcacaucaccuccaaggagacccucuacugcaucgacggcgcccugcugacgaagagcagcgaguacaaggggccgaucaccgacguguucuacaaggagaacuccuacaccaccacgaucaagcccgugaccuacaagcucgacggcgucgugugcaccgagaucgaccccaagcuggacaacuacuacaagaaggacaacagcuacuucaccgagcagcccaucgaccuggugccgaaccagcccuaccccaacgccuccuucgacaacuucaaguucgucugcgacaacaucaaguucgcggacgaccucaaccagcugacgggguacaagaagcccgccagccgcgagcugaaggugaccuucuucccggaccucaacggcgacguggucgccaucgacuacaagcacuacacccccuccuucaagaagggcgccaagcugcugcacaagcccaucguguggcacgugaacaacgcgaccaacaaggccacguacaagcccaacaccuggugcauccggugccucuggagcaccaagccggucgagaccuccaacagcuucgacgugcugaaguccgaggacgcccaggggauggacaaccuggccugcgaggaccucaagcccgugagcgaggaggucguggagaaccccacgauccagaaggacgugcuggagugcaacgucaagaccaccgagguggugggcgacaucauccugaagcccgccaacaacucccucaagaucaccgaggaggucgggcacacggaccugauggcggccuacguggacaacagcucccugaccaucaagaagccgaacgagcucagccgcgugcugggccugaagacccucgccacccacgggcuggccgccgucaacuccgugcccugggacacgaucgcgaacuacgccaagcccuuccugaacaagguggucagcaccaccaccaacaucgugacgcgcugccucaaccgggugugcaccaacuacaugccguacuucuucacccugcugcuccagcugugcaccuucacccgcuccacgaacagccggaucaaggccuccaugcccaccaccaucgccaagaacaccgucaagagcgugggcaaguucugccuggaggccagcuucaacuaccucaagucccccaacuucagcaagcugaucaacaucaucaucugguuccugcuccuguccgugugccugggcagccucaucuacuccacggcggcccuggggguccugaugagcaaccucggcaugcccuccuacugcaccggguaccgcgagggcuaccugaacagcaccaacgugaccaucgccacguacugcaccggcuccaucccgugcagcgugugccuguccgggcucgacagccuggacaccuaccccucccuggagaccauccagaucacgaucagcuccuucaagugggaccucaccgccuucggccuggucgccgagugguuccuggcguacauccucuucacccgguucuucuacgugcuggggcuggccgccaucaugcagcucuucuucagcuacuucgccgugcacuucaucuccaacagcuggcugauguggcugaucaucaaccugguccagauggcgcccaucuccgccauggugcgcauguacaucuucuucgccagcuucuacuacguguggaagagcuacguccacgugguggacggcugcaacuccagcaccugcaugaugugcuacaagcggaaccgcgccacgcgggucgagugcaccaccaucgugaacgggguccgccgguccuucuacguguacgccaacggcggcaagggguucugcaagcuccacaacuggaacugcgugaacugcgacaccuucugcgcgggcagcacguucaucuccgacgaggucgcccgcgaccugagccugcaguucaagcggcccaucaacccgaccgaccaguccagcuacaucguggacuccgugaccgucaagaacgggagcauccaccucuacuucgacaaggccggccagaagaccuacgagcgccacucccugagccacuucgugaaccuggacaaccuccgggccaacaacacgaaggggucccugcccaucaacgugaucgucuucgacggcaagagcaagugcgaggaguccagcgccaaguccgcgagcguguacuacucccagcugaugugccagcccauccuccugcuggaccaggcccucgugagcgacgucggcgacagcgccgagguggccgugaagauguucgacgccuacgucaacaccuucuccagcaccuucaacgugcccauggagaagcugaagacccugguggcgacggccgaggccgagcucgccaagaacgucucccuggacaacgugcugagcaccuucaucuccgcggcccgccagggguucguggacagcgacgucgagaccaaggacgugguggagugccucaagcugucccaccagagcgacaucgaggucaccggcgacuccugcaacaacuacaugcugacguacaacaagguggagaacaugaccccgcgggaccucggggccugcaucgacugcagcgcccgccacaucaacgcccagguggcgaagucccacaacaucgcccugaucuggaacgucaaggacuucaugagccuguccgagcagcuccggaagcagauccgcagcgccgccaagaagaacaaccugcccuucaagcugaccugcgccaccacgcgccagguggugaacgucgugaccaccaagaucgcgcucaagggcgggugaggacuaguuauaagacugacuagcccgaugggccucccaacgggcccuccuccccuccuugcaccgagauuaauaaaaaaaaaaaaaaaaaaaaaaaaaaaaaaaaaaaaaaaaaaaaaaaaaaaaaaaaaaaaaaaaugcaucccccccccccccccccccccccccccccccaaaggcucuuuucagagccaccagaauu

SEQ ID NO: 21990 - RNA, 6058 nt, Artificial Sequence
  SARS-CoV-2__MT412325.1__non-structural protein 3 (NSP3) mRNA gc
aggagaaagcuuaccauggcccccaccaaggugaccuucggcgacgacacggucaucgaggugcagggguacaagagcgugaacaucaccuucgagcuggacgagcgcaucgacaagguccucaacgagaagugcuccgccuacaccguggagcugggcaccgaggugaacgaguucgcgugcgucguggccgacgccgugaucaagacgcugcagccggucagcgagcuccugaccccccuggggaucgaccucgacgagugguccauggccaccuacuaccuguucgacgagagcggcgaguucaagcuggccucccacauguacugcagcuucuacccccccgacgaggacgaggaggagggggacugcgaggaggaggaguucgagccguccacccaguacgaguacggcacggaggacgacuaccagggcaagccccucgaguucggggcgaccagcgccgcccugcagcccgaggaggagcaggaggaggacuggcuggacgacgacucccagcagaccgugggccagcaggacgggagcgaggacaaccagaccacgaccauccagaccaucguggagguccagccccagcucgagauggagcugaccccgguggugcagacgaucgaggucaacuccuucagcggcuaccugaagcucaccgacaacguguacaucaagaacgccgacaucguggaggaggcgaagaaggucaagcccaccgugguggucaacgccgccaacguguaccugaagcacgggggcggcguggccggggcccugaacaaggcgaccaacaacgccaugcaggucgaguccgacgacuacaucgccacgaacggcccccucaagguggggggcagcugcguccuguccggccacaaccuggccaagcacugccuccacgugguggggcccaacgucaacaagggcgaggacauccagcugcugaagagcgccuacgagaacuucaaccagcacgaggugcuccuggcgccgcugcucuccgccgggaucuucggcgccgaccccauccacagccugcgggugugcgucgacaccgugcgcaccaacguguaccuggccgucuucgacaagaaccucuacgacaagcugguguccagcuuccuggagaugaagagcgagaagcagguggagcagaagaucgccgagauccccaaggaggaggucaagcccuucaucaccgaguccaagccgagcguggagcagcggaagcaggacgacaagaagaucaaggcgugcguggaggaggucacgaccacccucgaggagaccaaguuccugacggagaaccugcuccuguacaucgacaucaacgggaaccugcaccccgacuccgccacccucgugagcgacaucgacaucaccuuccugaagaaggacgcccccuacaucgugggcgacgucgugcaggagggcgugcugaccgccgucgugauccccacgaagaaggccgggggcaccaccgagaugcucgcgaaggcccugcgcaaggugccgaccgacaacuacaucacgaccuaccccgggcagggccugaacggguacaccgucgaggaggccaagaccgugcucaagaagugcaaguccgccuucuacauccugcccagcaucaucuccaacgagaagcaggagauccugggcaccgugagcuggaaccuccgggagaugcuggcgcacgccgaggagacgcgcaagcugaugcccgucugcguggagaccaaggccaucguguccaccauccagcggaaguacaagggcaucaagauccaggagggggucguggacuacggcgcccgcuucuacuucuacaccagcaagacgaccguggccucccugaucaacacccucaacgaccugaacgagacccuggucacgaugccgcucggguacgugacccacggccugaaccuggaggaggcggcccgguacaugcgcagccucaaggugcccgccaccgucuccgugagcucccccgacgccgugaccgccuacaacggguaccugacgagcuccagcaagacccccgaggagcacuucaucgagaccaucucccuggcgggcagcuacaaggacuggagcuacuccggccagagcacccagcucgggaucgaguuccugaagcggggcgacaaguccgucuacuacacgagcaacccgaccaccuuccaccuggacggggaggugaucaccuucgacaaccucaagacgcugcugucccuccgcgaggugcggaccaucaaggucuucaccaccguggacaacaucaaccugcacacgcagguggucgacaugagcaugaccuacggccagcaguucggccccaccuaccuggacggggccgacgugaccaagaucaagccccacaacucccacgagggcaagacguucuacgugcucccgaacgacgacacccugcgcgucgaggccuucgaguacuaccacaccaccgaccccagcuuccuggggcgguacauguccgcccucaaccacacgaagaaguggaaguacccccaggugaacggccugaccagcaucaagugggccgacaacaacugcuaccuggcgaccgcccuccugacccugcagcagaucgagcucaaguucaaccccccggcccugcaggacgccuacuaccgcgcgcgggccggggaggccgccaacuucugcgcccugauccucgcguacugcaacaagacggugggcgagcugggcgacguccgcgagaccauguccuaccuguuccagcacgccaagcucgacagcugcaagcgggugcugaacgucgugugcaagaccugcgggcagcagcagaccacccugaagggcguggaggccgucauguacauggggacgcucuccuacgagcaguucaagaagggcgugcagauccccugcaccugcgggaagcaggccaccaaguaccuggugcagcaggagagccccuucgucaugauguccgcccccccggcgcaguacgagcugaagcacggcaccuucacgugcgccagcgaguacaccggcaacuaccagugcgggcacuacaagcacaucaccuccaaggagacccucuacugcaucgacggcgcccugcugacgaagagcagcgaguacaaggggcccaucaccgacguguucuacaaggagaacuccuacaccaccacgaucaagcccgugaccuacaagcucgacggcgucgugugcaccgagaucgaccccaagcuggacaacuacuacaagaaggacaacagcuacuucaccgagcagccgaucgaccuggugcccaaccagcccuaccccaacgccuccuucgacaacuucaaguucgucugcgacaacaucaaguucgccgacgaccucaaccagcugacgggguacaagaagccggcgagccgcgagcugaaggugaccuucuuccccgaccucaacggcgacguggucgccaucgacuacaagcacuacacccccuccuucaagaagggcgccaagcugcugcacaagcccaucguguggcacgugaacaacgccaccaacaaggcgacguacaagccgaacaccuggugcauccggugccucuggagcaccaagcccgucgagaccuccaacagcuucgacgugcugaaguccgaggacgcccaggggauggacaaccuggccugcgaggaccucaagcccgugagcgaggaggucguggagaaccccacgauccagaaggacgugcuggagugcaacgucaagaccaccgagguggugggcgacaucauccugaagccggccaacaacucccucaagaucaccgaggaggucgggcacacggaccugauggccgcguacguggacaacagcucccugaccaucaagaagcccaacgagcucagccgcgugcugggccugaagacccucgccacccacgggcuggccgccgucaacuccgugcccugggacacgaucgccaacuacgcgaagccguuccugaacaagguggucagcaccaccaccaacaucgugacgcgcugccucaaccgggugugcaccaacuacaugcccuacuucuucacccugcugcuccagcugugcaccuucacccgcuccacgaacagccggaucaaggccuccaugcccaccaccaucgccaagaacaccgucaagagcgugggcaaguucugccuggaggccagcuucaacuaccucaagucccccaacuucagcaagcugaucaacaucaucaucugguuccugcuccuguccgugugccugggcagccucaucuacuccacggccgcgcuggggguccugaugagcaaccucggcaugccguccuacugcaccggguaccgcgagggcuaccugaacagcaccaacgugaccaucgccacguacugcaccggcuccauccccugcagcgugugccuguccgggcucgacagccuggacaccuaccccucccuggagaccauccagaucacgaucagcuccuucaagugggaccucaccgccuucggccuggucgccgagugguuccuggccuacauccucuucacccgguucuucuacgugcuggggcuggcggccaucaugcagcucuucuucagcuacuucgccgugcacuucaucuccaacagcuggcugauguggcugaucaucaaccugguccagauggcccccaucuccgcgauggugcgcauguacaucuucuucgccagcuucuacuacguguggaagagcuacguccacgugguggacggcugcaacuccagcaccugcaugaugugcuacaagcggaaccgcgccacgcgggucgagugcaccaccaucgugaacgggguccgccgguccuucuacguguacgccaacggcggcaagggguucugcaagcuccacaacuggaacugcgugaacugcgacaccuucugcgccggcagcacguucaucuccgacgaggucgcgcgcgaccugagccugcaguucaagcggccgaucaaccccaccgaccaguccagcuacaucguggacuccgugaccgucaagaacgggagcauccaccucuacuucgacaaggccggccagaagaccuacgagcgccacucccugagccacuucgugaaccuggacaaccuccgggccaacaacacgaaggggucccugcccaucaacgugaucgucuucgacggcaagagcaagugcgaggaguccagcgccaaguccgccagcguguacuacucccagcugaugugccagcccauccuccugcuggaccaggcgcucgugagcgacgucggcgacagcgccgagguggccgugaagauguucgacgccuacgucaacaccuucuccagcaccuucaacgugccgauggagaagcugaagacccugguggccacggcggaggccgagcucgccaagaacgucucccuggacaacgugcugagcaccuucaucuccgccgcgcgccagggguucguggacagcgacgucgagaccaaggacgugguggagugccucaagcugucccaccagagcgacaucgaggucaccggcgacuccugcaacaacuacaugcugacguacaacaagguggagaacaugaccccccgggaccucggggccugcaucgacugcagcgcccgccacaucaacgcccagguggccaagucccacaacaucgcgcugaucuggaacgucaaggacuucaugagccuguccgagcagcuccggaagcagauccgcagcgccgccaagaagaacaaccugcccuucaagcugaccugcgccaccacgcgccagguggugaacgucgugaccaccaagaucgcccucaagggcgggugaggacuaguuauaagacugacuagcccgaugggccucccaacgggcccuccuccccuccuugcaccgagauuaauaaaaaaaaaaaaaaaaaaaaaaaaaaaaaaaaaaaaaaaaaaaaaaaaaaaaaaaaaaaaaaaaugcaucccccccccccccccccccccccccccccccaaaggcucuuuucagagccaccagaauu

SEQ ID NO: 21991 - RNA, 6058 nt, Artificial Sequence
  SARS-CoV-2__MT415896.1__non-structural protein 3 (NSP3) mRNA gc
aggagaaagcuuaccauggcccccaccaaggugaccuucggcgacgacacggucaucgaggugcagggguacaagagcgugaacaucaccuucgagcuggacgagcgcaucgacaagguccucaacgagaagugcuccgccuacaccguggagcugggcaccgaggugaacgaguucgcgugcgucguggccgacgccgugaucaagacgcugcagccggucagcgagcuccugaccccccuggggaucgaccucgacgagugguccauggccaccuacuaccuguucgacgagagcggcgaguucaagcuggccucccacauguacugcagcuucuacccccccgacgaggacgaggaggagggggacugcgaggaggaggaguucgagccguccacccaguacgaguacggcacggaggacgacuaccagggcaagccccucgaguucggggcgaccagcgccgcccugcagcuggaggaggagcaggaggaggacuggcucgacgacgacucccagcagaccgugggccagcaggacgggagcgaggacaaccagaccacgaccauccagaccaucguggagguccagccccagcuggagauggagcugacccccguggugcagacgaucgaggucaacuccuucagcggcuaccucaagcugaccgacaacguguacaucaagaacgccgacaucguggaggaggcgaagaaggucaagccgaccgugguggucaacgccgccaacguguaccugaagcacgggggcggcguggccggggcccucaacaaggcgaccaacaacgccaugcaggucgaguccgacgacuacaucgccacgaacggcccccugaagguggggggcagcugcguccuguccggccacaaccucgccaagcacugccugcacgugguggggcccaacgucaacaagggcgaggacauccagcugcucaagagcgccuacgagaacuucaaccagcacgaggugcugcuggcgccccuccuguccgccgggaucuucggcgccgacccgauccacagccugcgggugugcgucgacaccgugcgcaccaacguguaccucgccgucuucgacaagaaccuguacgacaagcugguguccagcuuccucgagaugaagagcgagaagcagguggagcagaagaucgccgagauccccaaggaggaggucaagcccuucaucaccgaguccaagcccagcguggagcagcggaagcaggacgacaagaagaucaaggcgugcguggaggaggucacgaccacccuggaggagaccaaguuccugacggagaaccuccugcuguacaucgacaucaacgggaaccuccacccggacuccgccacccuggugagcgacaucgacaucaccuuccugaagaaggacgcccccuacaucgugggcgacgucgugcaggagggcgugcucaccgccgucgugauccccacgaagaaggccgggggcaccaccgagaugcuggcgaaggcccugcgcaaggugcccaccgacaacuacaucacgaccuacccggggcagggccucaacggguacaccgucgaggaggccaagaccgugcugaagaagugcaaguccgccuucuacauccugcccagcaucaucuccaacgagaagcaggagauccucggcaccgugagcuggaaccugcgggagaugcuggcgcacgccgaggagacgcgcaagcugaugcccgucugcguggagaccaaggccaucguguccaccauccagcggaaguacaagggcaucaagauccaggagggggucguggacuacggcgcccgcuucuacuucuacaccagcaagacgaccguggccucccucaucaacacccugaacgaccugaacgagacccucgucacgaugccccugggguacgugacccacggccugaaccucgaggaggcggcccgguacaugcgcagccugaaggugccggccaccgucuccgugagcucccccgacgccgugaccgccuacaacggguaccugacgagcuccagcaagacccccgaggagcacuucaucgagaccaucucccucgcgggcagcuacaaggacuggagcuacuccggccagagcacccagcuggggaucgaguuccugaagcggggcgacaaguccgucuacuacacgagcaaccccaccaccuuccaccucgacggggaggugaucaccuucgacaaccugaagacgcugcucucccugcgcgaggugcggaccaucaaggucuucaccaccguggacaacaucaaccugcacacgcagguggucgacaugagcaugaccuacggccagcaguucggcccgaccuaccucgacggggccgacgugaccaagaucaagccccacaacucccacgagggcaagacguucuacgugcugcccaacgacgacacccugcgcgucgaggccuucgaguacuaccacaccaccgacccgagcuuccucgggcgguacauguccgcccugaaccacacgaagaaguggaaguacccccaggugaacggccugaccagcaucaagugggccgacaacaacugcuaccucgcgaccgcccugcugacccuccagcagaucgagcugaaguucaacucccccgcccugcaggacgccuacuaccgcgcgcgggccggggaggccgccaacuucugcgcccucauccuggcguacugcaacaagacggugggcgagcugggcgacguccgcgagaccaugagcuaccucuuccagcacgccaaccuggacuccugcaagcgggugcugaacgucgugugcaagaccugcgggcagcagcagaccacccucaagggcguggaggccgucauguacauggggacgcugagcuacgagcaguucaagaagggcgugcagauccccugcaccugcgggaagcaggccaccaaguaccuggugcagcaggaguccccguucgucaugaugagcgccccccccgcgcaguacgagcucaagcacggcaccuucacgugcgccuccgaguacaccggcaacuaccagugcgggcacuacaagcacaucaccagcaaggagacccuguacugcaucgacggcgcccugcucacgaagagcuccgaguacaaggggcccaucaccgacguguucuacaaggagaacagcuacaccaccacgaucaagccggugaccuacaagcuggacggcgucgugugcaccgagaucgaccccaagcuggacaacuacuacaagaaggacaacuccuacuucaccgagcagcccaucgaccucgugcccaaccagccguaccccaacgccagcuucgacaacuucaaguucgucugcgacaacaucaaguucgccgacgaccugaaccagcugacgggguacaagaagcccgcgucccgcgagcucaaggugaccuucuuccccgaccugaacggcgacguggucgccaucgacuacaagcacuacaccccgagcuucaagaagggcgccaagcugcuccacaagcccaucguguggcacgugaacaacgccaccaacaaggcgacguacaagcccaacaccuggugcauccggugccugugguccaccaagcccgucgagaccagcaacuccuucgacgugcugaagagcgaggacgcccaggggauggacaaccucgccugcgaggaccugaagccgguguccgaggaggucguggagaaccccacgauccagaaggacgugcuggagugcaacgucaagaccaccgagguggugggcgacaucauccucaagcccgccaacaacagccugaagaucaccgaggaggucgggcacacggaccugauggccgcguacguggacaacuccagccucaccaucaagaagcccaacgagcugucccgcgugcugggccucaagacccuggccacccacgggcuggccgccgucaacagcgugccgugggacacgaucgccaacuacgcgaagcccuuccucaacaagguggucuccaccaccaccaacaucgugacgcgcugccugaaccgggugugcaccaacuacaugcccuacuucuucacccugcuccugcagcugugcaccuucacccgcagcacgaacucccggaucaaggccagcaugccgaccaccaucgccaagaacaccgucaagagcgugggcaaguucugccucgaggccuccuucaacuaccugaagagccccaacuucuccaagcugaucaacaucaucaucugguuccuccugcugagcgugugccucggcucccugaucuacagcacggccgcgcuggggguccucauguccaaccugggcaugcccagcuacugcaccggguaccgcgagggcuaccugaacuccaccaacgugaccaucgccacguacugcaccggcagcauccccugcuccgugugccucagcgggcuggacucccuggacaccuacccgagccucgagaccauccagaucacgaucuccagcuucaagugggaccugaccgccuucggccuggucgccgagugguuccucgccuacauccuguucacccgguucuucuacgugcuggggcucgcggccaucaugcagcuguucuucuccuacuucgccgugcacuucaucagcaacuccuggcugauguggcugaucaucaaccucguccagauggcccccaucagcgcgauggugcgcauguacaucuucuucgccagcuucuacuacguguggaaguccuacguccacgugguggacggcugcaacagcuccaccugcaugaugugcuacaagcggaaccgcgccacgcgggucgagugcaccaccaucgugaacgggguccgccggagcuucuacguguacgccaacggcggcaagggguucugcaagcugcacaacuggaacugcgugaacugcgacaccuucugcgccggcuccacguucaucagcgacgaggucgcgcgcgaccugucccuccaguucaagcggcccaucaaccccaccgaccagagcuccuacaucguggacagcgugaccgucaagaacggguccauccaccuguacuucgacaaggccggccagaagaccuacgagcgccacagccugucccacuucgugaaccucgacaaccugcgggccaacaacacgaaggggagccugccgaucaacgugaucgucuucgacggcaaguccaagugcgaggagagcuccgccaagagcgccuccguguacuacagccagcucaugugccagcccauccugcugcucgaccaggcgcuggugagcgacgucggcgacuccgccgagguggccgugaagauguucgacgccuacgucaacaccuucagcuccaccuucaacgugcccauggagaagcugaagacccucguggccacggcggaggccgagcuggccaagaacgucagccuggacaacgugcucuccaccuucaucagcgccgcgcgccagggguucguggacuccgacgucgagaccaaggacgugguggagugccugaagcugagccaccaguccgacaucgaggucaccggcgacagcugcaacaacuacaugcucacguacaacaagguggagaacaugaccccccgggaccugggggccugcaucgacugcuccgcccgccacaucaacgcccagguggccaagagccacaacaucgcgcugaucuggaacgucaaggacuucaugucccucagcgagcagcugcggaagcagauccgcuccgccgccaagaagaacaaccugccguucaagcucaccugcgccaccacgcgccagguggugaacgucgugaccaccaagaucgcccugaagggcgggugaggacuaguuauaagacugacuagcccgaugggccucccaacgggcccuccuccccuccuugcaccgagauuaauaaaaaaaaaaaaaaaaaaaaaaaaaaaaaaaaaaaaaaaaaaaaaaaaaaaaaaaaaaaaaaaaugcaucccccccccccccccccccccccccccccccaaaggcucuuuucagagccaccagaauu

SEQ ID NO: 21992 - RNA, 6058 nt, Artificial Sequence
  SARS-CoV-2__MT385436.1__non-structural protein 3 (NSP3) mRNA gc
aggagaaagcuuaccauggcccccaccaaggugaccuucggcgacgacacggucaucgaggugcagggguacaagagcgugaacaucaccuucgagcuggacgagcgcaucgacaagguccucaacgagaagugcuccgccuacaccguggagcugggcaccgaggugaacgaguucgcgugcgucgugacggacgccgugaucaagacccugcagccggucagcgagcuccugaccccccuggggaucgaccucgacgagugguccauggccaccuacuaccuguucgacgagagcggcgaguucaagcuggccucccacauguacugcagcuucuacccccccgacgaggacgaggaggagggggacugcgaggaggaggaguucgagccguccacgcaguacgaguacggcaccgaggacgacuaccagggcaagccccucgaguucggggccaccagcgcggcccugcagcccgaggaggagcaggaggaggacuggcuggacgacgacucccagcagaccgugggccagcaggacgggagcgaggacaaccagacgaccaccauccagaccaucguggagguccagccccagcucgagauggagcugacgccgguggugcagaccaucgaggucaacuccuucagcggcuaccugaagcucaccgacaacguguacaucaagaacgccgacaucguggaggaggccaagaaggucaagcccaccgugguggucaacgcggccaacguguaccugaagcacgggggcggcguggccggggcccugaacaaggccacgaacaacgcgaugcaggucgaguccgacgacuacaucgccaccaacggcccccucaagguggggggcagcugcguccuguccggccacaaccuggccaagcacugccuccacgugguggggcccaacgucaacaagggcgaggacauccagcugcugaagagcgccuacgagaacuucaaccagcacgaggugcuccuggccccgcugcucuccgcggggaucuucggcgccgaccccauccacagccugcgggugugcgucgacaccgugcgcaccaacguguaccuggccgucuucgacaagaaccucuacgacaagcugguguccagcuuccuggagaugaagagcgagaagcagguggagcagaagaucgccgagauccccaaggaggaggucaagcccuucaucacggaguccaagccgagcguggagcagcggaagcaggacgacaagaagaucaaggccugcguggaggaggucaccaccacccucgaggagacgaaguuccugaccgagaaccugcuccuguacaucgacaucaacgggaaccugcaccccgacuccgcgacccucgugagcgacaucgacaucaccuuccugaagaaggacgcccccuacaucgugggcgacgucgugcaggagggcgugcugacggccgucgugauccccaccaagaaggccgggggcaccaccgagaugcucgccaaggcgcugcgcaaggugccgacggacaacuacaucaccaccuaccccgggcagggccugaacggguacaccgucgaggaggccaagaccgugcucaagaagugcaaguccgccuucuacauccugcccagcaucaucuccaacgagaagcaggagauccugggcacggugagcuggaaccuccgggagaugcuggcccacgcggaggagacccgcaagcugaugcccgucugcguggagaccaaggccaucguguccaccauccagcggaaguacaagggcaucaagauccaggagggggucguggacuacggcgcccgcuucuacuucuacacgagcaagaccaccguggccucccugaucaacacccucaacgaccugaacgagacgcuggucaccaugccgcucggguacgugacccacggccugaaccuggaggaggccgcgcgguacaugcgcagccucaaggugcccgccaccgucuccgugagcucccccgacgccgugacggccuacaacggguaccugaccagcuccagcaagacccccgaggagcacuucaucgagaccaucucccuggccggcagcuacaaggacuggagcuacuccggccagagcacgcagcucgggaucgaguuccugaagcggggcgacaaguccgucuacuacaccagcaacccgaccaccuuccaccuggacggggaggugaucacguucgacaaccucaagacccugcugucccuccgcgaggugcggaccaucaaggucuucaccacgguggacaacaucaaccugcacacccagguggucgacaugagcaugaccuacggccagcaguucggccccaccuaccuggacggggcggacgugacgaagaucaagccccacaacucccacgagggcaagaccuucuacgugcucccgaacgacgacacccugcgcgucgaggccuucgaguacuaccacaccacggaccccagcuuccuggggcgguacauguccgcccucaaccacaccaagaaguggaaguacccccaggugaacggccugaccagcaucaagugggccgacaacaacugcuaccuggccaccgcgcuccugacgcugcagcagaucgagcucaaguucaaccccccggcccugcaggacgccuacuaccgcgcccgggcgggggaggccgccaacuucugcgcccugauccucgccuacugcaacaagaccgugggcgagcugggcgacguccgcgagaccauguccuaccuguuccagcacgcgaaccucgacagcugcaagcgggugcugaacgucgugugcaagaccugcgggcagcagcagaccacgcugaagggcguggaggccgucauguacauggggacccucuccuacgagcaguucaagaagggcgugcagauccccugcaccugcgggaagcaggccaccaaguaccuggugcagcaggagagccccuucgucaugauguccgcccccccggcccaguacgagcugaagcacggcacguucaccugcgcgagcgaguacaccggcaacuaccagugcgggcacuacaagcacaucaccuccaaggagacgcucuacugcaucgacggcgcccugcugaccaagagcagcgaguacaaggggcccaucaccgacguguucuacaaggagaacuccuacaccacgaccaucaagcccgugaccuacaagcucgacggcgucgugugcaccgagaucgaccccaagcuggacaacuacuacaagaaggacaacagcuacuucacggagcagccgaucgaccuggugcccaaccagcccuaccccaacgccuccuucgacaacuucaaguucgucugcgacaacaucaaguucgccgacgaccucaaccagcugaccggguacaagaagccggccagccgcgagcugaaggugaccuucuuccccgaccucaacggcgacguggucgcgaucgacuacaagcacuacacccccuccuucaagaagggcgccaagcugcugcacaagcccaucguguggcacgugaacaacgccacgaacaaggccaccuacaagccgaacaccuggugcauccggugccucuggagcaccaagcccgucgagacguccaacagcuucgacgugcugaaguccgaggacgcgcaggggauggacaaccuggccugcgaggaccucaagcccgugagcgaggaggucguggagaaccccaccauccagaaggacgugcuggagugcaacgucaagaccaccgagguggugggcgacaucauccugaagccggccaacaacucccucaagaucacggaggaggucgggcacaccgaccugauggccgccuacguggacaacagcucccugaccaucaagaagcccaacgagcucagccgcgugcugggccugaagacccucgcgacgcacgggcuggccgccgucaacuccgugcccugggacaccaucgccaacuacgccaagccguuccugaacaagguggucagcaccaccacgaacaucgugacccgcugccucaaccgggugugcaccaacuacaugcccuacuucuucacccugcugcuccagcugugcaccuucacgcgcuccaccaacagccggaucaaggcguccaugcccaccaccaucgccaagaacacggucaagagcgugggcaaguucugccuggaggccagcuucaacuaccucaagucccccaacuucagcaagcuggugaacaucaucaucugguuccugcuccuguccgucugccugggcagccucaucuacuccaccgccgcccugggggugcugaugagcaaccucggcaugccguccuacugcaccggguaccgcgagggcuaccugaacagcaccaacgugacgaucgcgaccuacugcaccggcuccauccccugcagcgucugccuguccgggcucgacagccuggacaccuaccccucccuggagacgauccagaucaccaucagcuccuucaagugggaccucaccgccuucggccugguggccgagugguuccuggccuacauccucuucacccgguucuucuacgugcuggggcuggccgcgaucaugcagcucuucuucagcuacuucgccguccacuucaucuccaacagcuggcugauguggcugaucaucaaccuggugcagauggcccccaucuccgccauggugcgcauguacaucuucuucgcgagcuucuacuacgucuggaagagcuacgugcacguggucgacggcugcaacuccagcacgugcaugaugugcuacaagcggaaccgcgccacccggguggagugcaccaccaucgucaacggggugcgccgguccuucuacguguacgccaacggcggcaagggguucugcaagcuccacaacuggaacugcgucaacugcgacacguucugcgccggcagcaccuucaucuccgacgagguggcccgcgaccugagccugcaguucaagcggccgaucaaccccaccgaccaguccagcuacaucguggacuccgucaccgugaagaacgggagcauccaccucuacuucgacaaggcgggccagaagacguacgagcgccacucccugagccacuucgugaaccuggacaaccuccgggccaacaacaccaaggggucccugcccaucaacgucaucguguucgacggcaagagcaagugcgaggaguccagcgccaaguccgccagcguguacuacucccagcugaugugccagcccauccuccugcuggaccaggcccucgucagcgacgugggcgacagcgcggagguggccgucaagauguucgacgccuacgugaacaccuucuccagcaccuucaacgugccgauggagaagcugaagacgcuggucgccaccgccgaggcggagcucgccaagaacgugucccuggacaacgugcugagcaccuucaucuccgccgcccgccagggguucgucgacagcgacguggagaccaaggacguggucgagugccucaagcugucccaccagagcgacaucgaggugacgggcgacuccugcaacaacuacaugcugaccuacaacaagguggagaacaugaccccccgggaccucggggcgugcaucgacugcagcgcccgccacaucaacgcccaggucgccaagucccacaacaucgcccugaucuggaacgugaaggacuucaugagccuguccgagcagcuccggaagcagauccgcagcgcggccaagaagaacaaccugcccuucaagcugaccugcgccacgacccgccagguggucaacguggugaccaccaagaucgcccucaagggcgggugaggacuaguuauaagacugacuagcccgaugggccucccaacgggcccuccuccccuccuugcaccgagauuaauaaaaaaaaaaaaaaaaaaaaaaaaaaaaaaaaaaaaaaaaaaaaaaaaaaaaaaaaaaaaaaaaugcaucccccccccccccccccccccccccccccccaaaggcucuuuucagagccaccagaauu

SEQ ID NO: 21993 - RNA, 6058 nt, Artificial Sequence
  SARS-CoV-2__MT385454.1__non-structural protein 3 (NSP3) mRNA gc
aggagaaagcuuaccauggcccccaccaaggugaccuucggcgacgacacggucaucgaggugcagggguacaagagcgugaacaucaccuucgagcuggacgagcgcaucgacaagguccucaacgagaagugcuccgccuacaccguggagcugggcaccgaggugaacgaguucgcgugcgucguggccgacgccgugaucaagacgcugcagccggucagcgagcuccugaccccccuggggaucgaccucgacgagugguccauggccaccuacuaccuguucgacgagagcggcgaguucaagcuggccucccacauguacugcagcuucuacccccccgacgaggacgaggaggagggggacugcgaggaggaggaguucgagccguccacccaguacgaguacggcacggaggacgacuaccagggcaagccccucgaguucggggcgaccagcgccgcccugcagcccgaggaggagcaggaggaggacuggcuggacgacgacucccagcagaccgugggccagcaggacgggagcgaggacaaccagaccacgaccauccagaccaucguggagguccagccccagcucgagauggagcugaccccgguggugcagacgaucgaggucaacuccuucagcggcuaccugaagcucaccgacaacguguacaucaagaacgccgacaucguggaggaggcgaagaaggucaagcccaccgugguggucaacgccgccaacguguaccugaagcacgggggcggcguggccggggcccugaacaaggcgaccaacaacgccaugcaggucgaguccgacgacuacaucgccacgaacggcccccucaagguggggggcagcugcguccuguccggccacaaccuggccaagcacugccuccacgugguggggcccaacgucaacaagggcgaggacauccagcugcugaagagcgccuacgagaacuucaaccagcacgaggugcuccuggcgccgcugcucuccgccgggaucuucggcgccgaccccauccacagccugcgggugugcgucgacaccgugcgcaccaacguguaccuggccgucuucgacaagaaccucuacgacaagcugguguccagcuuccuggagaugaagagcgagaagcagguggagcagaagaucgccgagauccccaaggaggaggucaagcccuucaucaccgaguccaagccgagcguggagcaggacgacaagaagaucaaggcgugcguggaggaggucacgaccacccucgaggagaccaaguuccugacggagaaccugcuccuguacaucgacaucaacgggaaccugcaccccgacuccgccacccucgugagcgacaucgacaucaccuuccugaagaaggacgcccccuacaucgugggcgacgucgugcaggagggcgugcugaccgccgucgugauccccacgaagaaggccgggggcaccaccgagaugcucgcgaaggcccugcggaaggugccgaccgacaacuacaucacgaccuaccccgggcagggccugaacggguacaccgucgaggaggccaagaccgugcucaagaagugcaaguccgccuucuacauccugcccagcaucaucuccaacgagaagcaggagauccugggcaccgugagcuggaaccuccgcgagaugcuggcgcacgccgaggagacgcggaagcugaugcccgucugcguggagaccaaggccaucguguccaccauccagcgcaaguacaagggcaucaagauccaggagggggucguggacuacggcgcccgguucuacuucuacaccagcaagacgaccguggccucccugaucaacacccucaacgaccugaacgagacccuggucacgaugccgcucggguacgugacccacggccugaaccuggaggaggcggcccgcuacaugcggagccucaaggugcccgccaccgucuccgugagcucccccgacgccgugaccgccuacaacggguaccugacgagcuccagcaagacccccgaggagcacuucaucgagaccaucucccuggcgggcagcuacaaggacuggagcuacuccggccagagcacccagcucgggaucgaguuccugaagcgcggcgacaaguccgucuacuacacgagcaacccgaccaccuuccaccuggacggggaggugaucaccuucgacaaccucaagacgcugcugucccuccgggaggugcgcaccaucaaggucuucaccaccguggacaacaucaaccugcacacgcagguggucgacaugagcaugaccuacggccagcaguucggccccaccuaccuggacggggccgacgugaccaagaucaagccccacaacucccacgagggcaagacguucuacgugcucccgaacgacgacacccugcgggucgaggccuucgaguacuaccacaccaccgaccccagcuuccuggggcgcuacauguccgcccucaaccacacgaagaaguggaaguacccccaggugaacggccugaccagcaucaagugggccgacaacaacugcuaccuggcgaccgcccuccugacccugcagcagaucgagcucaaguucaaccccccggcccugcaggacgccuacuaccgggcgcgcgccggggaggccgccaacuucugcgcccugauccucgcguacugcaacaagacggugggcgagcugggcgacguccgggagaccauguccuaccuguuccagcacgccaaccucgacagcugcaagcgcgugcugaacgucgugugcaagaccugcgggcagcagcagaccacccugaagggcguggaggccgucauguacauggggacgcucuccuacgagcaguucaagaagggcgugcagauccccugcaccugcgggaagcaggccaccaaguaccuggugcagcaggagagccccuucgucaugauguccgcccccccggcgcaguacgagcugaagcacggcaccuucacgugcgccagcgaguacaccggcaacuaccagugcgggcacuacaagcacaucaccuccaaggagacccucuacugcaucgacggcgcccugcugacgaagagcagcgaguacaaggggcccaucaccgacguguucuacaaggagaacuccuacaccaccacgaucaagcccgugaccuacaagcucgacggcgucgugugcaccgagaucgaccccaagcuggacaacuacuacaagaaggacaacagcuacuucaccgagcagccgaucgaccuggugcccaaccagcccuaccccaacgccuccuucgacaacuucaaguucgucugcgacaacaucaaguucgccgacgaccucaaccagcugacgggguacaagaagccggcgagccgggagcugaaggugaccuucuuccccgaccucaacggcgacguggucgccaucgacuacaagcacuacacccccuccuucaagaagggcgccaagcugcugcacaagcccaucguguggcacgugaacaacgccaccaacaaggcgacguacaagccgaacaccuggugcauccgcugccucuggagcaccaagcccgucgagaccuccaacagcuucgacgugcugaaguccgaggacgcccaggggauggacaaccuggccugcgaggaccucaagcccgugagcgaggaggucguggagaaccccacgauccagaaggacgugcuggagugcaacgucaagaccaccgagguggugggcgacaucauccugaagccggccaacaacucccucaagaucaccgaggaggucgggcacacggaccugauggccgcguacguggacaacagcucccugaccaucaagaagcccaacgagcucagccgggugcugggccugaagacccucgccacccacgggcuggccgccgucaacuccgugcccugggacacgaucgccaacuacgcgaagccguuccugaacaagguggucagcaccaccaccaacaucgugacgcgcugccucaaccgcgugugcaccaacuacaugcccuacuucuucacccugcugcuccagcugugcaccuucacccgguccacgaacagccgcaucaaggccuccaugcccaccaccaucgccaagaacaccgucaagagcgugggcaaguucugccuggaggccagcuucaacuaccucaagucccccaacuucagcaagcugaucaacaucaucaucugguuccugcuccuguccgugugccugggcagccucaucuacuccacggccgcgcuggggguccugaugagcaaccucggcaugccguccuacugcaccggguaccgggagggcuaccugaacagcaccaacgugaccaucgccacguacugcaccggcuccauccccugcagcgugugccuguccgggcucgacagccuggacaccuaccccucccuggagaccauccagaucacgaucagcuccuucaagugggaccucaccgccuucggccuggucgccgagugguuccuggccuacauccucuucacccgcuucuucuacgugcuggggcuggcggccaucaugcagcucuucuucagcuacuucgccgugcacuucaucuccaacagcuggcugauguggcugaucaucaaccugguccagauggcccccaucuccgcgauggugcggauguacaucuucuucgccagcuucuacuacguguggaagagcuacguccacgugguggacggcugcaacuccagcaccugcaugaugugcuacaagcgcaaccgggccacgcgcgucgagugcaccaccaucgugaacgggguccggcgcuccuucuacguguacgccaacggcggcaagggguucugcaagcuccacaacuggaacugcgugaacugcgacaccuucugcgccggcagcacguucaucuccgacgaggucgcgcgggaccugagccugcaguucaagcgcccgaucaaccccaccgaccaguccagcuacaucguggacuccgugaccgucaagaacgggagcauccaccucuacuucgacaaggccggccagaagaccuacgagcggcacucccugagccacuucgugaaccuggacaaccuccgcgccaacaacacgaaggggucccugcccaucaacgugaucgucuucgacggcaagagcaagugcgaggaguccagcgccaaguccgccagcguguacuacucccagcugaugugccagcccauccuccugcuggaccaggcgcucgugagcgacgucggcgacagcgccgagguggccgugaagauguucgacgccuacgucaacaccuucuccagcaccuucaacgugccgauggagaagcugaagacccugguggccacggcggaggccgagcucgccaagaacgucucccuggacaacgugcugagcaccuucaucuccgccgcgcggcagggguucguggacagcgacgucgagaccaaggacgugguggagugccucaagcugucccaccagagcgacaucgaggucaccggcgacuccugcaacaacuacaugcugacguacaacaagguggagaacaugaccccccgcgaccucggggccugcaucgacugcagcgcccggcacaucaacgcccagguggccaagucccacaacaucgcgcugaucuggaacgucaaggacuucaugagccuguccgagcagcuccgcaagcagauccggagcgccgccaagaagaacaaccugcccuucaagcugaccugcgccaccacgcgccagguggugaacgucgugaccaccaagaucgcccucaagggcgggaagaucgugugaggacuaguuauaagacugacuagcccgaugggccucccaacgggcccuccuccccuccuugcaccgagauuaauaaaaaaaaaaaaaaaaaaaaaaaaaaaaaaaaaaaaaaaaaaaaaaaaaaaaaaaaaaaaaaaaugcaucccccccccccccccccccccccccccccccaaaggcucuuuucagagccaccagaauu

SEQ ID NO: 21994 - RNA, 6058 nt, Artificial Sequence
  SARS-CoV-2__MT385461.1__non-structural protein 3 (NSP3) mRNA gc
aggagaaagcuuaccauggcccccaccaaggugaccuucggcgacgacacggucaucgaggugcagggguacaagagcgugaacaucaccuucgagcuggacgagcgcaucgacaagguccucaacgagaagugcuccgccuacaccguggagcugggcaccgaggugaacgaguucgcgugcgucguggccgacgccgugaucaagacgcugcagccggucagcgagcuccugaccccccuggggaucgaccucgacgagugguccauggccaccuacuaccuguucgacgagagcggcgaguucaagcuggccucccacauguacugcagcuucuacccccccgacgaggacgaggaggagggggacugcgaggaggaggaguucgagccguccacccaguacgaguacggcacggaggacgacuaccagggcaagccccucgaguucggggcgaccagcgccgcccugcagcccgaggaggagcaggaggaggacuggcuggacgacgacucccagcagaccgugggccagcaggacgggagcgaggacaaccagaccacgaccauccagaccaucguggagguccagccccagcucgagauggagcugaccccgguggugcagacgaucgaggucaacuccuucagcggcuaccugaagcucaccgacaacguguacaucaagaacgccgacaucguggaggaggcgaagaaggucaagcccaccgugguggucaacgccgccaacguguaccugaagcacgggggcggcguggccggggcccugaacaaggcgaccaacaacgccaugcaggucgaguccgacgacuacaucgccacgaacggcccccucaagguggggggcagcugcguccuguccggccacaaccuggccaagcacugccuccacgugguggggcccaacgucaacaagggcgaggacauccagcugcugaagagcgccuacgagaacuucaaccagcacgaggugcuccuggcgccgcugcucuccgccgggaucuucggcgccgaccccauccacagccugcgggugugcgucgacaccgugcgcaccaacguguaccuggccgucuucgacaagaaccucuacgacaagcugguguccagcuuccuggagaugaagagcgagaagcagguggagcagaagaucgccgagauccccaaggaggaggucaagcccuucaucaccgaguccaagccgagcguggagcagcggaagcaggacgacaagaagaucaaggcgugcguggaggaggucacgaccacccucgaggagaccaaguuccugacggagaaccugcuccuguacaucgacaucaacgggaaccugcaccccgacuccgccacccucgugagcgacaucgacaucaccuuccugaagaaggacgcccccuacaucgugggcgacgucgugcaggagggcgugcugaccgccgucgugauccccacgaagaaggccgggggcaccaccgagaugcucgcgaaggcccugcgcaaggugccgaccgacaacuacaucacgaccuaccccgggcagggccugaacggguacaccgucgaggaggccaagaccgugcucaagaagugcaaguccgccuucuacauccugcccagcaucaucuccaacgagaagcaggagauccugggcaccgugagcuggaaccuccgggagaugcuggcgcacgccgaggagacgcgcaagcugaugcccgucugcguggagaccaaggccaucguguccaccauccagcggaaguacaagggcaucaagauccaggagggggucguggacuacggcgcccgcuucuacuucuacaccagcaagacgaccguggccucccugaucaacacccucaacgaccugaacgagacccuggucacgaugccgcucggguacgugacccacggccugaaccuggaggaggcggcccgguacaugcgcagccucaaggugcccgccaccgucuccgugagcucccccgacgccgugaccgccuacaacggguaccugacgagcuccagcaagacccccgaggagcacuucaucgagaccaucucccuggcgggcagcuacaaggacuggagcuacuccggccagagcacccagcucgggaucgaguuccugaagcggggcgacaaguccgucuacuacacgagcaacccgaccaccuuccaccuggacggggaggugaucaccuucgacaaccucaagacgcugcugucccuccgcgaggugcggaccaucaaggucuucaccaccguggacaacaucaaccugcacacgcagguggucgacaugagcaugaccuacggccagcaguucggccccaccuaccuggacggggccgacgugaccaagaucaagccccacaacucccacgagggcaagacguucuacgugcucccgaacgacgacacccugcgcgucgaggccuucgaguacuaccacaccaccgaccccagcuuccuggggcgguacauguccgcccucaaccacacgaagaaguggaaguacccccaggugaacggccugaccagcaucaagugggccgacaacaacugcuaccuggcgaccgcccuccugacccugcagcagaucgagcucaaguucaaccccccggcccugcaggacgccuacuaccgcgcgcgggccggggaggccgccaacuucugcgcccugauccucgcguacugcaacaagacggugggcgagcugggcgacguccgcgagaccauguccuaccuguuccagcacgccaaccucgacagcugcaagcgggugcugaacgucgugugcaagaccugcgggcagcagcagaccacccugaagggcguggaggccgucauguacauggggacgcucuccuacgagcaguucaagaagggcgugcagauccccugcaccugcgggaagcaggccaccaaguaccuggugcagcaggagagccccuucgucaugauguccgcccccccggcgcaguacgagcugaagcacggcaccuucacgugcgccagcgaguacaccggcaacuaccagugcgggcacuacaagcacaucaccuccaaggagacccucuacugcaucgacggcgcccugcugacgaagagcagcgaguacaaggggcccaucaccgacguguucuacaaggagaacuccuacaccaccacgaucaagcccgugaccuacaagcucgacggcgucgugugcaccgagaucgaccccaagcuggacaacuacuacaagaaggacaacagcuacuucaccgagcagccgaucgaccuggugcccaaccagcccuaccccaacgccuccuucgacaacuucaaguucgucugcgacaacaucaaguucgccgacgaccucaaccagcugacgggguacaagaagccggcgagccgcgagcugaaggugaccuucuuccccgaccucaacggcgacguggucgccaucgacuacaagcacuacacccccuccuucaagaagggcgccaagcugcugcacaagcccaucguguggcacgugaacaacgccaccaacaaggcgacguacaagccgaacaccuggugcauccggugccucuggagcaccaagcccgucgagaccuccaacagcuucgacgugcugaaguccgaggacgcccaggggauggacaaccuggccugcgaggaccucaagcccgugagcgaggaggucguggagaaccccacgauccagaaggacgugcuggagugcaacgucaagaccaccgagguggugggcgacaucauccugaagccggccaacaacucccucaagaucaccgaggaggucgggcacacggaccugauggccgcguacguggacaacagcucccugaccaucaagaagcccaacgagcucagccgcgugcugggccugaagacccucgccacccacgggcuggccgccgucaacuccgugcccugggacacgaucgccaacuacgcgaagccguuccugaacaagguggucagcaccaccaccaacaucgugacgcgcugccucaaccgggugugcaccaacuacaugcccuacuucuucacccugcugcuccagcugugcaccuucacccgcuccacgaacagccggaucaaggccuccaugcccaccaccaucgccaagaacaccgucaagagcgugggcaaguucugccuggaggccagcuucaacuaccucaagucccccaacuucagcaagcugaucaacaucaucaucugguuccugcuccuguccgugugccugggcagccucaucuacuccacggccgcgcuggggguccugaugagcaaccucggcaugccguccuacugcaccggguaccgcgagggcuaccugaacagcaccaacgugaccaucgccacguacugcaccggcuccauccccugcagcgugugccuguccgggcucgacagccuggacaccuaccccucccuggagaccauccagaucacgaucagcuccuucaagugggaccucaccgccuucggccuggucgccgagugguuccuggccuacauccucuucacccgguucuucuacgugcuggggcuggcggccaucaugcagcucuucuucagcuacuucgccgugcacuucaucuccaacagcuggcugauguggcugaucaucaaccugguccagauggcccccaucuccgcgauggugcgcauguacaucuucuucgccagcuucuacuacguguggaagagcuacguccacgugguggacggcugcaacuccagcaccugcaugaugugcuacaagcggaaccgcgccacgcgggucgagugcaccaccaucgugaacgggguccgccgguccuucuacguguacgccaacggcggcaagggguucugcaagcuccacaacuggaacugcgugaacugcgacaccuucugcgccggcagcacguucaucuccgacgaggucgcgcgcgaccugagccugcaguucaagcggccgaucaaccccaccgaccaguccagcuacaucguggacuccgugaccgucaagaacgggagcauccaccucuacuucgacaaggccggccagaagaccuacgagcgccacucccugagccacuucgugaaccuggacaaccuccgggccaacaacacgaaggggucccugcccaucaacgugaucgucuucgacggcgagagcaagugcgaggaguccagcgccaaguccgccagcguguacuacucccagcugaugugccagcccauccuccugcuggaccaggcgcucgugagcgacgucggcgacagcgccgagguggccgugaagauguucgacgccuacgucaacaccuucuccagcaccuucaacgugccgauggagaagcugaagacccugguggccacggcggaggccgagcucgccaagaacgucucccuggacaacgugcugagcaccuucaucuccgccgcgcgccagggguucguggacagcgacgucgagaccaaggacgugguggagugccucaagcugucccaccagagcgacaucgaggucaccggcgacuccugcaacaacuacaugcugacguacaacaagguggagaacaugaccccccgggaccucggggccugcaucgacugcagcgcccgccacaucaacgcccagguggccaagucccacaacaucgcgcugaucuggaacgucaaggacuucaugagccuguccgagcagcuccggaagcagauccgcagcgccgccaagaagaacaaccugcccuucaagcugaccugcgccaccacgcgccagguggugaacgucgugaccaccaagaucgcccucaagggcgggugaggacuaguuauaagacugacuagcccgaugggccucccaacgggcccuccuccccuccuugcaccgagauuaauaaaaaaaaaaaaaaaaaaaaaaaaaaaaaaaaaaaaaaaaaaaaaaaaaaaaaaaaaaaaaaaaugcaucccccccccccccccccccccccccccccccaaaggcucuuuucagagccaccagaauu

SEQ ID NO: 21995 - RNA, 6058 nt, Artificial Sequence
  SARS-CoV-2__MT385465.1__non-structural protein 3 (NSP3) mRNA gc
aggagaaagcuuaccauggcccccaccaaggugaccuucggcgacgacacggucaucgaggugcagggguacaagagcgugaacaucaccuucgagcuggacgagcgcaucgacaagguccucaacgagaagugcuccgccuacaccguggagcugggcaccgaggugaacgaguucgcgugcgucguggccgacgccgugaucaagacgcugcagccggucagcgagcuccugaccccccuggggaucgaccucgacgagugguccauggccaccuacuaccuguucgacgagagcggcgaguucaagcuggccucccacauguacugcagcuucuacccccccgacgaggacgaggaggagggggacugcgaggaggaggaguucgagccguccacccaguacgaguacggcacggaggacgacuaccagggcaagccccucgaguucggggcgaccagcgccgcccugcagcccgaggaggagcaggaggaggacuggcuggacgacgacucccagcagaccgugggccagcaggacgggagcgaggacaaccagaccacgaccauccagaccaucguggagguccagccccagcucgagauggagcugaccccgguggugcagacgaucgaggucaacuccuucagcggcuaccugaagcucaccgacaacguguacaucaagaacgccgacaucguggaggaggcgaagaaggucaagcccaccgugguggucaacgccgccaacguguaccugaagcacgggggcggcguggccggggcccugaacaaggcgaccaacaacgccaugcaggucgaguccgacgacuacaucgccacgaacggcccccucaagguggggggcagcugcguccuguccggccacaaccuggccaagcacugccuccacgugguggggcccaacgucaacaagggcgaggacauccagcugcugaagagcgccuacgagaacuucaaccagcacgaggugcuccuggcgccgcugcucuccgccgggaucuucggcgccgaccccauccacagccugcgggugugcgucgacaccgugcgcaccaacguguaccuggccgucuucgacaagaaccucuacgacaagcugguguccagcuuccuggagaugaagagcgagaagcagguggagcagaagaucgccgagauccccaaggaggaggucaagcccuucaucaccgaguccaagccgagcguggagcagcggaagcaggacgacaagaagaucaaggcgugcguggaggaggucacgaccacccucgaggagaccaaguuccugacggagaaccugcuccuguacaucgacaucaacgggaaccugcaccccgacuccgccacccucgugagcgacaucgacaucaccuuccugaagaaggacgcccccuacaucgugggcgacgucgugcaggagggcgugcugaccgccgucgugauccccacgaagaaggccgggggcaccaccgagaugcucgcgaaggcccugcgcaaggugccgaccgacaacuacaucacgaccuaccccgggcagggccugaacggguacaccgucgaggaggccaagaccgugcucaagaagugcaaguccgccuucuacauccugcccagcaucaucuccaacgagaagcaggagauccugggcaccgugagcuggaaccuccgggagaugcuggcgcacgccgaggagacgcgcaagcugaugcccgucugcguggagaccaaggccaucguguccaccauccagcggaaguacaagggcaucaagauccaggagggggucguggacuacggcgcccgcuucuacuucuacaccagcaagacgaccguggccucccugaucaacacccucaacgaccugaacgagacccuggucacgaugccgcucggguacgugacccacggccugaaccuggaggaggcggcccgguacaugcgcagccucaaggugcccgccaccgucuccgugagcucccccgacgccgugaccgccuacaacggguaccugacgagcuccagcaagacccccgaggagcacuucaucgagaccaucucccuggcgggcagcuacaaggacuggagcuacuccggccagagcacccagcucgggaucgaguuccugaagcggggcgacaaguccgucuacuacacgagcaacccgaccaccuuccaccuggacggggaggugaucaccuucgacaaccucaagacgcugcugucccuccgcgaggugcggaccaucaaggucuucaccaccguggacaacaucaaccugcacacgcagguggucgacaugagcaugaccuacggccagcaguucggccccaccuaccuggacggggccgacgugaccaagaucaagccccacaacucccacgagggcaagacguucuacgugcucccgaacgacgacacccugcgcgucgaggccuucgaguacuaccacaccaccgaccccagcuuccuggggcgguacauguccgcccucaaccacacgaagaaguggaaguacccccaggugaacggccugaccagcaucaagugggccgacaacaacugcuaccuggcgaccgcccuccugacccugcagcagaucgagcucaaguucaaccccccggcccugcaggacgccuacuaccgcgcgcgggccggggaggccgccaacuucugcgcccugauccucgcguacugcaacaagacggugggcgagcugggcgacguccgcgagaccauguccuaccuguuccagcacgccaaccucgacagcugcaagcgggugcugaacgucgugugcaagaccugcgggcagcagcagaccacccugaagggcguggaggccgucauguacauggggacgcucuccuacgagcaguucaagaagggcgugcagauccccugcaccugcgggaagcaggccaccaaguaccuggugcagcaggagagccccuucgucaugauguccgcccccccggcgcaguacgagcugaagcacggcaccuucacgugcgccagcgaguacaccggcaacuaccagugcgggcacuacaagcacaucaccuccaaggagacccucuacugcaucgacggcgcccugcugacgaagagcagcgaguacaaggggcccaucaccgacguguucuacaaggagaacuccuacaccaccacgaucaagcccgugaccuacaagcucgacggcgucgugugcaccgagaucgaccccaagcuggacaacuacuacaagaaggacaacagcuacuucaccgagcagccgaucgaccuggugcccaaccagcccuaccccaacgccuccuucgacaacuucaaguucgucugcgacaacaucaaguucgccgacgaccucaaccagcugacgggguacaagaagccggcgagccgcgagcugaaggugaccuucuuccccgaccucaacggcgacguggucgccaucgacuacaagcacuacacccccuccuucaagaagggcgccaagcugcugcacaagcccaucguguggcacgugaacaacgccaccaacaaggcgacguacaagccgaacaccuggugcauccggugccucuggagcaccaagcccgucgagaccuccaacagcuucgacgugcugaaguccgaggacgcccaggggauggacaaccuggccugcgaggaccucaagcccgugagcgaggaggucguggagaaccccacgauccagaaggacgugcuggagugcaacgucaagaccaccgagguggugggcgacaucauccugaagccggccaacaacucccucaagaucaccgaggaggucgggcacacggaccugauggccgcguacguggacaacagcucccugaccaucaagaagcccaacgagcucagccgcgugcugggccugaagacccucgccacccacgggcuggccgccgucaacuccgugcccugggacacgaucgccaacuacgcgaagccguuccugaacaagguggucagcaccaccaccaacaucgugacgcgcugccucaaccgggugugcaccaacuacaugcccuacuucuucacccugcugcuccagcugugcaccuucacccgcuccacgaacagccggaucaaggccuccaugcccaccaccaucgccaagaacaccgucaagagcgugggcaaguucugccuggaggccagcuucaacuaccucaagucccccaacuucagcaagcugaucaacaucaucaucugguuccugcuccuguccgugugccugggcagccucaucuacuccacggccgcgcuggggguccugaugagcaaccucggcaugccguccuacugcaccggguaccgcgagggcuaccugaacuucaccaacgugaccaucgccacguacugcaccggcagcauccccugcuccgugugccugagcgggcucgacucccuggacaccuaccccagccuggagaccauccagaucacgaucuccagcuucaagugggaccucaccgccuucggccuggucgccgagugguuccuggccuacauccucuucacccgguucuucuacgugcuggggcuggcggccaucaugcagcucuucuucuccuacuucgccgugcacuucaucagcaacuccuggcugauguggcugaucaucaaccugguccagauggcccccaucagcgcgauggugcgcauguacaucuucuucgccuccuucuacuacguguggaagagcuacguccacgugguggacggcugcaacagcuccaccugcaugaugugcuacaagcggaaccgcgccacgcgggucgagugcaccaccaucgugaacgggguccgccggagcuucuacguguacgccaacggcggcaagggguucugcaagcuccacaacuggaacugcgugaacugcgacaccuucugcgccggcuccacguucaucagcgacgaggucgcgcgcgaccugucccugcaguucaagcggccgaucaaccccaccgaccagagcuccuacaucguggacagcgugaccgucaagaacggguccauccaccucuacuucgacaaggccggccagaagaccuacgagcgccacagccugucccacuucgugaaccuggacaaccuccgggccaacaacacgaaggggagccugcccaucaacgugaucgucuucgacggcaaguccaagugcgaggagagcuccgccaagagcgccuccguguacuacagccagcugaugugccagcccauccuccugcuggaccaggcgcucguguccgacgucggcgacagcgccgagguggccgugaagauguucgacgccuacgucaacaccuucagcuccaccuucaacgugccgauggagaagcugaagacccugguggccacggcggaggccgagcucgccaagaacgucagccuggacaacgugcuguccaccuucaucagcgccgcgcgccagggguucguggacuccgacgucgagaccaaggacgugguggagugccucaagcugagccaccaguccgacaucgaggucaccggcgacagcugcaacaacuacaugcugacguacaacaagguggagaacaugaccccccgggaccucggggccugcaucgacugcuccgcccgccacaucaacgcccagguggccaagagccacaacaucgcgcugaucuggaacgucaaggacuucaugucccugagcgagcagcuccggaagcagauccgcuccgccgccaagaagaacaaccugcccuucaagcugaccugcgccaccacgcgccagguggugaacgucgugaccaccaagaucgcccucaagggcgggugaggacuaguuauaagacugacuagcccgaugggccucccaacgggcccuccuccccuccuugcaccgagauuaauaaaaaaaaaaaaaaaaaaaaaaaaaaaaaaaaaaaaaaaaaaaaaaaaaaaaaaaaaaaaaaaaugcaucccccccccccccccccccccccccccccccaaaggcucuuuucagagccaccagaauu

SEQ ID NO: 21996 - RNA, 6058 nt, Artificial Sequence
  SARS-CoV-2__MT385471.1__non-structural protein 3 (NSP3) mRNA gc
aggagaaagcuuaccauggcccccaccaaggugaccuucggcgacgacacggucaucgaggugcagggguacaagagcgugaacaucaccuucgagcuggacgagcgcaucgacaagguccucaacgagaagugcuccgccuacaccguggagcugggcaccgaggugaacgaguucgcgugcgucguggccgacgccgugaucaagacgcugcagccggucagcgagcuccugaccccccuggggaucgaccucgacgagugguccauggccaccuacuaccuguucgacgagagcggcgaguucaagcuggccucccacauguacugcagcuucuacccccccgacgaggacgaggaggagggggacugcgaggaggaggaguucgagccguccacccaguacgaguacggcacggaggacgacuaccagggcaagccccucgaguucggggcgaccagcgccgcccugcagcccgaggaggagcaggaggaggacuggcuggacgacgacucccagcagaccgugggccagcaggacgggagcgaggacaaccagaccacgaccauccagaccaucguggagguccagccccagcucgagauggagcugaccccgguggugcagacgaucgaggucaacuccuucagcggcuaccugaagcucaccgacaacguguacaucaagaacgccgacaucguggaggaggcgaagaaggucaagcccaccgugguggucaacgccgccaacguguaccugaagcacgggggcggcguggccggggcccugaacaaggcgaccaacaacgccaugcaggucgaguccgacgacuacaucgccacgaacggcccccucaagguggggggcagcugcguccuguccggccacaaccuggccaagcacugccuccacgugguggggcccaacgucaacaagggcgaggacauccagcugcugaagagcgccuacgagaacuucaaccagcacgaggugcuccuggcgccgcugcucuccgccgggaucuucggcgccgaccccauccacagccugcgggugugcgucgacaccgugcgcaccaacguguaccuggccgucuucgacaagaaccucuacgacaagcugguguccagcuuccuggagaugaagagcgagaagcagguggagcagaagaucgccgagauccccaaggaggaggucaagcccuucaucaccgaguccaagccgagcguggagcagcggaagcaggacgacaagaagaucaaggcgugcguggaggaggucacgaccacccucgaggagaccaaguuccugacggagaaccugcuccuguacaucgacaucaacgggaaccugcaccccgacuccgccacccucgugagcgacaucgacaucaccuuccugaagaaggacgcccccuacaucgugggcgacgucgugcaggagggcgugcugaccgccgucgugauccccacgaagaaggccgggggcaccaccgagaugcucgcgaaggcccugcgcaaggugccgaccgacaacuacaucacgaccuaccccgggcagggccugaacggguacaccgucgaggaggccaagaccgugcucaagaagugcaaguccgccuucuacauccugcccagcaucaucuccaacgagaagcaggagauccugggcaccgugagcuggaaccuccgggagaugcuggcgcacgccgaggagacgcgcaagcugaugcccgucugcguggagaccaaggccaucguguccaccauccagcggaaguacaagggcaucaagauccaggagggggucguggacuacggcgcccgcuucuacuucuacaccagcaagacgaccguggccucccugaucaacacccucaacgaccugaacgagacccuggucacgaugccgcucggguacgugacccacggccugaaccuggaggaggcggcccgguacaugcgcagccucaaggugcccgccaccgucuccgugagcucccccgacgccgugaccgccuacaacggguaccugacgagcuccagcaagacccccgaggagcacuucaucgagaccaucucccuggcgggcagcuacaaggacuggagcuacuccggccagagcacccagcucgggaucgaguuccugaagcggggcgacaaguccgucuacuacacgagcaacccgaccaccuuccaccuggacggggaggugaucaccuucgacaaccucaagacgcugcugucccuccgcgaggugcggaccaucaaggucuucaccaccguggacaacaucaaccugcacacgcagguggucgacaugagcaugaccuacggccagcaguucggccccaccuaccuggacggggccgacgugaccaagaucaagccccacaacucccacgagggcaagacguucuacgugcucccgaacgacgacacccugcgcgucgaggccuucgaguacuaccacaccaccgaccccagcuuccuggggcgguacauguccgcccucaaccacacgaagaaguggaaguacccccaggugaacggccugaccagcaucaagugggccgacaacaacugcuaccuggcgaccgcccuccugacccugcagcagaucgagcucaaguucaaccccccggcccugcaggacgccuacuaccgcgcgcgggccggggaggccgccaacuucugcgcccugauccucgcguacugcaacaagacggugggcgagcugggcgacguccgcgagaccauguccuaccuguuccagcacgccaaccucgacagcugcaagcgggugcugaacgucgugugcaagaccugcgggcagcagcagaccacccugaagggcguggaggccgucauguacauggggacgcucuccuacgagcaguucaagaagggcgugcagauccccugcaccugcgggaagcaggccaccaaguaccuggugcagcaggagagccccuucgucaugauguccgcccccccggcgcaguacgagcugaagcacggcaccuucacgugcgccagcgaguacaccggcaacuaccagugcgggcacuacaagcacaucaccuccaaggagacccucuacugcaucgacggcgcccugcugacgaagagcagcgaguacaaggggcccaucaccgacguguucuacaaggagaacuccuacaccaccacgaucaagcccgugaccuacaagcucgacggcgucgugugcaccgagaucgaccccaagcuggacaacuacuacaagaaggacaacagcuacuucaccgagcagccgaucgaccuggugcccaaccagcccuaccccaacgccuccuucgacaacuucaaguucgucugcgacaacaucaaguucgccgacgaccucaaccagcugacgggguacaagaagccggcgagccgcgagcugaaggugaccuucuuccccgaccucaacggcgacguggucgccaucgacuacaagcacuacacccccuccuucaagaagggcgccaagcugcugcacaagcccaucguguggcacgugaacaacgccaccaacaaggcgacguacaagccgaacaccuggugcauccggugccucuggagcaccaagcccgucgagaccuccaacagcuucgacgugcugaaguccgaggacgcccaggggauggacaaccuggccugcgaggaccucaagcccgugagcgaggaggucguggagaaccccacgauccagaaggacgugcuggagugcaacgucaagaccaccgagguggugggcgacaucauccugaagccggccaacaacucccucaagaucaccgaggaggucgggcacacggaccugauggccgcguacguggacaacagcucccugaccaucaagaagcccaacgagcucagccgcgugcugggccugaagacccucgccacccacgggcuggccgccgucaacuccgugcccugggacacgaucgccaacuacgcgaagccguuccugaacaagguggucagcaccaccaccaacaucgugacgcgcugccucaaccgggugugcaccaacuacaugcccuacuucuucacccugcugcuccagcugugcaccuucacccgcuccacgaacagccggaucaaggccuccaugcccaccaccaucgccaagaacaccgucaagagcgugggcaaguucugccuggaggccagcuucaacuaccucaagucccccaacuucagcaagcugaucaacaucaucaucugguuccugcuccuguccgugugccugggcagccucaucuacuccacggccgcgcuggggguccugaugagcaaccucggcaugccguccuacugcaccggguaccgcgagggcuaccugaacagcaccaacgugaccaucgccacguacugcaccggcuccauccccugcagcgugugccuguccgggcucgacagccuggacaccuaccccucccuggagaccauccagaucacgaucagcuccuucaagugggaccucaccgccuucggccuggucgccgagugguuccuggccuacauccucuucacccgguucuucuacauccuggggcuggcggccaucaugcagcucuucuucagcuacuucgccgugcacuucaucuccaacagcuggcugauguggcugaucaucaaccuggugcagauggcccccaucuccgcgaugguccgcauguacaucuucuucgccagcuucuacuacguguggaagagcuacgugcacgucguggacggcugcaacuccagcaccugcaugaugugcuacaagcggaaccgcgccacgcggguggagugcaccaccaucgucaacggggugcgccgguccuucuacgucuacgccaacggcggcaagggguucugcaagcuccacaacuggaacugcgugaacugcgacaccuucugcgccggcagcacguucaucuccgacgagguggcgcgcgaccugagccugcaguucaagcggccgaucaaccccaccgaccaguccagcuacaucgucgacuccgugaccgugaagaacgggagcauccaccucuacuucgacaaggccggccagaagaccuacgagcgccacucccugagccacuucgucaaccuggacaaccuccgggccaacaacacgaaggggucccugcccaucaacgugaucguguucgacggcaagagcaagugcgaggaguccagcgccaaguccgccagcgucuacuacucccagcugaugugccagcccauccuccugcuggaccaggcgcucgugagcgacgugggcgacagcgccgaggucgccgugaagauguucgacgccuacgugaacaccuucuccagcaccuucaacgucccgauggagaagcugaagacccugguggccacggcggaggccgagcucgccaagaacgugucccuggacaacguccugagcaccuucaucuccgccgcgcgccagggguucguggacagcgacguggagaccaaggacgucguggagugccucaagcugucccaccagagcgacaucgaggugaccggcgacuccugcaacaacuacaugcugacguacaacaaggucgagaacaugaccccccgggaccucggggccugcaucgacugcagcgcccgccacaucaacgcccagguggccaagucccacaacaucgcgcugaucuggaacgugaaggacuucaugagccuguccgagcagcuccggaagcagauccgcagcgccgccaagaagaacaaccugcccuucaagcugaccugcgccaccacgcgccaggucgugaacguggucaccaccaagaucgcccucaagggcgggugaggacuaguuauaagacugacuagcccgaugggccucccaacgggcccuccuccccuccuugcaccgagauuaauaaaaaaaaaaaaaaaaaaaaaaaaaaaaaaaaaaaaaaaaaaaaaaaaaaaaaaaaaaaaaaaaugcaucccccccccccccccccccccccccccccccaaaggcucuuuucagagccaccagaauu

SEQ ID NO: 21997 - RNA, 6058 nt, Artificial Sequence
  SARS-CoV-2__MT375458.1__non-structural protein 3 (NSP3) mRNA gc
aggagaaagcuuaccauggcccccaccaaggugaccuucggcgacgacacggucaucgaggugcagggguacaagagcgugaacaucaccuucgagcuggacgagcgcaucgacaagguccucaacgagaagugcuccgccuacaccguggagcugggcaccgaggugaacgaguucgcgugcgucguggccgacgccgugaucaagacgcugcagccggucagcgagcuccugaccccccuggggaucgaccucgacgagugguccauggccaccuacuaccuguucgacgagagcggcgaguucaagcuggccucccacauguacugcagcuucuacccccccgacgaggacgaggaggagggggacugcgaggaggaggaguucgagccguccacccaguacgaguacggcacggaggacgacuaccagggcaagccccucgaguucggggcgaccagcgccgcccugcagcccgaggaggagcaggaggaggacuggcuggacgacgacucccagcagaccgugggccagcaggacgggagcgaggacaaccagaccacgaccauccagaccaucguggagguccagccccagcucgagauggagcugaccccgguggugcagacgaucgaggucaacuccuucagcggcuaccugaagcucaccgacaacguguacaucaagaacgccgacaucguggaggaggcgaagaaggucaagcccaccgugguggucaacgccgccaacguguaccugaagcacgggggcggcguggccggggcccugaacaaggcgaccaacaacgccaugcaggucgaguccgacgacuacaucgccacgaacggcccccucaagguggggggcagcugcguccuguccggccacaaccuggccaagcacugccuccacgugguggggcccaacgucaacaagggcgaggacauccagcugcugaagagcgccuacgagaacuucaaccagcacgaggugcuccuggcgccgcugcucuccgccgggaucuucggcgccgaccccauccacagccugcgggugugcgucgacaccgugcgcaccaacguguaccuggccgucuucgacaagaaccucuacgacaagcugguguccagcuuccuggagaugaagagcgagaagcagguggagcagaagaucgccgagauccccaaggaggaggucaagcccuucaucaccgaguccaagccgagcguggagcagcggaagcaggacgacaagaagaucaaggcgugcguggaggaggucacgaccacccucgaggagaccaaguuccugacggagaaccugcuccuguacaucgacaucaacgggaaccugcaccccgacuccgccacccucgugagcgacaucgacaucaccuuccugaagaaggacgcccccuacaucgugggcgacgucgugcaggagggcgugcugaccgccgucgugauccccacgaagaaggccgggggcaccaccgagaugcucgcgaaggcccugcgcaaggugccgaccgacaacuacaucacgaccuaccccgggcagggccugaacggguacaccgucgaggaggccaagaccgugcucaagaagugcaaguccgccuucuacauccugcccagcaucaucuccaacgagaagcaggagauccugggcaccgugagcuggaaccuccgggagaugcuggcgcacgccgaggagacgcgcaagcugaugcccgucugcguggagaccaaggccaucguguccaccauccagcggaaguacaagggcaucaagauccaggagggggucguggacuacggcgcccgcuucuacuucuacaccagcaagacgaccguggccucccugaucaacacccucaacgaccugaacgagacccuggucacgaugccgcucggguacgugacccacggccugaaccuggaggaggcggcccgguacaugcgcagccucaaggugcccgccaccgucuccgugagcucccccgacgccgugaccgccuacaacggguaccugacgagcuccagcaagacccccgaggagcacuucaucgagaccaucucccuggcgggcagcuacaaggacuggagcuacuccggccagagcacccagcucgggaucgaguuccugaagcggggcgacaaguccgucuacuacacgagcaacccgaccaccuuccaccuggacggggaggugaucaccuucgacaaccucaagacgcugcugucccuccgcgaggugcggaccaucaaggucuucaccaccguggacaacaucaaccugcacacgcagguggucgacaugagcaugaccuacggccagcaguucggccccaccuaccuggacggggccgacgugaccaagaucaagccccacaacucccacgagggcaagacguucuacgugcucccgaacgacgacacccugcgcgucgaggccuucgaguacuaccacaccaccgaccccagcuuccuggggcgguacauguccgcccucaaccacacgaagaaguggaaguacccccaggugaacggccugaccagcaucaagugggccgacaacaacugcuaccuggcgaccgcccuccugacccugcagcagaucgagcucaaguucaaccccccggcccugcaggacgccuacuaccgcgcgcgggccggggaggccgccaacuucugcgcccugauccucgcguacugcaacaagacggugggcgagcugggcgacguccgcgagaccauguccuaccuguuccagcacgccaaccucgacagcugcaagcgggugcugaacgucgugugcaagaccugcgggcagcagcagaccacccugaagggcguggaggccgucauguacauggggacgcucuccuacgagcaguucaagaagggcgugcagauccccugcaccugcgggaagcaggccaccaaguaccuggugcagcaggagagccccuucgucaugauguccgcccagcccgcgcaguacgagcugaagcacggcaccuucacgugcgccagcgaguacaccggcaacuaccagugcgggcacuacaagcacaucaccuccaaggagacccucuacugcaucgacggcgcccugcugacgaagagcagcgaguacaaggggccgaucaccgacguguucuacaaggagaacuccuacaccaccacgaucaagcccgugaccuacaagcucgacggcgucgugugcaccgagaucgaccccaagcuggacaacuacuacaagaaggacaacagcuacuucaccgagcagcccaucgaccuggugccgaaccagcccuaccccaacgccuccuucgacaacuucaaguucgucugcgacaacaucaaguucgccgacgaccucaaccagcugacgggguacaagaagcccgcgagccgcgagcugaaggugaccuucuucccggaccucaacggcgacguggucgccaucgacuacaagcacuacacccccuccuucaagaagggcgccaagcugcugcacaagcccaucguguggcacgugaacaacgccaccaacaaggcgacguacaagcccaacaccuggugcauccggugccucuggagcaccaagccggucgagaccuccaacagcuucgacgugcugaaguccgaggacgcccaggggauggacaaccuggccugcgaggaccucaagcccgugagcgaggaggucguggagaaccccacgauccagaaggacgugcuggagugcaacgucaagaccaccgagguggugggcgacaucauccugaagcccgccaacaacucccucaagaucaccgaggaggucgggcacacggaccugauggccgcguacguggacaacagcucccugaccaucaagaagccgaacgagcucagccgcgugcugggccugaagacccucgccacccacgggcuggccgccgucaacuccgugcccugggacacgaucgccaacuacgcgaagcccuuccugaacaagguggucagcaccaccaccaacaucgugacgcgcugccucaaccgggugugcaccaacuacaugccguacuucuucacccugcugcuccagcugugcaccuucacccgcuccacgaacagccggaucaaggccuccaugcccaccaccaucgccaagaacaccgucaagagcgugggcaaguucugccuggaggccagcuucaacuaccucaagucccccaacuucagcaagcugaucaacaucaucaucugguuccugcuccuguccgugugccugggcagccucaucuacuccacggccgcgcuggggguccugaugagcaaccucggcaugcccuccuacugcaccggguaccgcgagggcuaccugaacagcaccaacgugaccaucgccacguacugcaccggcuccaucccgugcagcgugugccuguccgggcucgacagccuggacaccuaccccucccuggagaccauccagaucacgaucagcuccuucaagugggaccucaccgccuucggccuggucgccgagugguuccuggccuacauccucuucacccgguucuucuacgugcuggggcuggcggccaucaugcagcucuucuucagcuacuucgccgugcacuucaucuccaacagcuggcugauguggcugaucaucaaccugguccagauggcccccaucuccgcgauggugcgcauguacaucuucuucgccagcuucuacuacguguggaagagcuacguccacgugguggacggcugcaacuccagcaccugcaugaugugcuacaagcggaaccgcgccacgcgggucgagugcaccaccaucgugaacgggguccgccgguccuucuacguguacgccaacggcggcaagggguucugcaagcuccacaacuggaacugcgugaacugcgacaccuucugcgccggcagcacguucaucuccgacgaggucgcgcgcgaccugagccugcaguucaagcggcccaucaacccgaccgaccaguccagcuacaucguggacuccgugaccgucaagaacgggagcauccaccucuacuucgacaaggccggccagaagaccuacgagcgccacucccugagccacuucgugaaccuggacaaccuccgggccaacaacacgaaggggucccugcccaucaacgugaucgucuucgacggcaagagcaagugcgaggaguccagcgccaaguccgccagcguguacuacucccagcugaugugccagcccauccuccugcuggaccaggcgcucgugagcgacgucggcgacagcgccgagguggccgugaagauguucgacgccuacgucaacaccuucuccagcaccuucaacgugcccauggagaagcugaagacccugguggccacggcggaggccgagcucgccaagaacgucucccuggacaacgugcugagcaccuucaucuccgccgcgcgccagggguucguggacagcgacgucgagaccaaggacgugguggagugccucaagcugucccaccagagcgacaucgaggucaccggcgacuccugcaacaacuacaugcugacguacaacaagguggagaacaugaccccgcgggaccucggggccugcaucgacugcagcgcccgccacaucaacgcccagguggccaagucccacaacaucgcgcugaucuggaacgucaaggacuucaugagccuguccgagcagcuccggaagcagauccgcagcgccgccaagaagaacaaccugcccuucaagcugaccugcgccaccacgcgccagguggugaacgucgugaccaccaagaucgcccucaagggcgggugaggacuaguuauaagacugacuagcccgaugggccucccaacgggcccuccuccccuccuugcaccgagauuaauaaaaaaaaaaaaaaaaaaaaaaaaaaaaaaaaaaaaaaaaaaaaaaaaaaaaaaaaaaaaaaaaugcaucccccccccccccccccccccccccccccccaaaggcucuuuucagagccaccagaauu

SEQ ID NO: 21998 - RNA, 6058 nt, Artificial Sequence
  SARS-CoV-2__MT252702.1__non-structural protein 3 (NSP3) mRNA gc
aggagaaagcuuaccauggcccccaccaaggugaccuucggcgacgacacggucaucgaggugcagggguacaagagcgugaacaucaccuucgagcuggacgagcgcaucgacaagguccucaacgagaagugcuccgccuacaccguggagcugggcaccgaggugaacgaguucgcgugcgucguggccgacgccgugaucaagacgcugcagccggucagcgagcuccugaccccccuggggaucgaccucgacgagugguccauggccaccuacuaccuguucgacgagagcggcgaguucaagcuggccucccacauguacugcagcuucuacccccccgacgaggacgaggaggagggggacugcgaggaggaggaguucgagccguccacccaguacgaguacggcacggaggacgacuaccagggcaagccccucgaguucggggcgaccagcgccgcccugcagcccgaggaggagcaggaggaggacuggcuggacgacgacucccagcagaccgugggccagcaggacgggagcgaggacaaccagaccacgaccauccagaccaucguggagguccagccccagcucgagauggagcugaccccgguggugcagacgaucgaggucaacuccuucagcggcuaccugaagcucaccgacaacguguacaucaagaacgccgacaucguggaggaggcgaagaaggucaagcccaccgugguggucaacgccgccaacguguaccugaagcacgggggcggcguggccggggcccugaacaaggcgaccaacaacgccaugcaggucgaguccgacgacuacaucgccacgaacggcccccucaagguggggggcagcugcguccuguccggccacaaccuggccaagcacugccuccacgugguggggcccaacgucaacaagggcgaggacauccagcugcugaagagcgccuacgagaacuucaaccagcacgaggugcuccuggcgccgcugcucuccgccgggaucuucggcgccgaccccauccacagccugcgggugugcgucgacaccgugcgcaccaacguguaccuggccgucuucgacaagaaccucuacgacaagcugguguccagcuuccuggagaugaagagcgagaagcagguggagcagaagaucgccgagauccccaaggaggaggucaagcccuucaucaccgaguccaagccgagcguggagcagcggaagcaggacgacaagaagaucaaggcgugcguggaggaggucacgaccacccucgaggagaccaaguuccugacggagaaccugcuccuguacaucgacaucaacgggaaccugcaccccgacuccgccacccucgugagcgacaucgacaucaccuuccugaagaaggacgcccccuacaucgugggcgacgucgugcaggagggcgugcugaccgccgucgugauccccacgaagaaggccgggggcaccaccgagaugcucgcgaaggcccugcgcaaggugccgaccgacaacuacaucacgaccuaccccgggcagggccugaacggguacaccgucgaggaggccaagaccgugcucaagaagugcaaguccgccuucuacauccugcccagcaucaucuccaacgagaagcaggagauccugggcaccgugagcuggaaccuccgggagaugcuggcgcacgccgaggagacgcgcaagcugaugcccgucugcguggagaccaaggccaucguguccaccauccagcggaaguacaagggcaucaagauccaggagggggucguggacuacggcgcccgcuucuacuucuacaccagcaagacgaccguggccucccugaucaacacccucaacgaccugaacgagacccuggucacgaugccgcucggguacgugacccacggccugaaccuggaggaggcggcccgguacaugcgcagccucaaggugcccgccaccgucuccgugagcucccccgacgccgugaccgccuacaacggguaccugacgagcuccagcaagacccccgaggagcacuucaucgagaccaucucccuggcgggcagcuacaaggacuggagcuacuccggccagagcacccagcucgggaucgaguuccugaagcggggcgacaaguccgucuacuacacgagcaacccgaccaccuuccaccuggacggggaggugaucaccuucgacaaccucaagacgcugcugucccuccgcgaggugcggaccaucaaggucuucaccaccguggacaacaucaaccugcacacgcagguggucgacaugagcaugaccuacggccagcaguucggccccaccuaccuggacggggccgacgugaccaagaucaagccccacaacucccacgagggcaagacguucuacgugcucccgaacgacgacacccugcgcgucgaggccuucgaguacuaccacaccaccgaccccagcuuccuggggcgguacauguccgcccucaaccacacgaagaaguggaaguacccccaggugaacggccugaccagcaucaagugggccgacaacaacugcuaccuggcgaccgcccuccugacccugcagcagaucgagcucaaguucaaccccccggcccugcaggacgccuacuaccgcgcgcgggccggggaggccgccaacuucugcgcccugauccucgcguacugcaacaagacggugggcgagcugggcgacguccgcgagaccauguccuaccuguuccagcacgccaaccucgacagcugcaagcgggugcugaacgucgugugcaagaccugcgggcagcagcagaccacccugaagggcguggaggccgucauguacauggggacgcucuccuacgagcaguucaagaagggcgugcagauccccugcaccugcgggaagcaggccaccaaguaccuggugcagcaggagagccccuucgucaugauguccgcccccccggcgcaguacgagcugaagcacggcaccuucacgugcgccagcgaguacaccggcaacuaccagugcgggcacuacaagcacaucaccuccaaggagacccucuacugcaucgacggcgcccugcugacgaagagcagcgaguacaaggggcccaucaccgacguguucuacaaggagaacuccuacaccaccacgaucaagcccgugaccuacaagcucgacggcgucgugugcaccgagaucgaccccaagcuggacaacuacuacaagaaggacaacagcuacuucaccgagcagccgaucgaccuggugcccaaccagcccuaccccaacgccuccuucgacaacuucaaguucgucugcgacaacaucaaguucgccgacgaccucaaccagcugacgggguacaagaagccggcgagccgcgagcugaaggugaccuucuuccccgaccucaacggcgacguggucgccaucgacuacaagcacuacacccccuccuucaagaagggcgccaagcugcugcacaagcccaucguguggcacgugaacaacgccaccaacaaggcgacguacaagccgaacaccuggugcauccggugccucuggagcaccaagcccgucgagaccuccaacagcuucgacgugcugaaguccgaggacgcccaggggauggacaaccuggccugcgaggaccucaagcccgugagcgaggaggucguggagaaccccacgauccagaaggacgugcuggagugcaacgucaagaccaccgagguggugggcgacaucauccugaagccggccaacaacucccucaagaucaccgaggaggucgggcacacggaccugauggccgcguacguggacaacagcucccugaccaucaagaagcccaacgagcucagccgcgugcugggccugaagacccucgccacccacgggcuggccgccgucaacuccgugcccugggacacgaucgccaacuacgcgaagccguuccugaacaagguggucagcaccaccaccaacaucgugacgcgcugccucaaccgggugugcaccaacuacaugcccuacuucuucacccugcugcuccagcugugcaccuucacccgcuccacgaacagccggaucaaggccuccaugcccaccaccaucgccaagaacaccgucaagagcgugggcaaguucugccuggaggccagcuucaacuaccucaagucccccaacuucagcaagcugaucaacaucaucaucugguuccugcuccuguccgugugccugggcagccucaucuacuccacggccgcgcuggggguccugaugagcaaccucggcaugccguccuacugcaccggguaccgcgagggcuaccuggacagcaccaacgugaccaucgccacguacugcaccggcuccauccccugcagcgugugccuguccgggcucgacagccuggacaccuaccccucccuggagaccauccagaucacgaucagcuccuucaagugggaccucaccgccuucggccuggucgccgagugguuccuggccuacauccucuucacccgguucuucuacgugcuggggcuggcggccaucaugcagcucuucuucagcuacuucgccgugcacuucaucuccaacagcuggcugauguggcugaucaucaaccugguccagauggcccccaucuccgcgauggugcgcauguacaucuucuucgccagcuucuacuacguguggaagagcuacguccacgugguggacggcugcaacuccagcaccugcaugaugugcuacaagcggaaccgcgccacgcgggucgagugcaccaccaucgugaacgggguccgccgguccuucuacguguacgccaacggcggcaagggguucugcaagcuccacaacuggaacugcgugaacugcgacaccuucugcgccggcagcacguucaucuccgacgaggucgcgcgcgaccugagccugcaguucaagcggccgaucaaccccaccgaccaguccagcuacaucguggacuccgugaccgucaagaacgggagcauccaccucuacuucgacaaggccggccagaagaccuacgagcgccacucccugagccacuucgugaaccuggacaaccuccgggccaacaacacgaaggggucccugcccaucaacgugaucgucuucgacggcaagagcaagugcgaggaguccagcgccaaguccgccagcguguacuacucccagcugaugugccagcccauccuccugcuggaccaggcgcucgugagcgacgucggcgacagcgccgagguggccgugaagauguucgacgccuacgucaacaccuucuccagcaccuucaacgugccgauggagaagcugaagacccugguggccacggcggaggccgagcucgccaagaacgucucccuggacaacgugcugagcaccuucaucuccgccgcgcgccagggguucguggacagcgacgucgagaccaaggacgugguggagugccucaagcugucccaccagagcgacaucgaggucaccggcgacuccugcaacaacuacaugcugacguacaacaagguggagaacaugaccccccgggaccucggggccugcaucgacugcagcgcccgccacaucaacgcccagguggccaagucccacaacaucgcgcugaucuggaacgucaaggacuucaugagccuguccgagcagcuccggaagcagauccgcagcgccgccaagaagaacaaccugcccuucaagcugaccugcgccaccacgcgccagguggugaacgucgugaccaccaagaucgcccucaagggcgggugaggacuaguuauaagacugacuagcccgaugggccucccaacgggcccuccuccccuccuugcaccgagauuaauaaaaaaaaaaaaaaaaaaaaaaaaaaaaaaaaaaaaaaaaaaaaaaaaaaaaaaaaaaaaaaaaugcaucccccccccccccccccccccccccccccccaaaggcucuuuucagagccaccagaauu

SEQ ID NO: 21999 - RNA, 6058 nt, Artificial Sequence
  SARS-CoV-2__MT252708.1__non-structural protein 3 (NSP3) mRNA gc
aggagaaagcuuaccauggcccccaccaaggugaccuucggcgacgacacggucaucgaggugcagggguacaagagcgugaacaucaccuucgagcuggacgagcgcaucgacaagguccucaacgagaagugcuccgccuacaccguggagcugggcaccgaggugaacgaguucgcgugcgucguggccgacgccgugaucaagacgcugcagccggucagcgagcuccugaccccccuggggaucgaccucgacgagugguccauggccaccuacuaccuguucgacgagagcggcgaguucaagcuggccucccacauguacugcagcuucuacccccccgacgaggacgaggaggagggggacugcgaggaggaggaguucgagccguccacccaguacgaguacggcacggaggacgacuaccagggcaagccccucgaguucggggcgaccagcgccgcccugcagcccgaggaggagcaggaggaggacuggcuggacgacgacucccagcagaccgugggccagcaggacgggagcgaggacaaccagaccacgaccauccagaccaucguggagguccagccccagcucgagauggagcugaccccgguggugcagacgaucgaggucaacuccuucagcggcuaccugaagcucaccgacaacguguacaucaagaacgccgacaucguggaggaggcgaagaaggucaagcccaccgugguggucaacgccgccaacguguaccugaagcacgggggcggcguggccggggcccugaacaaggcgaccaacaacgccaugcaggucgaguccgacgacuacaucgccacgaacggcccccucaagguggggggcagcugcguccuguccggccacaacuucgccaagcacugccugcacgugguggggcccaacgucaacaagggcgaggacauccagcuccugaagagcgccuacgagaacuucaaccagcacgaggugcugcucgcgccgcugcuguccgccgggaucuucggcgccgaccccauccacagccuccgggugugcgucgacaccgugcgcaccaacguguaccuggccgucuucgacaagaaccuguacgacaagcucguguccagcuuccuggagaugaagagcgagaagcagguggagcagaagaucgccgagauccccaaggaggaggucaagcccuucaucaccgaguccaagccgagcguggagcagcggaagcaggacgacaagaagaucaaggcgugcguggaggaggucacgaccacccuggaggagaccaaguuccucacggagaaccugcugcucuacaucgacaucaacgggaaccugcaccccgacuccgccacccuggugagcgacaucgacaucaccuuccucaagaaggacgcccccuacaucgugggcgacgucgugcaggagggcgugcugaccgccgucgugauccccacgaagaaggccgggggcaccaccgagaugcuggcgaaggcccuccgcaaggugccgaccgacaacuacaucacgaccuaccccgggcagggccugaacggguacaccgucgaggaggccaagaccgugcugaagaagugcaaguccgccuucuacauccuccccagcaucaucuccaacgagaagcaggagauccugggcaccgugagcuggaaccugcgggagaugcucgcgcacgccgaggagacgcgcaagcugaugcccgucugcguggagaccaaggccaucguguccaccauccagcggaaguacaagggcaucaagauccaggagggggucguggacuacggcgcccgcuucuacuucuacaccagcaagacgaccguggccucccugaucaacacccugaacgaccucaacgagacccuggucacgaugccgcugggguacgugacccacggccucaaccuggaggaggcggcccgguacaugcgcagccugaaggugcccgucaccguguccgugagcucccccgacgccgucaccgccuacaacggguaccucacgagcuccagcaagacccccgaggagcacuucaucgagaccaccucccuggccggcagcuacaaggacuggagcuacuccggccagagcacgcagcuggggaucgaguuccucaagcggggcgacaaguccguguacuacaccagcaacccgaccaccuuccaccuggacggggaggugaucacguucgacaaccugaagacccuccugucccugcgcgagguccggaccaucaagguguucaccacgguggacaacaucaaccuccacacccaggucguggacaugagcaugaccuacggccagcaguucggccccaccuaccuggacggggcggacgugacgaagaucaagccccacaacucccacgagggcaagaccuucuacguccugccgaacgacgacacccuccgcguggaggccuucgaguacuaccacaccacggaccccagcuuccuggggcgguacauguccgcccugaaccacaccaagaaguggaaguacccccaggugaacggccucaccagcaucaagugggccgacaacaacugcuaccuggccaccgcgcugcucacgcugcagcagaucgagcugaaguucaaccccccggcccuccaggacgccuacuaccgcgcccgggcgggggaggccgccaacuucugcgcccugauccuggccuacugcaacaagaccgucggcgagcucggcgacgugcgcgagaccauguccuaccuguuccagcacgcgaaccuggacagcugcaagcggguccucaacguggugugcaagaccugcgggcagcagcagaccacgcugaagggcgucgaggccgugauguacauggggacccuguccuacgagcaguucaagaagggcgugcagauccccugcaccugcgggaagcaggccaccaaguaccucguccagcaggagagccccuucgugaugauguccgcccccccggcccaguacgagcugaagcacggcacguucaccugcgcgagcgaguacaccggcaacuaccagugcgggcacuacaagcacaucaccuccaaggagacgcuguacugcaucgacggcgcccuccugaccaagagcagcgaguacaaggggcccaucaccgacguguucuacaaggagaacuccuacaccacgaccaucaagcccgucaccuacaagcuggacggcguggugugcaccgagaucgaccccaagcucgacaacuacuacaagaaggacaacagcuacuucacggagcagccgaucgaccugguccccaaccagcccuaccccaacgccuccuucgacaacuucaaguucgugugcgacaacaucaaguucgccgacgaccugaaccagcucaccggguacaagaagccggccagccgcgagcugaaggugaccuucuuccccgaccugaacggcgacgucguggcgaucgacuacaagcacuacacccccuccuucaagaagggcgccaagcuccugcacaagcccaucguguggcacgucaacaacgccacgaacaaggccaccuacaagccgaacaccuggugcauccggugccuguggagcaccaagcccguggagacguccaacagcuucgacgugcucaaguccgaggacgcgcaggggauggacaaccuggccugcgaggaccugaagcccgucagcgaggaggugguggagaaccccaccauccagaaggacguccucgagugcaacgugaagaccaccgagguggucggcgacaucauccugaagccggccaacaacucccugaagaucacggaggagguggggcacaccgaccucauggccgccuacguggacaacagcucccugaccaucaagaagcccaacgagcugagccgcguccucggccugaagacccuggcgacgcacgggcucgccgccgugaacuccgugcccugggacaccaucgccaacuacgccaagccguuccugaacaaggucgugagcaccaccacgaacaucgugacccgcugccugaaccgggucugcaccaacuacaugcccuacuucuucacccuccugcugcagcucugcaccuucacgcgcuccaccaacagccggaucaaggcguccaugcccaccaccaucgccaagaacacggugaagagcgugggcaaguucugccuggaggccagcuucaacuaccugaagucccccaacuucagcaagcucaucaacaucaucaucugguuccugcugcucuccgucugccugggcagccugaucuacuccaccgccgcccucggggugcugaugagcaaccugggcaugccguccuacugcaccggguaccgcgagggcuaccucaacagcaccaacgugacgaucgcgaccuacugcaccggcuccauccccugcagcgucugccuguccgggcuggacagccucgacaccuaccccucccuggagacgauccagaucaccaucagcuccuucaagugggaccugaccgccuucggccucguggccgagugguuccuggccuacauccuguucacccgguucuucuacgugcucgggcuggccgcgaucaugcagcuguucuucagcuacuucgccguccacuucaucuccaacagcuggcucauguggcugaucaucaaccuggugcagauggcccccaucuccgccauggugcgcauguacaucuucuucgcgagcuucuacuacgucuggaagagcuacgugcacguggucgacggcugcaacuccagcacgugcaugaugugcuacaagcggaaccgcgccacccggguggagugcaccaccaucgucaacggggugcgccgguccuucuacguguacgccaacggcggcaagggguucugcaagcugcacaacuggaacugcgucaacugcgacacguucugcgccggcagcaccuucaucuccgacgagguggcccgcgaccucagccugcaguucaagcggccgaucaaccccaccgaccaguccagcuacaucguggacuccgucaccgugaagaacgggagcauccaccuguacuucgacaaggcgggccagaagacguacgagcgccacucccucagccacuucgugaaccuggacaaccugcgggccaacaacaccaaggggucccuccccaucaacgucaucguguucgacggcaagagcaagugcgaggaguccagcgccaaguccgccagcguguacuacucccagcugaugugccagcccauccugcuccuggaccaggcccuggucagcgacgugggcgacagcgcggagguggccgucaagauguucgacgccuacgugaacaccuucuccagcaccuucaacgugccgauggagaagcucaagacgcuggucgccaccgccgaggcggagcuggccaagaacgugucccucgacaacgugcugagcaccuucaucuccgccgcccgccagggguucgucgacagcgacguggagaccaaggacguggucgagugccugaagcucucccaccagagcgacaucgaggugacgggcgacuccugcaacaacuacaugcugaccuacaacaagguggagaacaugaccccccgggaccugggggcgugcaucgacugcagcgcccgccacaucaacgcccaggucgccaagucccacaacaucgcccucaucuggaacgugaaggacuucaugagccuguccgagcagcugcggaagcagauccgcagcgcggccaagaagaacaaccuccccuucaagcugaccugcgccacgacccgccagguggucaacguggugaccaccaagaucgcccugaagggcgggugaggacuaguuauaagacugacuagcccgaugggccucccaacgggcccuccuccccuccuugcaccgagauuaauaaaaaaaaaaaaaaaaaaaaaaaaaaaaaaaaaaaaaaaaaaaaaaaaaaaaaaaaaaaaaaaaugcaucccccccccccccccccccccccccccccccaaaggcucuuuucagagccaccagaauu

SEQ ID NO: 22000 - RNA, 6058 nt, Artificial Sequence
  SARS-CoV-2__MT252749.1__non-structural protein 3 (NSP3) mRNA gc
aggagaaagcuuaccauggcccccaccaaggugaccuucggcgacgacacggucaucgaggugcagggguacaagagcgugaacaucaccuucgagcuggacgagcgcaucgacaagguccucaacgagaagugcuccgccuacaccguggagcugggcaccgaggugaacgaguucgcgugcgucguggccgacgccgugaucaagacgcugcagccggucagcgagcuccugaccccccuggggaucgaccucgacgagugguccauggccaccuacuaccuguucgacgagagcggcgaguucaagcuggccucccacauguacugcagcuucuacccccccgacgaggacgaggaggagggggacugcgaggaggaggaguucgagccguccacccaguacgaguacggcacggaggacgacuaccagggcaagccccucgaguucggggcgaccagcgccgcccugcagcccgaggaggagcaggaggaggacuggcuggacgacgacucccagcagaccgugggccagcaggacgggagcgaggacaaccagaccacgaccauccagaccaucguggagguccagccccagcucgagauggagcugaccccgguggugcagacgaucgaggucaacuccuucagcggcuaccugaagcucaccgacaacguguacaucaagaacgccgacaucguggaggaggcgaagaaggucaagcccaccgugguggucaacgccgccaacguguaccugaagcacgggggcggcguggccggggcccugaacaaggcgaccaacaacgccaugcaggucgaguccgacgacuacaucgccacgaacggcccccucaagguggggggcagcugcguccuguccggccacaaccuggccaagcacugccuccacgugguggggcccaacgucaacgagggcgaggacauccagcugcugaagagcgccuacgagaacuucaaccagcacgaggugcuccuggcgccgcugcucuccgccgggaucuucggcgccgaccccauccacagccugcgggugugcgucgacaccgugcgcaccaacguguaccuggccgucuucgacaagaaccucuacgacaagcugguguccagcuuccuggagaugaagagcgagaagcagguggagcagaagaucgccgagauccccaaggaggaggucaagcccuucaucaccgaguccaagccgagcguggagcagcggaagcaggacgacaagaagaucaaggcgugcguggaggaggucacgaccacccucgaggagaccaaguuccugacggagaaccugcuccuguacaucgacaucaacgggaaccugcaccccgacuccgccacccucgugagcgacaucgacaucaccuuccugaagaaggacgcccccuacaucgugggcgacgucgugcaggagggcgugcugaccgccgucgugauccccacgaagaaggccgggggcaccaccgagaugcucgcgaaggcccugcgcaaggugccgaccgacaacuacaucacgaccuaccccgggcagggccugaacggguacaccgucgaggaggccaagaccgugcucaagaagugcaaguccgccuucuacauccugcccagcaucaucuccaacgagaagcaggagauccugggcaccgugagcuggaaccuccgggagaugcuggcgcacgccgaggagacgcgcaagcugaugcccgucugcguggagaccaaggccaucguguccaccauccagcggaaguacaagggcaucaagauccaggagggggucguggacuacggcgcccgcuucuacuucuacaccagcaagacgaccguggccucccugaucaacacccucaacgaccugaacgagacccuggucacgaugccgcucggguacgugacccacggccugaaccuggaggaggcggcccgguacaugcgcagccucaaggugcccgccaccgucuccgugagcucccccgacgccgugaccgccuacaacggguaccugacgagcuccagcaagacccccgaggagcacuucaucgagaccaucucccuggcgggcagcuacaaggacuggagcuacuccggccagagcacccagcucgggaucgaguuccugaagcggggcgacaaguccgucuacuacacgagcaacccgaccaccuuccaccuggacggggaggugaucaccuucgacaaccucaagacgcugcugucccuccgcgaggugcggaccaucaaggucuucaccaccguggacaacaucaaccugcacacgcagguggucgacaugagcaugaccuacggccagcaguucggccccaccuaccuggacggggccgacgugaccaagaucaagccccacaacucccacgagggcaagacguucuacgugcucccgaacgacgacacccugcgcgucgaggccuucgaguacuaccacaccaccgaccccagcuuccuggggcgguacauguccgcccucaaccacacgaagaaguggaaguacccccaggugaacggccugaccagcaucaagugggccgacaacaacugcuaccuggcgaccgcccuccugacccugcagcagaucgagcucaaguucaaccccccggcccugcaggacgccuacuaccgcgcgcgggccggggaggccgccaacuucugcgcccugauccucgcguacugcaacaagacggugggcgagcugggcgacguccgcgagaccauguccuaccuguuccagcacgccaaccucgacagcugcaagcgggugcugaacgucgugugcaagaccugcgggcagcagcagaccacccugaagggcguggaggccgucauguacauggggacgcucuccuacgagcaguucaagaagggcgugcagauccccugcaccugcgggaagcaggccaccaaguaccuggugcagcaggagagccccuucgucaugauguccgcccccccggcgcaguacgagcugaagcacggcaccuucacgugcgccagcgaguacaccggcaacuaccagugcgggcacuacaagcacaucaccuccaaggagacccucuacugcaucgacggcgcccugcugacgaagagcagcgaguacaaggggcccaucaccgacguguucuacaaggagaacuccuacaccaccacgaucaagcccgugaccuacaagcucgacggcgucgugugcaccgagaucgaccccaagcuggacaacuacuacaagaaggacaacagcuacuucaccgagcagccgaucgaccuggugcccaaccagcccuaccccaacgccuccuucgacaacuucaaguucgucugcgacaacaucaaguucgccgacgaccucaaccagcugacgggguacaagaagccggcgagccgcgagcugaaggugaccuucuuccccgaccucaacggcgacguggucgccaucgacuacaagcacuacacccccuccuucaagaagggcgccaagcugcugcacaagcccaucguguggcacgugaacaacgccaccaacaaggcgacguacaagccgaacaccuggugcauccggugccucuggagcaccaagcccgucgagaccuccaacagcuucgacgugcugaaguccgaggacgcccaggggauggacaaccuggccugcgaggaccucaagcccgugagcgaggaggucguggagaaccccacgauccagaaggacgugcuggagugcaacgucaagaccaccgagguggugggcgacaucauccugaagccggccaacaacucccucaagaucaccgaggaggucgggcacacggaccugauggccgcguacguggacaacagcucccugaccaucaagaagcccaacgagcucagccgcgugcugggccugaagacccucgccacccacgggcuggccgccgucaacuccgugcccugggacacgaucgccaacuacgcgaagccguuccugaacaagguggucagcaccaccaccaacaucgugacgcgcugccucaaccgggugugcaccaacuacaugcccuacuucuucacccugcugcuccagcugugcaccuucacccgcuccacgaacagccggaucaaggccuccaugcccaccaccaucgccaagaacaccgucaagagcgugggcaaguucugccuggaggccagcuucaacuaccucaagucccccaacuucagcaagcugaucaacaucaucaucugguuccugcuccuguccgugugccugggcagccucaucuacuccacggccgcgcuggggguccugaugagcaaccucggcaugccguccuacugcaccggguaccgcgagggcuaccugaacagcaccaacgugaccaucgccacguacugcaccggcuccauccccugcagcgugugccuguccgggcucgacagccuggacaccuaccccucccuggagaccauccagaucacgaucagcuccuucaagugggaccucaccgccuucggccuggucgccgagugguuccuggccuacauccucuucacccgguucuucuacgugcuggggcuggcggccaucaugcagcucuucuucagcuacuucgccgugcacuucaucuccaacagcuggcugauguggcugaucaucaaccugguccagauggcccccaucuccgcgauggugcgcauguacaucuucuucgccagcuucuacuacguguggaagagcuacguccacgugguggacggcugcaacuccagcaccugcaugaugugcuacaagcggaaccgcgccacgcgggucgagugcaccaccaucgugaacgggguccgccgguccuucuacguguacgccaacggcggcaagggguucugcaagcuccacaacuggaacugcgugaacugcgacaccuucugcgccggcagcacguucaucuccgacgaggucgcgcgcgaccugagccugcaguucaagcggccgaucaaccccaccgaccaguccagcuacaucguggacuccgugaccgucaagaacgggagcauccaccucuacuucgacaaggccggccagaagaccuacgagcgccacucccugagccacuucgugaaccuggacaaccuccgggccaacaacacgaaggggucccugcccaucaacgugaucgucuucgacggcaagagcaagugcgaggaguccagcgccaaguccgccagcguguacuacucccagcugaugugccagcccauccuccugcuggaccaggcgcucgugagcgacgucggcgacagcgccgagguggccgugaagauguucgacgccuacgucaacaccuucuccagcaccuucaacgugccgauggagaagcugaagacccugguggccacggcggaggccgagcucgccaagaacgucucccuggacaacgugcugagcaccuucaucuccgccgcgcgccagggguucguggacagcgacgucgagaccaaggacgugguggagugccucaagcugucccaccagagcgacaucgaggucaccggcgacuccugcaacaacuacaugcugacguacaacaagguggagaacaugaccccccgggaccucggggccugcaucgacugcagcgcccgccacaucaacgcccagguggccaagucccacaacaucgcgcugaucuggaacgucaaggacuucaugagccuguccgagcagcuccggaagcagauccgcagcgccgccaagaagaacaaccugcccuucaagcugaccugcgccaccacgcgccagguggugaacgucgugaccaccaagaucgcccucaagggcgggugaggacuaguuauaagacugacuagcccgaugggccucccaacgggcccuccuccccuccuugcaccgagauuaauaaaaaaaaaaaaaaaaaaaaaaaaaaaaaaaaaaaaaaaaaaaaaaaaaaaaaaaaaaaaaaaaugcaucccccccccccccccccccccccccccccccaaaggcucuuuucagagccaccagaauu

SEQ ID NO: 22001 - RNA, 6058 nt, Artificial Sequence
  SARS-CoV-2__MT371049.1__non-structural protein 3 (NSP3) mRNA gc
aggagaaagcuuaccauggcccccaccaaggugaccuucggcgacgacacggucaucgaggugcagggguacaagagcgugaacaucaccuucgagcuggacgagcgcaucgacaagguccucaacgagaagugcuccgccuacaccguggagcugggcaccgaggugaacgaguucgcgugcgucguggccgacgccgugaucaagacgcugcagccggucagcgagcuccugaccccccuggggaucgaccucgacgagugguccauggccaccuacuaccuguucgacgagagcggcgaguucaagcuggccucccacauguacugcagcuucuacccccccgacgaggacgaggaggagggggacugcgaggaggaggaguucgagccguccacccaguacgaguacggcacggaggacgacuaccagggcaagccccucgaguucggggcgaccagcgccgcccugcagcccgaggaggagcaggaggaggacuggcuggacgacgacucccagcagaccgugggccagcaggacgggagcgaggacaaccagaccacgaccauccagaccaucguggagguccagccccagcucgagauggagcugaccccgguggugcagacgaucgaggucaacuccuucagcggcuaccugaagcucaccgacaacguguacaucaagaacgccgacaucguggaggaggcgaagaaggucaagcccaccgugguggucaacgccgccaacguguaccugaagcacgggggcggcguggccggggcccugaacaaggcgaccaacaacgccaugcaggucgaguccgacgacuacaucgccacgaacggcccccucaagguggggggcagcugcguccuguccggccacaaccuggccaagcacugccuccacgugguggggcccaacgucaacaagggcgaggacauccagcugcugaagagcgccuacgagaacuucaaccagcacgaggugcuccuggcgccgcugcucuccgccgggaucuucggcgccgaccccauccacagccugcgggugugcgucgacaccgugcgcaccaacguguaccuggccgucuucgacaagaaccucuacgacaagcugguguccagcuuccuggagaugaagagcgagaagcagguggagcagaagaucgccgagauccccaaggaggaggucaagcccuucaucaccgaguccaagccgagcguggagcagcggaagcaggacgacaagaagaucaaggcgugcguggaggaggucacgaccacccucgaggagaccaaguuccugacggagaaccugcuccuguacaucgacaucaacgggaaccugcaccccgacuccgccacccucgugagcgacaucgacaucaccuuccugaagaaggacgcccccuacaucgugggcgacgucgugcaggagggcgugcugaccgccgucgugauccccacgaagaaggccgggggcaccaccgagauccucgcgaaggcccugcgcaaggugccgaccgacaacuacaucacgaccuaccccgggcagggccugaacggguacaccgucgaggaggccaagaccgugcucaagaagugcaaguccgccuucuacauccugcccagcaucaucuccaacgagaagcaggagauccugggcaccgugagcuggaaccuccgggagaugcuggcgcacgccgaggagacgcgcaagcugaugcccgucugcguggagaccaaggccaucguguccaccauccagcggaaguacaagggcaucaagauccaggagggggucguggacuacggcgcccgcuucuacuucuacaccagcaagacgaccguggccucccugaucaacacccucaacgaccugaacgagacccuggucacgaugccgcucggguacgugacccacggccugaaccuggaggaggcggcccgguacaugcgcagccucaaggugcccgccaccgucuccgugagcucccccgacgccgugaccgccuacaacggguaccugacgagcuccagcaagacccccgaggagcacuucaucgagaccaucucccuggcgggcagcuacaaggacuggagcuacuccggccagagcacccagcucgggaucgaguuccugaagcggggcgacaaguccgucuacuacacgagcaacccgaccaccuuccaccuggacggggaggugaucaccuucgacaaccucaagacgcugcugucccuccgcgaggugcggaccaucaaggucuucaccaccguggacaacaucaaccugcacacgcagguggucgacaugagcaugaccuacggccagcaguucggccccaccuaccuggacggggccgacgugaccaagaucaagccccacaacucccacgagggcaagacguucuacgugcucccgaacgacgacacccugcgcgucgaggccuucgaguacuaccacaccaccgaccccagcuuccuggggcgguacauguccgcccucaaccacacgaagaaguggaaguacccccaggugaacggccugaccagcaucaagugggccgacaacaacugcuaccuggcgaccgcccuccugacccugcagcagaucgagcucaaguucaaccccccggcccugcaggacgccuacuaccgcgcgcgggccggggaggccgccaacuucugcgcccugauccucgcguacugcaacaagacggugggcgagcugggcgacguccgcgagaccauguccuaccuguuccagcacgccaaccucgacagcugcaagcgggugcugaacgucgugugcaagaccugcgggcagcagcagaccacccugaagggcguggaggccgucauguacauggggacgcucuccuacgagcaguucaagaagggcgugcagauccccugcaccugcgggaagcaggccaccaaguaccuggugcagcaggagagccccuucgucaugauguccgcccccccggcgcaguacgagcugaagcacggcaccuucacgugcgccagcgaguacaccggcaacuaccagugcgggcacuacaagcacaucaccuccaaggagacccucuacugcaucgacggcgcccugcugacgaagagcagcgaguacaaggggcccaucaccgacguguucuacaaggagaacuccuacaccaccacgaucaagcccgugaccuacaagcucgacggcgucgugugcaccgagaucgaccccaagcuggacaacuacuacaagaaggacaacagcuacuucaccgagcagccgaucgaccuggugcccaaccagcccuaccccaacgccuccuucgacaacuucaaguucgucugcgacaacaucaaguucgccgacgaccucaaccagcugacgggguacaagaagccggcgagccgcgagcugaaggugaccuucuuccccgaccucaacggcgacguggucgccaucgacuacaagcacuacacccccuccuucaagaagggcgccaagcugcugcacaagcccaucguguggcacgugaacaacgccaccaacaaggcgacguacaagccgaacaccuggugcauccggugccucuggagcaccaagcccgucgagaccuccaacagcuucgacgugcugaaguccgaggacgcccaggggauggacaaccuggccugcgaggaccucaagcccgugagcgaggaggucguggagaaccccacgauccagaaggacgugcuggagugcaacgucaagaccaccgagguggugggcgacaucauccugaagccggccaacaacucccucaagaucaccgaggaggucgggcacacggaccugauggccgcguacguggacaacagcucccugaccaucaagaagcccaacgagcucagccgcgugcugggccugaagacccucgccacccacgggcuggccgccgucaacuccgugcccugggacacgaucgccaacuacgcgaagccguuccugaacaagguggucagcaccaccaccaacaucgugacgcgcugccucaaccgggugugcaccaacuacaugcccuacuucuucacccugcugcuccagcugugcaccuucacccgcuccacgaacagccggaucaaggccuccaugcccaccaccaucgccaagaacaccgucaagagcgugggcaaguucugccuggaggccagcuucaacuaccucaagucccccaacuucagcaagcugaucaacaucaucaucugguuccugcuccuguccgugugccugggcagccucaucuacuccacggccgcgcuggggguccugaugagcaaccucggcaugccguccuacugcaccggguaccgcgagggcuaccugaacagcaccaacgugaccaucgccacguacugcaccggcuccauccccugcagcgugugccuguccgggcucgacagccuggacaccuaccccucccuggagaccauccagaucacgaucagcuccuucaagugggaccucaccgccuucggccuggucgccgagugguuccuggccuacauccucuucacccgguucuucuacgugcuggggcuggcggccaucaugcagcucuucuucagcuacuucgccgugcacuucaucuccaacagcuggcugauguggcugaucaucaaccugguccagauggcccccaucuccgcgauggugcgcauguacaucuucuucgccagcuucuacuacguguggaagagcuacguccacgugguggacggcugcaacuccagcaccugcaugaugugcuacaagcggaaccgcgccacgcgggucgagugcaccaccaucgugaacgggguccgccgguccuucuacguguacgccaacggcggcaagggguucugcaagcuccacaacuggaacugcgugaacugcgacaccuucugcgccggcagcacguucaucuccgacgaggucgcgcgcgaccugagccugcaguucaagcggccgaucaaccccaccgaccaguccagcuacaucguggacuccgugaccgucaagaacgggagcauccaccucuacuucgacaaggccggccagaagaccuacgagcgccacucccugagccacuucgugaaccuggacaaccuccgggccaacaacacgaaggggucccugcccaucaacgugaucgucuucgacggcaagagcaagugcgaggaguccagcgccaaguccgccagcguguacuacucccagcugaugugccagcccauccuccugcuggaccaggcgcucgugagcgacgucggcgacagcgccgagguggccgugaagauguucgacgccuacgucaacaccuucuccagcaccuucaacgugccgauggagaagcugaagacccugguggccacggcggaggccgagcucgccaagaacgucucccuggacaacgugcugagcaccuucaucuccgccgcgcgccagggguucguggacagcgacgucgagaccaaggacgugguggagugccucaagcugucccaccagagcgacaucgaggucaccggcgacuccugcaacaacuacaugcugacguacaacaagguggagaacaugaccccccgggaccucggggccugcaucgacugcagcgcccgccacaucaacgcccagguggccaagucccacaacaucgcgcugaucuggaacgucaaggacuucaugagccuguccgagcagcuccggaagcagauccgcagcgccgccaagaagaacaaccugcccuucaagcugaccugcgccaccacgcgccagguggugaacgucgugaccaccaagaucgcccucaagggcgggugaggacuaguuauaagacugacuagcccgaugggccucccaacgggcccuccuccccuccuugcaccgagauuaauaaaaaaaaaaaaaaaaaaaaaaaaaaaaaaaaaaaaaaaaaaaaaaaaaaaaaaaaaaaaaaaaugcaucccccccccccccccccccccccccccccccaaaggcucuuuucagagccaccagaauu

SEQ ID NO: 22002 - RNA, 6058 nt, Artificial Sequence
  SARS-CoV-2__MT370859.1__non-structural protein 3 (NSP3) mRNA gc
aggagaaagcuuaccauggcccccaccaaggugaccuucggcgacgacacggucaucgaggugcagggguacaagagcgugaacaucaccuucgagcuggacgagcgcaucgacaagguccucaacgagaagugcuccgccuacaccguggagcugggcaccgaggugaacgaguucgcgugcgucguggccgacgccgugaucaagacgcugcagccggucagcgagcuccugaccccccuggggaucgaccucgacgagugguccauggccaccuacuaccuguucgacgagagcggcgaguucaagcuggccucccacauguacugcagcuucuacccccccgacgaggacgaggaggagggggacugcgaggaggaggaguucgagccguccacccaguacgaguacggcacggaggacgacuaccagggcaagccccucgaguucggggcgaccagcgccgcccugcagcccgaggaggagcaggaggaggacuggcuggacgacgacucccagcagaccgugggccagcaggacgggagcgaggacaaccagaccacgaccauccagaccaucguggagguccagccccagcucgagauggagcugaccccgguggugcagacgaucgaggucaacuccuucagcggcuaccugaagcucaccgacaacguguacaucaagaacgccgacaucguggaggaggcgaagaaggucaagcccaccgugguggucaacgccgccaacguguaccugaagcacgggggcggcguggccggggcccugaacaaggcgaccaacaacgccaugcaggucgaguccgacgacuacaucgccacgaacggcccccucaagguggggggcagcugcguccuguccggccacaaccuggccaagcacugccuccacgugguggggcccaacgucaacaagggcgaggacauccagcugcugaagagcgccuacgagaacuucaaccagcacgaggugcuccuggcgccgcugcucuccgccgggaucuucggcgccgaccccauccacagccugcgggugugcgucgacaccgugcgcaccaacguguaccuggccgucuucgacaagaaccucuacgacaagcugguguccagcuuccuggagaugaagagcgagaagcagguggagcagaagaucgccgagauccccaaggaggaggucaagcccuucaucaccgaguccaagccgagcguggagcagcggaagcaggacgacaagaagaucaaggcgugcguggaggaggucacgaccacccucgaggagaccaaguuccugacggagaaccugcuccuguacaucgacaucaacgggaaccugcaccccgacuccgccacccucgugagcgacaucgacaucaccuuccugaagaaggacgcccccuacaucgugggcgacgucgugcaggagggcgugcugaccgccgucgugauccccacgaagaaggccgggggcaccaccgagaugcucgcgaaggcccugcgcaaggugccgaccgacaacuacaucacgaccuaccccgggcagggccugaacggguacaccgucgaggaggccaagaccgugcucaagaagugcaaguccgccuucuacauccugcccagcaucaucuccaacgagaagcaggagauccugggcaccgugagcuggaaccuccgggagaugcuggcgcacgccgaggagacgcgcaagcugaugcccgucugcguggagaccaaggccaucguguccaccauccagcggaaguacaagggcaucaagauccaggagggggucguggacuacggcgcccgcuucuacuucuacaccagcaagacgaccguggccucccugaucaacacccucaacgaccugaacgagacccuggucacgaugccgcucggguacgugacccacggccugaaccuggaggaggcggcccgguacaugcgcagccucaaggugcccgccaccgucuccgugagcucccccgacgccgugaccgccuacaacggguaccugacgagcuccagcaagacccccgaggagcacuucaucgagaccaucucccuggcgggcagcuacaaggacuggagcuacuccggccagagcacccagcucgggaucgaguuccugaagcggggcgacaaguccgucuacuacacgagcaacccgaccaccuuccaccuggacggggaggugaucaccuucgacaaccucaagacgcugcugucccuccgcgaggugcggaccaucaaggucuucaccaccguggacaacaucaaccugcacacgcagguggucgacaugagcaugaccuacggccagcaguucggccccaccuaccuggacggggccgacgugaccaagaucaagccccacaacucccacgagggcaagacguucuacgugcucccgaacgacgacacccugcgcgucgaggccuucgaguacuaccacaccaccgaccccagcuuccuggggcgguacauguccgcccucaaccacacgaagaaguggaaguacccccaggugaacggccugaccagcaucaagugggccgacaacaacugcuaccuggcgaccgcccuccugacccugcagcagaucgagcucaaguucaaccccccggcccugcaggacgccuacuaccgcgcgcgggccggggaggccgccaacuucugcgcccugauccucgcguacugcaacaagacggugggcgagcugggcgacguccgcgagaccauguccuaccuguuccagcacgccaaccucgacagcugcaagcgggugcugaacgucgugugcaagaccugcgggcagcagcagaccacccugaagggcguggaggccgucauguacauggggacgcucuccuacgagcaguucaagaagggcgugcagauccccugcaccugcgggaagcaggccaccaaguaccuggugcagcaggagagccccuucgucaugauguccgcccccccggcgcaguacgagcugaagcacggcaccuucacgugcgccagcgaguacaccggcaacuaccagugcgggcacuacaagcacaucaccuccaaggagacccucuacugcaucgacggcgcccugcugacgaagagcagcgaguacaaggggcccaucaccgacguguucuacaaggagaacuccuacaccaccacgaucaagcccgugaccuacaagcucgacggcgucgugugcaccgagaucgaccccaagcuggacaacuacuacaagaaggacaacagcuacuucaccgagcagccgaucgaccuggugcccaaccagcccuaccccaacgccuccuucgacaacuucaaguucgucugcgacaacaucaaguucgccgacgaccucaaccagcugacgggguacaagaagccggcgagccgcgagcugaaggugaccuucuuccccgaccucaacggcgacguggucgccaucgacuacaagcacuacacccccuccuucaagaagggcgccaagcugcugcacaagcccaucguguggcacgugaacaacgccaccaacaaggcgacguacaagccgaacaccuggugcauccggugccucuggagcaccaagcccgucgagaccuccaacagcuucgacgugcugaaguccgaggacgcccaggggauggacaaccuggccugcgaggaccucaagcccgugagcgaggaggucguggagaaccccacgauccagaaggacgugcuggagugcaacgucaagaccaccgagguggugggcgacaucauccugaagccggccaacaacucccucaagaucaccgaggaggucgggcacacggaccugauggccgcguacguggacaacagcucccugaccaucaagaagcccaacgagcucagccgcgugcugggccugaagacccucgccacccacgggcuggccgccgucaacuccgugcccugggacacgaucgccaacuacgcgaagccguuccugaacaagguggucagcaccaccaccaacaucgugacgcgcugccucaaccgggugugcaccaacuacaugcccuacuucuucacccugcugcuccagcugugcaccuucacccgcuccacgaacagccggaucaaggccuccaugcccaccaccaucgccaagaacaccgucaagagcgugggcaaguucugccuggaggccagcuucaacuaccucaagucccccaacuucagcaagcugaucaacaucaucaucugguuccugcuccuguccgugugccugggcagccucaucuacuccacggccgcgcuggggguccugaugagcaaccucggcaugccguccuacugcaccggguaccgcgagggcuaccugaacagcaccaacgugaccaucgccacguacugcaccggcuccauccccugcagcgugugccuguccgggcucgacagccuggacaccuaccccucccuggagaccauccagaucacgaucagcuccuucaagugggaccucaccgccuucggccuggucgccgagugguuccuggccuacauccucuucacccgguucuucuacgugcuggggcuggcggccaucaugcagcucuucuucagcuacuucgccgugcacuucaucuccaacagcuggcugauguggcugaucaucaaccugguccagauggcccccaucuccgcgauggugcgcauguacaucuucuucgccagcuucuacuacguguggaagagcuacguccacgugguggacggcugcaacuccagcaccugcaugaugugcuacaagcggaaccgcgccacgcgggucgagugcaccaccaucgugaacgggguccgccgguccuucuacguguacgccaacggcggcaagggguucugcaagcuccacaacuggaacugcgugaacugcgacaccuucugcgccggcagcacguucaucuccgacgaggucgcgcgcgaccugagccugcaguucaagcggccgaucaaccccaccgaccaguccagcuacaucguggacuccgugaccgucaagaacgggagcauccgccucuacuucgacaaggccggccagaagaccuacgagcggcacucccugagccacuucgugaaccuggacaaccuccgcgccaacaacacgaaggggucccugcccaucaacgugaucgucuucgacggcaagagcaagugcgaggaguccagcgccaaguccgccagcguguacuacucccagcugaugugccagcccauccuccugcuggaccaggcgcucgugagcgacgucggcgacagcgccgagguggccgugaagauguucgacgccuacgucaacaccuucuccagcaccuucaacgugccgauggagaagcugaagacccugguggccacggcggaggccgagcucgccaagaacgucucccuggacaacgugcugagcaccuucaucuccgccgcgcggcagggguucguggacagcgacgucgagaccaaggacgugguggagugccucaagcugucccaccagagcgacaucgaggucaccggcgacuccugcaacaacuacaugcugacguacaacaagguggagaacaugaccccccgcgaccucggggccugcaucgacugcagcgcccggcacaucaacgcccagguggccaagucccacaacaucgcgcugaucuggaacgucaaggacuucaugagccuguccgagcagcuccgcaagcagauccgcagcgccgccaagaagaacaaccugcccuucaagcugaccugcgccaccacgcggcagguggugaacgucgugaccaccaagaucgcccucaagggcgggugaggacuaguuauaagacugacuagcccgaugggccucccaacgggcccuccuccccuccuugcaccgagauuaauaaaaaaaaaaaaaaaaaaaaaaaaaaaaaaaaaaaaaaaaaaaaaaaaaaaaaaaaaaaaaaaaugcaucccccccccccccccccccccccccccccccaaaggcucuuuucagagccaccagaauu

SEQ ID NO: 22003 - RNA, 6058 nt, Artificial Sequence
  SARS-CoV-2__MT370862.1__non-structural protein 3 (NSP3) mRNA gc
aggagaaagcuuaccauggcccccaccaaggugaccuucggcgacgacacggucaucgaggugcagggguacaagagcgugaacaucaccuucgagcuggacgagcgcaucgacaagguccucaacgagaagugcuccgccuacaccguggagcugggcaccgaggugaacgaguucgcgugcgucguggccgacgccgugaucaagacgcugcagccggucagcgagcuccugaccccccuggggaucgaccucgacgagugguccauggccaccuacuaccuguucgacgagagcggcgaguucaagcuggccucccacauguacugcagcuucuacccccccgacgaggacgaggaggagggggacugcgaggaggaggaguucgagccguccacccaguacgaguacggcacggaggacgacuaccagggcaagccccucgaguucggggcgaccagcgccgcccugcagcccgaggaggagcaggaggaggacuggcuggacgacgacucccagcagaccgugggccagcaggacgggagcgaggacaaccagaccacgaccauccagaccaucguggagguccagccccagcucgagauggagcugaccccgguggugcagacgaucgaggucaacuccuucagcggcuaccugaagcucaccgacaacguguacaucaagaacgccgacaucguggaggaggcgaagaaggucaagcccaccgugguggucaacgccgccaacguguaccugaagcacgggggcggcguggccggggcccugaacaaggcgaccaacaacgccaugcaggucgaguccgacgacuacaucgccacgaacggcccccucaagguggggggcagcugcguccuguccggccacaaccuggccaagcacugccuccacgugguggggcccaacgucaacaagggcgaggacauccagcugcugaagagcgccuacgagaacuucaaccagcacgaggugcuccuggcgccgcugcucuccgccgggaucuucggcgccgaccccauccacagccugcgggugugcgucgacaccgugcgcaccaacguguaccuggccgucuucgacaagaaccucuacgacaagcugguguccagcuuccuggagaugaagagcgagaagcagguggagcagaagaucgccgagauccccaaggaggaggucaagcccuucaucaccgaguccaagccgagcguggagcagcggaagcaggacgacaagaagaucaaggcgugcguggaggaggucacgaccacccucgaggagaccaaguuccugacggagaaccugcuccuguacaucgacaucaacgggaaccugcaccccgacuccgccacccucgugagcgacaucgacaucaccuuccugaagaaggacgcccccuacaucgugggcgacgucgugcaggagggcgugcugaccgccgucgugauccccacgaagaaggccgggggcaccaccgagaugcucgcgaaggcccugcgcaaggugccgaccgacaacuacaucacgaccuaccccgggcagggccugaacggguacaccgucgaggaggccaagaccgugcucaagaagugcaaguccgccuucuacauccugcccagcaucaucuccaacgagaagcaggagauccugggcaccgugagcuggaaccuccgggagaugcuggcgcacgccgaggagacgcgcaagcugaugcccgucugcguggagaccaaggccaucguguccaccauccagcggaaguacaagggcaucaagauccaggagggggucguggacuacggcgcccgcuucuacuucuacaccagcaagacgaccguggccucccugaucaacacccucaacgaccugaacgagacccuggucacgaugccgcucggguacgugacccacggccugaaccuggaggaggcggcccgguacaugcgcagccucaaggugcccgccaccgucuccgugagcucccccgacgccgugaccgccuacaacggguaccugacgagcuccagcaagacccccgaggagcacuucaucgagaccaucucccuggcgggcagcuacaaggacuggagcuacuccggccagagcacccagcucgggaucgaguuccugaagcggggcgacaaguccgucuacuacacgagcaacccgaccaccuuccaccuggacggggaggugaucaccuucgacaaccucaagacgcugcugucccuccgcgaggugcggaccaucaaggucuucaccaccguggacaacaucaaccugcacacgcagguggucgacaugagcaugaccuacggccagcaguucggccccaccuaccuggacggggccgacgugaccaagaucaagccccacaacucccacgagggcaagacguucuacgugcucccgaacgacgacacccugcgcgucgaggccuucgaguacuaccacaccaccgaccccagcuuccuggggcgguacauguccgcccucaaccacacgaagaaguggaaguacccccaggugaacggccugaccagcaucaagugggccgacaacaacugcuaccuggcgaccgcccuccugacccugcagcagaucgagcucaaguucaaccccccggcccugcaggacgccuacuaccgcgcgcgggccggggaggccgccaacuucugcgcccugauccucgcguacugcaacaagacggugggcgagcugggcgacguccgcgagaccauguccuaccuguuccagcacgccaaccucgacagcugcaagcgggugcugaacgucgugugcaagaccugcgggcagcagcagaccacccugaagggcguggaggccgucauguacauggggacgcucuccuacgagcaguucaagaagggcgugcagauccccugcaccugcgggaagcaggccaccaaguaccuggugcagcaggagagccccuucgucaugauguccgcccccccggcgcaguacgagcugaagcacggcaccuucacgugcgccagcgaguacaccggcaacuaccagugcgggcacuacaagcacaucaccuccaaggagacccucuacugcaucgacggcgcccugcugacgaagagcagcgaguacaaggggcccaucaccgacguguucuacaaggagaacuccuacaccaccacgaucaagcccgugaccuacaagcucgacggcgucgugugcaccgagaucgaccccaagcuggacaacuacuacaagaaggacaacagcuacuucaccgagcagccgaucgaccuggugcccaaccagcccuaccccaacgccuccuucgacaacuucaaguucgucugcgacaacaucaaguucgccgacgaccucaaccagcugacgggguacaagaagccggcgagccgcgagcugaaggugaccuucuuccccgaccucaacggcgacguggucgccaucgacuacaagcacuacacccccuccuucaagaagggcgccaagcugcugcacaagcccaucguguggcacgugaacaacgccaccaacaaggcgacguacaagccgaacaccuggugcauccggugccucuggagcaccaagcccgucgggaccuccaacagcuucgacgugcugaaguccgaggacgcccagggcauggacaaccuggccugcgaggaccucaagcccgugagcgaggaggucguggagaaccccacgauccagaaggacgugcuggagugcaacgucaagaccaccgagguggugggggacaucauccugaagccggccaacaacucccucaagaucaccgaggaggucggccacacggaccugauggccgcguacguggacaacagcucccugaccaucaagaagcccaacgagcucagccgcgugcuggggcugaagacccucgccacccacggccuggccgccgucaacuccgugcccugggacacgaucgccaacuacgcgaagccguuccugaacaagguggucagcaccaccaccaacaucgugacgcgcugccucaaccgggugugcaccaacuacaugcccuacuucuucacccugcugcuccagcugugcaccuucacccgcuccacgaacagccggaucaaggccuccaugcccaccaccaucgccaagaacaccgucaagagcgugggcaaguucugccuggaggccagcuucaacuaccucaagucccccaacuucagcaagcugaucaacaucaucaucugguuccugcuccuguccgugugccuggggagccucaucuacuccacggccgcgcugggcguccugaugagcaaccucgggaugccguccuacugcaccggcuaccgcgagggcuaccugaacagcaccaacgugaccaucgccacguacugcaccggguccauccccugcagcgugugccuguccggccucgacagccuggacaccuaccccucccuggagaccauccagaucacgaucagcuccuucaagugggaccucaccgccuucgggcuggucgccgagugguuccuggccuacauccucuucacccgguucuucuacgugcugggccuggcggccaucaugcagcucuucuucagcuacuucgccgugcacuucaucuccaacagcuggcugauguggcugaucaucaaccugguccagauggcccccaucuccgcgauggugcgcauguacaucuucuucgccagcuucuacuacguguggaagagcuacguccacgugguggacgggugcaacuccagcaccugcaugaugugcuacaagcggaaccgcgccacgcgggucgagugcaccaccaucgugaacggcguccgccgguccuucuacguguacgccaacggcgggaagggcuucugcaagcuccacaacuggaacugcgugaacugcgacaccuucugcgccgggagcacguucaucuccgacgaggucgcgcgcgaccugagccugcaguucaagcggccgaucaaccccaccgaccaguccagcuacaucguggacuccgugaccgucaagaacggcagcauccaccucuacuucgacaaggccgggcagaagaccuacgagcgccacucccugagccacuucgugaaccuggacaaccuccgggccaacaacacgaagggcucccugcccaucaacgugaucgucuucgacggcaagagcaagugcgaggaguccagcgccaaguccgccagcguguacuacucccagcugaugugccagcccauccuccugcuggaccaggcgcucgugagcgacgucggggacagcgccgagguggccgugaagauguucgacgccuacgucaacaccuucuccagcaccuucaacgugccgauggagaagcugaagacccugguggccacggcggaggccgagcucgccaagaacgucucccuggacaacgugcugagcaccuucaucuccgccgcgcgccagggcuucguggacagcgacgucgagaccaaggacgugguggagugccucaagcugucccaccagagcgacaucgaggucaccggggacuccugcaacaacuacaugcugacguacaacaagguggagaacaugaccccccgggaccucggcgccugcaucgacugcagcgcccgccacaucaacgcccagguggccaagucccacaacaucgcgcugaucuggaacgucaaggacuucaugagccuguccgagcagcuccggaagcagauccgcagcgccgccaagaagaacaaccugcccuucaagcugaccugcgccaccacgcgccagguggugaacgucgugaccaccaagaucgcccucaaggggggcugaggacuaguuauaagacugacuagcccgaugggccucccaacgggcccuccuccccuccuugcaccgagauuaauaaaaaaaaaaaaaaaaaaaaaaaaaaaaaaaaaaaaaaaaaaaaaaaaaaaaaaaaaaaaaaaaugcaucccccccccccccccccccccccccccccccaaaggcucuuuucagagccaccagaauu

SEQ ID NO: 22004 - RNA, 6058 nt, Artificial Sequence
  SARS-CoV-2__MT370908.1__non-structural protein 3 (NSP3) mRNA gc
aggagaaagcuuaccauggcccccaccaaggugaccuucggcgacgacacggucaucgaggugcagggguacaagagcgugaacaucaccuucgagcuggacgagcgcaucgacaagguccucaacgagaagugcuccgccuacaccguggagcugggcaccgaggugaacgaguucgcgugcgucguggccgacgccgugaucaagacgcugcagccggucagcgagcuccugaccccccuggggaucgaccucgacgagugguccauggccaccuacuaccuguucgacgagagcggcgaguucaagcuggccucccacauguacugcagcuucuacccccccgacgaggacgaggaggagggggacugcgaggaggaggaguucgagccguccacccaguacgaguacggcacggaggacgacuaccagggcaagccccucgaguucggggcgaccagcgccgugcugcagcccgaggaggagcaggaggaggacuggcuggacgacgacucccagcagaccgugggccagcaggacgggagcgaggacaaccagaccacgaccauccagaccaucgucgaggugcagccccagcucgagauggagcugaccccggugguccagacgaucgaggugaacuccuucagcggcuaccugaagcucaccgacaacguguacaucaagaacgccgacaucgucgaggaggccaagaaggugaagcccaccguggucgugaacgcggccaacguguaccugaagcacgggggcggcgucgccggggcccugaacaaggccaccaacaacgcgaugcagguggaguccgacgacuacaucgccacgaacggcccccucaaggucgggggcagcugcgugcuguccggccacaaccuggccaagcacugccuccacguggucgggcccaacgugaacaagggcgaggacauccagcugcugaagagcgccuacgagaacuucaaccagcacgaggugcuccuggccccgcugcucuccgcggggaucuucggcgccgaccccauccacagccugcgggucugcguggacaccgugcgcaccaacgucuaccuggccguguucgacaagaaccucuacgacaagcugguguccagcuuccuggagaugaagagcgagaagcaggucgagcagaagaucgccgagauccccaaggaggaggugaagcccuucaucaccgaguccaagccgagcguggagcagcggaagcaggacgacaagaagaucaaggccugcgucgaggaggugacgaccacccucgaggagaccaaguuccugacggagaaccugcuccuguacaucgacaucaacgggaaccugcaccccgacuccgcgacccucgugagcgacaucgacaucaccuuccugaagaaggacgcccccuacaucgucggcgacguggugcaggagggcguccugaccgccguggugauccccacgaagaaggccgggggcaccaccgagaugcucgccaaggcgcugcgcaaggucccgaccgacaacuacaucacgaccuaccccgggcagggccugaacggguacaccguggaggaggccaagaccgugcucaagaagugcaaguccgccuucuacauccugcccagcaucaucuccaacgagaagcaggagauccugggcaccgucagcuggaaccuccgggagaugcuggcccacgcggaggagacgcgcaagcugaugcccgugugcguggagaccaaggccaucgucuccaccauccagcggaaguacaagggcaucaagauccaggagggggugguggacuacggcgcccgcuucuacuucuacaccagcaagacgaccgucgccucccugaucaacacccucaacgaccugaacgagacccuggugacgaugccgcucggguacgugacccacggccugaaccuggaggaggccgcgcgguacaugcgcagccucaagguccccgccaccguguccgugagcucccccgacgccgucaccgccuacaacggguaccugacgagcuccagcaagacccccgaggagcacuucaucgagaccaucucccuggccggcagcuacaaggacuggagcuacuccggccagagcacccagcucgggaucgaguuccugaagcggggcgacaaguccguguacuacacgagcaacccgaccaccuuccaccuggacggggaggugaucaccuucgacaaccucaagacgcugcugucccuccgcgagguccggaccaucaagguguucaccaccguggacaacaucaaccugcacacgcaggucguggacaugagcaugaccuacggccagcaguucggccccaccuaccuggacggggcggacgugaccaagaucaagccccacaacucccacgagggcaagacguucuacguccucccgaacgacgacacccugcgcguggaggccuucgaguacuaccacaccaccgaccccagcuuccuggggcgguacauguccgcccucaaccacacgaagaaguggaaguacccccaggugaacggccugaccagcaucaagugggccgacaacaacugcuaccuggccaccgcgcuccugacccugcagcagaucgagcucaaguucaaccccccggcccugcaggacgccuacuaccgcgcccgggcgggggaggccgccaacuucugcgcccugauccucgccuacugcaacaagacggucggcgagcugggcgacgugcgcgagaccauguccuaccuguuccagcacgcgaaccucgacagcugcaagcggguccugaacguggugugcaagaccugcgggcagcagcagaccacccugaagggcgucgaggccgugauguacauggggacgcucuccuacgagcaguucaagaagggcgugcagauccccugcaccugcgggaagcaggccaccaaguaccugguccagcaggagagccccuucgugaugauguccgcccccccggcccaguacgagcugaagcacggcaccuucacgugcgcgagcgaguacaccggcaacuaccagugcgggcacuacaagcacaucaccuccaaggagacccucuacugcaucgacggcgcccugcugacgaagagcagcgaguacaaggggcccaucaccgacguguucuacaaggagaacuccuacaccaccacgaucaagcccgucaccuacaagcucgacggcguggugugcaccgagaucgaccccaagcuggacaacuacuacaagaaggacaacagcuacuucaccgagcagccgaucgaccugguccccaaccagcccuaccccaacgccuccuucgacaacuucaaguucgugugcgacaacaucaaguucgccgacgaccucaaccagcugacgggguacaagaagccggccagccgcgagcugaaggugaccuucuuccccgaccucaacggcgacgucguggcgaucgacuacaagcacuacacccccuccuucaagaagggcgccaagcugcugcacaagcccaucguguggcacgucaacaacgccaccaacaaggccacguacaagccgaacaccuggugcauccggugccucuggagcaccaagcccguggagaccuccaacagcuucgacgugcugaaguccgaggacgcgcaggggauggacaaccuggccugcgaggaccucaagcccgucagcgaggaggugguggagaaccccacgauccagaaggacguccuggagugcaacgugaagaccaccgagguggucggcgacaucauccugaagccggccaacaacucccucaagaucaccgaggagguggggcacacggaccugauggccgccuacguggacaacagcucccugaccaucaagaagcccaacgagcucagccgcguccugggccugaagacccucgcgacccacgggcuggccgccgugaacuccgugcccugggacacgaucgccaacuacgccaagccguuccugaacaaggucgugagcaccaccaccaacaucgugacgcgcugccucaaccgggucugcaccaacuacaugcccuacuucuucacccugcugcuccagcugugcaccuucacccgcuccacgaacagccggaucaaggcguccaugcccaccaccaucgccaagaacaccgugaagagcgugggcaaguucugccuggaggccagcuucaacuaccucaagucccccaacuucagcaagcugaucaacaucaucaucugguuccugcuccuguccgucugccugggcagccucaucuacuccacggccgcccugggggugcugaugagcaaccucggcaugccguccuacugcaccggguaccgcgagggcuaccugaacagcaccaacgugaccaucgcgacguacugcaccggcuccauccccugcagcgucugccuguccgggcucgacagccuggacaccuaccccucccuggagaccauccagaucacgaucagcuccuucaagugggaccucaccgccuucggccugguggccgagugguuccuggccuacauccucuucacccgguucuucuacgugcuggggcuggccgcgaucaugcagcucuucuucagcuacuucgccguccacuucaucuccaacagcuggcugauguggcugaucaucaaccuggugcagauggcccccaucuccgccauggugcgcauguacaucuucuucgcgagcuucuacuacgucuggaagagcuacgugcacguggucgacggcugcaacuccagcaccugcaugaugugcuacaagcggaaccgcgccacgcggguggagugcaccaccaucgucaacggggugcgccgguccuucuacguguacgccaacggcggcaagggguucugcaagcuccacaacuggaacugcgucaacugcgacaccuucugcgccggcagcacguucaucuccgacgagguggcccgcgaccugagccugcaguucaagcggccgaucaaccccaccgaccaguccagcuacaucguggacuccgucaccgugaagaacgggagcauccaccucuacuucgacaaggcgggccagaagaccuacgagcgccacucccugagccacuucgugaaccuggacaaccuccgggccaacaacacgaaggggucccugcccaucaacgucaucguguucgacggcaagagcaagugcgaggaguccagcgccaaguccgccagcguguacuacucccagcugaugugccagcccauccuccugcuggaccaggcccucgucagcgacgugggcgacagcgcggagguggccgucaagauguucgacgccuacgugaacaccuucuccagcaccuucaacgugccgauggagaagcugaagacccuggucgccacggccgaggcggagcucgccaagaacgugucccuggacaacgugcugagcaccuucaucuccgccgcccgccagggguucgucgacagcgacguggagaccaaggacguggucgagugccucaagcugucccaccagagcgacaucgaggugaccggcgacuccugcaacaacuacaugcugacguacaacaagguggagaacaugaccccccgggaccucggggcgugcaucgacugcagcgcccgccacaucaacgcccaggucgccaagucccacaacaucgcccugaucuggaacgugaaggacuucaugagccuguccgagcagcuccggaagcagauccgcagcgcggccaagaagaacaaccugcccuucaagcugaccugcgccaccacgcgccagguggucaacguggugaccaccaagaucgcccucaagggcgggugaggacuaguuauaagacugacuagcccgaugggccucccaacgggcccuccuccccuccuugcaccgagauuaauaaaaaaaaaaaaaaaaaaaaaaaaaaaaaaaaaaaaaaaaaaaaaaaaaaaaaaaaaaaaaaaaugcaucccccccccccccccccccccccccccccccaaaggcucuuuucagagccaccagaauu

SEQ ID NO: 22005 - RNA, 6058 nt, Artificial Sequence
  SARS-CoV-2__MT370953.1__non-structural protein 3 (NSP3) mRNA gc
aggagaaagcuuaccauggcccccaccaaggugaccuucggcgacgacacggucaucgaggugcagggguacaagagcgugaacaucaccuucgagcuggacgagcgcaucgacaagguccucaacgagaagugcuccgccuacaccguggagcugggcaccgaggugaacgaguucgcgugcgucguggccgacgccgugaucaagacgcugcagccggucagcgagcuccugaccccccuggggaucgaccucgacgagugguccauggccaccuacuaccuguucgacgagagcggcgaguucaagcuggccucccacauguacugcagcuucuacccccccgacgaggacgaggaggagggggacugcgaggaggaggaguucgagccguccacccaguacgaguacggcacggaggacgacuaccagggcaagccccucgaguucggggcgaccagcgccgcccugcagcccgaggaggagcaggaggaggacuggcuggacgacgacucccagcagaccgugggccagcaggacgggagcgaggacaaccagaccacgaccauccagaccaucguggagguccagccccagcucgagauggagcugaccccgguggugcagacgaucgaggucaacuccuucagcggcuaccugaagcucaccgacaacguguacaucaagaacgccgacaucguggaggaggcgaagaaggucaagcccaccgugguggucaacgccgccaacguguaccugaagcacgggggcggcguggccggggcccugaacaaggcgaccaacaacgccaugcaggucgaguccgacgacuacaucgccacgaacggcccccucaagguggggggcagcugcguccuguccggccacaaccuggccaagcacugccuccacgugguggggcccaacgucaacaagggcgaggacauccagcugcugaagagcgccuacgagaacuucaaccagcacgaggugcuccuggcgccgcugcucuccgccgggaucuucggcgccgaccccauccacagccugcgggugugcgucgacaccgugcgcaccaacguguaccuggccgucuucgacaagaaccucuacgacaagcugguguccagcuuccuggagaugaagagcgagaagcagguggagcagaagaucgccgagauccccaaggaggaggucaagcccuucaucaccgaguccaagccgagcguggagcagcggaagcaggacgacaagaagaucaaggcgugcguggaggaggucacgaccacccucgaggagaccaaguuccugacggagaaccugcuccuguacaucgacaucaacgggaaccugcaccccgacuccgccacccucgugagcgacaucgacaucaccuuccugaagaaggacgcccccuacaucgugggcgacgucgugcaggagggcgugcugaccgccgucgugauccccacgaagaaggccgggggcaccaccgagaugcucgcgaaggcccugcgcaaggugccgaccgacaacuacaucacgaccuaccccgggcagggccugaacggguacaccgucgaggaggccaagaccgugcucaagaagugcaaguccgccuucuacauccugcccagcaucaucuccaacgagaagcaggagauccugggcaccgugagcuggaaccuccgggagaugcuggcgcacgccgaggagacgcgcaagcugaugcccgucugcguggagaccaaggccaucguguccaccauccagcggaaguacaagggcaucaagauccaggagggggucguggacuacggcgcccgcuucuacuucuacaccugcaagacgaccguggccagccugaucaacacccucaacgaccugaacgagacccuggucacgaugccgcucggguacgugacccacggccugaaccuggaggaggcggcccgguacaugcgcucccucaaggugcccgccaccgucagcguguccagccccgacgccgugaccgccuacaacggguaccugacguccagcuccaagacccccgaggagcacuucaucgagaccaucagccuggcgggcuccuacaaggacuggagcuacagcggccaguccacccagcucgggaucgaguuccugaagcggggcgacaagagcgucuacuacacguccaacccgaccaccuuccaccuggacggggaggugaucaccuucgacaaccucaagacgcugcugagccuccgcgaggugcggaccaucaaggucuucaccaccguggacaacaucaaccugcacacgcagguggucgacauguccaugaccuacggccagcaguucggccccaccuaccuggacggggccgacgugaccaagaucaagccccacaacagccacgagggcaagacguucuacgugcucccgaacgacgacacccugcgcgucgaggccuucgaguacuaccacaccaccgaccccuccuuccuggggcgguacaugagcgcccucaaccacacgaagaaguggaaguacccccaggugaacggccugaccuccaucaagugggccgacaacaacugcuaccuggcgaccgcccuccugacccugcagcagaucgagcucaaguucaaccccccggcccugcaggacgccuacuaccgcgcgcgggccggggaggccgccaacuucugcgcccugauccucgcguacugcaacaagacggugggcgagcugggcgacguccgcgagaccaugagcuaccuguuccagcacgccaaccucgacuccugcaagcgggugcugaacgucgugugcaagaccugcgggcagcagcagaccacccugaagggcguggaggccgucauguacauggggacgcucagcuacgagcaguucaagaagggcgugcagauccccugcaccugcgggaagcaggccaccaaguaccuggugcagcaggagucccccuucgucaugaugagcgcccccccggcgcaguacgagcugaagcacggcaccuucacgugcgccuccgaguacaccggcaacuaccagugcgggcacuacaagcacaucaccagcaaggagacccucuacugcaucgacggcgcccugcugacgaaguccagcgaguacaaggggcccaucaccgacguguucuacaaggagaacagcuacaccaccacgaucaagcccgugaccuacaagcucgacggcgucgugugcaccgagaucgaccccaagcuggacaacuacuacaagaaggacaacuccuacuucaccgagcagccgaucgaccuggugcccaaccagcccuaccccaacgccagcuucgacaacuucaaguucgucugcgacaacaucaaguucgccgacgaccucaaccagcugacgggguacaagaagccggcgucccgcgagcugaaggugaccuucuuccccgaccucaacggcgacguggucgccaucgacuacaagcacuacacccccagcuucaagaagggcgccaagcugcugcacaagcccaucguguggcacgugaacaacgccaccaacaaggcgacguacaagccgaacaccuggugcauccggugccucugguccaccaagcccgucgagaccagcaacuccuucgacgugcugaagagcgaggacgcccaggggauggacaaccuggccugcgaggaccucaagcccguguccgaggaggucguggagaaccccacgauccagaaggacgugcuggagugcaacgucaagaccaccgagguggugggcgacaucauccugaagccggccaacaacagccucaagaucaccgaggaggucgggcacacggaccugauggccgcguacguggacaacuccagccugaccaucaagaagcccaacgagcucucccgcgugcugggccugaagacccucgccacccacgggcuggccgccgucaacagcgugcccugggacacgaucgccaacuacgcgaagccguuccugaacaagguggucuccaccaccaccaacaucgugacgcgcugccucaaccgggugugcaccaacuacaugcccuacuucuucacccugcugcuccagcugugcaccuucacccgcagcacgaacucccggaucaaggccagcaugcccaccaccaucgccaagaacaccgucaaguccgugggcaaguucugccuggaggccagcuucaacuaccucaagagccccaacuucuccaagcugaucaacaucaucaucugguuccugcuccugagcgugugccugggcucccucaucuacagcacggccgcgcuggggguccugauguccaaccucggcaugccgagcuacugcaccggguaccgcgagggcuaccugaacuccaccaacgugaccaucgccacguacugcaccggcagcauccccugcuccgugugccugagcgggcucgacucccuggacaccuaccccagccuggagaccauccagaucacgaucuccagcuucaagugggaccucaccgccuucggccuggucgccgagugguuccuggccuacauccucuucacccgguucuucuacgugcuggggcuggcggccaucaugcagcucuucuucuccuacuucgccgugcacuucaucagcaacuccuggcugauguggcugaucaucaaccugguccagauggcccccaucagcgcgauggugcgcauguacaucuucuucgccuccuucuacuacguguggaagagcuacguccacgugguggacggcugcaacagcuccaccugcaugaugugcuacaagcggaaccgcgccacgcgggucgagugcaccaccaucgugaacgggguccgccggagcuucuacguguacgccaacggcggcaagggguucugcaagcuccacaacuggaacugcgugaacugcgacaccuucugcgccggcuccacguucaucagcgacgaggucgcgcgcgaccugucccugcaguucaagcggccgaucaaccccaccgaccagagcuccuacaucguggacagcgugaccgucaagaacggguccauccaccucuacuucgacaaggccggccagaagaccuacgagcgccacagccugucccacuucgugaaccuggacaaccuccgggccaacaacacgaaggggagccugcccaucaacgugaucgucuucgacggcaaguccaagugcgaggagagcuccgccaagagcgccuccguguacuacagccagcugaugugccagcccauccuccugcuggaccaggcgcucguguccgacgucggcgacagcgccgagguggccgugaagauguucgacgccuacgucaacaccuucagcuccaccuucaacgugccgauggagaagcugaagacccugguggccacggcggaggccgagcucgccaagaacgucagccuggacaacgugcuguccaccuucaucagcgccgcgcgccagggguucguggacuccgacgucgagaccaaggacgugguggagugccucaagcugagccaccaguccgacaucgaggucaccggcgacagcugcaacaacuacaugcugacguacaacaagguggagaacaugaccccccgggaccucggggccugcaucgacugcuccgcccgccacaucaacgcccagguggccaagagccacaacaucgcgcugaucuggaacgucaaggacuucaugucccugagcgagcagcuccggaagcagauccgcuccgccgccaagaagaacaaccugcccuucaagcugaccugcgccaccacgcgccagguggugaacgucgugaccaccaagaucgcccucaagggcgggugaggacuaguuauaagacugacuagcccgaugggccucccaacgggcccuccuccccuccuugcaccgagauuaauaaaaaaaaaaaaaaaaaaaaaaaaaaaaaaaaaaaaaaaaaaaaaaaaaaaaaaaaaaaaaaaaugcaucccccccccccccccccccccccccccccccaaaggcucuuuucagagccaccagaauu

SEQ ID NO: 22006 - RNA, 6058 nt, Artificial Sequence
  SARS-CoV-2__MT370987.1__non-structural protein 3 (NSP3) mRNA gc
aggagaaagcuuaccauggcccccaccaaggugaccuucggcgacgacacggucaucgaggugcagggguacaagagcgugaacaucaccuucgagcuggacgagcgcaucgacaagguccucaacgagaagugcuccgccuacaccguggagcugggcaccgaggugaacgaguucgcgugcgucguggccgacgccgugaucaagacgcugcagccggucagcgagcuccugaccccccuggggaucgaccucgacgagugguccauggccaccuacuaccuguucgacgagagcggcgaguucaagcuggccucccacauguacugcagcuucuacccccccgacgaggacgaggaggagggggacugcgaggaggaggaguucgagccguccacccaguacgaguacggcacggaggacgacuaccagggcaagccccucgaguucggggcgaccagcgccgcccugcagcccgaggaggagcaggaggaggacuggcuggacgacgacucccagcagaccgugggccagcaggacgggagcgaggacaaccagaccacgaccauccagaccaucguggagguccagccccagcucgagauggagcugaccccgguggugcagacgaucgaggucaacuccuucagcggcuaccugaagcucaccgacaacguguacaucaagaacgccgacaucguggaggaggcgaagaaggucaagcccaccgugguggucaacgccgccaacguguaccugaagcacgggggcggcguggccggggcccugaacaaggcgaccaacaacgccaugcaggucgaguccgacgacuacaucgccacgaacggcccccucaagguggggggcagcugcguccuguccggccacaaccuggccaagcacugccuccacgugguggggcccaacgucaacaagggcgaggacauccagcugcugaagagcgccuacgagaacuucaaccagcacgaggugcuccuggcgccgcugcucuccgccgggaucuucggcgccgaccccauccacagccugcgggugugcgucgacaccgugcgcaccaacguguaccuggccgucuucgacaagaaccucuacgacaagcugguguccagcuuccuggagaugaagagcgagaagcagguggagcagaagaucgccgagauccccaaggaggaggucaagcccuucaucaccgaguccaagccgagcguggagcagcggaagcaggacgacaagaagaucaaggcgugcguggaggaggucacgaccacccucgaggagaccaaguuccugacggagaaccugcuccuguacaucgacaucaacgggaaccugcaccccgacuccgccacccucgugagcgacaucgacaucaccuuccugaagaaggacgcccccuacaucgugggcgacgucgugcaggagggcgugcugaccgccgucgugauccccacgaagaaggccgggggcaccaccgagaugcucgcgaaggcccugcgcaaggugccgaccgacaacuacaucacgaccuaccccgggcagggccugaacggguacaccgucgaggaggccaagaccgugcucaagaagugcaaguccgccuucuacauccugcccagcaucaucuccaacgagaagcaggagauccugggcaccgugagcuggaaccuccgggagaugcuggcgcacgccgaggagacgcgcaagcugaugcccgucugcguggagaccaaggccaucguguccaccauccagcggaaguacaagggcaucaagauccaggagggggucguggacuacggcgcccgcuucuacuucuacaccagcaagacgaccguggccucccugaucaacacccucaacgaccugaacgagacccuggucacgaugccgcucggguacgugacccacggccugaaccuggaggaggcggcccgguacaugcgcagccucaaggugcccgccaccgucuccgugagcucccccgacgccgugaccgccuacaacggguaccugacgagcuccagcaagacccccgaggagcacuucaucgagaccaucucccuggcgggcagcuacaaggacuggagcuacuccggccagagcacccagcucgggaucgaguuccugaagcggggcgacaaguccgucuacuacacgagcaacccgaccaccuuccaccuggacggggaggugaucaccuucgacaaccucaagacgcugcugucccuccgcgaggugcggaccaucaaggucuucaccaccguggacaacaucaaccugcacacgcagguggucgacaugagcaugaccuacggccagcaguucggccccaccuaccuggacggggccgacgugaccaagaucaagccccacaacucccacgagggcaagacguucuacgugcucccgaacgacgacacccugcgcgucgaggccuucgaguacuaccacaccaccgaccccagcuuccuggggcgguacauguccgcccucaaccacacgaagaaguggaaguacccccaggugaacggccugaccagcaucaagugggccgacaacaacugcuaccuggcgaccgcccuccugacccugcagcagaucgagcucaaguucaaccccccggcccugcaggacgccuacuaccgcgcgcgggccggggaggccgccaacuucugcgcccugauccucgcguacugcaacaagacggugggcgagcugggcgacguccgcgagaccauguccuaccuguuccagcacgccaaccucgacagcugcaagcgggugcugaacgucgugugcaagaccugcgggcagcagcagaccacccugaagggcguggaggccgucauguacauggggacgcucuccuacgagcaguucaagaagggcgugcagauccccugcaccugcgggaagcaggccaccaaguaccuggugcagcaggagagccccuucgucaugauguccgcccccccggcgcaguacgagcugaagcacggcaccuucacgugcgccagcgaguacaccggcaacuaccagugcgggcacuacaagcacaucaccuccaaggagacccucuacugcaucgacggcgcccugcugacgaagagcagcgaguacaaggggcccaucaccgacguguucuacaaggagaacuccuacaccaccacgaucaagcccgugaccuacaagcucgacggcgucgugugcaccgagaucgaccccaagcuggacaacuacuacaagaaggacaacagcuacuucaccgagcagccgaucgaccuggugcccaaccagcccuaccccaacgccuccuucgacaacuucaaguucgucugcgacaacaucaaguucgccgacgaccucaaccagcugacgggguacaagaagccggcgagccgcgagcugaaggugaccuucuuccccgaccucaacggcgacguggucgccaucgacuacaagcacuacacccccuccuucaagaagggcgccaagcugcugcacaagcccaucguguggcacgugaacaacgccaccaacaaggcgacguacaagccgaacaccuggugcauccggugccucuggagcaccaagcccgucgagaccuccaacagcuucgacgugcugaaguccgaggacgcccaggggauggacaaccuggccugcgaggaccucaagcccgugagcgaggaggucguggagaaccccacgauccagaaggacgugcuggagugcaacgucaagaccaccgagguggugggcgacaucauccugaagccggccaacaacucccucaagaucaccgaggaggucgggcacacggaccugauggccgcguacguggacaacagcucccugaccaucaagaagcccaacgagcucagccgcgugcugggccugaagacccucgccacccacgggcuggccgccgucaacuccgugcccugggacacgaucgccaacuacgcgaagccguuccugaacaagguggucagcaccaccaccaacaucgugacgcgcugccucaaccgggugugcaccaacuacaugcccuacuucuucacccugcugcuccagcugugcaccuucacccgcuccacgaacagccggaucaaggccuccaugcccaccaccaucgccaagaacaccgucaagagcgugggcaaguucugccuggaggccagcuucaacuaccucaagucccccaacuucagcaagcugaucaacaucaucaucugguuccugcuccuguccgugugccugggcagccucaucuacuccacggccgcgcuggggguccugaugagcaaccucggcaugccguccuacugcaccggguaccgcgagggcuaccugaacagcaccaacgugaccaucgccacguacugcaccggcuccauccccugcagcgugugccuguccgggcucgacagccuggacaccuaccccucccuggagaccauccagaucacgaucagcuccuucaagugggaccucaccgccuucggccuggucgccgagugguuccuggccuacauccucuucacccgguucuucuacgugcuggggcuggcggccaucaugcagcucuucuucagcuacuucgccgugcacuucaucuccaacagcuggcugauguggcugaucaucaaccugguccagauggcccccaucuccgcgauggugcgcauguacaucuucuucgccagcuucuacuacguguggaagagcuacguccacgugguggacggcugcaacuccagcaccugcaugaugugcuacaagcggaaccgcgccacgcgggucgagugcaccaccaucgugaacgggguccgccgguccuucuacguguacgccaacggcggcaagggguucugcaagcuccacaacuggaacugcgugaacugcgacaccuucugcgccggcagcacguucaucuccgacgaggucgcgcgcgaccugagccugcaguucaagcggccgaucaaccccaucgaccaguccagcuacaucguggacuccgugaccgucaagaacgggagcauccaccucuacuucgacaaggccggccagaagaccuacgagcgccacucccugagccacuucgugaaccuggacaaccuccgggccaacaacaccaaggggucccugcccaucaacgugaucgucuucgacggcaagagcaagugcgaggaguccagcgccaaguccgccagcguguacuacucccagcugaugugccagcccauccuccugcuggaccaggcgcucgugagcgacgucggcgacagcgccgagguggccgugaagauguucgacgccuacgucaacacguucuccagcaccuucaacgugccgauggagaagcugaagacccugguggccaccgcggaggccgagcucgccaagaacgucucccuggacaacgugcugagcacguucaucuccgccgcgcgccagggguucguggacagcgacgucgagaccaaggacgugguggagugccucaagcugucccaccagagcgacaucgaggucaccggcgacuccugcaacaacuacaugcugaccuacaacaagguggagaacaugacgccccgggaccucggggccugcaucgacugcagcgcccgccacaucaacgcccagguggccaagucccacaacaucgcgcugaucuggaacgucaaggacuucaugagccuguccgagcagcuccggaagcagauccgcagcgccgccaagaagaacaaccugcccuucaagcugaccugcgccaccacccgccagguggugaacgucgugacgaccaagaucgcccucaagggcgggugaggacuaguuauaagacugacuagcccgaugggccucccaacgggcccuccuccccuccuugcaccgagauuaauaaaaaaaaaaaaaaaaaaaaaaaaaaaaaaaaaaaaaaaaaaaaaaaaaaaaaaaaaaaaaaaaugcaucccccccccccccccccccccccccccccccaaaggcucuuuucagagccaccagaauu

SEQ ID NO: 22007 - RNA, 6058 nt, Artificial Sequence
  SARS-CoV-2__MT371002.1__non-structural protein 3 (NSP3) mRNA gc
aggagaaagcuuaccauggcccccaccaaggugaccuucggcgacgacacggucaucgaggugcagggguacaagagcgugaacaucaccuucgagcuggacgagcgcaucgacaagguccucaacgagaagugcuccgccuacaccguggagcugggcaccgaggugaacgaguucgcgugcgucguggccgacgccgugaucaagacgcugcagccggucagcgagcuccugaccccccuggggaucgaccucgacgagugguccauggccaccuacuaccuguucgacgagagcggcgaguucaagcuggccucccacauguacugcagcuucuacccccccgacgaggacgaggaggagggggacugcgaggaggaggaguucgagccguccacccaguacgaguacggcacggaggacgacuaccagggcaagccccucgaguucggggcgaccagcgccgcccugcagcccgaggaggagcaggaggaggacuggcuggacgacgacucccagcagaccgugggccagcaggacgggagcgaggacaaccagaccacgaccauccagaccaucguggagguccagccccagcucgagauggagcugaccccgguggugcagacgaucgaggucaacuccuucagcggcuaccugaagcucaccgacaacguguacaucaagaacgccgacaucguggaggaggcgaagaaggucaagcccaccgugguggucaacgccgccaacguguaccugaagcacgggggcggcguggccggggcccugaacaaggcgaccaacaacgccaugcaggucgaguccgacgacuacaucgccacgaacggcccccucaagguggggggcagcugcguccuguccggccacaaccuggccaagcacugccuccacgugguggggcccaacgucaacaagggcgaggacauccagcugcugaagagcgccuacgagaacuucaaccagcacgaggugcuccuggcgccgcugcucuccgccgggaucuucggcgccgaccccauccacagccugcgggugugcgucgacaccgugcgcaccaacguguaccuggccgucuucgacaagaaccucuacgacaagcugguguccagcuuccuggagaugaagagcgagaagcagguggagcagaagaucgccgagauccccaaggaggaggucaagcccuucaucaccgaguccaagccgagcguggagcagcggaagcaggacgacaagaagaucaaggcgugcguggaggaggucacgaccacccucgaggagaccaaguuccugacggagaaccugcuccuguacaucgacaucaacgggaaccugcaccccgacuccgccacccucgugagcgacaucgacaucaccuuccugaagaaggacgcccccuacaucgugggcgacgucgugcaggagggcgugcugaccgccgucgugauccccacgaagaaggccgggggcaccaccgagaugcucgcgaaggcccugcgcaaggugccgaccgacaacuacaucacgaccuaccccgggcagggccugaacggguacaccgucgaggaggccaagaccgugcucaagaagugcaaguccgccuucuacauccugcccagcaucaucuccaacgagaagcaggagauccugggcaccgugagcuggaaccuccgggagaugcuggcgcacgccgaggagacgcgcaagcugaugcccgucugcguggagaccaaggccaucguguccaccauccagcggaaguacaagggcaucaagauccaggagggggucguggacuacggcgcccgcuucuacuucuacaccagcaagacgaccguggccucccugaucaacauccucaacgaccugaacgagacccuggucaccaugccgcucggguacgugacgcacggccugaaccuggaggaggcggcccgguacaugcgcagccucaaggugcccgccaccgucuccgugagcucccccgacgccgugaccgccuacaacggguaccugaccagcuccagcaagacgcccgaggagcacuucaucgagaccaucucccuggcgggcagcuacaaggacuggagcuacuccggccagagcacccagcucgggaucgaguuccugaagcggggcgacaaguccgucuacuacaccagcaacccgacgaccuuccaccuggacggggaggugaucaccuucgacaaccucaagacccugcugucccuccgcgaggugcggacgaucaaggucuucaccaccguggacaacaucaaccugcacacccagguggucgacaugagcaugacguacggccagcaguucggccccaccuaccuggacggggccgacgugaccaagaucaagccccacaacucccacgagggcaagaccuucuacgugcucccgaacgacgacacgcugcgcgucgaggccuucgaguacuaccacaccaccgaccccagcuuccuggggcgguacauguccgcccucaaccacaccaagaaguggaaguacccccaggugaacggccugacgagcaucaagugggccgacaacaacugcuaccuggcgaccgcccuccugacccugcagcagaucgagcucaaguucaaccccccggcccugcaggacgccuacuaccgcgcgcgggccggggaggccgccaacuucugcgcccugauccucgcguacugcaacaagaccgugggcgagcugggcgacguccgcgagacgauguccuaccuguuccagcacgccaaccucgacagcugcaagcgggugcugaacgucgugugcaagaccugcgggcagcagcagaccacccugaagggcguggaggccgucauguacauggggacccucuccuacgagcaguucaagaagggcgugcagauccccugcacgugcgggaagcaggccaccaaguaccuggugcagcaggagagccccuucgucaugauguccgcccccccggcgcaguacgagcugaagcacggcaccuucaccugcgccagcgaguacacgggcaacuaccagugcgggcacuacaagcacaucaccuccaaggagacccucuacugcaucgacggcgcccugcugaccaagagcagcgaguacaaggggcccaucacggacguguucuacaaggagaacuccuacaccaccaccaucaagcccgugacguacaagcucgacggcgucgugugcaccgagaucgaccccaagcuggacaacuacuacaagaaggacaacagcuacuucaccgagcagccgaucgaccuggugcccaaccagcccuaccccaacgccuccuucgacaacuucaaguucgucugcgacaacaucaaguucgccgacgaccucaaccagcugaccggguacaagaagccggcgagccgcgagcugaaggugacguucuuccccgaccucaacggcgacguggucgccaucgacuacaagcacuacacccccuccuucaagaagggcgccaagcugcugcacaagcccaucguguggcacgugaacaacgccaccaacaaggcgaccuacaagccgaacacguggugcauccggugccucuggagcaccaagcccgucgagaccuccaacagcuucgacgugcugaaguccgaggacgcccaggggauggacaaccuggccugcgaggaccucaagcccgugagcgaggaggucguggagaaccccaccauccagaaggacgugcuggagugcaacgucaagacgaccgagguggugggcgacaucauccugaagccggccaacaacucccucaagaucaccgaggaggucgggcacaccgaccugauggccgcguacguggacaacagcucccugacgaucaagaagcccaacgagcucagccgcgugcugggccugaagacccucgccacccacgggcuggccgccgucaacuccgugcccugggacaccaucgccaacuacgcgaagccguuccugaacaagguggucagcacgaccaccaacaucgugacccgcugccucaaccgggugugcacgaacuacaugcccuacuucuucacccugcugcuccagcugugcaccuucacccgcuccaccaacagccggaucaaggccuccaugcccacgaccaucgccaagaacaccgucaagagcgugggcaaguucugccuggaggccagcuucaacuaccucaagucccccaacuucagcaagcugaucaacaucaucaucugguuccugcuccuguccgugugccugggcagccucaucuacuccaccgccgcgcuggggguccugaugagcaaccucggcaugccguccuacugcacgggguaccgcgagggcuaccugaacagcaccaacgugaccaucgccaccuacugcacgggcuccauccccugcagcgugugccuguccgggcucgacagccuggacaccuaccccucccuggagaccauccagaucaccaucagcuccuucaagugggaccucacggccuucggccuggucgccgagugguuccuggccuacauccucuucacccgguucuucuacgugcuggggcuggcggccaucaugcagcucuucuucagcuacuucgccgugcacuucaucuccaacagcuggcugauguggcugaucaucaaccugguccagauggcccccaucuccgcgauggugcgcauguacaucuucuucgccagcuucuacuacguguggaagagcuacguccacgugguggacggcugcaacuccagcaccugcaugaugugcuacaagcggaaccgcgccacccgggucgagugcacgaccaucgugaacgggguccgccgguccuucuacguguacgccaacggcggcaagggguucugcaagcuccacaacuggaacugcgugaacugcgacaccuucugcgccggcagcaccuucaucuccgacgaggucgcgcgcgaccugagccugcaguucaagcggccgaucaaccccacggaccaguccagcuacaucguggacuccgugaccgucaagaacgggagcauccaccucuacuucgacaaggccggccagaagaccuacgagcgccacucccugagccacuucgugaaccuggacaaccuccgggccaacaacaccaaggggucccugcccaucaacgugaucgucuucgacggcaagagcaagugcgaggaguccagcgccaaguccgccagcguguacuacucccagcugaugugccagcccauccuccugcuggaccaggcgcucgugagcgacgucggcgacagcgccgagguggccgugaagauguucgacgccuacgucaacacguucuccagcaccuucaacgugccgauggagaagcugaagacccugguggccaccgcggaggccgagcucgccaagaacgucucccuggacaacgugcugagcacguucaucuccgccgcgcgccagggguucguggacagcgacgucgagaccaaggacgugguggagugccucaagcugucccaccagagcgacaucgaggucaccggcgacuccugcaacaacuacaugcugaccuacaacaagguggagaacaugacgccccgggaccucggggccugcaucgacugcagcgcccgccacaucaacgcccagguggccaagucccacaacaucgcgcugaucuggaacgucaaggacuucaugagccuguccgagcagcuccggaagcagauccgcagcgccgccaagaagaacaaccugcccuucaagcugaccugcgccaccacccgccagguggugaacgucgugacgaccaagaucgcccucaagggcgggugaggacuaguuauaagacugacuagcccgaugggccucccaacgggcccuccuccccuccuugcaccgagauuaauaaaaaaaaaaaaaaaaaaaaaaaaaaaaaaaaaaaaaaaaaaaaaaaaaaaaaaaaaaaaaaaaugcaucccccccccccccccccccccccccccccccaaaggcucuuuucagagccaccagaauu

SEQ ID NO: 22008 - RNA, 6058 nt, Artificial Sequence
  SARS-CoV-2__MT358672.1__non-structural protein 3 (NSP3) mRNA gc
aggagaaagcuuaccauggcccccaccaaggugaccuucggcgacgacacggucaucgaggugcagggguacaagagcgugaacaucaccuucgagcuggacgagcgcaucgacaagguccucaacgagaagugcuccgccuacaccguggagcugggcaccgaggugaacgaguucgcgugcgucguggccgacgccgugaucaagacgcugcagccggucagcgagcuccugaccccccuggggaucgaccucgacgagugguccauggccaccuacuaccuguucgacgagagcggcgaguucaagcuggccucccacauguacugcagcuucuacccccccgacgaggacgaggaggagggggacugcgaggaggaggaguucgagccguccacccaguacgaguacggcacggaggacgacuaccagggcaagccccucgaguucggggcgaccagcgccgcccugcagcccgaggaggagcaggaggaggacuggcuggacgacgacucccagcagaccgugggccagcaggacgggagcgaggacaaccagaccacgaccauccagaccaucguggagguccagccccagcucgagauggagcugaccccgguggugcagacgaucgaggucaacuccuucagcggcuaccugaagcucaccgacaacguguacaucaagaacgccgacaucguggaggaggcgaagaaggucaagcccaccgugguggucaacgccgccaacguguaccugaagcacgggggcggcguggccggggcccugaacaaggcgaccaacaacgccaugcaggucgaguccgacgacuacaucgccacgaacggcccccucaagguggggggcagcugcguccuguccggccacaaccuggccaagcacugccuccacgugguggggcccaacgucaacaagggcgaggacauccagcugcugaagagcgccuacgagaacuucaaccagcacgaggugcuccuggcgccgcugcucuccgccgggaucuucggcgccgaccccauccacagccugcgggugugcgucgacaccgugcgcaccaacguguaccuggccgucuucgacaagaaccucuacgacaagcugguguccagcuuccuggagaugaagagcgagaagcagguggagcagaagaucgccgagauccccaaggaggaggucaagcccuucaucaccgaguccaagccgagcguggagcagcggaagcaggacgacaagaagaucaaggcgugcguggaggaggucacgaccacccucgaggagaccaaguuccugacggagaaccugcuccuguacaucgacaucaacgggaaccugcaccccgacuccgccacccucgugagcgacaucgacaucaccuuccugaagaaggacgcccccuacaucgugggcgacgucgugcaggagggcgugcugaccgccgucgugauccccacgaagaaggccgggggcaccaccgagaugcucgcgaaggcccugcgcaaggugccgaccgacaacuacaucacgaccuaccccgggcagggccugaacggguacaccgucgaggaggccaagaccgugcucaagaagugcaaguccgccuucuacauccugcccagcaucaucuccaacgagaagcaggagauccugggcaccgugagcuggaaccuccgggagaugcuggcgcacgccgaggagacgcgcaagcugaugcccgucugcguggagaccaaggccaucguguccaccauccagcggaaguacaagggcaucaagauccaggagggggucguggacuacggcgcccgcuucuacuucuacaccagcaagacgaccguggccucccugaucaacacccucaacgaccugaacgagacccuggucacgaugccgcucggguacgugacccacggccugaaccuggaggaggcggcccgguacaugcgcagccucaaggugcccgccaccgucuccgugagcucccccgacgccgugaccgccuacaacggguaccugacgagcuccagcaagacccccgaggagcacuucaucgagaccaucucccuggcgggcagcuacaaggacuggagcuacuccggccagagcacccagcucgggaucgaguuccugaagcggggcgacaaguccgucuacuacacgagcaacccgaccaccuuccaccuggacggggaggugaucaccuucgacaaccucaagacgcugcugucccuccgcgaggugcggaccaucaaggucuucaccaccguggacaacaucaaccugcacacgcagguggucgacaugagcaugaccuacggccagcaguucggccccaccuaccuggacggggccgacgugaccaagaucaagccccacaacucccacgagggcaagacguucuacgugcucccgaacgacgacacccugcgcgucgaggccuucgagcacuaccacaccaccgaccccagcuuccuggggcgguacauguccgcccucaaccacacgaagaaguggaaguacccccaggugaacggccugaccagcaucaagugggccgacaacaacugcuaccuggcgaccgcccuccugacccugcagcagaucgagcucaaguucaaccccccggcccugcaggacgccuacuaccgcgcgcgggccggggaggccgccaacuucugcgcccugauccucgcguacugcaacaagacggugggcgagcugggcgacguccgcgagaccauguccuaccuguuccagcacgccaaccucgacagcugcaagcgggugcugaacgucgugugcaagaccugcgggcagcagcagaccacccugaagggcguggaggccgucauguacauggggacgcucuccuacgagcaguucaagaagggcgugcagauccccugcaccugcgggaagcaggccaccaaguaccuggugcagcaggagagccccuucgucaugauguccgcccccccggcgcaguacgagcugaagcacggcaccuucacgugcgccagcgaguacaccggcaacuaccagugcgggcacuacaagcacaucaccuccaaggagacccucuacugcaucgacggcgcccugcugacgaagagcagcgaguacaaggggcccaucaccgacguguucuacaaggagaacuccuacaccaccacgaucaagcccgugaccuacaagcucgacggcgucgugugcaccgagaucgaccccaagcuggacaacuacuacaagaaggacaacagcuacuucaccgagcagccgaucgaccuggugcccaaccagcccuaccccaacgccuccuucgacaacuucaaguucgucugcgacaacaucaaguucgccgacgaccucaaccagcugacgggguacaagaagccggcgagccgcgagcugaaggugaccuucuuccccgaccucaacggcgacguggucgccaucgacuacaagcacuacacccccuccuucaagaagggcgccaagcugcugcacaagcccaucguguggcacgugaacaacgccaccaacaaggcgacguacaagccgaacaccuggugcauccggugccucuggagcaccaagcccgucgagaccuccaacagcuucgacgugcugaaguccgaggacgcccaggggauggacaaccuggccugcgaggaccucaagcccgugagcgaggaggucguggagaaccccacgauccagaaggacgugcuggagugcaacgucaagaccaccgagguggugggcgacaucauccugaagccggccaacaacucccucaagaucaccgaggaggucgggcacacggaccugauggccgcguacguggacaacagcucccugaccaucaagaagcccaacgagcucagccgcgugcugggccugaagacccucgccacccacgggcuggccgccgucaacuccgugcccugggacacgaucgccaacuacgcgaagccguuccugaacaagguggucagcaccaccaccaacaucgugacgcgcugccucaaccgggugugcaccaacuacaugcccuacaucuucacccugcugcuccagcugugcaccuucacccgcuccacgaacagccggaucaaggccuccaugcccaccaccaucgccaagaacaccgucaagagcgugggcaaguucugccuggaggccagcuucaacuaccucaagucccccaacuucagcaagcugaucaacaucaucaucugguuccugcuccuguccgugugccugggcagccucaucuacuccacggccgcgcuggggguccugaugagcaaccucggcaugccguccuacugcaccggguaccgcgagggcuaccugaacagcaccaacgugaccaucgccacguacugcaccggcuccauccccugcagcgugugccuguccgggcucgacagccuggacaccuaccccucccuggagaccauccagaucacgaucagcuccuucaagugggaccucaccgccuucggccuggucgccgagugguuccuggccuacauccucuucacccgguucuucuacgugcuggggcuggcggccaucaugcagcucuucuucagcuacuucgccgugcacuucaucuccaacagcuggcugauguggcugaucaucaaccugguccagauggcccccaucuccgcgauggugcgcauguacaucuucuucgccagcuucuacuacguguggaagagcuacguccacgugguggacggcugcaacuccagcaccugcaugaugugcuacaagcggaaccgcgccacgcgggucgagugcaccaccaucgugaacgggguccgccgguccuucuacguguacgccaacggcggcaagggguucugcaagcuccacaacuggaacugcgugaacugcgacaccuucugcgccggcagcacguucaucuccgacgaggucgcgcgcgaccugagccugcaguucaagcggccgaucaaccccaccgaccaguccagcuacaucguggacuccgugaccgucaagaacgggagcauccaccucuacuucgacaaggccggccagaagaccuacgagcgccacucccugagccacuucgugaaccuggacaaccuccgggccaacaacacgaaggggucccugcccaucaacgugaucgucuucgacggcaagagcaagugcgaggaguccagcgccaaguccgccagcguguacuacucccagcugaugugccagcccauccuccugcuggaccaggcgcucgugagcgacgucggcgacagcgccgagguggccgugaagauguucgacgccuacgucaacaccuucuccagcaccuucaacgugccgauggagaagcugaagacccugguggccacggcggaggccgagcucgccaagaacgucucccuggacaacgugcugagcaccuucaucuccgccgcgcgccagggguucguggacagcgacgucgagaccaaggacgugguggagugccucaagcugucccaccagagcgacaucgaggucaccggcgacuccugcaacaacuacaugcugacguacaacaagguggagaacaugaccccccgggaccucggggccugcaucgacugcagcgcccgccacaucaacgcccagguggccaagucccacaacaucgcgcugaucuggaacgucaaggacuucaugagccuguccgagcagcuccggaagcagauccgcagcgccgccaagaagaacaaccugcccuucaagcugaccugcgccaccacgcgccagguggugaacgucgugaccaccaagaucgcccucaagggcgggugaggacuaguuauaagacugacuagcccgaugggccucccaacgggcccuccuccccuccuugcaccgagauuaauaaaaaaaaaaaaaaaaaaaaaaaaaaaaaaaaaaaaaaaaaaaaaaaaaaaaaaaaaaaaaaaaugcaucccccccccccccccccccccccccccccccaaaggcucuuuucagagccaccagaauu

SEQ ID NO: 22009 - RNA, 6058 nt, Artificial Sequence
  SARS-CoV-2__MT358724.1__non-structural protein 3 (NSP3) mRNA gc
aggagaaagcuuaccauggcccccaccaaggugaccuucggcgacgacacggucaucgaggugcagggguacaagagcgugaacaucaccuucgagcuggacgagcgcaucgacaagguccucaacgagaagugcuccgccuacaccguggagcugggcaccgaggugaacgaguucgcgugcgucguggccgacgccgugaucaagacgcugcagccggucagcgagcuccugaccccccuggggaucgaccucgacgagugguccauggccaccuacuaccuguucgacgagagcggcgaguucaagcuggccucccacauguacugcagcuucuacccccccgacgaggacgaggaggagggggacugcgaggaggaggaguucgagccguccacccaguacgaguacggcacggaggacgacuaccagggcaagccccucgaguucggggcgaccagcgccgcccugcagcccgaggaggagcaggaggaggacuggcuggacgacgacucccagcagaccgugggccagcaggacgggagcgaggacaaccagaccacgaccauccagaccaucguggagguccagccccagcucgagauggagcugaccccgguggugcagacgaucgaggucaacuccuucagcggcuaccugaagcucaccgacaacguguacaucaagaacgccgacaucguggaggaggcgaagaaggucaagcccaccgugguggucaacgccgccaacguguaccugaagcacgggggcggcguggccggggcccugaacaaggcgaccaacaacgccaugcaggucgaguccgacgacuacaucgccacgaacggcccccucaagguggggggcagcugcguccuguccggccacaaccuggccaagcacugccuccacgugguggggcccaacgucaacaagggcgaggacauccagcugcugaagagcgccuacgagaacuucaaccagcacgaggugcuccuggcgccgcugcucuccgccgggaucuucggcgccgaccccauccacagccugcgggugugcgucgacaccgugcgcaccaacguguaccuggccgucuucgacaagaaccucuacgacaagcugguguccagcuuccuggagaugaagagcgagaagcagguggagcagaagaucgccgagauccccaaggaggaggucaagcccuucaucaccgaguccaagccgagcguggagcagcggaagcaggacgacaagaagaucaaggcgugcguggaggaggucacgaccacccucgaggagaccaaguuccugacggagaaccugcuccuguacaucgacaucaacgggaaccugcaccccgacuccgccacccucgugagcgacaucgacaucaccuuccugaagaaggacgcccccuacaucgugggcgacgucgugcaggagggcgugcugaccgccgucgugauccccacgaagaaggccgggggcaccaccgagaugcucgcgaaggcccugcgcaaggugccgaccgacaacuacaucacgaccuaccccgggcagggccugaacggguacaccgucgaggaggccaagaccgugcucaagaagugcaaguccgccuucuacauccugcccagcaucaucuccaacgagaagcaggagauccugggcaccgugagcuggaaccuccgggagaugcuggcgcacgccgaggagacgcgcaagcugaugcccgucugcguggagaccaaggccaucguguccaccauccagcggaaguacaagggcaucaagauccaggagggggucguggacuacggcgcccgcuucuacuucuacaccagcaagacgaccguggccucccugaucaacacccucaacgaccugaacgagacccuggucacgaugccgcucggguacgugacccacggccugaaccuggaggaggcggcccgguacaugcgcagccucaaggugcccgccaccgucuccgugagcucccccgacgccgugaccgccuacaacggguaccugacgagcuccagcaagacccccgaggagcacuucaucgagaccaucucccuggcgggcagcuacaaggacuggagcuacuccggccagagcacccagcucgggaucgaguuccugaagcggggcgacaaguccgucuacuacacgagcaacccgaccaccuuccaccuggacggggaggugaucaccuucgacaaccucaagacgcugcugucccuccgcgaggugcggaccaucaaggucuucaccaccguggacaacaucaaccugcacacgcagguggucgacaugagcaugaccuacggccagcaguucggccccaccuaccuggacggggccgacgugaccaagaucaagccccacaacucccacgagggcaagacguucuacgugcucccgaacgacgacacccugcgcgucgaggccuucgaguacuaccacaccaccgaccccagcuuccuggggcgguacauguccgcccucaaccacacgaagaaguggaaguacccccaggugaacggccugaccagcaucaagugggccgacaacaacugcuaccuggcgaccgcccuccugacccugcagcagaucgagcucaaguucaaccccccggcccugcaggacgccuacuaccgcgcgcgggccggggaggccgccaacuucugcgcccugauccucgcguacugcaacaagacggugggcgagcugggcgacguccgcgagaccauguccuaccuguuccagcacgccaaccucgacagcugcaagcgggugcugaacgucgugugcaagaccugcgggcagcagcagaccacccugaagggcguggaggccgucauguacauggggacgcucuccuacgagcaguucaagaagggcgugcagauccccugcaccugcgggaagcaggccaccaaguaccuggugcagcaggagagccccuucgucaugauguccgcccccccggcgcaguacgagcugaagcacggcaccuucacgugcgccagcgaguacaccggcaacuaccagugcgggcacuacaagcacaucaccuccaaggagacccucuacugcaucgacggcgcccugcugacgaagagcagcgaguacaaggggcccaucaccgacguguucuacaaggagaacuccuacaccaccacgaucaagcccgugaccuacaagcucgacggcgucgugugcaccgagaucgaccccaagcuggacaacuacuacaagaaggacaacagcuacuucaccgagcagccgaucgaccuggugcccaaccagcccuaccccaacgccuccuucgacaacuucaaguucgucugcgacaacaucaaguucgccgacgaccucaaccagcugacgggguacaagaagccggcgagccgcgagcugaaggugaccuucuuccccgaccucaacggcgacguggucgccaucgacuacaagcacuacacccccuccuucaagaagggcgccaagcugcugcacaagcccaucguguggcacgugaacaacgccaccaacaaggcgacguacaagccgaacaccuggugcauccggugccucuggagcaccaagcccgucgagaccuccaacagcuucgacgugcugaaguccgaggacgcccaggggauggacaaccuggccugcgaggaccucaagcccgugagcgaggaggucauggagaaccccacgauccagaaggacgugcuggagugcaacgugaagaccaccgaggucgugggcgacaucauccugaagccggccaacaacucccucaagaucaccgaggagguggggcacacggaccugauggccgcguacgucgacaacagcucccugaccaucaagaagcccaacgagcucagccgcgugcugggccugaagacccucgccacccacgggcuggccgccgugaacuccguccccugggacacgaucgccaacuacgcgaagccguuccugaacaagguggugagcaccaccaccaacaucgucacgcgcugccucaaccgggugugcaccaacuacaugcccuacuucuucacccugcugcuccagcugugcaccuucacccgcuccacgaacagccggaucaaggccuccaugcccaccaccaucgccaagaacaccgugaagagcgucggcaaguucugccuggaggccagcuucaacuaccucaagucccccaacuucagcaagcugaucaacaucaucaucugguuccugcuccuguccgugugccugggcagccucaucuacuccacggccgcgcugggggugcugaugagcaaccucggcaugccguccuacugcaccggguaccgcgagggcuaccugaacagcaccaacgucaccaucgccacguacugcaccggcuccauccccugcagcgugugccuguccgggcucgacagccuggacaccuaccccucccuggagaccauccagaucacgaucagcuccuucaagugggaccucaccgccuucggccugguggccgagugguuccuggccuacauccucuucacccgguucuucuacguccuggggcuggcggccaucaugcagcucuucuucagcuacuucgccgugcacuucaucuccaacagcuggcugauguggcugaucaucaaccuggugcagauggcccccaucuccgcgaugguccgcauguacaucuucuucgccagcuucuacuacguguggaagagcuacgugcacgucguggacggcugcaacuccagcaccugcaugaugugcuacaagcggaaccgcgccacgcggguggagugcaccaccaucgucaacggggugcgccgguccuucuacgucuacgccaacggcggcaagggguucugcaagcuccacaacuggaacugcgugaacugcgacaccuucugcgccggcagcacguucaucuccgacgagguggcgcgcgaccugagccugcaguucaagcggccgaucaaccccaccgaccaguccagcuacaucgucgacuccgugaccgugaagaacgggagcauccaccucuacuucgacaaggccggccagaagaccuacgagcgccacucccugagccacuucgucaaccuggacaaccuccgggccaacaacacgaaggggucccugcccaucaacgugaucguguucgacggcaagagcaagugcgaggaguccagcgccaaguccgccagcgucuacuacucccagcugaugugccagcccauccuccugcuggaccaggcgcucgugagcgacgugggcgacagcgccgaggucgccgugaagauguucgacgccuacgugaacaccuucuccagcaccuucaacgucccgauggagaagcugaagacccugguggccacggcggaggccgagcucgccaagaacgugucccuggacaacguccugagcaccuucaucuccgccgcgcgccagggguucguggacagcgacguggagaccaaggacgucguggagugccucaagcugucccaccagagcgacaucgaggugaccggcgacuccugcaacaacuacaugcugacguacaacaaggucgagaacaugaccccccgggaccucggggccugcaucgacugcagcgcccgccacaucaacgcccagguggccaagucccacaacaucgcgcugaucuggaacgugaaggacuucaugagccuguccgagcagcuccggaagcagauccgcagcgccgccaagaagaacaaccugcccuucaagcugaccugcgccaccacgcgccaggucgugaacguggucaccaccaagaucgcccucaagggcgggugaggacuaguuauaagacugacuagcccgaugggccucccaacgggcccuccuccccuccuugcaccgagauuaauaaaaaaaaaaaaaaaaaaaaaaaaaaaaaaaaaaaaaaaaaaaaaaaaaaaaaaaaaaaaaaaaugcaucccccccccccccccccccccccccccccccaaaggcucuuuucagagccaccagaauu

SEQ ID NO: 22010 - RNA, 6058 nt, Artificial Sequence
  SARS-CoV-2__MT114416.1__non-structural protein 3 (NSP3) mRNA gc
aggagaaagcuuaccauggcccccaccaaggugaccuucggcgacgacacggucaucgaggugcagggguacaagagcgugaacaucaccuucgagcuggacgagcgcaucgacaagguccucaacgagaagugcuccgccuacaccguggagcugggcaccgaggugaacgaguucgcgugcgucguggccgacgccgugaucaagacgcugcagccggucagcgagcuccugaccccccuggggaucgaccucgacgagugguccauggccaccuacuaccuguucgacgagagcggcgaguucaagcuggccucccacauguacugcagcuucuacccccccgacgaggacgaggaggagggggacugcgaggaggaggaguucgagccguccacccaguacgaguacggcacggaggacgacuaccagggcaagccccucgaguucggggcgaccagcgccgcccugcagcccgaggaggagcaggaggaggacuggcuggacgacgacucccagcagaccgugggccagcaggacgggagcgaggacaaccagaccacgaccauccagaccaucguggagguccagccccagcucgagauggagcugaccccgguggugcagacgaucgaggucaacuccuucagcggcuaccugaagcucaccgacaacguguacaucaagaacgccgacaucguggaggaggcgaagaaggucaagcccaccgugguggucaacgccgccaacguguaccugaagcacgggggcggcguggccggggcccugaacaaggcgaccaacaacgccaugcaggucgaguccgacgacuacaucgccacgaacggcccccucaagguggggggcagcugcguccuguccggccacaaccuggccaagcacugccuccacgugguggggcccaacgucaacaagggcgaggacauccagcugcugaagagcgccuacgagaacuucaaccagcacgaggugcuccuggcgccgcugcucuccgccgggaucuucggcgccgaccccauccacagccugcgggugugcgucgacaccgugcgcaccaacguguaccuggccgucuucgacaagaaccucuacgacaagcugguguccagcuuccuggagaugaagagcgagaagcagguggagcagaagaucgccgagauccccaaggaggaggucaagcccuucaucaccgaguccaagccgagcguggagcagcggaagcaggacgacaagaagaucaaggcgugcguggaggaggucacgaccacccucgaggagaccaaguuccugacggagaaccugcuccuguacaucgacaucaacgggaaccugcaccccgacuccgccacccucgugagcgacaucgacaucaccuuccugaagaaggacgcccccuacaucgugggcgacgucgugcaggagggcgugcugaccgccgucgugauccccacgaagaaggccgggggcaccaccgagaugcucgcgaaggcccugcgcaaggugccgaccgacaacuacaucacgaccuaccccgggcagggccugaacggguacaccgucgaggaggccaagaccgugcucaagaagugcaaguccgccuucuacauccugcccagcaucaucuccaacgagaagcaggagauccugggcaccgugagcuggaaccuccgggagaugcuggcgcacgccgaggagacgcgcaagcugaugcccgucugcguggagaccaaggccaucguguccaccauccagcggaaguacaagggcaucaagauccaggagggggucguggacuacggcgcccgcuucuacuucuacaccagcaagacgaccguggccucccugaucaacacccucaacgaccugaacgagacccuggucacgaugccgcucggguacgugacccacggccugaaccuggaggaggcggcccgguacaugcgcagccucaaggugcccgccaccgucuccgugagcucccccgacgccgugaccgccuacaacggguaccugacgagcuccagcaagacccccgaggagcacuucaucgagaccaucucccuggcgggcagcuacaaggacuggagcuacuccggccagagcacccagcucgggaucgaguuccugaagcggggcgacaaguccgucuacuacacgagcaacccgaccaccuuccaccuggacggggaggugaucaccuucgacaaccucaagacgcugcugucccuccgcgaggugcggaccaucaaggucuucaccaccguggacaacaucaaccugcacacgcagguggucgacaugagcaugaccuacggccagcaguucggccccaccuaccuggacggggccgacgugaccaagaucaagccccacaacucccacgagggcaagacguucuacgugcucccgaacgacgacacccugcgcgucgaggccuucgaguacuaccacaccaccgaccccagcuuccuggggcgguacauguccgcccucaaccacacgaagaaguggaaguacccccaggugaacggccugaccagcaucaagugggccgacaacaacugcuaccuggcgaccgcccuccugacccugcagcagaucgagcucaaguucaaccccccggcccugcaggacgccuacuaccgcgcgcgggccggggaggccgccaacuucugcgcccugauccucgcguacugcaacaagacggugggcgagcugggcgacguccgcgagaccauguccuaccuguuccagcacgccaaccucgacagcugcaagcgggugcugaacgucgugugcaagaccugcgggcagcagcagaccacccugaagggcguggaggccgucauguacauggggacgcucuccuacgagcaguucaagaagggcgugcagauccccugcaccugcgggaagcaggccaccaaguaccuggugcagcaggagagccccuucgucaugauguccgcccccccggcgcaguacgagcugaagcacggcaccuucacgugcgccagcgaguacaccggcaacuaccagugcgggcacuacaagcacaucaccuccaaggagacccucuacugcaucgacggcgcccugcugacgaagagcagcgaguacaaggggcccaucaccgacguguucuacaaggagaacuccuacaccaccacgaucaagcccgugaccuacaagcucgacggcgucgugugcaccgagaucgaccccaagcuggacaacuacuacaagaaggacaacagcuacuucaccgagcagccgaucgaccuggugcccaaccagcccuaccccaacgccuccuucgacaacuucaaguucgucugcgacaacaucaaguucgccgacgaccucaaccagcugacgggguacaagaagccggcgagccgcgagcugaaggugaccuucuuccccgaccucaacggcgacguggucgccaucgacuacaagcacuacacccccuccuucaagaagggcgccaagcugcugcacaagcccaucguguggcacgugaacaacgccaccaacaaggcgacguacaagccgaacaccuggugcauccggugccucuggagcaccaagcccgucgagaccuccaacagcuucgacgugcugaaguccgaggacgcccaggggauggacaaccuggccugcgaggaccucaagcccgugagcgaggaggucguggagaaccccacgauccagaaggacgugcuggagugcaacgucaagaccaccgagguggugggcgacaucauccugaagcucgccaacaacucccugaagaucaccgaggaggucgggcacacggaccugauggccgcguacguggacaacagcucccucaccaucaagaagccgaacgagcugagccgcgugcugggccucaagacccuggccacccacgggcuggccgccgucaacuccgugcccugggacacgaucgccaacuacgcgaagcccuuccucaacaagguggucagcaccaccaccaacaucgugacgcgcugccugaaccgggugugcaccaacuacaugccguacuucuucacccugcuccugcagcugugcaccuucacccgcuccacgaacagccggaucaaggccuccaugcccaccaccaucgccaagaacaccgucaagagcgugggcaaguucugccucgaggccagcuucaacuaccugaagucccccaacuucagcaagcugaucaacaucaucaucugguuccuccugcuguccgugugccucggcagccugaucuacuccacggccgcgcuggggguccucaugagcaaccugggcaugcccuccuacugcaccggguaccgcgagggcuaccugaacagcaccaacgugaccaucgccacguacugcaccggcuccaucccgugcagcgugugccucuccgggcuggacagccuggacaccuaccccucccucgagaccauccagaucacgaucagcuccuucaagugggaccugaccgccuucggccuggucgccgagugguuccucgccuacauccuguucacccgguucuucuacgugcuggggcucgcggccaucaugcagcuguucuucagcuacuucgccgugcacuucaucuccaacagcuggcugauguggcugaucaucaaccucguccagauggcccccaucuccgcgauggugcgcauguacaucuucuucgccagcuucuacuacguguggaagagcuacguccacgugguggacggcugcaacuccagcaccugcaugaugugcuacaagcggaaccgcgccacgcgggucgagugcaccaccaucgugaacgggguccgccgguccuucuacguguacgccaacggcggcaagggguucugcaagcugcacaacuggaacugcgugaacugcgacaccuucugcgccggcagcacguucaucuccgacgaggucgcgcgcgaccugagccuccaguucaagcggcccaucaacccgaccgaccaguccagcuacaucguggacuccgugaccgucaagaacgggagcauccaccuguacuucgacaaggccggccagaagaccuacgagcgccacucccugagccacuucgugaaccucgacaaccugcgggccaacaacacgaaggggucccugcccaucaacgugaucgucuucgacggcaagagcaagugcgaggaguccagcgccaaguccgccagcguguacuacucccagcucaugugccagcccauccugcugcucgaccaggcgcuggugagcgacgucggcgacagcgccgagguggccgugaagauguucgacgccuacgucaacaccuucuccagcaccuucaacgugcccauggagaagcugaagacccucguggccacggcggaggccgagcuggccaagaacgucucccuggacaacgugcucagcaccuucaucuccgccgcgcgccagggguucguggacagcgacgucgagaccaaggacgugguggagugccugaagcugucccaccagagcgacaucgaggucaccggcgacuccugcaacaacuacaugcucacguacaacaagguggagaacaugaccccgcgggaccugggggccugcaucgacugcagcgcccgccacaucaacgcccagguggccaagucccacaacaucgcgcugaucuggaacgucaaggacuucaugagccucuccgagcagcugcggaagcagauccgcagcgccgccaagaagaacaaccugcccuucaagcucaccugcgccaccacgcgccagguggugaacgucgugaccaccaagaucgcccugaagggcgggugaggacuaguuauaagacugacuagcccgaugggccucccaacgggcccuccuccccuccuugcaccgagauuaauaaaaaaaaaaaaaaaaaaaaaaaaaaaaaaaaaaaaaaaaaaaaaaaaaaaaaaaaaaaaaaaaugcaucccccccccccccccccccccccccccccccaaaggcucuuuucagagccaccagaauu

SEQ ID NO: 22011 - RNA, 6058 nt, Artificial Sequence
  SARS-CoV-2__MT350247.1__non-structural protein 3 (NSP3) mRNA gc
aggagaaagcuuaccauggcccccaccaaggugaccuucggcgacgacacggucaucgaggugcagggguacaagagcgugaacaucaccuucgagcuggacgagcgcaucgacaagguccucaacgagaagugcuccgccuacaccguggagcugggcaccgaggugaacgaguucgcgugcgucguggccgacgccgugaucaagacgcugcagccggucagcgagcuccugaccccccuggggaucgaccucgacgagugguccauggccaccuacuaccuguucgacgagagcggcgaguucaagcuggccucccacauguacugcagcuucuacccccccgacgaggacgaggaggagggggacugcgaggaggaggaguucgagccguccacccaguacgaguacggcacggaggacgacuaccagggcaagccccucgaguucggggcgaccagcgccgcccugcagcccgaggaggagcaggaggaggacuggcuggacgacgacucccagcagaccgugggccagcaggacgggagcgaggacaaccagaccacgaccauccagaccaucguggagguccagccccagcucgagauggagcugaccccgguggugcagacgaucgaggucaacuccuucagcggcuaccugaagcucaccgacaacguguacaucaagaacgccgacaucguggaggaggcgaagaaggucaagcccaccgugguggucaacgccgccaacguguaccugaagcacgggggcggcguggccggggcccugaacaaggcgaccaacaacgccaugcaggucgaguccgacgacuacaucgccacgaacggcccccucaagguggggggcagcugcguccuguccggccacaaccuggccaagcacugccuccacgugguggggcccaacgucaacaagggcgaggacauccagcugcugaagagcgccuacgagaacuucaaccagcacgaggugcuccuggcgccgcugcucuccgccgggaucuucggcgccgaccccauccacagccugcgggugugcgucgacaccgugcgcaccaacguguaccuggccgucuucgacaagaaccucuacgacaagcugguguccagcuuccuggagaugaagagcgagaagcagguggagcagaagaucgccgagauccccaaggaggaggucaagcccuucaucaccgaguccaagagcuccguggagcagcggaagcaggacgacaagaagaucaaggcgugcguggaggaggucacgaccacccucgaggagaccaaguuccugacggagaaccugcuccuguacaucgacaucaacgggaaccugcacccggacagcgccacccucguguccgacaucgacaucaccuuccugaagaaggacgcccccuacaucgugggcgacgucgugcaggagggcgugcugaccgccgucgugauccccacgaagaaggccgggggcaccaccgagaugcucgcgaaggcccugcgcaaggugcccaccgacaacuacaucacgaccuacccggggcagggccugaacggguacaccgucgaggaggccaagaccgugcucaagaagugcaagagcgccuucuacauccugcccuccaucaucagcaacgagaagcaggagauccugggcaccguguccuggaaccuccgggagaugcuggcgcacgccgaggagacgcgcaagcugaugcccgucugcguggagaccaaggccaucgugagcaccauccagcggaaguacaagggcaucaagauccaggagggggucguggacuacggcacccgcuucuacuucuacacguccaagaccaccguggccagccugaucaacacccucaacgaccugaacgagacgcuggucaccaugccccucggguacgugacccacggccugaaccuggaggaggccgcgcgguacaugcgcucccucaaggugccggccaccgucagcguguccagccccgacgccgugacggccuacaacggguaccugaccuccagcuccaagacccccgaggagcacuucaucgagaccaucagccuggccggcagcuacaaggacugguccuacagcggccaguccacgcagcucgggaucgaguuccugaagcggggcgacaagagcgucuacuacaccuccaaccccaccaccuuccaccuggacggggaggugaucacguucgacaaccucaagacccugcugagccuccgcgaggugcggaccaucaaggucuucaccacgguggacaacaucaaccugcacacccagguggucgacauguccaugaccuacggccagcaguucggcccgaccuaccuggacggggcggacgugacgaagaucaagccccacaacagccacgagggcaagaccuucuacgugcuccccaacgacgacacccugcgcgucgaggccuucgaguacuaccacaccacggacccguccuuccuggggcgguacaugagcgcccucaaccacaccaagaaguggaaguacccccaggugaacggccugaccuccaucaagugggccgacaacaacugcuaccuggccaccgcgcuccugacgcugcagcagaucgagcucaaguucaacccccccgcccugcaggacgccuacuaccgcgcccgggcgggggaggccgccaacuucugcgcccugauccucgccuacugcaacaagaccgugggcgagcugggcgacguccgcgagaccaugagcuaccuguuccagcacgcgaaccucgacuccugcaagcgggugcugaacgucgugugcaagaccugcgggcagcagcagaccacgcugaagggcguggaggccgucauguacauggggacccucagcuacgagcaguucaagaagggcgugcagaucccgugcaccugcgggaagcaggccaccaaguaccuggugcagcaggagucccccuucgucaugaugagcgccccccccgcccaguacgagcugaagcacggcacguucaccugcgcguccgaguacaccggcaacuaccagugcgggcacuacaagcacaucaccagcaaggagacgcucuacugcaucgacggcgcccugcugaccaagagcuccgaguacaaggggccgaucaccgacguguucuacaaggagaacagcuacaccacgaccaucaagcccgugaccuacaagcucgacggcgucgugugcaccgagaucgaccccaagcuggacaacuacuacaagaaggacaacuccuacuucacggagcagcccaucgaccuggugccgaaccagcccuaccccaacgccagcuucgacaacuucaaguucgucugcgacaacaucaaguucgccgacgaccucaaccagcugaccggguacaagaagcccgccucccgcgagcugaaggugaccuucuucccggaccucaacggcgacguggucgcgaucgacuacaagcacuacacccccagcuucaagaagggcgccaagcugcugcacaagcccaucguguggcacgugaacaacgccacgaacaaggccaccuacaagcccaacaccuggugcauccggugccucugguccaccaagccggucgagacgagcaacuccuucgacgugcugaagagcgaggacgcgcaggggauggacaaccuggccugcgaggaccucaagcccguguccgaggaggucguggagaaccccaccauccagaaggacgugcuggagugcaacgucaagaccaccgagguggugggcgacaucauccugaagcccgccaacaacagccucaagaucacggaggaggucgggcacaccgaccugauggccgccuacguggacaacuccagccugaccaucaagaagccgaacgagcucucccgcgugcugggccugaagacccucgcgacgcacgggcuggccgccgucaacagcgugcccugggacaccaucgccaacuacgccaagcccuuccugaacaagguggucuccaccaccacgaacaucgugacccgcugccucaaccgggugugcaccaacuacaugccguacuucuucacccugcugcuccagcugugcaccuucacgcgcagcaccaacucccggaucaaggcgagcaugcccaccaccaucgccaagaacacggucaagagcgugggcaaguucugccuggaggccuccuucaacuaccucaagagccccaacuucuccaagcugaucaacaucaucaucugguuccugcuccugagcgugugccugggcucccucaucuacagcaccgccgcccuggggguccugauguccaaccucggcaugcccagcuacugcaccggguaccgcgagggcuaccugaacuccaccaacgugacgaucgcgaccuacugcaccggcagcaucccgugcuccgugugccugagcgggcucgacucccuggacaccuaccccagccuggagacgauccagaucaccaucuccagcuucaagugggaccucaccgccuucggccuggucgccgagugguuccuggccuacauccucuucacccgguucuucuacgugcuggggcuggccgcgaucaugcagcucuucuucuccuacuucgccgugcacuucaucagcaacuccuggcugauguggcugaucaucaaccugguccagauggcccccaucagcgccauggugcgcauguacaucuucuucgcgagcuucuacuacguguggaaguccuacguccacgugguggacggcugcaacagcuccacgugcaugaugugcuacaagcggaaccgcgccacccgggucgagugcaccaccaucgugaacgggguccgccggagcuucuacguguacgccaacggcggcaagggguucugcaagcuccacaacuggaacugcgugaacugcgacacguucugcgccggcuccaccuucaucagcgacgaggucgcccgcgaccugucccugcaguucaagcggcccaucaacccgaccgaccagagcuccuacaucguggacagcgugaccgucaagaacggguccauccaccucuacuucgacaaggcgggccagaagacguacgagcgccacagccugucccacuucgugaaccuggacaaccuccgggccaacaacaccaaggggagccugcccaucaacgugaucgucuucgacggcaaguccaagugcgaggagagcuccgccaagagcgccuccguguacuacagccagcugaugugccagcccauccuccugcuggaccaggcccucgugagcgacgucggcgacuccgcggagguggccgugaagauguucgacgccuacgucaacaccuucagcuccaccuucaacgugcccauggagaagcugaagacgcugguggccaccgccgaggcggagcucgccaagaacgucagccuggacaacgugcuguccaccuucaucagcgccgcccgccagggguucguggacuccgacgucgagaccaaggacgugguggagugccucaagcugagccaccaguccgacaucgaggucacgggcgacagcugcaacaacuacaugcugaccuacaacaagguggagaacaugaccccgcgggaccucggggcgugcaucgacugcuccgcccgccacaucaacgcccagguggccaagagccacaacaucgcccugaucuggaacgucaaggacuucaugucccugagcgagcagcuccggaagcagauccgcuccgcggccaagaagaacaaccugcccuucaagcugaccugcgccacgacccgccagguggugaacgucgugaccaccaagaucgcccucaagggcgggugaggacuaguuauaagacugacuagcccgaugggccucccaacgggcccuccuccccuccuugcaccgagauuaauaaaaaaaaaaaaaaaaaaaaaaaaaaaaaaaaaaaaaaaaaaaaaaaaaaaaaaaaaaaaaaaaugcaucccccccccccccccccccccccccccccccaaaggcucuuuucagagccaccagaauu

SEQ ID NO: 22012 - RNA, 6058 nt, Artificial Sequence
  SARS-CoV-2__MT345816.1__non-structural protein 3 (NSP3) mRNA gc
aggagaaagcuuaccauggcccccaccaaggugaccuucggcgacgacacggucaucgaggugcagggguacaagagcgugaacaucaccuucgagcuggacgagcgcaucgacaagguccucaacgagaagugcuccgccuacaccguggagcugggcaccgaggugaacgaguucgcgugcgucguggccgacgccgugaucaagacgcugcagccggucagcgagcuccugaccccccuggggaucgaccucgacgagugguccauggccaccuacuaccuguucgacgagagcggcgaguucaagcuggccucccacauguacugcagcuucuacccccccgacgaggacgaggaggagggggacugcgaggaggaggaguucgagccguccacccaguacgaguacggcacggaggacgacuaccagggcaagccccucgaguucggggcgaccagcgccgcccugcagcccgaggaggagcaggaggaggacuggcuggacgacgacucccagcagaccgugggccagcaggacgggagcgaggacaaccagaccacgaccauccagaccaucguggagguccagccccagcucgagauggagccgacccccguggugcagacgaucgaggucaacuccuucagcggcuaccugaagcugaccgacaacguguacaucaagaacgccgacaucguggaggaggcgaagaaggucaagcccaccgugguggucaacgccgccaacguguaccucaagcacgggggcggcguggccggggcccugaacaaggcgaccaacaacgccaugcaggucgaguccgacgacuacaucgccacgaacggcccccugaagguggggggcagcugcguccucuccggccacaaccuggccaagcacugccugcacgugguggggccgaacgucaacaagggcgaggacauccagcuccugaagagcgccuacgagaacuucaaccagcacgaggugcugcucgcgccccugcuguccgccgggaucuucggcgccgaccccauccacagccuccgggugugcgucgacaccgugcgcaccaacguguaccuggccgucuucgacaagaaccuguacgacaagcucguguccagcuuccuggagaugaagagcgagaagcagguggagcagaagaucgccgagauccccaaggaggaggucaagccguucaucaccgaguccaagcccagcguggagcagcggaagcaggacgacaagaagaucaaggcgugcguggaggaggucacgaccacccuggaggagaccaaguuccucacggagaaccugcugcucuacaucgacaucaacgggaaccugcaccccgacuccgccacccuggugagcgacaucgacaucaccuuccucaagaaggacgcccccuacaucgugggcgacgucgugcaggagggcgugcugaccgccgucgugaucccgacgaagaaggccgggggcaccaccgagaugcuggcgaaggcccuccgcaaggugcccaccgacaacuacaucacgaccuaccccgggcagggccugaacggguacaccgucgaggaggccaagaccgugcugaagaagugcaaguccgccuucuacauccuccccagcaucaucuccaacgagaagcaggagauccugggcaccgugagcuggaaccugcgggagaugcucgcgcacgccgaggagacgcgcaagcugaugccggucugcguggagaccaaggccaucguguccaccauccagcggaaguacaagggcaucaagauccaggagggggucguggacuacggcgcccgcuucuacuucuacaccagcaagacgaccguggccucccugaucaacacccugaacgaccucaacgagacccuggucacgaugccccugggguacgugacccacggccucaaccuggaggaggcggcccgguacaugcgcagccugaaggugcccgccaccgucuccgugagcucccccgacgccgugaccgccuacaacggguaccucacgagcuccagcaagaccccggaggagcacuucaucgagaccaucucccuggcgggcagcuacaaggacuggagcuacuccggccagagcacccagcuggggaucgaguuccucaagcggggcgacaaguccgucuacuacacgagcaaccccaccaccuuccaccuggacggggaggugaucaccuucgacaaccugaagacgcuccugucccugcgcgaggugcggaccaucaaggucuucaccaccguggacaacaucaaccuccacacgcagguggucgacaugagcaugaccuacggccagcaguucggccccaccuaccuggacggggccgacgugaccaagaucaagccgcacaacucccacgagggcaagacguucuacgugcugcccaacgacgacacccuccgcgucgaggccuucgaguacuaccacaccaccgaccccagcuuccuggggcgguacauguccgcccugaaccacacgaagaaguggaaguacccccaggugaacggccucaccagcaucaagugggccgacaacaacugcuaccuggcgaccgcccugcucacccugcagcagaucgagcugaaguucaacccgcccgcccuccaggacgccuacuaccgcgcgcgggccggggaggccgccaacuucugcgcccugauccuggcguacugcaacaagacggugggcgagcucggcgacguccgcgagaccauguccuaccuguuccagcacgccaaccuggacagcugcaagcgggugcucaacgucgugugcaagaccugcgggcagcagcagaccacccugaagggcguggaggccgucauguacauggggacgcuguccuacgagcaguucaagaagggcgugcagauccccugcaccugcgggaagcaggccaccaaguaccucgugcagcaggagagccccuucgucaugauguccgccccgcccgcgcaguacgagcugaagcacggcaccuucacgugcgccagcgaguacaccggcaacuaccagugcgggcacuacaagcacaucaccuccaaggagacccuguacugcaucgacggcgcccuccugacgaagagcagcgaguacaaggggcccaucaccgacguguucuacaaggagaacuccuacaccaccacgaucaagcccgugaccuacaagcuggacggcgucgugugcaccgagaucgacccgaagcucgacaacuacuacaagaaggacaacagcuacuucaccgagcagcccaucgaccuggugcccaaccagcccuacccgaacgccuccuucgacaacuucaaguucgucugcgacaacaucaaguucgccgacgaccugaaccagcucacgggguacaagaagcccgcgagccgcgagcugaaggugaccuucuuccccgaccugaacggcgacguggucgccaucgacuacaagcacuacacccccuccuucaagaagggcgccaagcuccugcacaagccgaucguguggcacgugaacaacgccaccaacaaggcgacguacaagcccaacaccuggugcauccggugccuguggagcaccaagcccgucgagaccuccaacagcuucgacgugcucaaguccgaggacgcccaggggauggacaaccuggccugcgaggaccugaagcccgugagcgaggaggucguggagaacccgacgauccagaaggacgugcucgagugcaacgucaagaccaccgagguggugggcgacaucauccugaagcccgccaacaacucccugaagaucaccgaggaggucgggcacacggaccucauggccgcguacguggacaacagcucccugaccaucaagaagcccaacgagcugagccgcgugcucggccugaagacccuggccacccacgggcucgccgccgucaacuccgugccgugggacacgaucgccaacuacgcgaagcccuuccugaacaagguggucagcaccaccaccaacaucgugacgcgcugccugaaccgggugugcaccaacuacaugcccuacuucuucacccuccugcugcagcucugcaccuucacccgcuccacgaacagccggaucaaggccuccaugcccaccaccaucgccaagaacaccgucaagagcgugggcaaguucugccuggaggccagcuucaacuaccugaaguccccgaacuucagcaagcucaucaacaucaucaucugguuccugcugcucuccgugugccugggcagccugaucuacuccacggccgcgcucgggguccugaugagcaaccugggcaugcccuccuacugcaccggguaccgcgagggcuaccucaacagcaccaacgugaccaucgccacguacugcaccggcuccauccccugcagcgugugccuguccgggcuggacagccucgacaccuaccccucccuggagaccauccagaucacgaucagcuccuucaagugggaccugaccgccuucggccucgucgccgagugguuccuggccuacauccuguucacccgguucuucuacgugcucgggcuggcggccaucaugcagcuguucuucagcuacuucgccgugcacuucaucuccaacagcuggcucauguggcugaucaucaaccugguccagauggccccgaucuccgcgauggugcgcauguacaucuucuucgccagcuucuacuacguguggaagagcuacguccacgugguggacggcugcaacuccagcaccugcaugaugugcuacaagcggaaccgcgccacgcgggucgagugcaccaccaucgugaacgggguccgccgguccuucuacguguacgccaacggcggcaagggguucugcaagcugcacaacuggaacugcgugaacugcgacaccuucugcgccggcagcacguucaucuccgacgaggucgcgcgcgaccucagccugcaguucaagcggcccaucaaccccaccgaccaguccagcuacaucguggacuccgugaccgucaagaacgggagcauccaccuguacuucgacaaggccggccagaagaccuacgagcgccacucccucagccacuucgugaaccuggacaaccugcgggccaacaacacgaaggggucccuccccaucaacgugaucgucuucgacggcaagagcaagugcgaggaguccagcgccaaguccgccagcguguacuacucccagcugaugugccagccgauccugcuccuggaccaggcgcuggugagcgacgucggcgacagcgccgagguggccgugaagauguucgacgccuacgucaacaccuucuccagcaccuucaacgugcccauggagaagcucaagacccugguggccacggcggaggccgagcuggccaagaacgucucccucgacaacgugcugagcaccuucaucuccgccgcgcgccagggguucguggacagcgacgucgagaccaaggacgugguggagugccugaagcucucccaccagagcgacaucgaggucaccggcgacuccugcaacaacuacaugcugacguacaacaagguggagaacaugaccccccgggaccugggggccugcaucgacugcagcgcccgccacaucaacgcccagguggccaagucccacaacaucgcgcucaucuggaacgucaaggacuucaugagccuguccgagcagcugcggaagcagauccgcagcgccgccaagaagaacaaccuccccuucaagcugaccugcgccaccacgcgccagguggugaacgucgugaccaccaagaucgcccugaagggcgggugaggacuaguuauaagacugacuagcccgaugggccucccaacgggcccuccuccccuccuugcaccgagauuaauaaaaaaaaaaaaaaaaaaaaaaaaaaaaaaaaaaaaaaaaaaaaaaaaaaaaaaaaaaaaaaaaugcaucccccccccccccccccccccccccccccccaaaggcucuuuucagagccaccagaauu

SEQ ID NO: 22013 - RNA, 6058 nt, Artificial Sequence
  SARS-CoV-2__MT345832.1__non-structural protein 3 (NSP3) mRNA gc
aggagaaagcuuaccauggcccccaccaaggugaccuucggcgacgacacggucaucgaggugcagggguacaagagcgugaacaucaccuucgagcuggacgagcgcaucgacaagguccucaacgagaagugcuccgccuacaccguggagcugggcaccgaggugaacgaguucgcgugcgucguggccgacgccgugaucaagacgcugcagccggucagcgagcuccugaccccccuggggaucgaccucgacgagugguccauggccaccuacuaccuguucgacgagagcggcgaguucaagcuggccucccacauguacugcagcuucuacccccccgacgaggacgaggaggagggggacugcgaggaggaggaguucgagccguccacccaguacgaguacggcacggaggacgacuaccagggcaagccccucgaguucggggcgaccagcgccgcccugcagcccgaggaggagcaggaggaggacuggcuggacgacgacucccagcagaccgugggccagcaggacgggagcgaggacaaccagaccacgaccauccagaccaucguggagguccagccccagcucgagauggagcugaccccgguggugcagacgaucgaggucaacuccuucagcggcuaccugaagcucaccgacaacguguacaucaagaacgccgacaucguggaggaggcgaagaaggucaagcccaccgugguggucaacgccgccaacguguaccugaagcacgggggcggcguggccggggcccugaacaaggcgaccaacaacgccaugcaggucgaguccgacgacuacaucgccacgaacggcccccucaagguggggggcagcugcguccuguccggccacaaccuggccaagcacugccuccacgugguggggcccaacgucaacaagggcgaggacauccagcugcugaagagcgccuacgagaacuucaaccagcacgaggugcuccuggcgccgcugcucuccgccgggaucuucggcgccgaccccauccacagccugcgggugugcgucgacaccgugcgcaccaacguguaccuggccgucuucgacaagaaccucuacgacaagcugguguccagcuuccuggagaugaagagcgagaagcagguggagcagaagaucgccgagauccccaaggaggaggucaagcccuucaucaccgaguccaagccgagcguggagcagcggaagcaggacgacaagaagaucaaggcgugcguggaggaggucacgaccacccucgaggagaccaaguuccugacggagaaccugcuccuguacaucgacaucaacgggaaccugcaccccgacuccgccacccucgugagcgacaucgacaucaccuuccugaagaaggacgcccccuacaucgugggcgacgucgugcaggagggcgugcugaccgccgucgugauccccacgaagaaggccgggggcaccaccgagaugcucgcgaaggcccugcgcaaggugccgaccgacuccuacaucacgaccuaccccgggcagggccugaacggguacaccgucgaggaggccaagaccgugcucaagaagugcaagagcgccuucuacauccugcccuccaucaucagcaacgagaagcaggagauccugggcaccguguccuggaaccuccgggagaugcuggcgcacgccgaggagacgcgcaagcugaugcccgucugcguggagaccaaggccaucgugagcaccauccagcggaaguacaagggcaucaagauccaggagggggucguggacuacggcgcccgcuucuacuucuacaccuccaagacgaccguggccagccugaucaacacccucaacgaccugaacgagacccuggucacgaugccgcucggguacgugacccacggccugaaccuggaggaggcggcccgguacaugcgcucccucaaggugcccgccaccgucagcguguccagccccgacgccgugaccgccuacaacggguaccugacguccagcuccaagacccccgaggagcacuucaucgagaccaucagccuggcgggcagcuacaaggacugguccuacagcggccaguccacccagcucgggaucgaguuccugaagcggggcgacaagagcgucuacuacacguccaacccgaccaccuuccaccuggacggggaggugaucaccuucgacaaccucaagacgcugcugagccuccgcgaggugcggaccaucaaggucuucaccaccguggacaacaucaaccugcacacgcagguggucgacauguccaugaccuacggccagcaguucggccccaccuaccuggacggggccgacgugaccaagaucaagccccacaacagccacgagggcaagacguucuacgugcucccgaacgacgacacccugcgcgucgaggccuucgaguacuaccacaccaccgaccccuccuuccuggggcgguacaugagcgcccucaaccacacgaagaaguggaaguacccccaggugaacggccugaccuccaucaagugggccgacaacaacugcuaccuggcgaccgcccuccugacccugcagcagaucgagcucaaguucaaccccccggcccugcaggacgccuacuaccgcgcgcgggccggggaggccgccaacuucugcgcccugauccucgcguacugcaacaagacggugggcgagcugggcgacguccgcgagaccaugagcuaccuguuccagcacgccaaccucgacuccugcaagcgggugcugaacgucgugugcaagaccugcgggcagcagcagaccacccugaagggcguggaggccgucauguacauggggacgcucagcuacgagcaguucaagaagggcgugcagauccccugcaccugcgggaagcaggccaccaaguaccuggugcagcaggagucccccuucgucaugaugagcgcccccccggcgcaguacgagcugaagcacggcaccuucacgugcgccuccgaguacaccggcaacuaccagugcgggcacuacaagcacaucaccagcaaggagacccucuacugcaucgacggcgcccugcugacgaagagcuccgaguacaaggggcccaucaccgacguguucuacaaggagaacagcuacaccaccacgaucaagcccgugaccuacaagcucgacggcgucgugugcaccgagaucgaccccaagcuggacaacuacuacaagaaggacaacuccuacuucaccgagcagccgaucgaccuggugcccaaccagcccuaccccaacgccagcuucgacaacuucaaguucgucugcgacaacaucaaguucgccgacgaccucaaccagcugacgggguacaagaagccggcgucccgcgagcugaaggugaccuucuuccccgaccucaacggcgacguggucgccaucgacuacaagcacuacacccccagcuucaagaagggcgccaagcugcugcacaagcccaucguguggcacgugaacaacgccaccaacaaggcgacguacaagccgaacaccuggugcauccggugccucugguccaccaagcccgucgagaccagcaacuccuucgacgugcugaagagcgaggacgcccaggggauggacaaccuggccugcgaggaccucaagcccguguccgaggaggucguggagaaccccacgauccagaaggacgugcuggagugcaacgucaagaccaccgagguggugggcgacaucauccugaagccggccaacaacagccucaagaucaccgaggaggucgggcacacggaccugauggccgcguacguggacaacuccagccugaccaucaagaagcccaacgagcucucccgcgugcugggccugaagacccucgccacccacgggcuggccgccgucaacagcgugcccugggacacgaucgccaacuacgcgaagccguuccugaacaagguggucuccaccaccaccaacaucgugacgcgcugccucaaccgggugugcaccaacuacaugcccuacuucuucacccugcugcuccagcugugcaccuucacccgcagcacgaacucccggaucaaggccagcaugcccaccaccaucgccaagaacaccgucaagagcgugggcaaguucugccuggaggccuccuucaacuaccucaagagccccaacuucuccaagcugaucaacaucaucaucugguuccugcuccugagcgugugccugggcucccucaucuacagcacggccgcgcuggggguccugauguccaaccucggcaugccgagcuacugcaccggguaccgcgagggcuaccugaacuccaccaacgugaccaucgccacguacugcaccggcagcauccccugcuccgugugccugagcgggcucgacucccuggacaccuaccccagccuggagaccauccagaucacgaucuccagcuucaagugggaccucaccgccuucggccuggucgccgagugguuccuggccuacauccucuucacccgguucuucuacgugcuggggcuggcggccaucaugcagcucuucuucuccuacuucgccgugcacuucaucagcaacuccuggcugauguggcugaucaucaaccugguccagauggcccccaucagcgcgauggugcgcauguacaucuucuucgccagcuucuacuacguguggaaguccuacguccacgugguggacggcugcaacagcuccaccugcaugaugugcuacaagcggaaccgcgccacgcgggucgagugcaccaccaucgugaacgggguccgccggagcuucuacguguacgccaacggcggcaagggguucugcaagcuccacaacuggaacugcgugaacugcgacaccuucugcgccggcuccacguucaucagcgacgaggucgcgcgcgaccugucccugcaguucaagcggccgaucaaccccaccgaccagagcuccuacaucguggacagcgugaccgucaagaacggguccauccaccucuacuucgacaaggccggccagaagaccuacgagcgccacagccugucccacuucgugaaccuggacaaccuccgggccaacaacacgaaggggagccugcccaucaacgugaucgucuucgacggcaaguccaagugcgaggagagcuccgccaagagcgccuccguguacuacagccagcugaugugccagcccauccuccugcuggaccaggcgcucgugagcgacgucggcgacuccgccgagguggccgugcgcauguucgacgccuacgucaacaccuucagcuccaccuucaacgugccgauggagaagcugaagacccugguggccacggcggaggccgagcucgccaagaacgucagccuggacaacgugcuguccaccuucaucagcgccgcgcggcagggguucguggacuccgacgucgagaccaaggacgugguggagugccucaagcugagccaccaguccgacaucgaggucaccggcgacagcugcaacaacuacaugcugacguacaacaagguggagaacaugaccccccgcgaccucggggccugcaucgacugcuccgcccggcacaucaacgcccagguggccaagagccacaacaucgcgcugaucuggaacgucaaggacuucaugucccugagcgagcagcuccgcaagcagauccgcuccgccgccaagaagaacaaccugcccuucaagcugaccugcgccaccacgcggcagguggugaacgucgugaccaccaagaucgcccucaagggcgggugaggacuaguuauaagacugacuagcccgaugggccucccaacgggcccuccuccccuccuugcaccgagauuaauaaaaaaaaaaaaaaaaaaaaaaaaaaaaaaaaaaaaaaaaaaaaaaaaaaaaaaaaaaaaaaaaugcaucccccccccccccccccccccccccccccccaaaggcucuuuucagagccaccagaauu

SEQ ID NO: 22014 - RNA, 6058 nt, Artificial Sequence
  SARS-CoV-2__MT345848.1__non-structural protein 3 (NSP3) mRNA gc
aggagaaagcuuaccauggcccccaccaaggugaccuucggcgacgacacggucaucgaggugcagggguacaagagcgugaacaucaccuucgagcuggacgagcgcaucgacaagguccucaacgagaagugcuccgccuacaccguggagcugggcaccgaggugaacgaguucgcgugcgucguggccgacgccgugaucaagacgcugcagccggucagcgagcuccugaccccccuggggaucgaccucgacgagugguccauggccaccuacuaccuguucgacgagagcggcgaguucaagcuggccucccacauguacugcagcuucuacccccccgacgaggacgaggaggagggggacugcgaggaggaggaguucgagccguccacccaguacgaguacggcacggaggacgacuaccagggcaagccccucgaguucggggcgaccagcgccgcccugcagcccgaggaggagcaggaggaggacuggcuggacgacgacucccagcagaccgugggccagcaggacgggagcgaggacaaccagaccacgaccauccagaccaucguggagguccagccccagcucgagauggagcugaccccgguggugcagacgaucgaggucaacuccuucagcggcuaccugaagcucaccgacaacguguacaucaagaacgccgacaucguggaggagaccaagaaggucaagcccaccgugguggucaacgcggccaacguguaccugaagcacgggggcggcguggccggggcccugaacaaggccacgaacaacgcgaugcaggucgaguccgacgacuacaucgccaccaacggcccccucaagguggggggcagcugcguccuguccggccacaaccuggccaagcacugccuccacgugguggggcccaacgucaacaagggcgaggacauccagcugcugaagagcgccuacgagaacuucaaccagcacgaggugcuccuggccccgcugcucuccgcggggaucuucggcgccgaccccauccacagccugcgggugugcgucgacaccgugcgcaccaacguguaccuggccgucuucgacaagaaccucuacgacaagcugguguccagcuuccuggagaugaagagcgagaagcagguggagcagaagaucgccgagauccccaaggaggaggucaagcccuucaucacggaguccaagccgagcguggagcagcggaagcaggacgacaagaagaucaaggccugcguggaggaggucaccaccacccucgaggagacgaaguuccugaccgagaaccugcuccuguacaucgacaucaacgggaaccugcaccccgacuccgcgacccucgugagcgacaucgacaucaccuuccugaagaaggacgcccccuacaucgugggcgacgucgugcaggagggcgugcugacggccgucgugauccccaccaagaaggccgggggcaccaccgagaugcucgccaaggcgcugcgcaaggugccgacggacaacuacaucaccaccuaccccgggcagggccugaacggguacaccgucgaggaggccaagaccgugcucaagaagugcaaguccgccuucuacauccugcccagcaucaucuccaacgagaagcaggagauccugggcacggugagcuggaaccuccgggagaugcuggcccacgcggaggagacccgcaagcugaugcccgucugcguggagaccaaggccaucguguccaccauccagcggaaguacaagggcaucaagauccaggagggggucguggacuacggcgcccgcuucuacuucuacacgagcaagaccaccguggccucccugaucaacacccucaacgaccugaacgagacgcuggucaccaugccgcucggguacgugacccacggccugaaccuggaggaggccgcgcgguacaugcgcagccucaaggugcccgccaccgucuccgugagcucccccgacgccgugacggccuacaacggguaccugaccagcuccagcaagacccccgaggagcacuucaucgagaccaucucccuggccggcagcuacaaggacuggagcuacuccggccagagcacgcagcucgggaucgaguuccugaagcggggcgacaaguccgucuacuacaccagcaacccgaccaccuuccaccuggacggggaggugaucacguucgacaaccucaagacccugcugucccuccgcgaggugcggaccaucaaggucuucaccacgguggacaacaucaaccugcacacccagguggucgacaugagcaugaccuacggccagcaguucggccccaccuaccuggacggggcggacgugacgaagaucaagccccacaacucccacgagggcaagaccuucuacgugcucccgaacgacgacacccugcgcgucgaggccuucgaguacuaccacaccacggaccccagcuuccuggggcgguacauguccgcccucaaccacaccaagaaguggaaguacccccaggugaacggccugaccagcaucaagugggccgacaacaacugcuaccuggccaccgcgcuccugacgcugcagcagaucgagcucaaguucaaccccccggcccugcaggacgccuacuaccgcgcccgggcgggggaggccgccaacuucugcgcccugauccucgccuacugcaacaagaccgugggcgagcugggcgacguccgcgagaccauguccuaccuguuccagcacgcgaaccucgacagcugcaagcgggugcugaacgucgugugcaagaccugcgggcagcagcagaccacgcugaagggcguggaggccgucauguacauggggacccucuccuacgagcaguucaagaagggcgugcagauccccugcaccugcgggaagcaggccaccaaguaccuggugcagcaggagagccccuucgucaugauguccgcccccccggcccaguacgagcugaagcacggcacguucaccugcgcgagcgaguacaccggcaacuaccagugcgggcacuacaagcacaucaccuccaaggagacgcucuacugcaucgacggcgcccugcugaccaagagcagcgaguacaaggggcccaucaccgacguguucuacaaggagaacuccuacaccacgaccaucaagcccgugaccuacaagcucgacggcgucgugugcaccgagaucgaccccaagcuggacaacuacuacaagaaggacaacagcuacuucacggagcagccgaucgaccuggugcccaaccagcccuaccccaacgccuccuucgacaacuucaaguucgucugcgacaacaucaaguucgccgacgaccucaaccagcugaccggguacaagaagccggccagccgcgagcugaaggugaccuucuuccccgaccucaacggcgacguggucgcgaucgacuacaagcacuacacccccuccuucaagaagggcgccaagcugcugcacaagcccaucguguggcacgugaacaacgccacgaacaaggccaccuacaagccgaacaccuggugcauccggugccucuggagcaccaagcccgucgagacguccaacagcuucgacgugcugaaguccgaggacgcgcaggggauggacaaccuggccugcgaggaccucaagcccgugagcgaggaggucguggagaaccccaccauccagaaggacgugcuggagugcaacgucaagaccaccgagguggugggcgacaucauccugaagccggccaacaacucccucaagaucacggaggaggucgggcacaccgaccugauggccgccuacguggacaacagcucccugaccaucaagaagcccaacgagcucagccgcgugcugggccugaagacccucgcgacgcacgggcuggccgccgucaacuccgugcccugggacaccaucgccaacuacgccaagccguuccugaacaagguggucagcaccaccacgaacaucgugacccgcugccucaaccgggugugcaccaacuacaugcccuacuucuucacccugcugcuccagcugugcaccuucacgcgcuccaccaacagccggaucaaggcguccaugcccaccaccaucgccaagaacacggucaagagcgugggcaaguucugccuggaggccagcuucaacuaccucaagucccccaacuucagcaagcugaucaacaucaucaucugguuccugcuccuguccgugugccugggcagccucaucuacuccaccgccgcccuggggguccugaugagcaaccucggcaugccguccuacugcaccggguaccgcgagggcuaccugaacagcaccaacgugacgaucgcgaccuacugcaccggcuccauccccugcagcgugugccuguccgggcucgacagccuggacaccuaccccucccuggagacgauccagaucaccaucagcuccuucaagugggaccucaccgccuucggccuggucgccgagugguuccuggccuacauccucuucacccgguucuucuacgugcuggggcuggccgcgaucaugcagcucuucuucagcuacuucgccgugcacuucaucuccaacagcuggcugauguggcugaucaucaaccugguccagauggcccccaucuccgccauggugcgcauguacaucuucuucgcgagcuucuacuacguguggaagagcuacguccacgugguggacggcugcaacuccagcacgugcaugaugugcuacaagcggaaccgcgccacccgggucgagugcaccaccaucgugaacgggguccgccgguccuucuacguguacgccaacggcggcaagggguucugcaagcuccacaacuggaacugcgugaacugcgacacguucugcgccggcagcaccuucaucuccgacgaggucgcccgcgaccugagccugcaguucaagcggccgaucaaccccaccgaccaguccagcuacaucguggacuccgugaccgucaagaacgggagcauccaccucuacuucgacaaggcgggccagaagacguacgagcgccacucccugagccacuucgugaaccuggacaaccuccgggccaacaacaccaaggggucccugcccaucaacgugaucgucuucgacggcaagagcaagugcgaggaguccagcgccaaguccgccagcguguacuacucccagcugaugugccagcccauccuccugcuggaccaggcccucgugagcgacgucggcgacagcgcggagguggccgugaagauguucgacgccuacgucaacaccuucuccagcaccuucaacgugccgauggagaagcugaagacgcugguggccaccgccgaggcggagcucgccaagaacgucucccuggacaacgugcugagcaccuucaucuccgccgcccgccagggguucguggacagcgacgucgagaccaaggacgugguggagugccucaagcugucccaccagagcgacaucgaggucacgggcgacuccugcaacaacuacaugcugaccuacaacaagguggagaacaugaccccccgggaccucggggcgugcaucgacugcagcgcccgccacaucaacgcccagguggccaagucccacaacaucgcccugaucuggaacgucaaggacuucaugagccuguccgagcagcuccggaagcagauccgcagcgcggccaagaagaacaaccugcccuucaagcugaccugcgccacgacccgccagguggugaacgucgugaccaccaagaucgcccucaagggcgggugaggacuaguuauaagacugacuagcccgaugggccucccaacgggcccuccuccccuccuugcaccgagauuaauaaaaaaaaaaaaaaaaaaaaaaaaaaaaaaaaaaaaaaaaaaaaaaaaaaaaaaaaaaaaaaaaugcaucccccccccccccccccccccccccccccccaaaggcucuuuucagagccaccagaauu

SEQ ID NO: 22015 - RNA, 6058 nt, Artificial Sequence
  SARS-CoV-2__MT345861.1__non-structural protein 3 (NSP3) mRNA gc
aggagaaagcuuaccauggcccccaccaaggugaccuucggcgacgacacggucaucgaggugcagggguacaagagcgugaacaucaccuucgagcuggacgagcgcaucgacaagguccucaacgagaagugcuccgccuacaccguggagcugggcaccgaggugaacgaguucgcgugcgucguggccgacgccgugaucaagacgcugcagccggucagcgagcuccugaccccccuggggaucgaccucgacgagugguccauggccaccuacuaccuguucgacgagagcggcgaguucaagcuggccucccacauguacugcagcuucuacccccccgacgaggacgaggaggagggggacugcgaggaggaggaguucgagccguccacccaguacgaguacggcacggaggacgacuaccagggcaagccccucgaguucggggcgaccagcgccgcccugcagcccgaggaggagcaggaggaggacuggcuggacgacgacucccagcagaccgugggccagcaggacgggagcgaggacaaccagaccacgaccauccagaccaucguggagguccagccccagcucgagauggagcugaccccgguggugcagacgaucgaggucaacuccuucagcggcuaccugaagcucaccgacaacguguacaucaagaacgccgacaucguggaggaggcgaagaaggucaagcccaccgugguggucaacgccgccaacguguaccugaagcacgggggcggcguggccggggcccugaacaaggcgaccaacaacgccaugcaggucgaguccgacgacuacaucgccacgaacggcccccucaagguggggggcagcugcguccuguccggccacaaccuggccaagcacugccuccacgugguggggcccaacgucaacaagggcgaggacauccagcugcugaagagcgccuacgagaacuucaaccagcacgaggugcucaucgcgccgcugcuguccgccgggaucuucggcgccgaccccauccacagccuccgggugugcgucgacaccgugcgcaccaacguguaccuggccgucuucgacaagaaccuguacgacaagcucguguccagcuuccuggagaugaagagcgagaagcagguggagcagaagaucgccgagauccccaaggaggaggucaagcccuucaucaccgaguccaagccgagcguggagcagcggaagcaggacgacaagaagaucaaggcgugcguggaggaggucacgaccacccuggaggagaccaaguuccucacggagaaccugcugcucuacaucgacaucaacgggaaccugcaccccgacuccgccacccuggugagcgacaucgacaucaccuuccucaagaaggacgcccccuacaucgugggcgacgucgugcaggagggcgugcugaccgccgucgugauccccacgaagaaggccgggggcaccaccgagaugcuggcgaaggcccuccgcaaggugccgaccgacaacuacaucacgaccuaccccgggcagggccugaacggguacaccgucgaggaggccaagaccgugcugaagaagugcaaguccgccuucuacauccuccccagcaucaucuccaacgagaagcaggagauccugggcaccgugagcuggaaccugcgggagaugcucgcgcacgccgaggagacgcgcaagcugaugcccgucugcguggagaccaaggccaucguguccaccauccagcggaaguacaagggcaucaagauccaggagggggucguggacuacggcgcccgcuucuacuucuacaccagcaagacgaccguggccucccugaucaacacccugaacgaccucaacgagacccuggucacgaugccgcugggguacgugacccacggccucaaccuggaggaggcggcccgguacaugcgcagccugaaggugcccgccaccgucuccgugagcucccccgacgccgugaccgccuacaacggguaccucacgagcuccagcaagacccccgaggagcacuucaucgagaccaucucccuggcgggcagcuacaaggacuggagcuacuccggccagagcacccagcuggggaucgaguuccucaagcggggcgacaaguccgucuacuacacgagcaacccgaccaccuuccaccuggacggggaggugaucaccuucgacaaccugaagacgcuccugucccugcgcgaggugcggaccaucaaggucuucaccaccguggacaacaucaaccuccacacgcagguggucgacaugagcaugaccuacggccagcaguucggccccaccuaccuggacggggccgacgugaccaagaucaagccccacaacucccacgagggcaagacguucuacgugcugccgaacgacgacacccuccgcgucgaggccuucgaguacuaccacaccaccgaccccagcuuccuggggcgguacauguccgcccugaaccacacgaagaaguggaaguacccccaggugaacggccucaccagcaucaagugggccgacaacaacugcuaccuggcgaccgcccugcucacccugcagcagaucgagcugaaguucaaccccccggcccuccaggacgccuacuaccgcgcgcgggccggggaggccgccaacuucugcgcccugauccuggcguacugcaacaagacggugggcgagcucggcgacguccgcgagaccauguccuaccuguuccagcacgccaaccuggacagcugcaagcgggugcucaacgucgugugcaagaccugcgggcagcagcagaccacccugaagggcguggaggccgucauguacauggggacgcuguccuacgagcaguucaagaagggcgugcagauccccugcaccugcgggaagcaggccaccaaguaccucgugcagcaggagagccccuucgucaugauguccgcccccccggcgcaguacgagcugaagcacggcaccuucacgugcgccagcgaguacaccggcaacuaccagugcgggcacuacaagcacaucaccuccaaggagacccuguacugcaucgacggcgcccuccugacgaagagcagcgaguacaaggggcccaucaccgacguguucuacaaggagaacuccuacaccaccacgaucaagcccgugaccuacaagcuggacggcgucgugugcaccgagaucgaccccaagcucgacaacuacuacaagaaggacaacagcuacuucaccgagcagccgaucgaccuggugcccaaccagcccuaccccaacgccuccuucgacaacuucaaguucgucugcgacaacaucaaguucgccgacgaccugaaccagcucacgggguacaagaagccggcgagccgcgagcugaaggugaccuucuuccccgaccugaacggcgacguggucgccaucgacuacaagcacuacacccccuccuucaagaagggcgccaagcuccugcacaagcccaucguguggcacgugaacaacgccaccaacaaggcgacguacaagccgaacaccuggugcauccggugccuguggagcaccaagcccgucgagaccuccaacagcuucgacgugcucaaguccgaggacgcccaggggauggacaaccuggccugcgaggaccugaagcccgugagcgaggaggucguggagaaccccacgauccagaaggacgugcucgagugcaacgucaagaccaccgagguggugggcgacaucauccugaagccggccaacaacucccugaagaucaccgaggaggucgggcacacggaccucauggccgcguacguggacaacagcucccugaccaucaagaagcccaacgagcugagccgcgugcucggccugaagacccuggccacccacgggcucgccgccgucaacuccgugcccugggacacgaucgccaacuacgcgaagccguuccugaacaagguggucagcaccaccaccaacaucgugacgcgcugccugaaccgggugugcaccaacuacaugcccuacuucuucacccuccugcugcagcucugcaccuucacccgcuccacgaacagccggaucaaggccuccaugcccaccaccaucgccaagaacaccgucaagagcgugggcaaguucugccuggaggccagcuucaacuaccugaagucccccaacuucagcaagcucaucaacaucaucaucugguuccugcugcucuccgugugccugggcagccugaucuacuccacggccgcgcucgggguccugaugagcaaccugggcaugccguccuacugcaccggguaccgcgagggcuaccucaacagcaccaacgugaccaucgccacguacugcaccggcuccauccccugcagcgugugccuguccgggcuggacagccucgacaccuaccccucccuggagaccauccagaucacgaucagcuccuucaagugggaccugaccgccuucggccucgucgccgagugguuccuggccuacauccuguucacccgguucuucuacgugcucgggcuggcggccaucaugcagcuguucuucagcuacuucgccgugcacuucaucuccaacagcuggcucauguggcugaucaucaaccugguccagauggcccccaucuccgcgauggugcgcauguacaucuucuucgccagcuucuacuacguguggaagagcuacguccacgugguggacggcugcaacuccagcaccugcaugaugugcuacaagcggaaccgcgccacgcgggucgagugcaccaccaucgugaacgggguccgccgguccuucuacguguacgccaacggcggcaagggguucugcaagcugcacaacuggaacugcgugaacugcgacaccuucugcgccggcagcacguucaucuccgacgaggucgcgcgcgaccucagccugcaguucaagcggccgaucaaccccaccgaccaguccagcuacaucguggacuccgugaccgucaagaacgggagcauccaccuguacuucgacaaggccggccagaagaccuacgagcgccacucccucagccacuucgugaaccuggacaaccugcgggccaacaacacgaaggggucccuccccaucaacgugaucgucuucgacggcaagagcaagugcgaggaguccagcgccaaguccgccagcguguacuacucccagcugaugugccagcccauccugcuccuggaccaggcgcuggugagcgacgucggcgacagcgccgagguggccgugaagauguucgacgccuacgucaacaccuucuccagcaccuucaacgugccgauggagaagcucaagacccugguggccacggcggaggccgagcuggccaagaacgucucccucgacaacgugcugagcaccuucaucuccgccgcgcgccagggguucguggacagcgacgucgagaccaaggacgugguggagugccugaagcucucccaccagagcgacaucgaggucaccggcgacuccugcaacaacuacaugcugacguacaacaagguggagaacaugaccccccgggaccugggggccugcaucgacugcagcgcccgccacaucaacgcccagguggccaagucccacaacaucgcgcucaucuggaacgucaaggacuucaugagccuguccgagcagcugcggaagcagauccgcagcgccgccaagaagaacaaccuccccuucaagcugaccugcgccaccacgcgccagguggugaacgucgugaccaccaagaucgcccugaagggcgggugaggacuaguuauaagacugacuagcccgaugggccucccaacgggcccuccuccccuccuugcaccgagauuaauaaaaaaaaaaaaaaaaaaaaaaaaaaaaaaaaaaaaaaaaaaaaaaaaaaaaaaaaaaaaaaaaugcaucccccccccccccccccccccccccccccccaaaggcucuuuucagagccaccagaauu

SEQ ID NO: 22016 - RNA, 6058 nt, Artificial Sequence
  SARS-CoV-2__MT345869.1__non-structural protein 3 (NSP3) mRNA gc
aggagaaagcuuaccauggcccccaccaaggugaccuucggcgacgacacggucaucgaggugcagggguacaagagcgugaacaucaccuucgagcuggacgagcgcaucgacaagguccucaacgagaagugcuccgccuacaccguggagcugggcaccgaggugaacgaguucgcgugcgucguggccgacgccgugaucaagacgcugcagccggucagcgagcuccugaccccccuggggaucgaccucgacgagugguccauggccaccuacuaccuguucgacgagagcggcgaguucaagcuggccucccacauguacugcagcuucuacccccccgacgaggacgaggaggagggggacugcgaggaggaggaguucgagccguccacccaguacgaguacggcacggaggacgacuaccagggcaagagccucgaguucggggcgaccuccgccgcccugcagcccgaggaggagcaggaggaggacuggcuggacgacgacagccagcagaccgugggccagcaggacggguccgaggacaaccagaccacgaccauccagaccaucguggagguccagccccagcucgagauggagcugacccccguggugcagacgaucgaggucaacagcuucuccggcuaccugaagcucaccgacaacguguacaucaagaacgccgacaucguggaggaggcgaagaaggucaagccgaccgugguggucaacgccgccaacguguaccugaagcacgggggcggcguggccggggcccugaacaaggcgaccaacaacgccaugcaggucgagagcgacgacuacaucgccacgaacggcccccucaagguggggggcuccugcguccugagcggccacaaccuggccaagcacugccuccacgugguggggcccaacgucaacaagggcgaggacauccagcugcugaaguccgccuacgagaacuucaaccagcacgaggugcuccuggcgccccugcucagcgccgggaucuucggcgccgacccgauccacucccugcgggugugcgucgacaccgugcgcaccaacguguaccuggccgucuucgacaagaaccucuacgacaagcuggugagcagcuuccuggagaugaaguccgagaagcagguggagcagaagaucgccgagauccccaaggaggaggucaagcccuucaucaccgagagcaagcccuccguggagcagcggaagcaggacgacaagaagaucaaggcgugcguggaggaggucacgaccacccucgaggagaccaaguuccugacggagaaccugcuccuguacaucgacaucaacgggaaccugcacccggacagcgccacccucguguccgacaucgacaucaccuuccugaagaaggacgcccccuacaucgugggcgacgucgugcaggagggcgugcugaccgccgucgugauccccacgaagaaggccgggggcaccaccgagaugcucgcgaaggcccugcgcaaggugcccaccgacaacuacaucacgaccuacccggggcagggccugaacggguacaccgucgaggaggccaagaccgugcucaagaagugcaagagcgccuucuacauccugcccuccaucaucagcaacgagaagcaggagauccugggcaccguguccuggaaccuccgggagaugcuggcgcacgccgaggagacgcgcaagcugaugcccgucugcguggagaccaaggccaucgugagcaccauccagcggaaguacaagggcaucaagauccaggagggggucguggacuacggcgcccgcuucuacuucuacaccuccaagacgaccguggccagccugaucaacacccucaacgaccugaacgagacccuggucacgaugccccucggguacgugacccacggccugaaccuggaggaggcggcccgguacaugcgcucccucaaggugccggccaccgucagcguguccagccccgacgccgugaccgccuacaacggguaccugacguccagcuccaagacccccgaggagcacuucaucgagaccaucagccuggcgggcagcuacaaggacugguccuacagcggccaguccacccagcucgggaucgaguuccugaagcggggcgacaagagcgucuacuacacguccaaccccaccaccuuccaccuggacggggaggugaucaccuucgacaaccucaagacgcugcugagccuccgcgaggugcggaccaucaaggucuucaccaccguggacaacaucaaccugcacacgcagguggucgacauguccaugaccuacggccagcaguucggcccgaccuaccuggacggggccgacgugaccaagaucaagccccacaacagccacgagggcaagacguucuacgugcuccccaacgacgacacccugcgcgucgaggccuucgaguacuaccacaccaccgacccguccuuccuggggcgguacaugagcgcccucaaccacacgaagaaguggaaguacccccaggugaacggccugaccuccaucaagugggccgacaacaacugcuaccuggcgaccgcccuccugacccugcagcagaucgagcucaaguucaacccccccgcccugcaggacgccuacuaccgcgcgcgggccggggaggccgccaacuucugcgcccugauccucgcguacugcaacaagacggugggcgagcugggcgacguccgcgagaccaugagcuaccuguuccagcacgccaaccucgacuccugcaagcgggugcugaacgucgugugcaagaccugcgggcagcagcagaccacccugaagggcguggaggccgucauguacauggggacgcucagcuacgagcaguucaagaagggcgugcagaucccgugcaccugcgggaagcaggccaccaaguaccuggugcagcaggagucccccuucgucaugaugagcgccccccccgcgcaguacgagcugaagcacggcaccuucacgugcgccuccgaguacaccggcaacuaccagugcgggcacuacaagcacaucaccagcaaggagacccucuacugcaucgacggcgcccugcugacgaagagcuccgaguacaaggggccgaucaccgacguguucuacaaggagaacagcuacaccaccacgaucaagcccgugaccuacaagcucgacggcgucgugugcaccgagaucgaccccaagcuggacaacuacuacaagaaggacaacuccuacuucaccgagcagcccaucgaccuggugccgaaccagcccuaccccaacgccagcuucgacaacuucaaguucgucugcgacaacaucaaguucgccgacgaccucaaccagcugacgggguacaagaagcccgcgucccgcgagcugaaggugaccuucuucccggaccucaacggcgacguggucgccaucgacuacaagcacuacacccccagcuucaagaagggcgccaagcugcugcacaagcccaucguguggcacgugaacaacgccaccaacaaggcgacguacaagcccaacaccuggugcauccggugccucugguccaccaagccggucgagaccagcaacuccuucgacgugcugaagagcgaggacgcccaggggauggacaaccuggccugcgaggaccucaagcccguguccgaggaggucguggagaaccccacgauccagaaggacgugcuggagugcaacgucaagaccaccgagguggugggcgacaucauccugaagcccgccaacaacagccucaagaucaccgaggaggucgggcacacggaccugauggccgcguacguggacaacuccagccugaccaucaagaagccgaacgagcucucccgcgugcugggccugaagacccucgccacccacgggcuggccgccgucaacagcgugcccugggacacgaucgccaacuacgcgaagcccuuccugaacaagguggucuccaccaccaccaacaucgugacgcgcugccucaaccgggugugcaccaacuacaugccguacuucuucacccugcugcuccagcugugcaccuucacccgcagcacgaacucccggaucaaggccagcaugcccaccaccaucgccaagaacaccgucaagagcgugggcaaguucugccuggaggccuccuucaacuaccucaagagccccaacuucuccaagcugaucaacaucaucaucugguuccugcuccugagcgugugccugggcucccucaucuacagcacggccgcgcuggggguccugauguccaaccucggcaugcccagcuacugcaccggguaccgcgagggcuaccugaacuccaccaacgugaccaucgccacguacugcaccggcagcaucccgugcuccgugugccugagcgggcucgacucccuggacaccuaccccagccuggagaccauccagaucacgaucuccagcuucaagugggaccucaccgccuucggccuggucgccgagugguuccuggccuacauccucuucacccgguucuucuacgugcuggggcuggcggccaucaugcagcucuucuucuccuacuucgccgugcacuucaucagcaacuccuggcugauguggcugaucaucaaccugguccagauggcccccaucagcgcgauggugcgcauguacaucuucuucgccagcuucuacuacguguggaaguccuacguccacgugguggacggcugcaacagcuccaccugcaugaugugcuacaagcggaaccgcgccacgcgggucgagugcaccaccaucgugaacgggguccgccggagcuucuacguguacgccaacggcggcaagggguucugcaagcuccacaacuggaacugcgugaacugcgacaccuucugcgccggcuccacguucaucagcgacgaggucgcgcgcgaccugucccugcaguucaagcggcccaucaacccgaccgaccagagcuccuacaucguggacagcgugaccgucaagaacggguccauccaccucuacuucgacaaggccggccagaagaccuacgagcgccacagccugucccacuucgugaaccuggacaaccuccgggccaacaacacgaaggggagccugcccaucaacgugaucgucuucgacggcaaguccaagugcgaggagagcuccgccaagagcgccuccguguacuacagccagcugaugugccagcccauccuccugcuggaccaggcgcucgugagcgacgucggcgacuccgccgagguggccgugaagauguucgacgccuacgucaacaccuucagcuccaccuucaacgugcccauggagaagcugaagacccugguggccacggcggaggccgagcucgccaagaacgucagccuggacaacgugcuguccaccuucaucagcgccgcgcgccagggguucguggacuccgacgucgagaccaaggacgugguggagugccucaagcugagccaccaguccgacaucgaggucaccggcgacagcugcaacaacuacaugcugacguacaacaagguggagaacaugaccccgcgggaccucggggccugcaucgacugcuccgcccgccacaucaacgcccagguggccaagagccacaacaucgcgcugaucuggaacgucaaggacuucaugucccugagcgagcagcuccggaagcagauccgcuccgccgccaagaagaacaaccugcccuucaagcugaccugcgccaccacgcgccagguggugaacgucgugaccaccaagaucgcccucaagggcgggugaggacuaguuauaagacugacuagcccgaugggccucccaacgggcccuccuccccuccuugcaccgagauuaauaaaaaaaaaaaaaaaaaaaaaaaaaaaaaaaaaaaaaaaaaaaaaaaaaaaaaaaaaaaaaaaaugcaucccccccccccccccccccccccccccccccaaaggcucuuuucagagccaccagaauu

SEQ ID NO: 22017 - RNA, 6058 nt, Artificial Sequence
  SARS-CoV-2__MT345871.1__non-structural protein 3 (NSP3) mRNA gc
aggagaaagcuuaccauggcccccaccaaggugaccuucggcgacgacacggucaucgaggugcagggguacaagagcgugaacaucaccuucgagcuggacgagcgcaucgacaagguccucaacgagaagugcuccgccuacaccguggagcugggcaccgaggugaacgaguucgcgugcgucguggccgacgccgugaucaagacgcugcagccggucagcgagcuccugaccccccuggggaucgaccucgacgagugguccauggccaccuacuaccuguucgacgagagcggcgaguucaagcuggccucccacauguacugcagcuucuacccccccgacgaggacgaggaggagggggacugcgaggaggaggaguucgagccguccacccaguacgaguacggcacggaggacgacuaccagggcaagccccucgaguucggggcgaccagcgccgcccugcagcccgaggaggagcaggaggaggacuggcuggacgacgacucccagcagaccgugggccagcaggacgggagcgaggacaaccagaccacgaccauccagaccaucguggagguccagccccagcucgagauggagcugaccccgguggugcagacgaucgaggucaacuccuucagcggcuaccugaagcucaccgacaacguguacaucaagaacgccgacaucguggaggaggcgaagaaggucaagcccaccgugguggucaacgccgccaacguguaccugaagcacgggggcggcguggccggggcccugaacaaggcgaccaacaacgccaugcaggucgaguccgacgacuacaucgccacgaacggcccccucaagguggggggcagcugcguccuguccggccacaaccuggccaagcacugccuccacgugguggggcccaacgucaacaagggcgaggacauccagcugcugaagagcgccuacgagaacuucaaccagcacgaggugcuccuggcgccgcugcucuccgccgggaucuucggcgccgaccccauccacagccugcgggugugcgucgacaccgugcgcaccaacguguaccuggccgucuucgacaagaaccucuacgacaagcugguguccagcuuccuggagaugaagagcgagaagcagguggagcagaagaucgccgagauccccaaggaggaggucaagcccuucaucaccgaguccaagccgagcguggagcagcggaagcaggacgacaagaagaucaaggcgugcguggaggaggucacgaccacccucgaggagaccaaguuccugacggagaaccugcuccuguacaucgacaucaacgggaaccugcaccccgacuccgccacccucgugagcgacaucgacaucaccuuccugaagaaggacgcccccuacaucgugggcgacgucgugcaggagggcgugcugaccgccgucgugauccccacgaagaaggccgggggcaccaccgagaugcucgcgaaggcccugcgcaaggugccgaccgacaacuacaucacgaccuaccccgggcagggccugaacggguacaccgucgaggaggccaagaccgugcucaagaagugcaaguccgccuucuacauccugcccagcaucaucuccaacgagaagcaggagauccugggcaccgugagcuggaaccuccgggagaugcuggcgcacgccgaggagacgcgcaagcugaugcccgucugcguggagaccaaggccaucguguccaccauccagcggaaguacaagggcaucaagauccaggagggggucguggacuacggcgcccgcuucuacuucuacaccagcaagacgaccguggccucccugaucaacacccucaacgaccugaacgagacccuggucacgaugccgcucggguacgugacccacggccugaaccuggaggaggcggcccgguacaugcgcagccucaaggugcccgccaccgucuccgugagcucccccgacgccgugaccgccuacaacggguaccugacgagcuccagcaagacccccgaggagcacuucaucgagaccaucucccuggcgggcagcuacaaggacuggagcuacuccggccagagcacccagcucgggaucgaguuccugaagcggggcgacaaguccgucuacuacacgagcaacccgaccaccuuccaccuggacggggaggugaucaccuucgacaaccucaagacgcugcugucccuccgcgaggugcggaccaucaaggucuucaccaccguggacaacaucaaccugcacacgcagguggucgacaugagcaugaccuacggccagcaguucggccccaccuaccuggacggggccgacgugaccaagaucaagccccacaacucccacgagggcaagacguucuacgugcucccgaacgacgacacccugcgcgucgaggccuucgaguacuaccacaccaccgaccccagcuuccuggggcgguacauguccgcccucaaccacacgaagaaguggaaguacccccaggugaacggccugaccagcaucaagugggccgacaacaacugcuaccuggcgaccgcccuccugacccugcagcagaucgagcucaaguucaaccccccggcccugcaggacgccuacuaccgcgcgcgggccggggaggccgccaacuucugcgcccugauccucgcguacugcaacaagacggugggcgagcugggcgacguccgcgagaccauguccuaccuguuccagcacgccaaccucgacagcugcaagcgggugcugaacgucgugugcaagaccugcgggcagcagcagaccacccugaagggcguggaggccgucauguacauggggacgcucuccuacgagcaguucaagaagggcgugcagauccccugcaccugcgggaagcaggccaccaaguaccuggugcagcaggagagccccuucgucaugauguccgcccccccggcgcaguacgagcugaagcacggcaccuucacgugcgccagcgaguacaccggcaacuaccagugcgggcacuacaagcacaucaccuccaaggagacccucuacugcaucgacggcgcccugcugacgaagagcagcgaguacaaggggcccaucaccgacguguucuacaaggagaacuccuacaccaccacgaucaagcccgugaccuacaagcucgacggcgucgugugcaccgagaucgaccccaagcuggacaacuacuacaagaaggacaacagcuacuucaccgagcagccgaucgaccuggugcccaaccagcccuaccccaacgccuccuucgacaacuucaaguucgucugcgacaacaucaaguucgccgacgaccucaaccagcugacgggguacaagaagccggcgagccgcgagcugaaggugaccuucuuccccgaccucaacggcgacguggucgccaucgacuacaagcacuacacccccuccuucaagaagggcgccaagcugcugcacaagcccaucguguggcacgugaacaacgccaccaacaaggcgacguacaagccgaacaccuggugcauccggugccucuggagcaccaagcccgucgagaccuccaacagcuucgacgugcugaagcuggaggacgcccaggggauggacaaccucgccugcgaggaccugaagcccguguccgaggaggucguggagaaccccacgauccagaaggacgugcuggagugcaacgucaagaccaccgagguggugggcgacaucauccucaagccggccaacaacagccugaagaucaccgaggaggucgggcacacggaccugauggccgcguacguggacaacuccagccucaccaucaagaagcccaacgagcugucccgcgugcugggccucaagacccuggccacccacgggcuggccgccgucaacagcgugcccugggacacgaucgccaacuacgcgaagccguuccucaacaagguggucuccaccaccaccaacaucgugacgcgcugccugaaccgggugugcaccaacuacaugcccuacuucuucacccugcuccugcagcugugcaccuucacccgcagcacgaacucccggaucaaggccagcaugcccaccaccaucgccaagaacaccgucaaguccgugggcaaguucugccucgaggccagcuucaacuaccugaagagccccaacuucuccaagcugaucaacaucaucaucugguuccuccugcugagcgugugccucggcucccugaucuacagcacggccgcgcuggggguccucauguccaaccugggcaugccgagcuacugcaccggguaccgcgagggcuaccugaacuccaccaacgugaccaucgccacguacugcaccggcagcauccccugcuccgugugccucagcgggcuggacucccuggacaccuaccccagccucgagaccauccagaucacgaucuccagcuucaagugggaccugaccgccuucggccuggucgccgagugguuccucgccuacauccuguucacccgguucuucuacgugcuggggcucgcggccaucaugcagcuguucuucuccuacuucgccgugcacuucaucagcaacuccuggcugauguggcugaucaucaaccucguccagauggcccccaucagcgcgauggugcgcauguacaucuucuucgccuccuucuacuacguguggaagagcuacguccacgugguggacggcugcaacagcuccaccugcaugaugugcuacaagcggaaccgcgccacgcgggucgagugcaccaccaucgugaacgggguccgccggagcuucuacguguacgccaacggcggcaagggguucugcaagcugcacaacuggaacugcgugaacugcgacaccuucugcgccggcuccacguucaucagcgacgaggucgcgcgcgaccugucccuccaguucaagcggccgaucaaccccaccgaccagagcuccuacaucguggacagcgugaccgucaagaacggguccauccaccuguacuucgacaaggccggccagaagaccuacgagcgccacagccugucccacuucgugaaccucgacaaccugcgggccaacaacacgaaggggagccugcccaucaacgugaucgucuucgacggcaaguccaagugcgaggagagcuccgccaagagcgccuccguguacuacagccagcucaugugccagcccauccugcugcucgaccaggcgcugguguccgacgucggcgacagcgccgagguggccgugaagauguucgacgccuacgucaacaccuucagcuccaccuucaacgugccgauggagaagcugaagacccucguggccacggcggaggccgagcuggccaagaacgucagccuggacaacgugcucuccaccuucaucagcgccgcgcgccagggguucguggacuccgacgucgagaccaaggacgugguggagugccugaagcugagccaccaguccgacaucgaggucaccggcgacagcugcaacaacuacaugcucacguacaacaagguggagaacaugaccccccgggaccugggggccugcaucgacugcuccgcccgccacaucaacgcccagguggccaagagccacaacaucgcgcugaucuggaacgucaaggacuucaugucccucagcgagcagcugcggaagcagauccgcuccgccgccaagaagaacaaccugcccuucaagcucaccugcgccaccacgcgccagguggugaacgucgugaccaccaagaucgcccugaagggcgggugaggacuaguuauaagacugacuagcccgaugggccucccaacgggcccuccuccccuccuugcaccgagauuaauaaaaaaaaaaaaaaaaaaaaaaaaaaaaaaaaaaaaaaaaaaaaaaaaaaaaaaaaaaaaaaaaugcaucccccccccccccccccccccccccccccccaaaggcucuuuucagagccaccagaauu

SEQ ID NO: 22018 - RNA, 6058 nt, Artificial Sequence
  SARS-CoV-2__MT345879.1__non-structural protein 3 (NSP3) mRNA gc
aggagaaagcuuaccauggcccccaccaaggugaccuucggcgacgacacggucaucgaggugcagggguacaagagcgugaacaucaccuucgagcuggacgagcgcaucgacaagguccucaacgagaagugcuccgccuacaccguggagcugggcaccgaggugaacgaguucgcgugcgucguggccgacgccgugaucaagacgcugcagccggucagcgagcuccugaccccccuggggaucgaccucgacgagugguccauggccaccuacuaccuguucgacgagagcggcgaguucaagcuggccucccacauguacugcagcuucuacccccccgacgaggacgaggaggagggggacugcgaggaggaggaguucgagccguccacccaguacgaguacggcacggaggacgacuaccagggcaagccccucgaguucggggcgaccagcgccgcccugcagcccgaggaggagcaggaggaggacuggcuggacgacgacucccagcagaccgugggccagcaggacgggagcgaggacaaccagaccacgaccauccagaccaucguggagguccagccccagcucgagauggagcugaccccgguggugcagacgaucgaggucaacuccuucagcggcuaccugaagcucaccgacaacguguacaucaagaacgccgacaucguggaggaggcgaagaaggucaagcccaccgugguggucaacgccgccaacguguaccugaagcacgggggcggcguggccggggcccugaacaaggcgaccaacaacgccaugcaggucgaguccgacgacuacaucgccacgaacggcccccucaagguggggggcagcugcguccuguccggccacaaccuggccaagcacugccuccacgugguggggcccaacgucaacaagggcgaggacauccagcugcugaagagcgccuacgagaacuucaaccagcacgaggugcuccuggcgccgcugcucuccgccgggaucuucggcgccgaccccauccacagccugcgggugugcgucgacaccgugcgcaccaacguguaccuggccgucuucgacaagaaccucuacgacaagcugguguccagcuuccuggagaugaagagcgagaagcagguggagcagaagaucgccgagauccccaaggaggaggucaagcccuucaucaccgaguccaagccgagcguggagcagcggaagcaggacgacaagaagaucaaggcgugcguggaggaggucacgaccacccucgaggagaccaaguuccugacggagaaccugcuccuguacaucgacaucaacgggaaccugcaccccgacuccgccacccucgugagcgacaucgacaucaccuuccugaagaaggacgcccccuacaucgugggcgacgucgugcaggagggcgugcugaccgccgucgugauccccacgaagaaggccgggggcaccaccgagaugcucgcgaaggcccugcgcaaggugccgaccgacaacuacaucacgaccuaccccgggcagggccugaacggguacaccgucgaggaggccaagaccgugcucaagaagugcaaguccgccuucuacauccugcccagcaucaucuccaacgagaagcaggagauccugggcaccgugagcuggaaccuccgggagaugcuggcgcacgccgaggagacgcgcaagcugaugcccgucugcguggagaccaaggccaucguguccaccauccagcggaaguacaagggcaucaagauccaggagggggucguggacuacggcgcccgcuucuacuucuacaccagcaagacgaccguggccucccugaucaacacccucaacgaccugaacgagacccuggucacgaugccgcucggguacgugacccacggccugaaccuggaggaggcggcccgguacaugcgcagccucaaggugcccgccaccgucuccgugagcucccccgacgccgugaccgccuacaacggguaccugacgagcuccagcaagacccccgaggagcacuucaucgagaccaucucccuggcgggcagcuacaaggacuggagcuacuccggccagagcacccagcucgggaucgaguuccugaagcggggcgacaaguccgucuacuacacgagcaacccgaccaccuuccaccuggacggggaggugaucaccuucgacaaccucaagacgcugcugucccuccgcgaggugcggaccaucaaggucuucaccaccguggacaacaucaaccugcacacgcagguggucgacaugagcaugaccuacggccagcaguucggccccaccuaccuggacggggccgacgugaccaagaucaagccccacaacucccacgagggcaagacguucuacgugcucccgaacgacgacacccugcgcgucgaggccuucgaguacuaccacaccaccgaccccagcuuccuggggcgguacauguccgcccucaaccacacgaagaaguggaaguacccccaggugaacggccugaccagcaucaaguggaccgacaacaacugcuaccuggccaccgcgcuccugacgcugcagcagaucgagcucaaguucaaccccccggcccugcaggacgccuacuaccgcgcccgggcgggggaggccgccaacuucugcgcccugauccucgccuacugcaacaagaccgugggcgagcugggcgacguccgcgagaccauguccuaccuguuccagcacgcgaaccucgacagcugcaagcgggugcugaacgucgugugcaagaccugcgggcagcagcagaccacgcugaagggcguggaggccgucauguacauggggacccucuccuacgagcaguucaagaagggcgugcagauccccugcaccugcgggaagcaggccaccaaguaccuggugcagcaggagagccccuucgucaugauguccgcccccccggcccaguacgagcugaagcacggcacguucaccugcgcgagcgaguacaccggcaacuaccagugcgggcacuacaagcacaucaccuccaaggagacgcucuacugcaucgacggcgcccugcugaccaagagcagcgaguacaaggggcccaucaccgacguguucuacaaggagaacuccuacaccacgaccaucaagcccgugaccuacaagcucgacggcgucgugugcaccgagaucgaccccaagcuggacaacuacuacaagaaggacaacagcuacuucacggagcagccgaucgaccuggugcccaaccagcccuaccccaacgccuccuucgacaacuucaaguucgucugcgacaacaucaaguucgccgacgaccucaaccagcugaccggguacaagaagccggccagccgcgagcugaaggugaccuucuuccccgaccucaacggcgacguggucgcgaucgacuacaagcacuacacccccuccuucaagaagggcgccaagcugcugcacaagcccaucguguggcacgugaacaacgccacgaacaaggccaccuacaagccgaacaccuggugcauccggugccucuggagcaccaagcccgucgagacguccaacagcuucgacgugcugaaguccgaggacgcgcaggggauggacaaccuggccugcgaggaccucaagcccgugagcgaggaggucguggagaaccccaccauccagaaggacgugcuggagugcaacgucaagaccaccgagguggugggcgacaucauccugaagccggccaacaacucccucaagaucacggaggaggucgggcacaccgaccugauggccgccuacguggacaacagcucccugaccaucaagaagcccaacgagcucagccgcgugcugggccugaagacccucgcgacgcacgggcuggccgccgucaacuccgugcccugggacaccaucgccaacuacgccaagccguuccugaacaagguggucagcaccaccacgaacaucgugacccgcugccucaaccgggugugcaccaacuacaugcccuacuucuucacccugcugcuccagcugugcaccuucacgcgcuccaccaacagccggaucaaggcguccaugcccaccaccaucgccaagaacacggucaagagcgugggcaaguucugccuggaggccagcuucaacuaccucaagucccccaacuucagcaagcugaucaacaucaucaucugguuccugcuccuguccgugugccugggcagccucaucuacuccaccgccgcccuggggguccugaugagcaaccucggcaugccguccuacugcaccggguaccgcgagggcuaccugaacagcaccaacgugacgaucgcgaccuacugcaccggcuccauccccugcagcgugugccuguccgggcucgacagccuggacaccuaccccucccuggagacgauccagaucaccaucagcuccuucaagugggaccucaccgccuucggccuggucgccgagugguuccuggccuacauccucuucacccgguucuucuacgugcuggggcuggccgcgaucaugcagcucuucuucagcuacuucgccgugcacuucaucuccaacagcuggcugauguggcugaucaucaaccugguccagauggcccccaucuccgccauggugcgcauguacaucuucuucgcgagcuucuacuacguguggaagagcuacguccacgugguggacggcugcaacuccagcacgugcaugaugugcuacaagcggaaccgcgccacccgggucgagugcaccaccaucgugaacgggguccgccgguccuucuacguguacgccaacggcggcaagggguucugcaagcuccacaacuggaacugcgugaacugcgacacguucugcgccggcagcaccuucaucuccgacgaggucgcccgcgaccugagccugcaguucaagcggccgaucaaccccaccgaccaguccagcuacaucguggacuccgugaccgucaagaacgggagcauccaccucuacuucgacaaggcgggccagaagacguacgagcgccacucccugagccacuucgugaaccuggacaaccuccgggccaacaacaccaaggggucccugcccaucaacgugaucgucuucgacggcaagagcaagugcgaggaguccagcgccaaguccgccagcguguacuacucccagcugaugugccagcccauccuccugcuggaccaggcccucgugagcgacgucggcgacagcgcggagguggccgugaagauguucgacgccuacgucaacaccuucuccagcaccuucaacgugccgauggagaagcugaagacgcugguggccaccgccgaggcggagcucgccaagaacgucucccuggacaacgugcugagcaccuucaucuccgccgcccgccagggguucguggacagcgacgucgagaccaaggacgugguggagugccucaagcugucccaccagagcgacaucgaggucacgggcgacuccugcaacaacuacaugcugaccuacaacaagguggagaacaugaccccccgggaccucggggcgugcaucgacugcagcgcccgccacaucaacgcccagguggccaagucccacaacaucgcccugaucuggaacgucaaggacuucaugagccuguccgagcagcuccggaagcagauccgcagcgcggccaagaagaacaaccugcccuucaagcugaccugcgccacgacccgccagguggugaacgucgugaccaccaagaucgcccucaagggcgggugaggacuaguuauaagacugacuagcccgaugggccucccaacgggcccuccuccccuccuugcaccgagauuaauaaaaaaaaaaaaaaaaaaaaaaaaaaaaaaaaaaaaaaaaaaaaaaaaaaaaaaaaaaaaaaaaugcaucccccccccccccccccccccccccccccccaaaggcucuuuucagagccaccagaauu

SEQ ID NO: 22019 - RNA, 6058 nt, Artificial Sequence
  SARS-CoV-2__MT345887.1__non-structural protein 3 (NSP3) mRNA gc
aggagaaagcuuaccauggcccccaccaaggugaccuucggcgacgacacggucaucgaggugcagggguacaagagcgugaacaucaccuucgagcuggacgagcgcaucgacaagguccucaacgagaagugcuccgccuacaccguggagcugggcaccgaggugaacgaguucgcgugcgucguggccgacgccgugaucaagacgcugcagccggucagcgagcuccugaccccccuggggaucgaccucgacgagugguccauggccaccuacuaccuguucgacgagagcggcgaguucaagcuggccucccacauguacugcagcuucuacccccccgacgaggacgaggaggagggggacugcgaggaggaggaguucgagccguccacccaguacgaguacggcacggaggacgacuaccagggcaagccccucgaguucggggcgaccagcgccgcccugcagcccgaggaggagcaggaggaggacuggcuggacgacgacucccagcagaccgugggccagcaggacgggagcgaggacaaccagaccacgaccauccagaccaucguggagguccagccccagcucgagauggagcugaccccgguggugcagacgaucgaggucaacuccuucagcggcuaccugaagcucaccgacaacguguacaucaagaacgccgacaucguggaggaggcgaagaaggucaagcccaccgugguggucaacgccgccaacguguaccugaagcacgggggcggcguggccggggcccugaacaaggcgaccaacaacgccaugcaggucgaguccgacgacuacaucgccacgaacggcccccucaagguggggggcagcugcguccuguccggccacaaccuggccaagcacugccuccacgugguggggcccaacgucaacaagggcgaggacauccagcugcugaagagcgccuacgagaacuucaaccagcacgaggugcuccuggcgccgcugcucuccgccgggaucuucggcgccgaccccauccacagccugcgggugugcgucgacaccgugcgcaccaacguguaccuggccgucuucgacaagaaccucuacgacaagcugguguccagcuuccuggagaugaagagcgagaagcagguggagcagaagaucgccgagauccccaaggaggaggucaagcccuucaucaccgaguccaagccgagcguggagcagcggaagcaggacgacaagaagaucaaggcgugcguggaggaggucacgaccacccucgaggagaccaaguuccugacggagaaccugcuccuguacaucgacaucaacgggaaccugcaccccgacuccgccacccucgugagcgacaucgacaucaccuuccugaagaaggacgcccccuacaucgugggcgacgucgugcaggagggcgugcugaccgccgucgugauccccacgaagaaggccgggggcaccaccgagaugcucgcgaaggcccugcgcaaggugccgaccgacaacuacaucacgaccuaccccgggcagggccugaacggguacaccgucgaggaggccaagaccgugcucaagaagugcaaguccgccuucuacauccugcccagcaucaucuccaacgagaagcaggagauccugggcaccgugagcuggaaccuccgggagaugcuggcgcacgccgaggagacgcgcaagcugaugcccgucugcguggagaccaaggccaucguguccaccauccagcggaaguacaagggcaucaagauccaggagggggucguggacuacggcgcccgcuucuacuucuacaccagcaagacgaccguggccucccugaucaacacccucaacgaccugaacgagacccuggucacgaugccgcucggguacgugacccacggccugaaccuggaggaggcggcccgguacaugcgcagccucaaggugcccgccaccgucuccgugagcucccccgacgccgugaccgccuacaacggguaccugacgagcuccagcaagacccccgaggagcacuucaucgagaccaucucccuggcgggcagcuacaaggacuggagcuacuccggccagagcacccagcucgggaucgaguuccugaagcggggcgacaaguccgucuacuacacgagcaacccgaccaccuuccaccuggacggggaggugaucaccuucgacaaccucaagacgcugcugucccuccgcgaggugcggaccaucaaggucuucaccaccguggacaacaucaaccugcacacgcagguggucgacaugagcaugaccuacggccagcaguucggccccaccuaccuggacggggccgacgugaccaagaucaagccccacaacucccacgagggcaagacguucuacgugcucccgaacgacgacacccugcgcgucgaggccuucgaguacuaccacaccaccgaccccagcuuccuggggcgguacauguccgcccucaaccacacgaagaaguggaaguacccccaggugaacggccugaccagcaucaagugggccgacaacaacugcuaccuggcgaccgcccuccugacccugcagcagaucgagcucaaguucaaccccccggcccugcaggacgccuacuaccgcgcgcgggccggggaggccgccaacuucugcgcccugauccucgcguacugcaacaagacggugggcgagcugggcgacguccgcgagaccauguccuaccuguuccagcacgccaaccucgacagcugcaagcgggugcugaacgucgugugcaagaccugcgggcagcagcagaccacccugaagggcguggaggccgucauguacauggggacgcucuccuacgagcaguucaagaagggcgugcagauccccugcaccugcgggaagcaggccaccaaguaccuggugcagcaggagagccccuucgucaugauguccgcccccccggcgcaguacgagcugaagcacggcaccuucacgugcgccagcgaguacaccggcaacuaccagugcgggcacuacaagcacaucaccuccaaggagacccucuacugcaucgacggcgcccugcugacgaagagcagcgaguacaaggggcccaucaccgacguguucuacaaggagaacuccuacaccaccacgaucaagcccgugaccuacaagcucgacggcgucgugugcaucgagaucgaccccaagcuggacaacuacuacaagaaggacaacagcuacuucaccgagcagccgaucgaccuggugcccaaccagcccuaccccaacgccuccuucgacaacuucaaguucgucugcgacaacaucaaguucgccgacgaccucaaccagcugaccggguacaagaagccggcgagccgcgagcugaaggugacguucuuccccgaccucaacggcgacguggucgccaucgacuacaagcacuacacccccuccuucaagaagggcgccaagcugcugcacaagcccaucguguggcacgugaacaacgccaccaacaaggcgaccuacaagccgaacacguggugcauccggugccucuggagcaccaagcccgucgagaccuccaacagcuucgacgugcugaaguccgaggacgcccaggggauggacaaccuggccugcgaggaccucaagcccgugagcgaggaggucguggagaaccccaccauccagaaggacgugcuggagugcaacgucaagacgaccgagguggugggcgacaucauccugaagccggccaacaacucccucaagaucaccgaggaggucgggcacaccgaccugauggccgcguacguggacaacagcucccugacgaucaagaagcccaacgagcucagccgcgugcugggccugaagacccucgccacccacgggcuggccgccgucaacuccgugcccugggacaccaucgccaacuacgcgaagccguuccugaacaagguggucagcacgaccaccaacaucgugacccgcugccucaaccgggugugcacgaacuacaugcccuacuucuucacccugcugcuccagcugugcaccuucacccgcuccaccaacagccggaucaaggccuccaugcccacgaccaucgccaagaacaccgucaagagcgugggcaaguucugccuggaggccagcuucaacuaccucaagucccccaacuucagcaagcugaucaacaucaucaucugguuccugcuccuguccgugugccugggcagccucaucuacuccaccgccgcgcuggggguccugaugagcaaccucggcaugccguccuacugcacgggguaccgcgagggcuaccugaacagcaccaacgugaccaucgccaccuacugcacgggcuccauccccugcagcgugugccuguccgggcucgacagccuggacaccuaccccucccuggagaccauccagaucaccaucagcuccuucaagugggaccucacggccuucggccuggucgccgagugguuccuggccuacauccucuucacccgguucuucuacgugcuggggcuggcggccaucaugcagcucuucuucagcuacuucgccgugcacuucaucuccaacagcuggcugauguggcugaucaucaaccugguccagauggcccccaucuccgcgauggugcgcauguacaucuucuucgccagcuucuacuacguguggaagagcuacguccacgugguggacggcugcaacuccagcaccugcaugaugugcuacaagcggaaccgcgccacccgggucgagugcacgaccaucgugaacgggguccgccgguccuucuacguguacgccaacggcggcaagggguucugcaagcuccacaacuggaacugcgugaacugcgacaccuucugcgccggcagcaccuucaucuccgacgaggucgcgcgcgaccugagccugcaguucaagcggccgaucaaccccacggaccaguccagcuacaucguggacuccgugaccgucaagaacgggagcauccaccucuacuucgacaaggccggccagaagaccuacgagcgccacucccugagccacuucgugaaccuggacaaccuccgggccaacaacaccaaggggucccugcccaucaacgugaucgucuucgacggcaagagcaagugcgaggaguccagcgccaaguccgccagcguguacuacucccagcugaugugccagcccauccuccugcuggaccaggcgcucgugagcgacgucggcgacagcgccgagguggccgugaagauguucgacgccuacgucaacacguucuccagcaccuucaacgugccgauggagaagcugaagacccugguggccaccgcggaggccgagcucgccaagaacgucucccuggacaacgugcugagcacguucaucuccgccgcgcgccagggguucguggacagcgacgucgagaccaaggacgugguggagugccucaagcugucccaccagagcgacaucgaggucaccggcgacuccugcaacaacuacaugcugaccuacaacaagguggagaacaugacgccccgggaccucggggccugcaucgacugcagcgcccgccacaucaacgcccagguggccaagucccacaacaucgcgcugaucuggaacgucaaggacuucaugagccuguccgagcagcuccggaagcagauccgcagcgccgccaagaagaacaaccugcccuucaagcugaccugcgccaccacccgccagguggugaacgucgugacgaccaagaucgcccucaagggcgggugaggacuaguuauaagacugacuagcccgaugggccucccaacgggcccuccuccccuccuugcaccgagauuaauaaaaaaaaaaaaaaaaaaaaaaaaaaaaaaaaaaaaaaaaaaaaaaaaaaaaaaaaaaaaaaaaugcaucccccccccccccccccccccccccccccccaaaggcucuuuucagagccaccagaauu

SEQ ID NO: 22020 - RNA, 6058 nt, Artificial Sequence
  SARS-CoV-2__MT326054.1__non-structural protein 3 (NSP3) mRNA gc
aggagaaagcuuaccauggcccccaccaaggugaccuucggcgacgacacggucaucgaggugcagggguacaagagcgugaacaucaccuucgagcuggacgagcgcaucgacaagguccucaacgagaagugcuccgccuacaccguggagcugggcaccgaggugaacgaguucgcgugcgucguggccgacgccgugaucaagacgcugcagccggucagcgagcuccugaccccccuggggaucgaccucgacgagugguccauggccaccuacuaccuguucgacgagagcggcgaguucaagcuggccucccacauguacugcagcuucuacccccccgacgaggacgaggaggagggggacugcgaggaggaggaguucgagccguccacccaguacgaguacggcacggaggacgacuaccagggcaagccccucgaguucggggcgaccagcgccgcccugcagcccgaggaggagcaggaggaggacuggcuggacgacgacucccagcagaccgugggccagcaggacgggagcgaggacaaccagaccacgaccauccagaccaucguggagguccagccccagcucgagauggagcugaccccgguggugcagacgaucgaggucaacuccuucagcggcuaccugaagcucaccgacaacguguacaucaagaacgccgacaucguggaggaggcgaagaaggucaagcccaccgugguggucaacgccgccaacguguaccugaagcacgggggcggcguggccggggcccugaacaaggcgaccaacaacgccaugcaggucgaguccgacgacuacaucgccacgaacggcccccucaagguggggggcagcugcguccuguccggccacaaccuggccaagcacugccuccacgugguggggcccaacgucaacaagggcgaggacauccagcugcugaagagcgccuacgagaacuucaaccagcacgaggugcuccuggcgccgcugcucuccgccgggaucuucggcgccgaccccauccacagccugcgggugugcgucgacaccgugcgcaccaacguguaccuggccgucuucgacaagaaccucuacgacaagcugguguccagcuuccuggagaugaagagcgagaagcagguggagcagaagaucgccgagauccccaaggaggaggucaagcccuucaucaccgaguccaagccgagcguggagcagcggaagcaguacgacaagaagaucaaggcgugcguggaggaggucacgaccacccucgaggagaccaaguuccugacggagaaccugcuccuguacaucgacaucaacgggaaccugcaccccgacuccgccacccucgugagcgacaucgacaucaccuuccugaagaaggacgcccccuacaucgugggcgacgucgugcaggagggcgugcugaccgccgucgugauccccacgaagaaggccgggggcaccaccgagaugcucgcgaaggcccugcgcaaggugccgaccgacaacuacaucacgaccuaccccgggcagggccugaacggguacaccgucgaggaggccaagaccgugcucaagaagugcaaguccgccuucuacauccugcccagcaucaucuccaacgagaagcaggagauccugggcaccgugagcuggaaccuccgggagaugcuggcgcacgccgaggagacgcgcaagcugaugcccgucugcguggagaccaaggccaucguguccaccauccagcggaaguacaagggcaucaagauccaggagggggucguggacuacggcgcccgcuucuacuucuacaccagcaagacgaccguggccucccugaucaacacccucaacgaccugaacgagacccuggucacgaugccgcucggguacgugacccacggccugaaccuggaggaggcggcccgguacaugcgcagccucaaggugcccgccaccgucuccgugagcucccccgacgccgugaccgccuacaacggguaccugacgagcuccagcaagacccccgaggagcacuucaucgagaccaucucccuggcgggcagcuacaaggacuggagcuacuccggccagagcacccagcucgggaucgaguuccugaagcggggcgacaaguccgucuacuacacgagcaacccgaccaccuuccaccuggacggggaggugaucaccuucgacaaccucaagacgcugcugucccuccgcgaggugcggaccaucaaggucuucaccaccguggacaacaucaaccugcacacgcagguggucgacaugagcaugaccuacggccagcaguucggccccaccuaccuggacggggccgacgugaccaagaucaagccccacaacucccacgagggcaagacguucuacgugcucccgaacgacgacacccugcgcgucgaggccuucgaguacuaccacaccaccgaccccagcuuccuggggcgguacauguccgcccucaaccacacgaagaaguggaaguacccccaggugaacggccugaccagcaucaagugggccgacaacaacugcuaccuggcgaccgcccuccugacccugcagcagaucgagcucaaguucaaccccccggcccugcaggacgccuacuaccgcgcgcgggccggggaggccgccaacuucugcgcccugauccucgcguacugcaacaagacggugggcgagcugggcgacguccgcgagaccauguccuaccuguuccagcacgccaaccucgacagcugcaagcgggugcugaacgucgugugcaagaccugcgggcagcagcagaccacccugaagggcguggaggccgucauguacauggggacgcucuccuacgagcaguucaagaagggcgugcagauccccugcaccugcgggaagcaggccaccaaguaccuggugcagcaggagagccccuucgucaugauguccgcccccccggcgcaguacgagcugaagcacggcaccuucacgugcgccagcgaguacaccggcaacuaccagugcgggcacuacaagcacaucaccuccaaggagacccucuacugcaucgacggcgcccugcugacgaagagcagcgaguacaaggggcccaucaccgacguguucuacaaggagaacuccuacaccaccacgaucaagcccgugaccuacaagcucgacggcgucgugugcaccgagaucgaccccaagcuggacaacuacuacaagaaggacaacagcuacuucaccgagcagccgaucgaccuggugcccaaccagcccuaccccaacgccuccuucgacaacuucaaguucgucugcgacaacaucaaguucgccgacgaccucaaccagcugacgggguacaagaagccggcgagccgcgagcugaaggugaccuucuuccccgaccucaacggcgacguggucgccaucgacuacaagcacuacacccccuccuucaagaagggcgccaagcugcugcacaagcccaucguguggcacgugaacaacgccaccaacaaggcgacguacaagccgaacaccuggugcauccggugccucuggagcaccaagcccgucgagaccuccaacagcuucgacgugcugaaguccgaggacgcccaggggauggacaaccuggccugcgaggaccucaagcccgugagcgaggaggucguggagaaccccacgauccagaaggacgugcuggagugcaacgucaagaccaccgagguggugggcgacaucauccugaagccggccaacaacucccucaagaucaccgaggaggucgggcacacggaccugauggccgcguacguggacaacagcucccugaccaucaagaagcccaacgagcucagccgcgugcugggccugaagacccucgccacccacgggcuggccgccgucaacuccgugcccugggacacgaucgccaacuacgcgaagccguuccugaacaagguggucagcaccaccaccaacaucgugacgcgcugccucaaccgggugugcaccaacuacaugcccuacuucuucacccugcugcuccagcugugcaccuucacccgcuccacgaacagccggaucaaggccuccaugcccaccaccaucgccaagaacaccgucaagagcgugggcaaguucugccuggaggccagcuucaacuaccucaagucccccaacuucagcaagcugaucaacaucaucaucugguuccugcuccuguccgugugccugggcagccucaucuacuccacggccgcgcuggggguccugaugagcaaccucggcaugccguccuacugcaccggguaccgcgagggcuaccugaacagcaccaacgugaccaucgccacguacugcaccggcuccauccccugcagcgugugccuguccgggcucgacagccuggacaccuaccccucccuggagaccauccagaucacgaucagcuccuucaagugggaccucaccgccuucggccuggucgccgagugguuccuggccuacauccucuucacccgguucuucuacgugcuggggcuggcggccaucaugcagcucuucuucagcuacuucgccgugcacuucaucuccaacagcuggcugauguggcugaucaucaaccugguccagauggcccccaucuccgcgauggugcgcauguacaucuucuucgccagcuucuacuacguguggaagagcuacguccacgugguggacggcugcaacuccagcaccugcaugaugugcuacaagcggaaccgcgccacgcgggucgagugcaccaccaucgugaacgggguccgccgguccuucuacguguacgccaacggcggcaagggguucugcaagcuccacaacuggaacugcgugaacugcgacaccuucugcgccggcagcacguucaucuccgacgaggucgcgcgcgaccugagccugcaguucaagcggccgaucaaccccaccgaccaguccagcuacaucguggacuccgugaccgucaagaacgggagcauccaccucuacuucgacaaggccggccagaagaccuacgagcgccacucccugagccacuucgugaaccuggacaaccuccgggccaacaacacgaaggggucccugcccaucaacgugaucgucuucgacggcaagagcaagugcgaggaguccagcgccaaguccgccagcguguacuacucccagcugaugugccagcccauccuccugcuggaccaggcgcucgugagcgacgucggcgacagcgccgagguggccgugaagauguucgacgccuacgucaacaccuucuccagcaccuucaacgugccgauggagaagcugaagacccugguggccacggcggaggccgagcucgccaagaacgucucccuggacaacgugcugagcaccuucaucuccgccgcgcgccagggguucguggacagcgacgucgagaccaaggacgugguggagugccucaagcugucccaccagagcgacaucgaggucaccggcgacuccugcaacaacuacaugcugacguacaacaagguggagaacaugaccccccgggaccucggggccugcaucgacugcagcgcccgccacaucaacgcccagguggccaagucccacaacaucgcgcugaucuggaacgucaaggacuucaugagccuguccgagcagcuccggaagcagauccgcagcgccgccaagaagaacaaccugcccuucaagcugaccugcgccaccacgcgccagguggugaacgucgugaccaccaagaucgcccucaagggcgggugaggacuaguuauaagacugacuagcccgaugggccucccaacgggcccuccuccccuccuugcaccgagauuaauaaaaaaaaaaaaaaaaaaaaaaaaaaaaaaaaaaaaaaaaaaaaaaaaaaaaaaaaaaaaaaaaugcaucccccccccccccccccccccccccccccccaaaggcucuuuucagagccaccagaauu

SEQ ID NO: 22021 - RNA, 6058 nt, Artificial Sequence
  SARS-CoV-2__MT326086.1__non-structural protein 3 (NSP3) mRNA gc
aggagaaagcuuaccauggcccccaccaaggugaccuucggcgacgacacggucaucgaggugcagggguacaagagcgugaacaucaccuucgagcuggacgagcgcaucgacaagguccucaacgagaagugcuccgccuacaccguggagcugggcaccgaggugaacgaguucgcgugcgucguggccgacgccgugaucaagacgcugcagccggucagcgagcuccugaccccccuggggaucgaccucgacgagugguccauggccaccuacuaccuguucgacgagagcggcgaguucaagcuggccucccacauguacugcagcuucuacccccccgacgaggacgaggaggagggggacugcgaggaggaggaguucgagccguccacccaguacgaguacggcacggaggacgacuaccagggcaagccccucgaguucggggcgaccagcgccgcccugcagcccgaggaggagcaggaggaggacuggcuggacgacgacucccagcagaccgugggccagcaggacgggagcgaggacaaccagaccacgaccauccagaccaucguggagguccagccccagcucgagauggagcugaccccgguggugcagacgaucgaggucaacuccuucagcggcuaccugaagcucaccgacaacguguacaucaagaacgccgacaucguggaggaggcgaagaaggucaagcccaccgugguggucaacgccgccaacguguaccugaagcacgggggcggcguggccggggcccugaacaaggcgaccaacaacgccaugcaggucgaguccgacgacuacaucgccacgaacggcccccucaagguggggggcagcugcguccuguccggccacaaccuggccaagcacugccuccacgugguggggcccaacgucaacaagggcgaggacauccagcugcugaagagcgccuacgagaacuucaaccagcacgaggugcuccuggcgccgcugcucuccgccgggaucuucggcgccgaccccauccacagccugcgggugugcgucgacaccgugcgcaccaacguguaccuggccgucuucgacaagaaccucuacgacaagcugguguccagcuuccuggagaugaagagcgagaagcagguggagcagaagaucgccgagauccccaaggaggaggucaagcccuucaucaccgaguccaagccgagcguggagcagcggaagcaggacgacaagaagaucaaggcgugcguggaggaggucacgaccacccucgaggagaccaaguuccugacggagaaccugcuccuguacaucgacaucaacgggaaccugcaccccgacuccgccacccucgugagcgacaucgacaucaccuuccugaagaaggacgcccccuacaucgugggcgacgucgugcaggagggcgugcugaccgccgucgugauccccacgaagaaggccgggggcaccaccgagaugcucgcgaaggcccugcgcaaggugccgaccgacaacuacaucacgaccuaccccgggcagggccugaacggguacaccgucgaggaggccaagaccgugcucaagaagugcaaguccgccuucuacauccugcccagcaucaucuccaacgagaagcaggagauccugggcaccgugagcuggaaccuccgggagaugcuggcgcacgccgaggagacgcgcaagcugaugcccgucugcguggagaccaaggccaucguguccaccauccagcggaaguacaagggcaucaagauccaggagggggucguggacuacggcgcccgcuucuacuucuacaccagcaagacgaccguggccucccugaucaacacccucaacgaccugaacgagacccuggucacgaugccgcucggguacgugacccacggccugaaccuggaggaggcggcccgguacaugcgcagccucaaggugcccgccaccgucuccgugagcucccccgacgccgugaccgccuacaacggguaccugacgagcuccagcaagacccccgaggagcacuucaucgagaccaucucccuggcgggcagcuacaaggacuggagcuacuccggccagagcacccagcucgggaucgaguuccugaagcggggcgacaaguccgucuacuacacgagcaacccgaccaccuuccaccuggacggggaggugaucaccuucgacaaccucaagacgcugcugucccuccgcgaggugcggaccaucaaggucuucaccaccguggacaacaucaaccugcacacgcagguggucgacaugagcaugaccuacggccagcaguucggccccaccuaccuggacggggccgacgugaccaagaucaagccccacaacucccacgagggcaagacguucuacgugcucccgaacgacgacacccugcgcgucgaggccuucgaguacuaccacaccaccgaccccagcuuccuggggcgguacauguccgcccucaaccacacgaagaaguggaaguacccccaggugaacggccugaccagcaucaagugggccgacaacaacugcuaccuggcgaccgcccuccugacccugcagcagaucgagcucaaguucaaccccccggcccugcaggacgccuacuaccgcgcgcgggccggggaggccgccaacuucugcgcccugauccucgcguacugcaacaagacggugggcgagcugggcgacguccgcgagaccauguccuaccuguuccagcacgccaaccucgacagcugcaagcgggugcugaacgucgugugcaagaccugcgggcagcagcagaccacccugaagggcguggaggccgucauguacauggggacgcucuccuacgagcaguucaagaagggcgugcagauccccugcaccugcgggaagcaggccaccaaguaccuggugcagcaggagagccccuucgucaugauguccgcccccccggcgcaguacgagcugaagcacggcaccuucacgugcgccagcgaguacaccggcaacuaccagugcgggcacuacaagcacaucaccuccaaggagacccucuacugcaucgacggcgcccugcugacgaagagcagcgaguacaaggggcccaucaccgacguguucuacaaggagaacuccuacaccaccacgaucaagcccgugaccuacaagcucgacggcgucgugugcaccgagaucgaccccaagcuggacaacuacuacaagaaggacaacagcuacuucaccgagcagccgaucgaccuggugcccaaccagcccuaccccaacgccuccuucgacaacuucaaguucgucugcgacaacaucaaguucgccgacgaccucaaccagcugacgggguacaagaagccggcgagccgcgagcugaaggugaccuucuuccccgaccucaacggcgacguggucgccaucgacuacaagcacuacacccccuccuucaagaagggcgccaagcugcugcacaagcccaucguguggcacgugaacaacgccaccaacaaggcgacguacaagccgaacaccuggugcauccggugccucuggagcaccaagcccgucgagaccuccaacagcuucgacgugcugaaguccgaggacgcccaggggauggacaaccuggccugcgaggaccucaagcccgugagcgaggaggucguggagaaccccacgauccagaaggacgugcuggagugcaacgucaagaccaccgagguggugggcgacaucauccugaagccggccaacaacucccucaagaucaccgaggaggucgggcacacggaccugauggccgcguacguggacaacagcucccugaccaucaagaagcccaacgagcucagccgcgugcugggccugaagacccucgccacccacgggcuggccgccgucaacuccgugcccugggacacgaucgccaacuacgcgaagccguuccugaacaagguggucagcaccaccaccaacaucgugacgcgcugccucaaccgggugugcaccaacuacaugcccuacuucuucacccugcugcuccagcugugcaccuucacccgcuccgccaacagccggaucaaggccuccaugcccacgaccaucgccaagaacaccgucaagagcgugggcaaguucugccuggaggccagcuucaacuaccucaagucccccaacuucagcaagcugaucaacaucaucaucugguuccugcuccuguccgugugccugggcagccucaucuacuccaccgcggcccuggggguccugaugagcaaccucggcaugccguccuacugcacgggguaccgcgagggcuaccugaacagcaccaacgugaccaucgccaccuacugcacgggcuccauccccugcagcgugugccuguccgggcucgacagccuggacaccuaccccucccuggagaccauccagaucaccaucagcuccuucaagugggaccucacggccuucggccuggucgccgagugguuccuggcguacauccucuucacccgguucuucuacgugcuggggcuggccgccaucaugcagcucuucuucagcuacuucgccgugcacuucaucuccaacagcuggcugauguggcugaucaucaaccugguccagauggcgcccaucuccgccauggugcgcauguacaucuucuucgccagcuucuacuacguguggaagagcuacguccacgugguggacggcugcaacuccagcaccugcaugaugugcuacaagcggaaccgcgccacccgggucgagugcacgaccaucgugaacgggguccgccgguccuucuacguguacgccaacggcggcaagggguucugcaagcuccacaacuggaacugcgugaacugcgacaccuucugcgcgggcagcaccuucaucuccgacgaggucgcccgcgaccugagccugcaguucaagcggccgaucaaccccacggaccaguccagcuacaucguggacuccgugaccgucaagaacgggagcauccaccucuacuucgacaaggccggccagaagaccuacgagcgccacucccugagccacuucgugaaccuggacaaccuccgggccaacaacaccaaggggucccugcccaucaacgugaucgucuucgacggcaagagcaagugcgaggaguccagcgccaaguccgcgagcguguacuacucccagcugaugugccagcccauccuccugcuggaccaggcccucgugagcgacgucggcgacagcgccgagguggccgugaagauguucgacgccuacgucaacacguucuccagcaccuucaacgugccgauggagaagcugaagacccugguggcgaccgccgaggccgagcucgccaagaacgucucccuggacaacgugcugagcacguucaucuccgcggcccgccagggguucguggacagcgacgucgagaccaaggacgugguggagugccucaagcugucccaccagagcgacaucgaggucaccggcgacuccugcaacaacuacaugcugaccuacaacaagguggagaacaugacgccccgggaccucggggccugcaucgacugcagcgcccgccacaucaacgcccagguggcgaagucccacaacaucgcccugaucuggaacgucaaggacuucaugagccuguccgagcagcuccggaagcagauccgcagcgccgccaagaagaacaaccugcccuucaagcugaccugcgccaccacccgccagguggugaacgucgugacgaccaagaucgcgcucaagggcgggugaggacuaguuauaagacugacuagcccgaugggccucccaacgggcccuccuccccuccuugcaccgagauuaauaaaaaaaaaaaaaaaaaaaaaaaaaaaaaaaaaaaaaaaaaaaaaaaaaaaaaaaaaaaaaaaaugcaucccccccccccccccccccccccccccccccaaaggcucuuuucagagccaccagaauu

SEQ ID NO: 22022 - RNA, 6058 nt, Artificial Sequence
  SARS-CoV-2__MT326091.1__non-structural protein 3 (NSP3) mRNA gc
aggagaaagcuuaccauggcccccaccaaggugaccuucggcgacgacacggucaucgaggugcagggguacaagagcgugaacaucaccuucgagcuggacgagcgcaucgacaagguccucaacgagaagugcuccgccuacaccguggagcugggcaccgaggugaacgaguucgcgugcgucguggccgacgccgugaucaagacgcugcagccggucagcgagcuccugaccccccuggggaucggcuucuacgagugguccauggccaccuacuaccucuucgacgagagcggggaguucaagcuggccucccacauguacugcagcuucuacccccccgacgaggacgaggaggagggcgacugcgaggaggaggaguucgagccguccacccaguacgaguacggcacggaggacgacuaccaggggaagccccuggaguucggcgcgaccagcgccgcccuccagcccgaggaggagcaggaggaggacuggcuggacgacgacucccagcagaccguggggcagcaggacggcagcgaggacaaccagaccacgaccauccagaccaucguggagguccagccccagcuggagauggagcucaccccgguggugcagacgaucgaggucaacuccuucagcggguaccugaagcugaccgacaacguguacaucaagaacgccgacaucguggaggaggcgaagaaggucaagcccaccgugguggucaacgccgccaacguguaccucaagcacggcggcgggguggccggcgcccugaacaaggcgaccaacaacgccaugcaggucgaguccgacgacuacaucgccacgaacgggccccugaaggugggcggcagcugcguccucuccgggcacaaccuggccaagcacugccugcacguggugggccccaacgucaacaagggggaggacauccagcuccugaagagcgccuacgagaacuucaaccagcacgaggugcugcucgcgccgcugcuguccgccggcaucuucggggccgaccccauccacagccuccgggugugcgucgacaccgugcgcaccaacguguaccuggccgucuucgacaagaaccuguacgacaagcucguguccagcuuccuggagaugaagagcgagaagcagguggagcagaagaucgccgagauccccaaggaggaggucaagcccuucaucaccgaguccaagccgagcguggagcagcggaagcaggacgacaagaagaucaaggcgugcguggaggaggucacgaccacccuggaggagaccaaguuccucacggagaaccugcugcucuacaucgacaucaacggcaaccugcaccccgacuccgccacccuggugagcgacaucgacaucaccuuccucaagaaggacgcccccuacaucgugggcgacgucgugcaggagggggugcugaccgccgucgugauccccacgaagaaggccggcgggaccaccgagaugcuggcgaaggcccuccgcaaggugccgaccgacuccuacaucacgaccuaccccggccaggggcugaacggcuacaccgucgaggaggccaagaccgugcugaagaagugcaagagcgccuucuacauccuccccuccaucaucagcaacgagaagcaggagauccugggcaccguguccuggaaccugcgggagaugcucgcgcacgccgaggagacgcgcaagcugaugcccgucugcguggagaccaaggccaucgugagcaccauccagcggaaguacaaggggaucaagauccaggagggcgucguggacuacggggcccgcuucuacuucuacaccuccaagacgaccguggccagccugaucaacacccugaacgaccucaacgagacccuggucacgaugccgcugggcuacgugacccacgggcucaaccuggaggaggcggcccgguacaugcgcucccugaaggugcccgccaccgucagcguguccagccccgacgccgugaccgccuacaacggcuaccucacguccagcuccaagacccccgaggagcacuucaucgagaccaucagccuggcgggcagcuacaaggacugguccuacagcgggcaguccacccagcugggcaucgaguuccucaagcggggggacaagagcgucuacuacacguccaacccgaccaccuuccaccuggacggcgaggugaucaccuucgacaaccugaagacgcuccugagccugcgcgaggugcggaccaucaaggucuucaccaccguggacaacaucaaccuccacacgcagguggucgacauguccaugaccuacggccagcaguucgggcccaccuaccuggacggcgccgacgugaccaagaucaagccccacaacagccacgaggggaagacguucuacgugcugccgaacgacgacacccuccgcgucgaggccuucgaguacuaccacaccaccgaccccuccuuccugggccgguacaugagcgcccugaaccacacgaagaaguggaaguacccccaggugaacgggcucaccuccaucaagugggccgacaacaacugcuaccuggcgaccgcccugcucacccugcagcagaucgagcugaaguucaaccccccggcccuccaggacgccuacuaccgcgcgcgggccggcgaggccgccaacuucugcgcccugauccuggcguacugcaacaagacggugggcgagcucggggacguccgcgagaccaugagcuaccuguuccagcacgccaaccuggacuccugcaagcgggugcucaacgucgugugcaagaccugcggccagcagcagaccacccugaaggggguggaggccgucauguacaugggcacgcugagcuacgagcaguucaagaagggggugcagauccccugcaccugcggcaagcaggccaccaaguaccucgugcagcaggagucccccuucgucaugaugagcgcccccccggcgcaguacgagcugaagcacggcaccuucacgugcgccuccgaguacaccgggaacuaccagugcggccacuacaagcacaucaccagcaaggagacccuguacugcaucgacggggcccuccugacgaagagcuccgaguacaagggccccaucaccgacguguucuacaaggagaacagcuacaccaccacgaucaagcccgugaccuacaagcuggacggggucgugugcaccgagaucgaccccaagcucgacaacuacuacaagaaggacaacuccuacuucaccgagcagccgaucgaccuggugcccaaccagcccuaccccaacgccagcuucgacaacuucaaguucgucugcgacaacaucaaguucgccgacgaccugaaccagcucacgggcuacaagaagccggcgucccgcgagcugaaggugaccuucuuccccgaccugaacggcgacguggucgccaucgacuacaagcacuacacccccagcuucaagaagggggccaagcuccugcacaagcccaucguguggcacgugaacaacgccaccaacaaggcgacguacaagccgaacaccuggugcauccggugccugugguccaccaagcccgucgagaccagcaacuccuucgacgugcucaagagcgaggacgcccagggcauggacaaccuggccugcgaggaccugaagcccguguccgaggaggucguggagaaccccacgauccagaaggacgugcucgagugcaacgucaagaccaccgagguggugggggacaucauccugaagccggccaacaacagccugaagaucaccgaggaggucggccacacggaccucauggccgcguacguggacaacuccagccugaccaucaagaagcccaacgagcugucccgcgugcucgggcugaagacccuggccacccacggccucgccgccgucaacagcgugcccugggacacgaucgccaacuacgcgaagccguuccugaacaagguggucuccaccaccaccaacaucgugacgcgcugccugaaccgggugugcaccaacuacaugcccuacuucuucacccuccugcugcagcucugcaccuucacccgcagcacgaacucccggaucaaggccagcaugcccaccaccaucgccaagaacaccgucaagagcgugggcaaguucugccuggaggccuccuucaacuaccugaagagccccaacuucuccaagcucaucaacaucaucaucugguuccugcugcucagcgugugccuggggucccugaucuacagcacggccgcgcucggcguccugauguccaaccuggggaugccgagcuacugcaccggcuaccgcgagggcuaccucaacuccaccaacgugaccaucgccacguacugcaccgggagcauccccugcuccgugugccugagcggccuggacucccucgacaccuaccccagccuggagaccauccagaucacgaucuccagcuucaagugggaccugaccgccuucgggcucgucgccgagugguuccuggccuacauccuguucacccgguucuucuacgugcucggccuggcggccaucaugcagcuguucuucuccuacuucgccgugcacuucaucagcaacuccuggcucauguggcugaucaucaaccugguccagauggcccccaucagcgcgauggugcgcauguacaucuucuucgccagcuucuacuacguguggaaguccuacguccacgugguggacgggugcaacagcuccaccugcaugaugugcuacaagcggaaccgcgccacgcgggucgagugcaccaccaucgugaacggcguccgccggagcuucuacguguacgccaacggcgggaagggcuucugcaagcugcacaacuggaacugcgugaacugcgacaccuucugcgccggguccacguucaucagcgacgaggucgcgcgcgaccucucccugcaguucaagcggccgaucaaccccaccgaccagagcuccuacaucguggacagcgugaccgucaagaacggcuccauccaccuguacuucgacaaggccgggcagaagaccuacgagcgccacagccucucccacuucgugaaccuggacaaccugcgggccaacaacacgaagggcagccuccccaucaacgugaucgucuucgacggcaaguccaagugcgaggagagcuccgccaagagcgccuccguguacuacagccagcugaugugccagcccauccugcuccuggaccaggcgcuggugagcgacgucggggacuccgccgagguggccgugaagauguucgacgccuacgucaacaccuucagcuccaccuucaacgugccgauggagaagcucaagacccugguggccacggcggaggccgagcuggccaagaacgucagccucgacaacgugcuguccaccuucaucagcgccgcgcgccagggcuucguggacuccgacgucgagaccaaggacgugguggagugccugaagcucagccaccaguccgacaucgaggucaccggggacagcugcaacaacuacaugcugacguacaacaagguggagaacaugaccccccgggaccugggcgccugcaucgacugcuccgcccgccacaucaacgcccagguggccaagagccacaacaucgcgcucaucuggaacgucaaggacuucaugucccugagcgagcagcugcggaagcagauccgcuccgccgccaagaagaacaaccuccccuucaagcugaccugcgccaccacgcgccagguggugaacgucgugaccaccaagaucgcccugaaggggggcugaggacuaguuauaagacugacuagcccgaugggccucccaacgggcccuccuccccuccuugcaccgagauuaauaaaaaaaaaaaaaaaaaaaaaaaaaaaaaaaaaaaaaaaaaaaaaaaaaaaaaaaaaaaaaaaaugcaucccccccccccccccccccccccccccccccaaaggcucuuuucagagccaccagaauu

SEQ ID NO: 22023 - RNA, 6058 nt, Artificial Sequence
  SARS-CoV-2__MT326135.1__non-structural protein 3 (NSP3) mRNA gc
aggagaaagcuuaccauggcccccaccaaggugaccuucggcgacgacacggucaucgaggugcagggguacaagagcgugaacaucaccuucgagcuggacgagcgcaucgacaagguccucaacgagaagugcuccgccuacaccguggagcugggcaccgaggugaacgaguucgcgugcgucguggccgacgccgugaucaagacgcugcagccggucagcgagcuccugaccccccuggggaucgaccucgacgagugguccauggccaccuacuaccuguucgacgagagcggcgaguucaagcuggccucccacauguacugcagcuucuacccccccgacgaggacgaggaggagggggacugcgaggaggaggaguucgagccguccacccaguacgaguacggcacggaggacgacuaccagggcaagccccucgaguucggggcgaccagcgccgcccugcagcccgaggaggagcaggaggaggacuggcuggacgacgacucccagcagaccgugggccagcaggacgggagcgaggacaaccagaccacgaccauccagaccaucguggagguccagccccagcucgagauggagcugaccccgguggugcagacgaucgaggucaacuccuucagcggcuaccugaagcucaccgacaacguguacaucaagaacgccgacaucguggaggaggcgaagaaggucaagcccaccgugguggucaacgccgccaacguguaccugaagcacgggggcggcguggccggggcccugaacaaggcgaccaacaacgccaugcaggucgaguccgacgacuacaucgccacgaacggcccccucaagguggggggcagcugcguccuguccggccacaaccuggccaagcacugccuccacgugguggggcccaacgucaacaagggcgaggacauccagcugcugaagagcgccuacgagaacuucaaccagcacgaggugcuccuggcgccgcugcucuccgccgggaucuucggcgccgaccccauccacagccugcgggugugcgucgacaccgugcgcaccaacguguaccuggccgucuucgacaagaaccucuacgacaagcugguguccagcuuccuggagaugaagagcgagaagcagguggagcagaagaucgccgagauccccaaggaggaggucaagcccuucaucaccgaguccaagccgagcguggagcagcggaagcaggacgacaagaagaucaaggcgugcguggaggaggucacgaccacccucgaggagaccaaguuccugacggagaaccugcuccuguacaucgacaucaacgggaaccugcaccccgacuccgccacccucgugagcgacaucgacaucaccuuccugaagaaggacgcccccuacaucgugggcgacgucgugcaggagggcgugcugaccgccgucgugauccccacgaagaaggccgggggcaccaccgagaugcucgcgaaggcccugcgcaaggugccgaccgacaacuacaucacgaccuaccccgggcagggccugaacggguacaccgucgaggaggccaagaccgugcucaagaagugcaaguccgccuucuacauccugcccagcaucaucuccaacgagaagcaggagauccugggcaccgugagcuggaaccuccgggagaugcuggcgcacgccgaggagacgcgcaagcugaugcccgucugcguggagaccaaggccaucguguccaccauccagcggaaguacaagggcaucaagauccaggagggggucguggacuacggcgcccgcuucuacuucuacaccagcaagacgaccguggccucccugaucaacacccucaacgaccugaacgagacccuggucacgaugccgcucggguacgugacccacggccugaaccuggaggaggcggcccgguacaugcgcagccucaaggugcccgccaccgucuccgugagcucccccgacgccgugaccgccuacaacggguaccugacgagcuccagcaagacccccgaggagcacuucaucgagaccaucucccuggcgggcagcuacaaggacuggagcuacuccggccagagcacccagcucgggaucgaguuccugaagcggggcgacaaguccgucuacuacacgagcaacccgaccaccuuccaccuggacggggaggugaucaccuucgacaaccucaagacgcugcugucccuccgcgaggugcggaccaucaaggucuucaccaccguggacaacaucaaccugcacacgcagguggucgacaugagcaugaccuacggccagcaguucggccccaccuaccuggacggggccgacgugaccaagaucaagccccacaacucccacgagggcaagacguucuacgugcucccgaacgacgacacccugcgcgucgaggccuucgaguacuaccacaccaccgaccccagcuuccuggggcgguacauguccgcccucaaccacacgaagaaguggaaguacccccaggugaacggccugaccagcaucaagugggccgacaacaacugcuaccuggcgaccgcccuccugacccugcagcagaucgagcucaaguucaaccccccggcccugcaggacgccuacuaccgcgcgcgggccggggaggccgccaacuucugcgcccugauccucgcguacugcaacaagacggugggcgagcugggcgacguccgcgagaccauguccuaccuguuccagcacgccaaccucgacagcugcaagcgggugcugaacgucgugugcaagaccugcgggcagcagcagaccacccugaagggcguggaggccgucauguacauggggacgcucuccuacgagcaguucaagaagggcgugcagauccccugcaccugcgggaagcaggccaccaaguaccuggugcagcaggagagccccuucgucaugauguccgcccccccggcgcaguacgagcugaagcacggcaccuucacgugcgccagcgaguacaccggcaacuaccagugcgggcacuacaagcacaucaccuccaaggagacccucuacugcaucgacggcgcccugcugacgaagagcagcgaguacaaggggcccaucaccgacguguucuacaaggagaacuccuacaccaccacgaucaagcccgugaccuacaagcucgacggcgucgugugcaccgagaucgaccccaagcuggacaacuacuacaagaaggacaacagcuacuucaccgagcagccgaucgaccuggugcccaaccagcccuaccccaacgccuccuucgacaacuucaaguucgucugcgacaacaucaaguucgccgacgaccucaaccagcugacgggguacaagaagccggcgagccgcgagcugaaggugaccuucuuccccgaccucaacggcgacguggucgccaucgacuacaagcacuacacccccuccuucaagaagggcgccaagcugcugcacaagcccaucguguggcacgugaacaacgccaccaacaaggcgacguacaagccgaacaccuggugcauccggugccucuggagcaccaagcccgucgagaccuccaacagcuucgacgcccugaaguccgaggacgcccaggggauggacaaccuggccugcgaggaccucaagcccgugagcgaggagguggucgagaaccccacgauccagaaggacgugcuggagugcaacgugaagaccaccgaggucgugggcgacaucauccugaagccggccaacaacucccucaagaucaccgaggagguggggcacacggaccugauggcggccuacgucgacaacagcucccugaccaucaagaagcccaacgagcucagccgcgugcugggccugaagacccucgccacccacgggcuggccgccgugaacuccguccccugggacacgaucgcgaacuacgccaagccguuccugaacaagguggugagcaccaccaccaacaucgucacgcgcugccucaaccgggugugcaccaacuacaugcccuacuucuucacccugcugcuccagcugugcaccuucacccgcuccacgaacagccggaucaaggccuccaugcccaccaccaucgccaagaacaccgugaagagcgucggcaaguucugccuggaggccagcuucaacuaccucaagucccccaacuucagcaagcugaucaacaucaucaucugguuccugcuccuguccgugugccugggcagccucaucuacuccacggcggcccugggggugcugaugagcaaccucggcaugccguccuacugcaccggguaccgcgagggcuaccugaacagcaccaacgucaccaucgccacguacugcaccggcuccauccccugcagcgugugccuguccgggcucgacagccuggacaccuaccccucccuggagaccauccagaucacgaucagcuccuucaagugggaccucaccgccuucggccugguggccgagugguuccuggcguacauccucuucacccgguucuucuacguccuggggcuggccgccaucaugcagcucuucuucagcuacuucgccgugcacuucaucuccaacagcuggcugauguggcugaucaucaaccuggugcagauggcgcccaucuccgccaugguccgcauguacaucuucuucgccagcuucuacuacguguggaagagcuacgugcacgucguggacggcugcaacuccagcaccugcaugaugugcuacaagcggaaccgcgccacgcggguggagugcaccaccaucgucaacggggugcgccgguccuucuacgucuacgccaacggcggcaagggguucugcaagcuccacaacuggaacugcgugaacugcgacaccuucugcgcgggcagcacguucaucuccgacgagguggcccgcgaccugagccugcaguucaagcggccgaucaaccccaccgaccaguccagcuacaucgucgacuccgugaccgugaagaacgggagcauccaccucuacuucgacaaggccggccagaagaccuacgagcgccacucccugagccacuucgucaaccuggacaaccuccgggccaacaacacgaaggggucccugcccaucaacgugaucguguucgacggcaagagcaagugcgaggaguccagcgccaaguccgcgagcgucuacuacucccagcugaugugccagcccauccuccugcuggaccaggcccucgugagcgacgugggcgacagcgccgaggucgccgugaagauguucgacgccuacgugaacaccuucuccagcaccuucaacgucccgauggagaagcugaagacccugguggcgacggccgaggccgagcucgccaagaacgugucccuggacaacguccugagcaccuucaucuccgcggcccgccagggguucguggacagcgacguggagaccaaggacgucguggagugccucaagcugucccaccagagcgacaucgaggugaccggcgacuccugcaacaacuacaugcugacguacaacaaggucgagaacaugaccccccgggaccucggggccugcaucgacugcagcgcccgccacaucaacgcccagguggcgaagucccacaacaucgcccugaucuggaacgugaaggacuucaugagccuguccgagcagcuccggaagcagauccgcagcgccgccaagaagaacaaccugcccuucaagcugaccugcgccaccacgcgccaggucgugaacguggucaccaccaagaucgcgcucaagggcgggugaggacuaguuauaagacugacuagcccgaugggccucccaacgggcccuccuccccuccuugcaccgagauuaauaaaaaaaaaaaaaaaaaaaaaaaaaaaaaaaaaaaaaaaaaaaaaaaaaaaaaaaaaaaaaaaaugcaucccccccccccccccccccccccccccccccaaaggcucuuuucagagccaccagaauu

SEQ ID NO: 22024 - RNA, 6058 nt, Artificial Sequence
  SARS-CoV-2__MT326160.1__non-structural protein 3 (NSP3) mRNA gc
aggagaaagcuuaccauggcccccaccaaggugaccuucggcgacgacacggucaucgaggugcagggguacaagagcgugaacaucaccuucgagcuggacgagcgcaucgacaagguccucaacgagaagugcuccgccuacaccguggagcugggcaccgaggugaacgaguucgcgugcgucguggccgacgccgugaucaagacgcugcagccggucagcgagcuccugaccccccuggggaucgaccucgacgagugguccauggccaccuacuaccuguucgacgagagcggcgaguucaagcuggccucccacauguacugcagcuucuacccccccgacgaggacgaggaggagggggacugcgaggaggaggaguucgagccguccacccaguacgaguacggcacggaggacgacuaccagggcaagccccucgaguucggggcgaccagcgccgcccugcagcccgaggaggagcaggaggaggacuggcuggacgacgacucccagcagaccgugggccagcaggacgggagcgaggacaaccagaccacgaccauccagaccaucguggagguccagccccagcucgagauggagcugaccccgguggugcagacgaucgaggucaacuccuucagcggcuaccugaagcucaccgacaacguguacaucaagaacgccgacaucguggaggaggcgaagaaggucaagcccaccgugguggucaacgccgccaacguguaccugaagcacgggggcggcguggccggggcccugaacaaggcgaccaacaacgccaugcaggucgaguccgacgacuacaucgccacgaacggcccccucaagguggggggcagcugcguccuguccggccacaaccuggccaagcacugccuccacgugguggggcccaacgucaacaagggcgaggacauccagcugcugaagagcgccuacgagaacuucaaccagcacgaggugcuccuggcgccgcugcucuccgccgggaucuucggcgccgaccccauccacagccugcgggugugcgucgacaccgugcgcaccaacguguaccuggccgucuucgacaagaaccucuacgacaagcugguguccagcuuccuggagaugaagagcgagaagcagguggagcagaagaucgccgagauccccaaggaggaggucaagcccuucaucaccgaguccaagccgagcguggagcagcggaagcaggacgacaagaagaucaaggcgugcguggaggaggucacgaccacccucgaggagaccaaguuccugacggagaaccugcuccuguacaucgacaucaacgggaaccugcaccccgacuccgccacccucgugagcgacaucgacaucaccuuccugaagaaggacgcccccuacaucgugggcgacgucgugcaggagggcgugcugaccgccgucgugauccccacgaagaaggccgggggcaccaccgagaugcucgcgaaggcccugcgcaaggugccgaccgacaacuacaucacgaccuaccccgggcagggccugaacggguacaccgucgaggaggccaagaccgugcucaagaagugcaaguccgccuucuacauccugcccagcaucaucuccaacgagaagcaggagauccugggcaccgugagcuggaaccuccgggagaugcuggcgcacgccgaggagacgcgcaagcugaugcccgucugcguggagaccaaggccaucguguccaccauccagcggaaguacaagggcaucaagauccaggagggggucguggacuacggcgcccgcuucuacuucuacaccagcaagacgaccguggccucccugaucaacacccucaacgaccugaacgagacccuggucacgaugccgcucggguacgugacccacggccugaaccuggaggaggcggcccgguacaugcgcagccucaaggugcccgccaccgucuccgugagcucccccgacgccgugaccgccuacaacggguaccugacgagcuccagcaagacccccgaggagcacuucaucgagaccaucucccuggcgggcagcuacaaggacuggagcuacuccggccagagcacccagcucgggaucgaguuccugaagcggggcgacaaguccgucuacuacacgagcaacccgaccaccuuccaccuggacggggaggugaucaccuucgacaaccucaagacgcugcugucccuccgcgaggugcggaccaucaaggucuucaccaccguggacaacaucaaccugcacacgcagguggucgacaugagcaugaccuacggccagcaguucggccccaccuaccuggacggggccgacgugaccaagaucaagccccacaacucccacgagggcaagacguucuacgugcucccgaacgacgacacccugcgcgucgaggccuucgaguacuaccacaccaccgaccccagcuuccuggggcgguacauguccgcccucaaccacacgaagaaguggaaguacccccaggugaacggccugaccagcaucaagugggccgacaacaacugcuaccuggcgaccgcccuccugacccugcagcagaucgagcucaaguucaaccccccggcccugcaggacgccuacuaccgcgcgcgggccggggaggccgccaacuucugcgcccugauccucgcguacugcaacaagacggugggcgagcugggcgacguccgcgagaccauguccuaccuguuccagcacgccaaccucgacagcugcaagcgggugcugaacgucgugugcaagaccugcgggcagcagcagaccacccugaagggcguggaggccgucauguacauggggacgcucuccuacgagcaguucaagaagggcgugcagauccccugcaccugcgggaagcaggccaccaaguaccuggugcagcaggagagccccuucgucaugauguccgcccccccggcgcaguacgagcugaagcacggcaccuucacgugcgccagcgaguacaccggcaacuaccagugcgggcacuacaagcacaucaccuccaaggagacccucuacugcaucgacggcgcccugcugacgaagagcagcgaguacaaggggcccaucaccgacguguucuacaaggagaacuccuacaccaccacgaucaagcccgugaccuacaagcucgacggcgucgugugcaccgagaucgaccccaagcuggacaacuacuacaagaaggacaacagcuacuucaccgagcagccgaucgaccuggugcccaaccagcccuaccccaacgccuccuucgacaacuucaaguucgucugcgacaacaucaaguucgccgacgaccucaaccagcugacgggguacaagaagccggcgagccgcgagcugaaggugaccuucuuccccgaccucaacggcgacguggucgccaucgacuacaagcacuacacccccuccuucaagaagggcgccaagcugcugcacaagcccaucguguggcacgugaacaacgccaccaacaaggcgacguacaagccgaacaccuggugcauccggugccucuggagcaccaagcccgucgagaccuccaacagcuucgacgugcugaaguccgaggacgcccaggggauggacaaccuggccugcgaggaccucaagcccgugagcgaggaggucguggagaaccccacgauccagaaggacgugcuggagugcaacgucaagaccaccgagguggugggcgacaucauccugaagccggccaacaacucccucaagaucaccgaggaggucgggcacacggaccugauggccgcguacguggacaacagcucccugaccaucaagaagcccaacgagcucagccgcgugcugggccugaagacccucgccacccacgggcuggccgccaucaacuccguccccugggacacgaucgccaacuacgcgaagccguuccugaacaagguggugagcaccaccaccaacaucgucacgcgcugccucaaccgggugugcaccaacuacaugcccuacuucuucacccugcugcuccagcugugcaccuucacccgcuccacgaacagccggaucaaggccuccaugcccaccaccaucgccaagaacaccgugaagagcgucggcaaguucugccuggaggccagcuucaacuaccucaagucccccaacuucagcaagcugaucaacaucaucaucugguuccugcuccuguccgugugccugggcagccucaucuacuccacggccgcgcugggggugcugaugagcaaccucggcaugccguccuacugcaccggguaccgcgagggcuaccugaacagcaccaacgucaccaucgccacguacugcaccggcuccauccccugcagcgugugccuguccgggcucgacagccuggacaccuaccccucccuggagaccauccagaucacgaucagcuccuucaagugggaccucaccgccuucggccugguggccgagugguuccuggccuacauccucuucacccgguucuucuacguccuggggcuggcggccaucaugcagcucuucuucagcuacuucgccgugcacuucaucuccaacagcuggcugauguggcugaucaucaaccuggugcagauggcccccaucuccgcgaugguccgcauguacaucuucuucgccagcuucuacuacguguggaagagcuacgugcacgucguggacggcugcaacuccagcaccugcaugaugugcuacaagcggaaccgcgccacgcggguggagugcaccaccaucgucaacggggugcgccgguccuucuacgucuacgccaacggcggcaagggguucugcaagcuccacaacuggaacugcgugaacugcgacaccuucugcgccggcagcacguucaucuccgacgagguggcgcgcgaccugagccugcaguucaagcggccgaucaaccccaccgaccaguccagcuacaucgucgacuccgugaccgugaagaacgggagcauccaccucuacuucgacaaggccggccagaagaccuacgagcgccacucccugagccacuucgucaaccuggacaaccuccgggccaacaacacgaaggggucccugcccaucaacgugaucguguucgacggcaagagcaagugcgaggaguccagcgccaaguccgccagcgucuacuacucccagcugaugugccagcccauccuccugcuggaccaggcgcucgugagcgacgugggcgacagcgccgaggucgccgugaagauguucgacgccuacgugaacaccuucuccagcaccuucaacgucccgauggagaagcugaagacccugguggccacggcggaggccgagcucgccaagaacgugucccuggacaacguccugagcaccuucaucuccgccgcgcgccagggguucguggacagcgacguggagaccaaggacgucguggagugccucaagcugucccaccagagcgacaucgaggugaccggcgacuccugcaacaacuacaugcugacguacaacaaggucgagaacaugaccccccgggaccucggggccugcaucgacugcagcgcccgccacaucaacgcccagguggccaagucccacaacaucgcgcugaucuggaacgugaaggacuucaugagccuguccgagcagcuccggaagcagauccgcagcgccgccaagaagaacaaccugcccuucaagcugaccugcgccaccacgcgccaggucgugaacguggucaccaccaagaucgcccucaagggcgggugaggacuaguuauaagacugacuagcccgaugggccucccaacgggcccuccuccccuccuugcaccgagauuaauaaaaaaaaaaaaaaaaaaaaaaaaaaaaaaaaaaaaaaaaaaaaaaaaaaaaaaaaaaaaaaaaugcaucccccccccccccccccccccccccccccccaaaggcucuuuucagagccaccagaauu

SEQ ID NO: 22025 - RNA, 6058 nt, Artificial Sequence
  SARS-CoV-2__MT325594.1__non-structural protein 3 (NSP3) mRNA gc
aggagaaagcuuaccauggcccccaccaaggugaccuucggcgacgacacggucaucgaggugcagggguacaagagcgugaacaucaccuucgagcuggacgagcgcaucgacaagguccucaacgagaagugcuccgccuacaccguggagcugggcaccgaggugaacgaguucgcgugcgucguggccgacgccgugaucaagacgcugcagccggucagcgagcuccugaccccccuggggaucgaccucgacgagugguccauggccaccuacuaccuguucgacgagagcggcgaguucaagcuggccucccacauguacugcagcuucuacccccccgacgaggacgaggaggagggggacugcgaggaggaggaguucgagccguccacccaguacgaguacggcacggaggacgacuaccagggcaagccccucgaguucggggcgaccagcgccgcccugcagcccgaggaggagcaggaggaggacuggcuggacgacgacucccagcagaccgugggccagcaggacgggagcgaggacaaccagaccacgaccauccagaccaucguggagguccagccccagcucgagauggagcugaccccgguggugcagacgaucgaggucaacuccuucagcggcuaccugaagcucaccgacaacguguacaucaagaacgccgacaucguggaggaggcgaagaaggucaagcccaccgugguggucaacgccgccaacguguaccugaagcacgggggcggcguggccggggcccugaacaaggcgaccaacaacgccaugcaggucgaguccgacgacuacaucgccacgaacggcccccucaagguggggggcagcugcguccuguccggccacaaccuggccaagcacugccuccacgugguggggcccaacgucaacaagggcgaggacauccagcugcugaagagcgccuacgagaacuucaaccagcacgaggugcuccuggcgccgcugcucuccgccgggaucuucggcgccgaccccauccacagccugcgggugugcgucgacaccgugcgcaccaacguguaccuggccgucuucgacaagaaccucuacgacaagcugguguccagcuuccuggagaugaagagcgagaagcagguggagcagaagaucgccgagauccccaaggaggaggucaagcccuucaucaccgaguccaagccgagcguggagcagcggaagcaggacgacaagaagaucaaggcgugcguggaggaggucacgaccacccucgaggagaccaaguuccugacggagaaccugcuccuguacaucgacaucaacgggaaccugcaccccgacuccgccacccucgugagcgacaucgacaucaccuuccugaagaaggacgcccccuacaucgugggcgacgucgugcaggagggcgugcugaccgccgucgugauccccacgaagaaggccgggggcaccaccgagaugcucgcgaaggcccugcgcaaggugccgaccgacaacuacaucacgaccuaccccgggcagggccugaacggguacaccgucgaggaggccaagaccgugcucaagaagugcaaguccgccuucuacauccugcccagcaucaucuccaacgagaagcaggagauccugggcaccgugagcuggaaccuccgggagaugcuggcgcacgccgaggagacgcgcaagcugaugcccgucugcguggagaccaaggccaucguguccaccauccagcggaaguacaagggcaucaagauccaggagggggucguggacuacggcgcccgcuucuacuucuacaccagcaagacgaccguggccucccugaucaacacccucaacgaccugaacgagacccuggucacgaugccgcucggguacgugacccacggccugaaccuggaggaggcggcccgguacaugcgcagccucaaggugcccgccaccgucuccgugagcucccccgacgccgugaccgccuacaacggguaccugacgagcuccagcaagacccccgaggagcacuucaucgagaccaucucccuggcgggcagcuacaaggacuggagcuacuccggccagagcacccagcucgggaucgaguuccugaagcggggcgacaaguccgucuacuacacgagcaacccgaccaccuuccaccuggacggggaggugaucaccuucgacaaccucaagacgcugcugucccuccgcgaggugcggaccaucaaggucuucaccaccguggacaacaucaaccugcacaugcagguggucgacaugagcaugacguacggccagcaguucggccccaccuaccuggacggggccgacgugaccaagaucaagccccacaacucccacgagggcaagaccuucuacgugcucccgaacgacgacacgcugcgcgucgaggccuucgaguacuaccacaccaccgaccccagcuuccuggggcgguacauguccgcccucaaccacaccaagaaguggaaguacccccaggugaacggccugacgagcaucaagugggccgacaacaacugcuaccuggcgaccgcccuccugacccugcagcagaucgagcucaaguucaaccccccggcccugcaggacgccuacuaccgcgcgcgggccggggaggccgccaacuucugcgcccugauccucgcguacugcaacaagaccgugggcgagcugggcgacguccgcgagacgauguccuaccuguuccagcacgccaaccucgacagcugcaagcgggugcugaacgucgugugcaagaccugcgggcagcagcagaccacccugaagggcguggaggccgucauguacauggggacccucuccuacgagcaguucaagaagggcgugcagauccccugcacgugcgggaagcaggccaccaaguaccuggugcagcaggagagccccuucgucaugauguccgcccccccggcgcaguacgagcugaagcacggcaccuucaccugcgccagcgaguacacgggcaacuaccagugcgggcacuacaagcacaucaccuccaaggagacccucuacugcaucgacggcgcccugcugaccaagagcagcgaguacaaggggcccaucacggacguguucuacaaggagaacuccuacaccaccaccaucaagcccgugacguacaagcucgacggcgucgugugcaccgagaucgaccccaagcuggacaacuacuacaagaaggacaacagcuacuucaccgagcagccgaucgaccuggugcccaaccagcccuaccccaacgccuccuucgacaacuucaaguucgucugcgacaacaucaaguucgccgacgaccucaaccagcugaccggguacaagaagccggcgagccgcgagcugaaggugacguucuuccccgaccucaacggcgacguggucgccaucgacuacaagcacuacacccccuccuucaagaagggcgccaagcugcugcacaagcccaucguguggcacgugaacaacgccaccaacaaggcgaccuacaagccgaacacguggugcauccggugccucuggagcaccaagcccgucgagaccuccaacagcuucgacgugcugaaguccgaggacgcccaggggauggacaaccuggccugcgaggaccucaagcccgugagcgaggaggucguggagaaccccaccauccagaaggacgugcuggagugcaacgucaagacgaccgagguggugggcgacaucauccugaagccggccaacaacucccucaagaucaccgaggaggucgggcacaccgaccugauggccgcguacguggacaacagcucccugacgaucaagaagcccaacgagcucagccgcgugcugggccugaagacccucgccacccacgggcuggccgccgucaacuccgugcccugggacaccaucgccaacuacgcgaagccguuccugaacaagguggucagcacgaccaccaacaucgugacccgcugccucaaccgggugugcacgaacuacaugcccuacuucuucacccugcugcuccagcugugcaccuucacccgcuccaccaacagccggaucaaggccuccaugcccacgaccaucgccaagaacaccgucaagagcgugggcaaguucugccuggaggccagcuucaacuaccucaagucccccaacuucagcaagcugaucaacaucaucaucugguuccugcuccuguccgugugccugggcagccucaucuacuccaccgccgcgcuggggguccugaugagcaaccucggcaugccguccuacugcacgggguaccgcgagggcuaccugaacagcaccaacgugaccaucgccaccuacugcacgggcuccauccccugcagcgugugccuguccgggcucgacagccuggacaccuaccccucccuggagaccauccagaucaccaucagcuccuucaagugggaccucacggccuucggccuggucgccgagugguuccuggccuacauccucuucacccgguucuucuacgugcuggggcuggcggccaucaugcagcucuucuucagcuacuucgccgugcacuucaucuccaacagcuggcugauguggcugaucaucaaccugguccagauggcccccaucuccgcgauggugcgcauguacaucuucuucgccagcuucuacuacguguggaagagcuacguccacgugguggacggcugcaacuccagcaccugcaugaugugcuacaagcggaaccgcgccacccgggucgagugcacgaccaucgugaacgggguccgccgguccuucuacguguacgccaacggcggcaagggguucugcaagcuccacaacuggaacugcgugaacugcgacaccuucugcgccggcagcaccuucaucuccgacgaggucgcgcgcgaccugagccugcaguucaagcggccgaucaaccccacggaccaguccagcuacaucguggacuccgugaccgucaagaacgggagcauccaccucuacuucgacaaggccggccagaagaccuacgagcgccacucccugagccacuucgugaaccuggacaaccuccgggccaacaacaccaaggggucccugcccaucaacgugaucgucuucgacggcaagagcaagugcgaggaguccagcgccaaguccgccagcguguacuacucccagcugaugugccagcccauccuccugcuggaccaggcgcucgugagcgacgucggcgacagcgccgagguggccgugaagauguucgacgccuacgucaacacguucuccagcaccuucaacgugccgauggagaagcugaagacccugguggccaccgcggaggccgagcucgccaagaacgucucccuggacaacgugcugagcacguucaucuccgccgcgcgccagggguucguggacagcgacgucgagaccaaggacgugguggagugccucaagcugucccaccagagcgacaucgaggucaccggcgacuccugcaacaacuacaugcugaccuacaacaagguggagaacaugacgccccgggaccucggggccugcaucgacugcagcgcccgccacaucaacgcccagguggccaagucccacaacaucgcgcugaucuggaacgucaaggacuucaugagccuguccgagcagcuccggaagcagauccgcagcgccgccaagaagaacaaccugcccuucaagcugaccugcgccaccacccgccagguggugaacgucgugacgaccaagaucgcccucaagggcgggugaggacuaguuauaagacugacuagcccgaugggccucccaacgggcccuccuccccuccuugcaccgagauuaauaaaaaaaaaaaaaaaaaaaaaaaaaaaaaaaaaaaaaaaaaaaaaaaaaaaaaaaaaaaaaaaaugcaucccccccccccccccccccccccccccccccaaaggcucuuuucagagccaccagaauu

SEQ ID NO: 22026 - RNA, 6058 nt, Artificial Sequence
  SARS-CoV-2__MT293211.1__non-structural protein 3 (NSP3) mRNA gc
aggagaaagcuuaccauggcccccaccaaggugaccuucggcgacgacacggucaucgaggugcagggguacaagagcgugaacaucaccuucgagcuggacgagcgcaucgacaagguccucaacgagaagugcuccgccuacaccguggagcugggcaccgaggugaacgaguucgcgugcgucguggccgacgccgugaucaagacgcugcagccggucagcgagcuccugaccccccuggggaucgaccucgacgagugguccauggccaccuacuaccuguucgacgagagcggcgaguucaagcuggccucccacauguacugcagcuucuacccccccgacgaggacgaggaggagggggacugcgaggaggaggaguucgagccguccacccaguacgaguacggcacggaggacgacuaccagggcaagccccucgaguucggggcgaccagcgccgcccugcagcccgaggaggagcaggaggaggacuggcuggacgacgacucccagcagaccgugggccagcaggacgggagcgaggacaaccagaccacgaccauccagaccaucguggagguccagccccagcucgagauggagcugaccccgguggugcagacgaucgaggucaacuccuucagcggcuaccugaagcucaccgacaacguguacaucaagaacgccgacaucguggaggaggcgaagaaggucaagcccaccgugguggucaacgccgccaacguguaccugaagcacgggggcggcguggccggggcccugaacaaggcgaccaacaacgccaugcaggucgaguccgacgacuacaucgccacgaacggcccccucaagguggggggcagcugcguccuguccggccacaaccuggccaagcacugccuccacgugguggggcccaacgucaacaagggcgaggacauccagcugcugaagagcgccuacgagaacuucaaccagcacgaggugcuccuggcgccgcugcucuccgccgggaucuucggcgccgaccccauccacagccugcgggugugcgucgacaccgugcgcaccaacguguaccuggccgucuucgacaagaaccucuacgacaagcugguguccagcuuccuggagaugaagagcgagaagcagguggagcagaagaucgccgagauccccaaggaggaggucaagcccuucaucaccgaguccaagccgagcguggagcagcggaagcaggacgacaagaagaucaaggcgugcguggaggaggucacgaccacccucgaggagaccaaguuccugacggagaaccugcuccuguacaucgacaucaacgggaaccugcaccccgacuccgccacccucgugagcgacaucgacaucaccuuccugaagaaggacgcccccuacaucgugggcgacgucgugcaggagggcgugcugaccgccgucgugauccccacgaagaaggccgggggcaccaccgagaugcucgcgaaggcccugcgcaaggugccgaccgacaacuacaucacgaccuaccccgggcagggccugaacggguacaccgucgaggaggccaagaccgugcucaagaagugcaaguccgccuucuacauccugcccagcaucaucuccaacgagaagcaggagauccugggcaccgugagcuggaaccuccgggagaugcuggcgcacgccgaggagacgcgcaagcugaugcccgucugcguggagaccaaggccaucguguccaccauccagcggaaguacaagggcaucaagauccaggagggggucguggacuacggcgcccgcuucuacuucuacaccagcaagacgaccguggccucccugaucaacacccucaacgaccugaacgagacccuggucacgaugccgcucggguacgugacccacggccugaaccuggaggaggcggcccgguacaugcgcagccucaaggugcccgccaccgucuccgugagcucccccgacgccgugaccgccuacaacggguaccugacgagcuccagcaagacccccgaggagcacuucaucgagaccaucucccuggcgggcagcuacaaggacuggagcuacuccggccagagcacccagcucgggaucgaguuccugaagcggggcgacaaguccgucuacuacacgagcaacccgaccaccuuccaccuggacggggaggugaucaccuucgacaaccucaagacgcugcugucccuccgcgaggugcggaccaucaaggucuucaccaccguggacaacaucaaccugcacacgcagguggucgacaugagcaugaccuacggccagcaguucggccccaccuaccuggacggggccgacgugaccaagaucaagccccacaacucccacgagggcaagacguucuacgugcucccgaacgacgacacccugcgcgucgaggccuucgaguacuaccacaccaccgaccccagcuuccuggggcgguacauguccgcccucaaccacacgaagaaguggaaguacccccaggugaacggccugaccagcaucaagugggccgacaacaacugcuaccuggcgaccgcccuccugacccugcagcagaucgagcucaaguucaaccccccggcccugcaggacgccuacuaccgcgcgcgggccggggaggccgccaacuucugcgcccugauccucgcguacugcaacaagacggugggcgagcugggcgacguccgcgagaccauguccuaccuguuccagcacgccaaccucgacagcugcaagcgggugcugaacgucgugugcaagaccugcgggcagcagcagaccacccugaagggcguggaggccgucauguacauggggacgcucuccuacgagcaguucaagaagggcgugcagauccccugcaccugcgggaagcaggccaccaaguaccuggugcagcaggagagccccuucgucaugauguccgcccccccggcgcaguacgagcugaagcacggcaccuucacgugcgccagcgaguacaccggcaacuaccagugcgggcacuacaagcacaucaucuccaaggagacccucuacugcaucgacggcgcccugcugaccaagagcagcgaguacaaggggcccaucacggacguguucuacaaggagaacuccuacaccaccaccaucaagcccgugacguacaagcucgacggcgucgugugcaccgagaucgaccccaagcuggacaacuacuacaagaaggacaacagcuacuucaccgagcagccgaucgaccuggugcccaaccagcccuaccccaacgccuccuucgacaacuucaaguucgucugcgacaacaucaaguucgccgacgaccucaaccagcugaccggguacaagaagccggcgagccgcgagcugaaggugacguucuuccccgaccucaacggcgacguggucgccaucgacuacaagcacuacacccccuccuucaagaagggcgccaagcugcugcacaagcccaucguguggcacgugaacaacgccaccaacaaggcgaccuacaagccgaacacguggugcauccggugccucuggagcaccaagcccgucgagaccuccaacagcuucgacgugcugaaguccgaggacgcccaggggauggacaaccuggccugcgaggaccucaagcccgugagcgaggaggucguggagaaccccaccauccagaaggacgugcuggagugcaacgucaagacgaccgagguggugggcgacaucauccugaagccggccaacaacucccucaagaucaccgaggaggucgggcacaccgaccugauggccgcguacguggacaacagcucccugacgaucaagaagcccaacgagcucagccgcgugcugggccugaagacccucgccacccacgggcuggccgccgucaacuccgugcccugggacaccaucgccaacuacgcgaagccguuccugaacaagguggucagcacgaucaccaacaucgugacccgcugccucaaccgggugugcaccaacuacaugcccuacuucuucacgcugcugcuccagcugugcaccuucacccgcuccaccaacagccggaucaaggccuccaugcccaccacgaucgccaagaacaccgucaagagcgugggcaaguucugccuggaggccagcuucaacuaccucaagucccccaacuucagcaagcugaucaacaucaucaucugguuccugcuccuguccgugugccugggcagccucaucuacuccaccgccgcgcuggggguccugaugagcaaccucggcaugccguccuacugcaccggguaccgcgagggcuaccugaacagcacgaacgugaccaucgccaccuacugcaccggcuccauccccugcagcgugugccuguccgggcucgacagccuggacacguaccccucccuggagaccauccagaucaccaucagcuccuucaagugggaccucaccgccuucggccuggucgccgagugguuccuggccuacauccucuucacgcgguucuucuacgugcuggggcuggcggccaucaugcagcucuucuucagcuacuucgccgugcacuucaucuccaacagcuggcugauguggcugaucaucaaccugguccagauggcccccaucuccgcgauggugcgcauguacaucuucuucgccagcuucuacuacguguggaagagcuacguccacgugguggacggcugcaacuccagcaccugcaugaugugcuacaagcggaaccgcgccacccgggucgagugcaccacgaucgugaacgggguccgccgguccuucuacguguacgccaacggcggcaagggguucugcaagcuccacaacuggaacugcgugaacugcgacaccuucugcgccggcagcaccuucaucuccgacgaggucgcgcgcgaccugagccugcaguucaagcggccgaucaaccccaccgaccaguccagcuacaucguggacuccgugacggucaagaacgggagcauccaccucuacuucgacaaggccggccagaagaccuacgagcgccacucccugagccacuucgugaaccuggacaaccuccgggccaacaacaccaaggggucccugcccaucaacgugaucgucuucgacggcaagagcaagugcgaggaguccagcgccaaguccgccagcguguacuacucccagcugaugugccagcccauccuccugcuggaccaggcgcucgugagcgacgucggcgacagcgccgagguggccgugaagauguucgacgccuacgucaacaccuucuccagcacguucaacgugccgauggagaagcugaagacccugguggccaccgcggaggccgagcucgccaagaacgucucccuggacaacgugcugagcaccuucaucuccgccgcgcgccagggguucguggacagcgacgucgagacgaaggacgugguggagugccucaagcugucccaccagagcgacaucgaggucaccggcgacuccugcaacaacuacaugcugaccuacaacaagguggagaacaugaccccccgggaccucggggccugcaucgacugcagcgcccgccacaucaacgcccagguggccaagucccacaacaucgcgcugaucuggaacgucaaggacuucaugagccuguccgagcagcuccggaagcagauccgcagcgccgccaagaagaacaaccugcccuucaagcugacgugcgccaccacccgccagguggugaacgucgugaccacgaagaucgcccucaagggcgggugaggacuaguuauaagacugacuagcccgaugggccucccaacgggcccuccuccccuccuugcaccgagauuaauaaaaaaaaaaaaaaaaaaaaaaaaaaaaaaaaaaaaaaaaaaaaaaaaaaaaaaaaaaaaaaaaugcaucccccccccccccccccccccccccccccccaaaggcucuuuucagagccaccagaauu

SEQ ID NO: 22027 - RNA, 6058 nt, Artificial Sequence
  SARS-CoV-2__MT291826.1__non-structural protein 3 (NSP3) mRNA gc
aggagaaagcuuaccauggcccccaccaaggugaccuucggcgacgacacggucaucgaggugcagggguacaagagcgugaacaucaccuucgagcuggacgagcgcaucgacaagguccucaacgagaagugcuccgccuacaccguggagcugggcaccgaggugaacgaguucgcgugcgucguggccgacgccgugaucaagacgcugcagccggucagcgagcuccugaccccccuggggaucgaccucgacgagugguccauggccaccuacuaccuguucgacgagagcggcgaguucaagcuggccucccacauguacugcagcuucuacccccccgacgaggacgaggaggagggggacugcgaggaggaggaguucgagccguccacccaguacgaguacggcacggaggacgacuaccagggcaagccccucgaguucggggcgaccagcgccgcccugcagcccgaggaggagcaggaggaggacuggcuggacgacgacucccagcagaccgugggccagcaggacgggagcgaggacaaccagaccacgaccauccagaccaucguggagguccagccccagcucgagauggagcugaccccgguggugcagacgaucgaggucaacuccuucagcggcuaccugaagcucaccgacaacguguacaucaagaacgccgacaucguggaggaggcgaagaaggucaagcccaccgugguggucaacgccgccaacguguaccugaagcacgggggcggcguggccggggcccugaacaaggcgaccaacaacgccaugcaggucgaguccgacgacuacaucgccacgaacggcccccucaagguggggggcagcugcguccuguccggccacaaccuggccaagcacugccuccacgugguggggcccaacgucaacaagggcgaggacauccagcugcugaagagcgccuacgagaacuucaaccagcacgaggugcuccuggcgccgcugcucuccgccgggaucuucggcgccgaccccauccacagccugcgggugugcgucgacaccgugcgcaccaacguguaccuggccgucuucgacaagaaccucuacgacaagcugguguccagcuuccuggagaugaagagcgagaagcagguggagcagaagaucgccgagauccccaaggaggaggucaagcccuucaucaccgaguccaagccgagcguggagcagcggaagcaggacgacaagaagaucaaggcgugcguggaggaggucacgaccacccucgaggagaccaaguuccugacggagaaccugcuccuguacaucgacaucaacgggaaccugcaccccgacuccgccacccucgugagcgacaucgacaucaccuuccugaagaaggacgcccccuacaucgugggcgacgucgugcaggagggcgugcugaccgccgucgugauccccacgaagaaggccgggggcaccaccgagaugcucgcgaaggcccugcgcaaggugccgaccgacaacuacaucacgaccuaccccgggcagggccugaacggguacaccgucgaggaggccaagaccgugcucaagaagugcaaguccgccuucuacauccugcccagcaucaucuccaacgagaagcaggagauccugggcaccgugagcuggaaccuccgggagaugcuggcgcacgccgaggagacgcgcaagcugaugcccgucugcguggagaccaaggccaucguguccaccauccagcggaaguacaagggcaucaagauccaggagggggucguggacuacggcgcccgcuucuacuucuacaccagcaagacgaccguggccucccugaucaacacccucaacgaccugaacgagacccuggucacgaugccgcucggguacgugacccacggccugaaccuggaggaggcggcccgguacaugcgcagccucaaggugcccgccaccgucuccgugagcucccccgacgccgugaccgccuacaacggguaccugacgagcuccagcaagacccccgaggagcacuucaucgagaccaucucccuggcgggcagcuacaaggacuggagcuacuccggccagagcacccagcucgggaucgaguuccugaagcggggcgacaaguccgucuacuacacgagcaacccgaccaccuuccaccuggacggggaggugaucaccuucgacaaccucaagacgcugcugccccuccgcgaggugcggaccaucaaggucuucaccaccguggacaacaucaaccugcacacgcagguggucgacauguccaugaccuacggccagcaguucggccccaccuaccuggacggggccgacgugaccaagaucaagccgcacaacagccacgagggcaagacguucuacgugcuccccaacgacgacacccugcgcgucgaggccuucgaguacuaccacaccaccgaccccuccuuccuggggcgguacaugagcgcccucaaccacacgaagaaguggaaguacccccaggugaacggccugaccuccaucaagugggccgacaacaacugcuaccuggcgaccgcccuccugacccugcagcagaucgagcucaaguucaacccgcccgcccugcaggacgccuacuaccgcgcgcgggccggggaggccgccaacuucugcgcccugauccucgcguacugcaacaagacggugggcgagcugggcgacguccgcgagaccaugagcuaccuguuccagcacgccaaccucgacuccugcaagcgggugcugaacgucgugugcaagaccugcgggcagcagcagaccacccugaagggcguggaggccgucauguacauggggacgcucagcuacgagcaguucaagaagggcgugcagauccccugcaccugcgggaagcaggccaccaaguaccuggugcagcaggagucccccuucgucaugaugagcgccccgcccgcgcaguacgagcugaagcacggcaccuucacgugcgccuccgaguacaccggcaacuaccagugcgggcacuacaagcacaucaccagcaaggagacccucuacugcaucgacggcgcccugcugacgaaguccagcgaguacaaggggcccaucaccgacguguucuacaaggagaacagcuacaccaccacgaucaagcccgugaccuacaagcucgacggcgucgugugcaccgagaucgacccgaagcuggacaacuacuacaagaaggacaacuccuacuucaccgagcagcccaucgaccuggugcccaaccagcccuacccgaacgccagcuucgacaacuucaaguucgucugcgacaacaucaaguucgccgacgaccucaaccagcugacgggguacaagaagcccgcgucccgcgagcugaaggugaccuucuuccccgaccucaacggcgacguggucgccaucgacuacaagcacuacacccccagcuucaagaagggcgccaagcugcugcacaagccgaucguguggcacgugaacaacgccaccaacaaggcgacguacaagcccaacaccuggugcauccggugccucugguccaccaagcccgucgagaccagcaacuccuucgacgugcugaagagcgaggacgcccaggggauggacaaccuggccugcgaggaccucaagcccguguccgaggaggucguggagaacccgacgauccagaaggacgugcuggagugcaacgucaagaccaccgagguggugggcgacaucauccugaagcccgccaacaacagccucaagaucaccgaggaggucgggcacacggaccugauggccgcguacguggacaacuccagccugaccaucaagaagcccaacgagcucucccgcgugcugggccugaagacccucgccacccacgggcuggccgccgucaacagcgugccgugggacacgaucgccaacuacgcgaagcccuuccugaacaagguggucuccaccaccaccaacaucgugacgcgcugccucaaccgggugugcaccaacuacaugcccuacuucuucacccugcugcuccagcugugcaccuucacccgcagcacgaacucccggaucaaggccagcaugcccaccaccaucgccaagaacaccgucaaguccgugggcaaguucugccuggaggccagcuucaacuaccucaagagcccgaacuucuccaagcugaucaacaucaucaucugguuccugcuccugagcgugugccugggcucccucaucuacagcacggccgcgcuggggguccugauguccaaccucggcaugcccagcuacugcaccggguaccgcgagggcuaccugaacuccaccaacgugaccaucgccacguacugcaccggcagcauccccugcuccgugugccugagcgggcucgacucccuggacaccuaccccagccuggagaccauccagaucacgaucuccagcuucaagugggaccucaccgccuucggccuggucgccgagugguuccuggccuacauccucuucacccgguucuucuacgugcuggggcuggcggccaucaugcagcucuucuucuccuacuucgccgugcacuucaucagcaacuccuggcugauguggcugaucaucaaccugguccagauggccccgaucagcgcgauggugcgcauguacaucuucuucgccuccuucuacuacguguggaagagcuacguccacgugguggacggcugcaacagcuccaccugcaugaugugcuacaagcggaaccgcgccacgcgggucgagugcaccaccaucgugaacgggguccgccggagcuucuacguguacgccaacggcggcaagggguucugcaagcuccacaacuggaacugcgugaacugcgacaccuucugcgccggcuccacguucaucagcgacgaggucgcgcgcgaccugucccugcaguucaagcggcccaucaaccccaccgaccagagcuccuacaucguggacagcgugaccgucaagaacggguccauccaccucuacuucgacaaggccggccagaagaccuacgagcgccacagccugucccacuucgugaaccuggacaaccuccgggccaacaacacgaaggggagccugcccaucaacgugaucgucuucgacggcaaguccaagugcgaggagagcuccgccaagagcgccuccguguacuacagccagcugaugugccagccgauccuccugcuggaccaggcgcucguguccgacgucggcgacagcgccgagguggccgugaagauguucgacgccuacgucaacaccuucagcuccaccuucaacgugcccauggagaagcugaagacccugguggccacggcggaggccgagcucgccaagaacgucagccuggacaacgugcuguccaccuucaucagcgccgcgcgccagggguucguggacuccgacgucgagaccaaggacgugguggagugccucaagcugagccaccaguccgacaucgaggucaccggcgacagcugcaacaacuacaugcugacguacaacaagguggagaacaugaccccccgggaccucggggccugcaucgacugcuccgcccgccacaucaacgcccagguggccaagagccacaacaucgcgcugaucuggaacgucaaggacuucaugucccugagcgagcagcuccggaagcagauccgcuccgccgccaagaagaacaaccugcccuucaagcugaccugcgccaccacgcgccagguggugaacgucgugaccaccaagaucgcccucaagggcgggugaggacuaguuauaagacugacuagcccgaugggccucccaacgggcccuccuccccuccuugcaccgagauuaauaaaaaaaaaaaaaaaaaaaaaaaaaaaaaaaaaaaaaaaaaaaaaaaaaaaaaaaaaaaaaaaaugcaucccccccccccccccccccccccccccccccaaaggcucuuuucagagccaccagaauu

SEQ ID NO: 22028 - RNA, 6058 nt, Artificial Sequence
  SARS-CoV-2__MT276325.2__non-structural protein 3 (NSP3) mRNA gc
aggagaaagcuuaccauggcccccaccaaggugaccuucggcgacgacacggucaucgaggugcagggguacaagagcgugaacaucaccuucgagcuggacgagcgcaucgacaagguccucaacgagaagugcuccgccuacaccguggagcugggcaccgaggugaacgaguucgcgugcgucguggccgacgccgugaucaagacgcugcagccggucagcgagcuccugaccccccuggggaucgaccucgacgagugguccauggccaccuacuaccuguucgacgagagcggcgaguucaagcuggccucccacauguacugcagcuucuacccccccgacgaggacgaggaggagggggacugcgaggaggaggaguucgagccguccacccaguacgaguacggcacggaggacgacuaccagggcaagccccucgaguucggggcgaccagcgccgcccugcagcccgaggaggagcaggaggaggacuggcuggacgacgacucccagcagaccgugggccagcaggacgggagcgaggacaaccagaccacgaccauccagaccaucguggagguccagccccagcucgagauggagcugaccccgguggugcagacgaucgaggucaacuccuucagcggcuaccugaagcucaccgacaacguguacaucaagaacgccgacaucguggaggaggucaagaaggugaagcccaccguggucgugaacgcggccaacguguaccugaagcacgggggcggcgucgccggggcccugaacaaggccaccaacaacgcgaugcagguggaguccgacgacuacaucgccacgaacggcccccucaaggucgggggcagcugcgugcuguccggccacaaccuggccaagcacugccuccacguggucgggcccaacgugaacaagggcgaggacauccagcugcugaagagcgccuacgagaacuucaaccagcacgaggugcuccuggccccgcugcucuccgcggggaucuucggcgccgaccccauccacagccugcgggucugcguggacaccgugcgcaccaacgucuaccuggccguguucgacaagaaccucuacgacaagcugguguccagcuuccuggagaugaagagcgagaagcaggucgagcagaagaucgccgagauccccaaggaggaggugaagcccuucaucaccgaguccaagccgagcguggagcagcggaagcaggacgacaagaagaucaaggccugcgucgaggaggugacgaccacccucgaggagaccaaguuccugacggagaaccugcuccuguacaucgacaucaacgggaaccugcaccccgacuccgcgacccucgugagcgacaucgacaucaccuuccugaagaaggacgcccccuacaucgucggcgacguggugcaggagggcguccugaccgccguggugauccccacgaagaaggccgggggcaccaccgagaugcucgccaaggcgcugcgcaaggucccgaccgacaacuacaucacgaccuaccccgggcagggccugaacggguacaccguggaggaggccaagaccgugcucaagaagugcaaguccgccuucuacauccugcccagcaucaucuccaacgagaagcaggagauccugggcaccgucagcuggaaccuccgggagaugcuggcccacgcggaggagacgcgcaagcugaugcccgugugcguggagaccaaggccaucgucuccaccauccagcggaaguacaagggcaucaagauccaggagggggugguggacuacggcgcccgcuucuacuucuacaccagcaagacgaccgucgccucccugaucaacacccucaacgaccugaacgagacccuggugacgaugccgcucggguacgugacccacggccugaaccuggaggaggccgcgcgguacaugcgcagccucaagguccccgccaccguguccgugagcucccccgacgccgucaccgccuacaacggguaccugacgagcuccagcaagacccccgaggagcacuucaucgagaccaucucccuggccggcagcuacaaggacuggagcuacuccggccagagcacccagcucgggaucgaguuccugaagcggggcgacaaguccguguacuacacgagcaacccgaccaccuuccaccuggacggggaggugaucaccuucgacaaccucaagacgcugcugucccuccgcgagguccggaccaucaagguguucaccaccguggacaacaucaaccugcacacgcaggucguggacaugagcaugaccuacggccagcaguucggccccaccuaccuggacggggcggacgugaccaagaucaagccccacaacucccacgagggcaagacguucuacguccucccgaacgacgacacccugcgcguggaggccuucgaguacuaccacaccaccgaccccagcuuccuggggcgguacauguccgcccucaaccacacgaagaaguggaaguacccccaggugaacggccugaccagcaucaagugggccgacaacaacugcuaccuggccaccgcgcuccugacccugcagcagaucgagcucaaguucaaccccccggcccugcaggacgccuacuaccgcgcccgggcgggggaggccgccaacuucugcgcccugauccucgccuacugcaacaagacggucggcgagcugggcgacgugcgcgagaccauguccuaccuguuccagcacgcgaaccucgacagcugcaagcggguccugaacguggugugcaagaccugcgggcagcagcagaccacccugaagggcgucgaggccgugaucuacauggggacgcucuccuacgagcaguucaagaagggcgugcagauccccugcaccugcgggaagcaggccaccaaguaccugguccagcaggagagccccuucgugaugauguccgcccccccggcccaguacgagcugaagcacggcaccuucacgugcgcgagcgaguacaccggcaacuaccagugcgggcacuacaagcacaucaccuccaaggagacccucuacugcaucgacggcgcccugcugacgaagagcagcgaguacaaggggcccaucaccgacguguucuacaaggagaacuccuacaccaccacgaucaagcccgucaccuacaagcucgacggcguggugugcaccgagaucgaccccaagcuggacaacuacuacaagaaggacaacagcuacuucaccgagcagccgaucgaccugguccccaaccagcccuaccccaacgccuccuucgacaacuucaaguucgugugcgacaacaucaaguucgccgacgaccucaaccagcugacgggguacaagaagccggccagccgcgagcugaaggugaccuucuuccccgaccucaacggcgacgucguggcgaucgacuacaagcacuacacccccuccuucaagaagggcgccaagcugcugcacaagcccaucguguggcacgucaacaacgccaccaacaaggccacguacaagccgaacaccuggugcauccggugccucuggagcaccaagcccguggagaccuccaacagcuucgacgugcugaaguccgaggacgcgcaggggauggacaaccuggccugcgaggaccucaagcccgucagcgaggaggugguggagaaccccacgauccagaaggacguccuggagugcaacgugaagaccaccgagguggucggcgacaucauccugaagccggccaacaacucccucaagaucaccgaggagguggggcacacggaccugauggccgccuacguggacaacagcucccugaccaucaagaagcccaacgagcucagccgcguccugggccugaagacccucgcgacccacgggcuggccgccgugaacuccgugcccugggacacgaucgccaacuacgccaagccguuccugaacaaggucgugagcaccaccaccaacaucgugacgcgcugccucaaccgggucugcaccaacuacaugcccuacuucuucacccugcugcuccagcugugcaccuucacccgcuccacgaacagccggaucaaggcguccaugcccaccaccaucgccaagaacaccgugaagagcgugggcaaguucugccuggaggccagcuucaacuaccucaagucccccaacuucagcaagcugaucaacaucaucaucugguuccugcuccuguccgucugccugggcagccucaucuacuccacggccgcccugggggugcugaugagcaaccucggcaugccguccuacugcaccggguaccgcgagggcuaccugaacagcaccaacgugaccaucgcgacguacugcaccggcuccauccccugcagcgucugccuguccgggcucgacagccuggacaccuaccccucccuggagaccauccagaucacgaucagcuccuucaagugggaccucaccgccuucggccugguggccgagugguuccuggccuacauccucuucacccgguucuucuacgugcuggggcuggccgcgaucaugcagcucuucuucagcuacuucgccguccacuucaucuccaacagcuggcugauguggcugaucaucaaccuggugcagauggcccccaucuccgccauggugcgcauguacaucuucuucgcgagcuucuacuacgucuggaagagcuacgugcacguggucgacggcugcaacuccagcaccugcaugaugugcuacaagcggaaccgcgccacgcggguggagugcaccaccaucgucaacggggugcgccgguccuucuacguguacgccaacggcggcaagggguucugcaagcuccacaacuggaacugcgucaacugcgacaccuucugcgccggcagcacguucaucuccgacgagguggcccgcgaccugagccugcaguucaagcggccgaucaaccccaccgaccaguccagcuacaucguggacuccgucaccgugaagaacgggagcauccaccucuacuucgacaaggcgggccagaagaccuacgagcgccacucccugagccacuucgugaaccuggacaaccuccgggccaacaacacgaaggggucccugcccaucaacgucaucguguucgacggcaagagcaagugcgaggaguccagcgccaaguccgccagcguguacuacucccagcugaugugccagcccauccuccugcuggaccaggcccucgucagcgacgugggcgacagcgcggagguggccgucaagauguucgacgccuacgugaacaccuucuccagcaccuucaacgugccgauggagaagcugaagacccuggucgccacggccgaggcggagcucgccaagaacgugucccuggacaacgugcugagcaccuucaucuccgccgcccgccagggguucgucgacagcgacguggagaccaaggacguggucgagugccucaagcugucccaccagagcgacaucgaggugaccggcgacuccugcaacaacuacaugcugacguacaacaagguggagaacaugaccccccgggaccucggggcgugcaucgacugcagcgcccgccacaucaacgcccaggucgccaagucccacaacaucgcccugaucuggaacgugaaggacuucaugagccuguccgagcagcuccggaagcagauccgcagcgcggccaagaagaacaaccugcccuucaagcugaccugcgccaccacgcgccagguggucaacguggugaccaccaagaucgcccucaagggcgggugaggacuaguuauaagacugacuagcccgaugggccucccaacgggcccuccuccccuccuugcaccgagauuaauaaaaaaaaaaaaaaaaaaaaaaaaaaaaaaaaaaaaaaaaaaaaaaaaaaaaaaaaaaaaaaaaugcaucccccccccccccccccccccccccccccccaaaggcucuuuucagagccaccagaauu

SEQ ID NO: 22029 - RNA, 6058 nt, Artificial Sequence
  SARS-CoV-2__MT263415.1__non-structural protein 3 (NSP3) mRNA gc
aggagaaagcuuaccauggcccccaccaaggugaccuucggcgacgacacggucaucgaggugcagggguacaagagcgugaacaucaccuucgagcuggacgagcgcaucgacaagguccucaacgagaagugcuccgccuacaccguggagcugggcaccgaggugaacgaguucgcgugcgucguggccgacgccgugaucaagacgcugcagccggucagcgagcuccugaccccccuggggaucgaccucgacgagugguccauggccaccuacuaccuguucgacgagagcggcgaguucaagcuggccucccacauguacugcagcuucuacccccccgacgaggacgaggaggagggggacugcgaggaggaggaguucgagccguccacccaguacgaguacggcacggaggacgacuaccagggcaagccccucgaguucggggcgaccagcgccgcccugcagcccgaggaggagcaggaggaggacuggcuggacgacgacucccagcagaccgugggccagcaggacgggagcgaggacaaccagaccacgaccauccagaccaucguggagguccagccccagcucgagauggagcugaccccgguggugcagacgaucgaggucaacuccuucagcggcuaccugaagcucaccgacaacguguacaucaagaacgccgacaucguggaggaggcgaagaaggucaagcccaccgugguggucaacgccgccaacguguaccugaagcacgggggcggcguggccggggcccugaacaaggcgaccaacaacgccaugcaggucgaguccgacgacuacaucgccacgaacggcccccucaagguggggggcagcugcguccuguccggccacaaccuggccaagcacugccuccacgugguggggcccaacgucaacaagggcgaggacauccagcugcugaagagcgccuacgagaacuucaaccagcacgaggugcuccuggcgccgcugcucuccgccgggaucuucggcgccgaccccauccacagccugcgggugugcgucgacaccgugcgcaccaacguguaccuggccgucuucgacaagaaccucuacgacaagcugguguccagcuuccuggagaugaagagcgagaagcagguggagcagaagaucgccgagauccccaaggaggaggucaagcccuucaucaccgaguccaagccgagcguggagcagcggaagcaggacgacaagaagaucaaggcgugcguggaggaggucacgaccacccucgaggagaccaaguuccugacggagaaccugcuccuguacaucgacaucaacgggaaccugcaccccgacuccgccacccucgugagcgacaucgacaucaccuuccugaagaaggacgcccccuacaucgugggcgacgucgugcaggagggcgugcugaccgccgucgugauccccacgaagaaggccgggggcaccaccgagaugcucgcgaaggcccugcgcaaggugccgaccgacaacuacaucacgaccuaccccgggcagggccugaacggguacaccgucgaggaggccaagaccgugcucaagaagugcaaguccgccuucuacauccugcccagcaucaucuccaacgagaagcaggagauccugggcaccgugagcuggaaccuccgggagaugcuggcgcacgccgaggagacgcgcaagcugaugcccgucugcguggagaccaaggccaucguguccaccauccagcggaaguacaagggcaucaagauccaggagggggucguggacuacggcgcccgcuucuacuucuacaccagcaagacgaccguggccucccugaucaacacccucaacgaccugaacgagacccuggucacgaugccgcucggguacgugacccacggccugaaccuggaggaggcggcccgguacaugcgcagccucaaggugcccgucaccguguccgugagcucccccgacgccgucaccgccuacaacggguaccugacgagcuccagcaagacccccgaggagcacuucaucgagaccaucucccuggccggcagcuacaaggacuggagcuacuccggccagagcacccagcucgggaucgaguuccugaagcggggcgacaaguccguguacuacacgagcaacccgaccaccuuccaccuggacggggaggugaucaccuucgacaaccucaagacgcugcugucccuccgcgagguccggaccaucaagguguucaccaccguggacaacaucaaccugcacacgcaggucguggacaugagcaugaccuacggccagcaguucggccccaccuaccuggacggggcggacgugaccaagaucaagccccacaacucccacgagggcaagacguucuacguccucccgaacgacgacacccugcgcguggaggccuucgaguacuaccacaccaccgaccccagcuuccuggggcgguacauguccgcccucaaccacacgaagaaguggaaguacccccaggugaacggccugaccagcaucaagugggccgacaacaacugcuaccuggccaccgcgcuccugacccugcagcagaucgagcucaaguucaaccccccggcccugcaggacgccuacuaccgcgcccgggcgggggaggccgccaacuucugcgcccugauccucgccuacugcaacaagacggucggcgagcugggcgacgugcgcgagaccauguccuaccuguuccagcacgcgaaccucgacagcugcaagcggguccugaacguggugugcaagaccugcgggcagcagcagaccacccugaagggcgucgaggccgugauguacauggggacgcucuccuacgagcaguucaagaagggcgugcagauccccugcaccugcgggaagcaggccaccaaguaccugguccagcaggagagccccuucgugaugauguccgcccccccggcccaguacgagcugaagcacggcaccuucacgugcgcgagcgaguacaccggcaacuaccagugcgggcacuacaagcacaucaccuccaaggagacccucuacugcaucgacggcgcccugcugacgaagagcagcgaguacaaggggcccaucaccgacguguucuacaaggagaacuccuacaccaccacgaucaagcccgucaccuacaagcucgacggcguggugugcaccgagaucgaccccaagcuggacaacuacuacaagaaggacaacagcuacuucaccgagcagccgaucgaccugguccccaaccagcccuaccccaacgccuccuucgacaacuucaaguucgugugcgacaacaucaaguucgccgacgaccucaaccagcugacgggguacaagaagccggccagccgcgagcugaaggugaccuucuuccccgaccucaacggcgacgucguggcgaucgacuacaagcacuacacccccuccuucaagaagggcgccaagcugcugcacaagcccaucguguggcacgucaacaacgccaccaacaaggccacguacaagccgaacaccuggugcauccggugccucuggagcaccaagcccguggagaccuccaacagcuucgacgugcugaaguccgaggacgcgcaggggauggacaaccuggccugcgaggaccucaagcccgucagcgaggaggugguggagaaccccacgauccagaaggacguccuggagugcaacgugaagaccaccgagguggucggcgacaucauccugaagccggccaacaacucccucaagaucaccgaggagguggggcacacggaccugauggccgccuacguggacaacagcucccugaccaucaagaagcccaacgagcucagccgcguccugggccugaagacccucgcgacccacgggcuggccgccgugaacuccgugcccugggacacgaucgccaacuacgccaagccguuccugaacaaggucgugagcaccaccaccaacaucgugacgcgcugccucaaccgggucugcaccaacuacaugcccuacuucuucacccugcugcuccagcugugcaccuucacccgcuccacgaacagccggaucaaggcguccaugcccaccaccaucgccaagaacaccgugaagagcgugggcaaguucugccuggaggccagcuucaacuaccucaagucccccaacuucagcaagcugaucaacaucaucaucugguuccugcuccuguccgucugccugggcagccucaucuacuccacggccgcccugggggugcugaugagcaaccucggcaugccguccuacugcaccggguaccgcgagggcuaccugaacagcaccaacgugaccaucgcgacguacugcaccggcuccauccccugcagcgucugccuguccgggcucgacagccuggacaccuaccccucccuggagaccauccagaucacgaucagcuccuucaagugggaccucaccgccuucggccugguggccgagugguuccuggccuacauccucuucacccgguucuucuacgugcuggggcuggccgcgaucaugcagcucuucuucagcuacuucgccguccacuucaucuccaacagcuggcugauguggcugaucaucaaccuggugcagauggcccccaucuccgccauggugcgcauguacaucuucuucgcgagcuucuacuacgucuggaagagcuacgugcacguggucgacggcugcaacuccagcaccugcaugaugugcuacaagcggaaccgcgccacgcggguggagugcaccaccaucgucaacggggugcgccgguccuucuacguguacgccaacggcggcaagggguucugcaagcuccacaacuggaacugcgucaacugcgacaccuucugcgccggcagcacguucaucuccgacgagguggcccgcgaccugagccugcaguucaagcggccgaucaaccccaccgaccaguccagcuacaucguggacuccgucaccgugaagaacgggagcauccaccucuacuucgacaaggcgggccagaagaccuacgagcgccacucccugagccacuucgugaaccuggacaaccuccgggccaacaacacgaaggggucccugcccaucaacgucaucguguucgacggcaagagcaagugcgaggaguccagcgccaaguccgccagcguguacuacucccagcugaugugccagcccauccuccugcuggaccaggcccucgucagcgacgugggcgacagcgcggagguggccgucaagauguucgacgccuacgugaacaccuucuccagcaccuucaacgugccgauggagaagcugaagacccuggucgccacggccgaggcggagcucgccaagaacgugucccuggacaacgugcugagcaccuucaucuccgccgcccgccagggguucgucgacagcgacguggagaccaaggacguggucgagugccucaagcugucccaccagagcgacaucgaggugaccggcgacuccugcaacaacuacaugcugacguacaacaagguggagaacaugaccccccgggaccucggggcgugcaucgacugcagcgcccgccacaucaacgcccaggucgccaagucccacaacaucgcccugaucuggaacgugaaggacuucaugagccuguccgagcagcuccggaagcagauccgcagcgcggccaagaagaacaaccugcccuucaagcugaccugcgccaccacgcgccagguggucaacguggugaccaccaagaucgcccucaagggcgggugaggacuaguuauaagacugacuagcccgaugggccucccaacgggcccuccuccccuccuugcaccgagauuaauaaaaaaaaaaaaaaaaaaaaaaaaaaaaaaaaaaaaaaaaaaaaaaaaaaaaaaaaaaaaaaaaugcaucccccccccccccccccccccccccccccccaaaggcucuuuucagagccaccagaauu

SEQ ID NO: 22030 - RNA, 6058 nt, Artificial Sequence
  SARS-CoV-2__MT263422.1__non-structural protein 3 (NSP3) mRNA gc
aggagaaagcuuaccauggcccccaccaaggugaccuucggcgacgacacggucaucgaggugcagggguacaagagcgugaacaucaccuucgagcuggacgagcgcaucgacaagguccucaacgagaagugcuccgccuacaccguggagcugggcaccgaggugaacgaguucgcgugcgucguggccgacgccgugaucaagacgcugcagccggucagcgagcuccugaccccccuggggaucgaccucgacgagugguccauggccaccuacuaccuguucgacgagagcggcgaguucaagcuggccucccacauguacugcagcuucuacccccccgacgaggacgaggaggagggggacugcgaggaggaggaguucgagccguccacccaguacgaguacggcacggaggacgacuaccagggcaagccccucgaguucggggcgaccagcgccgcccugcagcccgaggaggagcaggaggaggacuggcuggacgacgacucccagcagaccgugggccagcaggacgggagcgaggacaaccagaccacgaccauccagaccaucguggagguccagccccagcucgagauggagcugaccccgguggugcagacgaucgaggucaacuccuucagcggcuaccugaagcucaccgacaacguguacaucaagaacgccgacaucguggaggaggcgaagaaggucaagcccaccgugguggucaacgccgccaacguguaccugaagcacgggggcggcguggccggggcccugaacaaggcgaccaacaacgccaugcaggucgaguccgacgacuacaucgccacgaacggcccccucaagguggggggcagcugcguccuguccggccacaaccuggccaagcacugccuccacgugguggggcccaacgucaacaagggcgaggacauccagcugcugaagagcgccuacgagaacuucaaccagcacgaggugcuccuggcgccgcugcucuccgccgggaucuucggcgccgaccccauccacagccugcgggugugcgucgacaccgugcgcaccaacguguaccuggccgucuucgacaagaaccucuacgacaagcugguguccagcuuccuggagaugaagagcgagaagcagguggagcagaagaucgccgagauccccaaggaggaggucaagcccuucaucaccgaguccaagccgagcguggagcagcggaagcaggacgacaagaagaucaaggcgugcguggaggaggucacgaccacccucgaggagaccaaguuccugacggagaaccugcuccuguacaucgacaucaacgggaaccugcaccccgacuccgccacccucgugagcgacaucgacaucaccuuccugaagaaggacgcccccuacaucgugggcgacgucgugcaggagggcgugcugaccgccgucgugauccccacgaagaaggccgggggcaccaccgagaugcucgcgaaggcccugcgcaaggugccgaccgacaacuacaucacgaccuaccccgggcagggccugaacggguacaccgucgaggaggccaagaccgugcucaagaagugcaaguccgccuucuacauccugcccagcaucaucuccaacgagaagcaggagauccugggcaccgugagcuggaaccuccgggagaugcuggcgcacgccgaggagacgcgcaagcugaugcccgucugcguggagaccaaggccaucguguccaccauccagcggaaguacaagggcaucaagauccaggagggggucguggacuacggcgcccgcuucuacuucuacaccagcaagacgaccguggccucccugaucaacacccucaacgaccugaacgagacccuggucacgaugccgcucggguacgugacccacggccugaaccuggaggaggcggcccgguacaugcgcagccucaaggugcccgccaccgucuccgugagcucccccgacgccgugaccgccuacaacggguaccugacgagcuccagcaagacccccgaggagcacuucaucgagaccaucucccuggcgggcagcuacaaggacuggagcuacuccggccagagcacccagcucgggaucgaguuccugaagcggggcgacaaguccgucuacuacacgagcaacccgaccaccuuccaccuggacggggaggugaucaccuucgacaaccucaagacgcugcugucccuccgcgaggugcggaccaucaaggucuucaccaccguggacaacaucaacuuccacacgcagguggucgacaugagcaugaccuacggccagcaguucggccccaccuaccuggacggggccgacgugaccaagaucaagccccacaacucccacgagggcaagacguucuacgugcugccgaacgacgacacccuccgcgucgaggccuucgaguacuaccacaccaccgaccccagcuuccuggggcgguacauguccgcccugaaccacacgaagaaguggaaguacccccaggugaacggccucaccagcaucaagugggccgacaacaacugcuaccuggcgaccgcccugcucacccugcagcagaucgagcugaaguucaaccccccggcccuccaggacgccuacuaccgcgcgcgggccggggaggccgccaacuucugcgcccugauccuggcguacugcaacaagacggugggcgagcucggcgacguccgcgagaccauguccuaccuguuccagcacgccaaccuggacagcugcaagcgggugcucaacgucgugugcaagaccugcgggcagcagcagaccacccugaagggcguggaggccgucauguacauggggacgcuguccuacgagcaguucaagaagggcgugcagauccccugcaccugcgggaagcaggccaccaaguaccucgugcagcaggagagccccuucgucaugauguccgcccccccggcgcaguacgagcugaagcacggcaccuucacgugcgccagcgaguacaccggcaacuaccagugcgggcacuacaagcacaucaccuccaaggagacccuguacugcaucgacggcgcccuccugacgaagagcagcgaguacaaggggcccaucaccgacguguucuacaaggagaacuccuacaccaccacgaucaagcccgugaccuacaagcuggacggcgucgugugcaccgagaucgaccccaagcucgacaacuacuacaagaaggacaacagcuacuucaccgagcagccgaucgaccuggugcccaaccagcccuaccccaacgccuccuucgacaacuucaaguucgucugcgacaacaucaaguucgccgacgaccugaaccagcucacgggguacaagaagccggcgagccgcgagcugaaggugaccuucuuccccgaccugaacggcgacguggucgccaucgacuacaagcacuacacccccuccuucaagaagggcgccaagcuccugcacaagcccaucguguggcacgugaacaacgccaccaacaaggcgacguacaagccgaacaccuggugcauccggugccuguggagcaccaagcccgucgagaccuccaacagcuucgacgugcucaaguccgaggacgcccaggggauggacaaccuggccugcgaggaccugaagcccgugagcgaggaggucguggagaaccccacgauccagaaggacgugcucgagugcaacgucaagaccaccgagguggugggcgacaucauccugaagccggccaacaacucccugaagaucaccgaggaggucgggcacacggaccucauggccgcguacguggacaacagcucccugaccaucaagaagcccaacgagcugagccgcgugcucggccugaagacccuggccacccacgggcucgccgccgucaacuccgugcccugggacacgaucgccaacuacgcgaagccguuccugaacaagguggucagcaccaccaccaacaucgugacgcgcugccugaaccgggugugcaccaacuacaugcccuacuucuucacccuccugcugcagcucugcaccuucacccgcuccacgaacagccggaucaaggccuccaugcccaccaccaucgccaagaacaccgucaagagcgugggcaaguucugccuggaggccagcuucaacuaccugaagucccccaacuucagcaagcucaucaacaucaucaucugguuccugcugcucuccgugugccugggcagccugaucuacuccacggccgcgcucgggguccugaugagcaaccugggcaugccguccuacugcaccggguaccgcgagggcuaccucaacagcaccaacgugaccaucgccacguacugcaccggcuccauccccugcagcgugugccuguccgggcuggacagccucgacaccuaccccucccuggagaccauccagaucacgaucagcuccuucaagugggaccugaccgccuucggccucgucgccgagugguuccuggccuacauccuguucacccgguucuucuacgugcucgggcuggcggccaucaugcagcuguucuucagcuacuucgccgugcacuucaucuccaacagcuggcucauguggcugaucaucaaccugguccagauggcccccaucuccgcgauggugcgcauguacaucuucuucgccagcuucuacuacguguggaagagcuacguccacgugguggacggcugcaacuccagcaccugcaugaugugcuacaagcggaaccgcgccacgcgggucgagugcaccaccaucgugaacgggguccgccgguccuucuacguguacgccaacggcggcaagggguucugcaagcugcacaacuggaacugcgugaacugcgacaccuucugcgccggcagcacguucaucuccgacgaggucgcgcgcgaccucagccugcaguucaagcggccgaucaaccccaccgaccaguccagcuacaucguggacuccgugaccgucaagaacgggagcauccaccuguacuucgacaaggccggccagaagaccuacgagcgccacucccucagccacuucgugaaccuggacaaccugcgggccaacaacacgaaggggucccuccccaucaacgugaucgucuucgacggcaagagcaagugcgaggaguccagcgccaaguccgccagcguguacuacucccagcugaugugccagcccauccugcuccuggaccaggcgcuggugagcgacgucggcgacagcgccgagguggccgugaagauguucgacgccuacgucaacaccuucuccagcaccuucaacgugccgauggagaagcucaagacccugguggccacggcggaggccgagcuggccaagaacgucucccucgacaacgugcugagcaccuucaucuccgccgcgcgccagggguucguggacagcgacgucgagaccaaggacgugguggagugccugaagcucucccaccagagcgacaucgaggucaccggcgacuccugcaacaacuacaugcugacguacaacaagguggagaacaugaccccccgggaccugggggccugcaucgacugcagcgcccgccacaucaacgcccagguggccaagucccacaacaucgcgcucaucuggaacgucaaggacuucaugagccuguccgagcagcugcggaagcagauccgcagcgccgccaagaagaacaaccuccccuucaagcugaccugcgccaccacgcgccagguggugaacgucgugaccaccaagaucgcccugaagggcgggugaggacuaguuauaagacugacuagcccgaugggccucccaacgggcccuccuccccuccuugcaccgagauuaauaaaaaaaaaaaaaaaaaaaaaaaaaaaaaaaaaaaaaaaaaaaaaaaaaaaaaaaaaaaaaaaaugcaucccccccccccccccccccccccccccccccaaaggcucuuuucagagccaccagaauu

SEQ ID NO: 22031 - RNA, 6058 nt, Artificial Sequence
  SARS-CoV-2__MT263457.1__non-structural protein 3 (NSP3) mRNA gc
aggagaaagcuuaccauggcccccaccaaggugaccuucggcgacgacacggucaucgaggugcagggguacaagagcgugaacaucaccuucgagcuggacgagcgcaucgacaagguccucaacgagaagugcuccgccuacaccguggagcugggcaccgaggugaacgaguucgcgugcgucguggccgacgccgugaucaagacgcugcagccggucagcgagcuccugaccccccuggggaucgaccucgacgagugguccauggccaccuacuaccuguucgacgagagcggcgaguucaagcuggccucccacauguacugcagcuucuacccccccgacgaggacgaggaggagggggacugcgaggaggaggaguucgagccguccacccaguacgaguacggcacggaggacgacuaccagggcaagccccucgaguucggggcgaccagcgccgcccugcagcccgaggaggagcaggaggaggacuggcuggacgacgacucccagcagaccgugggccagcaggacgggagcgaggacaaccagaccacgaccauccagaccaucguggagguccagccccagcucgagauggagcugaccccgguggugcagacgaucgaggucaacuccuucagcggcuaccugaagcucaccgacaacguguacaucaagaacgccgacaucguggaggaggcgaagaaggucaagcccaccgugguggucaacgccgccaacguguaccugaagcacgggggcggcguggccggggcccugaacaaggcgaccaacaacgccaugcaggucgaguccgacgacuacaucgccacgaacggcccccucaagguggggggcagcugcguccuguccggccacaaccuggccaagcacugccuccacgugguggggcccaacgucaacaagggcgaggacauccagcugcugaagagcgccuacgagaacuucaaccagcacgaggugcuccuggcgccgcugcucuccgccgggaucuucggcgccgaccccauccacagccugcgggugugcgucgacaccgugcgcaccaacguguaccuggccgucuucgacaagaaccucuacgacaagcugguguccagcuuccuggagaugaagagcgagaagcagguggagcagaagaucgccgagauccccaaggaggaggucaagcccuucaucaccgaguccaagccgagcguggagcagcggaagcaggacgacaagaagaucaaggcgugcguggaggaggucacgaccacccucgaggagaccaaguuccugacggagaaccugcuccuguacaucgacaucaacgggaaccugcaccccgacuccgccacccucgugagcgacaucgacaucaccuuccugaagaaggacgcccccuacaucgugggcgacgucgugcaggagggcgugcugaccgccgucgugauccccacgaagaaggccgggggcaccaccgagaugcucgcgaaggcccugcgcaaggugccgaccgacaacuacaucacgaccuaccccgggcagggccugaacggguacaccgucgaggaggccaagaccgugcucaagaagugcaaguccgccuucuacauccugcccagcaucaucuccaacgagaagcaggagauccugggcaccgugagcuggaaccuccgggagaugcuggcgcacgccgaggagacgcgcaagcugaugcccgucugcguggagaccaaggccaucguguccaccauccagcggaaguacaagggcaucaagauccaggagggggucguggacuacggcgcccgcuucuacuucuacaccagcaagacgaccguggccucccugaucaacacccucaacgaccugaacgagacccuggucacgaugccgcucggguacgugacccacggccugaaccuggaggaggcggcccgguacaugcgcagccucaaggugcccgccaccgucuccgugagcucccccgacgccgugaccgccuacaacggguaccugacgagcuccagcaagacccccgaggagcacuucaucgagaccaucucccuggcgggcagcuacaaggacuggagcuacuccggccagagcacccagcucgggaucgaguuccugaagcggggcgacaaguccgucuacuacacgagcaacccgaccaccuuccaccuggacggggaggugaucaccuucgacaaccucaagacgcugcugucccuccgcgaggugcggaccaucaaggucuucaccaccguggacaacaucaaccugcacacgcagguggucgacaugagcaugaccuacggccagcaguucggccccaccuaccuggacggggccgacgugaccaagaucaagccccacaacucccacgagggcaagacguucuacgugcucccgaacgacgacacccugcgcgucgaggccuucgaguacuaccacaccaccgaccccagcuuccuggggcgguacauguccgcccucaaccacacgaagaaguggaaguacccccaggugaacggccugaccagcaucaagugggccgacaacaacugcuaccuggcgaccgcccuccugacccugcagcagaucgagcucaaguucaaccccccggcccugcaggacgccuacuaccgcgcgcgggccggggaggccgccaacuucugcgcccugauccucgcguacugcaacaagacggugggcgagcugggcgacguccgcgagaccauguccuaccuguuccagcacgccaaccucgacagcugcaagcgggugcugaacgucgugugcaagaccugcgggcagcagcagaccacccugaagggcguggaggccgucauguacauggggacgcucuccuacgagcaguucaagaagggcgugcagauccccugcaccugcgggaagcaggccaccaaguaccuggugcagcaggagagccccuucgucaugauguccgcccccccggcgcaguacgagcugaagcacggcaccuucacgugcgccagcgaguacaccggcaacuaccagugcgggcacuacaagcacaucaccuccaaggagacccucuacugcaucgacggcgcccugcugacgaagagcagcgaguacaaggggcccaucaccgacguguucuacaaggagaacuccuacaccaccacgaucaagcccgugaccuacaagcucgacggcgucgugugcaccgagaucgaccccaagcuggacaacuacuacaagaaggacaacagcuacuucaccgagcagccgaucgaccuggugcccaaccagcccuaccccaacgccuccuucgacaacuucaaguucgucugcgacaacaucaaguucgccgacgaccucaaccagcugacgggguacaagaagccggcgagccgcgagcugaaggugaccuucuuccccgaccucaacggcgacguggucgccaucgacuacaagcacuacacccccuccuucaagaagggcgccaagcugcugcacaagcccaucguguggcacgugaacaacgccaccaacaaggcgacguacaagccgaacaccuggugcauccggugccucuggagcaccaagcccgucgagaccuccaacagcuucgacgugcugaaguccgaggacgcccaggggauggacaaccuggccugcgaggaccucaagcccgugagcgaggaggucguggagaaccccacgauccagaaggacgugcuggagugcaacgucaagaccaccgagguggugggcgacaucauccugaagccggccaacaacucccucaagaucaccgaggaggucgggcacacggaccugauggccgcguacguggacaacagcucccugaccaucaagaagcccaacgagcucagccgcgugcugggccugaagacccucgccacccacgggcuggccgccgucaacuccgugcccugggacacgaucgccaacuacgcgaagccguuccugaacaagguggucagcaccaccaccaacaucgugacgcgcugccucaaccgggugugcaccaacuacaugcccuacuucuucacccugcugcuccagcugugcaccuucacccgcuccacgaacagccggaucaaggccuccaugcccaccaccaucgccaagaacaccgucaagagcgugggcaaguucugccuggaggccagcuucaacuaccucaagucccccaacuucagcaagcugaucaacaucaucaucugguuccugcuccuguccgugugccugggcagccucaucuacuccacggccgcgcuggggguccugaugagcaaccucggcaugccguccuacugcaccggguaccgcgagggcuaccugaacagcaccaacgugaccaucgccacguacugcaccggcuccauccccugcagcgugugccuguccgggcucgacagccuggacaccuaccccucccuggagaccauccagaucacgaucagcuccuucaagugggaccucaccgccuucggccuggucgccgagugguuccuggccuacauccucuucacccgguucuucuacgugcuggggcuggcggccaucaugcagcucuucuucagcuacuucgccgugcacuucaucuccaacagcuggcugauguggcugaucaucaaccugguccagauggcccccaucuccgcgauggugcgcauguacaucuucuucgccagcuucuacuacguguggaagagcuacguccacgugguggacggcugcaacuccagcaccugcaugaugugcuacaagcggaaccgcgucacgcggguggagugcaccaccaucgucaacggggugcgccgguccuucuacguguacgccaacggcggcaagggguucugcaagcuccacaacuggaacugcgucaacugcgacaccuucugcgccggcagcacguucaucuccgacgagguggcccgcgaccugagccugcaguucaagcggccgaucaaccccaccgaccaguccagcuacaucguggacuccgucaccgugaagaacgggagcauccaccucuacuucgacaaggcgggccagaagaccuacgagcgccacucccugagccacuucgugaaccuggacaaccuccgggccaacaacacgaaggggucccugcccaucaacgucaucguguucgacggcaagagcaagugcgaggaguccagcgccaaguccgccagcguguacuacucccagcugaugugccagcccauccuccugcuggaccaggcccucgucagcgacgugggcgacagcgcggagguggccgucaagauguucgacgccuacgugaacaccuucuccagcaccuucaacgugccgauggagaagcugaagacccuggucgccacggccgaggcggagcucgccaagaacgugucccuggacaacgugcugagcaccuucaucuccgccgcccgccagggguucgucgacagcgacguggagaccaaggacguggucgagugccucaagcugucccaccagagcgacaucgaggugaccggcgacuccugcaacaacuacaugcugacguacaacaagguggagaacaugaccccccgggaccucggggcgugcaucgacugcagcgcccgccacaucaacgcccaggucgccaagucccacaacaucgcccugaucuggaacgugaaggacuucaugagccuguccgagcagcuccggaagcagauccgcagcgcggccaagaagaacaaccugcccuucaagcugaccugcgccaccacgcgccagguggucaacguggugaccaccaagaucgcccucaagggcgggugaggacuaguuauaagacugacuagcccgaugggccucccaacgggcccuccuccccuccuugcaccgagauuaauaaaaaaaaaaaaaaaaaaaaaaaaaaaaaaaaaaaaaaaaaaaaaaaaaaaaaaaaaaaaaaaaugcaucccccccccccccccccccccccccccccccaaaggcucuuuucagagccaccagaauu

SEQ ID NO: 22032 - RNA, 6058 nt, Artificial Sequence
  SARS-CoV-2__MT163720.1__non-structural protein 3 (NSP3) mRNA gc
aggagaaagcuuaccauggcccccaccaaggugaccuucggcgacgacacggucaucgaggugcagggguacaagagcgugaacaucaccuucgagcuggacgagcgcaucgacaagguccucaacgagaagugcuccgccuacaccguggagcugggcaccgaggugaacgaguucgcgugcgucguggccgacgccgugaucaagacgcugcagccggucagcgagcuccugaccccccuggggaucgaccucgacgagugguccauggccaccuacuaccuguucgacgagagcggcgaguucaagcuggccucccacauguacugcagcuucuacccccccgacgaggacgaggaggagggggacugcgaggaggaggaguucgagccguccacccaguacgaguacggcacggaggacgacuaccagggcaagccccucgaguucggggcgaccagcgccgcccugcagcccgaggaggagcaggaggaggacuggcuggacgacgacucccagcagaccgugggccagcaggacgggagcgaggacaaccagaccacgaccauccagaccaucguggagguccagccccagcucgagauggagcugaccccgguggugcagacgaucgaggucaacuccuucagcggcuaccugaagcucaccgacaacguguacaucaagaacgccgacaucguggacgaggcgaagaaggucaagcccaccgugguggucaacgccgccaacguguaccugaagcacgggggcggcguggccggggcccugaacaaggcgaccaacaacgccaugcaggucgaguccgacgacuacaucgccacgaacggcccccucaagguggggggcagcugcguccuguccggccacaaccuggccaagcacugccuccacgugguggggcccaacgucaacaagggcgaggacauccagcugcugaagagcgccuacgagaacuucaaccagcacgaggugcuccuggcgccgcugcucuccgccgggaucuucggcgccgaccccauccacagccugcgggugugcgucgacaccgugcgcaccaacguguaccuggccgucuucgacaagaaccucuacgacaagcugguguccagcuuccuggagaugaagagcgagaagcagguggagcagaagaucgccgagauccccaaggaggaggucaagcccuucaucaccgaguccaagccgagcguggagcagcggaagcaggacgacaagaagaucaaggcgugcguggaggaggucacgaccacccucgaggagaccaaguuccugacggagaaccugcuccuguacaucgacaucaacgggaaccugcaccccgacuccgccacccucgugagcgacaucgacaucaccuuccugaagaaggacgcccccuacaucgugggcgacgucgugcaggagggcgugcugaccgccgucgugauccccacgaagaaggccgggggcaccaccgagaugcucgcgaaggcccugcgcaaggugccgaccgacaacuacaucacgaccuaccccgggcagggccugaacggguacaccgucgaggaggccaagaccgugcucaagaagugcaaguccgccuucuacauccugcccagcaucaucuccaacgagaagcaggagauccugggcaccgugagcuggaaccuccgggagaugcuggcgcacgccgaggagacgcgcaagcugaugcccgucugcguggagaccaaggccaucguguccaccauccagcggaaguacaagggcaucaagauccaggagggggucguggacuacggcgcccgcuucuacuucuacaccagcaagacgaccguggccucccugaucaacacccucaacgaccugaacgagacccuggucacgaugccgcucggguacgugacccacggccugaaccuggaggaggcggcccgguacaugcgcagccucaaggugcccgccaccgucuccgugagcucccccgacgccgugaccgccuacaacggguaccugacgagcuccagcaagacccccgaggagcacuucaucgagaccaucucccuggcgggcagcuacaaggacuggagcuacuccggccagagcacccagcucgggaucgaguuccugaagcggggcgacaaguccgucuacuacacgagcaacccgaccaccuuccaccuggacggggaggugaucaccuucgacaaccucaagacgcugcugucccuccgcgaggugcggaccaucaaggucuucaccaccguggacaacaucaaccugcacacgcagguggucgacaugagcaugaccuacggccagcaguucggccccaccuaccuggacggggccgacgugaccaagaucaagccccacaacucccacgagggcaagacguucuacgugcucccgaacgacgacacccugcgcgucgaggccuucgaguacuaccacaccaccgaccccagcuuccuggggcgguacauguccgcccucaaccacacgaagaaguggaaguacccccaggugaacggccugaccagcaucaagugggccgacaacaacugcuaccuggcgaccgcccuccugacccugcagcagaucgagcucaaguucaaccccccggcccugcaggacgccuacuaccgcgcgcgggccggggaggccgccaacuucugcgcccugauccucgcguacugcaacaagacggugggcgagcugggcgacguccgcgagaccauguccuaccuguuccagcacgccaaccucgacagcugcaagcgggugcugaacgucgugugcaagaccugcgggcagcagcagaccacccugaagggcguggaggccgucauguacauggggacgcucuccuacgagcaguucaagaagggcgugcagauccccugcaccugcgggaagcaggccaccaaguaccuggugcagcaggagagccccuucgucaugauguccgcccccccggcgcaguacgagcugaagcacggcaccuucacgugcgccagcgaguacaccggcaacuaccagugcgggcacuacaagcacaucaucuccaaggagacccucuacugcaucgacggcgcccugcugaccaagagcagcgaguacaaggggcccaucacggacguguucuacaaggagaacuccuacaccaccaccaucaagcccgugacguacaagcucgacggcgucgugugcaccgagaucgaccccaagcuggacaacuacuacaagaaggacaacagcuacuucaccgagcagccgaucgaccuggugcccaaccagcccuaccccaacgccuccuucgacaacuucaaguucgucugcgacaacaucaaguucgccgacgaccucaaccagcugaccggguacaagaagccggcgagccgcgagcugaaggugacguucuuccccgaccucaacggcgacguggucgccaucgacuacaagcacuacacccccuccuucaagaagggcgccaagcugcugcacaagcccaucguguggcacgugaacaacgccaccaacaaggcgaccuacaagccgaacacguggugcauccggugccucuggagcaccaagcccgucgagaccuccaacagcuucgacgugcugaaguccgaggacgcccaggggauggacaaccuggccugcgaggaccucaagcccgugagcgaggaggucguggagaaccccaccauccagaaggacgugcuggagugcaacgucaagacgaccgagguggugggcgacaucauccugaagccggccaacaacucccucaagaucaccgaggaggucgggcacaccgaccugauggccgcguacguggacaacagcucccugacgaucaagaagcccaacgagcucagccgcgugcugggccugaagacccucgccacccacgggcuggccgccgucaacuccgugcccugggacaccaucgccaacuacgcgaagccguuccugaacaagguggucagcacgaccaccaacaucgugacccgcugccucaaccgggugugcacgaacuacaugcccuacuucuucacccugcugcuccagcugugcaccuucacccgcuccaccaacagccggaucaaggccuccaugcccacgaccaucgccaagaacaccgucaagagcgugggcaaguucugccuggaggccagcuucaacuaccucaagucccccaacuucagcaagcugaucaacaucaucaucugguuccugcuccuguccgugugccugggcagccucaucuacuccaccgccgcgcuggggguccugaugagcaaccucggcaugccguccuacugcacgggguaccgcgagggcuaccugaacagcaccaacgugaccaucgccaccuacugcacgggcuccauccccugcagcgugugccuguccgggcucgacagccuggacaccuaccccucccuggagaccauccagaucaccaucagcuccuucaagugggaccucacggccuucggccuggucgccgagugguuccuggccuacauccucuucacccgguucuucuacgugcuggggcuggcggccaucaugcagcucuucuucagcuacuucgccgugcacuucaucuccaacagcuggcugauguggcugaucaucaaccugguccagauggcccccaucuccgcgauggugcgcauguacaucuucuucgccagcuucuacuacguguggaagagcuacguccacgugguggacggcugcaacuccagcaccugcaugaugugcuacaagcggaaccgcgccacccgggucgagugcacgaccaucgugaacgggguccgccgguccuucuacguguacgccaacggcggcaagggguucugcaagcuccacaacuggaacugcgugaacugcgacaccuucugcgccggcagcaccuucaucuccgacgaggucgcgcgcgaccugagccugcaguucaagcggccgaucaaccccacggaccaguccagcuacaucguggacuccgugaccgucaagaacgggagcauccaccucuacuucgacaaggccggccagaagaccuacgagcgccacucccugagccacuucgugaaccuggacaaccuccgggccaacaacaccaaggggucccugcccaucaacgugaucgucuucgacggcaagagcaagugcgaggaguccagcgccaaguccgccagcguguacuacucccagcugaugugccagcccauccuccugcuggaccaggcgcucgugagcgacgucggcgacagcgccgagguggccgugaagauguucgacgccuacgucaacacguucuccagcaccuucaacgugccgauggagaagcugaagacccugguggccaccgcggaggccgagcucgccaagaacgucucccuggacaacgugcugagcacguucaucuccgccgcgcgccagggguucguggacagcgacgucgagaccaaggacgugguggagugccucaagcugucccaccagagcgacaucgaggucaccggcgacuccugcaacaacuacaugcugaccuacaacaagguggagaacaugacgccccgggaccucggggccugcaucgacugcagcgcccgccacaucaacgcccagguggccaagucccacaacaucgcgcugaucuggaacgucaaggacuucaugagccuguccgagcagcuccggaagcagauccgcagcgccgccaagaagaacaaccugcccuucaagcugaccugcgccaccacccgccagguggugaacgucgugacgaccaagaucgcccucaagggcgggugaggacuaguuauaagacugacuagcccgaugggccucccaacgggcccuccuccccuccuugcaccgagauuaauaaaaaaaaaaaaaaaaaaaaaaaaaaaaaaaaaaaaaaaaaaaaaaaaaaaaaaaaaaaaaaaaugcaucccccccccccccccccccccccccccccccaaaggcucuuuucagagccaccagaauu

SEQ ID NO: 22033 - RNA, 1744 nt, Artificial Sequence
  MERS-CoV/MERS-CoV-Jeddah-human-1__KF958702.1__non-structural protein 4 (NSP4) mRNA gc
aggagaaagcuuaccauggccagcaccugguucaacgcccugcgcgacuucacccucaagggcuacgugcuggcgacgaucaucgucuuccugugcgccgugcucauguaccugugccugcccaccuucuccauggugccggucgaguucuacgaggaccggauccucgacuucaaggugcuggacaacgggaucauccgcgacgugaaccccgacgacaagugcuucgccaacaagcaccggagcuucacccagugguaccacgagcacgucggcgggguguacgacaacuccaucacgugcccccugaccguggccgucaucgccggcguggcgggggcccgcauccccgacgugccgaccacccucgccugggucaacaaccagaucaucuucuucgugagccggguguucgccaacaccggcuccgucugcuacacgcccaucgacgagauccccuacaagagcuucuccgacagcggcugcauccugcccuccgagugcaccauguuccgcgacgcggaggggcggaugaccccguacugccacgaccccaccgugcugcccggcgccuucgccuacagccagaugcgcccccacgugcgguacgaccucuacgacgggaacauguucaucaaguucccggaggucguguucgaguccacgcugcgcaucacccggacccugagcacccaguacugccgcuucggcuccugcgaguacgcccaggagggggugugcaucacgaccaacggcagcugggccaucuucaacgaccaccaccucaaccggcccggcgucuacugcggguccgacuucaucgacaucgugcgccggcuggcggugagccuguuccagcccaucaccuacuuccagcucaccacgucccugguccugggcaucgggcucugcgccuuccugacccuccuguucuacuacaucaacaaggugaagcgcgccuucgccgacuacacccagugcgccgucaucgcggugguggccgccguccugaacagccugugcaucugcuucguggccuccaucccccucugcaucgugccguacaccgcccuguacuacuacgcgacguucuacuucaccaacgagcccgccuucaucaugcacgucagcugguacaucauguucggccccaucgugcccaucuggaugaccugcguguacaccgucgccaugugcuuccggcacuucuucugggugcuggccuacuucagcaagaagcacguggaggucuucacggacggcaagcucaacugcuccuuccaggacgccgcgagcaacaucuucgugaucaacaaggacaccuacgccgcccugcgcaacucccugaccaacgacgccuacagccgguuccucgggcuguucaacaaguacaaguacuucuccggcgcgauggagaccgccgccuaccgcgaggccgccgcgugccaccuggccaaggcccuccagacguacagcgagaccggguccgaccugcuguaccagccgcccaacugcagcaucaccuccggcgugcuccagugaggacuaguuauaagacugacuagcccgaugggccucccaacgggcccuccuccccuccuugcaccgagauuaauaaaaaaaaaaaaaaaaaaaaaaaaaaaaaaaaaaaaaaaaaaaaaaaaaaaaaaaaaaaaaaaaugcaucccccccccccccccccccccccccccccccaaaggcucuuuucagagccaccagaauu

SEQ ID NO: 22034 - RNA, 1744 nt, Artificial Sequence
  MERS-CoV/Al-Hasa_4_2013__KF186564.1__non-structural protein 4 (NSP4) mRNA gc
aggagaaagcuuaccauggcccccaccugguucaacgugcugcgcgacuucacccucaagggcuacguccuggccacgaucaucguguuccugugcgcggugcucauguaccugugccugcccaccuucagcaugguccccguggaguucuacgaggaccggauccucgacuucaaggugcuggacaacgggaucauccgcgacgucaaccccgacgacaagugcuucgccaacaagcaccgguccuucacccagugguaccacgagcacgugggcgggguguacgacaacagcaucacgugcccccugaccgucgccgugaucgccggcguggccggggcgcgcaucccggacguccccaccacccucgccugggugaacaaccagaucaucuucuucgugucccgggucuucgccaacaccggcagcgugugcuacacgcccaucgacgagauccccuacaaguccuucagcgacuccggcugcauccugccgagcgagugcaccauguuccgcgacgccgaggggcggaugacccccuacugccacgaccccaccgugcugcccggcgcguucgccuacucccagaugcgcccgcacguccgguacgaccucuacgacgggaacauguucaucaaguuccccgaggugguguucgagagcacgcugcgcaucacccggacccuguccacccaguacugccgcuucggcagcugcgaguacgcccaggagggggucugcaucacgaccaacggcuccugggccaucuucaacgaccaccaccucaaccggcccggcguguacugcgggagcgacuucaucgacaucgugcgccggcuggccgucucccuguuccagcccaucaccuacuuccagcucaccacgagccuggugcugggcaucgggcucugcgcguuccugacccuccuguucuacuacaucaacaaggucaagcgcgccuucgccgacuacacccagugcgccgugaucgccguggucgcggccgugcugaacucccugugcaucugcuucguggccagcaucccgcucugcaucguccccuacaccgcccuguacuacuacgccacguucuacuucaccaacgagcccgcguucaucaugcacguguccugguacaucauguucggccccaucgugccgaucuggaugaccugcgucuacaccguggccaugugcuuccggcacuucuucugggugcuggccuacuucagcaagaagcacgucgagguguucacggacggcaagcucaacugcagcuuccaggacgccgccuccaacaucuucgugaucaacaaggacaccuacgcggcccugcgcaacagccugaccaacgacgccuacucccgguuccucgggcuguucaacaaguacaaguacuucagcggcgccauggagaccgcggccuaccgcgaggccgccgccugccaccuggcgaaggcccuccagacguacuccgagaccgggagcgaccugcuguaccagccgcccaacugcuccaucaccagcggcguccuccagugaggacuaguuauaagacugacuagcccgaugggccucccaacgggcccuccuccccuccuugcaccgagauuaauaaaaaaaaaaaaaaaaaaaaaaaaaaaaaaaaaaaaaaaaaaaaaaaaaaaaaaaaaaaaaaaaugcaucccccccccccccccccccccccccccccccaaaggcucuuuucagagccaccagaauu

SEQ ID NO: 22035 - RNA, 1744 nt, Artificial Sequence
  MERS-CoV/Riyadh_14_2013__KJ156934.1__non-structural protein 4 (NSP4) mRNA gc
aggagaaagcuuaccauggcccccaccugguucaacgcccugcgcgacuucacccucaagggcuacgugcuggcgacgaucaucgucuuccugugcgccgugcucauguaccugugccugcccaccuucagcauggugcccgucgaguucuacgaggaccggauccucgacuucaaggugcuggacaacgggaucauccgcgacgugaaccccgacgacaagugcuucgccaacaagcaccgguccuucacccagugguaccacgagcacgucggcgggguguacgacaacagcaucacgugcccccugaccguggccgucaucgccggcguggcgggggcccgcaucccggacgugcccaccacccucgccugggucaacaaccagaucaucuucuucgugucccggguguucgccaacaccggcagcgucugcuacacgcccaucgacgagauccccuacaaguccuucagcgacuccggcugcauccugccgagcgagugcaccauguuccgcgacgcggaggggcggaugacccccuacugccacgaccccaccgugcugcccggcgccuucgccuacucccagaugcgcccgcacgugcgguacgaccucuacgacgggaacauguucaucaaguuccccgaggucguguucgagagcacgcugcgcaucacccggacccuguccacccaguacugccgcuucggcagcugcgaguacgcccaggagggggugugcaucacgaccaacggcuccugggccaucuucaacgaccaccaccucaaccggcccggcgucuacugcgggagcgacuucaucgacaucgugcgccggcuggcggugucccuguuccagcccaucaccuacuuccagcucaccacgagccugguccugggcaucgggcucugcgccuuccugacccuccuguucuacuacaucaacaaggugaagcgcgccuucgccgacuacacccagugcgccgucaucgcggugguggccgccguccugaacucccugugcaucugcuucguggccagcaucccgcucugcaucgugcccuacaccgcccuguacuacuacgcgacguucuacuucaccaacgagcccgccuucaucaugcacgucuccugguacaucauguucggccccaucgugccgaucuggaugaccugcguguacaccgucgccaugugcuuccggcacuucuucugggugcuggccuacuucagcaagaagcacguggaggucuucacggacggcaagcucaacugcagcuuccaggacgccgcguccaacaucuucgugaucaacaaggacaccuacgccgcccugcgcaacagccugaccaacgacgccuacucccgguuccucgggcuguucaacaaguacaaguacuucagcggcgcgauggagaccgccgccuaccgcgaggccgccgcgugccaccuggccaaggcccuccagacguacuccgagaccgggagcgaccugcuguaccagccgcccaacugcuccaucaccagcggcgugcuccagugaggacuaguuauaagacugacuagcccgaugggccucccaacgggcccuccuccccuccuugcaccgagauuaauaaaaaaaaaaaaaaaaaaaaaaaaaaaaaaaaaaaaaaaaaaaaaaaaaaaaaaaaaaaaaaaaugcaucccccccccccccccccccccccccccccccaaaggcucuuuucagagccaccagaauu

SEQ ID NO: 22036 - RNA, 1744 nt, Artificial Sequence; identical to SEQ ID NO: 22035
  MERS-CoV/England 1__NC_038294.1__non-structural protein 4 (NSP4) mRNA gc

SEQ ID NO: 22037 - RNA, 1723 nt, Artificial Sequence
  SARS-CoV/Tor2__NC_004718.3__non-structural protein 4 (NSP4) mRNA gc
aggagaaagcuuaccaugaagaucgugagcacgugcuucaagcugaugcucaaggccacccugcugugcguccucgccgcgcuggugugcuacaucgugaugcccguccacacccuguccauccacgacggcuacaccaacgagaucaucggguacaaggccauccaggacggcgugacccgcgacaucaucagcaccgacgacugcuucgccaacaagcacgccggguucgacgccugguucucccagcggggcgggagcuacaagaacgacaaguccugcccgguggucgcggccaucaucacgcgcgagaucggcuucaucgugcccggccuccccgggaccgugcugcgggccaucaacggcgacuuccugcacuuccucccccgcgucuucagcgccguggggaacaucugcuacaccccguccaagcugaucgaguacagcgacuucgcgaccuccgccugcgugcuggccgccgagugcacgaucuucaaggacgccaugggcaagcccguccccuacugcuacgacaccaaccuccuggaggggagcaucuccuacagcgagcugcggcccgacacccgcuacgugcucauggacggcuccaucauccaguucccgaacaccuaccuggagggcagcgugcgggucgugacgaccuucgacgcggaguacugccgccacgggaccugcgagcgguccgaggugggcaucugccugagcaccuccgggcgcuggguccucaacaacgagcacuaccgggcccugagcggcguguucugcggcguggacgccaugaaccugaucgccaacaucuucacgccccucguccagcccgugggggcccuggacguguccgcgagcgucguggccggcgggaucaucgccauccuggugaccugcgccgccuacuacuucaugaaguuccgccgggucuucggcgaguacaaccacguggucgcggccaacgcccuccuguuccugaugagcuucaccauccucugccuggugcccgccuacuccuuccugccggggguguacagcgucuucuaccucuaccugaccuucuacuucacgaacgacguguccuuccuggcccaccuccagugguucgcgauguucagccccaucgugcccuucuggaucaccgccaucuacgucuucugcaucucccugaagcacugccacugguucuucaacaacuaccugcgcaagcgggugauguucaacggcgugaccuucagcaccuucgaggaggccgcccucugcacguuccugcugaacaaggagauguaccucaagcugcgcuccgagacccugcucccccugacccaguacaaccgguaccuggcgcucuacaacaaguacaaguacuucagcggcgcccuggacaccacguccuaccgcgaggccgccugcugccaccuggccaaggcgcugaacgacuucagcaacuccggggccgacguccucuaccagccgccccagaccagcaucaccuccgccgugcugcagugaggacuaguuauaagacugacuagcccgaugggccucccaacgggcccuccuccccuccuugcaccgagauuaauaaaaaaaaaaaaaaaaaaaaaaaaaaaaaaaaaaaaaaaaaaaaaaaaaaaaaaaaaaaaaaaaugcaucccccccccccccccccccccccccccccccaaaggcucuuuucagagccaccagaauu

SEQ ID NO: 22038 - RNA, 1711 nt, Artificial Sequence
  HCoV/OC43__NC_006213.1__non-structural protein 4 (NSP4) mRNA gc
aggagaaagcuuaccauggccguguucagcuacuucgucuacgugugcuucgugcugucccucgucugcuucaucggccuguggugccugaugcccaccuacaccgugcacaagagcgacuuccagcuccccguguacgccuccuacaagguccuggacaacggggugauccgcgacgugagcgucgaggacgugugcuucgcgaacaaguucgagcaguucgaccagugguacgaguccacguucggccugagcuacuacuccaacagcauggccugccccaucguggucgccgugaucgaccaggacuucggguccaccguguucaacguccccaccaaggugcuccgguacggcuaccacgugcugcacuucaucacccacgcccugagcgccgacgggguccagugcuacacgccccacucccagaucagcuacuccaacuucuacgcgagcggcugcgugcucuccagcgccugcaccauguucaccauggccgacggcuccccgcagcccuacugcuacaccgaggggcugaugcagaacgccagccuguacuccagccucgugccccacguccgcuacaaccuggcgaacgccaagggcuucauccgguuccccgaggugcugcgcgaggggcucgugcggaucguccgcacgcggagcauguccuacugccgcgugggccugugcgaggaggccgacgaggggaucugcuucaacuucaacggcagcuggguccugaacaacgacuacuaccggucccucccgggcaccuucugcgggcgcgacguguucgaccugaucuaccagcuguucaagggccucgcccagcccguggacuuccuggcccugaccgcgagcuccaucgccggggccauccucgccgucaucguggugcuggucuucuacuaccugaucaagcucaagcgggccuucggcgacuacaccagcgugguguucgucaacgugaucguguggugcgucaacuucaugaugcuguucguguuccagguguaccccauccuguccugcgucuacgcgaucugcuacuucuacgccacgcucuacuuccccagcgagaucuccgugaucaugcaccuccaguggcuggugauguacggcaccaucaugccgcugugguucugccugcuguacaucgccgucguggugagcaaccacgccuucugggucuucuccuacugccgcaagcucgggaccagcgugcgguccgacggcaccuucgaggagauggcccugacgaccuucaugaucaccaaggacagcuacugcaagcugaagaacucccucagcgacguggcguucaaccgcuaccugucccuguacaacaaguaccgguacuacagcgggaagauggacaccgccgccuaccgcgaggccgccugcucccagcucgcgaaggccauggacacguucaccaacaacaacggcagcgacguccuguaccagccgcccaccgccagcguguccaccagcuuccugcagugaggacuaguuauaagacugacuagcccgaugggccucccaacgggcccuccuccccuccuugcaccgagauuaauaaaaaaaaaaaaaaaaaaaaaaaaaaaaaaaaaaaaaaaaaaaaaaaaaaaaaaaaaaaaaaaaugcaucccccccccccccccccccccccccccccccaaaggcucuuuucagagccaccagaauu

SEQ ID NO: 22039 - RNA, 1711 nt, Artificial Sequence
  HCoV/HKU1__NC_006577.2__non-structural protein 4 (NSP4) mRNA gc
aggagaaagcuuaccauggugguccugagcaaccuccuguacauccuguucuucgugucccucaucugcuucauccugcugugggcccuccugcccaccuacagcguguacaaguccgacauccaccuccccgccuacgcgagcuucaaggucaucgacaacggcguggugcgcgacaucuccgucaacgaccugugcuucgccaacaaguucuuccaguucgaccagugguacgagagcaccuucggguccguguacuaccacaacagcauggacugccccaucguggucgccgugauggacgaggacaucggcuccacgauguucaacgugcccaccaagguccugcggcacggguuccacgugcugcacuuccucaccuacgccuucgccagcgacuccgugcagugcuacacgccccacauccagaucagcuacaacgacuucuacgcguccggcugcguccugagcucccugugcaccauguucaagcgcggggacggcaccccgcaccccuacugcuacagcgacggcgugaugaagaacgccucccucuacaccagccuggugccccacacccgguacucccuggccaacagcaacggguucauccgcuuccccgacgucaucagcgagggcaucgugcggaucgugcgcacgcgguccaugaccuacugccgcgucggggccugcgaguacgcggaggagggcaucugcuucaacuucaacagcuccugggugcucaacaacgacuacuaccggagcaugccggggaccuucugcggccgcgaccuguucgaccuguucuaccaguucuucuccagccucauccggcccaucgacuucuucucccugaccgccagcuccaucuucggcgccauccuggccaucguggucgugcucgucuucuacuaccugaucaagcugaagcgcgccuucggggacuacacgagcgugguggucaucaacgugguggucuggugcaucaacuuccucaugcuguucguguuccagguguaccccaucugcgcgugcgucuacgccugcuucuacuucuacgugacccuguacuuccccuccgagaucagcgugaucaugcaccuccaguggaucgucauguacggcgccaucaugccguucugguucugcgugaccuacguggccauggucaucgccaaccacgugcuguggcuguucuccuacugccggaagaucggggugaacgucugcagcgacuccaccuucgaggagacgagccucaccaccuucaugaucaccaaggacuccuacugccgccugaagaacagcguguccgacguggcguacaaccgguaccugagccucuacaacaaguaccgcuacuacagcggcaagauggacacggccgccuaccgggaggccgccugcucccagcuggcgaaggccauggagaccuucaaccacaacaacggcaacgacguccuguaccagccgcccaccgccagcguguccaccagcuuccuccagugaggacuaguuauaagacugacuagcccgaugggccucccaacgggcccuccuccccuccuugcaccgagauuaauaaaaaaaaaaaaaaaaaaaaaaaaaaaaaaaaaaaaaaaaaaaaaaaaaaaaaaaaaaaaaaaaugcaucccccccccccccccccccccccccccccccaaaggcucuuuucagagccaccagaauu

SEQ ID NO: 22040 - RNA, 1666 nt, Artificial Sequence
  HCoV/229E/BN1/GER/2015__KU291448.1__non-structural protein 4 (NSP4) mRNA gc
aggagaaagcuuaccaugggcgacgccgggcacagccugaccuggcucuggcugcugugcggccucgugugccugauccaguucuaccugugcuucuucaugcccuacuucaugcacgacgucguguccagcuucgagggguacgacuucaaguacaucgagaacggccagcucaagaacuucgaggccccgcugaagugcgugcgcaacgucuucgagaacuucgaggacuggcacuacgcgaaguucggguucacgccccugaacaagcaguccugccccaucguggugggcgucagcgagaucgugaacacgguggccggcauccccuccaacgucuaccucguggggaagacccugaucuucacccugcaggccgccuucggcaacgccggggugugcuacgacaucuucggcgucaccacgccggagaagugcaucuucaccagcgcgugcacccggcucgaggggcugggcggcaacaacguguacugcuacaacaccgagcugauggaggggucccuccccuacagcuccauccaggccaacgccuacuacaaguacgacaacggcaacuucaucaagcugcccgaggugaucgcccagggguucggcuuccgcaccguccggaccaucgcgaccaaguacugccgcgugggcgagugcguggacagcaacgccggggucugcuucggcuucgacaagugguucgugaacgacgggcggguggccaacggcuacgucugcgggaccggccuguggaaccucguguucaacauccuguccauguucagcuccagcuucuccguggccgccaugagcggccagauccugcucaacugcgcgcugggggccuucgccaucuucugcugcuuccuggucacgaaguuccgccggauguucggcgaccucuccgugggggucugcaccgugguggucgccgugcugcugaacaacgugagcuacaucgucacccagaaccucgugaccaugaucgccuacgcgauccuguacuucuucgccacgcgcucccugcgguacgccuggaucuggugcgccgccuaccucaucgcguacaucagcuucgcccccugguggcugugcgccugguacuuccuggccaugcucaccggccugcugcccagccuccugaagcugaagguguccaccaaccucuucgagggggacaaguucgucggcaccuucgagagcgccgcggccggcacguucgugaucgacauccgcuccuacgagaagcuggccaacagcaucucccccgagaagcucaagagcuacgccgcguccuacaaccgguacaaguacuacagcgggaacgccaacgaggccgacuaccgcugcgccugcuacgccuaccuggcgaaggccaugcuggacuucucccgggaccacaacgacauccuguacaccccgcccaccgugagcuacggcuccacccuccagugaggacuaguuauaagacugacuagcccgaugggccucccaacgggcccuccuccccuccuugcaccgagauuaauaaaaaaaaaaaaaaaaaaaaaaaaaaaaaaaaaaaaaaaaaaaaaaaaaaaaaaaaaaaaaaaaugcaucccccccccccccccccccccccccccccccaaaggcucuuuucagagccaccagaauu

SEQ ID NO: 22041 - RNA, 1654 nt, Artificial Sequence
  HCoV/NL63/RPTEC/2004__JX504050.1__non-structural protein 4 (NSP4) mRNA gc
aggagaaagcuuaccaugggcuucaagcgcaccuacaacuuccugugguacgugugccucuucgucguggcccuguucaucggggugagcuucaucgacuacaccacgaccgucaccuccuuccacggcuacgacuucaaguacaucgagaacgggcagcugaagguguucgaggcgccccuccacugcgugcggaacgucuucgacaacuucaaccaguggcacgaggccaaguucggcguggugaccacgaacagcgacaagugccccaucgucguggggguguccgagcgcaucaacgucgugcccggcgugcccaccaacgucuaccuggugggcaagacccugguguucacccuccaggccgccuucgggaacacgggcgucugcuacgacuucgacggggugaccaccagcgacaagugcaucuucaacuccgccugcacccggcuggagggccucgggggcgacaacguguacugcuacaacacgggccucaucgaggggagcaagcccuacuccacccugcagccgaacgccuacuacaaguacgacgcgaagaacuacguccgcuuccccgagauccuggcccggggcuucgggcuccgcaccauccggacccuggccacgcgcuacugccgggugggcgagugccgcgacagccacaagggcgugugcuucggguucgacaagugguacgucaacgacggccggguggacgacggguacaucugcggcgacgggcugaucgaccuccuggucaacgugcuguccaucuucagcuccagcuucuccguggucgccaugagcggccacaugcuguucaacuuccuguucgcggccuucaucaccuuccugugcuuccucgugaccaaguucaagcgcguguucggcgaccuguccuacggggucuucaccguggugugcgccacgcugaucaacaacaucagcuacgucgugacccagaaccucuucuucaugcugcuguacgccauccucuacuucguguucacccggaccguccgcuacgccuggaucuggcacaucgcguacaucguggccuacuuccugcugauccccugguggcuccugacgugguucuccuucgccgccuuccuggagcuccugcccaacguguucaagcugaagaucagcacccagcuguucgagggcgacaaguucaucgggaccuucgaguccgccgcggccggcaccuucguccucgacaugcggagcuacgagcgccugaucaacacgaucagcccggagaagcucaagaacuacgccgccuccuacaacaaguacaaguacuacagcggguccgccagcgaggcggacuaccggugcgccugcuacgcccaccuggccaaggccaugcuggacuacgcgaaggaccacaacgacaugcucuacuccccgcccaccaucagcuacaacuccacccugcagugaggacuaguuauaagacugacuagcccgaugggccucccaacgggcccuccuccccuccuugcaccgagauuaauaaaaaaaaaaaaaaaaaaaaaaaaaaaaaaaaaaaaaaaaaaaaaaaaaaaaaaaaaaaaaaaaugcaucccccccccccccccccccccccccccccccaaaggcucuuuucagagccaccagaauu

SEQ ID NO: 22042 - RNA, 1723 nt, Artificial Sequence
  Bat SARS-like CoV/WIV1__KF367457.1__non-structural protein 4 (NSP4) mRNA gc
aggagaaagcuuaccaugaagaucgugagcaccugguucaagcugaugcucaaggccacccugcugugcgucaucgccacgcucgugugcuacaucgugaugcccguccacacccuguccgugcacgacggcuacaccaacgagaucaucggguacaaggcgauccaggacggcgugacccgcgacaucgucagcacggacgacugcuucgccaacaagcacgccggguucgacuccuggcugagccagcggggcggguccuacaagaacgacaagagcugccccgugguggccgccaucaucacccgcgagaucggcuucaucguccccggccuccccgggaccgugcugcgggcgaucaacggcgacuuccugcacuuccucccccgcguguucuccgccgucgggaacaucugcuacaccccgagcaagcugaucgaguacuccgacuucgccacgagcgccugcgugcuggcggccgagugcaccaucuucaaggacgccaugggcaagcccgugcccuacugcuacgacaccaaccuccuggagggguccaucagcuacuccgagcugcggcccgacacccgcuacguccucauggacggcagcaucauccaguucccgaacacguaccuggagggcuccgugcggguggucaccaccuucgacgccgaguacugccgccacgggaccugcgagcggagcgaggccggcaucugccuguccacgagcgggcgcugggugcucaacaacgagcacuaccgggcgcugcccggcguguucugcggcgucgacgccaugaaccugaucgccaacaucuucacgccccucgugcagcccgugggggcccuggacgucuccgccagcguggucgcgggcgggaucaucgccauccuggugaccugcgccgccuacuacuucaugaaguuccgccgggccuucggcgaguacaaccacguggucgcggccaacgcccuccuguuccugaugagcuucaccauccucugccuggccccggccuacuccuuccugcccgggguguacagcguguucuaccucuaccugaccuucuacuucaccaacgacgucuccuuccuggcgcaccuccagugguucgccauguucagccccaucgugcccuucuggaucaccgccaucuacguguucugcaucucccugaagcacugccacugguucuucaacaacuaccugcgcaagcgggucauguucaacggcgugaccuucagcacguucgaggaggccgcgcucugcaccuuccugcugaacaaggagauguaccucaagcugcgcuccgagacccugcucccgcugacccaguacaaccgguaccuggcccucuacaacaaguacaaguacuucagcggcgcccuggacacgaccuccuaccgcgaggccgccugcugccaccuggcgaaggcccugaacgacuucagcaacuccggggccgacgugcucuaccagccgccccagaccagcaucaccuccgccguccugcagugaggacuaguuauaagacugacuagcccgaugggccucccaacgggcccuccuccccuccuugcaccgagauuaauaaaaaaaaaaaaaaaaaaaaaaaaaaaaaaaaaaaaaaaaaaaaaaaaaaaaaaaaaaaaaaaaugcaucccccccccccccccccccccccccccccccaaaggcucuuuucagagccaccagaauu

SEQ ID NO: 22043 - RNA, 1705 nt, Artificial Sequence
  BatCoV/HKU9-1 BF_005I__NC_009021.1__non-structural protein 4 (NSP4) mRNA gc
aggagaaagcuuaccaugggccaccgccggaucgugagcuggcgccggguccugauccacguguucaugcuccuggugguccugaacccccagugguucaccccgugguacaucaugcgccccaucgaguacaacgugguggacuucaaggucaucgacaacgccgugauccgggacaucaccuccgccgaccagugcuucgcgaacaaguucagcgccuucgagaacugguacuccaaccgcuacgggagcuacgugaacucccggggcugccccauggucguggggguggucagcgacaucgugggcucccucgugcccgggcugccggcccgcuuccugcgggucggcacgacccuccugccccuggugaacuacggccucggggccgugggcagcgucugcuacaccccgcacuacgccaucaacuacgacguguucgacaccuccgcgugcgugcuggccgccacgugcacccuguucagcuccgccagcggggagcgcaugcccuacugcgcggacgccgcccucauccagaacgccucccgguacgacaugcugaagccccacgucauguaccccuucuacgagcacagcggcuacauccgcuuccccgaggugaucuccgccggggugcacaucguccggaccauggcgauggaguacugcaaggugggccgcugcgacgucagcgaggccggccugugcaugucccuccagccccgguggguggugaacaacgccuacuuccgccagcagagcggggucuacugcggcaccuccgccuucgaccuguucaugaacaugcugcucccgaucuucacgcccgugggggccguggacaucaccaccagcauccugaugggcgcgcugcucgccgucguggugagcaugucccuguacuaccugcuccgguuccgccgggccuucggcgacuacagcggggucaucuucaccaacauccuggccuucgugcugaacgugaucguccucugccuggagggccccuaccccaugcugccguccaucuacgccaugguguuccucuacgcgacgugcuacuucgggagcgacaucgccugcaugaugcacguguccuuccugaucauguucgccggcgucgugccccugugggugaccguccucuacaucguggugguccugagccgccacauccugugguucgccucccucugcaccaagcggaccguccaggugggggaccuggccuuccacagcuuccaggacgcggcccugcagacguucaugcucgacaaggagguguuccugcgccugaagcgcgagaucuccagcgacgccuacuucaaguaccucgccauguacaacaaguacaaguacuacuccggccccauggacaccgcggccuaccgggaggccgccugcagccaccuggugauggcccuggagaaguacuccaacggcgggggcgacaccaucuaccagcccccgcgcugcagcguggcguccgccgcccuccagugaggacuaguuauaagacugacuagcccgaugggccucccaacgggcccuccuccccuccuugcaccgagauuaauaaaaaaaaaaaaaaaaaaaaaaaaaaaaaaaaaaaaaaaaaaaaaaaaaaaaaaaaaaaaaaaaugcaucccccccccccccccccccccccccccccccaaaggcucuuuucagagccaccagaauu

SEQ ID NO: 22044 - RNA, 1666 nt, Artificial Sequence
  PEDV/NPL-PEDv/2013/P10__KJ778616.1__non-structural protein 4 (NSP4) mRNA gc
aggagaaagcuuaccauggccggccugcccagcuucuccaaggugaagaaguucuucugguuccucugccuguucaucgucgccguguucuucgcgcugagcuucuucgacuucuccacccaggugagcuccgacagcgacuacgacuucaaguacaucgaguccgggcagcucaagaccuucgacaacccgcugagcugcguccacaacguguucuccaacuucgaccaguggcacgacgccaaguucggcuucacgcccgugaacaaccccagcugccccaucgucguggggguguccgacgaggcccgcaccgucccgggcauccccgccgggguguaccuggccggcaagacccucguguucgcgaucaacaccaucuucggcacgagcgggcugugcuucgacgccuccggcgucgccgacaagggggccugcaucuucaacagcgcgugcaccacccuguccggccucgggggcaccgccguguacugcuacaagaacggccugguggagggggccaagcuguacagcgagcucgcgccccacuccuacuacaagauggucgacggcaacgccgugagccugcccgagaucaucucccggggguucggcauccgcacgauccggaccaaggccaugaccuacugccgcgugggccagugcguccagagcgccgagggggugugcuucggcgccgaccgguucuucguguacaacgccgagagcggguccgacuucgucugcggcaccgggcuguucacgcuccugaugaacgugaucagcguguucuccaagaccgucccggugaccguccugagcggccagauccucuucaacugcaucaucgccuucgcggccguggccgugugcuuccuguucaccaaguucaagcgcauguucggcgacauguccgucgggguguucacggugggcgccugcacccugcucaacaacgucagcuacaucgugacccagaacacccuggggaugcugggcuacgccacgcucuacuuccugugcaccaagggggugcgguacauguggaucuggcaccugggcuuccucaucuccuacauccugaucgcgcccugguggguccugaugguguacgccuucagcgccaucuucgaguucaugcccaaccucuucaagcugaagguguccacccagcuguucgagggcgacaaguucgucgggagcuucgagaacgccgccgcgggcaccuucgugcucgacaugcacgccuacgagcgccuggccaacuccaucagcacggagaagcugcggcaguacgccuccaccuacaacaaguacaaguacuacagcggguccgcgagcgaggccgacuaccgccucgccugcuucgcccaccuggccaaggcgaugauggacuacgccuccaaccacaacgacacccuguacacgcccccgaccgugagcuacaacuccacccuccagugaggacuaguuauaagacugacuagcccgaugggccucccaacgggcccuccuccccuccuugcaccgagauuaauaaaaaaaaaaaaaaaaaaaaaaaaaaaaaaaaaaaaaaaaaaaaaaaaaaaaaaaaaaaaaaaaugcaucccccccccccccccccccccccccccccccaaaggcucuuuucagagccaccagaauu

SEQ ID NO: 22045 - RNA, 1711 nt, Artificial Sequence
  MHV/A59__NC_048217.1__non-structural protein 4 (NSP4) mRNA gc
aggagaaagcuuaccauggccguguucagccgcaugcugcaguggcuguucgucgccaaccugaucugcuucaucgugcugugggcgcucaugcccaccuacgccgugcacaaguccgacaugcagcugccgcuguacgccagcuucaaggucaucgacaacggcgugcuccgggacguguccgucaccgacgccugcuucgccaacaaguucaaccaguucgaccagugguacgagagcacguucgggcuggcguacuaccgcaacuccaaggccugccccgugguggucgccgugaucgaccaggacaucggccacacccuguucaacgugcccaccaccguccuccgguacggguuccacgugcugcacuucaucacgcacgccuucgcgaccgacagcgugcagugcuacaccccgcacaugcagauccccuacgacaacuucuacgccuccggcugcguccugagcucccucugcaccaugcuggcccacgccgacgggacgccccaccccuacugcuacaccggcggcgugaugcacaacgccagccuguacuccagccucgcgccccacgugcgcuacaaccuggccuccagcaacggguacauccgguucccggaggucguguccgagggcaucgugcgcgucgugcggacccgcagcaugaccuacugccggguggggcugugcgaggaggccgaggagggcaucugcuucaacuucaaccgcuccuggguccucaacaaccccuacuaccgggccaugcccgggacguucugcggccgcaacgccuucgaccugauccaccaggugcugggcgggcucguccggcccaucgacuucuucgcgcugaccgccagcuccguggccggcgccauccuggccaucaucgugguccucgcguucuacuaccugaucaagcugaagcgcgccuucggggacuacaccagcgugguggucaucaacgugaucguguggugcaucaacuuccucaugcuguucgucuuccagguguacccgacccugagcugccucuacgccugcuucuacuucuacacgacccuguacuuccccuccgagaucagcguggucaugcaccuccaguggcucgugauguacggcgccaucaugccccugugguucugcaucaucuacguggccgucgugguguccaaccacgcgcuguggcuguucagcuacugccggaagaucggcaccgagguccgcuccgacgggaccuucgaggagauggcccucacgaccuucaugaucaccaaggagagcuacugcaagcugaagaacuccgugagcgacguggccuucaaccgguaccucucccuguacaacaaguaccgcuacuucagcggcaagauggacaccgccgcguaccgggaggccgccugcucccagcuggccaaggccauggagacguucaaccacaacaacgggaacgacguccucuaccagcccccgaccgcgagcgugaccaccuccuuccugcagugaggacuaguuauaagacugacuagcccgaugggccucccaacgggcccuccuccccuccuugcaccgagauuaauaaaaaaaaaaaaaaaaaaaaaaaaaaaaaaaaaaaaaaaaaaaaaaaaaaaaaaaaaaaaaaaaugcaucccccccccccccccccccccccccccccccaaaggcucuuuucagagccaccagaauu

SEQ ID NO: 22046 - RNA, 1723 nt, Artificial Sequence
  SARS-CoV-2/Wuhan-Hu-1__NC_045512.2/MN908947.2/EPI_ISL_402128__non -structural protein 4 (NSP4) mRNA gc R9942
aggagaaagcuuaccaugaagaucgugaacaacuggcugaagcagcucaucaaggucacccugguguuccuguucguggccgccaucuucuaccucaucacccccguccacgugaugagcaagcacacggacuucuccagcgagaucaucggcuacaaggcgaucgacgggggcgugacccgcgacaucgccuccaccgacacgugcuucgccaacaagcacgccgacuucgacaccugguucagccagcggggcggcuccuacaccaacgacaaggccugcccccugaucgcggccgucaucacccgcgaggugggguucgugguccccggccugcccggcaccauccuccggacgaccaacggggacuuccugcacuuccugccccgcguguucagcgccgugggcaacaucugcuacaccccguccaagcucaucgaguacaccgacuucgccacgagcgcgugcguccuggccgccgagugcaccaucuucaaggacgccuccgggaagcccgugcccuacugcuacgacaccaacgugcuggagggcagcgucgccuacgagucccuccggcccgacacccgcuacgugcugauggacgggagcaucauccaguucccgaacacguaccuggagggcuccgugcgggucgugaccaccuucgacagcgaguacugccgccacgggaccugcgagcgguccgaggcgggggugugcgucagcacguccggccgcugggugcucaacaacgacuacuaccggagccugcccgggguguucugcggcgucgacgccgugaaccugcucaccaacauguucacgccccugauccagcccaucggcgcccuggacaucuccgccagcaucgucgccgggggcaucguggcgaucguggugaccugccucgccuacuacuucaugcgcuuccggcgcgccuucggggaguacagccacgucguggccuucaacacccugcuguuccucauguccuucaccguccugugccugaccccgguguacagcuuccuccccggcguguacuccgucaucuaccuguaccugaccuucuaccucacgaacgacgugagcuuccuggcccacauccaguggauggugauguucacgccccugguccccuucuggaucaccaucgcguacaucaucugcaucuccaccaagcacuucuacugguucuucagcaacuaccucaagcggcgcgugguguucaacggggucuccuucagcaccuucgaggaggccgcccugugcaccuuccugcucaacaaggagauguaccugaagcugcgguccgacgugcuccugccgcugacccaguacaaccgcuaccucgcccuguacaacaaguacaaguacuucagcggcgccauggacaccacguccuaccgggaggcggccugcugccaccuggccaaggcccucaacgacuucagcaacuccggcagcgacgugcuguaccagccgccccagaccuccaucaccagcgcgguccugcagugaggacuaguuauaagacugacuagcccgaugggccucccaacgggcccuccuccccuccuugcaccgagauuaauaaaaaaaaaaaaaaaaaaaaaaaaaaaaaaaaaaaaaaaaaaaaaaaaaaaaaaaaaaaaaaaaugcaucccccccccccccccccccccccccccccccaaaggcucuuuucagagccaccagaauu

SEQ ID NO: 22047 - RNA, 1723 nt, Artificial Sequence
  SARS-CoV-2__MT919775.1__non-structural protein 4 (NSP4) mRNA gc
aggagaaagcuuaccaugaagaucgugaacaacuggcugaagcagcucaucaaggucacccugguguuccuguucguggccgccaucuucuaccucaucacccccguccacgugaugagcaagcacacggacuucuccagcgagaucaucggcuacaaggcgaucgacgggggcgugacccgcgacaucgccuccaccgacacgugcuucgccaacaagcacgccgacuucgacaccugguucagccagcggggcggcuccuacaccaacgacaaggccugcccccugaucgcggccgucaucacccgcgaggugggguucgugguccccggccugcccggcaccauccuccggacgaccaacggggacuuccugcacuuccugccccgcguguucagcgccgugggcaacaucugcuacaccccguccaagcucaucgaguacaccgacuucgccacgagcgcgugcguccuggccgccgagugcaccaucuucaaggacgccuccgggaagcccgugcccuacugcuacgacaccaacgugcuggagggcagcgucgccuacgagucccuccggcccgacacccgcuacgugcugauggacgggagcaucauccaguucccgaacacguaccuggagggcuccgugcgggucgugaccaccuucgacagcgaguacugccgccacgggaccugcgagcgguccgaggcgggggugugcgucagcacguccggccgcugggugcucaacaacgacuacuaccggagccugcccgggguguucugcggcgucgacgccgugaaccugcucaccaacauguucacgccccugauccagcccaucggcgcccuggacaucuccgccagcaucgucgccgggggcaucguggcgaucguggugaccugccucgccuacuacuucaugcgcuuccggcgcgucuucggggaguacagccacguggucgccuucaacacccugcuguuccucauguccuucaccgugcugugccugaccccgguguacagcuuccuccccggcgucuacuccgugaucuaccuguaccugaccuucuaccucacgaacgacgugagcuuccuggcccacauccaguggauggucauguucacgccccuggugcccuucuggaucaccaucgccuacaucaucugcaucuccaccaagcacuucuacugguucuucagcaacuaccucaagcggcgcguggucuucaacgggguguccuucagcaccuucgaggaggcggcccugugcaccuuccugcucaacaaggagauguaccugaagcugcgguccgacgugcuccugccgcugacccaguacaaccgcuaccucgcccuguacaacaaguacaaguacuucagcggcgccauggacaccacguccuaccgggaggccgcgugcugccaccuggccaaggcccucaacgacuucagcaacuccggcagcgacguccuguaccagccgccccagaccuccaucaccagcgccgugcugcagugaggacuaguuauaagacugacuagcccgaugggccucccaacgggcccuccuccccuccuugcaccgagauuaauaaaaaaaaaaaaaaaaaaaaaaaaaaaaaaaaaaaaaaaaaaaaaaaaaaaaaaaaaaaaaaaaugcaucccccccccccccccccccccccccccccccaaaggcucuuuucagagccaccagaauu

SEQ ID NO: 22048 - RNA, 1723 nt, Artificial Sequence
  SARS-CoV-2__MT919788.1__non-structural protein 4 (NSP4) mRNA gc
aggagaaagcuuaccaugaagaucgugaacaacuggcugaagcagcucaucaaggucacccugguguuccuguucguggccgccaucuucuaccucaucacccccguccacgugaugagcaagcacacggacuucuccagcgagaucaucggcuacaaggcgaucgacgggggcgugacccgcgacaucgccuccaccgacacgugcuucgccaacaagcacgccgacuucgacaccugguucagccagcggggcggcuccuacaccaacgacaaggccugcccccugaucgcggccgucaucacccgcgaggugggguucgugguccccggccugcccggcaccauccuccggacgaccaacggggacuuccugcacuuccugccccgcguguucagcgccgugggcaacaucugcuacaccccguccaagcucaucgaguacaccgacuucgccacgagcgcgugcguccuggccgccgagugcaccaucuucaaggacgccuccgggaagcccgugcccuacugcuacgacaccaacgugcuggagggcagcgucgccuacgagucccuccggcccgacacccgcuacgugcugauggacgggagcaucauccaguucccgaacacguaccuggagggcuccgugcgggucgugaccaccuucgacagcgaguacugccgccacgggaccugcgagcgguccgaggcgggggugugcgucagcacguccggccgcugggugcucaacaacgacuacuaccggagccugcccgggguguucugcggcgucgacgccgugaaccugcucaccaacauguucacgccccugauccagcccaucggcgcccuggacaucuccgccagcaucgucgccgggggcaucguggcgaucguggugaccugccucgccuacuacuucaugcgcuuccggcgcgccuucggggaguacagccacgucguggccuucaacacccugcuguuccucauguccuucaccguccugugccugaccccgguguacagcuuccuccccggcguguacuccgucaucuaccuguaccugaccuucuaccucacgaacgacgugagcuuccuggcccacauccaguggauggugauguucacgccccugguccccuucuggaucaccaucgcguacaucaucugcaucuccaccaagcacuucuacugguucuucagcaacuaccucaagcggcgcgugguguucaacggggucuccuucggcaccuucgaggaggccgcccugugcaccuuccugcucaacaaggagauguaccugaagcugcggagcgacgugcuccugccgcugacccaguacaaccgcuaccucgcccuguacaacaaguacaaguacuucuccggcgccauggacaccacgagcuaccgggaggcggccugcugccaccuggccaaggcccucaacgacuucuccaacagcggguccgacgugcuguaccagccgccccagaccagcaucaccuccgcgguccugcagugaggacuaguuauaagacugacuagcccgaugggccucccaacgggcccuccuccccuccuugcaccgagauuaauaaaaaaaaaaaaaaaaaaaaaaaaaaaaaaaaaaaaaaaaaaaaaaaaaaaaaaaaaaaaaaaaugcaucccccccccccccccccccccccccccccccaaaggcucuuuucagagccaccagaauu

SEQ ID NO: 22049 - RNA, 1723 nt, Artificial Sequence
  SARS-CoV-2__MT920024.1__non-structural protein 4 (NSP4) mRNA gc
aggagaaagcuuaccaugaagaucgugaacaacuggcugaagcagcucaucaaggucacccugguguuccuguucguggccgccaucuucuaccucaucacccccguccacgugaugagcaagcacacggacuucuccagcgagaucaucggcuacaaggcgaucgacgggggcgugacccgcgacaucgccuccaccgacacgugcuucgccaacaagcacgccgacuucgacaccugguucagccagcgggggugcuccuacaccaacgacaaggccugcccccugaucgcggccgucaucacccgcgaggugggcuucgugguccccgggcugcccggcaccauccuccggacgaccaacggcgacuuccugcacuuccugccccgcguguucagcgccguggggaacaucugcuacaccccguccaagcucaucgaguacaccgacuucgccacgagcgcgugcguccuggccgccgagugcaccaucuucaaggacgccuccggcaagcccgugcccuacugcuacgacaccaacgugcuggaggggagcgucgccuacgagucccuccggcccgacacccgcuacgugcugauggacggcagcaucauccaguucccgaacacguaccuggagggguccgugcgggucgugaccaccuucgacagcgaguacugccgccacgggaccugcgagcgguccgaggcgggcgugugcgucagcacguccggccgcugggugcucaacaacgacuacuaccggagccugcccggcguguucugcggggucgacgccgugaaccugcucaccaacauguucacgccccugauccagcccaucggcgcccuggacaucuccgccagcaucgucgccggcgggaucguggcgaucguggugaccugccucgccuacuacuucaugcgcuuccggcgcgccuucggcgaguacagccacgucguggccuucaacacccugcuguuccucauguccuucaccguccugugccugaccccgguguacagcuuccuccccgggguguacuccgucaucuaccuguaccugaccuucuaccucacgaacgacgugagcuuccuggcccacauccaguggauggugauguucacgccccugguccccuucuggaucaccaucgcguacaucaucugcaucuccaccaagcacuucuacugguucuucagcaacuaccucaagcggcgcgugguguucaacggcgucuccuucagcaccuucgaggaggccgcccugugcaccuuccugcucaacaaggagauguaccugaagcugcgguccgacgugcuccugccgcugacccaguacaaccgcuaccucgcccuguacaacaaguacaaguacuucagcggggccauggacaccacguccuaccgggaggcggccugcugccaccuggccaaggcccucaacgacuucagcaacuccggcagcgacgugcuguaccagccgccccagaccuccaucaccagcgcgguccugcagugaggacuaguuauaagacugacuagcccgaugggccucccaacgggcccuccuccccuccuugcaccgagauuaauaaaaaaaaaaaaaaaaaaaaaaaaaaaaaaaaaaaaaaaaaaaaaaaaaaaaaaaaaaaaaaaaugcaucccccccccccccccccccccccccccccccaaaggcucuuuucagagccaccagaauu

SEQ ID NO: 22050 - RNA, 1723 nt, Artificial Sequence
  SARS-CoV-2__MT913038.1__non-structural protein 4 (NSP4) mRNA gc
aggagaaagcuuaccaugaagaucgugaacaacuggcugaagcagcucaucaaggucacccugguguuccuguucguggccgccaucuucuaccucaucacccccguccacgugaugagcaagcacacggacuucuccagcgagaucaucggcuacaaggcgaucgacgggggcgugacccgcgacaucgccuccaccgacacgugcuucgccaacaagcacgccgacuucgacaccugguucagccagcggggcggcuccuacaccaacgacaaggccugcccccugaucgcggccgucaucacccgcgaggugggguucgugguccccggccugcccggcaccauccuccggaucacgaacggggacuuccugcacuuccugccccgcguguucagcgccgugggcaacaucugcuacaccccguccaagcucaucgaguacaccgacuucgccaccagcgcgugcguccuggccgccgagugcacgaucuucaaggacgccuccgggaagcccgugcccuacugcuacgacaccaacgugcuggagggcagcgucgccuacgagucccuccggcccgacacccgcuacgugcugauggacgggagcaucauccaguucccgaacaccuaccuggagggcuccgugcgggucgugacgaccuucgacagcgaguacugccgccacgggaccugcgagcgguccgaggcgggggugugcgucagcaccuccggccgcugggugcucaacaacgacuacuaccggagccugcccgggguguucugcggcgucgacgccgugaaccugcucacgaacauguucacgccccugauccagcccaucggcgcccuggacaucuccgccagcaucgucgccgggggcaucguggcgaucguggugaccugccucgccuacuacuucaugcgcuuccggcgcgccuucggggaguacagccacgucguggccuucaacacccugcuguuccucauguccuucaccguccugugccugaccccgguguacagcuuccuccccggcguguacuccgucaucuaccuguaccugaccuucuaccucaccaacgacgugagcuuccuggcccacauccaguggauggugauguucacgccccugguccccuucuggaucaccaucgcguacaucaucugcaucuccaccaagcacuucuacugguucuucagcaacuaccucaagcggcgcgugguguucaacggggucuccuucagcaccuucgaggaggccgcccugugcacguuccugcucaacaaggagauguaccugaagcugcgguccgacgugcuccugccgcugacccaguacaaccgcuaccucgcccuguacaacaaguacaaguacuucagcggcgccauggacaccaccuccuaccgggaggcggccugcugccaccuggccaaggcccucaacgacuucagcaacuccggcagcgacgugcuguaccagccgccccagacguccaucaccagcgcgguccugcagugaggacuaguuauaagacugacuagcccgaugggccucccaacgggcccuccuccccuccuugcaccgagauuaauaaaaaaaaaaaaaaaaaaaaaaaaaaaaaaaaaaaaaaaaaaaaaaaaaaaaaaaaaaaaaaaaugcaucccccccccccccccccccccccccccccccaaaggcucuuuucagagccaccagaauu

SEQ ID NO: 22051 - RNA, 1723 nt, Artificial Sequence
  SARS-CoV-2__MT913046.1__non-structural protein 4 (NSP4) mRNA gc
aggagaaagcuuaccaugaagaucgugaacaacuggcugaagcagcucaucaaggucacccugguguuccuguucguggccgccaucuucuaccucaucacccccguccacgugaugagcaagcacacggacuucuccagcgagaucaucggcuacaaggcgaucgacgggggcgugacccgcgacaucgccuccaccgacacgugcuucgccaacaagcacgccgacuucgacaccugguucagccagcggggcggcuccuacaccaacgacaaggccugcccccugaucgcggccgucaucacccgcgaggugggguucgugguccccggccugcccggcaccauccuccggacgaccaacggggacuuccugcacuuccugccccgcguguucagcgccgugggcaacaucugcuacaccccguccaagcucaucgaguacaccgacuucgccacgagcgcgugcguccuggccgccgagugcaccaucuucaaggacgccuccgggaagcccgugcccuacugcuacgacaccaacgugcuggagggcagcgucgccuacgagucccuccggcccgacacccgcuacgugcugauggacgggagcaucauccaguucccgaacacguaccuggagggcuccgugcgggucgugaccaccuucgacagcgaguacugccgccacgggaccugcgagcgguccgaggcgggggugugcgucagcacguccggccgcugggugcucaacaacgacuacuaccggagccugcccgggguguucugcggcgucgacgccgugaaccugcucaccaacauguucacgccccugauccagcccaucggcgcccuggacaucuccgccagcaucgucgccgggggcaucguggcgaucguggugaccugccucgccuacuacuucaugcgcuuccggcgcgccuucggggaguacagccacgucguggccuucaacacccugcugcuccugauguccuucaccguccugugccucaccccgguguacagcuuccugcccggcguguacuccgucaucuaccuguaccucaccuucuaccugacgaacgacgugagcuuccuggcccacauccaguggauggugauguucacgccccucguccccuucuggaucaccaucgcguacaucaucugcaucuccaccaagcacuucuacugguucuucagcaacuaccugaagcggcgcgugguguucaacggggucuccuucagcaccuucgaggaggccgcccugugcaccuuccuccugaacaaggagauguaccugaagcuccgguccgacgugcugcugccgcucacccaguacaaccgcuaccuggcccuguacaacaaguacaaguacuucagcggcgccauggacaccacguccuaccgggaggcggccugcugccaccucgccaaggcccugaacgacuucagcaacuccggcagcgacgugcuguaccagccgccccagaccuccaucaccagcgcgguccugcagugaggacuaguuauaagacugacuagcccgaugggccucccaacgggcccuccuccccuccuugcaccgagauuaauaaaaaaaaaaaaaaaaaaaaaaaaaaaaaaaaaaaaaaaaaaaaaaaaaaaaaaaaaaaaaaaaugcaucccccccccccccccccccccccccccccccaaaggcucuuuucagagccaccagaauu

SEQ ID NO: 22052 - RNA, 1723 nt, Artificial Sequence
  SARS-CoV-2__MT913061.1__non-structural protein 4 (NSP4) mRNA gc
aggagaaagcuuaccaugaagaucgugaacaacuggcugaagcagcucaucaaggucacccugguguuccuguucguggccgccaucuucuaccucaucacccccguccacgugaugagcaagcacacggacuucuccagcgagaucaucggcuacaaggcgaucgacgggggcgugacccgcgacaucgccuccaccgacacgugcuucgccaacaagcacgccgacuucgacaccugguucagccagcgcgggggcuccuacaccaacgacaaggccugcccccugaucaccgcggucaucacccgggaggugggguucgugguccccggccugcccggcacgauccuccggaccaccaacggggacuuccugcacuuccugccccgcguguucagcgccgugggcaacaucugcuacaccccguccaagcucaucgaguacacggacuucgccaccagcgccugcguccuggcggccgagugcaccaucuucaaggacgccuccgggaagcccgugcccuacugcuacgacaccaacgugcuggagggcagcgucgccuacgagucccuccggcccgacacgcgcuacgugcugauggacgggagcaucauccaguucccgaacaccuaccuggagggcuccgugcgggucgugaccaccuucgacagcgaguacugccgccacggcacgugcgagcgguccgaggccggggugugcgucagcaccuccggccgcugggugcucaacaacgacuacuaccggagccugcccgggguguucugcggcgucgacgcggugaaccugcucaccaacauguucaccccgcugauccagcccaucggcgcccuggacaucuccgccagcaucgucgccgggggcaucguggccaucguggucacgugccucgcguacuacuucaugcgcuuccggcgcgccuucggggaguacagccacgugguggccuucaacacccugcuguuccucauguccuucaccguccugugccugacccccguguacagcuuccuccccggcguguacuccgucaucuaccuguaccugacguucuaccucaccaacgacgugagcuuccuggcccacauccaguggauggugauguucacgccccugguccccuucuggaucaccaucgccuacaucaucugcaucuccaccaagcacuucuacugguucuucagcaacuaccucaagcggcgcgugguguucaacggggucuccuucagcaccuucgaggaggcggcccugugcaccuuccugcucaacaaggagauguaccugaagcugcgguccgacgugcuccugccgcugacccaguacaaccgcuaccucgcccuguacaacaaguacaaguacuucagcggcgccauggacacgaccuccuaccgggaggccgcgugcugccaccuggccaaggcccucaacgacuucagcaacuccggcagcgacgugcuguaccagccgccccagaccuccaucaccagcgccguccugcagugaggacuaguuauaagacugacuagcccgaugggccucccaacgggcccuccuccccuccuugcaccgagauuaauaaaaaaaaaaaaaaaaaaaaaaaaaaaaaaaaaaaaaaaaaaaaaaaaaaaaaaaaaaaaaaaaugcaucccccccccccccccccccccccccccccccaaaggcucuuuucagagccaccagaauu

SEQ ID NO: 22053 - RNA, 1723 nt, Artificial Sequence
  SARS-CoV-2__MT913095.1__non-structural protein 4 (NSP4) mRNA gc
aggagaaagcuuaccaugaagaucgugaacaacuggcugaagcagcucaucaaggucacccugguguuccuguucguggccgccaucuucuaccucaucacccccguccacgugaugagcaagcacacggacuucuccagcgagaucaucggcuacaaggcgaucgacgggggcgugacccgcgacaucgccuccaccgacacgugcuucgccaacaagcacgccgacuucgacaccugguucagccagcggggcggcuccuacaccaacgacaaggccugcccccugaucgcggccgucaucacccgcgaggugggguucgugguccccggccugcccggcaccauccuccggacgaccaacggggacuuccugcacuuccugccccgcguguucagcgccgugggcaacaucugcuacaccccguccaagcucaucgaguacaccgacuucgccacgagcgcgugcguccuggccgccgagugcaccaucuucaaggacgccuccgggaagcccgugcccuacugcuacgacaccaacgugcuggagggcagcgucgccuacgagucccuccggcccgacacccgcuacgugcugauggacgggagcaucauccaguucccgaacacguaccuggagggcuccgugcgggucgugaccaccuucgacagcgaguacugccgccacgggaccugcgagcgguccgaggcgggggugugcgucagcacguccggccgcugggugcucaacaacgacuacuaccggagccugcccgggguguucugcggcgucgacgccgugaaccugcucaccaacauguucacgccccugauccagcccaucggcgcccuggacaucuccgccagcaucgucgccgggggcaucguggcgaucguggugaccugccucgccuacuacuucaugcgcuuccggcgcgccuucggggaguacagccacgucguggccuucaacacccugcuguuccucauguccuucaccguccugugccugaccccgguguacagcuuccuccccggcguguacuccgucaucuaccuguaccugaccuucuaccucacgaacgacgugagcuuccuggcccacauccaguggauggugauguucacgccccugguccccuucuggaucaccaucgcguacaucaucugcaucuccaccaagcacuucuacugguucuucagcaacuaccucaagcggcgcgugguguucaacggggucuccuucagcaccuucgaggaggccgcccugugcaccuuccugcucaacaaggagauguaccugaagcugcgguccgacgugcuccugccgcugacccaguacaaccgcuaccucgccuucuacaacaaguacaaguacuucagcggcgccauggacaccacguccuaccgggaggcggccugcugccaccuggccaaggcccugaacgacuucagcaacuccggcagcgacgugcucuaccagccgccccagaccuccaucaccagcgcgguccugcagugaggacuaguuauaagacugacuagcccgaugggccucccaacgggcccuccuccccuccuugcaccgagauuaauaaaaaaaaaaaaaaaaaaaaaaaaaaaaaaaaaaaaaaaaaaaaaaaaaaaaaaaaaaaaaaaaugcaucccccccccccccccccccccccccccccccaaaggcucuuuucagagccaccagaauu

SEQ ID NO: 22054 - RNA, 1723 nt, Artificial Sequence
  SARS-CoV-2__MT913100.1__non-structural protein 4 (NSP4) mRNA gc
aggagaaagcuuaccaugaagaucgugaacaacuggcugaagcagcucaucaaggucacccugguguuccuguucguggccgccaucuucuaccucaucacccccguccacgugaugagcaagcacacggacuucuccagcgagaucaucggcuacaaggcgaucgacgggggcgugacccgcgacaucgccuccaccgacacgugcuucgccaacaagcacgccgacuucgacaccugguucagccagcggggcggcuccuacaccaacgacaaggccugcccccugaucgcggccgucaucacccgcgaggugggguucgugguccccggccugcccggcaccauccuccggacgaccaacggggacuuccugcacuuccugccccgcguguucagcgccgugggcaacaucugcuacaccccguccaagcucaucgaguacaccgacuucgccacgagcgcgugcguccuggccgccgagugcaccaucuucaaggacgccuccgggaagcccgugcccuacugcuacgacaccaacgugcuggagggcagcgucgccuacgagucccuccggcccgacacccgcuacgugcugauggacgggagcaucauccaguucccgaacacguaccuggagggcuccgugcgggucgugaccaccuucgacagcgaguacugccgccacgggaccugcgagcgguccgaggcgggggugugcgucagcacguccggccgcugggugcucaacaacgacuacuaccggagccugcccgggguguucugcggcgucgacgccgugaaccugcucaccaacauguucacgccccugauccagcccaucggcgcccuggacaucuccgccagcaucgucgccgggggcaucguggcgaucguggugaccugccucgccuacuacuucaugcgcuuccggcgcgccuucggggaguacagccacgucguggccuucaacacccugcuguuccucauguccuucaccguccugugccugaccccgguguacagcuuccuccccggcguguacuccgucaucuaccuguaccugaccuucuaccucacgaacgacgugagcuuccuggcccacauccaguggauggugauguucacgccccugguccccuucuggaucaccaucguguacaucaucugcaucuccaccaagcacuucuacugguucuucagcaacuaccucaagcggcgcguggucuucaacgggguguccuucagcaccuucgaggaggcggcccugugcaccuuccugcucaacaaggagauguaccugaagcugcgguccgacgugcuccugccgcugacccaguacaaccgcuaccucgcccuguacaacaaguacaaguacuucagcggcgccauggacaccacguccuaccgggaggccgcgugcugccaccuggccaaggcccucaacgacuucagcaacuccggcagcgacguccuguaccagccgccccagaccuccaucaccagcgccgugcugcagugaggacuaguuauaagacugacuagcccgaugggccucccaacgggcccuccuccccuccuugcaccgagauuaauaaaaaaaaaaaaaaaaaaaaaaaaaaaaaaaaaaaaaaaaaaaaaaaaaaaaaaaaaaaaaaaaugcaucccccccccccccccccccccccccccccccaaaggcucuuuucagagccaccagaauu

SEQ ID NO: 22055 - RNA, 1723 nt, Artificial Sequence
  SARS-CoV-2__MT913141.1__non-structural protein 4 (NSP4) mRNA gc
aggagaaagcuuaccaugaagaucgugaacaacuggcugaagcagcucaucaaggucacccugguguuccuguucguggccgccaucuucuaccucaucacccccguccacgugaugagcaagcacaacgacuucuccagcgagaucaucggcuacaaggcgaucgacgggggcgugacgcgcgacaucgccuccaccgacacgugcuucgccaacaagcacgccgacuucgacaccugguucagccagcggggcggcuccuacaccaacgacaaggccugcccccugaucgcggccgucaucacccgcgaggugggguucgugguccccggccugcccggcaccauccuccggaccacgaacggggacuuccugcacuuccugccccgcguguucagcgccgugggcaacaucugcuacaccccguccaagcucaucgaguacaccgacuucgccaccagcgcgugcguccuggccgccgagugcacgaucuucaaggacgccuccgggaagcccgugcccuacugcuacgacaccaacgugcuggagggcagcgucgccuacgagucccuccggcccgacacccgcuacgugcugauggacgggagcaucauccaguucccgaacaccuaccuggagggcuccgugcgggucgugacgaccuucgacagcgaguacugccgccacgggaccugcgagcgguccgaggcgggggugugcgucagcaccuccggccgcugggugcucaacaacgacuacuaccggagccugcccgggguguucugcggcgucgacgccgugaaccugcucacgaacauguucacgccccugauccagcccaucggcgcccuggacaucuccgccagcaucgucgccgggggcaucguggcgaucguggugaccugccucgccuacuacuucaugcgcuuccggcgcgccuucggggaguacagccacgucguggccuucaacacccugcuguuccucauguccuucaccguccugugccugaccccgguguacagcuuccuccccggcguguacuccgucaucuaccuguaccugaccuucuaccucaccaacgacgugagcuuccuggcccacauccaguggauggugauguucacgccccugguccccuucuggaucaccaucgcguacaucaucugcaucuccaccaagcacuucuacugguucuucagcaacuaccucaagcggcgcgugguguucaacggggucuccuucagcaccuucgaggaggccgcccugugcacguuccugcucaacaaggagauguaccugaagcugcgguccgacgugcuccugccgcugacccaguacaaccgcuaccucgcccuguacaacaaguacaaguacuucagcggcgccauggacaccaccuccuaccgggaggcggccugcugccaccuggccaaggcccucaacgacuucagcaacuccggcagcgacgugcuguaccagccgccccagacguccaucaccagcgcgguccugcagugaggacuaguuauaagacugacuagcccgaugggccucccaacgggcccuccuccccuccuugcaccgagauuaauaaaaaaaaaaaaaaaaaaaaaaaaaaaaaaaaaaaaaaaaaaaaaaaaaaaaaaaaaaaaaaaaugcaucccccccccccccccccccccccccccccccaaaggcucuuuucagagccaccagaauu

SEQ ID NO: 22056 - RNA, 1723 nt, Artificial Sequence
  SARS-CoV-2__MT907515.1__non-structural protein 4 (NSP4) mRNA gc
aggagaaagcuuaccaugaagaucgugaacaacuggcugaagcagcucaucaaggucacccugguguuccuguucguggccgccaucuucuaccucaucacccccguccacgugaugagcaagcacacggacuucuccagcgagaucaucggcuacaaggcgaucgacgggggcgugacccgcgacaucgccuccaccgacacgugcuucgccaacaagcacgccgacuucgacaccugguucagccagcggggcggcuccuacaccaacgacaaggccugcccccugaucgcggccgucaucacccgcgaggugggguucgugguccccggccugcccggcaccauccuccggacgaccaacggggacuuccugcacuuccugccccgcguguucagcgccgugggcaacaucugcuacaccccguccaagcucaucgaguacaccgacuucgccacgagcgcgugcguccuggccgccgagugcaccaucuucaaggacgccuccgggaagcccgugcccuacugcuacgacaccaacgugcuggagggcagcgucgccuacgagucccuccggcccgacacccgcuacgugcugauggacgggagcaucauccaguucccgaacacguaccuggagggcuccgugcgggucgugaccaccuucgacagcgaguacugccgccacgggaccugcgagcgguccgaggcgggggugugcgucagcacguccggccgcugggugcucaacaacgacuacuaccggagccugcccgggguguucugcggcgucgacgccgugaaccugcucaccaacauguucacgccccugauccagcccaucggcgcccuggacaucuccgccagcaucgucgccgggggcaucguggcgaucguggugaccugccucgccuacuacuucaugcgcuuccggcgcgccuacggggaguacagccacgucguggccuucaacacccugcuguuccucauguccuucaccguccugugccugaccccgguguacagcuuccuccccggcguguacuccgucaucuaccuguaccugaccuucuaccucacgaacgacgugagcuuccuggcccacauccaguggauggugauguucacgccccugguccccuucuggaucaccaucgcguacaucaucugcaucuccaccaagcacuucuacugguucuucagcaacuaccucaagcggcgcgugguguucaacggggucuccuucagcaccuucgaggaggccgcccugugcaccuuccugcucaacaaggagauguaccugaagcugcgguccgacgugcuccugccgcugacccaguacaaccgcuaccucgcccuguacaacaaguacaaguacuucagcggcgccauggacaccacguccuaccgggaggcggccugcugccaccuggccaaggcccucaacgacuucagcaacuccggcagcgacgugcuguaccagccgccccagaccuccaucaccagcgcgguccugcagugaggacuaguuauaagacugacuagcccgaugggccucccaacgggcccuccuccccuccuugcaccgagauuaauaaaaaaaaaaaaaaaaaaaaaaaaaaaaaaaaaaaaaaaaaaaaaaaaaaaaaaaaaaaaaaaaugcaucccccccccccccccccccccccccccccccaaaggcucuuuucagagccaccagaauu

SEQ ID NO: 22057 - RNA, 1723 nt, Artificial Sequence
  SARS-CoV-2__MT907517.1__non-structural protein 4 (NSP4) mRNA gc
aggagaaagcuuaccaugaagaucgugaacaacuggcugaagcagcucaucaaggucacccugguguuccuguucguggccgccaucuucuaccucaucacccccguccacgugaugagcaagcacacggacuucuccagcgagaucaucggcuacaaggcgaucgacgggggcgugacccgcgacaucgccuccaccgacacgugcuucgccaacaagcacgccgacuucgacaccugguucagccagcggggcggcuccuacaccaacgacaaggccugcccccugaucgcggccgucaucacccgcgaggugggguucgugguccccggccugcccggcaccauccuccggacgaccaacggggacuuccugcacuuccugccccgcguguucagcgccgugggcaacaucugcuacaccccguccaagcucaucgaguacaccgacuucgccacgagcgcgugcguccuggccgccgagugcaccaucuucaaggacgccuccgggaagcccgugcccuacugcuacgacaccaacgugcuggagggcagcgucgccuacgagucccuccggcccgacacccgcuacgugcugauggacgggagcaucauccaguucccgaacacguaccuggagggcuccgugcgggucgugaccaccuucgacagcgaguacugccgccacgggaccugcgagcgguccgaggcgggggugugcgucagcacguccggccgcugggugcucaacaacgacuacuaccggagccugcccgggguguucugcggcgucgacgccgugaaccugcucaccaacauguccacgccccugauccagcccaucggcgcccuggacaucagcgccagcaucgucgccgggggcaucguggcgaucguggugaccugccucgccuacuacuucaugcgcuuccggcgcgccuucggggaguacucccacgucguggccuucaacacccugcuguuccucaugagcuucaccguccugugccugaccccgguguacuccuuccuccccggcguguacagcgucaucuaccuguaccugaccuucuaccucacgaacgacguguccuuccuggcccacauccaguggauggugauguucacgccccugguccccuucuggaucaccaucgcguacaucaucugcaucagcaccaagcacuucuacugguucuucuccaacuaccucaagcggcgcgugguguucaacggggucagcuucuccaccuucgaggaggccgcccugugcaccuuccugcucaacaaggagauguaccugaagcugcggagcgacgugcuccugccgcugacccaguacaaccgcuaccucgcccuguacaacaaguacaaguacuucuccggcgccauggacaccacgagcuaccgggaggcggccugcugccaccuggccaaggcccucaacgacuucuccaacagcggcuccgacgugcuguaccagccgccccagaccagcaucaccuccgcgguccugcagugaggacuaguuauaagacugacuagcccgaugggccucccaacgggcccuccuccccuccuugcaccgagauuaauaaaaaaaaaaaaaaaaaaaaaaaaaaaaaaaaaaaaaaaaaaaaaaaaaaaaaaaaaaaaaaaaugcaucccccccccccccccccccccccccccccccaaaggcucuuuucagagccaccagaauu

SEQ ID NO: 22058 - RNA, 1723 nt, Artificial Sequence
  SARS-CoV-2__MT890294.1__non-structural protein 4 (NSP4) mRNA gc
aggagaaagcuuaccaugaagaucgugaacaacuggcugaagcagcucaucaaggucacccugguguuccuguucguggccgccaucuucuaccucaucacccccguccacgugaugagcaagcacacggacuucuccagcgagaucaucggcuacaaggcgaucgacgggggcgugacccgcgacaucgccuccaccgacacgugcuucgccaacaagcacgccgacuucgacaccugguucagccagcggggcggcuccuacaccaacgacaaggccugcccccugaucgcggccgucaucacccgcgaggugggguucgugguccccggccugcccggcaccauccuccggacgaccaacggggacuuccugcacuuccugccccgcguguucagcgccgugggcaacaucugcuacaccccguccaagcucaucgaguacaccgacuucgccacgagcgcgugcguccuggccgccgagugcaccaucuucaaggacgccuccgggaagcccgugcccuacugcuacgacaccaacgugcuggagggcagcgucgccuacgagucccuccggcccgacacccgcuacgugcugauggacgggagcaucauccaguucccgaacacgcaccuggagggcuccgugcgggucgugaccaccuucgacagcgaguacugccgccacgggaccugcgagcgguccgaggcgggggugugcgucagcacguccggccgcugggugcucaacaacgacuacuaccggagccugcccgggguguucugcggcgucgacgccgugaaccugcucaccaacauguucacgccccugauccagcccaucggcgcccuggacaucuccgccagcaucgucgccgggggcaucguggcgaucguggugaccugccucgccuacuacuucaugcgcuuccggcgcgccuucggggaguacagccacgucguggccuucaacacccugcuguuccucauguccuucaccguccugugccugaccccgguguacagcuuccuccccggcguguacuccgucaucuaccuguaccugaccuucuaccucacgaacgacgugagcuuccuggcccacauccaguggauggugauguucacgccccugguccccuucuggaucaccaucgcguacaucaucugcaucuccaccaagcacuucuacugguucuucagcaacuaccucaagcggcgcgugguguucaacggggucuccuucagcaccuucgaggaggccgcccugugcaccuuccugcucaacaaggagauguaccugaagcugcgguccgacgugcuccugccgcugacccaguacaaccgcuaccucgcccuguacaacaaguacaaguacuucagcggcgccauggacaccacguccuaccgggaggcggccugcugccaccuggccaaggcccucaacgacuucagcaacuccggcagcgacgugcuguaccagccgccccagaccuccaucaccagcgcgguccugcagugaggacuaguuauaagacugacuagcccgaugggccucccaacgggcccuccuccccuccuugcaccgagauuaauaaaaaaaaaaaaaaaaaaaaaaaaaaaaaaaaaaaaaaaaaaaaaaaaaaaaaaaaaaaaaaaaugcaucccccccccccccccccccccccccccccccaaaggcucuuuucagagccaccagaauu

SEQ ID NO: 22059 - RNA, 1723 nt, Artificial Sequence
  SARS-CoV-2__MT893001.1__non-structural protein 4 (NSP4) mRNA gc
aggagaaagcuuaccaugaagaucgugaacaacuggcugaagcagcucaucaaggucacccugguguuccuguucguggccgccaucuucuaccucaucacccccguccacgugaugagcaagcacacggacuucuccagcgagaucaucggcuacaaggcgaucgacgggggcgugacccgcgacaucgccuccaccgacacgugcuucgccaacaagcacgccgacuucgacaccugguucagccagcggggcggcuccuacaccaacgacaaggccugcccccugaucgcggccgucaucacccgcgaggugggguucgugguccccggccugcccggcaccauccuccggacgaccaacggggacuuccugcacuuccugccccgcguguucagcgccgugggcaacaucugcuacaccccguccaagcucaucgaguacaccgacuucgccacgagcgcgugcguccuggccgccgagugcaccaucuucaaggacgccuccgggaagcccgugcccuacugcuacgacaccaacgugcuggagggcagcgucgccuacgagucccuccggcccgacacccgcuacgugcugauggacgggagcaucauccaguucccgaacacguaccuggagggcuccgugcgggucgugaccaccuucgacagcgaguacugccgccacgggaccugcgagcgguccgaggcgggggugugcgucagcacguccggccgcugggugcucaacaacgacuacuaccggagccugcccgggguguucugcggcgucgacgccgugaaccugcucaccaacauguucacgccccugauccagcccaucggcgcccuggacaucuccgccagcaucgucgccgggggcaucguggcgaucguggugaccugccucgccuacuacuucaugcgcuuccggcgcgccuucggggaguacagccacgucguggccuucaacacccugcuguuccucauguccuucaccguccugugccugaccccgguguaccucuuccugcccggcguguacagcgucaucuaccuguaccucaccuucuacuucacgaacgacguguccuuccuggcccacauccaguggauggugauguucacgccccugguccccuucuggaucaccaucgcguacaucaucugcaucagcaccaagcacuucuacugguucuucuccaacuaccucaagcggcgcgugguguucaacggggucagcuucuccaccuucgaggaggccgcccugugcaccuuccugcucaacaaggagauguaccugaagcugcggagcgacgugcuccugccgcugacccaguacaaccgcuaccucgcccuguacaacaaguacaaguacuucuccggcgccauggacaccacgagcuaccgggaggcggccugcugccaccuggccaaggcccucaacgacuucuccaacagcggcuccgacgugcuguaccagccgccccagaccagcaucaccuccgcgguccugcagugaggacuaguuauaagacugacuagcccgaugggccucccaacgggcccuccuccccuccuugcaccgagauuaauaaaaaaaaaaaaaaaaaaaaaaaaaaaaaaaaaaaaaaaaaaaaaaaaaaaaaaaaaaaaaaaaugcaucccccccccccccccccccccccccccccccaaaggcucuuuucagagccaccagaauu

SEQ ID NO: 22060 - RNA, 1723 nt, Artificial Sequence
  SARS-CoV-2__MT893008.1__non-structural protein 4 (NSP4) mRNA gc
aggagaaagcuuaccaugaagaucgugaacaacuggcugaagcagcucaucaaggucacccugguguuccuguucguggccgccaucuucuaccucaucacccccguccacgugaugagcaagcacacggacuucuccaucgagaucaucggcuacaaggcgaucgacgggggcgugacccgcgacaucgccagcaccgacacgugcuucgccaacaagcacgccgacuucgacaccugguucucccagcggggcggcagcuacaccaacgacaaggccugcccccugaucgcggccgucaucacccgcgaggugggguucgugguccccggccugcccggcaccauccuccggacgaccaacggggacuuccugcacuuccugccccgcguguucuccgccgugggcaacaucugcuacaccccgagcaagcucaucgaguacaccgacuucgccacguccgcgugcguccuggccgccgagugcaccaucuucaaggacgccagcgggaagcccgugcccuacugcuacgacaccaacgugcuggagggcuccgucgccuacgagagccuccggcccgacacccgcuacgugcugauggacggguccaucauccaguucccgaacacguaccuggagggcagcgugcgggucgugaccaccuucgacuccgaguacugccgccacgggaccugcgagcggagcgaggcgggggugugcgucuccacgagcggccgcugggugcucaacaacgacuacuaccggucccugcccgggguguucugcggcgucgacgccgugaaccugcucaccaacauguucacgccccugauccagcccaucggcgcccuggacaucagcgccuccaucgucgccgggggcaucguggcgaucguggugaccugccucgccuacuacuucaugcgcuuccggcgcgccuucggggaguacagccacgucguggccuucaacacccugcuguuccucaugagcuucaccguccugugccugaccccgguguacuccuuccuccccggcguguacagcgucaucuaccuguaccugaccuucuaccucacgaacgacguguccuuccuggcccacauccaguggauggugauguucacgccccugguccccuucuggaucaccaucgcguacaucaucugcaucagcaccaagcacuucuacugguucuucuccaacuaccucaagcggcgcgugguguucaacggggucagcuucuccaccuucgaggaggccgcccugugcaccuuccugcucaacaaggagauguaccugaagcugcggagcgacgugcuccugccgcugacccaguacaaccgcuaccucgcccuguacaacaaguacaaguacuucuccggcgccauggacaccacgagcuaccgggaggcggccugcugccaccuggccaaggcccucaacgacuucuccaacagcggcuccgacgugcuguaccagccgccccagaccagcaucaccuccgcgguccugcagugaggacuaguuauaagacugacuagcccgaugggccucccaacgggcccuccuccccuccuugcaccgagauuaauaaaaaaaaaaaaaaaaaaaaaaaaaaaaaaaaaaaaaaaaaaaaaaaaaaaaaaaaaaaaaaaaugcaucccccccccccccccccccccccccccccccaaaggcucuuuucagagccaccagaauu

SEQ ID NO: 22061 - RNA, 1723 nt, Artificial Sequence
  SARS-CoV-2__MT873055.1__non-structural protein 4 (NSP4) mRNA gc
aggagaaagcuuaccaugaagaucgugaacaacuggcugaagcagcucaucaaggucacccugguguuccuguucguggccgccaucuucuaccucaucacccccguccacgugaugagcaagcacacggacuucuccagcgagaucaucggcuacaaggcgaucgacgggggcgugacccgcgacaucgccuccaccgacacgugcuucgccaacaagcacgccgacuucgacaccugguucagccagcggggcggcuccuacaccaacgacaaggccugcccccugaucgcggccgucaucacccgcgagguggggaucgugguccccggccugcccggcaccauccuccggacgaccaacggggacuuccugcacuuccugccccgcguguucagcgccgugggcaacaucugcuacaccccguccaagcucaucgaguacaccgacuucgccacgagcgcgugcguccuggccgccgagugcaccaucuucaaggacgccuccgggaagcccgugcccuacugcuacgacaccaacgugcuggagggcagcgucgccuacgagucccuccggcccgacacccgcuacgugcugauggacgggagcaucauccaguucccgaacacguaccuggagggcuccgugcgggucgugaccaccuucgacagcgaguacugccgccacgggaccugcgagcgguccgaggcgggggugugcgucagcacguccggccgcugggugcucaacaacgacuacuaccggagccugcccgggguguucugcggcgucgacgccgugaaccugcucaccaacauguucacgccccugauccagcccaucggcgcccuggacaucuccgccagcaucgucgccgggggcaucguggcgaucguggugaccugccucgccuacuacuucaugcgcuuccggcgcgccuucggggaguacagccacgucguggccuucaacacccugcuguuccucauguccuucaccguccugugccugaccccgguguacagcuuccuccccggcguguacuccgucaucuaccuguaccugaccuucuaccucacgaacgacgugagcuuccuggcccacauccaguggauggugauguucacgccccugguccccuucuggaucaccaucgcguacaucaucugcaucuccaccaagcacuucuacugguucuucagcaacuaccucaagcggcgcgugguguucaacggggucuccuucagcaccuucgaggaggccgcccugugcaccuuccugcucaacaaggagauguaccugaagcugcgguccgacgugcuccugccgcugacccaguacaaccgcuaccucgcccuguacaacaaguacaaguacuucagcggcgccauggacaccacguccuaccgggaggcggccugcugccaccuggccaaggcccucaacgacuucagcaacuccggcagcgacgugcuguaccagccgccccagaccuccaucaccagcgcgguccugcagugaggacuaguuauaagacugacuagcccgaugggccucccaacgggcccuccuccccuccuugcaccgagauuaauaaaaaaaaaaaaaaaaaaaaaaaaaaaaaaaaaaaaaaaaaaaaaaaaaaaaaaaaaaaaaaaaugcaucccccccccccccccccccccccccccccccaaaggcucuuuucagagccaccagaauu

SEQ ID NO: 22062 - RNA, 1723 nt, Artificial Sequence
  SARS-CoV-2__MT873076.1__non-structural protein 4 (NSP4) mRNA gc
aggagaaagcuuaccaugaagaucgugaacaacuggcugaagcagcucaucaaggucacccugguguuccuguucguggccgccaucuucuaccucaucacccccguccacgugaugagcaagcacacggacuucuccagcgagaucaucggcuacaaggcgaucgacgggggcgugacccgcgacaucgccuccaccgacacgugcuucgccaacaagcacgccgacuucgacaccugguucagccagcggggcggcuccuacaccaacgacaaggccugcccccugaucgcggccgucaucacccgcgaggugggguucgugguccccggccugcccggcaccauccuccggacgaccaacggggacuuccugcacuuccugccccgcguguucagcgccgugggcaacaucugcuacaccccguccaagcucaucgaguacaccgacuucgccacgagcgcgugcguccuggccgccgagugcaccaucuucaaggacgccuccgggaagcccgugcccuacugcuacgacaccaacgugcuggagggcagcgucgccuacgagucccuccggcccgacacccgcuacgugcugauggacgggagcaucauccaguucccgaacacguaccuggagggcuccgugcgggucgugaccaccuucgacagcgaguacugccgccacgggaccugcgagcgguccgaggcgggggugugcgucagcacguccggccgcugggugcucaacaacgacuacuaccggagccugcccgggguguucugcggcgucgacgccgugaaccugcucaccaacauguucacgccccugauccagcccaucggcgcccuggacaucuccgccagcaucgucgccgggggcaucguggcgaucguggucaucugccucgccuacuacuucaugcgcuuccggcgcgccuucggggaguacagccacgugguggccuucaacacccugcuguuccucauguccuucaccguccugugccugaccccgguguacagcuuccuccccggcguguacuccgucaucuaccuguaccugaccuucuaccucaccaacgacgugagcuuccuggcccacauccaguggauggugauguucacgccccugguccccuucuggaucaccaucgcguacaucaucugcaucuccaccaagcacuucuacugguucuucagcaacuaccucaagcggcgcgugguguucaacggggucuccuucagcaccuucgaggaggccgcccugugcacguuccugcucaacaaggagauguaccugaagcugcgguccgacgugcuccugccgcugacccaguacaaccgcuaccucgcccuguacaacaaguacaaguacuucagcggcgccauggacaccaccuccuaccgggaggcggccugcugccaccuggccaaggcccucaacgacuucagcaacuccggcagcgacgugcuguaccagccgccccagacguccaucaccagcgcgguccugcagugaggacuaguuauaagacugacuagcccgaugggccucccaacgggcccuccuccccuccuugcaccgagauuaauaaaaaaaaaaaaaaaaaaaaaaaaaaaaaaaaaaaaaaaaaaaaaaaaaaaaaaaaaaaaaaaaugcaucccccccccccccccccccccccccccccccaaaggcucuuuucagagccaccagaauu

SEQ ID NO: 22063 - RNA, 1723 nt, Artificial Sequence
  SARS-CoV-2__MT873134.1__non-structural protein 4 (NSP4) mRNA gc
aggagaaagcuuaccaugaagaucgugaacaacuggcugaagcagcucaucaaggucacccugguguuccuguucguggccgccaucuucuaccucaucacccccguccacgugaugagcaagcacacggacuucuccagcgagaucaucggcuacaaggcgaucgacgggggcgugacccgcgacaucgccuccaccgacacgugcuucgccaacaagcacgccgacuucgacaccugguucagccagcggggcggcuccuacaccaacgacaaggccugcccccugaucgcggccgucaucacccgcgaggugggguucgugguccccggccugcccggcaccauccuccggacgaccaacggggacuuccugcacuuccugccccgcguguucagcgccgugggcaacaucugcuacaccccguccaagcucaucgaguacaccgacuucgccacgagcgcgugcguccuggccgccgagugcaccaucuucaaggacgccuccgggaagcccgugcccuacugcuacgacaccaacgugcuggagggcagcgucgccuacgagucccuccggcccgacacccgcuacgugcugauggacgggagcaucauccaguucccgaacacguaccuggagggcuccgugcgggucgugaccaccuucgacagcgaguacugccgccacgggaccugcgagcgguccgaggcgggggugugcgucagcacguccggccgcugggugcucaacaacgacuacuaccggagccugcccgggguguucugcggcgucgacgccgugaaccugcucaccaacauguucacgccccugauccagcccaucggcgcccuggacaucuccgccagcaucgucgccgggggcaucguggcgaucguggugaccugccucgccuacuacuucaugcgcuuccggcgcgccuucggggucuacagccacguggucgccuucaacacccugcuguuccucauguccuucaccgugcugugccugaccccgguguacagcuuccuccccggcgucuacuccgugaucuaccuguaccugaccuucuaccucacgaacgacgugagcuuccuggcccacauccaguggauggucauguucacgccccuggugcccuucuggaucaccaucgcguacaucaucugcaucuccaccaagcacuucuacugguucuucagcaacuaccucaagcggcgcguggucuucaacgggguguccuucagcaccuucgaggaggccgcccugugcaccuuccugcucaacaaggagauguaccugaagcugcgguccgacgugcuccugccgcugacccaguacaaccgcuaccucgcccuguacaacaaguacaaguacuucagcggcgccauggacaccacguccuaccgggaggcggccugcugccaccuggccaaggcccucaacgacuucagcaacuccggcagcgacguccuguaccagccgccccagaccuccaucaccagcgcggugcugcagugaggacuaguuauaagacugacuagcccgaugggccucccaacgggcccuccuccccuccuugcaccgagauuaauaaaaaaaaaaaaaaaaaaaaaaaaaaaaaaaaaaaaaaaaaaaaaaaaaaaaaaaaaaaaaaaaugcaucccccccccccccccccccccccccccccccaaaggcucuuuucagagccaccagaauu

SEQ ID NO: 22064 - RNA, 1723 nt, Artificial Sequence
  SARS-CoV-2__MT873140.1__non-structural protein 4 (NSP4) mRNA gc
aggagaaagcuuaccaugaagaucgugaacaacuggcugaagcagcucaucaaggucacccugguguuccuguucguggccgccaucuucuaccucaucacccccguccacgugaugagcaagcacacggacuucuccagcgagaucaucggcuacaaggcgaucgacgggggcgugacccgcgacaucgccuccaccgacacgugcuucgccaacaagcacgccgacuucgacaccugguucagccagcggggcggcuccuacaccaacgacaaggccugcccccugaucgcggccgucaucacccgcgaggugggguucgugguccccggccugcccggcaccauccuccggacgaccaacggggacuuccugcacuuccugccccgcguguucagcgccgugggcaacaucugcuacaccccguccaagcucaucgaguacaccgacuucgccacgagcgcgugcguccuggccgccgagugcaccaucuucaaggacgccuccgggaagcccgugcccuacugcuacgacaccaacgugcuggagggcagcgucgccuacgagucccuccggcccgacacccgcuacgugcugauggacgggagcaucauccaguucccgaacacguaccuggagggcuccgugcgggucgugaccaccuucgacagcgaguacugccgccacgggaccugcgagcgguccgaggcgggggugugcgucagcacguccggccgcugggugcucaacaacgacuacuaccggagccugcccgggguguucugcggcgucgacgccgugaaccugcucaccaacauguucaccccgcugauccagcccaucggcgcccuggacaucuccgccagcaucgucgccgggggcaucguggcgaccguggucacgugccucgccuacuacuucaugcgcuuccggcgcgccuucggggaguacagccacgugguggccuucaacacccugcuguuccucauguccuucaccguccugugccugacccccguguacagcuuccuccccggcguguacuccgucaucuaccuguaccugacguucuaccucaccaacgacgugagcuuccuggcccacauccaguggauggugauguucacgccccugguccccuucuggaucaccaucgcguacaucaucugcaucuccaccaagcacuucuacugguucuucagcaacuaccucaagcggcgcgugguguucaacggggucuccuucagcaccuucgaggaggccgcccugugcaccuuccugcucaacaaggagauguaccugaagcugcgguccgacgugcuccugccgcugacccaguacaaccgcuaccucgcccuguacaacaaguacaaguacuucagcggcgccauggacacgaccuccuaccgggaggcggccugcugccaccuggccaaggcccucaacgacuucagcaacuccggcagcgacgugcuguaccagccgccccagaccuccaucaccagcgcgguccugcagugaggacuaguuauaagacugacuagcccgaugggccucccaacgggcccuccuccccuccuugcaccgagauuaauaaaaaaaaaaaaaaaaaaaaaaaaaaaaaaaaaaaaaaaaaaaaaaaaaaaaaaaaaaaaaaaaugcaucccccccccccccccccccccccccccccccaaaggcucuuuucagagccaccagaauu

SEQ ID NO: 22065 - RNA, 1723 nt, Artificial Sequence
  SARS-CoV-2__MT873324.1__non-structural protein 4 (NSP4) mRNA gc
aggagaaagcuuaccaugaagaucgugaacaacuggcugaagcagcucaucaaggucacccugguguuccuguucguggccgccaucuucuaccucaucacccccguccacgugaugagcaagcacacggacuucuccagcgagaucaucggcuacaaggcgaucgacgggggcgugacccgcgacaucgccuccaccgacacgugcuucgccaacaagcacgccgacuucgacaccugguucagccagcggggcggcuccuacaccaacgacaaggccugcccccugaucgcggccgucaucacccgcgaggugggguucgugguccccggccugcccggcaccauccuccggacgaccaacggggacuuccugcacuuccugccccgcguguucagcgccgugggcaacaucugcuacaccccguccaagcucaucgaguacaccgacuucgccacgagcgcgugcguccuggccgccgagugcaccaucuucaaggacgccuccgggaagcccgugcccuacugcuacgacaccaacgugcuggagggcagcgucgccuacgagucccuccggcccgacacccgcuacgugcugauggacgggagcaucauccaguucccgaacacguaccuggagggcuccgugcgggucgugaccaccuucgacagcgaguacugccgccacgggaccugcgagcgguccgaggcgggggugugcgucagcacguccggccgcugggugcucaacaacgacuacuaccggagccugcccgggguguucugcggcgucgacgccgugaaccugcucaccaacauguucacgccccugauccagcccaucggcgcccuggacaucuccgccagcaucgucgccgggggcaucguggcgaucguggugaccugccucgccuacuacuucaugcgcuuccggcgcgccuucggggaguacagccacgucguggccuucaacacccugcuguuccucauguccuucaccguccugugccugaccccgguguacagcuuccuccccggcguguacuccaucaucuaccuguaccugaccuucuaccucacgaacgacgucagcuuccuggcccacauccaguggauggugauguucacgccccuggugcccuucuggaucaccaucgcguacaucaucugcaucuccaccaagcacuucuacugguucuucagcaacuaccucaagcggcgcgucguguucaacgggguguccuucagcaccuucgaggaggccgcccugugcaccuuccugcucaacaaggagauguaccugaagcugcgguccgacguccuccugccgcugacccaguacaaccgcuaccucgcccuguacaacaaguacaaguacuucagcggcgccauggacaccacguccuaccgggaggcggccugcugccaccuggccaaggcccucaacgacuucagcaacuccggcagcgacgugcuguaccagccgccccagaccuccaucaccagcgcggugcugcagugaggacuaguuauaagacugacuagcccgaugggccucccaacgggcccuccuccccuccuugcaccgagauuaauaaaaaaaaaaaaaaaaaaaaaaaaaaaaaaaaaaaaaaaaaaaaaaaaaaaaaaaaaaaaaaaaugcaucccccccccccccccccccccccccccccccaaaggcucuuuucagagccaccagaauu

SEQ ID NO: 22066 - RNA, 1723 nt, Artificial Sequence
  SARS-CoV-2__MT873454.1__non-structural protein 4 (NSP4) mRNA gc
aggagaaagcuuaccaugaagaucgugaacaacuggcugaagcagcucaucaaggucacccugguguuccuguucguggccgccaucuucuaccucaucacccccguccacgugaugagcaagcacacggacuucuccagcgagaucaucggcuacaaggcgaucgacgggggcgugacccgcgacaucgccuccaccgacacgugcuucgccaacaagcacgccgacuucgacaccugguucagccagcggggcggcuccuacaccaacgacaaggccugcccccugaucgcggccgucaucacccgcgaggugggguucgugguccccggccugcccggcaccauccuccggacgaccaacggggacuuccugcacuuccugccccgcguguucagcgccgugggcaacaucugcuacaccccguccaagcucaucgaguacaccgacuucgccacgagcgcgugcguccuggccgccgagugcaccaucuucaaggacgccuccgggaagcccgugcccuacugcuacgacaccaacgugcuggagggcagcgucgccuacgagucccuccggcccgacacccgcuacgugcugauggacgggagcaucauccaguucccgaacacguaccuggagggcuccgugcgggucgugaccaccuucgacagcgaguacugccgccacgggaccugcgagcgguccgaggcgggggugugcgucagcacguccggccgcugggugcucaacaacgacuacuaccggagccugcccgggguguucugcggcgucgacgccgugaaccugcucaccaacauguucacgccccugauccagcccaucggcgcccuggacaucuccgccagcaucgucgccgggggcaucguggcgaucguggugaccugccucgccuacuacuucaugcgcuuccggcgcgccuucggggaguacagccacgucguggccuucaacacccugcuguuccucauguccuucaccguccugugccugaccccgguguacagcuuccuccccggcguguacuccgucaucuaccuguaccugaccuucuaccucacgaacgacgugagcuuccuggcccacauccaguggauggugauguucacgccccugguccccuucuggaucaccaucgcguacaucaucugcaucuccaccaagcacuucuacugguucuucagcaacuaccucaagcggcgcgugguguucaacggggucuccuucagcaccuucgaggaggccgcccugugcaccuuccugcucaacaaggagauguaccugaagcugcgguccgacgugcuccugccgcugacccaguacaaccgcuaccucgcccuguacaacaaguacaaguacuucagcggcgccauggacaccacguccuaccgggaggcggccugcugccaccuggugaaggcccucaacgacuucagcaacuccggcagcgacguccuguaccagccgccccagaccuccaucaccagcgccgugcugcagugaggacuaguuauaagacugacuagcccgaugggccucccaacgggcccuccuccccuccuugcaccgagauuaauaaaaaaaaaaaaaaaaaaaaaaaaaaaaaaaaaaaaaaaaaaaaaaaaaaaaaaaaaaaaaaaaugcaucccccccccccccccccccccccccccccccaaaggcucuuuucagagccaccagaauu

SEQ ID NO: 22067 - RNA, 1723 nt, Artificial Sequence
  SARS-CoV-2__MT877304.1__non-structural protein 4 (NSP4) mRNA gc
aggagaaagcuuaccaugaagaucgugaacaacuggcugaagcagcucaucaaggucacccugguguuccuguucguggccgucaucuucuaccucaucacccccgugcacgugaugagcaagcacacggacuucuccagcgagaucaucggcuacaaggccaucgacgggggcgucacccgcgacaucgcguccaccgacacgugcuucgccaacaagcacgccgacuucgacaccugguucagccagcggggcggcuccuacaccaacgacaaggccugcccccugaucgccgcggugaucacccgcgaggugggguucgucgugcccggccugcccggcaccauccuccggacgaccaacggggacuuccugcacuuccugccccgcguguucagcgccgucggcaacaucugcuacaccccguccaagcucaucgaguacaccgacuucgccacgagcgccugcgugcuggcggccgagugcaccaucuucaaggacgccuccgggaagcccgugcccuacugcuacgacaccaacguccuggagggcagcguggccuacgagucccuccggcccgacacccgcuacgugcugauggacgggagcaucauccaguucccgaacacguaccuggagggcuccguccggguggugaccaccuucgacagcgaguacugccgccacgggaccugcgagcgguccgaggccggggucugcgugagcacguccggccgcugggugcucaacaacgacuacuaccggagccugcccggggucuucugcggcguggacgcggucaaccugcucaccaacauguucacgccccugauccagcccaucggcgcccuggacaucuccgccagcaucguggccgggggcaucguggccaucgucgugaccugccucgcguacuacuucaugcgcuuccggcgcgccuucggggaguacagccacguggucgccuucaacacccugcuguuccucauguccuucaccgugcugugccugaccccgguguacagcuuccuccccggcgucuacuccgugaucuaccuguaccugaccuucuaccucacgaacgacgugagcuuccuggcccacauccaguggauggucauguucacgccccuggugcccuucuggaucaccaucgccuacaucaucugcaucuccaccaagcacuucuacugguucuucagcaacuaccucaagcggcgcguggucuucaacgggguguccuucagcaccuucgaggaggcggcccugugcaccuuccugcucaacaaggagauguaccugaagcugcgguccgacgugcuccugccgcugacccaguacaaccgcuaccucgcccuguacaacaaguacaaguacuucagcggcgccauggacaccacguccuaccgggaggccgcgugcugccaccuggccaaggcccucaacgacuucagcaacuccggcagcgacguccuguaccagccgccccagaccuccaucaccagcgccgugcugcagugaggacuaguuauaagacugacuagcccgaugggccucccaacgggcccuccuccccuccuugcaccgagauuaauaaaaaaaaaaaaaaaaaaaaaaaaaaaaaaaaaaaaaaaaaaaaaaaaaaaaaaaaaaaaaaaaugcaucccccccccccccccccccccccccccccccaaaggcucuuuucagagccaccagaauu

SEQ ID NO: 22068 - RNA, 1723 nt, Artificial Sequence
  SARS-CoV-2__MT877329.1__non-structural protein 4 (NSP4) mRNA gc
aggagaaagcuuaccaugaagaucgugaacaacuggcugaagcagcucaucaaggucacccugguguuccuguucguggccgccaucuucuaccucaucacccccguccacgugaugagcaagcacacggacuucuccagcgagaucaucggcuacaaggcgaucgacgggggcgugacccgcgacaucgccuccaccgacacgugcuucgccaacaagcacgccgacuucgacaccugguucagccagcggggcggcuccuacaccaacgacaaggccugcccccugaucgcggccgucaucacccgcgaggugggguucgugguccccggccugcccggcaccauccuccggacgaccaacggggacuuccugcacuuccugccccgcguguucagcgccgugggcaacaucugcuacaccccguccaagcucaucgaguacaccgacuucgccacgagcgcgugcguccuggccgccgagugcaccaucuucaaggacgccuccgggaagcccgugcccuacugcuacgacaccaacgugcuggagggcagcgucgccuacgagucccuccggcccaacacccgcuacgugcugauggacgggagcaucauccaguucccgaacacguaccuggagggcuccgugcgggucgugaccaccuucgacagcgaguacugccgccacgggaccugcgagcgguccgaggcgggggugugcgucagcacguccggccgcugggugcucaacaacgacuacuaccggagccugcccgggguguucugcggcgucgacgccgugaaccugcucaccaacauguucacgccccugauccagcccaucggcgcccuggacaucuccgccagcaucgucgccgggggcaucguggcgaucguggugaccugccucgccuacuacuucaugcgcuuccggcgcgccuucggggaguacagccacgucguggccuucaacacccugcuguuccucauguccuucaccguccugugccugaccccgguguacagcuuccuccccggcguguacuccgucaucuaccuguaccugaccuucuaccucacgaacgacgugagcuuccuggcccacauccaguggauggugauguucacgccccugguccccuucuggaucaccaucgcguacaucaucugcaucuccaccaagcacuucuacugguucuucagcaacuaccucaagcggcgcgugguguucaacggggucuccuucagcaccuucgaggaggccgcccugugcaccuuccugcucaacaaggagauguaccugaagcugcgguccgacgugcuccugccgcugacccaguacaaccgcuaccucgcccuguacaacaaguacaaguacuucagcggcgccauggacaccacguccuaccgggaggcggccugcugccaccuggccaaggcccucaacgacuucagcaacuccggcagcgacgugcuguaccagccgccccagaccuccaucaccagcgcgguccugcagugaggacuaguuauaagacugacuagcccgaugggccucccaacgggcccuccuccccuccuugcaccgagauuaauaaaaaaaaaaaaaaaaaaaaaaaaaaaaaaaaaaaaaaaaaaaaaaaaaaaaaaaaaaaaaaaaugcaucccccccccccccccccccccccccccccccaaaggcucuuuucagagccaccagaauu

SEQ ID NO: 22069 - RNA, 1723 nt, Artificial Sequence
  SARS-CoV-2__MT856682.1__non-structural protein 4 (NSP4) mRNA gc
aggagaaagcuuaccaugaagaucgugaacaacuggcugaagcagcucaucaaggucacccugguguuccuguucguggccgccaucuucuaccucaucacccccguccacgugaugagcaagcacacggacuucuccagcgagaucaucggcuacaaggcgaucgacgggggcgugacccgcgacaucgccuccaccgacacgugcuucgccaacaagcacgccgacuucgacaccugguucagccagcggggcggcuccuacaccaacgacaaggccugcccccugaucgcggccgucaucacccgcgaggugggguucgugguccccagccugcccggcaccauccuccggacgaccaacggcgacuuccugcacuuccugccccgcguguucuccgccguggggaacaucugcuacaccccgagcaagcucaucgaguacaccgacuucgccacguccgcgugcguccuggccgccgagugcaccaucuucaaggacgccagcggcaagcccgugcccuacugcuacgacaccaacgugcuggagggguccgucgccuacgagagccuccggcccgacacccgcuacgugcugauggacggcuccaucauccaguucccgaacacguaccuggaggggagcgugcgggucgugaccaccuucgacuccgaguacugccgccacgggaccugcgagcggagcgaggcgggcgugugcgucuccacgagcgggcgcugggugcucaacaacgacuacuaccggucccugcccggcguguucugcggggucgacgccgugaaccugcucaccaacauguucacgccccugauccagcccaucggcgcccuggacaucagcgccagcaucgucgccggcgggaucguggcgaucguggugaccugccucgccuacuacuucaugcgcuuccggcgcgccuucggcgaguacucccacgucguggccuucaacacccugcuguuccucaugagcuucaccguccugugccugaccccgguguacuccuuccuccccgggguguacagcgucaucuaccuguaccugaccuucuaccucacgaacgacguguccuuccuggcccacauccaguggauggugauguucacgccccugguccccuucuggaucaccaucgcguacaucaucugcaucagcaccaagcacuucuacugguucuucuccaacuaccucaagcggcgcgugguguucaacggcgucagcuucuccaccuucgaggaggccgcccugugcaccuuccugcucaacaaggagauguaccugaagcugcggagcgacgugcuccugccgcugacccaguacaaccgcuaccucgcccuguacaacaaguacaaguacuucuccggggccauggacaccacgagcuaccgggaggcggccugcugccaccuggccaaggcccucaacgacuucuccaacagcggcuccgacgugcuguaccagccgccccagaccagcaucaccuccgcgguccugcagugaggacuaguuauaagacugacuagcccgaugggccucccaacgggcccuccuccccuccuugcaccgagauuaauaaaaaaaaaaaaaaaaaaaaaaaaaaaaaaaaaaaaaaaaaaaaaaaaaaaaaaaaaaaaaaaaugcaucccccccccccccccccccccccccccccccaaaggcucuuuucagagccaccagaauu

SEQ ID NO: 22070 - RNA, 1723 nt, Artificial Sequence
  SARS-CoV-2__MT846007.1__non-structural protein 4 (NSP4) mRNA gc
aggagaaagcuuaccaugaagaucgugaacaacuggcugaagcagcucaucaaggucacccugguguuccuguucguggccgccaucuucuaccucaucacccccguccacgugaugagcaagcacacggacuucuccagcgagaucaucggcuacaaggcgaucgacgggggcgugacccgcaacaucgccuccaccgacacgugcuucgccaacaagcacgccgacuucgacaccugguucagccagcggggcggcuccuacaccaacgacaaggccugcccccugaucgcggccgucaucacccgcgaggugggguucgugguccccggccugcccggcaccauccuccggacgaccaacggggacuuccugcacuuccugccccgcguguucagcgccgugggcaacaucugcuacaccccguccaagcucaucgaguacaccgacuucgccacgagcgcgugcguccuggccgccgagugcaccaucuucaaggacgccuccgggaagcccgugcccuacugcuacgacaccaacgugcuggagggcagcgucgccuacgagucccuccggcccgacacccgcuacgugcugauggacgggagcaucauccaguucccgaacacguaccuggagggcuccgugcgggucgugaccaccuucgacagcgaguacugccgccacgggaccugcgagcgguccgaggcgggggugugcgucagcacguccggccgcugggugcucaacaacgacuacuaccggagccugcccgggguguucugcggcgucgacgccgugaaccugcucaccaacauguucacgccccugauccagcccaucggcgcccuggacaucuccgccagcaucgucgccgggggcaucguggcgaucguggugaccugccucgccuacuacuucaugcgcuuccggcgcgccuucggggaguacagccacgucguggccuucaacacccugcuguuccucauguccuucaccguccugugccugaccccgguguacagcuuccuccccggcguguacuccgucaucuaccuguaccugaccuucuaccucacgaacgacgugagcuuccuggcccacauccaguggauggugauguucacgccccugguccccuucuggaucaccaucgcguacaucaucugcaucuccaccaagcacuucuacugguucuucagcaacuaccucaagcggcgcgugguguucaacggggucuccuucagcaccuucgaggaggccgcccugugcaccuuccugcucaacaaggagauguaccugaagcugcgguccgacgugcuccugccgcugacccaguacaaccgcuaccucgcccuguacaacaaguacaaguacuucagcggcgccauggacaccacguccuaccgggaggcggccugcugccaccuggccaaggcccucaacgacuucagcaacuccggcagcgacgugcuguaccagccgccccagaccuccaucaccagcgcgguccugcagugaggacuaguuauaagacugacuagcccgaugggccucccaacgggcccuccuccccuccuugcaccgagauuaauaaaaaaaaaaaaaaaaaaaaaaaaaaaaaaaaaaaaaaaaaaaaaaaaaaaaaaaaaaaaaaaaugcaucccccccccccccccccccccccccccccccaaaggcucuuuucagagccaccagaauu

SEQ ID NO: 22071 - RNA, 1723 nt, Artificial Sequence
  SARS-CoV-2__MT846519.1__non-structural protein 4 (NSP4) mRNA gc
aggagaaagcuuaccaugaagaucgugaacaacuggcugaagcagcucaucaaggucacccugguguuccuguucguggccgccaucuucuaccucaucacccccguccacgugaugagcaagcacacggacuucuccagcgagaucaucggcuacaaggcgaucgacgggggcgugacccgcgacaucgccuccaccgacacgugcuucgccaacaagcacgccgacuucgacaccugguucagccagcggggcggcuccuacaccaacgacaaggccugcccccugaucgcggccgucaucacccgcgaggugggguucgugguccccggccugcccggcaccauccuccggacgaccaacggggacuuccugcacuuccugccccgcguguucagcgccgugggcaacaucugcuacaccccguccaagcucaucgaguacaccgacuucgccacgagcgcgugcguccuggccgccgagugcaccaucuucaaggacgccuccgggaagcccgugcccuacugcuacgacaccaacgugcuggagggcagcgucgccuacgagucccuccggcccgacacccgcuacgugcugauggacgggagcaucauccaguucccgaacacguaccuggagggcuccgugcgggucgugaccaccuucgacagcgaguacugccgccacgggaccugcgagcgguccgaggcgggggugugcgucagcacguccggccgcugggugcucaacaacgacuacuaccggagccugcccgggguguucugcggcgucgacgccgugaaccugcucaccaacauguucacgccccugauccagcccaucggcgcccuggacaucuccgccagcaucgucgccgggggcaucguggcgaucguggugaccugccucgccuacuacuucaugcgcuuccggcgcgccuucggggaguacagccacgucguggccuucaacacccugcuguuccucauguccuucaccguccugugccugaccccgguguacagcuuccuccccggcguguacuccgucaucuaccuguaccugaccuucuaccucacgaacgacgugagcuuccuggcccacauccaguggauggugauguucacgccccugguccccuucuggaucaccaucgcguacaucaucugcaucuccaccaagcacuucuacugguucuucagcaacuaccucgagcggcgcgugguguucaacggggucuccuucagcaccuucgaggaggccgcccugugcaccuuccugcucaacaaggagauguaccugaagcugcgguccgacgugcuccugccgcugacccaguacaaccgcuaccucgcccuguacaacaaguacaaguacuucagcggcgccauggacaccacguccuaccgggaggcggccugcugccaccuggccaaggcccucaacgacuucagcaacuccggcagcgacgugcuguaccagccgccccagaccuccaucaccagcgcgguccugcagugaggacuaguuauaagacugacuagcccgaugggccucccaacgggcccuccuccccuccuugcaccgagauuaauaaaaaaaaaaaaaaaaaaaaaaaaaaaaaaaaaaaaaaaaaaaaaaaaaaaaaaaaaaaaaaaaugcaucccccccccccccccccccccccccccccccaaaggcucuuuucagagccaccagaauu

SEQ ID NO: 22072 - RNA, 1723 nt, Artificial Sequence
  SARS-CoV-2__MT846557.1__non-structural protein 4 (NSP4) mRNA gc
aggagaaagcuuaccaugaagaucgugaacaacuggcugaagcagcucaucaaggucacccugguguuccuguucguggccgccaucuucuaccucaucacccccguccacgugaugagcaagcacacggacuucuccagcgagaucaucggcuacaaggcgaucgacgggggcgugacccgcgacaucgccuccaccgacacgugcuucgccaacaagcacgccgacuucgacaccugguucagccagcggggcggcuccuacaccaacgacaaggccugcccccugaucgcggccgucaucacccgcgaggugggguucgugguccccggccugcccggcaccauccuccggacgaccaacggggacuuccugcacuuccugccccgcguguucagcgccgugggcaacaucugcuacaccccguccaagcucaucgaguacaccgacuucgccacgagcgcgugcguccuggccgccgagugcaccaucuucaaggacgccuccgggaagcccgugcccuacugcuacgacaccaacgugcuggagggcagcgucgccuacgagucccuccggcccgacauccgcuacgugcugauggacgggagcaucauccaguucccgaacaccuaccuggagggcuccgugcgggucgugacgaccuucgacagcgaguacugccgccacgggaccugcgagcgguccgaggcgggggugugcgucagcaccuccggccgcugggugcucaacaacgacuacuaccggagccugcccgggguguucugcggcgucgacgccgugaaccugcucacgaacauguucacgccccugauccagcccaucggcgcccuggacaucuccgccagcaucgucgccgggggcaucguggcgaucguggugaccugccucgccuacuacuucaugcgcuuccggcgcgccuucggggaguacagccacgucguggccuucaacacccugcuguuccucauguccuucaccguccugugccugaccccgguguacagcuuccuccccggcguguacuccgucaucuaccuguaccugaccuucuaccucaccaacgacgugagcuuccuggcccacauccaguggauggugauguucacgccccugguccccuucuggaucaccaucgcguacaucaucugcaucuccaccaagcacuucuacugguucuucagcaacuaccucaagcggcgcgugguguucaacggggucuccuucagcaccuucgaggaggccgcccugugcacguuccugcucaacaaggagauguaccugaagcugcgguccgacgugcuccugccgcugacccaguacaaccgcuaccucgcccuguacaacaaguacaaguacuucagcggcgccauggacaccaccuccuaccgggaggcggccugcugccaccuggccaaggcccucaacgacuucagcaacuccggcagcgacgugcuguaccagccgccccagacguccaucaccagcgcgguccugcagugaggacuaguuauaagacugacuagcccgaugggccucccaacgggcccuccuccccuccuugcaccgagauuaauaaaaaaaaaaaaaaaaaaaaaaaaaaaaaaaaaaaaaaaaaaaaaaaaaaaaaaaaaaaaaaaaugcaucccccccccccccccccccccccccccccccaaaggcucuuuucagagccaccagaauu

SEQ ID NO: 22073 - RNA, 1723 nt, Artificial Sequence
  SARS-CoV-2__MT846600.1__non-structural protein 4 (NSP4) mRNA gc
aggagaaagcuuaccaugaagaucgugaacaacuggcugaagcagcucaucaaggucacccugguguuccuguucguggccgccaucuucuaccucaucacccccguccacgugaugagcaagcacacggacuucuccagcgagaucaucggcuacaaggcgaucgacgggggcgugacccgcgacaucgccuccaccgacacgugcuucgccaacaagcacgccgacuucgacaccugguucagccagcgcgggggcuccuacaccaacgacaaggccugcccgcugaucgcggccgucaucacccgggaggugggguucgugguccccggccugcccggcaccauccuccggacgaccaacggggacuuccugcacuuccugccccgcguguucagcgccgugggcaacaucugcuacaccccguccaagcucaucgaguacaccgacuucgccacgagcgcgugcguccuggccgccgagugcaccaucuucaaggacgccuccggcaagagcgugcccuacugcuacgacaccaacgugcuggagggcuccgucgccuacgagagccuccggcccgacacccgcuacgugcugauggacggguccaucauccaguuccccaacacguaccuggagggcagcgugcgggucgugaccaccuucgacuccgaguacugccgccacgggaccugcgagcggagcgaggcgggggugugcgucuccacgagcggccgcugggugcucaacaacgacuacuaccggucccugccggggguguucugcggcgucgacgccgugaaccugcucaccaacauguucacgccccugauccagcccaucggcgcccuggacaucagcgccagcaucgucgccgggggcaucguggcgaucguggugaccugccucgccuacuacuucaugcgcuuccggcgcgccuucggggaguacucccacgucguggccuucaacacccugcuguuccucaugagcuucaccguccugugccugacccccguguacuccuuccucccgggcguguacagcgucaucuaccuguaccugaccuucuaccucacgaacgacguguccuuccuggcccacauccaguggauggugauguucacgccccugguccccuucuggaucaccaucgcguacaucaucugcaucagcaccaagcacuucuacugguucuucuccaacuaccucaagcggcgcgugguguucaacggggucagcuucuccaccuucgaggaggccgcccugugcaccuuccugcucaacaaggagauguaccugaagcugcggagcgacgugcuccugccccugacccaguacaaccgcuaccucgcccuguacaacaaguacaaguacuucuccggcgccauggacaccacgagcuaccgggaggcggccugcugccaccuggccaaggcccucaacgacuucuccaacagcggcuccgacgugcuguaccagccgccccagaccagcaucaccuccgcgguccugcagugaggacuaguuauaagacugacuagcccgaugggccucccaacgggcccuccuccccuccuugcaccgagauuaauaaaaaaaaaaaaaaaaaaaaaaaaaaaaaaaaaaaaaaaaaaaaaaaaaaaaaaaaaaaaaaaaugcaucccccccccccccccccccccccccccccccaaaggcucuuuucagagccaccagaauu

SEQ ID NO: 22074 - RNA, 1723 nt, Artificial Sequence
  SARS-CoV-2__MT846623.1__non-structural protein 4 (NSP4) mRNA gc
aggagaaagcuuaccaugaagaucgugaacaacuggcugaagcagcucaucaaggucacccugguguuccuguucguggccgccaucuucuaccucaucacccccguccacgugaugagcaagcacacggacuucuccagcgagaucaucggcuacaaggcgaucgacgggggcgugacccgcgacaucgccuccaccgacacgugcuucgccaacaagcacgccgacuucgacaccugguucagccagcggggcggcuccuacaccaacgacaaggccugcccccugaucgcggccgucaucacccgcgaggugggguucgugguccccggccugcccggcaccauccuccggacgaccaacggggacuuccugcacuuccugccccgcguguucagcgccgugggcaacaucugcuacaccccguccaagcucaucgaguacaccgacuucgccacgagcgcgugcguccuggccgccgagugcaccaucuucaaggacgccuccgggaagcccgugcccuacugcuacgacaccaacgugcuggagggcagcgucgccuacgagucccuccggcccgacacccgcuacgugcugauggacgggagcaucauccaguucccgaacacguaccuggagggcuccgugcgggucgugaccaccuucgacagcgaguacugccgccacgggaccugcgagcgguccgaggcgggggugugcgucagcacguccggccgcugggugcucaacaacgacuacuaccggagccugcccgggguguucugcggcgucgacgccgugaaccugcucaccaacauguucacgccccugauccagcccaucggcgcccuggacaucuccgccagcaucgucgccgggggcaucguggcgaucguggugaccugccucgccuacuacuucaugcgcuuccggcgcgccuucggggaguacagccacgucguggccuucaacacccugcuguuccucauguccuucaccguccugugccugaccccgguguacagcuuccuccccggcguguacuccgucaucuaccuguaccugaccuucuaccucacgaacgacgugagcuuccuggcccacauccaguggauggugauguucacgccccugguccccuucuggaucaccaucgcguacaucaucugcaucuccaccaagcacuucuacugguucuucagcaacuaccucaagaagcgggugguguucaacggggucuccuucagcaccuucgaggaggccgcccugugcaccuuccugcucaacaaggagauguaccugaagcugcgcuccgacgugcuccugccgcugacccaguacaaccgguaccucgcccuguacaacaaguacaaguacuucagcggcgccauggacaccacguccuaccgcgaggcggccugcugccaccuggccaaggcccucaacgacuucagcaacuccggcagcgacgugcuguaccagccgccccagaccuccaucaccagcgcgguccugcagugaggacuaguuauaagacugacuagcccgaugggccucccaacgggcccuccuccccuccuugcaccgagauuaauaaaaaaaaaaaaaaaaaaaaaaaaaaaaaaaaaaaaaaaaaaaaaaaaaaaaaaaaaaaaaaaaugcaucccccccccccccccccccccccccccccccaaaggcucuuuucagagccaccagaauu

SEQ ID NO: 22075 - RNA, 1723 nt, Artificial Sequence
  SARS-CoV-2__MT843311.1__non-structural protein 4 (NSP4) mRNA gc
aggagaaagcuuaccaugaagaucgugaacaacuggcugaagcagcucaucaaggucacccuggccuuccuguucguggccgcgaucuucuaccucaucacccccgugcacgucaugagcaagcacacggacuucuccagcgagaucaucggcuacaaggccaucgacgggggcgugacccgcgacaucgccuccaccgacacgugcuucgccaacaagcacgccgacuucgacaccugguucagccagcggggcggcuccuacaccaacgacaaggcgugcccccugaucgccgccgugaucacccgcgaggucggguucguggugcccggccugcccggcaccauccuccggacgaccaacggggacuuccugcacuuccugccccgcgucuucagcgccgugggcaacaucugcuacaccccguccaagcucaucgaguacaccgacuucgcgacgagcgccugcgugcuggccgccgagugcaccaucuucaaggacgccuccgggaagcccguccccuacugcuacgacaccaacgugcuggagggcagcguggcguacgagucccuccggcccgacacccgcuacguccugauggacgggagcaucauccaguucccgaacacguaccuggagggcuccgugcggguggucaccaccuucgacagcgaguacugccgccacgggaccugcgagcgguccgaggccggggugugcgugagcacguccggccgcuggguccucaacaacgacuacuaccggagccugcccgggguguucugcggcguggacgccgucaaccugcucaccaacauguucacgccccugauccagcccaucggcgcccuggacaucuccgccagcaucguggccgggggcaucgucgcgaucguggugaccugccucgccuacuacuucaugcgcuuccggcgcgccuucggggaguacagccacgucguggccuucaacacccugcuguuccucauguccuucaccgugcugugccugaccccggucuacagcuuccuccccggcguguacuccgugaucuaccuguaccugaccuucuaccucacgaacgacgucagcuuccuggcgcacauccaguggauggugauguucacgccccuggugcccuucuggaucaccaucgccuacaucaucugcaucuccaccaagcacuucuacugguucuucagcaacuaccucaagcggcgcgucguguucaacgggguguccuucagcaccuucgaggaggccgcccugugcaccuuccugcucaacaaggagauguaccugaagcugcgguccgacguccuccugccgcugacccaguacaaccgcuaccucgcccuguacaacaaguacaaguacuucagcggcgcgauggacaccacguccuaccgggaggccgccugcugccaccuggccaaggcgcucaacgacuucagcaacuccggcagcgacgugcuguaccagccgccccagaccuccaucaccagcgccgugcugcagugaggacuaguuauaagacugacuagcccgaugggccucccaacgggcccuccuccccuccuugcaccgagauuaauaaaaaaaaaaaaaaaaaaaaaaaaaaaaaaaaaaaaaaaaaaaaaaaaaaaaaaaaaaaaaaaaugcaucccccccccccccccccccccccccccccccaaaggcucuuuucagagccaccagaauu

SEQ ID NO: 22076 - RNA, 1723 nt, Artificial Sequence
  SARS-CoV-2__MT843318.1__non-structural protein 4 (NSP4) mRNA gc
aggagaaagcuuaccaugaagaucgugaacaacuggcugaagcagcucaucaaggucacccugguguuccuguucguggccgccaucuucuaccucaucacccccguccacgugaugagcaagcacacggacuucuccagcgagaucaucggcuacaaggcgaucgacgggggcgugacccgcgacaucgccuccaccgacacgugcuucgccaacaagcacgccgacuucgacaccugguucagccagcggggcggcuccuacaccaacgacaaggccugcccccugaucgcggccgucaucacccgcgaggugggguucgugguccccggccugcccggcaccauccuccggacgaccaacggggacuuccugcacuuccugccccgcguguucagcgccgugggcaacaucugcuacaccccguccaagcucaucgaguacaccgacuucgccacgagcgcgugcguccuggccgccgagugcaccaucuucaaggacgccuccgggaagcccgugcccuacugcuacgacaccaacgugcuggagggcagcgucgccuacgagucccuccggcccgacacccgcuacgugcugauggacgggagcaucauccaguucccgaacacguaccuggagggcuccgugcgggucgugaccaccuucgacagcgaguacugccgccacgggaccugcgagcgguccgaggcgggggugugcgucagcacguccggccgcugggugcucaacaacgacuacuaccggagccugcccgggguguucugcggcgucgacgccgugaaccugcucaccaacauguucacgccccugauccagcccaucggcgcccuggacaucuccgccagcaucgucgccgggggcaucguggcgaucguggugaccugccucgccuacuacuucaugcgcuuccggcgcgccuucggggaguacagccacgucguggccuucaacacccugcuguuccucauguccuucaccguccugugccugaccccgguguacagcuuccuccccggcguguacuccgucaucuaccuguaccugaccuucuaccucacgaacgacgugagcuuccuggcccacauccaguggauggugauguucacgccccugguccccuucuggaucaccaucgcguacaucaucugcaucuccaccaagcacuucuacugguucuucagcaacuaccucaagcggcgcgugguguucaacggggucuccuucagcaccuucgaggaggccgcccugugcaccuuccugcucaacaaggagauguaccugaagcugcgguccgacgugcuccugccgcugacccaguacaaccgcuaccucgcccuguacaacaaguacaaguacuucagcggcgccaucgacaccacguccuaccgggaggcggccugcugccaccuggccaaggcccucaacgacuucagcaacuccggcagcgacgugcuguaccagccgccccagaccuccaucaccagcgcgguccugcagugaggacuaguuauaagacugacuagcccgaugggccucccaacgggcccuccuccccuccuugcaccgagauuaauaaaaaaaaaaaaaaaaaaaaaaaaaaaaaaaaaaaaaaaaaaaaaaaaaaaaaaaaaaaaaaaaugcaucccccccccccccccccccccccccccccccaaaggcucuuuucagagccaccagaauu

SEQ ID NO: 22077 - RNA, 1723 nt, Artificial Sequence
  SARS-CoV-2__MT843757.1__non-structural protein 4 (NSP4) mRNA gc
aggagaaagcuuaccaugaagaucgugaacaacuggcugaagcagcucaucaaggucacccugguguuccuguucguggccgccaucuucuaccucaucacccccguccacgugaugagcaagcacacggacuucuccagcgagaucaucggcuacaaggcgaucgacgggggcgugacccgcgacaucgccuccaccgacacgugcuucgccaacaagcacgccgacuucgacaccugguucagccagcggggcggcuccuacaccaacgacaaggccugcccccugaucgcggccgucaucacccgcgaggugggguucgugguccccggccugcccggcaccauccuccggacgaccagcgacuuccugcacuuccugccccgcguguucuccgccguggggaacaucugcuacaccccgagcaagcucaucgaguacaccgacuucgccacguccgcgugcguccuggccgccgagugcaccaucuucaaggacgccagcggcaagcccgugcccuacugcuacgacaccaacgugcuggagggguccgucgccuacgagagccuccggcccgacacccgcuacgugcugauggacggcuccaucauccaguucccgaacacguaccuggaggggagcgugcgggucgugaccaccuucgacuccgaguacugccgccacgggaccugcgagcggagcgaggcgggcgugugcgucuccacgagcgggcgcugggugcucaacaacgacuacuaccggucccugcccggcguguucugcggggucgacgccgugaaccugcucaccaacauguucacgccccugauccagcccaucggcgcccuggacaucagcgccagcaucgucgccggcgggaucguggcgaucguggugaccugccucgccuacuacuucaugcgcuuccggcgcgccuucggcgaguacucccacgucguggccuucaacacccugcuguuccucaugagcuucaccguccugugccugaccccgguguacuccuuccuccccgggguguacagcgucaucuaccuguaccugaccuucuaccucacgaacgacguguccuuccuggcccacauccaguggauggugauguucacgccccugguccccuucuggaucaccaucgcguacaucaucugcaucagcaccaagcacuucuacugguucuucuccaacuaccucaagcggcgcgugguguucaacggcgucagcuucuccaccuucgaggaggccgcccugugcaccuuccugcucaacaaggagauguaccugaagcugcggagcgacgugcuccugccgcugacccaguacaaccgcuaccucgcccuguacaacaaguacaaguacuucuccggggccauggacaccacgagcuaccgggaggcggccugcugccaccuggccaaggcccucaacgacuucuccaacagcggcuccgacgugcuguaccagccgccccagaccagcaucaccuccgcgguccugcagagcugaggacuaguuauaagacugacuagcccgaugggccucccaacgggcccuccuccccuccuugcaccgagauuaauaaaaaaaaaaaaaaaaaaaaaaaaaaaaaaaaaaaaaaaaaaaaaaaaaaaaaaaaaaaaaaaaugcaucccccccccccccccccccccccccccccccaaaggcucuuuucagagccaccagaauu

SEQ ID NO: 22078 - RNA, 1723 nt, Artificial Sequence
  SARS-CoV-2__MT831125.1__non-structural protein 4 (NSP4) mRNA gc
aggagaaagcuuaccaugaagaacaucaacaacuggcugaagcagcucaucaaggugacccuggucuuccuguucguggccgccaucuucuaccucaucacccccgugcacgucaugagcaagcacacggacuucuccagcgagaucaucggcuacaaggcgaucgacgggggcgugacccgcgacaucgccuccaccgacacgugcuucgccaacaagcacgccgacuucgacaccugguucagccagcggggcggcuccuacaccaacgacaaggccugcccccugaucgcggccgugaucacccgcgaggucggguucguggugcccggccugcccggcaccauccuccggacgaccaacggggacuuccugcacuuccugccccgcgucuucagcgccgugggcaacaucugcuacaccccguccaagcucaucgaguacaccgacuucgccacgagcgcgugcgugcuggccgccgagugcaccaucuucaaggacgccuccgggaagcccguccccuacugcuacgacaccaacgugcuggagggcagcguggccuacgagucccuccggcccgacacccgcuacguccugauggacgggagcaucauccaguucccgaacacguaccuggagggcuccgugcggguggucaccaccuucgacagcgaguacugccgccacgggaccugcgagcgguccgaggcgggggugugcgugagcacguccggccgcuggguccucaacaacgacuacuaccggagccugcccgggguguucugcggcguggacgccgucaaccugcucaccaacauguucacgccccugauccagcccaucggcgcccuggacaucuccgccagcaucguggccgggggcaucgucgcgaucguggugaccugccucgccuacuacuucaugcgcuuccggcgcgccuucggggaguacagccacgucguggccuucaacacccugcuguuccucauguccuucaccgugcugugccugaccccggucuacagcuuccuccccggcguguacuccgugaucuaccuguaccugaccuucuaccucacgaacgacgucagcuuccuggcccacauccaguggauggugauguucacgccccuggugcccuucuggaucaccaucgcguacaucaucugcaucuccaccaagcacuucuacugguucuucagcaacuaccucaagcggcgcgucguguucaacgggguguccuucagcaccuucgaggaggccgcccugugcaccuuccugcucaacaaggagauguaccugaagcugcgguccgacguccuccugccgcugacccaguacaaccgcuaccucgcccuguacaacaaguacaaguacuucagcggcgccauggacaccacguccuaccgggaggcggccugcugccaccuggccaaggcccucaacgacuucagcaacuccggcagcgacgugcuguaccagccgccccagaccuccaucaccagcgcggugcugcagugaggacuaguuauaagacugacuagcccgaugggccucccaacgggcccuccuccccuccuugcaccgagauuaauaaaaaaaaaaaaaaaaaaaaaaaaaaaaaaaaaaaaaaaaaaaaaaaaaaaaaaaaaaaaaaaaugcaucccccccccccccccccccccccccccccccaaaggcucuuuucagagccaccagaauu

SEQ ID NO: 22079 - RNA, 1723 nt, Artificial Sequence
  SARS-CoV-2__MT831217.1__non-structural protein 4 (NSP4) mRNA gc
aggagaaagcuuaccaugaagaucgugaacaacuggcugaagcagcucaucaaggucacccugguguuccuguucguggccgccaucuucuaccucaucacccccguccacgugaugagcaagcacacggacuucuccagcgagaucaucggcuacaaggcgaucgacgggggcgugacccgcgacaucgccuucaccgacacgugcuucgccaacaagcacgccgacuucgacaccugguucucccagcggggcggcagcuacaccaacgacaaggccugcccccugaucgcggccgucaucacccgcgaggugggguucgugguccccggccugcccggcaccauccuccggacgaccaacggggacuuccugcacuuccugccccgcguguucuccgccgugggcaacaucugcuacaccccgagcaagcucaucgaguacaccgacuucgccacguccgcgugcguccuggccgccgagugcaccaucuucaaggacgccagcgggaagcccgugcccuacugcuacgacaccaacgugcuggagggcuccgucgccuacgagagccuccggcccgacacccgcuacgugcugauggacggguccaucauccaguucccgaacacguaccuggagggcagcgugcgggucgugaccaccuucgacuccgaguacugccgccacgggaccugcgagcggagcgaggcgggggugugcgucuccacgagcggccgcugggugcucaacaacgacuacuaccggucccugcccgggguguucugcggcgucgacgccgugaaccugcucaccaacauguucacgccccugauccagcccaucggcgcccuggacaucagcgccuccaucgucgccgggggcaucguggcgaucguggugaccugccucgccuacuacuucaugcgcuuccggcgcgccuucggggaguacagccacgucguggccuucaacacccugcuguuccucaugagcuucaccguccugugccugaccccgguguacuccuuccuccccggcguguacagcgucaucuaccuguaccugaccuucuaccucacgaacgacguguccuuccuggcccacauccaguggauggugauguucacgccccugguccccuucuggaucaccaucgcguacaucaucugcaucagcaccaagcacuucuacugguucuucuccaacuaccucaagcggcgcgugguguucaacggggucagcuucuccaccuucgaggaggccgcccugugcaccuuccugcucaacaaggagauguaccugaagcugcggagcgacgugcuccugccgcugacccaguacaaccgcuaccucgcccuguacaacaaguacaaguacuucuccggcgccauggacaccacgagcuaccgggaggcggccugcugccaccuggccaaggcccucaacgacuucuccaacagcggcuccgacgugcuguaccagccgccccagaccagcaucaccuccgcgguccugcagugaggacuaguuauaagacugacuagcccgaugggccucccaacgggcccuccuccccuccuugcaccgagauuaauaaaaaaaaaaaaaaaaaaaaaaaaaaaaaaaaaaaaaaaaaaaaaaaaaaaaaaaaaaaaaaaaugcaucccccccccccccccccccccccccccccccaaaggcucuuuucagagccaccagaauu

SEQ ID NO: 22080 - RNA, 1723 nt, Artificial Sequence
  SARS-CoV-2__MT831323.1__non-structural protein 4 (NSP4) mRNA gc
aggagaaagcuuaccaugaagaucgugaacaacuggcugaagcagcucaucaaggucacccugguguuccuguucguggccgccaucuucuaccucaucacccccguccacgugaugagcaagcacacggacuucuccagcgagaucaucggcuacaaggcgaucgacgggggcgugacccgcgacaucaccuccaccgacacgugcuucgccaacaagcacgccgacuucgacaccugguucagccagcgcgggggcuccuacaccaacgacaaggccugcccccugaucgccgcggucaucacccgggaggugggguucgugguccccggccugcccggcacgauccuccggaccaccaacggggacuuccugcacuuccugccccgcguguucagcgccgugggcaacaucugcuacaccccguccaagcucaucgaguacacggacuucgccaccagcgccugcguccuggcggccgagugcaccaucuucaaggacgccuccgggaagcccgugcccuacugcuacgacaccaacgugcuggagggcagcgucgccuacgagucccuccggcccgacacgcgcuacgugcugauggacgggagcaucauccaguucccgaacaccuaccuggagggcuccgugcgggucgugaccaccuucgacagcgaguacugccgccacggcacgugcgagcgguccgaggccggggugugcgucagcaccuccggccgcugggugcucaacaacgacuacuaccggagccugcccgggguguucugcggcgucgacgcggugaaccugcucaccaacauguucaccccgcugauccagcccaucggcgcccuggacaucuccgccagcaucgucgccgggggcaucguggccaucguggucacgugccucgcguacuacuucaugcgcuuccggcgcgccuucggggaguacagccacgugguggccuucaacacccugcuguuccucauguccuucaccguccugugccugacccccguguacagcuuccuccccggcguguacuccgucaucuaccuguaccugacguucuaccucaccaacgacgugagcuuccuggcccacauccaguggauggugauguucacgccccugguccccuucuggaucaccaucgccuacaucaucugcaucuccaccaagcacuucuacugguucuucagcaacuaccucaagcggcgcgugguguucaacggggucuccuucagcaccuucgaggaggcggcccugugcaccuuccugcucaacaaggagauguaccugaagcugcgguccgacgugcuccugccgcugacccaguacaaccgcuaccucgcccuguacaacaaguacaaguacuucagcggcgccauggacacgaccuccuaccgggaggccgcgugcugccaccuggccaaggcccucaacgacuucagcaacuccggcagcgacgugcuguaccagccgccccagaccuccaucaccagcgccguccugcagugaggacuaguuauaagacugacuagcccgaugggccucccaacgggcccuccuccccuccuugcaccgagauuaauaaaaaaaaaaaaaaaaaaaaaaaaaaaaaaaaaaaaaaaaaaaaaaaaaaaaaaaaaaaaaaaaugcaucccccccccccccccccccccccccccccccaaaggcucuuuucagagccaccagaauu

SEQ ID NO: 22081 - RNA, 1723 nt, Artificial Sequence
  SARS-CoV-2__MT831695.1__non-structural protein 4 (NSP4) mRNA gc
aggagaaagcuuaccaugaagaucgugaacaacuggcugaagcagcucaucaaggucacccugguguuccuguucguggccgccaucuucuaccucaucacccccguccacgugaugagcaagcacacggacuucuccagcgagaucaucggcuacaaggcgaucgacgggggcgugacccgcgacaucgccuccaccgacacgugcuucgccaacaagcacgccgacuucgacaccugguucagccagcggggcggcuccuacaccaacgacaaggccugcccccugaucgcggccgucaucacccgcgaggugggguucgugguccccggccugcccggcaccauccuccggacgaccaacggggacuuccugcacuuccugccccgcguguucagcgccgugggcaacaucugcuacaccccguccaagcucaucgaguacaccgacuucgccacgagcgcgugcguccuggccgccgagugcaccaucuucaaggacgccuccgggaagcccgugcccuacugcuacgacaccaacgugcuggagggcagcgucgccuacgagucccuccggcccgacacccgcuacgugcugauggacgggagcaucauccaguucccgaacacguaccuggagggcuccgugcgggucgugaccaccuucgacagcgaguacugccgccacgggaccugcgagcgguccgaggcgggggugugcgucagcacguccggccgcugggugcucaacaacgacuacuaccggagccugcccgggguguucugcggcgucgacgccgugaaccugcucaccaacauguucacgccccugauccagcccaucggcgcccuggacaucuccgccagcaucgucgccgggggcaucguggcgaucguggugaccugcuucgccuacuacuucaugcgcuuccggcgcgccuucggggaguacagccacgucguggccuucaacacccuccuguuccugauguccuucaccguccucugccugaccccgguguacagcuuccugcccggcguguacuccgucaucuaccucuaccugaccuucuaccugacgaacgacgugagcuuccucgcccacauccaguggauggugauguucacgccccugguccccuucuggaucaccaucgcguacaucaucugcaucuccaccaagcacuucuacugguucuucagcaacuaccugaagcggcgcgugguguucaacggggucuccuucagcaccuucgaggaggccgcccucugcaccuuccugcugaacaaggagauguaccucaagcugcgguccgacgugcugcucccgcugacccaguacaaccgcuaccuggcccucuacaacaaguacaaguacuucagcggcgccauggacaccacguccuaccgggaggcggccugcugccaccuggccaaggcccugaacgacuucagcaacuccggcagcgacgugcucuaccagccgccccagaccuccaucaccagcgcgguccugcagugaggacuaguuauaagacugacuagcccgaugggccucccaacgggcccuccuccccuccuugcaccgagauuaauaaaaaaaaaaaaaaaaaaaaaaaaaaaaaaaaaaaaaaaaaaaaaaaaaaaaaaaaaaaaaaaaugcaucccccccccccccccccccccccccccccccaaaggcucuuuucagagccaccagaauu

SEQ ID NO: 22082 - RNA, 1723 nt, Artificial Sequence
  SARS-CoV-2__MT831697.1__non-structural protein 4 (NSP4) mRNA gc
aggagaaagcuuaccaugaagaucgugaacaacuggcugaagcagcucaucaaggucacccugguguuccuguucguggccgccaucuucuaccucaucacccccguccacgugaugagcaagcacacggacuucuccagcgagaucaucggcuacaaggcgaucgacgggggcgugacccgcgacaucgccuccaccgacacgugcuucgccaacaagcacgccgacuucgacaccugguucagccagcggggcggcuccuacaccaacgacaaggccugcccccugaucgcggccgucaucacccgcgaggugggguucgugguccccggccugcccggcaccauccuccggacgaccaacggggacuuccugcacuuccugccccgcguguucagcgccgugggcaacaucugcuacaccccguccaagcucaucgaguacaccgacuucgccacgagcgcgugcguccuggccgccgagugcaccaucuucaaggacgccuccgggaagcccgugcccuacugcuacgacaccaacgugcuggagggcagcgucgccuacgagucccuccggcccgacacccgcuacgugcugauggacgggagcaucauccaguucccgaacacguaccuggagggcuccgugcgggucgugaccaucuucgacagcgaguacugccgccacgggaccugcgagcgguccgaggcgggggugugcgucagcaccuccggccgcugggugcucaacaacgacuacuaccggagccugcccgggguguucugcggcgucgacgccgugaaccugcucacgaacauguucacgccccugauccagcccaucggcgcccuggacaucuccgccagcaucgucgccgggggcaucguggcgaucguggugaccugccucgccuacuacuucaugcgcuuccggcgcgccuucggggaguacagccacgucguggccuucaacacccugcuguuccucauguccuucaccguccugugccugaccccgguguacagcuuccuccccggcguguacuccgucaucuaccuguaccugaccuucuaccucaccaacgacgugagcuuccuggcccacauccaguggauggugauguucacgccccugguccccuucuggaucaccaucgcguacaucaucugcaucuccaccaagcacuucuacugguucuucagcaacuaccucaagcggcgcgugguguucaacggggucuccuucagcaccuucgaggaggccgcccugugcacguuccugcucaacaaggagauguaccugaagcugcgguccgacgugcuccugccgcugacccaguacaaccgcuaccucgcccuguacaacaaguacaaguacuucagcggcgccauggacaccaccuccuaccgggaggcggccugcugccaccuggccaaggcccucaacgacuucagcaacuccggcagcgacgugcuguaccagccgccccagacguccaucaccagcgcgguccugcagugaggacuaguuauaagacugacuagcccgaugggccucccaacgggcccuccuccccuccuugcaccgagauuaauaaaaaaaaaaaaaaaaaaaaaaaaaaaaaaaaaaaaaaaaaaaaaaaaaaaaaaaaaaaaaaaaugcaucccccccccccccccccccccccccccccccaaaggcucuuuucagagccaccagaauu

SEQ ID NO: 22083 - RNA, 1723 nt, Artificial Sequence
  SARS-CoV-2__MT831724.1__non-structural protein 4 (NSP4) mRNA gc
aggagaaagcuuaccaugaagaucgugaacaacuggcugaagcagcucaucaaggucacccugguguuccuguucguggccgccaucuucuaccucaucacccccguccacgugaugagcaagcacacggacuucuccagcgagaucaucggcuacaaggcgaucgacgggggcgugacccgcgacaucgccuccaccgacacgugcuucgccaacaagcacgccgacuucgacaccugguucagccagcggggcggcuccuacaccaacgacaaggccugcccccugaucgcggccgucaucacccgcgaggugggguucgugguccccggccugcccggcaccauccuccggacgaccaacggggacuuccugcacuuccugccccgcguguucagcgccgugggcaacaucugcuacaccccguccaagcucaucgaguacaccgacuucgccacgagcgcgugcguccuggccgccgagugcaccaucuucaaggacgccuccgggaagcccgugcccuacugcuacgacaccaacgugcuggagggcagcgucgccuacgagucccuccggcccgacacccgcuacgugcugauggacgggagcaucauccaguucccgaacacguaccuggagggcuccgugcgggucgugaccaccuucgacagcgaguacugccgccacgggaccugcgagcgguccgaggcgggggugugcgucagcacguccggccgcugggugcucaacaacgacuacuaccggagccugcccgggguguucugcggcgucgacgccgugaaccugcucaccaacauguucacgccccugauccagcccaucggcgcccuggacaucuccgccagcaucgucgccgggggcaucguggcgaucguggugaccugccucgccuacuacuucaugcgcuuccggcgcgccuucugcgaguacagccacgucguggccuucaacacccugcuguuccucauguccuucaccguccugugccugaccccgguguacagcuuccuccccgggguguacuccgucaucuaccuguaccugaccuucuaccucacgaacgacgugagcuuccuggcccacauccaguggauggugauguucacgccccugguccccuucuggaucaccaucgcguacaucaucugcaucuccaccaagcacuucuacugguucuucagcaacuaccucaagcggcgcgugguguucaacggcgucuccuucagcaccuucgaggaggccgcccugugcaccuuccugcucaacaaggagauguaccugaagcugcgguccgacgugcuccugccgcugacccaguacaaccgcuaccucgcccuguacaacaaguacaaguacuucagcggggccauggacaccacguccuaccgggaggcggccugcugccaccuggccaaggcccucaacgacuucagcaacuccggcagcgacgugcuguaccagccgccccagaccuccaucaccagcgcgguccugcagugaggacuaguuauaagacugacuagcccgaugggccucccaacgggcccuccuccccuccuugcaccgagauuaauaaaaaaaaaaaaaaaaaaaaaaaaaaaaaaaaaaaaaaaaaaaaaaaaaaaaaaaaaaaaaaaaugcaucccccccccccccccccccccccccccccccaaaggcucuuuucagagccaccagaauu

SEQ ID NO: 22084 - RNA, 1723 nt, Artificial Sequence
  SARS-CoV-2__MT831729.1__non-structural protein 4 (NSP4) mRNA gc
aggagaaagcuuaccaugaagaucgugaacaacuggcugaagcagcucaucaaggucacccugguguuccuguucguggccgccaucuucuaccucaucacccccguccacgugaugagcaagcacacggacuucuccagcgagaucaucggcuacaaggcgaucgacgggggcgugacccgcgacaucgccuccaccgacacgugcuucgccaacaagcacgccgacuucgacaccugguucagccagcggggcggcuccuacaccaacgacaaggccugcccccugaucgcggccgucaucacccgcgaggugggguucgugguccccggccugcccggcaccauccuccggacgaccaacggggacuuccugcacuuccugccccgcguguucagcgccgugggcaacaucugcuacaccccguccaagcucaucgaguacaccgacuucgccacgagcgcgugcguccuggccgccgagugcaccaucuucaaggacgccuccgggaagcccgugcccuacugcuacgacaccaacgugcuggagggcagcgucgccuacgagucccuccggcccgacacccgcuacgugcugauggacgggagcaucauccaguucccgaacacguaccuggagggcuccgugcgggucgugaccaccuucgacagcgaguacugccgccacgggaccugcgagcgguccgaggcgggggugugcgucagcacguccggccgcugggugcucaacaacgacuacuaccggagccugcccgggguguucugcggcgucgacgccgugaaccugcucaccaacauguucacgccccugauccagcccaucggcgcccuggacaucuccgccagcaucgucgccgggggcaucguggcgaucguggugaccugccucgccuacuacuucaugcgcuuccggcgcgccuucggggaguacagccacgucguggccuucaacacccugcuguuccucauguccuucaccguccugugccugaccccgguguacagcuuccuccccggcguguacuccgucaucuaccuguaccugaccuucuaccucacgaacgacgugagcuuccuggcccacauccaguggaugguggucuucacgccccuggugcccuucuggaucaccaucgcguacaucaucugcaucuccaccaagcacuucuacugguucuucagcaacuaccucaagcggcgcguggucuucaacgggguguccuucagcaccuucgaggaggccgcccugugcaccuuccugcucaacaaggagauguaccugaagcugcgguccgacgugcuccugccgcugacccaguacaaccgcuaccucgcccuguacaacaaguacaaguacuucagcggcgccauggacaccacguccuaccgggaggcggccugcugccaccuggccaaggcccucaacgacuucagcaacuccggcagcgacguccuguaccagccgccccagaccuccaucaccagcgcggugcugcagugaggacuaguuauaagacugacuagcccgaugggccucccaacgggcccuccuccccuccuugcaccgagauuaauaaaaaaaaaaaaaaaaaaaaaaaaaaaaaaaaaaaaaaaaaaaaaaaaaaaaaaaaaaaaaaaaugcaucccccccccccccccccccccccccccccccaaaggcucuuuucagagccaccagaauu

SEQ ID NO: 22085 - RNA, 1723 nt, Artificial Sequence
  SARS-CoV-2__MT831811.1__non-structural protein 4 (NSP4) mRNA gc
aggagaaagcuuaccaugaagaucgugaacaacuggcugaagcagcucaucaaggucacccugguguuccuguucguggccgccaucuucuaccucaucacccccguccacgugaugagcaagcacacggacuucuccagcgagaucaucggcuacaaggcgaucgacgggggcgugacccgcgacaucgccuccaccgacacgugcuucgccaacaagcacgccgacuucgacaccugguucagccagcggggcggcuccuacaccaacgacaaggccugcccccugaucgcggccgucaucacccgcgaggugggguucgugguccccggccugcccggcaccauccuccggacgaccaacggggacuuccugcacuuccugccccgcguguucagcgccgugggcaacaucugcuacaccccguccaagcucaucgaguacaccgacuucgccacgagcgcgugcguccuggccgccgagugcaccaucuucaaggacgccuccgggaagcccgugcccuacugcuacgacaccaacgugcuggagggcagcgucgccuacgagucccuccggcccgacacccgcuacgugcugauggacgggagcaucauccaguucccgaacacguaccuggagggcuccgugcgggucgugaccaccuucgacagcgaguacugccgccacgggaccugcgagcgguccgaggcgggggugugcgucagcacguccggccgcugggugcucaacaacgacuacuaccggagccugcccgggguguucugcggcgucgacgccgugaaccugcucaccaacauguucacgccccugauccagcccaucggcgcccuggacaucuccgccagcaucgucgccgggggcaucguggcgaucguggugaccugccucgccuacuacuucaugcgcuuccggcgcgccuucggggaguacagccacgucguggccuucaacacccugcuguuccucauguccuucaccguccugugccugaccccgguguacagcuuccuccccggcguguacuccgucaucuaccuguaccugaccuucuaccucacgaacgacgugagcuuccuggcccacauccaguggauggugauguucacgccccugguccccuucuggaucaccaucgcguacaucaucugcaucuccaccaagcacuucuacugguucuucagcaacugccucaagcggcgcgugguguucaacggggucuccuucagcaccuucgaggaggccgcccugugcaccuuccugcucaacaaggagauguaccugaagcugcgguccgacgugcuccugccgcugacccaguacaaccgcuaccucgcccuguacaacaaguacaaguacuucagcggcgccauggacaccacguccuaccgggaggcggccugcugccaccuggccaaggcccucaacgacuucagcaacuccggcagcgacgugcuguaccagccgccccagaccuccaucaccagcgcgguccugcagugaggacuaguuauaagacugacuagcccgaugggccucccaacgggcccuccuccccuccuugcaccgagauuaauaaaaaaaaaaaaaaaaaaaaaaaaaaaaaaaaaaaaaaaaaaaaaaaaaaaaaaaaaaaaaaaaugcaucccccccccccccccccccccccccccccccaaaggcucuuuucagagccaccagaauu

SEQ ID NO: 22086 - RNA, 1723 nt, Artificial Sequence
  SARS-CoV-2__MT834038.1__non-structural protein 4 (NSP4) mRNA gc
aggagaaagcuuaccaugaagaucgugaacaacuggcugaagcagcucaucaaggucacccugguguuccuguucguggccgccaucuucuaccucaucacccccguccacgugaugagcaagcacacggacuucuccagcgagaucaucggcuacaaggcgaucgacgggggcgugacccgcgacaucgccuccaccgacacgugcuucgccaacaagcacgccgacuucgacaccugguucagccagcggggcggcuccuacaccaacgacaaggccugcccccugaucgcggccgucaucacccgcgaggugggguucgugguccccggccugcccggcaccauccuccggacgaccaacggggacuuccugcacuuccugccccgcguguucagcgccgugggcaacaucugcuacaccccguccaagcucaucgaguacaccgacuucgccacgagcgcgugcguccuggccgccgagugcaccaucuucaaggacgccuccgggaagcccgugcccuacugcuacgacaccaacgugcuggagggcagcgucgccuacgagucccuccggcccgacacccgcuacgugcugauggacgggagcaucauccaguucccgaacacguaccuggagggcuccgugcgggucgugaccaccuucgacagcgaguacugccgccacgggaccugcgagcgguccgaggcgggggugugcgucagcacguccggccgcugggugcucaacaacgacuacuaccggagccugcccgggguguucugcggcgucgacgccgugaaccugcucaccaacauguucacgccccugauccagcccaucggcgcccuggacaucuccgccagcaucgucgccgggggcaucguggcgaucguggugaccugccucgccuacuacuucaugcgcuuccggcgcgccuucggggaguacagccacgucguggccuucaacacccugcuguuccucauguccuucaccguccugugccugaccccgguguacagcuuccuccccggcguguacuccgucaucuaccuguaccugaccuucuaccucacgaacgacgugagcuuccuggcccacauccaguggauggugauguucacgccccugguccccuucuggaucaccaucgcguacaucaucugcaucuccaccaagcacuucuacugguucuucagcaacuaccucaagcggcgcgugguguucaacggggucuccuucagcaccuucgaggaggccgcccugugcaccuuccugcucaacaaggagauguaccugaagcugcgguccgacgugcuccugccgcugacccaguacaaccgcuaccucgcccuguacaacaaguacaaguacuucagcggcgccauggacaccacguccuaccgggaggcggccugcugccaccuggccaaggcccucaacgacuucagcaaccugggcuccgacgugcuguaccagccgccccagaccagcaucaccuccgcgguccugcagugaggacuaguuauaagacugacuagcccgaugggccucccaacgggcccuccuccccuccuugcaccgagauuaauaaaaaaaaaaaaaaaaaaaaaaaaaaaaaaaaaaaaaaaaaaaaaaaaaaaaaaaaaaaaaaaaugcaucccccccccccccccccccccccccccccccaaaggcucuuuucagagccaccagaauu

SEQ ID NO: 22087 - RNA, 1723 nt, Artificial Sequence
  SARS-CoV-2__MT834636.1__non-structural protein 4 (NSP4) mRNA gc
aggagaaagcuuaccaugaagaucgugaacaacuggcugaagcagcucaucaaggucacccugguguuccuguucguggccgccaucuucuaccucaucacccccguccacgugaugagcaagcacacggacuucuccagcgagaucaucggcuacaaggcgaucgacgggggcgugacccgcgacaucgccuccaccgacacgugcuucgccaacaagcacgccgacuucgacaccugguucagccagcggggcggcuccuacaccaacgacaaggccugcccccugaucgcggccgucaucacccgcgaggugggguucgugguccccggccugcccggcaccauccuccggacgaccaacggggacuuccugcacuuccugccccgcguguucagcgccgugggcaacaucugcuacaccccguccaagcucaucgaguacaccgacuucgccacgagcgcgugcguccuggccgccgagugcaccaucuucaaggacgccuccgggaagcccgugcccuacugcuacgacaccaacgugcuggagggcagcgucgccuacgagucccuccggcccgacacccgcuacgugcugauggacgggagcaucauccaguucccgaacacguaccuggagggcuccgugcgggucgugaccaccuucgacagcgaguacugccgccacgggaccugcgagcgguccgaggcgggggugugcgucagcacguccggccgcugggugcucaacaacgacuacuaccggagccugcccgggguguucugcggcgucgacgccgugaaccugcucaccaacauguucacgccccugauccagcccaucggcgcccuggacaucuccgccagcaucgucgccgggggcaucguggcgaucguggugaccugccucgccuacuacuucaugcgcuuccggcgcgccuucggggaguacagccacgucguggccuucaacacccugcuguuccucauguccuucaccguccugugccugaccccgguguacagcuuccuccccggcguguacuccgucaucuaccuguaccugaccuucuaccucacgaacgacgugagcuuccuggcccacauccaguggauggugauguucacgccccugguccccuucuggaucaccaucgcguacaucaucugcaucuccaccaagcacuucuacugguucuucagcaacuaccucaagcggcgcgugguguucaacggggucuccuucagcaccuucgaggaggccgcccugugcaccuuccugcucaacaaggagauguaccugaagcugcgguccgacgugcuccugccgcugacccaguacaaccgcuaccucgcccuguacaacaaguacaaguacuucagcggcgugauggacaccacguccuaccgggaggccgcgugcugccaccuggccaaggcccucaacgacuucagcaacuccggcagcgacguccuguaccagccgccccagaccuccaucaccagcgccgugcugcagugaggacuaguuauaagacugacuagcccgaugggccucccaacgggcccuccuccccuccuugcaccgagauuaauaaaaaaaaaaaaaaaaaaaaaaaaaaaaaaaaaaaaaaaaaaaaaaaaaaaaaaaaaaaaaaaaugcaucccccccccccccccccccccccccccccccaaaggcucuuuucagagccaccagaauu

SEQ ID NO: 22088 - RNA, 1723 nt, Artificial Sequence
  SARS-CoV-2__MT827203.1__non-structural protein 4 (NSP4) mRNA gc
aggagaaagcuuaccaugaagaucgugaacaacuggcugaagcagcucaucaaggucacccugguguuccuguucguggccgccaucuucuaccucaucacccccguccacgugaugagcaagcacacggacuucuccagcgagaucaucggcuacaaggcgaucgacgggggcgugacccgcgacaucgccuccaccgacacgugcuucgccaacaagcacgccgacuucgacaccugguucagccagcggggcggcuccuacaccaacgacaaggccugcccccugaucgcggccgucaucacccgcgaggugggguucgugguccccggccugcccggcaccauccuccggacgaccaacggggacuuccugcacuuccugccccgcguguucagcgccgugggcaacaucugcuacaccccguccaagcucaucgaguacaccgacuucgccacgagcgcgugcguccuggccgccgagugcaccaucuucaaggacgccuccgggaagcccgugcccuacugcuacgacaccaacgugcuggagggcagcgucgccuacgagucccuccggcccgacacccgcuacgugcugauggacgggagcaucauccaguucccgaacacguaccuggagggcuccgugcgggucgugaccaccuucgacagcgaguacugccgccacgggaccugcgagcgguccgaggugggggucugcgugagcacguccggccgcugggugcucaacaacgacuacuaccggagccugcccggggucuucugcggcguggacgcggucaaccugcucaccaacauguucacgccccugauccagcccaucggcgcccuggacaucuccgccagcaucguggccgggggcaucguggccaucgucgugaccugccucgcguacuacuucaugcgcuuccggcgcgccuucggggaguacagccacguggucgccuucaacacccugcuguuccucauguccuucaccgugcugugccugaccccgguguacagcuuccuccccggcgucuacuccgugaucuaccuguaccugaccuucuaccucacgaacgacgugagcuuccuggcccacauccaguggauggucauguucacgccccuggugcccuucuggaucaccaucgccuacaucaucugcaucuccaccaagcacuucuacugguucuucagcaacuaccucaagcggcgcguggucuucaacgggguguccuucagcaccuucgaggaggcggcccugugcaccuuccugcucaacaaggagauguaccugaagcugcgguccgacgugcuccugccgcugacccaguacaaccgcuaccucgcccuguacaacaaguacaaguacuucagcggcgccauggacaccacguccuaccgggaggccgcgugcugccaccuggccaaggcccucaacgacuucagcaacuccggcagcgacguccuguaccagccgccccagaccuccaucaccagcgccgugcugcagugaggacuaguuauaagacugacuagcccgaugggccucccaacgggcccuccuccccuccuugcaccgagauuaauaaaaaaaaaaaaaaaaaaaaaaaaaaaaaaaaaaaaaaaaaaaaaaaaaaaaaaaaaaaaaaaaugcaucccccccccccccccccccccccccccccccaaaggcucuuuucagagccaccagaauu

SEQ ID NO: 22089 - RNA, 1723 nt, Artificial Sequence
  SARS-CoV-2__MT825091.1__non-structural protein 4 (NSP4) mRNA gc
aggagaaagcuuaccaugaagaucgugaacaacuggcugaagcagcucaucaaggucacccugguguuccuguucguggccgccaucuucuaccucaucacccccguccacgugaugagcaagcacacggacuucuccagcgagaucaucggcuacaaggacaucgacgggggcgugacccgcgacaucgcguccaccgacacgugcuucgccaacaagcacgccgacuucgacaucugguucagccagcggggcggcuccuacaccaacgacaaggccugcccccugaucgccgcggucaucacccgcgaggugggguucgugguccccggccugcccggcaccauccuccggaccacgaacggggacuuccugcacuuccugccccgcguguucagcgccgugggcaacaucugcuacaccccguccaagcucaucgaguacaccgacuucgccaccagcgccugcguccuggcggccgagugcacgaucuucaaggacgccuccgggaagcccgugcaguacugcuacgacaccaacgugcaggagggcagcgucgccuacgagucccugcggcccgacacccgcuacgugcucauggacgggagcaucauccaguuccccaacaccuaccuggagggcuccgugcgggucgugacgaccuucgacagcgaguacugccgccacgggaccugcgagcgguccgaggccggggugugcgucagcaccuccggccgcugggugccgaacaacgacuacuaccggagccugcccgggguguucugcggcgucgacgcggugaaccuccugacgaacauguucacgccccugauccagcucaucggcgcccuggacaucuccgccagcaucgucgccgggggcaucguggccaucguggugaccugccuggcguacuacuucaugcgcuuccggcgcgccuucggggaguacagccacgucguggccuucaacacccuccccuuccugauguccuucaccguccacugccugaccccgguguacagcuuccuccccggcguguacuccgucaucuaccuguaccugaccuucuaccucaccaacgacgugagcuuccuggcccacauccaguggauggugauguucacgccccugguccccuucuggaucaccaucgccuacaucaucugcaucuccaccaagcacuucuacugguucuucagcaacuaccucaagcggcgcgugguguucaacggggucuccuucagcaccuucgaggaggcggcccugugcacguuccugcucaacaaggagauguaccugaagcugcgguccgacgugcuccugccgcugacccaguacaaccgcuaccucgcccuguacaacaaguacaaguacuucagcggcgccauggacaccaccuccuaccgggaggccgcgugcugccaccuggccaaggcccucaacgacuucagcaacuccggcagcgacgugcuguaccugccgccccagacguccaucaccagcgccguccuccagugaggacuaguuauaagacugacuagcccgaugggccucccaacgggcccuccuccccuccuugcaccgagauuaauaaaaaaaaaaaaaaaaaaaaaaaaaaaaaaaaaaaaaaaaaaaaaaaaaaaaaaaaaaaaaaaaugcaucccccccccccccccccccccccccccccccaaaggcucuuuucagagccaccagaauu

SEQ ID NO: 22090 - RNA, 1723 nt, Artificial Sequence
  SARS-CoV-2__MT821553.1__non-structural protein 4 (NSP4) mRNA gc
aggagaaagcuuaccaugaagaucgugaacaacuggcugaagcagcucaucaaggucacccugguguuccuguucguggccgccaucuucuaccucaucacccccguccacgugaugagcaagcacacggacuucuccagcgagaucaucggcuacaaggcgaucgacgggggcgugacccgcgacaucgccuccaccgacacgugcuucgccaacaagcacgccgacuucgacaccugguucagccagcggggcggcuccuacaccaacgacaaggccugcccgcugaucgcggccgucaucacccgcgaggugggguucgugguccccggccugcccggcaccauccuccggacgaccaacggggacuuccugcacuuccugccccgcguguucagcgccgugggcaacaucugcuacaccccguccaagcucaucgaguacaccgacuucgccacgagcgcgugcguccuggccgccgagugcaccaucuucaaggacgccuccgggaagcccgugcccuacugcuacgacaccaacgugcuggagggcagcgucgccuacgagucccuccggcccgacacccgcuacgugcugauggacgggagcaucauccaguucccgaacacguaccuggagggcuccgugcgggucgugaccaccuucgacagcgaguacugccgccacgggaccugcgagcgguccgaggcgggggugugcgucagcacguccggccgcugggugcucaacaacgacuacuaccggagccugcccgggguguucugcggcgucgacgccgugaaccugcucaccaacauguucacgccccugauccagcccaucggcgcccuggacaucuccgccagcaucgucgccgggggcaucguggcgaucguggugaccugccucgccuacuacuucaugcgcuuccggcgcgccuucggggaguacagccacgucguggccuucaacacccugcuguuccucauguccuucaccguccugugccugaccccgguguacagcuuccuccccggcguguacuccgucaucuaccuguaccugaccuucuaccucacgaacgacgugagcuuccuggcccacauccaguggauggugauguucacgccccugguccccuucuggaucaccaucgcguacaucaucugcaucuccaccaagcacuucuacugguucuucagcaacuaccucaagcggcgcgugguguucaacggggucuccuucagcaccuucgaggaggccgcccugugcaccuuccugcucaacaaggagauguaccugaagcugcgguccgacgugcuccugagccugacccaguacaaccgcuaccucgcccuguacaacaaguacaaguacuucuccggcgccauggacaccacgagcuaccgggaggcggccugcugccaccuggccaaggcccucaacgacuucuccaacagcggcuccgacgugcuguaccagccgccccagaccagcaucaccuccgcgguccugcagugaggacuaguuauaagacugacuagcccgaugggccucccaacgggcccuccuccccuccuugcaccgagauuaauaaaaaaaaaaaaaaaaaaaaaaaaaaaaaaaaaaaaaaaaaaaaaaaaaaaaaaaaaaaaaaaaugcaucccccccccccccccccccccccccccccccaaaggcucuuuucagagccaccagaauu

SEQ ID NO: 22091 - RNA, 1723 nt, Artificial Sequence
  SARS-CoV-2__MT821707.1__non-structural protein 4 (NSP4) mRNA gc
aggagaaagcuuaccaugaagaucgugaacaacuggcugaagcagcucaucaaggucacccugguguuccuguucguggccgccaucuucuaccucaucacccccguccacgugaugagcaagcacacggacuucuccagcgagaucaucggcuacaaggcgaucgacgggggcgugacccgcgacaucgccuccaccgacacgugcuucgccaacaagcacgccgacuucgacaccugguucagccagcggggcggcuccuacaucaacgacaaggccugcccccugaucgcggccgucaucacccgcgaggugggguucgugguccccggccugcccggcaccauccuccggaccacgaacggggacuuccugcacuuccugccccgcguguucagcgccgugggcaacaucugcuacaccccguccaagcucaucgaguacaccgacuucgccaccagcgcgugcguccuggccgccgagugcacgaucuucaaggacgccuccgggaagcccgugcccuacugcuacgacaccaacgugcuggagggcagcgucgccuacgagucccuccggcccgacacccgcuacgugcugauggacgggagcaucauccaguucccgaacaccuaccuggagggcuccgugcgggucgugacgaccuucgacagcgaguacugccgccacgggaccugcgagcgguccgaggcgggggugugcgucagcaccuccggccgcugggugcucaacaacgacuacuaccggagccugcccgggguguucugcggcgucgacgccgugaaccugcucacgaacauguucacgccccugauccagcccaucggcgcccuggacaucuccgccagcaucgucgccgggggcaucguggcgaucguggugaccugccucgccuacuacuucaugcgcuuccggcgcgccuucggggaguacagccacgucguggccuucaacacccugcuguuccucauguccuucaccguccugugccugaccccgguguacagcuuccuccccggcguguacuccgucaucuaccuguaccugaccuucuaccucaccaacgacgugagcuuccuggcccacauccaguggauggugauguucacgccccugguccccuucuggaucaccaucgcguacaucaucugcaucuccaccaagcacuucuacugguucuucagcaacuaccucaagcggcgcgugguguucaacggggucuccuucagcaccuucgaggaggccgcccugugcacguuccugcucaacaaggagauguaccugaagcugcgguccgacgugcuccugccgcugacccaguacaaccgcuaccucgcccuguacaacaaguacaaguacuucagcggcgccauggacaccaccuccuaccgggaggcggccugcugccaccuggccaaggcccucaacgacuucagcaacuccggcagcgacgugcuguaccagccgccccagacguccaucaccagcgcgguccugcagugaggacuaguuauaagacugacuagcccgaugggccucccaacgggcccuccuccccuccuugcaccgagauuaauaaaaaaaaaaaaaaaaaaaaaaaaaaaaaaaaaaaaaaaaaaaaaaaaaaaaaaaaaaaaaaaaugcaucccccccccccccccccccccccccccccccaaaggcucuuuucagagccaccagaauu

SEQ ID NO: 22092 - RNA, 1723 nt, Artificial Sequence
  SARS-CoV-2__MT820132.1__non-structural protein 4 (NSP4) mRNA gc
aggagaaagcuuaccaugaagaucgugaacaacuggcugaagcagcucaucaaggucacccugguguuccuguucguggccgccaucuucuaccucaucacccccguccacgugaugagcaagcacacggacuucuccagcgagaucaucggcuacaaggcgaucgacgggggcgugacccgcgacaucgccuccaccgacacgugcuucgccaacaagcacgccgacuucgacaccugguucagccagcggggcggcuccuacaccaacgacaaggccugcccccugaucgcggccgucaucacccgcgaggugggguucgugguccccggccugcccggcaccauccuccggacgaccaacggggacuuccugcacuuccugccccgcguguucagcgccgugggcaacaucugcuacaccccguccaagcucaucgaguacaccgacuucgccacgagcgcgugcguccuggccgccgagugcaccaucuucaaggacgccuccgggaagcccgugcccuacugcuacgacaccaacgugcuggagggcagcgucgccuacgagucccuccggcccgacacccgcuacgugcugauggacgggagcaucauccaguucccgaacacguaccuggagggcuccgugcgggucgugaccaccuucgacagcgaguacugccgccacgggaccugcgagcgguccgaggcgggggugugcgucagcacguccggccgcugggugcucaacaacgacuacuaccggagccugcccgggguguucugcggcgucgacgccgugaaccugcucaccaacauguucacgccccugauccagcccaucggcgcccuggacaucuccgccagcaucgucgccgggggcaucguggcgaucguggugaccugccucgccuacuacuucaugcgcuuccggcgcgccuucggggaguacagccacgucguggccuucaacacccugcuguuccucauguccuucaccguccugugccugaccccgguguacagcuuccuccccggcguguacuccgucaucuaccuguaccugaccuucuaccucacgaacgacgugagcuuccuggcccacauccaguggauggugauguucacgccccugguccccuucuggaucaccaucgcguacaucaucugcaucuccaccaagcacuucuacugguucuucagcaacuaccucaagcggcgcgugguguucaacggggucuccuucagcaccuucgaggaggccgcccugugcaccuuccugcucaacaaggagauguaccugaagcugcgguccgacgugcucccgcugacccaguacaaccgcuaccuggcccucuacaacaaguacaaguacuucagcggcgccauggacaccacguccuaccgggaggcggccugcugccaccuggccaaggcccugaacgacuucagcaacuccggcagcgacgugcucuaccagccgccccagaccuccaucaccagcgcgguccugcaguccugaggacuaguuauaagacugacuagcccgaugggccucccaacgggcccuccuccccuccuugcaccgagauuaauaaaaaaaaaaaaaaaaaaaaaaaaaaaaaaaaaaaaaaaaaaaaaaaaaaaaaaaaaaaaaaaaugcaucccccccccccccccccccccccccccccccaaaggcucuuuucagagccaccagaauu

SEQ ID NO: 22093 - RNA, 1723 nt, Artificial Sequence
  SARS-CoV-2__MT810483.1__non-structural protein 4 (NSP4) mRNA gc
aggagaaagcuuaccaugaagaucgugaacaacuggcugaagcagcucaucaaggucacccugguguuccuguucguggccgccaucuucuaccucaucacccccguccacgugaucagcaagcacacggacuucuccagcgagaucaucggcuacaaggcgaucgacgggggcgugacccgcgacaucgccuccaccgacacgugcuucgccaacaagcacgccgacuucgacaccugguucagccagcggggcggcuccuacaccaacgacaaggccugcccccugaucgcggccgucaucacccgcgaggugggguucgugguccccggccugcccggcaccauccuccggacgaccaacggggacuuccugcacuuccugccccgcguguucagcgccgugggcaacaucugcuacaccccguccaagcucaucgaguacaccgacuucgccacgagcgcgugcguccuggccgccgagugcaccaucuucaaggacgccuccgggaagcccgugcccuacugcuacgacaccaacgugcuggagggcagcgucgccuacgagucccuccggcccgacacccgcuacgugcugauggacgggagcaucauccaguucccgaacacguaccuggagggcuccgugcgggucgugaccaccuucgacagcgaguacugccgccacgggaccugcgagcgguccgaggcgggggugugcgucagcacguccggccgcugggugcucaacaacgacuacuaccggagccugcccgggguguucugcggcgucgacgccgugaaccugcucaccaacauguucacgccccugauccagcccaucggcgcccuggacaucuccgccagcaucgucgccgggggcaucguggcgaucguggugaccugccucgccuacuacuucaugcgcuuccggcgcgccuucggggaguacagccacgucguggccuucaacacccugcuguuccucauguccuucaccguccugugccugaccccgguguacagcuuccuccccggcguguacuccgucaucuaccuguaccugaccuucuaccucacgaacgacgugagcuuccuggcccacauccaguggauggugauguucacgccccugguccccuucuggaucaccaucgcguacaucaucugcaucuccaccaagcacuucuacugguucuucagcaacuaccucaagcggcgcgugguguucaacggggucuccuucagcaccuucgaggaggccgcccugugcaccuuccugcucaacaaggagauguaccugaagcugcgguccgacgugcuccugccgcugacccaguacaaccgcuaccucgcccuguacaacaaguacaaguacuucagcggcgccauggacaccacguccuaccgggaggcggccugcugccaccuggccaaggcccucaacgacuucagcaacuccggcagcgacgugcuguaccagccgccccagaccuccaucaccagcgcgguccugcagugaggacuaguuauaagacugacuagcccgaugggccucccaacgggcccuccuccccuccuugcaccgagauuaauaaaaaaaaaaaaaaaaaaaaaaaaaaaaaaaaaaaaaaaaaaaaaaaaaaaaaaaaaaaaaaaaugcaucccccccccccccccccccccccccccccccaaaggcucuuuucagagccaccagaauu

SEQ ID NO: 22094 - RNA, 1723 nt, Artificial Sequence
  SARS-CoV-2__MT810494.1__non-structural protein 4 (NSP4) mRNA gc
aggagaaagcuuaccaugaagaucgugaacaacuggcugaagcagcucaucaaggucacccugguguuccuguucguggccgccaucuucuaccucaucacccccguccacgugaugagcaagcacacggacuucuccagcgagaucaucggcuacaaggcgaucgacgggggcgugacccgcgacaucgccuccaccgacacgugcuucgccaacaagcacgccgacuucgacaccugguucagccagcggggcggcuccuacaccaacgacaaggccugcccccugaucgcggccgucaucacccgcgaggugggguucgugguccccggccugcccggcaccauccuccggacgaccaacggggacuuccugcacuuccugccccgcguguucagcgccgugggcaacaucugcuacaccccguccaagcucaucgaguacaccgacuucgccacgagcgcgugcguccuggccgccgagugcaccaucuucaaggacgccuccgggaagcccgugcccuacugcuacgacaccaacgugcuggagggcagcgucguguacgagucccuccggcccgacacccgcuacgugcugauggacgggagcaucauccaguucccgaacacguaccuggagggcuccguccggguggugaccaccuucgacagcgaguacugccgccacgggaccugcgagcgguccgaggccggggucugcgugagcacguccggccgcugggugcucaacaacgacuacuaccggagccugcccggggucuucugcggcguggacgcggucaaccugcucaccaacauguucacgccccugauccagcccaucggcgcccuggacaucuccgccagcaucguggccgggggcaucguggccaucgucgugaccugccucgcguacuacuucaugcgcuuccggcgcgccuucggggaguacagccacguggucgccuucaacacccugcuguuccucauguccuucaccgugcugugccugaccccgguguacagcuuccuccccggcgucuacuccgugaucuaccuguaccugaccuucuaccucacgaacgacgugagcuuccuggcccacauccaguggauggucauguucacgccccuggugcccuucuggaucaccaucgccuacaucaucugcaucuccaccaagcacuucuacugguucuucagcaacuaccucaagcggcgcguggucuucaacgggguguccuucagcaccuucgaggaggcggcccugugcaccuuccugcucaacaaggagauguaccugaagcugcgguccgacgugcuccugccgcugacccaguacaaccgcuaccucgcccuguacaacaaguacaaguacuucagcggcgccauggacaccacguccuaccgggaggccgcgugcugccaccuggccaaggcccucaacgacuucagcaacuccggcagcgacguccuguaccagccgccccagaccuccaucaccagcgccgugcugcagugaggacuaguuauaagacugacuagcccgaugggccucccaacgggcccuccuccccuccuugcaccgagauuaauaaaaaaaaaaaaaaaaaaaaaaaaaaaaaaaaaaaaaaaaaaaaaaaaaaaaaaaaaaaaaaaaugcaucccccccccccccccccccccccccccccccaaaggcucuuuucagagccaccagaauu

SEQ ID NO: 22095 - RNA, 1723 nt, Artificial Sequence
  SARS-CoV-2__MT810720.1__non-structural protein 4 (NSP4) mRNA gc
aggagaaagcuuaccaugaagaucgugaacaacuggcugaagcagcucaucaaggucacccugguguuccuguucguggccgccaucuucuaccucaucacccccguccacgugaugagcaagcacacggacuucuccagcgagaucaucggcuacaaggcgaucgacgggggcgugacccgcgacaucgccuccaccgacacgugcuucgccaacaagcacgccgacuucgacgccugguucagccagcggggcggcuccuacaccaacgacaaggcgugcccccugaucgccgccgucaucacccgcgaggugggguucgugguccccggccugcccggcaccauccuccggaccacgaacggggacuuccugcacuuccugccccgcguguucagcgccgugggcaacaucugcuacaccccguccaagcucaucgaguacaccgacuucgcgaccagcgccugcguccuggccgccgagugcacgaucuucaaggacgccuccgggaagcccgugcccuacugcuacgacaccaacgugcuggagggcagcgucgcguacgagucccuccggcccgacacccgcuacgugcugauggacgggagcaucauccaguucccgaacaccuaccuggagggcuccgugcgggucgugacgaccuucgacagcgaguacugccgccacgggaccugcgagcgguccgaggccggggugugcgucagcaccuccggccgcugggugcucaacaacgacuacuaccggagccugcccgggguguucugcggcgucgacgccgugaaccugcucacgaacauguucacgccccugauccagcccaucggcgcccuggacaucuccgccagcaucgucgccgggggcaucguggcgaucguggugaccugccucgccuacuacuucaugcgcuuccggcgcgccuucggggaguacagccacgucguggccuucaacacccugcuguuccucauguccuucaccguccugugccugaccccgguguacagcuuccuccccggcguguacuccgucaucuaccuguaccugaccuucuaccucaccaacgacgugagcuuccuggcgcacauccaguggauggugauguucacgccccugguccccuucuggaucaccaucgccuacaucaucugcaucuccaccaagcacuucuacugguucuucagcaacuaccucaagcggcgcgugguguucaacggggucuccuucagcaccuucgaggaggccgcccugugcacguuccugcucaacaaggagauguaccugaagcugcgguccgacgugcuccugccgcugacccaguacaaccgcuaccucgcccuguacaacaaguacaaguacuucagcggcgcgauggacaccaccuccuaccgggaggccgccugcugccaccuggccaaggcgcucaacgacuucagcaacuccggcagcgacgugcuguaccagccgccccagacguccaucaccagcgccguccugcagugaggacuaguuauaagacugacuagcccgaugggccucccaacgggcccuccuccccuccuugcaccgagauuaauaaaaaaaaaaaaaaaaaaaaaaaaaaaaaaaaaaaaaaaaaaaaaaaaaaaaaaaaaaaaaaaaugcaucccccccccccccccccccccccccccccccaaaggcucuuuucagagccaccagaauu

SEQ ID NO: 22096 - RNA, 1723 nt, Artificial Sequence
  SARS-CoV-2__MT810758.1__non-structural protein 4 (NSP4) mRNA gc
aggagaaagcuuaccaugaagaucgugaacaacuggcugaagcagcucaucaaggucacccugguguuccuguucguggccgccaucuucuaccucaucacccccguccacgugaugagcaagcacacggacuucuccagcgagaucaucggcuacaaggcgaucgacgggggcgugacccgcgacaucgccuccaccgacacgugcuucgccaacaagcacgccgacuucgacaccugguucagccagcggggcggcuccuacaccaacgacaaggccugcccccugaucgcggccgucaucacccgcgaggugggguucgugguccccggccugcccggcaccauccuccggacgaccaacggggacuuccugcacuuccugccccgcguguucagcgccgugggcaacaucugcuacaccccguccaagcucaucgaguacaccgacuucgccacgagcgcgugcguccuggccgccgagugcaccaucuucaaggacgccuccgggaagcccgugcccuacugcuacgacaccaacgugcuggagggcagcgucgccuacgagucccuccggcccgacacccgcuacgugcugauggacgggagcaucauccaguucccgaacacguaccuggagggcuccgugcgggucgugaccaccuucgacagcgaguacugccgccacgggaccugcgagcgguccgaggcgggggugugcgucagcacguccggccgcugggugcucaacaacgacuacuaccggagccugcccgggguguucugcggcgucgacgccgugaaccugcucaccaacauguucacgccccugauccagcccaucggcgcccuggacaucuccgccagcaucgucgccgggggcaucguggcgaucguggugaccugccucgccuacuacuucaugcgcuuccggcgcgccuucggggaguacagccacgucguggccuucaacacccugcuguuccucauguccuucaccguccugugccugaccccgguguacagcuuccuccccggcguguacuccgucaucuaccuguaccugaccuucuaccucacgaacgacgugagcuuccuggcccacauccaguggauggugauguucacgccccugguccccuucuggaucaccaucgcguacaucaucugcaucuccaccaagaacuucuacugguucuucagcaacuaccucaagcggcgcgugguguucaacggggucuccuucagcaccuucgaggaggccgcccugugcaccuuccugcucaacaaggagauguaccugaagcugcgguccgacgugcuccugccgcugacccaguacaaccgcuaccucgcccuguacaacaaguacaaguacuucagcggcgccauggacaccacguccuaccgggaggcggccugcugccaccuggccaaggcccucaacgacuucagcaacuccggcagcgacgugcuguaccagccgccccagaccuccaucaccagcgcgguccugcagugaggacuaguuauaagacugacuagcccgaugggccucccaacgggcccuccuccccuccuugcaccgagauuaauaaaaaaaaaaaaaaaaaaaaaaaaaaaaaaaaaaaaaaaaaaaaaaaaaaaaaaaaaaaaaaaaugcaucccccccccccccccccccccccccccccccaaaggcucuuuucagagccaccagaauu

SEQ ID NO: 22097 - RNA, 1723 nt, Artificial Sequence
  SARS-CoV-2__MT810765.1__non-structural protein 4 (NSP4) mRNA gc
aggagaaagcuuaccaugaagaucgugaacaacuggcugaagcagcucaucaaggucacccugguguuccuguucguggccgccaucuucuaccucaucacccccguccacgugauguucaagcacacggacuucagcuccgagaucaucggcuacaaggcgaucgacgggggcgugacccgcgacaucgccagcaccgacacgugcuucgccaacaagcacgccgacuucgacaccugguucucccagcggggcggcagcuacaccaacgacaaggccugcccccugaucgcggccgucaucacccgcgaggugggguucgugguccccggccugcccggcaccauccuccggacgaccaacggggacuuccugcacuuccugccccgcguguucuccgccgugggcaacaucugcuacaccccgagcaagcucaucgaguacaccgacuucgccacguccgcgugcguccuggccgccgagugcaccaucuucaaggacgccagcgggaagcccgugcccuacugcuacgacaccaacgugcuggagggcuccgucgccuacgagagccuccggcccgacacccgcuacgugcugauggacggguccaucauccaguucccgaacacguaccuggagggcagcgugcgggucgugaccaccuucgacuccgaguacugccgccacgggaccugcgagcggagcgaggcgggggugugcgucuccacgagcggccgcugggugcucaacaacgacuacuaccggucccugcccgggguguucugcggcgucgacgccgugaaccugcucaccaacauguucacgccccugauccagcccaucggcgcccuggacaucagcgccuccaucgucgccgggggcaucguggcgaucguggugaccugccucgccuacuacuucaugcgcuuccggcgcgccuucggggaguacagccacgucguggccuucaacacccugcuguuccucaugagcuucaccguccugugccugaccccgguguacuccuuccuccccggcguguacagcgucaucuaccuguaccugaccuucuaccucacgaacgacguguccuuccuggcccacauccaguggauggugauguucacgccccugguccccuucuggaucaccaucgcguacaucaucugcaucagcaccaagcacuucuacugguucuucuccaacuaccucaagcggcgcgugguguucaacggggucagcuucuccaccuucgaggaggccgcccugugcaccuuccugcucaacaaggagauguaccugaagcugcggagcgacgugcuccugccgcugacccaguacaaccgcuaccucgcccuguacaacaaguacaaguacuucuccggcgccauggacaccacgagcuaccgggaggcggccugcugccaccuggccaaggcccucaacgacuucuccaacagcggcuccgacgugcuguaccagccgccccagaccagcaucaccuccgcgguccugcagugaggacuaguuauaagacugacuagcccgaugggccucccaacgggcccuccuccccuccuugcaccgagauuaauaaaaaaaaaaaaaaaaaaaaaaaaaaaaaaaaaaaaaaaaaaaaaaaaaaaaaaaaaaaaaaaaugcaucccccccccccccccccccccccccccccccaaaggcucuuuucagagccaccagaauu

SEQ ID NO: 22098 - RNA, 1723 nt, Artificial Sequence
  SARS-CoV-2__MT810782.1__non-structural protein 4 (NSP4) mRNA gc
aggagaaagcuuaccaugaagaucgugaacaacuggcugaagcagcucaucaaggucacccugguguuccuguucguggccgccaucuucuaccucaucacccccguccacgugaugagcaagcacacggacuucuccagcgagaucaucggcuacaaggcgaucgacgggggcgugacccgcgacaucgccuccaccgacacgugcuucgccaacaagcacgccgacuucgacaccugguucagccagcgcgggggcuccuacaccaccgacaaggccugcccccugaucgcggccgucaucacccgggaggugggguucgugguccccggccugcccggcacgauccuccggaccaccaacggggacuuccugcacuuccugccccgcguguucagcgccgugggcaacaucugcuacaccccguccaagcucaucgaguacacggacuucgccaccagcgcgugcguccuggccgccgagugcaccaucuucaaggacgccuccgggaagcccgugcccuacugcuacgacaccaacgugcuggagggcagcgucgccuacgagucccuccggcccgacacgcgcuacgugcugauggacgggagcaucauccaguucccgaacaccuaccuggagggcuccgugcgggucgugaccaccuucgacagcgaguacugccgccacggcacgugcgagcgguccgaggcgggggugugcgucagcaccuccggccgcugggugcucaacaacgacuacuaccggagccugcccgggguguucugcggcgucgacgccgugaaccugcucaccaacauguucaccccgcugauccagcccaucggcgcccuggacaucuccgccagcaucgucgccgggggcaucguggcgaucguggucacgugccucgccuacuacuucaugcgcuuccggcgcgccuucggggaguacagccacgugguggccuucaacacccugcuguuccucauguccuucaccguccugugccugacccccguguacagcuuccuccccggcguguacuccgucaucuaccuguaccugacguucuaccucaccaacgacgugagcuuccuggcccacauccaguggauggugauguucacgccccugguccccuucuggaucaccaucgcguacaucaucugcaucuccaccaagcacuucuacugguucuucagcaacuaccucaagcggcgcgugguguucaacggggucuccuucagcaccuucgaggaggccgcccugugcaccuuccugcucaacaaggagauguaccugaagcugcgguccgacgugcuccugccgcugacccaguacaaccgcuaccucgcccuguacaacaaguacaaguacuucagcggcgccauggacacgaccuccuaccgggaggcggccugcugccaccuggccaaggcccucaacgacuucagcaacuccggcagcgacgugcuguaccagccgccccagaccuccaucaccagcgcgguccugcagugaggacuaguuauaagacugacuagcccgaugggccucccaacgggcccuccuccccuccuugcaccgagauuaauaaaaaaaaaaaaaaaaaaaaaaaaaaaaaaaaaaaaaaaaaaaaaaaaaaaaaaaaaaaaaaaaugcaucccccccccccccccccccccccccccccccaaaggcucuuuucagagccaccagaauu

SEQ ID NO: 22099 - RNA, 1723 nt, Artificial Sequence
  SARS-CoV-2__MT810814.1__non-structural protein 4 (NSP4) mRNA gc
aggagaaagcuuaccaugaagaucgugaacaacuggcugaagcagcucaucaaggucacccugguguuccuguucguggccgccaucuucuaccucaucacccccguccacgugaugagcaagcacacggacuucuccagcgagaucaucggcuacaaggcgaucgacgggggcgugacccgcgacaucgccuccaccgacacgugcuucgccaacaagcacgccgacuucgacaccugguucagccagcggggcggcuccuacaccaacgacaaggccugcccccugaucgcggccgucaucacccgcgaggugggguucgugguccccggccugcccggcaccauccuccggacgaccaacggggacuuccugcacuuccugccccgcguguucagcgccgugggcaacaucugcuacaccccguccaagcucaucgaguacaccgacuucgccacgagcgcgugcguccuggccgccgagugcaccaucuucaaggacgccuccgggaagcccgugcccuacugcuacgacaccaacgugcuggagggcagcgucgccuacgagucccuccggcccgacacccgcuacgugcugauggacgggagcaucauccaguucccgaacacguaccuggagggcuccgugcgggucgugaccaccuucgacagcgaguacugccgccacgggaccugcgagcgguccgaggcgggggugugcgucagcacguccggccgcugggugcucaacaacgacuacuaccggagccugcccgggguguucugcggcgucgacgccgugaaccugcucaccaacauguucacgccccugauccagcccaucggcgcccuggacaucuccgccagcaucgucgccgggggcaucguggcgaucguggugaccugccucgccuacuacuucaugcgcuuccggcgcgccuucggggaguacagccacgucguggccuucaacacccugcuguuccucauguccuucaccguccugugccugaccccgguguacagcuuccuccccggcguguacuccgucaucuaccuguaccugaccuucuaccucacgaacgacgugagcuuccuggcccacauccaguggauggugauguucacgccccugguccccuucuggaucaccaucgcguacaucaucugcaucuccaccaagcacuucuacugguucuucagcaacuaccucaagcggcgcgugguguucaacggggucuccuucagcaccuucgaggaggccgcccugugcaccuuccugcucaacaaggagauguaccugaagcugcgguccgacgugcuccugccgcugacccaguacaaccgcuaccucgugcuguacaacaaguacaaguacuucagcggcgccauggacaccacguccuaccgggaggccgcgugcugccaccuggccaaggcccucaacgacuucagcaacuccggcagcgacguccuguaccagccgccccagaccuccaucaccagcgccgugcugcagugaggacuaguuauaagacugacuagcccgaugggccucccaacgggcccuccuccccuccuugcaccgagauuaauaaaaaaaaaaaaaaaaaaaaaaaaaaaaaaaaaaaaaaaaaaaaaaaaaaaaaaaaaaaaaaaaugcaucccccccccccccccccccccccccccccccaaaggcucuuuucagagccaccagaauu

SEQ ID NO: 22100 - RNA, 1723 nt, Artificial Sequence
  SARS-CoV-2__MT810842.1__non-structural protein 4 (NSP4) mRNA gc
aggagaaagcuuaccaugaagaucgugaacaacuggcugaagcagcucaucaaggucacccugguguuccuguucguggccgccaucuucuaccucaucacccccguccacgugaugagcaagcacacggacuucuccagcgagaucaucggcuacaaggcgaucgacgggggcgugacccgcgacaucgccuccaccgacacgugcuucgccaacaagcacgccgacuucgacaccugguucagccagcgcgggggcuccuacaccaacgacaaggccugcccccugaucgcggccgucaucacccgggaggugggguucgugguccccggccugcccggcaccauccuccggacgaccaacggggacuuccugcacuuccugccccgcguguucagcgccgugggcaacaucugcuacaccccguccaagcucaucgaguacaccgacuucgccacgagcgcgugcguccuggccgccgagugcaccaucuucaaggacgccuccgggaagcccgugcccuacugcuacgacaccaacgugcuggagggcagcgucgccuacgagucccuccggcccgacacccgcuacgugcugauggacgggagcaucauccaguucccgaacacguaccuggagggcuccgugcgggucgugaccaccuucgacagcgaguacugccgccacugcacgugcgagcgguccgaggcgggcgugugcgucagcaccuccgggcgcugggugcucaacaacgacuacuaccggagccugcccggcguguucugcggggucgacgccgugaaccugcucaccaacauguucacgccccugauccagcccaucggcgcccuggacaucuccgccagcaucgucgccggcgggaucguggcgaucguggugaccugccucgccuacuacuucaugcgcuuccggcgcgccuucggcgaguacagccacgucguggccuucaacacccugcuguuccucauguccuucaccguccugugccugaccccgguguacagcuuccuccccgggguguacuccgucaucuaccuguaccugaccuucuaccucacgaacgacgugagcuuccuggcccacauccaguggauggugauguucacgccccugguccccuucuggaucaccaucgcguacaucaucugcaucuccaccaagcacuucuacugguucuucagcaacuaccucaagcggcgcgugguguucaacggcgucuccuucagcaccuucgaggaggccgcccugugcaccuuccugcucaacaaggagauguaccugaagcugcgguccgacgugcuccugccgcugacccaguacaaccgcuaccucgcccuguacaacaaguacaaguacuucagcggggccauggacaccacguccuaccgggaggcggccugcugccaccuggccaaggcccucaacgacuucagcaacuccggcagcgacgugcuguaccagccgccccagaccuccaucaccagcgcgguccugcagugaggacuaguuauaagacugacuagcccgaugggccucccaacgggcccuccuccccuccuugcaccgagauuaauaaaaaaaaaaaaaaaaaaaaaaaaaaaaaaaaaaaaaaaaaaaaaaaaaaaaaaaaaaaaaaaaugcaucccccccccccccccccccccccccccccccaaaggcucuuuucagagccaccagaauu

SEQ ID NO: 22101 - RNA, 1723 nt, Artificial Sequence
  SARS-CoV-2__MT810897.1__non-structural protein 4 (NSP4) mRNA gc
aggagaaagcuuaccaugaagaucgugaacaacuggcugaagcagcucaucaaggucacccugguguuccuguucguggccgccaucuucuaccucaucacccccguccacgugaugagcaagcacacggacuucuccagcgagaucaucggcuacaaggcgaucgacgggggcgugacccgcgacaucgccuccaccgacacgugcuucgccaacaagcacgccgacuucgacaccugguucagccagcggggcggcuccuacaccaacgacaaggccugcccccugaucgcggccgucaucacccgcgaggugggguucgugguccccggccugcccggcaccauccuccggacgaccaacggggacuuccugcacuuccugccccgcguguucagcgccgugggcaacaucugcuacaccccguccaagcucaucgaguacaccgacuucgccacgagcgcgugcguccuggccgccgagugcaccaucuucaaggaggccuccgggaagcccgugcccuacugcuacgacaccaacgugcuggagggcagcgucgccuacgagucccuccggcccgacacccgcuacgugcugauggacgggagcaucauccaguucccgaacacguaccuggagggcuccgugcgggucgugaccaccuucgacagcgaguacugccgccacgggaccugcgagcgguccgaggcgggggugugcgucagcacguccggccgcugggugcucaacaacgacuacuaccggagccugcccgggguguucugcggcgucgacgccgugaaccugcucaccaacauguucacgccccugauccagcccaucggcgcccuggacaucuccgccagcaucgucgccgggggcaucguggcgaucguggugaccugccucgccuacuacuucaugcgcuuccggcgcgccuucggggaguacagccacgucguggccuucaacacccugcuguuccucauguccuucaccguccugugccugaccccgguguacagcuuccuccccggcguguacuccgucaucuaccuguaccugaccuucuaccucacgaacgacgugagcuuccuggcccacauccaguggauggugauguucacgccccugguccccuucuggaucaccaucgcguacaucaucugcaucuccaccaagcacuucuacugguucuucagcaacuaccucaagcggcgcgugguguucaacggggucuccuucagcaccuucgaggaggccgcccugugcaccuuccugcucaacaaggagauguaccugaagcugcgguccgacgugcuccugccgcugacccaguacaaccgcuaccucgcccuguacaacaaguacaaguacuucagcggcgccauggacaccacguccuaccgggaggcggccugcugccaccuggccaaggcccucaacgacuucagcaacuccggcagcgacgugcuguaccagccgccccagaccuccaucaccagcgcgguccugcagugaggacuaguuauaagacugacuagcccgaugggccucccaacgggcccuccuccccuccuugcaccgagauuaauaaaaaaaaaaaaaaaaaaaaaaaaaaaaaaaaaaaaaaaaaaaaaaaaaaaaaaaaaaaaaaaaugcaucccccccccccccccccccccccccccccccaaaggcucuuuucagagccaccagaauu

SEQ ID NO: 22102 - RNA, 1723 nt, Artificial Sequence
  SARS-CoV-2__MT810946.1__non-structural protein 4 (NSP4) mRNA gc
aggagaaagcuuaccaugaagaucgugaacaacuggcugaagcagcucaucaaggucacccugguguuccuguucguggccgccaucuucuaccucaucacccccguccacgugaugagcaagcacacggacuucuccagcgagaucaucggcuacaaggcgaucgacgggggcgugacccgcgacaucgccuccaccgacacgugcuucgccaacaagcacgccgacuucgacaccugguucagccagcggggcggcuccuacaccaacgacaaggccugcccccugaucgcggccgucaucacccgcgaggugggguucgugguccccggccugcccggcaccauccuccggacgaccaacggggacuuccugcacuuccugccccgcguguucagcgccgugggcaacaucugcuacaccccguccaagcucaucgaguacaccgacuucgccacgagcgcgugcguccuggccgccgagugcaccaucuucaaggacgccuccgggaagcccgugcccuacugcuacgacaccaacgugcuggagggcagcgucgccuacgagucccuccggcccgacacccgcuacgugcugauggacgggagcaucauccaguucccgaacacguaccuggagggcuccgugcgggucgugaccaccuucgacagcgaguacugccgccacgggaccugcgagcgguccgaggcgggggugugcgucagcacguccggccgcugggugcucaacaacgacuacuaccggagccugcccgggguguucugcggcgucgacgccgugaaccugcucaccaacauguucacgccccugauccagcccaucggcgcccuggacaucuccgccagcaucgucgccgggggcgugguggcgaucgucgugaccugccucgccuacuacuucaugcgcuuccggcgcgccuucggggaguacagccacguggucgccuucaacacccugcuguuccucauguccuucaccgugcugugccugaccccgguguacagcuuccuccccggcgucuacuccgugaucuaccuguaccugaccuucuaccucacgaacgacgugagcuuccuggcccacauccaguggauggucauguucacgccccuggugcccuucuggaucaccaucgcguacaucaucugcaucuccaccaagcacuucuacugguucuucagcaacuaccucaagcggcgcguggucuucaacgggguguccuucagcaccuucgaggaggccgcccugugcaccuuccugcucaacaaggagauguaccugaagcugcgguccgacgugcuccugccgcugacccaguacaaccgcuaccucgcccuguacaacaaguacaaguacuucagcggcgccauggacaccacguccuaccgggaggcggccugcugccaccuggccaaggcccucaacgacuucagcaacuccggcagcgacguccuguaccagccgccccagaccuccaucaccagcgcggugcugcagugaggacuaguuauaagacugacuagcccgaugggccucccaacgggcccuccuccccuccuugcaccgagauuaauaaaaaaaaaaaaaaaaaaaaaaaaaaaaaaaaaaaaaaaaaaaaaaaaaaaaaaaaaaaaaaaaugcaucccccccccccccccccccccccccccccccaaaggcucuuuucagagccaccagaauu

SEQ ID NO: 22103 - RNA, 1723 nt, Artificial Sequence
  SARS-CoV-2__MT810982.1__non-structural protein 4 (NSP4) mRNA gc
aggagaaagcuuaccaugaagaucgugaacaacuggcugaagcagcucaucaaggucacccugguguuccuguucguggccgccaucuucuaccucaucacccccguccacgugaugagcaagcacacggacuucuccagcgagaucaucggcuacaaggcgaucgacgggggcgugacccgcgacaucgccuccaccgacacgugcuucgccaacaagcacgccgacuucgacaccugguucagccagcgcgggggcuccuacaccaacgacaaggccugcccccugaucgcggccgucaucacccgggaggugggguucgugguccccggccugcccggcaccauccuccggacgaccaacggggacuuccugcacuuccugccccgcguguucagcgccgugggcaacaucugcuacaccccguccaagcucaucgaguacaccgacuucgccacgagcgcgugcguccuggccgccgagugcaccaucuucaaggacgccuccgggaagcccgugcccuacugcuacgacaccaacgugcuggagggcagcgucgccuacgagucccuccggcccgacacccgcuacgugcugauggacgggagcaucauccaguucccgaacacguaccuggagggcuccgugcgggucgugaccaccuucgacagcgaguacugccgccacggcaucugcgagcgguccgaggcgggggugugcgucagcaccuccggccgcugggugcucaacaacgacuacuaccggagccugcccgggguguucugcggcgucgacgccgugaaccugcucacgaacauguucacgccccugauccagcccaucggcgcccuggacaucuccgccagcaucgucgccgggggcaucguggcgaucguggugaccugccucgccuacuacuucaugcgcuuccggcgcgccuucggggaguacagccacgucguggccuucaacacccugcuguuccucauguccuucaccguccugugccugaccccgguguacagcuuccuccccggcguguacuccgucaucuaccuguaccugaccuucuaccucaccaacgacgugagcuuccuggcccacauccaguggauggugauguucacgccccugguccccuucuggaucaccaucgcguacaucaucugcaucuccaccaagcacuucuacugguucuucagcaacuaccucaagcggcgcgugguguucaacggggucuccuucagcaccuucgaggaggccgcccugugcacguuccugcucaacaaggagauguaccugaagcugcgguccgacgugcuccugccgcugacccaguacaaccgcuaccucgcccuguacaacaaguacaaguacuucagcggcgccauggacaccaccuccuaccgggaggcggccugcugccaccuggccaaggcccucaacgacuucagcaacuccggcagcgacgugcuguaccagccgccccagacguccaucaccagcgcgguccugcagugaggacuaguuauaagacugacuagcccgaugggccucccaacgggcccuccuccccuccuugcaccgagauuaauaaaaaaaaaaaaaaaaaaaaaaaaaaaaaaaaaaaaaaaaaaaaaaaaaaaaaaaaaaaaaaaaugcaucccccccccccccccccccccccccccccccaaaggcucuuuucagagccaccagaauu

SEQ ID NO: 22104 - RNA, 1723 nt, Artificial Sequence
  SARS-CoV-2__MT811283.1__non-structural protein 4 (NSP4) mRNA gc
aggagaaagcuuaccaugaagaucgugaacaacuggcugaagcagcucaucaaggucacccugguguuccuguucguggccgccaucuucuaccucaucacccccguccacgugaugagcaagcacacggacuucuccagcgagaucaucggcuacaaggcgaucgacgggggcgugacccgcgacaucgccuccaccgacacgugcuucgccaacaagcacgccgacuucgacaccugguucagccagcggggcggcuccuacaccaacgacaaggccugcccgcugaucgcggccgucaucacccgcgaggugggguucgugguccccggccugcccggcaccauccuccggacgaccaacggggacuuccugcacuuccugccccgcguguucagcgccgugggcaacaucugcuacaccccguccaagcucaucgaguacaccgacuucgccacgagcgcgugcguccuggccgccgagugcaccaucuucaaggacgccuccgggaagcccgugcccuacugcuacgacaccaacgugcuggagggcagcgucgccuacgagucccuccggcccgacacccgcuacgugcugauggacgggagcaucauccaguucccgaacacguaccuggagggcuccgugcgggucgugaccaccuucgacagcgaguacugccgccacgggaccugcgagcgguccgaggcgggggugugcgucagcacguccggccgcugggugcucaacaacgacuacuaccggagccugcccgggguguucugcggcgucgacgccgugaaccugcucaccaacauguucacgccccugauccagcccaucggcgcccuggacaucuccgccagcaucgucgccgggggcaucguggcgaucguggugaccugccucgccuacuacuucaugcgcuuccggcgcgccuucggggaguacagccacgucguggccuucaacacccugcuguuccucauguccuucaccguccugugccugaccccgguguacagcuuccuccccggcguguacuccgucaucuaccuguaccugaccuucuaccucacgaacgacgugagcuuccuggcccacauccaguggauggugauguucaccucccugguccccuucuggaucaccaucgcguacaucaucugcaucagcaccaagcacuucuacugguucuucuccaacuaccucaagcggcgcgugguguucaacggggucagcuucuccacguucgaggaggccgcccugugcaccuuccugcucaacaaggagauguaccugaagcugcggagcgacgugcuccugccccugacccaguacaaccgcuaccucgcccuguacaacaaguacaaguacuucuccggcgccauggacaccacgagcuaccgggaggcggccugcugccaccuggccaaggcccucaacgacuucuccaacagcggcuccgacgugcuguaccagccgccccagaccagcaucaccuccgcgguccugcagugaggacuaguuauaagacugacuagcccgaugggccucccaacgggcccuccuccccuccuugcaccgagauuaauaaaaaaaaaaaaaaaaaaaaaaaaaaaaaaaaaaaaaaaaaaaaaaaaaaaaaaaaaaaaaaaaugcaucccccccccccccccccccccccccccccccaaaggcucuuuucagagccaccagaauu

SEQ ID NO: 22105 - RNA, 1723 nt, Artificial Sequence
  SARS-CoV-2__MT811437.1__non-structural protein 4 (NSP4) mRNA gc
aggagaaagcuuaccaugaagaucgugaacaacuggcugaagcagcucaucaaggucacccugguguuccuguucguggccgccaucuucuaccucaucacccccguccacgugaugagcaagcacacggacuucuccagcgagaucaucggcuacaaggcgaucgacgggggcgugacccgcgacaucgccuccaccgacacgugcuucgccaacaagcacgccgacuucgacaccugguucagccagcggggcggcuccuacaccaacgacaaggccugcccccugaucgcggccgucaucacccgcgaggugggguucgugguccccggccugcccggcaccauccuccggacgaccaacggggacuuccugcacuuccugccccgcguguucagcgccgugggcaacaucugcuacaccccguccaagcucaucgaguacaccgacuucgccacgagcgcgugcguccuggccgccgagugcaccaucuucaaggacgccuccgggaagcccgugcccuacugcuacgacaccaacgugcuggagggcagcgucgccuacgagaaccuccggcccgacacccgcuacgugcugauggacggguccaucauccaguucccgaacacguaccuggagggcagcgugcgggucgugaccaccuucgacuccgaguacugccgccacgggaccugcgagcggagcgaggcgggggugugcgucuccacgagcggccgcugggugcucaacaacgacuacuaccggucccugcccgggguguucugcggcgucgacgccgugaaccugcucaccaacauguucacgccccugauccagcccaucggcgcccuggacaucagcgccuccaucgucgccgggggcaucguggcgaucguggugaccugccucgccuacuacuucaugcgcuuccggcgcgccuucggggaguacagccacgucguggccuucaacacccugcuguuccucaugagcuucaccguccugugccugaccccgguguacuccuuccuccccggcguguacagcgucaucuaccuguaccugaccuucuaccucacgaacgacguguccuuccuggcccacauccaguggauggugauguucacgccccugguccccuucuggaucaccaucgcguacaucaucugcaucagcaccaagcacuucuacugguucuucuccaacuaccucaagcggcgcgugguguucaacggggucagcuucuccaccuucgaggaggccgcccugugcaccuuccugcucaacaaggagauguaccugaagcugcggagcgacgugcuccugccgcugacccaguacaaccgcuaccucgcccuguacaacaaguacaaguacuucuccggcgccauggacaccacgagcuaccgggaggcggccugcugccaccuggccaaggcccucaacgacuucuccaacagcggcuccgacgugcuguaccagccgccccagaccagcaucaccuccgcgguccugcagugaggacuaguuauaagacugacuagcccgaugggccucccaacgggcccuccuccccuccuugcaccgagauuaauaaaaaaaaaaaaaaaaaaaaaaaaaaaaaaaaaaaaaaaaaaaaaaaaaaaaaaaaaaaaaaaaugcaucccccccccccccccccccccccccccccccaaaggcucuuuucagagccaccagaauu

SEQ ID NO: 22106 - RNA, 1723 nt, Artificial Sequence
  SARS-CoV-2__MT811448.1__non-structural protein 4 (NSP4) mRNA gc
aggagaaagcuuaccaugaagaucgugaacaacuggcugaagcagcucaucaaggucacccugguguuccuguucguggccgccaucuucuaccucaucacccccguccacgugaugagcaagcacacggacuucuccagcgagaucaucggcuacaaggcgaucgacgggggcgugacccgcgacaucgccuccaccgacacgugcuucgccaacaagcacgccgacuucgacaccugguucagccagcggggcggcuccuacaccaacgacaaggccugcccccugaucgcggccgucaucacccgcgaggugggguucgugguccccggccugcccggcaccauccuccggacgaccaacggggacuuccugcacuuccugccccgcguguucagcgccgugggcaacaucugcuacaccccguccaagcucaucgaguacaccgacuucgccacggcggccugcguccuggccgccgagugcaccaucuucaaggacgccagcgggaagcccgugcccuacugcuacgacaccaacgugcuggagggcuccgucgcguacgagagccuccggcccgacacccgcuacgugcugauggacggguccaucauccaguucccgaacacguaccuggagggcagcgugcgggucgugaccaccuucgacuccgaguacugccgccacgggaccugcgagcggagcgaggccggggugugcgucuccacgagcggccgcugggugcucaacaacgacuacuaccggucccugcccgggguguucugcggcgucgacgccgugaaccugcucaccaacauguucacgccccugauccagcccaucggcgcccuggacaucagcgccuccaucgucgccgggggcaucguggcgaucguggugaccugccucgccuacuacuucaugcgcuuccggcgcgccuucggggaguacagccacgucguggccuucaacacccugcuguuccucaugagcuucaccguccugugccugaccccgguguacuccuuccuccccggcguguacagcgucaucuaccuguaccugaccuucuaccucacgaacgacguguccuuccuggcgcacauccaguggauggugauguucacgccccugguccccuucuggaucaccaucgccuacaucaucugcaucagcaccaagcacuucuacugguucuucuccaacuaccucaagcggcgcgugguguucaacggggucagcuucuccaccuucgaggaggccgcccugugcaccuuccugcucaacaaggagauguaccugaagcugcggagcgacgugcuccugccgcugacccaguacaaccgcuaccucgcccuguacaacaaguacaaguacuucuccggcgcgauggacaccacgagcuaccgggaggccgccugcugccaccuggccaaggcgcucaacgacuucuccaacagcggcuccgacgugcuguaccagccgccccagaccagcaucaccuccgccguccugcagugaggacuaguuauaagacugacuagcccgaugggccucccaacgggcccuccuccccuccuugcaccgagauuaauaaaaaaaaaaaaaaaaaaaaaaaaaaaaaaaaaaaaaaaaaaaaaaaaaaaaaaaaaaaaaaaaugcaucccccccccccccccccccccccccccccccaaaggcucuuuucagagccaccagaauu

SEQ ID NO: 22107 - RNA, 1723 nt, Artificial Sequence
  SARS-CoV-2__MT811484.1__non-structural protein 4 (NSP4) mRNA gc
aggagaaagcuuaccaugaagaucgugaacaacuggcugaagcagcucaucaaggucacccugguguuccuguucguggccgccaucuucuaccucaucacccccguccacgugaugagcaagcacacggacuucuccagcgagaucaucggcuacaaggcgaucgacgggggcgugacccgcgacaucgccuccaccgacacgugcuucgccaacaagcacgccgacuucgacaccugguucagccagcggggcggcuccuacaccaacgacaaggccugcccccugaucgcggccgucaucacccgcgaggugggguucgugguccccggccugcccggcaccauccuccggacgaccaacggggacuuccugcacuuccugccccgcguguucagcgccgugggcaacaucugcuacaccccguccaagcucaucgaguacaccgacuucgccacgagcgcgugcguccuggccgccgagugcaccaucuucaaggacgccuccgggaagcccgugcccuacugcuacgacaccaacgugcuggagggcagcgucgccuacgagucccuccggcccgacacccgcuacgugcugauggacgggagcaucauccaguucccgaacacguaccuggagggcuccgugcgggucgugaccaccuucgacagcgaguacugccgccacgggaccugcgagcgguccgaggcgggggugugcgucagcacguccggccgcugggugcucaacaacgacuacuaccggagccugcccgggguguucugcggcgucgacgccgugaaccugcucaccaacauguucacgccccugauccagcccaucggcgcccuggacaucuccgccagcaucgucgccgggggcaucguggcgaucguggugaccugccucgccuacuacuucaugcgcuuccggcgcgccuucggggaguacagccacgucguggccuucaacacccugcuguuccucauguccuucaccguccugugccugaccccgguguacagcuuccuccccggcguguacuccgucaucuaccuguaccugaccuucuaccucacgaacgacgugagcuuccuggcccacauccaguggauggugauguucacgccccugguccccuucuggaucaccaucgcguacaucaucugcaucuccaccaagcacuucuacugguucuucagcaacuaccucaagcggcgcgugguguucaacggggucuccuucagcaccuucgaggaggccgcccugugcaccuuccugcucaacaaggagauguaccugaagcugcgguccgacgugcuccugccgcugacccaguacaaccgcuaccucgcccuguacaacaaguacaaguacuucagcggcgccauggacaccacguccuaccgggaggcggccugcugccaccuggccaaggcccucaacgacuucagcaacuccggcagcgacgugcuguaccagccgccccaggcguccaucaccagcgccguccugcagugaggacuaguuauaagacugacuagcccgaugggccucccaacgggcccuccuccccuccuugcaccgagauuaauaaaaaaaaaaaaaaaaaaaaaaaaaaaaaaaaaaaaaaaaaaaaaaaaaaaaaaaaaaaaaaaaugcaucccccccccccccccccccccccccccccccaaaggcucuuuucagagccaccagaauu

SEQ ID NO: 22108 - RNA, 1723 nt, Artificial Sequence
  SARS-CoV-2__MT811505.1__non-structural protein 4 (NSP4) mRNA gc
aggagaaagcuuaccaugaagaucgugaacaacuggcugaagcagcucaucaaggucacccugguguuccuguucguggccgccaucuucuaccucaucacccccguccacgugaugagcaagcacacggacuucuccagcgagaucaucggcuacaaggcgaucgacgggggcgugacccgcgacaucgccuccaccgacacgugcuucgccaacaagcacgccgacuucgacaccugguucagccagcggggcggcuccuacaccaacgacaaggccugcccccugaucgcggccgucaucacccgcgaggugggguucgugguccccggccugcccggcaccauccuccggacgaccaacggggacuuccugcacuuccugccccgcguguucagcgccgugggcaacaucugcuacaccccguccaagcucaucgaguacaccgacuucgccacgagcgcgugcguccuggccgccgagugcaccaucuucaaggacgccuccgggaagcccgugcccuacugcuacgacaccaacgugcuggagggcagcgucgccuacgagucccuccggcccgacacccgcuacgugcugauggacgggagcaucauccaguucccgaacacguaccuggagggcuccgugcgggucgugaucaccuucgacagcgaguacugccgccacgggaccugcgagcgguccgaggcgggggugugcgucagcaccuccggccgcugggugcucaacaacgacuacuaccggagccugcccgggguguucugcggcgucgacgccgugaaccugcucacgaacauguucacgccccugauccagcccaucggcgcccuggacaucuccgccagcaucgucgccgggggcaucguggcgaucguggugaccugccucgccuacuacuucaugcgcuuccggcgcgccuucggggaguacagccacgucguggccuucaacacccugcuguuccucauguccuucaccguccugugccugaccccgguguacagcuuccuccccggcguguacuccgucaucuaccuguaccugaccuucuaccucaccaacgacgugagcuuccuggcccacauccaguggauggugauguucacgccccugguccccuucuggaucaccaucgcguacaucaucugcaucuccaccaagcacuucuacugguucuucagcaacuaccucaagcggcgcgugguguucaacggggucuccuucagcaccuucgaggaggccgcccugugcacguuccugcucaacaaggagauguaccugaagcugcgguccgacgugcuccugccgcugacccaguacaaccgcuaccucgcccuguacaacaaguacaaguacuucagcggcgccauggacaccaccuccuaccgggaggcggccugcugccaccuggccaaggcccucaacgacuucagcaacuccggcagcgacgugcuguaccagccgccccagacguccaucaccagcgcgguccugcagugaggacuaguuauaagacugacuagcccgaugggccucccaacgggcccuccuccccuccuugcaccgagauuaauaaaaaaaaaaaaaaaaaaaaaaaaaaaaaaaaaaaaaaaaaaaaaaaaaaaaaaaaaaaaaaaaugcaucccccccccccccccccccccccccccccccaaaggcucuuuucagagccaccagaauu

SEQ ID NO: 22109 - RNA, 1723 nt, Artificial Sequence
  SARS-CoV-2__MT811523.1__non-structural protein 4 (NSP4) mRNA gc
aggagaaagcuuaccaugaagaucgugaacaacuggcugaagcagcucaucaaggucacccugguguuccuguucguggccgccaucuucuaccucaucacccccguccacgugaugagcaagcacacggacuucuccagcgagaucaucggcuacaaggcgaucgacgggggcgugacccgcgacaucgccuccaccgacacgugcuucgccaacaagcacgccgacuucgacaccugguucagccagcggggcggcuccuacaccaacgacaaggccugcccccugaucgcggccgucaucacccgcgaggugggguucgugguccccggccugcccggcaccauccuccggacgaccaacggggacuuccugcacuuccugccccgcguguucagcgccgugggcaacaucugcuacaccccguccaagcucaucgaguacaccgacuucgccacgagcgcgugcguccuggccgccgagugcaccaucuucaaggacgccuccgggaagcccgugcccuacugcuacgacaccaacgugcuggagggcagcgucgccuacgagucccuccggcccgacacccgcuacgugcugauggacgggagcaucauccaguucccgaacacguaccuggagggcuccgugcgggucgugaccaccuucgacagcgaguacugccgccacgggaccugcgagcgguccgaggcgggggugugcgucagcacguccggccgcugggugcucaacaacgacuacuaccggagccugcccgggguguucugcggcgucgacgccgugaaccugcucaccaacauguucacgccccugauccagcccaucggcgcccugaacaucuccgccagcaucgucgccgggggcaucguggcgaucguggugaccugccucgccuacuacuucaugcgcuuccggcgcgccuucggggaguacagccacgucguggccuucaacacccugcuguuccucauguccuucaccguccugugccugaccccgguguacagcuuccuccccggcguguacuccgucaucuaccuguaccugaccuucuaccucacgaacgacgugagcuuccuggcccacauccaguggauggugauguucacgccccugguccccuucuggaucaccaucgcguacaucaucugcaucuccaccaagcacuucuacugguucuucagcaacuaccucaagcggcgcgugguguucaacggggucuccuucagcaccuucgaggaggccgcccugugcaccuuccugcucaacaaggagauguaccugaagcugcgguccgacgugcuccugccgcugacccaguacaaccgcuaccucgcccuguacaacaaguacaaguacuucagcggcgccauggacaccacguccuaccgggaggcggccugcugccaccuggccaaggcccucaacgacuucagcaacuccggcagcgacgugcuguaccagccgccccagaccuccaucaccagcgcgguccugcagugaggacuaguuauaagacugacuagcccgaugggccucccaacgggcccuccuccccuccuugcaccgagauuaauaaaaaaaaaaaaaaaaaaaaaaaaaaaaaaaaaaaaaaaaaaaaaaaaaaaaaaaaaaaaaaaaugcaucccccccccccccccccccccccccccccccaaaggcucuuuucagagccaccagaauu

SEQ ID NO: 22110 - RNA, 1723 nt, Artificial Sequence
  SARS-CoV-2__MT811707.1__non-structural protein 4 (NSP4) mRNA gc
aggagaaagcuuaccaugaagaucgugaacaacuggcugaagcagcucaucaaggucacccugguguuccuguucguggccgccaucuucuaccucaucacccccguccacgugaugagcaagcacacggacuucuccagcgagaucaucggcuacaaggcgaucgacgggggcgugacccgcgacaucgccuccaccgacacgugcuucgccaacaagcacgccgacuucgacaccugguucagccagcggggcggcuccuacaccaacgacaaggccugcccccugaucgcggccgucaucacccgcgaggugggguucgugguccccggccugcccggcaccauccuccggacgaccaacggggacuuccugcacuuccugccccgcguguucagcgccgugggcaacaucugcuacaccccguccaagcucaucgaguacaccgacuucgccacgagcgcgugcguccuggccgccgagugcaccaucuucaaggacgccuccgggaagcccgugcccuacugcuacgacaccaacgugcuggagggcagcgucgccuacgagucccuccggcccgacacccgcuacgugcugauggacgggagcaucauccaguucccgaacacguaccuggagggcuccgugcgggucgugaccaccuucgacagcgaguacugccgccacgggaccugcgagcgguccgaggcgggggugugcgucagcacguccggccgcugggugcucaacaacgacuacuaccggagccugcccggggugcugugcggcgucgacgccgugaaccuccugaccaacauguucacgccccugauccagcccaucggcgcccucgacaucuccgccagcaucgucgccgggggcaucguggcgaucguggugaccugccuggccuacuacuucaugcgcuuccggcgcgccuucggggaguacagccacgucguggccuucaacacccuccuguuccugauguccuucaccguccugugccucaccccgguguacagcuuccugcccggcguguacuccgucaucuaccuguaccucaccuucuaccugacgaacgacgugagcuuccuggcccacauccaguggauggugauguucacgccccucguccccuucuggaucaccaucgcguacaucaucugcaucuccaccaagcacuucuacugguucuucagcaacuaccugaagcggcgcgugguguucaacggggucuccuucagcaccuucgaggaggccgcccugugcaccuuccuccugaacaaggagauguaccugaagcuccgguccgacgugcugcugccgcucacccaguacaaccgcuaccuggcccuguacaacaaguacaaguacuucagcggcgccauggacaccacguccuaccgggaggcggccugcugccaccucgccaaggcccugaacgacuucagcaacuccggcagcgacgugcuguaccagccgccccagaccuccaucaccagcgcgguccugcagugaggacuaguuauaagacugacuagcccgaugggccucccaacgggcccuccuccccuccuugcaccgagauuaauaaaaaaaaaaaaaaaaaaaaaaaaaaaaaaaaaaaaaaaaaaaaaaaaaaaaaaaaaaaaaaaaugcaucccccccccccccccccccccccccccccccaaaggcucuuuucagagccaccagaauu

SEQ ID NO: 22111 - RNA, 1723 nt, Artificial Sequence
  SARS-CoV-2__MT811728.1__non-structural protein 4 (NSP4) mRNA gc
aggagaaagcuuaccaugaagaucgugaacaacuggcugaagcagcucaucaaggucacccugguguuccuguucguggccgccaucuucuaccucaucacccccguccacgugaugagcaagcacacggacuucuccagcgagaucaucggcuacaaggcgaucgacgggggcgugacccgcgacaucgccuccaccgacacgugcuucgccaacaagcacgccgacuucgacaccugguucagccagcggggcggcuccuacaccaacgacaaggccugcccccugaucgcggccgucaucauccgcgaggugggguucgugguccccggccugcccggcaccauccuccggaccacgaacggggacuuccugcacuuccugccccgcguguucagcgccgugggcaacaucugcuacaccccguccaagcucaucgaguacaccgacuucgccaccagcgcgugcguccuggccgccgagugcacgaucuucaaggacgccuccgggaagcccgugcccuacugcuacgacaccaacgugcuggagggcagcgucgccuacgagucccuccggcccgacacccgcuacgugcugauggacgggagcaucauccaguucccgaacaccuaccuggagggcuccgugcgggucgugacgaccuucgacagcgaguacugccgccacgggaccugcgagcgguccgaggcgggggugugcgucagcaccuccggccgcugggugcucaacaacgacuacuaccggagccugcccgggguguucugcggcgucgacgccgugaaccugcucacgaacauguucacgccccugauccagcccaucggcgcccuggacaucuccgccagcaucgucgccgggggcaucguggcgaucguggugaccugccucgccuacuacuucaugcgcuuccggcgcgccuucggggaguacagccacgucguggccuucaacacccugcuguuccucauguccuucaccguccugugccugaccccgguguacagcuuccuccccggcguguacuccgucaucuaccuguaccugaccuucuaccucaccaacgacgugagcuuccuggcccacauccaguggauggugauguucacgccccugguccccuucuggaucaccaucgcguacaucaucugcaucuccaccaagcacuucuacugguucuucagcaacuaccucaagcggcgcgugguguucaacggggucuccuucagcaccuucgaggaggccgcccugugcacguuccugcucaacaaggagauguaccugaagcugcgguccgacgugcuccugccgcugacccaguacaaccgcuaccucgcccuguacaacaaguacaaguacuucagcggcgccauggacaccaccuccuaccgggaggcggccugcugccaccuggccaaggcccucaacgacuucagcaacuccggcagcgacgugcuguaccagccgccccagacguccaucaccagcgcgguccugcagugaggacuaguuauaagacugacuagcccgaugggccucccaacgggcccuccuccccuccuugcaccgagauuaauaaaaaaaaaaaaaaaaaaaaaaaaaaaaaaaaaaaaaaaaaaaaaaaaaaaaaaaaaaaaaaaaugcaucccccccccccccccccccccccccccccccaaaggcucuuuucagagccaccagaauu

SEQ ID NO: 22112 - RNA, 1723 nt, Artificial Sequence
  SARS-CoV-2__MT811737.1__non-structural protein 4 (NSP4) mRNA gc
aggagaaagcuuaccaugaagaucgugaacaacuggcugaagcagcucaucaaggucacccugguguuccuguucguggccgccaucuucuaccucaucacccccguccacgugaugagcaagcacacggacuucuccagcgagaucaucggcuacaaggcgaucgacgggggcgugacccgcgacaucgccuccaccgacacgugcuucgccaacaagcacgccgacuucgacaccugguucagccagcggggcggcuccuacaccaacgacaaggccugcccccugaucgcggccgucaucacccgcgaggugggguucgugguccccggccugcccggcaccauccuccggacgaccaacggggacuuccugcacuuccugccccgcguguucagcgccgugggcaacaucugcuacaccccguccaagcucaucgaguacaccgacuucgccacgagcgcgugcguccuggccgccgagugcaccaucuucaaggacgccuccgggaagcccgugcccuacugcuacgacaccaacgugcuggagggcagcgucgccuacgagucccuccggcccgacacccgcuacgugcugauggacgggagcaucauccaguucccgaacacguaccuggagggcuccgugcgggucgugaccaccuucgacagcgaguacugccgccacgggaccugcgagcgguccgaggcgggggugugcgucagcacguccggccgcugggugcucaacaacgacuacuaccggagccugcccgggguguucugcggcgucgacgccgugaaccugcucaccaacauguucacgccccugauccagcccaucggcgcccuggacaucuccgccagcaucgucgccgggggcaucguggcgaucguggugaccugccucgccuacuacuucaugcgcuuccggcgcgccuucggggaguacagccacgucguggccuucaacacccugcuguuccucauguccuucaccguccugugccugaccccgguguacagcuuccuccccggcguguacuccgucaucuaccuguaccugaucuucuaccucaccaacgacgugagcuuccuggcccacauccaguggauggugauguucacgccccugguccccuucuggaucaccaucgcguacaucaucugcaucuccaccaagcacuucuacugguucuucagcaacuaccucaagcggcgcgugguguucaacggggucuccuucagcaccuucgaggaggccgcccugugcacguuccugcucaacaaggagauguaccugaagcugcgguccgacgugcuccugccgcugacccaguacaaccgcuaccucgcccuguacaacaaguacaaguacuucagcggcgccauggacaccaccuccuaccgggaggcggccugcugccaccuggccaaggcccucaacgacuucagcaacuccggcagcgacgugcuguaccagccgccccagacguccaucaccagcgcgguccugcagugaggacuaguuauaagacugacuagcccgaugggccucccaacgggcccuccuccccuccuugcaccgagauuaauaaaaaaaaaaaaaaaaaaaaaaaaaaaaaaaaaaaaaaaaaaaaaaaaaaaaaaaaaaaaaaaaugcaucccccccccccccccccccccccccccccccaaaggcucuuuucagagccaccagaauu

SEQ ID NO: 22113 - RNA, 1723 nt, Artificial Sequence
  SARS-CoV-2__MT806775.1__non-structural protein 4 (NSP4) mRNA gc
aggagaaagcuuaccaugaagaucgugaacaacuggcugaagcagcucaucaaggucacccugguguuccuguucguggccgccaucuucuaccucaucacccccguccacgugaugagcaagcacacggacuucuccagcgagaucaucggcuacaaggcgaucgacgggggcgugacccgcgacaucgccuccaccgacacgugcuucgccaacaagcacgccgacuucgacaccugguucagccagcggggcggcuccuacaccaacgacaaggccugcccccugaucgcggccgucaucacccgcgaggugggguucgugguccccggccugcccggcaccauccuccggacgaccaacggggacuuccugcacuuccugccccgcguguucagcguggucggcaacaucugcuacaccccguccaagcucaucgaguacaccgacuucgccacgagcgccugcgugcuggcggccgagugcaccaucuucaaggacgccuccgggaagcccgugcccuacugcuacgacaccaacguccuggagggcagcguggccuacgagucccuccggcccgacacccgcuacgugcugauggacgggagcaucauccaguucccgaacacguaccuggagggcuccguccggguggugaccaccuucgacagcgaguacugccgccacgggaccugcgagcgguccgaggccggggucugcgugagcacguccggccgcugggugcucaacaacgacuacuaccggagccugcccggggucuucugcggcguggacgcggucaaccugcucaccaacauguucacgccccugauccagcccaucggcgcccuggacaucuccgccagcaucguggccgggggcaucguggccaucgucgugaccugccucgcguacuacuucaugcgcuuccggcgcgccuucggggaguacagccacguggucgccuucaacacccugcuguuccucauguccuucaccgugcugugccugaccccgguguacagcuuccuccccggcgucuacuccgugaucuaccuguaccugaccuucuaccucacgaacgacgugagcuuccuggcccacauccaguggauggucauguucacgccccuggugcccuucuggaucaccaucgccuacaucaucugcaucuccaccaagcacuucuacugguucuucagcaacuaccucaagcggcgcguggucuucaacgggguguccuucagcaccuucgaggaggcggcccugugcaccuuccugcucaacaaggagauguaccugaagcugcgguccgacgugcuccugccgcugacccaguacaaccgcuaccucgcccuguacaacaaguacaaguacuucagcggcgccauggacaccacguccuaccgggaggccgcgugcugccaccuggccaaggcccucaacgacuucagcaacuccggcagcgacguccuguaccagccgccccagaccuccaucaccagcgccgugcugcagugaggacuaguuauaagacugacuagcccgaugggccucccaacgggcccuccuccccuccuugcaccgagauuaauaaaaaaaaaaaaaaaaaaaaaaaaaaaaaaaaaaaaaaaaaaaaaaaaaaaaaaaaaaaaaaaaugcaucccccccccccccccccccccccccccccccaaaggcucuuuucagagccaccagaauu

SEQ ID NO: 22114 - RNA, 1723 nt, Artificial Sequence
  SARS-CoV-2__MT806779.1__non-structural protein 4 (NSP4) mRNA gc
aggagaaagcuuaccaugaagaucgugaacaacuggcugaagcagcucaucaaggucacccugguguuccuguucguggccgccaucuucuaccucaucacccccguccacgugaugagcaagcacacggacuucuccagcgagaucaucggcuacaaggcgaucgacgggggcgugacccgcgacaucgccuccaccgacacgugcuucgccaacaagcacgccgacuucgacaccugguucagccagcggggcggcuccuacaccaacgacaaggccugcccccugaucgcggccgucaucacccgcgaggugggguucgugguccccggccugcccggcaccauccuccggacgaccaacggggacuuccugcacuuccugccccgcguguucagcgccgugggcaacaucugcuacaccccguccaagcucaucgaguacaccgacuucgccacgagcgcgugcguccuggccgccgagugcaccaucuucaaggacgccuccgggaagcccgugcccuacugcuacgacaccaacgugcuggagggcagcgucgccuacgagucccuccggcccgacacccgcuacgugcugauggacgggagcaucauccaguucccgaacacguaccuggagggcuccgugcgggucgugaccaccuucgacagcgaguacugccgccacgggaccugcgagcgguccgaggcgggggugugcgucagcaucuccggccgcugggugcucaacaacgacuacuaccggagccugcccgggguguucugcggcgucgacgccgugaaccugcucacgaacauguucacgccccugauccagcccaucggcgcccuggacaucuccgccagcaucgucgccgggggcaucguggcgaucguggugaccugccucgccuacuacuucaugcgcuuccggcgcgccuucggggaguacagccacgucguggccuucaacacccugcuguuccucauguccuucaccguccugugccugaccccgguguacagcuuccuccccggcguguacuccgucaucuaccuguaccugaccuucuaccucaccaacgacgugagcuuccuggcccacauccaguggauggugauguucacgccccugguccccuucuggaucaccaucgcguacaucaucugcaucuccaccaagcacuucuacugguucuucagcaacuaccucaagcggcgcgugguguucaacggggucuccuucagcaccuucgaggaggccgcccugugcacguuccugcucaacaaggagauguaccugaagcugcgguccgacgugcuccugccgcugacccaguacaaccgcuaccucgcccuguacaacaaguacaaguacuucagcggcgccauggacaccaccuccuaccgggaggcggccugcugccaccuggccaaggcccucaacgacuucagcaacuccggcagcgacgugcuguaccagccgccccagacguccaucaccagcgcgguccugcagugaggacuaguuauaagacugacuagcccgaugggccucccaacgggcccuccuccccuccuugcaccgagauuaauaaaaaaaaaaaaaaaaaaaaaaaaaaaaaaaaaaaaaaaaaaaaaaaaaaaaaaaaaaaaaaaaugcaucccccccccccccccccccccccccccccccaaaggcucuuuucagagccaccagaauu

SEQ ID NO: 22115 - RNA, 1723 nt, Artificial Sequence
  SARS-CoV-2__MT800029.1__non-structural protein 4 (NSP4) mRNA gc
aggagaaagcuuaccaugaagaucgugaacaacuggcugaagcagcucaucaaggucacccugguguuccuguucguggccgccaucuucuaccucaucacccccguccacgugaugagcaagcacacggacuucuccagcgagaucaucggcuacaaggcgaucgacgggggcgugacccgcgacaucgccuccaccgacacgugcuucgccaacaagcacgccgacuucgacaccugguucagccagcggggcggcuccuacaccaacgacaaggccugcccccugaucgcggccgucaucacccgcgaggugggguucgugguccccggccugcccggcaccauccuccggacgaccaacggggacuuccugcacuuccugccccgcguguucagcgccgugggcaacaucugcuacaccccguccaagcucaucgaguacaccgacuucgccacgagcgcgugcguccuggccgccgagugcaccaucuucaaggacgccuccgggaagcccgugcccuacugcuacgacaccaacgugcuggagggcagcgucgccuacgagucccuccggcccgacacccgcuacgugcugauggacgggagcaucauccaguucccgaacacguaccuggagggcuccgugcgggucgugaccaccuucgacagcgaguacugccgccacgggaccugcgagcgguccgaggcgggggugugcgucagcacguccggccgcugggugcucaacaacgacuacuaccggagccugcccgggguguucugcggcgucgacgccgugaaccugcucaccaacauguucacgccccugauccagcccaucggcgcccuggacaucuccgccagcaucgucgccgggggcaucguggcgaucguggugaccugccucgccuacuacuucaugcgcuuccggcgcgccuucggggaguacagccacgucguggccuucaacacccugcuguuccucaucuccuucaccguccugugccugaccccgguguacagcuuccuccccggcguguacuccgucaucuaccuguaccugaccuucuaccucacgaacgacgugagcuuccuggcccacauccaguggauggugauguucacgccccugguccccuucuggaucaccaucgcguacaucaucugcaucuccaccaagcacuucuacugguucuucagcaacuaccucaagcggcgcgugguguucaacggggucuccuucagcaccuucgaggaggccgcccugugcaccuuccugcucaacaaggagauguaccugaagcugcgguccgacgugcuccugccgcugacccaguacaaccgcuaccucgcccuguacaacaaguacaaguacuucagcggcgccauggacaccacguccuaccgggaggcggccugcugccaccuggccaaggcccucaacgacuucagcaacuccggcagcgacgugcuguaccagccgccccagaccuccaucaccagcgcgguccugcagugaggacuaguuauaagacugacuagcccgaugggccucccaacgggcccuccuccccuccuugcaccgagauuaauaaaaaaaaaaaaaaaaaaaaaaaaaaaaaaaaaaaaaaaaaaaaaaaaaaaaaaaaaaaaaaaaugcaucccccccccccccccccccccccccccccccaaaggcucuuuucagagccaccagaauu

SEQ ID NO: 22116 - RNA, 1723 nt, Artificial Sequence
  SARS-CoV-2__MT800282.1__non-structural protein 4 (NSP4) mRNA gc
aggagaaagcuuaccaugaagaucgugaacaacuggcugaagcagcucaucaaggucacccugguguuccuguucguggccgccaucuucuaccucaucacccccguccacgugaugagcaagcacacggacuucuccagcgagaucaucggcuacaaggcgaucgacgggggcgugacccgcgacaucgccuccaccgacacgugcuucgccaacaagcacgccgacuucgacaccugguucagccagcggggcggcuccuacaccaacgacaaggccugcccccugaucgcggccgucaucacccgcgaggugggguucgugguccccggccugcccggcaccauccuccggacgaccaacggggacuuccugcacuuccugccccgcguguucagcgccgugggcaacaucugcuacaccccguccaagcucaucgaguacaccgacuucgccacgagcgcgugcguccuggccgccgagugcaccaucuucaaggacgccuccgggaagcccgugcccuacugcuacgacaccaacgugcuggagggcagcgucgccuacgagucccuccggcccgacacccgcuacgugcugauggacgggagcaucauccaguucccgaacacguaccuggagggcuccgugcgggucgugaccaccuucgacagcgaguacugccgccacgggaccugcgagcgguccgaggcgggggugugcgucagcacguccggccgcugggugcucaacaacgacuacuaccggagccugcccgggguguucugcggcgucgacgccgugaaccugcucaccaacauguucacgccccugauccagcccaucggcgcccuggacaucuccgccagcaucgucgccgggggcaucguggcgaucguggugaccugccucgccuacuacuucaugcgcuuccggcgcgccuucggggaguacagccacgucguggccuucaacacccugcuguuccucauguccuucaccguccugugccugaccccgguguacagcuuccuccccggcguguacuccgucaucuaccuguaccugaccuucuaccucacgaacgacgugagcuuccuggcccacauccaguggauggugauguucacgccccugguccccuucuggaucaccaucgcguacaucaucugcaucuccaccaagcacuucuacugguucuucgggaacuaccucaagcggcgcgugguguucaacggcgucagcuucuccaccuucgaggaggccgcccugugcaccuuccugcucaacaaggagauguaccugaagcugcggagcgacgugcuccugccgcugacccaguacaaccgcuaccucgcccuguacaacaaguacaaguacuucuccggcgccauggacaccacgagcuaccgggaggcggccugcugccaccuggccaaggcccucaacgacuucuccaacagcggguccgacgugcuguaccagccgccccagaccagcaucaccuccgcgguccugcagugaggacuaguuauaagacugacuagcccgaugggccucccaacgggcccuccuccccuccuugcaccgagauuaauaaaaaaaaaaaaaaaaaaaaaaaaaaaaaaaaaaaaaaaaaaaaaaaaaaaaaaaaaaaaaaaaugcaucccccccccccccccccccccccccccccccaaaggcucuuuucagagccaccagaauu

SEQ ID NO: 22117 - RNA, 1723 nt, Artificial Sequence
  SARS-CoV-2__MT800753.1__non-structural protein 4 (NSP4) mRNA gc
aggagaaagcuuaccaugaagaucgugaacaacuggcugaagcagcucaucaaggucacccugguguuccuguucguggccgccaucuucuaccucaucacccccguccacgugaugagcaagcacacggacuucuccagcgagaucaucggcuacaaggcgaucgacgggggcgugacccgcgacaucgccuccaccgacacgugcuucgccaacaagcacgccgacuucgacaccugguucagccagcggggcggcuccuacaccaacgacaaggccugcccccugaucgcggccgucaucacccgcgaggugggguucgugguccccggccugcccggcaccauccuccggacgaccaacggggacuuccugcacuuccugccccgcguguucagcgccgugggcaacaucugcuacaccccguccaagcucaucgaguacaccgacuucgccacgagcgcgugcguccuggccgccgagugcaccaucuucaaggacgccuccgggaagcccgugcccuacugcuacgacaccaacgugcuggagggcagcgucgccuacgagucccuccggcccgacacccgcuacgugcugauggacgggagcaucauccaguucccgaacacguaccuggagggcuccgugcgggucgugaccaccuucgacagcgaguacugccgccacgggaccugcgagcgguccgaggcgggggugugcgucagcacguccggccgcugggugcucaacaacgacuacuaccggagccugcccgggguguucugcggcgucgacgccgugaaccugcucaccaacauguucacgccccugauccagcccaucggcgcccuggacaucuccgccagcaucgucgccgggggcaucguggcgaucguggugaccugccucgccuacuacuucaugcgcuuccggcgcgccuucggggaguacagccacgucguggccuucaacacccugcuguuccucauguccuucaccguccugugccugaccccgguguacagcuuccuccccggcguguacuccgucaucuaccuguaccugaccuucuaccucacgaacgacgugagcuuccuggcccacauccaguggauggugauguucacgccccugguccccuucuggaucaccaucgcguacaucaucugcaucuccaucaagcacuucuacugguucuucagcaacuaccucaagcggcgcgugguguucaacggggucuccuucagcaccuucgaggaggccgcccugugcaccuuccugcucaacaaggagauguaccugaagcugcgguccgacgugcuccugccgcugacccaguacaaccgcuaccucgcccuguacaacaaguacaaguacuucagcggcgccauggacaccaccuccuaccgggaggcggccugcugccaccuggccaaggcccucaacgacuucagcaacuccggcagcgacgugcuguaccagccgccccagacguccaucaccagcgcgguccugcagugaggacuaguuauaagacugacuagcccgaugggccucccaacgggcccuccuccccuccuugcaccgagauuaauaaaaaaaaaaaaaaaaaaaaaaaaaaaaaaaaaaaaaaaaaaaaaaaaaaaaaaaaaaaaaaaaugcaucccccccccccccccccccccccccccccccaaaggcucuuuucagagccaccagaauu

SEQ ID NO: 22118 - RNA, 1723 nt, Artificial Sequence
  SARS-CoV-2__MT791940.1__non-structural protein 4 (NSP4) mRNA gc
aggagaaagcuuaccaugaagaucgugaacaacuggcugaagcagcucaucaaggucacccugguguuccuguucguggccgccaucuucuaccucaucacccccguccacgugaugagcaagcacacggacuucuccagcgagaucaucggcuacaaggcgaucgacgggggcgugacccgcgacaucgccuccaccgacacgugcuucgccaacaagcacgccgacuucgacaccugguucagccagcggggcggcuccuacaccaacgacaaggccugcccccugaucgcggccgucaucacccgcgaggugggguucgugguccccggccugcccggcaccauccuccggacgaccaacggggacuuccugcacuuccugccccgcguguucagcgccgugggcaacaucugcuacaccccguccaagcucaucgaguacaccgacuucgccacgagcgcgugcguccuggccgccgagugcaccaucuucaaggacgccuccgggaagcccgugcccuacugcuacgacaccaacgugcuggagggcagcgucgccuacgagucccuccggcccgacacccgcuacgugcugauggacgggagcaucauccaguucccgaacacguaccuggagggcuccgugcgggucgugaccaccuucgacagcgaguacugccgccacgggaccugcgagcgguccgaggcgggggugugcgucagcacguccggccgcugggugcucaacaacgacuacuaccggagccugcccgggguguucugcggcgucgacgccgugaaccugcucaccaacauguucacgccccugauccagcccaucggcgcccuggacaucuccgccagcaucgucgccgggggcaucguggcgaucguggugaccugccucgccuacuacuucaugcgcuuccggcgcgccuucggggaguacagccacgucguggccuucaacacccugcuguuccucauguccuucaccguccugugccugaccccgguguacagcuuccuccccggcguguacuccgucaucuaccuguaccugaccuucuaccucacgaacgacgugagcuuccuggcccacauccaguggauggugaugcugacgccccucguccccuucuggaucaccaucgcguacaucaucugcaucuccaccaagcacuucuacugguucuucagcaacuaccugaagcggcgcgugguguucaacggggucuccuucagcaccuucgaggaggccgcccugugcaccuuccuccugaacaaggagauguaccugaagcuccgguccgacgugcugcugccgcucacccaguacaaccgcuaccuggcccuguacaacaaguacaaguacuucagcggcgccauggacaccacguccuaccgggaggcggccugcugccaccucgccaaggcccugaacgacuucagcaacuccggcagcgacgugcuguaccagccgccccagaccuccaucaccagcgcgguccugcagugaggacuaguuauaagacugacuagcccgaugggccucccaacgggcccuccuccccuccuugcaccgagauuaauaaaaaaaaaaaaaaaaaaaaaaaaaaaaaaaaaaaaaaaaaaaaaaaaaaaaaaaaaaaaaaaaugcaucccccccccccccccccccccccccccccccaaaggcucuuuucagagccaccagaauu

SEQ ID NO: 22119 - RNA, 1723 nt, Artificial Sequence
  SARS-CoV-2__MT786815.1__non-structural protein 4 (NSP4) mRNA gc
aggagaaagcuuaccaugaagaucgugaacaacuggcugaagcagcucaucaaggucacccugguguuccuguucguggccgccaucuucuaccucaucacccccguccacgugaugagcaagcacacggacuucuccagcgagaucaucggcuacaaggcgaucgacgggggcgugacccgcgacaucgccuccaccgacacgugcuucgccaacaagcacgccgacuucgacaccugguucagccagcggggcggcuccuacaccaacgacaaggccugcccgcugaucgcggccgucaucacccgcgaggugggguucgugguccccggccugcccggcaccauccuccggacgaccaacggggacuuccugcacuuccugccccgcguguucagcgccgugggcaacaucugcuacaccccguccaagcucaucgaguacaccgacuucgccacgagcgcgugcguccuggccgccgagugcaccaucuucaaggacgccuccgggaagcccgugcccuacugcuacgacaccaacgugcuggagggcagcgucgccuacgagucccuccggcccgacacccgcuacgugcugauggacgggagcaucauccaguucuccaacacguaccuggagggcagcgugcgggucgugaccaccuucgacuccgaguacugccgccacgggaccugcgagcggagcgaggcgggggugugcgucuccacgagcggccgcugggugcucaacaacgacuacuaccggucccugccggggguguucugcggcgucgacgccgugaaccugcucaccaacauguucacgccccugauccagcccaucggcgcccuggacaucagcgccagcaucgucgccgggggcaucguggcgaucguggugaccugccucgccuacuacuucaugcgcuuccggcgcgccuucggggaguacucccacgucguggccuucaacacccugcuguuccucaugagcuucaccguccugugccugacccccguguacuccuuccucccgggcguguacagcgucaucuaccuguaccugaccuucuaccucacgaacgacguguccuuccuggcccacauccaguggauggugauguucacgccccugguccccuucuggaucaccaucgcguacaucaucugcaucagcaccaagcacuucuacugguucuucuccaacuaccucaagcggcgcgugguguucaacggggucagcuucuccaccuucgaggaggccgcccugugcaccuuccugcucaacaaggagauguaccugaagcugcggagcgacgugcuccugccccugacccaguacaaccgcuaccucgcccuguacaacaaguacaaguacuucuccggcgccauggacaccacgagcuaccgggaggcggccugcugccaccuggccaaggcccucaacgacuucuccaacagcggcuccgacgugcuguaccagccgccccagaccagcaucaccuccgcgguccugcagugaggacuaguuauaagacugacuagcccgaugggccucccaacgggcccuccuccccuccuugcaccgagauuaauaaaaaaaaaaaaaaaaaaaaaaaaaaaaaaaaaaaaaaaaaaaaaaaaaaaaaaaaaaaaaaaaugcaucccccccccccccccccccccccccccccccaaaggcucuuuucagagccaccagaauu

SEQ ID NO: 22120 - RNA, 1723 nt, Artificial Sequence
  SARS-CoV-2__MT786838.1__non-structural protein 4 (NSP4) mRNA gc
aggagaaagcuuaccaugaagaucgugaacaacuggcugaagcagcucaucaaggucacccugguguuccuguucguggccgccaucuucuaccucaucacccccguccacgugaugagcaagcacacggacuucuccagcgagaucaucggcuacaaggcgaucgacgggggcgugacccgcgacaucgccuccaccgacacgugcuucgccaacaagcacgccgacuucgacaccugguucagccagcggggcggcuccuacaccaacgacaaggccugcccccugaucgcggccgucaucacccgcgaggugggguucgugguccccggccugcccggcaccauccuccggacgaccaacggggacuuccugcacuuccugccccgcguguucagcgccgugggcaacaucugcuacaccccguccaagcucaucgaguacaccgacuucgccacgagcgcgugcguccuggccgccgagugcaccaucuucaaggacgccuccgggaagcccgugcccuacugcuacgacaccaacgugcuggagggcagcgucgccuacgagucccuccggcccgacacccgcuacgugcugauggacgggagcaucauccaguucccgaacacguaccuggagggcuccgugcgggucgugaccaccuucgacagcgaguacugccgccacgggaccugcgagcgguccgaggcgggggugugcgucagcacguccggccgcugggugcucaacaacgacuacuaccggagccugcccgggguguucugcggcgucgacgccgugaaccugcucaccaacauguucacgccccugauccagcccaucggcgcccuggacaucuccgccagcaucgucgccgggggcaucguggcgaucguggugaccugccucgccuacuacuucaugcgcuuccggcgcgccuucggggaguacagccacgucguggccuucaacacccugcuguuccucauguccuucaccguccugugccugaccccgguguacagcuuccuccccggcguguacuccgucaucuaccuguaccugaccuucuaccucacgaacgacgugagcuuccuggcccacauccaguggauggugauguucacgccccugguccccuucuggaucaccaucgcguacaucaucugcaucuccaccaagcacuucuacugguucuucagcaacuaccucaagcggcgcgugguguucaacggggucuccuucagcaccuucgaggaggccgcccugugcaccuuccugcucaacaaggagauguaccugaagcugcgguccgacgugcuccugccgcugacccaguacaaccgcuaccucgccuucuacaacaaguacaaguacuucagcggcgccauggacaccacguccuaccgggaggcggccugcugccaccuggccaaggcccugaacgacuucagcaacuccggcagcgacgugcucuaccagccgccccagaucuccaucaccagcgcgguccugcagugaggacuaguuauaagacugacuagcccgaugggccucccaacgggcccuccuccccuccuugcaccgagauuaauaaaaaaaaaaaaaaaaaaaaaaaaaaaaaaaaaaaaaaaaaaaaaaaaaaaaaaaaaaaaaaaaugcaucccccccccccccccccccccccccccccccaaaggcucuuuucagagccaccagaauu

SEQ ID NO: 22121 - RNA, 1723 nt, Artificial Sequence
  SARS-CoV-2__MT775831.1__non-structural protein 4 (NSP4) mRNA gc
aggagaaagcuuaccaugaagaucgugaacaacuggcugaagcagcucaucaaggucacccugguguuccuguucguggccgccaucuucuaccucaucacccccguccacgugaugagcaagcacacggacuucuccagcgagaucaucggcuacaaggcgaucgacgggggcgugacccgcgacaucgccuccaccgacacgugcuucgccaacaagcacgccgacuucgacaccugguucagccagcggggcggcuccuacaccaacgacaaggccugcccccugaucgcggccgucaucacccgcgaggugggguucgugguccccggccugcccggcaccauccuccggacgaccaacggggacuuccugcacuuccugccccgcguguucagcgccgugggcaacaucugcuacaccccguccaagcucaucgaguacaccgacuucgccacgagcgcgugcguccuggccgccgagugcaccaucuucaaggacgccuccgggaagcccgugcccuacugcuacgacaccaacgugcuggagggcagcgucgccuacgagucccuccggcccgacacccgcuacgugcugauggacgggagcaucauccaguucccgaacacguaccuggagggcuccgugcgggucgugaccaccuucgacagcgaguacugccgccacgggaccugcgagcgguccgaggcgggggugugcgucagcacguccggccgcugggugcucaacaacgacuacuaccggagccugcccgggguguucugcggcgucgacgccgugaaccugcucaccaacauguucacgccccugauccagcccaucggcgcccuggacaucuccgccagcaucgucgccgggggcaucguggcgaucguggugaccugccucgccuacuacuucaugcgcuuccggcgcgccuucggggacuacagccacgucguggccuucaacacccugcuguuccucauguccuucaccguccugugccugaccccgguguacagcuuccuccccggcguguacuccgucaucuaccuguaccugaccuucuaccucacgaacgacgugagcuuccuggcccacauccaguggauggugauguucacgccccugguccccuucuggaucaccaucgcguacaucaucugcaucuccaccaagcacuucuacugguucuucagcaacuaccucaagcggcgcgugguguucaacggggucuccuucagcaccuucgaggaggccgcccugugcaccuuccugcucaacaaggagauguaccugaagcugcgguccgacgugcuccugccgcugacccaguacaaccgcuaccucgcccuguacaacaaguacaaguacuucagcggcgccauggacaccacguccuaccgggaggcggccugcugccaccuggccaaggcccucaacgacuucagcaacuccggcagcgacgugcuguaccagccgccccagaccuccaucaccagcgcgguccugcagugaggacuaguuauaagacugacuagcccgaugggccucccaacgggcccuccuccccuccuugcaccgagauuaauaaaaaaaaaaaaaaaaaaaaaaaaaaaaaaaaaaaaaaaaaaaaaaaaaaaaaaaaaaaaaaaaugcaucccccccccccccccccccccccccccccccaaaggcucuuuucagagccaccagaauu

SEQ ID NO: 22122 - RNA, 1723 nt, Artificial Sequence
  SARS-CoV-2__MT772215.1__non-structural protein 4 (NSP4) mRNA gc
aggagaaagcuuaccaugaagaucgugaacaacuggcugaagcagcucaucaaggucacccugguguuccuguucguggccgccaucuucuaccucaucacccccguccacgugaugagcaagcacacggacuucuccagcgagaucaucggcuacaaggcgaucgacgggggcgugacccgcgacaucgccuccaccgacacgugcuucgccaacaagcacgccgacuucgacaccugguucagccagcgcgggggcuccuacaccaacgacaaggccugcccccugaucgcggccgucaucacccgggaggugggguucgugguccccggccugcccggcaccauccuccggacgaccaacggggacuuccugcacuuccugccccgcguguucagcgccgugggcaacaucugcuacaccccguccaagcucaucgaguacaccgacuucgccacgagcgcgugcguccuggccgccgagugcaccaucuucaaggacgccuccgggaagcccgugcccuacugcuacgacaccaacgugcuggagggcagcgucgccuacgagucccuccggcccgacacccgcuacgugcugauggacgggagcaucauccaguucccgaacacguaccuggagggcuccgugcgggucgugaccaccuucggcagcgaguacugccgccacgggaccugcgagcgguccgaggcgggcgugugcgucagcacguccgggcgcugggugcucaacaacgacuacuaccggagccugcccggcguguucugcggcgucgacgccgugaaccugcucaccaacauguucacgccccugauccagcccaucggggcccuggacaucuccgccagcaucgucgccggcgggaucguggcgaucguggugaccugccucgccuacuacuucaugcgcuuccggcgcgccuucggcgaguacagccacgucguggccuucaacacccugcuguuccucauguccuucaccguccugugccugaccccgguguacagcuuccuccccgggguguacuccgucaucuaccuguaccugaccuucuaccucacgaacgacgugagcuuccuggcccacauccaguggauggugauguucacgccccugguccccuucuggaucaccaucgcguacaucaucugcaucuccaccaagcacuucuacugguucuucagcaacuaccucaagcggcgcgugguguucaacggcgucuccuucagcaccuucgaggaggccgcccugugcaccuuccugcucaacaaggagauguaccugaagcugcgguccgacgugcuccugccgcugacccaguacaaccgcuaccucgcccuguacaacaaguacaaguacuucagcggcgccauggacaccacguccuaccgggaggcggccugcugccaccuggccaaggcccucaacgacuucagcaacuccgggagcgacgugcuguaccagccgccccagaccuccaucaccagcgcgguccugcagugaggacuaguuauaagacugacuagcccgaugggccucccaacgggcccuccuccccuccuugcaccgagauuaauaaaaaaaaaaaaaaaaaaaaaaaaaaaaaaaaaaaaaaaaaaaaaaaaaaaaaaaaaaaaaaaaugcaucccccccccccccccccccccccccccccccaaaggcucuuuucagagccaccagaauu

SEQ ID NO: 22123 - RNA, 1723 nt, Artificial Sequence
  SARS-CoV-2__MT772564.1__non-structural protein 4 (NSP4) mRNA gc
aggagaaagcuuaccaugaagaucgugaacaacuggcugaagcagcucaucaaggucacccugguguuccuguucguggccgccaucuucuaccucaucacccccguccacgugaugagcaagcacacggacuucuccagcgagaucaucggcuacaaggcgaucgacgggggcgugacccgcgacaucgccuccaccgacacgugcuucgccaacaagcacgccgacuucgacaccugguucagccagcggggcggcuccuacaccaacgacaaggccugcccccugaucgcggccgucaucacccgcgaggugggguucgugguccccggccugcccggcaccauccuccggacgaccaacggggacuuccugcacuuccugccccgcguguucagcgccgugggcaacaucugcuacaccccguccaagcucaucgaguacaccgacuucgccacgagcgcgugcguccuggccgccgagugcaccaucuucaaggacgccuccgggaagcccgugcccuacugcuacgacaccaacgugcuggagggcagcgucgccuacgagucccuccggcccgacacccgcuacgugcugauggacgggagcaucauccaguucccgaacacguaccuggagggcuccgugcgggucgugaccaccuucgacagcgaguacugccgccacgggaccugcgagcgguccgaggcgggggugugcgucagcacguccggccgcugggugcucaacaacgacuacuaccggagccugcccgggguguucugcggcgucgacgccgugaaccugcucaccaacauguucacgccccugauccagcccaucggcgcccuggacaucuccgccagcaucgucgccgggggcaucguggcgaucguggugaccugccucgccuacuacuucaugcgcuuccggcgcgccuucggggaguacagccacgucguggccuucaacacccugcuguuccucauguccuucaccguccugugccugaccccgguguacagcuuccuccccggcguguacuccgucaucuaccuguaccugaccuucuaccucacgaacgacgugagcuuccuggcccacauccaguggauggugauguucacgccccugguccccuucuggaucaccaucgcguacaucaucugcaucuucaccaagcacuucuacugguucuucuccaacuaccucaagcggcgcgugguguucaacggggucagcuucuccaccuucgaggaggccgcccugugcaccuuccugcucaacaaggagauguaccugaagcugcggagcgacgugcuccugccgcugacccaguacaaccgcuaccucgcccuguacaacaaguacaaguacuucuccggcgccauggacaccacgagcuaccgggaggcggccugcugccaccuggccaaggcccucaacgacuucuccaacagcggcuccgacgugcuguaccagccgccccagaccagcaucaccuccgcgguccugcagugaggacuaguuauaagacugacuagcccgaugggccucccaacgggcccuccuccccuccuugcaccgagauuaauaaaaaaaaaaaaaaaaaaaaaaaaaaaaaaaaaaaaaaaaaaaaaaaaaaaaaaaaaaaaaaaaugcaucccccccccccccccccccccccccccccccaaaggcucuuuucagagccaccagaauu

SEQ ID NO: 22124 - RNA, 1723 nt, Artificial Sequence
  SARS-CoV-2__MT764170.1__non-structural protein 4 (NSP4) mRNA gc
aggagaaagcuuaccaugaagaucgugaacaacuggcugaagcagcucaucaaggucacccugguguuccuguucguggccgccaucuucuaccucaucacccccguccacgugaugagcaagcacacggacuucuccagcgagaucaucggcuacaaggcgaucgacgggggcgugacccgcgacaucgccuccaccgacacgugcuucgccaacaagcacgccgacuucgacaccugguucagccagcggggcggcuccuacaccaacgacaaggccugcccccugaucgcggccgucaucacccgcgaggugggguucgugguccccggccugcccggcaccauccuccggacgaccaacggggacuuccugcacuuccugccccgcguguucagcgccgugggcaacaucugcuacaccccguccaagcucaucgaguacaccgacuucgccacgagcgcgugcguccuggccgccgagugcaccaucuucaaggacgccuccgggaagcccgugcccuacugcuacgacaccaacgugcuggagggcagcgucgccuacgagucccuccggcccgacacccgcuacgugcugauggacgggagcaucauccaguucccgaacacguaccuggagggcuccgugcgggucgugaccaccuucgacagcgaguacugccgccacgggaccugcgagcgguccgaggcgggggugugcgucagcacguccggccgcugggugcucaacaacgacuacuaccggagccugcccgggguguucugcggcgucgacgccgugaaccugcucaccaacauguucacgccccugauccagcccaucggcgcccuggacaucuccgccagcaucgucgccgggggcaucguggcgaucguggugaccugccucgccuacuacuucaugcgcuuccggcgcgccuucggggaguacagccacgucguggccuucaacacccugcuguuccucauguccuucaccguccugugccugaccccgguguacagcuuccuccccggcguguacuccgucaucuaccuguaccugaccuucuaccucacgaacgacgugagcuuccuggcccacauccaguggauggugauguucacgccccugguccccuucuggaucaccaucgcguacaucaucuucaucuccaccaagcacuucuacugguucuucagcaacuaccucaagcggcgcgugguguucaacggggucuccuucagcaccuucgaggaggccgcccugugcaccuuccugcucaacaaggagauguaccugaagcugcgguccgacgugcuccugccgcugacccaguacaaccgcuaccucgcccuguacaacaaguacaaguacuucagcggcgccauggacaccacguccuaccgggaggcggccugcugccaccuggccaaggcccucaacgacuucagcaacuccggcagcgacgugcuguaccagccgccccagaccuccaucaccagcgcgguccugcagugaggacuaguuauaagacugacuagcccgaugggccucccaacgggcccuccuccccuccuugcaccgagauuaauaaaaaaaaaaaaaaaaaaaaaaaaaaaaaaaaaaaaaaaaaaaaaaaaaaaaaaaaaaaaaaaaugcaucccccccccccccccccccccccccccccccaaaggcucuuuucagagccaccagaauu

SEQ ID NO: 22125 - RNA, 1723 nt, Artificial Sequence
  SARS-CoV-2__MT755829.1__non-structural protein 4 (NSP4) mRNA gc
aggagaaagcuuaccaugaagaucgugaacaacuggcugaagcagcucaucaaggucacccugguguuccuguucguggccgccaucuucuaccucaucacccccguccacgugaugagcaagcacacggacuucuccagcgagaucaucggcuacaaggcgaucgacgggggcgugacccgcgacaucgccuccaccgacacgugcuucgccaacaagcacgccgacuucgacaccugguucagccagcggggcggcuccuacaccaacgacaaggccugcccccugaucgcggccgucaucacccgcgaggugggguucgugguccccggccugcccggcaccauccuccggacgaccaacggggacuuccugcacuuccugccccgcguguucagcgccgugggcaacaucugcuacaccccguccaagcucaucgaguacaccgacuucgccacgagcgcgugcguccuggccgccgagugcaccaucuucaaggacgccuccgggaagcccgugcccuacugcuacgacaccaacgugcuggagggcagcgucgccuacgagucccuccggcccgacacccgcuacgugcugauggacgggagcaucauccaguucccgaacacguaccuggagggcuccgugcgggucgugaccaccuucgacagcgaguacugccgccacgggaccugcgagcgguccgaggcgggggugugcgucagcacguccggccgcugggugcucaacaacgacuacuaccggagccugcccgggguguucugcggcgucgacgccgugaaccugcucaccaacauguucacgccccugauccagcccaucggcgcccuggacaucuccgccagcaucgucgccgggggcaucguggcgaucguggugaccugccucgccuacuacuucaugcgcuuccggcgcgccuucggggaguacagccacgucguggccuucaacacccugcuguuccucauguccuucaccguccugugccugaccccgguguacagcuuccuccccggcguguacuccgucaucuaccuguaccugaccuucuaccucacgaacgacgugagcuuccuggcccacauccaguggauggugauguucacgccccugguccccuucuggaucaccaucgcguacaucaucugcaucuccaccaagcacuucuacugguucuucagcaacuaccucaagcggcgcgugguguucaacggggucuccuucagcaccuucgaggaggccgcccugugcaccuuccugcucaacaaggagauguaccugaagcugcgguccgacgugcuccugccguucacccaguacaaccgcuaccuggcccucuacaacaaguacaaguacuucagcggcgccauggacaccacguccuaccgggaggcggccugcugccaccuggccaaggcccugaacgacuucagcaacuccggcagcgacgugcucuaccagccgccccagaccuccaucaccagcgcgguccugcagugaggacuaguuauaagacugacuagcccgaugggccucccaacgggcccuccuccccuccuugcaccgagauuaauaaaaaaaaaaaaaaaaaaaaaaaaaaaaaaaaaaaaaaaaaaaaaaaaaaaaaaaaaaaaaaaaugcaucccccccccccccccccccccccccccccccaaaggcucuuuucagagccaccagaauu

SEQ ID NO: 22126 - RNA, 1723 nt, Artificial Sequence
  SARS-CoV-2__MT755892.1__non-structural protein 4 (NSP4) mRNA gc
aggagaaagcuuaccaugaagaucgugaacaacuggcugaagcagcucaucaaggucacccugguguuccuguucguggccgccaucuucuaccucaucacccccguccacgugaugagcaagcacacggacuucuccagcgagaucaucggcuacaaggcgaucgacgggggcgugacccgcgacaucgccuccaccgacacgugcuucgccaacaagcacgccgacuucgacaccugguucagccagcgcgggggcuccuacaccaacgacaaggccugcccccugaucgcggccgucaucacccgggaggugggguucgugguccccggccugcccggcaccauccuccggacgaccaacggggacuuccugcacuuccugccccgcguguucagcgccgugggcaacaucugcuacaccccguccaagcucaucgaguacaccgacuucgccacgagcgcgugcguccuggccgccgagugcaccaucuucaaggacgccuccgggaagcccgugcccuacugcuacgacaccaacgugcuggagggcagcgucgccuacgggucccuccggcccgacacccgcuacgugcugauggacggcagcaucauccaguucccgaacacguaccuggagggcuccgugcgggucgugaccaccuucgacagcgaguacugccgccacgggaccugcgagcgguccgaggcgggcgugugcgucagcacguccgggcgcugggugcucaacaacgacuacuaccggagccugcccggcguguucugcggcgucgacgccgugaaccugcucaccaacauguucacgccccugauccagcccaucggggcccuggacaucuccgccagcaucgucgccggcgggaucguggcgaucguggugaccugccucgccuacuacuucaugcgcuuccggcgcgccuucggcgaguacagccacgucguggccuucaacacccugcuguuccucauguccuucaccguccugugccugaccccgguguacagcuuccuccccgggguguacuccgucaucuaccuguaccugaccuucuaccucacgaacgacgugagcuuccuggcccacauccaguggauggugauguucacgccccugguccccuucuggaucaccaucgcguacaucaucugcaucuccaccaagcacuucuacugguucuucagcaacuaccucaagcggcgcgugguguucaacggcgucuccuucagcaccuucgaggaggccgcccugugcaccuuccugcucaacaaggagauguaccugaagcugcgguccgacgugcuccugccgcugacccaguacaaccgcuaccucgcccuguacaacaaguacaaguacuucagcggcgccauggacaccacguccuaccgggaggcggccugcugccaccuggccaaggcccucaacgacuucagcaacuccgggagcgacgugcuguaccagccgccccagaccuccaucaccagcgcgguccugcagugaggacuaguuauaagacugacuagcccgaugggccucccaacgggcccuccuccccuccuugcaccgagauuaauaaaaaaaaaaaaaaaaaaaaaaaaaaaaaaaaaaaaaaaaaaaaaaaaaaaaaaaaaaaaaaaaugcaucccccccccccccccccccccccccccccccaaaggcucuuuucagagccaccagaauu

SEQ ID NO: 22127 - RNA, 1723 nt, Artificial Sequence
  SARS-CoV-2__MT745605.1__non-structural protein 4 (NSP4) mRNA gc
aggagaaagcuuaccaugaagaucgugaacaacuggcugaagcagcucaucaaggucacccugguguuccuguucguggccgccaucuucuaccucaucacccccguccacgugaugagcaagcacacggacuucuccagcgagaucaucggcuacaaggcgaucgacgggggcgugacccgcgacaucgccuccaccgacacgugcuucgccaacaagcacgccgacuucgacaccugguucagccagcggggcggcuccuacaccaacgacaaggccugcccccugaucgcggccgucaucacccgcgaggugggguucgugguccccggccugcccggcaccauccuccggacgaccaacggggacuuccugcacuuccugccccgcguguucagcgccgugggcaacaucugcuacaccccguccaagcucaucgaguacaccgacuucgccacgagcgcgugcguccuggccgccgagugcaccaucuucaaggacgccuccgggaagcccgugcccuacugcuacgacaccaacgugcuggagggcagcgucgccuacgagucccuccggcccgacacccgcuacgugcugauggacgggagcaucauccaguucccgaacaucuaccuggagggcuccgugcgggucgugacgaccuucgacagcgaguacugccgccacgggaccugcgagcgguccgaggcgggggugugcgucagcaccuccggccgcugggugcucaacaacgacuacuaccggagccugcccgggguguucugcggcgucgacgccgugaaccugcucacgaacauguucacgccccugauccagcccaucggcgcccuggacaucuccgccagcaucgucgccgggggcaucguggcgaucguggugaccugccucgccuacuacuucaugcgcuuccggcgcgccuucggggaguacagccacgucguggccuucaacacccugcuguuccucauguccuucaccguccugugccugaccccgguguacagcuuccuccccggcguguacuccgucaucuaccuguaccugaccuucuaccucaccaacgacgugagcuuccuggcccacauccaguggauggugauguucacgccccugguccccuucuggaucaccaucgcguacaucaucugcaucuccaccaagcacuucuacugguucuucagcaacuaccucaagcggcgcgugguguucaacggggucuccuucagcaccuucgaggaggccgcccugugcacguuccugcucaacaaggagauguaccugaagcugcgguccgacgugcuccugccgcugacccaguacaaccgcuaccucgcccuguacaacaaguacaaguacuucagcggcgccauggacaccaccuccuaccgggaggcggccugcugccaccuggccaaggcccucaacgacuucagcaacuccggcagcgacgugcuguaccagccgccccagacguccaucaccagcgcgguccugcagugaggacuaguuauaagacugacuagcccgaugggccucccaacgggcccuccuccccuccuugcaccgagauuaauaaaaaaaaaaaaaaaaaaaaaaaaaaaaaaaaaaaaaaaaaaaaaaaaaaaaaaaaaaaaaaaaugcaucccccccccccccccccccccccccccccccaaaggcucuuuucagagccaccagaauu

SEQ ID NO: 22128 - RNA, 1723 nt, Artificial Sequence
  SARS-CoV-2__MT745655.1__non-structural protein 4 (NSP4) mRNA gc
aggagaaagcuuaccaugaagaucgugaacaacuggcugaagcagcucaucaaggucacccugguguuccuguucguggccgccaucuucuaccucaucacccccguccacgugaugagcaagcacacggacuucuccagcgagaucaucggcuacaaggcgaucgacgggggcgugacccgcgacaucgccuccaccgacacgugcuucgccaacaagcacgccgacuucgacaccugguucagccagcggggcggcuccuacaccaacgacaaggccugcccccugaucgcggccgucaucacccgcgaggugggguucgugguccccggccugcccggcaccauccuccggacgaccaacggggacuuccugcacuuccugccccgcguguucagcgccgugggcaacaucugcuacaccccguccaagcucaucgaguacaccgacuucgccacgagcgcgugcguccuggccgccgagugcaccaucuucaaggacgccuccgggaagcccgugcccuacugcuacgacaccaacgugcuggagggcagcgucgccuacgagucccuccggcccgacacccgcuacgugcugauggacgggagcaucauccaguucccgaacacguaccuggagggcuccgugcgggucgugaccaccuucgacagcgaguacugccgccacgggaccugcgagcgguccgaggcgggggugugcgucagcacguccggccgcugggugcucaacaacgacuacuaccggagccugcccgggguguucugcggcgucgacgccgugaaccugcucaccaacauguucacgccccugauccagcccaucggcgcccuggacaucuccgccagcaucgucgccgggggcaucguggcgaucguggugaccugccucgccuacuacuucaugcgcuuccggcgcgccuucggggaguacagccacgucguggccuucaacacccugcuguuccucauguccuucaccguccugugccugaccccgguguacagcuuccuccccggcguguacuccgucaucuaccuguaccugaccuucuaccucacgaacgacgugagcuuccuggcccacucccaguggauggugauguucacgccccugguccccuucuggaucaccaucgcguacaucaucugcaucagcaccaagcacuucuacugguucuucuccaacuaccucaagcggcgcgugguguucaacggggucagcuucuccaccuucgaggaggccgcccugugcaccuuccugcucaacaaggagauguaccugaagcugcggagcgacgugcuccugccgcugacccaguacaaccgcuaccucgcccuguacaacaaguacaaguacuucuccggcgccauggacaccacgagcuaccgggaggcggccugcugccaccuggccaaggcccucaacgacuucuccaacagcggcuccgacgugcuguaccagccgccccagaccagcaucaccuccgcgguccugcagugaggacuaguuauaagacugacuagcccgaugggccucccaacgggcccuccuccccuccuugcaccgagauuaauaaaaaaaaaaaaaaaaaaaaaaaaaaaaaaaaaaaaaaaaaaaaaaaaaaaaaaaaaaaaaaaaugcaucccccccccccccccccccccccccccccccaaaggcucuuuucagagccaccagaauu

SEQ ID NO: 22129 - RNA, 1723 nt, Artificial Sequence
  SARS-CoV-2__MT745677.1__non-structural protein 4 (NSP4) mRNA gc
aggagaaagcuuaccaugaagaucgugaacaacuggcugaagcagcucaucaaggucacccugguguuccuguucguggccgccaucuucuaccucaucacccccguccacgugaugagcaagcacacggacuucuccagcgagaucaucggcuacaaggcgaucgacgggggcgugacccgcgacaucgccuccaucgacacgugcuucgccaacaagcacgccgacuucgacaccugguucagccagcggggcggcuccuacaccaacgacaaggccugcccccugaucgcggccgucaucacccgcgaggugggguucgugguccccggccugcccggcaccauccuccggaccacgaacggggacuuccugcacuuccugccccgcguguucagcgccgugggcaacaucugcuacaccccguccaagcucaucgaguacaccgacuucgccaccagcgcgugcguccuggccgccgagugcacgaucuucaaggacgccuccgggaagcccgugcccuacugcuacgacaccaacgugcuggagggcagcgucgccuacgagucccuccggcccgacacccgcuacgugcugauggacgggagcaucauccaguucccgaacaccuaccuggagggcuccgugcgggucgugacgaccuucgacagcgaguacugccgccacgggaccugcgagcgguccgaggcgggggugugcgucagcaccuccggccgcugggugcucaacaacgacuacuaccggagccugcccgggguguucugcggcgucgacgccgugaaccugcucacgaacauguucacgccccugauccagcccaucggcgcccuggacaucuccgccagcaucgucgccgggggcaucguggcgaucguggugaccugccucgccuacuacuucaugcgcuuccggcgcgccuucggggaguacagccacgucguggccuucaacacccugcuguuccucauguccuucaccguccugugccugaccccgguguacagcuuccuccccggcguguacuccgucaucuaccuguaccugaccuucuaccucaccaacgacgugagcuuccuggcccacauccaguggauggugauguucacgccccugguccccuucuggaucaccaucgcguacaucaucugcaucuccaccaagcacuucuacugguucuucagcaacuaccucaagcggcgcgugguguucaacggggucuccuucagcaccuucgaggaggccgcccugugcacguuccugcucaacaaggagauguaccugaagcugcgguccgacgugcuccugccgcugacccaguacaaccgcuaccucgcccuguacaacaaguacaaguacuucagcggcgccauggacaccaccuccuaccgggaggcggccugcugccaccuggccaaggcccucaacgacuucagcaacuccggcagcgacgugcuguaccagccgccccagacguccaucaccagcgcgguccugcagugaggacuaguuauaagacugacuagcccgaugggccucccaacgggcccuccuccccuccuugcaccgagauuaauaaaaaaaaaaaaaaaaaaaaaaaaaaaaaaaaaaaaaaaaaaaaaaaaaaaaaaaaaaaaaaaaugcaucccccccccccccccccccccccccccccccaaaggcucuuuucagagccaccagaauu

SEQ ID NO: 22130 - RNA, 1723 nt, Artificial Sequence
  SARS-CoV-2__MT740431.1__non-structural protein 4 (NSP4) mRNA gc
aggagaaagcuuaccaugaagaucgugaacaacuggcugaagcagcucaucaaggucacccugguguuccuguucguggccgccaucuucuaccucaucacccccguccacgugaugagcaagcacacggacuucuccagcgagaucaucggcuacaaggcgaucgacgggggcgugacccgcgacaucgccuccaccgacacgugcuucgccaacaagcacgucgacuucgacaccugguucagccagcggggcggcuccuacaccaacgacaaggccugcccccugaucgccgcggugaucacccgcgaggugggguucgucgugcccggccugcccggcaccauccuccggacgaccaacggggacuuccugcacuuccugccccgcguguucagcgccgucggcaacaucugcuacaccccguccaagcucaucgaguacaccgacuucgccacgagcgccugcgugcuggcggccgagugcaccaucuucaaggacgccuccgggaagcccgugcccuacugcuacgacaccaacguccuggagggcagcguggccuacgagucccuccggcccgacacccgcuacgugcugauggacgggagcaucauccaguucccgaacacguaccuggagggcuccguccggguggugaccaccuucgacagcgaguacugccgccacgggaccugcgagcgguccgaggccggggucugcgugagcacguccggccgcugggugcucaacaacgacuacuaccggagccugcccggggucuucugcggcguggacgcggucaaccugcucaccaacauguucacgccccugauccagcccaucggcgcccuggacaucuccgccagcaucguggccgggggcaucguggccaucgucgugaccugccucgcguacuacuucaugcgcuuccggcgcgccuucggggaguacagccacguggucgccuucaacacccugcuguuccucauguccuucaccgugcugugccugaccccgguguacagcuuccuccccggcgucuacuccgugaucuaccuguaccugaccuucuaccucacgaacgacgugagcuuccuggcccacauccaguggauggucauguucacgccccuggugcccuucuggaucaccaucgccuacaucaucugcaucuccaccaagcacuucuacugguucuucagcaacuaccucaagcggcgcguggucuucaacgggguguccuucagcaccuucgaggaggcggcccugugcaccuuccugcucaacaaggagauguaccugaagcugcgguccgacgugcuccugccgcugacccaguacaaccgcuaccucgcccuguacaacaaguacaaguacuucagcggcgccauggacaccacguccuaccgggaggccgcgugcugccaccuggccaaggcccucaacgacuucagcaacuccggcagcgacguccuguaccagccgccccagaccuccaucaccagcgccgugcugcagugaggacuaguuauaagacugacuagcccgaugggccucccaacgggcccuccuccccuccuugcaccgagauuaauaaaaaaaaaaaaaaaaaaaaaaaaaaaaaaaaaaaaaaaaaaaaaaaaaaaaaaaaaaaaaaaaugcaucccccccccccccccccccccccccccccccaaaggcucuuuucagagccaccagaauu

SEQ ID NO: 22131 - RNA, 1723 nt, Artificial Sequence
  SARS-CoV-2__MT731936.1__non-structural protein 4 (NSP4) mRNA gc
aggagaaagcuuaccaugaagaucgugaacaacuggcugaagcagcucaucaaggucacccugguguuccuguucguggccgccaucuucuaccucaucacccccguccacgugaugagcaagcacacggacuucuccagcgagaucaucggcuacaaggcgaucgacgggggcgugacccgcgacaucgccuccaccgacacgugcuucgccaacaagcacgccgacuucgacaccugguucagccagcgcgggggcuccuacaccaacgacaaggccugcccgcugaucgcggccgucaucacccgggaggugggguucgugguccccggccugcccggcaccauccuccggacgaccaacggggacuuccugcacuuccugccccgcguguucagcgccgugggcaacaucugcuacaccccguccaagcucaucgaguacaccgacuucgccacgagcgcgugcguccuggccgccgagugcaccaucuucaaggacgccuccggcaagagcgugcccuacugcuacgacaccaacgugcuggagggcuccgucgccuacgagagccuccggcccgacacccgcuacgugcugauggacggguccaucauccaguuccccaacacguaccuggagggcagcgugcgggucgugaccaccuucgacuccgaguacugccgccacgggaccugcgagcggagcgaggcgggggugugcgucuccacgagcggccgcugggugcucaacaacgacuacuaccggucccugccggggguguucugcggcgucgacgccgugaaccugcucaccaacauguucacgccccugauccagcccaucggcgcccuggacaucagcgccagcaucgucgccgggggcaucguggcgaucguggugaccugccucgccuacuacuucaugcgcuuccggcgcgccuucggggaguacucccacgucguggccuucaacacccugcuguuccucaugagcuucaccguccugugccugacccccguguacuccuuccucccgggcguguacagcgucaucuaccuguaccugaccuucuaccucacgaacgacguguccuuccuggcccacauccaguggauggugauguucacgccccugguccccuucuggaucaccaucgcguacaucaucugcaucagcaccaagcacuucuacugguucuucuccaacuaccucaagcggcgcgugguguucaacggggucagcuucuccaccuucgaggaggccgcccugugcaccuuccugcucaacaagggcauguaccugaagcugcggagcgacgugcuccugccccugacccaguacaaccgcuaccucgcccuguacaacaaguacaaguacuucuccggcgccauggacaccacgagcuaccgggaggcggccugcugccaccuggccaaggcccucaacgacuucuccaacagcggguccgacgugcuguaccagccgccccagaccagcaucaccuccgcgguccugcagugaggacuaguuauaagacugacuagcccgaugggccucccaacgggcccuccuccccuccuugcaccgagauuaauaaaaaaaaaaaaaaaaaaaaaaaaaaaaaaaaaaaaaaaaaaaaaaaaaaaaaaaaaaaaaaaaugcaucccccccccccccccccccccccccccccccaaaggcucuuuucagagccaccagaauu

SEQ ID NO: 22132 - RNA, 1723 nt, Artificial Sequence
  SARS-CoV-2__MT706149.1__non-structural protein 4 (NSP4) mRNA gc
aggagaaagcuuaccaugaagaucgugaacaacuggcugaagcagcucaucaaggucacccugguguuccuguucguggccgccaucuucuaccucaucacccccguccacgugaugagcaagcacacggacuucuccagcgagaucaucggcuacaaggcgaucgacgggggcgugacccgcgacaucgccuccaccgacacgugcuucgccaacaagcacgccgacuucgacaccugguucagccagcggggcggcuccuacaccaacgacaaggccugcccgcugaucgcggccgucaucacccgcgaggugggguucgugguccccggccugcccggcaccauccuccggacgaccaacggggacuuccugcacuuccugccccgcguguucagcgccgugggcaacaucugcuacaccccguccaagcucaucgaguacaccgacuucgccacgagcgcgugcguccuggccgccgagugcaccaucuucaaggacgccuccgggaagcccgugcccuacugcuacgacaccaacgugcuggagggcagcgucgccuacgagucccuccggagcgacacccgcuacgugcugauggacggguccaucauccaguuccccaacacguaccuggagggcagcgugcgggucgugaccaccuucgacuccgaguacugccgccacgggaccugcgagcggagcgaggcgggggugugcgucuccacgagcggccgcugggugcucaacaacgacuacuaccggucccugccggggguguucugcggcgucgacgccgugaaccugcucaccaacauguucacgccccugauccagcccaucggcgcccuggacaucagcgccagcaucgucgccgggggcaucguggcgaucguggugaccugccucgccuacuacuucaugcgcuuccggcgcgccuucggggaguacucccacgucguggccuucaacacccugcuguuccucaugagcuucaccguccugugccugacccccguguacuccuuccucccgggcguguacagcgucaucuaccuguaccugaccuucuaccucacgaacgacguguccuuccuggcccacauccaguggauggugauguucacgccccugguccccuucuggaucaccaucgcguacaucaucugcaucagcaccaagcacuucuacugguucuucuccaacuaccucaagcggcgcgugguguucaacggggucagcuucuccaccuucgaggaggccgcccugugcaccuuccugcucaacaaggagauguaccugaagcugcggagcgacgugcuccugccccugacccaguacaaccgcuaccucgcccuguacaacaaguacaaguacuucuccggcgccauggacaccacgagcuaccgggaggcggccugcugccaccuggccaaggcccucaacgacuucuccaacagcggcuccgacgugcuguaccagccgccccagaccagcaucaccuccgcgguccugcagugaggacuaguuauaagacugacuagcccgaugggccucccaacgggcccuccuccccuccuugcaccgagauuaauaaaaaaaaaaaaaaaaaaaaaaaaaaaaaaaaaaaaaaaaaaaaaaaaaaaaaaaaaaaaaaaaugcaucccccccccccccccccccccccccccccccaaaggcucuuuucagagccaccagaauu

SEQ ID NO: 22133 - RNA, 1723 nt, Artificial Sequence
  SARS-CoV-2__MT706230.1__non-structural protein 4 (NSP4) mRNA gc
aggagaaagcuuaccaugaagaucgugaacaacuggcugaagcagcucaucaaggucacccugguguuccuguucguggccgccaucuucuaccucaucacccccguccacgugaugagcaagcacacggacuucuccagcgagaucaucggcuacaaggcgaucgacgggggcgugacccgcgacaucgccuccaccgacacgugcuucgccaacaagcacgccgacuucgacaccugguucagccagcggggcggcuccuacaccaacgacaaggccugcccccugaucgcggccgucaucacccgcgaggugggguucgugguccccggccugcccggcaccauccuccggacgaccaacggggacuuccugcacuuccugccccgcguguucagcgccgugggcaacaucugcuacaccccguccaagcucaucgaguacaccgacuucgccacgagcgcgugcguccuggccgccgagugcaccaucuucaaggacgccuccgggaagccccugcccuacugcuacgacaccaacgugcucgagggcagcguggccuacgagucccugcggcccgacacccgcuacguccugauggacgggagcaucauccaguucccgaacacguaccucgagggcuccgugcggguggucaccaccuucgacagcgaguacugccgccacgggaccugcgagcgguccgaggcgggggugugcgugagcacguccggccgcuggguccugaacaacgacuacuaccggagccugcccgggguguucugcggcguggacgccgucaaccuccugaccaacauguucacgccccugauccagcccaucggcgcccucgacaucuccgccagcaucguggccgggggcaucgucgcgaucguggugaccugccuggccuacuacuucaugcgcuuccggcgcgccuucggggaguacagccacgucguggccuucaacacccuccuguuccugauguccuucaccgugcugugccucaccccggucuacagcuuccugcccggcguguacuccgugaucuaccuguaccucaccuucuaccugacgaacgacgucagcuuccuggcccacauccaguggauggugauguucacgccccucgugcccuucuggaucaccaucgcguacaucaucugcaucuccaccaagcacuucuacugguucuucagcaacuaccugaagcggcgcgucguguucaacgggguguccuucagcaccuucgaggaggccgcccugugcaccuuccuccugaacaaggagauguaccugaagcuccgguccgacguccugcugccgcucacccaguacaaccgcuaccuggcccuguacaacaaguacaaguacuucagcggcgccauggacaccacguccuaccgggaggcggccugcugccaccucgccaaggcccugaacgacuucagcaacuccggcagcgacgugcuguaccagccgccccagaccuccaucaccagcgcggugcugcagugaggacuaguuauaagacugacuagcccgaugggccucccaacgggcccuccuccccuccuugcaccgagauuaauaaaaaaaaaaaaaaaaaaaaaaaaaaaaaaaaaaaaaaaaaaaaaaaaaaaaaaaaaaaaaaaaugcaucccccccccccccccccccccccccccccccaaaggcucuuuucagagccaccagaauu

SEQ ID NO: 22134 - RNA, 1723 nt, Artificial Sequence
  SARS-CoV-2__MT706254.1__non-structural protein 4 (NSP4) mRNA gc
aggagaaagcuuaccaugaagaucgugaacaacuggcugaagcagcucaucaaggucacccugguguuccuguucguggccgccaucuucuaccucaucacccccguccacgugaugagcaagcacacggacuucuccagcgagaucaucggcuacaaggcgaucgacgggggcgugacccgcgacaucgccuccaccgacacgugcuucgccaacaagcacgccgacuucgacaccugguucagccagcggggcggcuccuacaccaacgacaaggccugcccccugaucgcggccgucaucacccgcgaggugggguucgugguccccggccugcccggcaccauccuccggacgaccaacggggacuuccugcacuuccugccccgcguguucagcgccgugggcaacaucugcuacaccccguccaagcucaucgaguacaccgacuucgccacgagcgcgugcguccuggccgccgagugcaccaucuucaaggacgccuccgggaagcccgugcccuacugcuacgacaccaacgugcuggagggcagcgucgccuacgagucccuccggcccgacacccgcuacgugcugauggacgggagcaucauccaguucccgaacacguaccuggagggcuccgugcgggucgugaccaccuucgacagcgaguacugccgccacgggaccugcgagcgguccgaggcgggggugugcgucagcacguccggccgcugggugcucaacaacgacuacuaccggagccugcccgggguguucugcggcgucgacgccgugaaccugcucaccaacauguucacgccccugauccagcccaucggcgcccuggacaucuccgccagcaucgucgccgggggcaucguggcgaucguggugaccugccucgccuacuacuucaugcgcuuccggcgcgccuucggggaguacagccacgucguggccuucaacacccugcuguuccucauguccuucaccguccugugccugaccccgguguacagcuuccuccccggcguguacuccgucaucuaccuguaccugaccuucuaccucacgaacgacgugagcuuccuggcccacauccaguggauggugauguucacgccccugguccccuucuggaugaccaucgcguacaucaucugcaucuccaccaagcacuucuacugguucuucagcaacuaccucaagcggcgcgugguguucaacggggucuccuucagcaccuucgaggaggccgcccugugcaccuuccugcucaacaaggagauguaccugaagcugcgguccgacgugcuccugccgcugacccaguacaaccgcuaccucgcccuguacaacaaguacaaguacuucagcggcgccauggacaccacguccuaccgggaggcggccugcugccaccuggccaaggcccucaacgacuucagcaacuccggcagcgacgugcuguaccagccgccccagaccuccaucaccagcgcgguccugcagugaggacuaguuauaagacugacuagcccgaugggccucccaacgggcccuccuccccuccuugcaccgagauuaauaaaaaaaaaaaaaaaaaaaaaaaaaaaaaaaaaaaaaaaaaaaaaaaaaaaaaaaaaaaaaaaaugcaucccccccccccccccccccccccccccccccaaaggcucuuuucagagccaccagaauu

SEQ ID NO: 22135 - RNA, 1723 nt, Artificial Sequence
  SARS-CoV-2__MT706307.1__non-structural protein 4 (NSP4) mRNA gc
aggagaaagcuuaccaugaagaucgugaacaacuggcugaagcagcucaucaaggucacccugguguuccuguucguggccgccaucuucuaccucaucacccccguccacgugaugagcaagcacacggacuucuccagcgagaucaucggcuacaaggcgaucgacgggggcgugacccgcgacaucgccuccaccgacacgugcuucgccaacaagcacgccgacuucgacaccugguucagccagcggggcggcuccuacaccaacgacaaggccugcccccugaucgcggccgucaucacccgcgaggugggguucgugguccccggccugcccggcaccauccuccggacgaccaacggggacuuccugcacuuccugccccgcguguucagcgccgugggcaacaucugcuacaccccguccaagcucaucgaguacaccgacuucgccacgagcgcgugcguccuggccgccgagugcaccaucuucaaggacgccuccgggaagcccgugcccuacugcuacgacaccaacgugcuggagggcagcgucgccuacgagucccuccggcccgacacccgcuacgugcugauggacgggagcaucauccaguucccgaacacguaccuggagggcuccgugcgggucgugaccaccuucgacagcgaguacugccgccacgggaccugcgagcgguccgaggcgggggugugcgucagcacguccggccgcugggugcucaacaacgacuacuaccggagccugcccgggguguucugcggcgucgacgccgugaaccugcucaccaacauguucacgccccugauccagcccaucggcgcccuggacaucuccgccagcaucgucgccgggggcaucguggcgaucguggugaccugccucgccuacuacuucaugcgcuuccggcgcgccuucggggaguacagccacgucguggccuucaacauccugcuguuccucauguccuucaccguccugugccugaccccgguguacagcuuccuccccggcguguacuccgucaucuaccuguaccugaccuucuaccucaccaacgacgugagcuuccuggcccacauccaguggauggugauguucacgccccugguccccuucuggaucaccaucgcguacaucaucugcaucuccaccaagcacuucuacugguucuucagcaacuaccucaagcggcgcgugguguucaacggggucuccuucagcaccuucgaggaggccgcccugugcacguuccugcucaacaaggagauguaccugaagcugcgguccgacgugcuccugccgcugacccaguacaaccgcuaccucgcccuguacaacaaguacaaguacuucagcggcgccauggacaccaccuccuaccgggaggcggccugcugccaccuggccaaggcccucaacgacuucagcaacuccggcagcgacgugcuguaccagccgccccagacguccaucaccagcgcgguccugcagugaggacuaguuauaagacugacuagcccgaugggccucccaacgggcccuccuccccuccuugcaccgagauuaauaaaaaaaaaaaaaaaaaaaaaaaaaaaaaaaaaaaaaaaaaaaaaaaaaaaaaaaaaaaaaaaaugcaucccccccccccccccccccccccccccccccaaaggcucuuuucagagccaccagaauu

SEQ ID NO: 22136 - RNA, 1723 nt, Artificial Sequence
  SARS-CoV-2__MT706334.1__non-structural protein 4 (NSP4) mRNA gc
aggagaaagcuuaccaugaagaucgugaacaacuggcugaagcagcucaucaaggucacccugguguuccuguucguggccgccaucuucuaccucaucacccccguccacgugaugagcaagcacacggacuucuccagcgagaucaucggcuacaaggcgaucgacgggggcgugacccgcgacaucgccuccaccgacacgugcuucgccaacaagcacgccgacuucgacaccugguucagccagcggggcggcuccuacaccaacgacaaggccugcccccugaucgcggccgucaucacccgcgaggugggguucgugguccccggccugcccggcaccauccuccggacgaccaacggggacuuccugcacuuccugccccgcguguucagcgccgugggcaacaucugcuacaccccguccaagcucaucgaguacaccgacuucgccacgagcgcgugcguccuggccgccgagugcaccaucuucaaggacgccuccgggaagcccgugcccuacugcuacgacaccaacgugcuggagggcagcgucgccuacgagucccuccggcccgacacccgcuacgugcugauggacgggagcaucauccaguucccgaacacguaccuggagggcuccgugcgggucgugaccaccuucgacagcgaguacugccgccacgggaccugcgagcgguccgaggcgggggugugcgucagcacguccggccgcugggugcucaacaacgacuacuaccggagccugcccgggguguucugcggcgucgacgccgugaaccugcucaccaacauguucacgccccugauccagcccaucggcgcccuggacaucuccgccagcaucgucgccgggggcaucguggcgaucguggugaccugccucgccuacuacuucaugcgcuuccggcgcgccuucggggaguacagccacgucguggccuucaacacccugcuguuccucauguccuucaccguccugugccugaccccgguguacagcuuccuccccggcguguacuccgucaucuaccuguaccugaccuucuaccucacgaacgacgugagcuuccuggcccacauccaguggauggugauguucacgccccugguccccuucuggaucaccaucgcguacaucaucugcaucuccaccaagcacuucuacugguucuucagcaacuaccucaagcggcgcgugguguucaacggggucuccuucagcaccuucgaggaggccgcccugugcaccuuccugcucaacaaggagauguaccugaagcugcggggcgacgugcuccugccgcugacccaguacaaccgcuaccucgcccuguacaacaaguacaaguacuucuccggcgccauggacaccacgagcuaccgggaggcggccugcugccaccuggccaaggcccucaacgacuucuccaacagcggguccgacgugcuguaccagccgccccagaccagcaucaccuccgcgguccugcagugaggacuaguuauaagacugacuagcccgaugggccucccaacgggcccuccuccccuccuugcaccgagauuaauaaaaaaaaaaaaaaaaaaaaaaaaaaaaaaaaaaaaaaaaaaaaaaaaaaaaaaaaaaaaaaaaugcaucccccccccccccccccccccccccccccccaaaggcucuuuucagagccaccagaauu

SEQ ID NO: 22137 - RNA, 1723 nt, Artificial Sequence
  SARS-CoV-2__MT706437.1__non-structural protein 4 (NSP4) mRNA gc
aggagaaagcuuaccaugaagaucgugaacaacuggcugaagcagcucaucaaggucacccugguguuccuguucguggccgccaucuucuaccucaucacccccguccacgugaugagcaagcacacggacuucuccagcgagaucaucggcuacaaggcgaucgacgggggcgugacccgcgacaucgccuccaccgacacgugcuucgccaacaagcacgccgacuucgacaccugguucagccagcggggcggcuccuacaccaacgacaaggccugcccccugaucgcggccgucaucacccgcgaggugggguucgugguccccggccugcccggcaccauccuccggacgaccaacggggacuuccugcacuuccugccccgcguguucagcgccgugggcaacaucugcuacaccccguccaagcucaucgaguacaccgacuucgccacgagcgcgugcguccuggccgccgagugcaccaucuucaaggacgccuccgggaagcccgugcccuacugcuacgacaccaacgugcuggagggcagcgucgccuacgagucccuccggcccgacacccgcuacgugcugauggacgggagcaucauccaguucccgaacacguaccuggagggcuccgugcgggucgugaccaccuucgacagcgaguacugccgccacgggaccugcgagcgguccgaggcgggggugugcgucagcacguccggccgcugggugcucaacaacgacuacuaccggagccugcccgggguguucugcggcgucgacgccgugaaccugcucaccaacauguucacgccccugauccagcccaucggcgcccuggacaucuccgccagcaucgucgccgggggcaucguggcgaucguggugaccugccucgccuacuacuucaugcgcuuccggcgcgccuucggggaguacagccacgucguggccuucaacacccugcuguuccucauguccuucaccguccugugccugaccccgguguacagcuuccuccccggcguguacuccgucaucuaccuguaccugaccuucuaccucacgaacgacgugagcuuccuggcccacauccaguggauggugauguucacgccccugguccccuucugggugaccaucgcguacaucaucugcaucuccaccaagcacuucuacugguucuucagcaacuaccucaagcggcgcguggucuucaacgggguguccuucagcaccuucgaggaggccgcccugugcaccuuccugcucaacaaggagauguaccugaagcugcgguccgacgugcuccugccgcugacccaguacaaccgcuaccucgcccuguacaacaaguacaaguacuucagcggcgccauggacaccacguccuaccgggaggcggccugcugccaccuggccaaggcccucaacgacuucagcaacuccggcagcgacguccuguaccagccgccccagaccuccaucaccagcgcggugcugcagugaggacuaguuauaagacugacuagcccgaugggccucccaacgggcccuccuccccuccuugcaccgagauuaauaaaaaaaaaaaaaaaaaaaaaaaaaaaaaaaaaaaaaaaaaaaaaaaaaaaaaaaaaaaaaaaaugcaucccccccccccccccccccccccccccccccaaaggcucuuuucagagccaccagaauu

SEQ ID NO: 22138 - RNA, 1723 nt, Artificial Sequence
  SARS-CoV-2__MT704022.1__non-structural protein 4 (NSP4) mRNA gc
aggagaaagcuuaccaugaagaucgugaacaacuggcugaagcagcucaucaaggucacccugguguuccuguucguggccgccaucuucuaccucaucacccccguccacgugaugagcaagcacacggacuucuccagcgagaucaucggcuacaaggcgaucgacgggggcgugacccgcgacaucgccuccaccgacacgugcuucgccaacaagcacgccgacuucgacaccugguucagccagcggggcggcuccuacaccaacgacaaggccugcccccugaucgcggccgucaucacccgcgaggugggguucgugguccccggccugcccggcaccauccuccggacgaccaacggggacuuccugcacuuccugccccgcguguucagcgccgugggcaacaucugcuacaccccguccaagcucaucgaguacaccgacuucgccacgagcgcgugcguccuggccgccgagugcaccaucuucaaggacgccuccgggaagcccgugcccuacugcuacgacaccaacgugcuggagggcagcgucgccuacgagucccuccggcccgacacccgcuacgugcugauggacgggagcaucauccaguucccgaacacguaccuggagggcuccgugcgggucgugaccaccuucgacagcgaguacugccgccacgggaccugcgagcgguccgaggcgggggugugcgucagcacguccggccgcugggugcucaacaacgacuacuaccggagccugcccgggguguucugcggcgucgacgccgugaaccugcucaccaacauguucacgccccugauccagcccaucggcgcccuggacaucuccgccagcaucgucgccgggggcaucguggcgaucaucgugaccugccucgccuacuacuucaugcgcuuccggcgcgccuucggggaguacagccacgucguggccuucaacacccugcuguuccucauguccuucaccgugcugugccugaccccggucuacagcuuccuccccggcguguacuccgugaucuaccuguaccugaccuucuaccucacgaacgacgucagcuuccuggcccacauccaguggauggugauguucacgccccuggugcccuucuggaucaccaucgcguacaucaucugcaucuccaccaagcacuucuacugguucuucagcaacuaccucaagcggcgcgucguguucaacgggguguccuucagcaccuucgaggaggccgcccugugcaccuuccugcucaacaaggagauguaccugaagcugcgguccgacguccuccugccgcugacccaguacaaccgcuaccucgcccuguacaacaaguacaaguacuucagcggcgccauggacaccacguccuaccgggaggcggccugcugccaccuggccaaggcccucaacgacuucagcaacuccggcagcgacgugcuguaccagccgccccagaccuccaucaccagcgcggugcugcagugaggacuaguuauaagacugacuagcccgaugggccucccaacgggcccuccuccccuccuugcaccgagauuaauaaaaaaaaaaaaaaaaaaaaaaaaaaaaaaaaaaaaaaaaaaaaaaaaaaaaaaaaaaaaaaaaugcaucccccccccccccccccccccccccccccccaaaggcucuuuucagagccaccagaauu

SEQ ID NO: 22139 - RNA, 1723 nt, Artificial Sequence
  SARS-CoV-2__MT704064.1__non-structural protein 4 (NSP4) mRNA gc
aggagaaagcuuaccaugaagaucgugaacaacuggcugaagcagcucaucaaggucacccugguguuccuguucguggccgccaucuucuaccucaucacccccguccacgugaugagcaagcacacggacuucuccagcgagaucaucggcuacaaggcgaucgacgggggcgugacccgcgacaucgccuccaccgacacgugcuucgccaacaagcacgccgacuucgacaccugguucagccagcggggcggcuccuacaccaacgacaaggccugcccccugaucgcggccgucaucacccgcgaggugggguucgugguccccggccugcccggcaccauccuccggacgaccaacggggacuuccugcacuuccugccccgcguguucagcgccgugggcaacaucugcuacaccccguccaagcucaucgaguacaccgacuucgccacgagcgcgugcguccuggccgccgagugcaccaucuucaaggacgccuccgggaagcccgugcccuacugcuacgacaccaacgugcuggagggcagcgucgccuacgagucccuccggcccgacacccgcuacgugcugauggacgggagcaucauccaguucccgaacacguaccuggagggcuccgugcgggucgugaccaccuucgacagcgaguacugccgccacgggaccugcgagcgguccgaggcgggggugugcgucagcacguccggccgcugggugcucaacaacgacuucuaccggagccugcccgggguguucugcggcgucgacgccgugaaccugcucaccaacauguucacgccccugauccagcccaucggcgcccuggacaucuccgccagcaucgucgccgggggcaucguggcgaucguggugaccugccucgccuacuacuucaugcgcuuccggcgcgccuucggggaguacagccacgucguggccuucaacacccugcuguuccucauguccuucaccguccugugccugaccccgguguacagcuuccuccccggcguguacuccgucaucuaccuguaccugaccuucuaccucacgaacgacgugagcuuccuggcccacauccaguggauggugauguucacgccccugguccccuucuggaucaccaucgcguacaucaucugcaucuccaccaagcacuucuacugguucuucagcaacuaccucaagcggcgcgugguguucaacggggucuccuucagcaccuucgaggaggccgcccugugcaccuuccugcucaacaaggagauguaccugaagcugcgguccgacgugcuccugccgcugacccaguacaaccgcuaccucgcccuguacaacaaguacaaguacuucagcggcgccauggacaccacguccuaccgggaggcggccugcugccaccuggccaaggcccucaacgacuucagcaacuccggcagcgacgugcuguaccagccgccccagaccuccaucaccagcgcgguccugcagugaggacuaguuauaagacugacuagcccgaugggccucccaacgggcccuccuccccuccuugcaccgagauuaauaaaaaaaaaaaaaaaaaaaaaaaaaaaaaaaaaaaaaaaaaaaaaaaaaaaaaaaaaaaaaaaaugcaucccccccccccccccccccccccccccccccaaaggcucuuuucagagccaccagaauu

SEQ ID NO: 22140 - RNA, 1723 nt, Artificial Sequence
  SARS-CoV-2__MT704121.1__non-structural protein 4 (NSP4) mRNA gc
aggagaaagcuuaccaugaagaucgugaacaacuggcugaagcagcucaucaaggucacccugguguuccuguucguggccgccaucuucuaccucaucacccccguccacgugaugagcaagcacacggacuucuccagcgagaucaucggcuacaaggcgaucgacgggggcgugacccgcgacaucgccuccaccgacacgugcuucgccaacaagcacgccgacuucgacaccugguucagccagcggggcggcuccuacaccaacgacaaggccugcccccugaucgcggccgucaucacccgcgaggugggguucgugguccccggccugcccggcaccauccuccggacgaccaacggggacuuccugcacuuccugccccgcguguucagcgccgugggcaacaucugcuacaccccguccaagcucaucgaguacaccgacuucgccacgagcgcgugcguccuggccgccgagugcaccaucuucaaggacgccuccgggaagcccgugcccuacugcuacgacaccaacgugcuggagggcagcgucgccuacgagucccuccggcccgacacccgcuacgugcugauggacgggagcaucauccaguucccgaacacguacuucgagggcuccgugcgggucgugaccaccuucgacagcgaguacugccgccacgggaccugcgagcgguccgaggcgggggugugcgucagcacguccggccgcugggugcugaacaacgacuacuaccggagccuccccgggguguucugcggcgucgacgccgugaaccugcugaccaacauguucacgccccucauccagcccaucggcgcccuggacaucuccgccagcaucgucgccgggggcaucguggcgaucguggugaccugccuggccuacuacuucaugcgcuuccggcgcgccuucggggaguacagccacgucguggccuucaacacccuccuguuccugauguccuucaccguccucugccugaccccgguguacagcuuccugcccggcguguacuccgucaucuaccucuaccugaccuucuaccugacgaacgacgugagcuuccucgcccacauccaguggauggugauguucacgccccugguccccuucuggaucaccaucgcguacaucaucugcaucuccaccaagcacuucuacugguucuucagcaacuaccugaagcggcgcgugguguucaacggggucuccuucagcaccuucgaggaggccgcccucugcaccuuccugcugaacaaggagauguaccucaagcugcgguccgacgugcugcucccgcugacccaguacaaccgcuaccuggcccucuacaacaaguacaaguacuucagcggcgccauggacaccacguccuaccgggaggcggccugcugccaccuggccaaggcccugaacgacuucagcaacuccggcagcgacgugcucuaccagccgccccagaccuccaucaccagcgcgguccugcagugaggacuaguuauaagacugacuagcccgaugggccucccaacgggcccuccuccccuccuugcaccgagauuaauaaaaaaaaaaaaaaaaaaaaaaaaaaaaaaaaaaaaaaaaaaaaaaaaaaaaaaaaaaaaaaaaugcaucccccccccccccccccccccccccccccccaaaggcucuuuucagagccaccagaauu

SEQ ID NO: 22141 - RNA, 1723 nt, Artificial Sequence
  SARS-CoV-2__MT704136.1__non-structural protein 4 (NSP4) mRNA gc
aggagaaagcuuaccaugaagaucgugaacaacuggcugaagcagcucaucaaggucacccugguguuccuguucguggccgccaucuucuaccucaucacccccguccacgugaugagcaagcacacggacuucuccagcgagaucaucggcuacaaggcgaucgacgggggcgugacccgcgacaucgccuccaccgacacgugcuucgccaacaagcacgccgacuucgacaccugguucagccagcggggcggcuccuacaccaacgacaaggccugcccccugaucgcggccgucaucacccgcgaggugggguucgugguccccggccugcccggcaccauccuccggacgaccaacggggacuuccugcacuuccugccccgcguguucagcgccgugggcaacaucugcuacaccccguccaagcucaucgaguacaccgacuucgccacgagcgcgugcguccuggccgccgagugcaccaucuucaaggacgccuccgggaagcccgugcccuacugcuacgacaccaacgugcuggagggcagcgucgccuacgagucccuccggcccgacacccgcuacgugcugauggacgggagcaucauccaguucccgaacacguaccuggagggcuccgugcgggucgugaccaccuucgacagcgaguacugccgccacgggaccugcgagcgguccgaggcgggggugugcgucagcacguccggccgcugggugcucaacaacgacuacuaccggagccugcccgggguguucugcggcgucgacgccgugaaccugcucaccaacauguucacgccccugauccagcccaucggcgcccuggacaucuccgccagcaucgucgccgggggcaucguggcgaucguggugaccugccucgccuacuacuucaugcgcuuccggcgcgccuucggggaguacagccacgucguggccuucaacacccugcuguucuucauguccuucaccguccucugccugaccccgguguacagcuuccugcccggcguguacuccgucaucuaccucuaccugaccuucuaccugacgaacgacgugagcuuccucgcccacauccaguggauggugauguucacgccccugguccccuucuggaucaccaucgcguacaucaucugcaucuccaccaagcacuucuacugguucuucagcaacuaccugaagcggcgcgugguguucaacggggucuccuucagcaccuucgaggaggccgcccucugcaccuuccugcugaacaaggagauguaccucaagcugcgguccgacgugcugcucccgcugacccaguacaaccgcuaccuggcccucuacaacaaguacaaguacuucagcggcgccauggacaccacguccuaccgggaggcggccugcugccaccuggccaaggcccugaacgacuucagcaacuccggcagcgacgugcucuaccagccgccccagaccuccaucaccagcgcgguccugcagugaggacuaguuauaagacugacuagcccgaugggccucccaacgggcccuccuccccuccuugcaccgagauuaauaaaaaaaaaaaaaaaaaaaaaaaaaaaaaaaaaaaaaaaaaaaaaaaaaaaaaaaaaaaaaaaaugcaucccccccccccccccccccccccccccccccaaaggcucuuuucagagccaccagaauu

SEQ ID NO: 22142 - RNA, 1723 nt, Artificial Sequence
  SARS-CoV-2__MT683386.1__non-structural protein 4 (NSP4) mRNA gc
aggagaaagcuuaccaugaagaucgugaacaacuggcugaagcagcucaucaaggucacccugguguuccuguucguggccgccaucuucuaccucaucacccccguccacgugaugagcaagcacacggacuucuccagcgagaucaucggcuacaaggcgaucgacgggggcgugacccgcgacaucgccuccaccgacacgugcuucgccaacaagcacgccgacuucgacaccugguucagccagcggggcggcuccuacaccaacgacaaggccugcccccugaucgcggccgucaucacccgcgaggugggguucgugguccccggccugcccggcaccauccuccggacgaccaacggggacuuccugcacuuccugccccgcguguucagcgccgugggcaacaucugcuacaccccguccaagcucaucgaguacaccgacuucgccacgagcgcgugcguccuggccgccgagugcaccaucuucaaggacgccuccgggaagcccgugcccuacugcuacgacaccaacgugcuggagggcagcgucgccuacgagucccuccggcccgacacccgcuacgugcugauggacgggagcaucauccaguucccgaacacguaccuggagggcuccgugcgggucgugaccaccuucgacagcgaguacugccgccacgggaccugcgagcgguccgaggcgggggugugcgucagcacguccggccgcugggugcucaacaacgacuacuaccggagccugcccgggguguucugcggcgucgacgccgugaaccugcucaccaacauguucacgccccugauccagcccaucggcgcccuggacaucuccgccagcaucgucgccgggggcaucguggcgauccucgugaccugccuggccuacuacuucaugcgcuuccggcgcgccuucggggaguacagccacgucguggccuucaacacccuccuguuccugauguccuucaccgugcugugccucaccccggucuacagcuuccugcccggcguguacuccgugaucuaccuguaccucaccuucuaccugacgaacgacgucagcuuccuggcccacauccaguggauggugauguucacgccccucgugcccuucuggaucaccaucgcguacaucaucugcaucuccaccaagcacuucuacugguucuucagcaacuaccugaagcggcgcgucguguucaacgggguguccuucagcaccuucgaggaggccgcccugugcaccuuccuccugaacaaggagauguaccugaagcuccgguccgacguccugcugccgcucacccaguacaaccgcuaccuggcccuguacaacaaguacaaguacuucagcggcgccauggacaccacguccuaccgggaggcggccugcugccaccucgccaaggcccugaacgacuucagcaacuccggcagcgacgugcuguaccagccgccccagaccuccaucaccagcgcggugcugcagugaggacuaguuauaagacugacuagcccgaugggccucccaacgggcccuccuccccuccuugcaccgagauuaauaaaaaaaaaaaaaaaaaaaaaaaaaaaaaaaaaaaaaaaaaaaaaaaaaaaaaaaaaaaaaaaaugcaucccccccccccccccccccccccccccccccaaaggcucuuuucagagccaccagaauu

SEQ ID NO: 22143 - RNA, 1723 nt, Artificial Sequence
  SARS-CoV-2__MT627391.1__non-structural protein 4 (NSP4) mRNA gc
aggagaaagcuuaccaugaagaucgugaacaacuggcugaagcagcucaucaaggucacccugguguuccuguucguggccgccaucuucuaccucaucacccccguccacgugaugagcaagcacacggacuucuccagcgagaucaucggcuacaaggcgaucgacgggggcgugacccgcgacaucgccuccaccgacacgugcuucgccaacaagcacgccgacuucgacaccugguucagccagcggggcggcuccuacaccaacgacaaggccugcccccugaucgcggccgucaucacccgcgaggugggguucgugguccccggccugcccggcaccauccuccggacgaccaacggggacuuccugcacuuccugccccgcguguucagcgccgugggcaacaucugcuacaccccguccaagcucaucgaguacaccgacuucgccacgagcgcgugcguccuggccgccgagugcaccaucuucaaggacgccuccgggaagcccgugcccuacugcuacgacaccaacgugcuggagggcagcgucgccuacgagucccuccggcccgacacccgcuacgugcugauggacgggagcaucauccaguucccgaacacguaccuggagggcuccgugcgggucgugaccaccuucgacagcgaguacugccgccacgggaccugcgagcgguccgaggcgggggugugcgucagcacguccggccgcugggugcucaacaacgacuacuaccggagccugcccgggguguucugcggcgucgacgccgugaaccugcucaccaacauguucacgccccugauccagcccaucggcgcccuggacaucuccgccagcaucgucgccgggggcaucguggcgaucguggugaccugccucgccuacuacuucaugcgcuuccggcgcgccuucggggccuacagccacgucguggccuucaacacccugcuguuccucauguccuucaccguccugugccugaccccgguguacagcuuccuccccggcguguacuccgucaucuaccuguaccugaccuucuaccucacgaacgacgugagcuuccuggcgcacauccaguggauggugauguucacgccccugguccccuucuggaucaccaucgccuacaucaucugcaucuccaccaagcacuucuacugguucuucagcaacuaccucaagcggcgcgugguguucaacggggucuccuucagcaccuucgaggaggccgcccugugcaccuuccugcucaacaaggagauguaccugaagcugcgguccgacgugcuccugccgcugacccaguacaaccgcuaccucgcccuguacaacaaguacaaguacuucagcggcgcgauggacaccacguccuaccgggaggccgccugcugccaccuggccaaggcgcucaacgacuucagcaacuccggcagcgacgugcuguaccagccgccccagaccuccaucaccagcgccguccugcagugaggacuaguuauaagacugacuagcccgaugggccucccaacgggcccuccuccccuccuugcaccgagauuaauaaaaaaaaaaaaaaaaaaaaaaaaaaaaaaaaaaaaaaaaaaaaaaaaaaaaaaaaaaaaaaaaugcaucccccccccccccccccccccccccccccccaaaggcucuuuucagagccaccagaauu

SEQ ID NO: 22144 - RNA, 1723 nt, Artificial Sequence
  SARS-CoV-2__MT678839.1__non-structural protein 4 (NSP4) mRNA gc
aggagaaagcuuaccaugaagaucgugaacaacuggcugaagcagcucaucaaggucacccugguguuccuguucguggccgccaucuucuaccucaucacccccguccacgugaugagcaagcacacggacuucuccagcgagaucaucggcuacaaggcgaucgacgggggcgugacccgcgacaucgccuccaccgacacgugcuucgccaacaagcacgccgacuucgacaccugguucagccagcggggcggcuccuacaccaacgacaaggccugcccccugaucgcggccgucaucacccgcgaggugggguucgugguccccggccugcccagcaccauccuccggacgaccaacggcgacuuccugcacuuccugccccgcguguucuccgccguggggaacaucugcuacaccccgagcaagcucaucgaguacaccgacuucgccacguccgcgugcguccuggccgccgagugcaccaucuucaaggacgccagcggcaagcccgugcccuacugcuacgacaccaacgugcuggagggguccgucgccuacgagagccuccggcccgacacccgcuacgugcugauggacggcuccaucauccaguucccgaacacguaccuggaggggcccgugcgggucgugaccaccuucgacagcgaguacugcggccacgggaccugcgagcgcuccgaggcgggggugugcgucagcacguccggccggugggugcucaacaacgacuacuaccgcagccugcccgggguguucugcggcgucgacgccgugaaccugcucaccaacauguucacgccccugauccagccgaucggcgcccuggacaucuccgccagcaucgucgccgggggcaucguggcgaucguggugaccugccucgccuacuacuucaugcgguuccgccgggccuucggggaguacagccacgucguggccuucaacacccugcuguuccucauguccuucaccguccugugccugacccccguguacagcuuccuccccggcguguacuccgucaucuaccuguaccugaccuucuaccucacgaacgacgugagcuuccuggcccacauccaguggauggugauguucacgccccuggucccguucuggaucaccaucgcguacaucaucugcaucuccaccaagcacuucuacugguucuucagcaacuaccucaagcgccgggugguguucaacggggucuccuucagcaccuucgaggaggccgcccugugcaccuuccugcucaacaaggagauguaccugaagcugcgcuccgacgugcuccugccccugacccaguacaaccgguaccucgcccuguacaacaaguacaaguacuucagcggcgccauggacaccacguccuaccgcgaggcggccugcugccaccuggccaaggcccucaacgacuucagcaacuccggcagcgacgugcuguaccagccgccccagaccuccaucaccagcgcgguccugcagugaggacuaguuauaagacugacuagcccgaugggccucccaacgggcccuccuccccuccuugcaccgagauuaauaaaaaaaaaaaaaaaaaaaaaaaaaaaaaaaaaaaaaaaaaaaaaaaaaaaaaaaaaaaaaaaaugcaucccccccccccccccccccccccccccccccaaaggcucuuuucagagccaccagaauu

SEQ ID NO: 22145 - RNA, 1723 nt, Artificial Sequence
  SARS-CoV-2__MT611440.1__non-structural protein 4 (NSP4) mRNA gc
aggagaaagcuuaccaugaagaucgugaacaacuggcugaagcagcucaucaaggucacccugguguuccuguucguggccgccaucuucuaccucaucacccccguccacgugaugagcaagcacacggacuucuccagcgagaucaucggcuacaaggcgaucgacgggggcgugacccgcgacaucgccuccaccgacacgugcuucgccaacaagcacgccgacuucgacaccugguucagccagcggggcggcuccuacaccaacgacaaggccugcccccugaucgcggccgucaucacccgcgaggugggguucgugguccccggccugcccggcaccauccuccggacgaccaacggggacuuccugcacuuccugccccgcguguucagcgccgugggcaacaucugcuacaccccguccaagcucaucgaguacaccgacuucgccacgagcgcgugcguccuggccgccgagugcaccaucuucaaggacgccuccgggaagcccgugcccuacugcuacgacaccaacgugcuggagggcagcgucgccuacgagucccuccggcccgacacccgcuacgugcugauggacgggagcaucauccaguucccgaacacguaccuggagggcuccgugcgggucgugaccaccuucgacagcgaguacugccgccacgggaccugcgagcgguccgaggcgggggugugcgucagcacguccggccgcugggugcucaacaacgacuacuaccggagccugcccgggguguucugcggcgucgacgccgugaaccugcucaccaacauguucacgccccugauccagcccaucggcgcccuggacaucuccgccagcaucgucgccgggggcaucguggcgaucguggugaccugccucgccuacuacuucaugcgcuuccggcgcgccuucggggaguacagccacgucguggccuucaacacccugcuguuccucauguccuucaccguccugugccugaccccgguguacagcuuccuccccggcguguacuccgucaucuaccuguaccugaccuucuaccucacgaacgacgugagcuuccuggcccacauccaguggauggugauguucacgccccugguccccuucuggaucaccaucgcguacaucaucugcaucuccaccaagcacuucuacugguucuucagcaacuaccucaagcggcgcgugguguucaacggggucuccuucagcaccuucgaggaggccgcccugugcaccuuccugcucaacaaggagauguaccugaagcugcgguccgacgugcuccugccgcugacccaguacaaccgcuaccucgcccuguacaacaaguacaaguacuucagcggcgccauggacaccacguccuaccgggaggcggccugcugccaccuggccaaggcccucaacgacuucagcaacuccggcagcgacgugcuguaccagccgccccagaccuccaucaccagcgcgauccugcagugaggacuaguuauaagacugacuagcccgaugggccucccaacgggcccuccuccccuccuugcaccgagauuaauaaaaaaaaaaaaaaaaaaaaaaaaaaaaaaaaaaaaaaaaaaaaaaaaaaaaaaaaaaaaaaaaugcaucccccccccccccccccccccccccccccccaaaggcucuuuucagagccaccagaauu

SEQ ID NO: 22146 - RNA, 1723 nt, Artificial Sequence
  SARS-CoV-2__MT648830.1__non-structural protein 4 (NSP4) mRNA gc
aggagaaagcuuaccaugaagaucgugaacaacuggcugaagcagcucaucaaggucacccugguguuccuguucguggccgccaucuucuaccucaucacccccguccacgugaugagcaagcacacggacuucuccagcgagaucaucggcuacaaggcgaucgacgggggcgugacccgcgacaucgccuccaccgacacgugcuucgccaacaagcacgccgacuucgacaccugguucagccagcggggcggcuccuacaccaacgacaaggccugcccccugaucgcggccgucaucacccgcgaggugggguucgugguccccggccugcccggcaccauccuccggacgaccaacggggacuuccugcacuuccugccccgcguguucagcgccgugggcaacaucugcuacaccccguccaagcucaucgaguacaccgacuucgccacgagcgcgugcguccuggccgccgagugcaccaucuucaaggacgccuccgggaagcccgugcccuacugcuacgacaccaacgugcuggagggcagcgucgccuacgagucccuccggcccgacacccgcuacgugcugauggacgggagcaucauccaguucccgaacacguaccuggagggcuccgugcgggucgugaccaccuucgacagcgaguacugccgccacgggaccugcgagcgguccgaggcgggggugugcgucagcacguccggccgcugggugcucaacaacgacuacuaccggagccugcccgggguguucugcggcgucgacgccgugaaccugcucaccaacauguucacgccccugauccagcccaucggcgcccuggacaucuccgccagcaucgucgccgggggcaucguggcgaucguggugaccugccucgccuacuacuucaugcgcuuccggcgcgccuucggggaguacagccacgucguggccuucaacacccugcuguuccucauguccuucaccguccugugccugaccccgguguacagcuuccuccccggcguguacuccgucaucuaccuguaccugaccuucuaccucacgaacgacgugagcuuccuggcccacauccaguggauggugauguucacgccccugguccccuucuggaucaccaucgcguacaucaucugcaucuccaccaagcacuucuacugguucuucagcaacuaccucaagcggcgcgugguguucaacggggucuccuucagcaccuucgaggaggccgcccugugcaccuuccugcucaacaaggagauguaccugaagcugcgguccgacgugcuccugccgcugacccaguacaaccgcuaccucgcccuguacaacaaguacaaguacuucagcggcgccauggacaccacguccuaccgggaggcggccugcugccaccugagcaaggcccucaacgacuucuccaacagcggcuccgacgugcuguaccagccgccccagaccagcaucaccuccgccguccugcagugaggacuaguuauaagacugacuagcccgaugggccucccaacgggcccuccuccccuccuugcaccgagauuaauaaaaaaaaaaaaaaaaaaaaaaaaaaaaaaaaaaaaaaaaaaaaaaaaaaaaaaaaaaaaaaaaugcaucccccccccccccccccccccccccccccccaaaggcucuuuucagagccaccagaauu

SEQ ID NO: 22147 - RNA, 1723 nt, Artificial Sequence
  SARS-CoV-2__MT641509.1__non-structural protein 4 (NSP4) mRNA gc
aggagaaagcuuaccaugaagaucgugaacaacuggcugaagcagcucaucaaggucacccugguguuccuguucguggccgccaucuucuaccucaucacccccguccacgugaugagcaagcacacggacuucuccagcgagaucaucggcuacaaggcgaucgacgggggcgugacccgcgacaucgccuccaccgacacgugcuucgccaacaagcacgccgacuucgacaccugguucagccagcggggcggcuccuacaccaacgacaaggccugcccccugaucgcggccgucaucacccgcgaggugggguucgugguccccggccugcccggcaccauccuccggacgaccaacggggacuuccugcacuuccugccccgcguguucagcgccgugggcaacaucugcuacaccccguccaagcucaucgaguacaccgacuucgccacgagcgcgugcguccuggccgccgagugcaccaucuucaaggacgccuccgggaagcccgugcccuacugcuacgacaccaacgugcuggagggcagcgucgccuacgagucccuccggcccgacacccgcuacgugcugauggacgggagcaucauccaguucccgaacacguaccuggagggcuccgugcgggucgugaccaccuucgacagcgaguacugccgccacgggaccugcgagcgguccgaggcgggggugugcgucagcacguccggccgcugggugcucaacaacgacuacuaccggagccugcccgggguguucugcggcgucgacgccgugaaccugcucaucaacauguucacgccccugauccagcccaucggcgcccuggacaucuccgccagcaucgucgccgggggcaucguggcgaucguggugaccugccucgccuacuacuucaugcgcuuccggcgcgccuucggggaguacagccacgucguggccuucaacacccugcuguuccucauguccuucaccguccugugccugaccccgguguacagcuuccuccccggcguguacuccgucaucuaccuguaccugaccuucuaccucaccaacgacgugagcuuccuggcccacauccaguggauggugauguucacgccccugguccccuucuggaucaccaucgcguacaucaucugcaucuccaccaagcacuucuacugguucuucagcaacuaccucaagcggcgcgugguguucaacggggucuccuucagcaccuucgaggaggccgcccugugcacguuccugcucaacaaggagauguaccugaagcugcgguccgacgugcuccugccgcugacccaguacaaccgcuaccucgcccuguacaacaaguacaaguacuucagcggcgccauggacaccaccuccuaccgggaggcggccugcugccaccuggccaaggcccucaacgacuucagcaacuccggcagcgacgugcuguaccagccgccccagacguccaucaccagcgcgguccugcagugaggacuaguuauaagacugacuagcccgaugggccucccaacgggcccuccuccccuccuugcaccgagauuaauaaaaaaaaaaaaaaaaaaaaaaaaaaaaaaaaaaaaaaaaaaaaaaaaaaaaaaaaaaaaaaaaugcaucccccccccccccccccccccccccccccccaaaggcucuuuucagagccaccagaauu

SEQ ID NO: 22148 - RNA, 1723 nt, Artificial Sequence
  SARS-CoV-2__MT641646.1__non-structural protein 4 (NSP4) mRNA gc
aggagaaagcuuaccaugaagaucgugaacaacuggcugaagcagcucaucaaggucacccugguguuccuguucguggccgccaucuucuaccucaucacccccguccacgugaugagcaagcacacggacuucuccagcgagaucaucggcuacaaggcgaucgacgggggcgugacccgcgacaucgccuccaccgacacgugcuucgccaacaagcacgccgacuucgacaccugguucagccagcggggcggcuccuacaccaacgacaaggccugcccccugaucgcggccgucaucacccgcgaggugggguucgugguccccggccugcccggcaccauccuccggacgaccaacggggacuuccugcacuuccugccccgcguguucagcgccgugggcaacaucugcuacaccccguccaagcucaucgaguacaccgacuucgccacgagcgcgugcguccuggccgccgagugcaccaucuucaaggacgccuccgggaagcccgugcccuacugcuacgacaccaacgugcuggagggcagcgucgccuacgagucccuccggcccgacacccgcuacgugcugauggacgggagcaucauccaguucccgaacacguaccuggagggcuccgugcgggucgugaccaccuucgacagcgaguacugccgccacgggaccugcgagcgguccgaggcgggggugugcgucagcacguccggccgcugggugcucaacaacgacuacuaccggagccugcccgggguguucugcggcgucgacguggucaaccugcucaccaacauguucacgccccugauccagcccaucggcgcccuggacaucuccgccagcaucguggccgggggcaucguggccaucgucgugaccugccucgcguacuacuucaugcgcuuccggcgcgccuucggggaguacagccacguggucgccuucaacacccugcuguuccucauguccuucaccgugcugugccugaccccgguguacagcuuccuccccggcgucuacuccgugaucuaccuguaccugaccuucuaccucacgaacgacgugagcuuccuggcccacauccaguggauggucauguucacgccccuggugcccuucuggaucaccaucgccuacaucaucugcaucuccaccaagcacuucuacugguucuucagcaacuaccucaagcggcgcguggucuucaacgggguguccuucagcaccuucgaggaggcggcccugugcaccuuccugcucaacaaggagauguaccugaagcugcgguccgacgugcuccugccgcugacccaguacaaccgcuaccucgcccuguacaacaaguacaaguacuucagcggcgccauggacaccacguccuaccgggaggccgcgugcugccaccuggccaaggcccucaacgacuucagcaacuccggcagcgacguccuguaccagccgccccagaccuccaucaccagcgccgugcugcagugaggacuaguuauaagacugacuagcccgaugggccucccaacgggcccuccuccccuccuugcaccgagauuaauaaaaaaaaaaaaaaaaaaaaaaaaaaaaaaaaaaaaaaaaaaaaaaaaaaaaaaaaaaaaaaaaugcaucccccccccccccccccccccccccccccccaaaggcucuuuucagagccaccagaauu

SEQ ID NO: 22149 - RNA, 1723 nt, Artificial Sequence
  SARS-CoV-2__MT641677.1__non-structural protein 4 (NSP4) mRNA gc
aggagaaagcuuaccaugaagaucgugaacaacuggcugaagcagcucaucaaggucacccugguguuccuguucguggccgccaucuucuaccucaucacccccguccacgugaugagcaagcacacggacuucuccagcgagaucaucggcuacaaggcgaucgacgggggcgugacccgcgacaucgccuccaccgacacgugcuucgccaacaagcacgccgacuucgacaccugguucagccagcggggcggcuccuacaccaacgacaaggccugcccccugaucgcggccgucaucacccgcgaggugggguucgugguccccggccugcccggcaccauccuccggacgaccaacggggacuuccugcacuuccugccccgcguguucagcgccgugggcaacaucugcuacaccccguccaagcucaucgaguacaccgacuucgccacgagcgcgugcguccuggccgccgagugcaccaucuucaaggacgccuccgggaagcccgugcccuacugcuacgacaccaacgugcuggagggcagcgucgccuacgagucccuccggcccgacacccgcuacgugcugauggacgggagcaucauccaguucccgaacacguaccuggagggcuccgugcgggucgugaccaccuucgacagcgaguacugccgccacgggaccugcgagcgguccgaggcgggggugugcgucagcacguccggccgcugggugcucaacaacgacuacuaccggagccugcccgggguguucugcggcgucgacgccgugaaccugcucaccaacauguucacgccccugauccagcccaucggcgcccuggacaucuccgccagcaucgucgccgggggcaucguggcgaucguggugaccugccucgccuacuacuucaugcgcuuccggcgcgccuucggggaguacagccacgucguggccuucaacacccugcuguuccucauguccuucaccguccugugccugaccccgguguacagcuuccuccccggcguguacuccgucaucuaccuguaccugaccuucuaccucacgaacgacgugagcuuccuggcccacauccaguggauggugauguucacgccccugguccccuucuggaucaccaucgcguacaucaucugcaucuccaccaagcacuucuacugguucuucagcaacuaccucaagcggcgcgugguguucaacggggucuccuucagcaccuucgaggaggccgcccugugcaccuuccugcucaacaaggagauguaccugaagcugcgguccgacgugcuccugccgcugacccaguacaaccgcuaccucgcccuguacaacaaguacaaguacuucagcggcgccauggacaccacguccuaccgggaggcggccugcugccaccugaccaaggcccucaacgacuucagcaacuccggcagcgacgugcuguaccagccgccccagaccuccaucaccagcgccguccugcagugaggacuaguuauaagacugacuagcccgaugggccucccaacgggcccuccuccccuccuugcaccgagauuaauaaaaaaaaaaaaaaaaaaaaaaaaaaaaaaaaaaaaaaaaaaaaaaaaaaaaaaaaaaaaaaaaugcaucccccccccccccccccccccccccccccccaaaggcucuuuucagagccaccagaauu

SEQ ID NO: 22150 - RNA, 1723 nt, Artificial Sequence
  SARS-CoV-2__MT641679.1__non-structural protein 4 (NSP4) mRNA gc
aggagaaagcuuaccaugaagaucgugaacaacuggcugaagcagcucaucaaggucacccugguguuccuguucguggccgccaucuucuaccucaucacccccguccacgugaugagcaagcacacggacuucuccagcgagaucaucggcuacaaggcgaucgacgggggcgugacccgcgacaucgccuccaccgacacgugcuucgccaacaagcacgccgacuucgacaccugguucagccagcgggucggguccuacaccaacgacaaggccugcccccugaucgcggccgugaucacccgcgaggugggcuucgucgugcccgggcugcccggcaccauccuccggacgaccaacggcgacuuccugcacuuccugccccgcguguucagcgccgucgggaacaucugcuacaccccguccaagcucaucgaguacaccgacuucgccacgagcgcgugcgugcuggccgccgagugcaccaucuucaaggacgccuccggcaagcccgugcccuacugcuacgacaccaacguccuggaggggagcguggccuacgagucccuccggcccgacacccgcuacgugcugauggacggcagcaucauccaguucccgaacacguaccuggagggguccguccggguggugaccaccuucgacagcgaguacugccgccacgggaccugcgagcgguccgaggcgggcgucugcgugagcacguccggccgcugggugcucaacaacgacuacuaccggagccugcccggcgucuucugcgggguggacgccgucaaccugcucaccaacauguucacgccccugauccagcccaucggcgcccuggacaucuccgccagcaucguggccggcgggaucguggcgaucgucgugaccugccucgccuacuacuucaugcgcuuccggcgcgccuucggcgaguacagccacguggucgccuucaacacccugcuguuccucauguccuucaccgugcugugccugaccccgguguacagcuuccuccccggggucuacuccgugaucuaccuguaccugaccuucuaccucacgaacgacgugagcuuccuggcccacauccaguggauggucauguucacgccccuggugcccuucuggaucaccaucgcguacaucaucugcaucuccaccaagcacuucuacugguucuucagcaacuaccucaagcggcgcguggucuucaacggcguguccuucagcaccuucgaggaggccgcccugugcaccuuccugcucaacaaggagauguaccugaagcugcgguccgacgugcuccugccgcugacccaguacaaccgcuaccucgcccuguacaacaaguacaaguacuucagcggggccauggacaccacguccuaccgggaggcggccugcugccaccuggccaaggcccucaacgacuucagcaacuccggcagcgacguccuguaccagccgccccagaccuccaucaccagcgcggugcugcagugaggacuaguuauaagacugacuagcccgaugggccucccaacgggcccuccuccccuccuugcaccgagauuaauaaaaaaaaaaaaaaaaaaaaaaaaaaaaaaaaaaaaaaaaaaaaaaaaaaaaaaaaaaaaaaaaugcaucccccccccccccccccccccccccccccccaaaggcucuuuucagagccaccagaauu

SEQ ID NO: 22151 - RNA, 1723 nt, Artificial Sequence
  SARS-CoV-2__MT641710.1__non-structural protein 4 (NSP4) mRNA gc
aggagaaagcuuaccaugaagaucgugaacaacuggcugaagcagcucaucaaggucacccugguguuccuguucguggccgccaucuucuaccucaucacccccguccacgugaugagcaagcacacggacuucuccagcgagaucaucggcuacaaggcgaucgacgggggcgugacccgcgacaucgccuccaccgacacgugcuucgccaacaagcacgccgacuucgacaccugguucagccagcggggcggcuccuacaccaacgacaaggccugcccccugaucgcggccgucaucacccgcgaggugggguucgugguccccggccugcccggcaccauccuccggacgaccaacggggacuuccugcacuuccugccccgcguguucagcgccgugggcaacaucugcuacaccccguccaagcucaucgaguacaccgacuucgccacgagcgcgugcguccuggccgccgagugcaccaucuucaaggacgccuccgggaagcccgugcccuacugcuacgacaccaacgugcuggagggcagcgucgccuacgagucccuccggcccgacacccgcuacgugcugauggacgggagcaucauccaguucccgaacacguaccuggagggcuccgugcgggucgugaccaccuucgacagcgaguacugccgccacgggaccugcgagcgguccgaggcgggggugugcgucagcacguccggccgcugggugcucaacaacgacuacuaccggagccugcccgggguguucugcggcgucgacgccgugaaccugcucaccaacauguucacgccccugauccagcccaucggcgcccuggacaucuccgccagcaucgucgccgggggcaucguggcgaucguggugaccugccucgccuacuacuucaugcgcuuccggcgcgccuucggggaguacagcuacgucguggccuucaacacccugcuguuccucauguccuucaccguccugugccugaccccgguguacagcuuccuccccggcguguacuccgucaucuaccuguaccugaccuucuaccucacgaacgacgugagcuuccuggcccacauccaguggauggugauguucacgccccugguccccuucuggaucaccaucgcguacaucaucugcaucuccaccaagcacuucuacugguucuucagcaacuaccucaagcggcgcgugguguucaacggggucuccuucagcaccuucgaggaggccgcccugugcaccuuccugcucaacaaggagauguaccugaagcugcgguccgacgugcuccugccgcugacccaguacaaccgcuaccucgcccuguacaacaaguacaaguacuucagcggcgccauggacaccacguccuaccgggaggcggccugcugccaccuggccaaggcccucaacgacuucagcaacuccggcagcgacgugcuguaccagccgccccagaccuccaucaccagcgcgguccugcagugaggacuaguuauaagacugacuagcccgaugggccucccaacgggcccuccuccccuccuugcaccgagauuaauaaaaaaaaaaaaaaaaaaaaaaaaaaaaaaaaaaaaaaaaaaaaaaaaaaaaaaaaaaaaaaaaugcaucccccccccccccccccccccccccccccccaaaggcucuuuucagagccaccagaauu

SEQ ID NO: 22152 - RNA, 1723 nt, Artificial Sequence
  SARS-CoV-2__MT642243.1__non-structural protein 4 (NSP4) mRNA gc
aggagaaagcuuaccaugaagaucgugaacaacuggcugaagcagcucaucaaggucauccugguguuccuguucguggccgccaucuucuaccucaucacccccguccacgugaugagcaagcacaccgacuucuccagcgagaucaucggcuacaaggcgaucgacgggggcgugacgcgcgacaucgccuccaccgacacgugcuucgccaacaagcacgccgacuucgacaccugguucagccagcggggcggcuccuacaccaacgacaaggccugcccccugaucgcggccgucaucacccgcgaggugggguucgugguccccggccugcccggcaccauccuccggaccacgaacggggacuuccugcacuuccugccccgcguguucagcgccgugggcaacaucugcuacaccccguccaagcucaucgaguacaccgacuucgccaccagcgcgugcguccuggccgccgagugcacgaucuucaaggacgccuccgggaagcccgugcccuacugcuacgacaccaacgugcuggagggcagcgucgccuacgagucccuccggcccgacacccgcuacgugcugauggacgggagcaucauccaguucccgaacaccuaccuggagggcuccgugcgggucgugacgaccuucgacagcgaguacugccgccacgggaccugcgagcgguccgaggcgggggugugcgucagcaccuccggccgcugggugcucaacaacgacuacuaccggagccugcccgggguguucugcggcgucgacgccgugaaccugcucacgaacauguucacgccccugauccagcccaucggcgcccuggacaucuccgccagcaucgucgccgggggcaucguggcgaucguggugaccugccucgccuacuacuucaugcgcuuccggcgcgccuucggggaguacagccacgucguggccuucaacacccugcuguuccucauguccuucaccguccugugccugaccccgguguacagcuuccuccccggcguguacuccgucaucuaccuguaccugaccuucuaccucaccaacgacgugagcuuccuggcccacauccaguggauggugauguucacgccccugguccccuucuggaucaccaucgcguacaucaucugcaucuccaccaagcacuucuacugguucuucagcaacuaccucaagcggcgcgugguguucaacggggucuccuucagcaccuucgaggaggccgcccugugcacguuccugcucaacaaggagauguaccugaagcugcgguccgacgugcuccugccgcugacccaguacaaccgcuaccucgcccuguacaacaaguacaaguacuucagcggcgccauggacaccaccuccuaccgggaggcggccugcugccaccuggccaaggcccucaacgacuucagcaacuccggcagcgacgugcuguaccagccgccccagacguccaucaccagcgcgguccugcagugaggacuaguuauaagacugacuagcccgaugggccucccaacgggcccuccuccccuccuugcaccgagauuaauaaaaaaaaaaaaaaaaaaaaaaaaaaaaaaaaaaaaaaaaaaaaaaaaaaaaaaaaaaaaaaaaugcaucccccccccccccccccccccccccccccccaaaggcucuuuucagagccaccagaauu

SEQ ID NO: 22153 - RNA, 1723 nt, Artificial Sequence
  SARS-CoV-2__MT642326.1__non-structural protein 4 (NSP4) mRNA gc
aggagaaagcuuaccaugaagaucgugaacaacuggcugaagcagcucaucaaggucacccugguguuccuguucguggccgccaucuucuaccucaucacccccguccacgugaugagcaagcacacggacuucuccagcgagaucaucggcuacaaggcgaucgacgggggcgugacccgcgacaucgccuccaccgacacgugcuucgccaacaagcacgccgacuucgacaccugguucagccagcggggcggcuccuacaccaacgacaaggccugcccccugaucgcggccgucaucacccgcgaggugggguucgugguccccggccugcccggcaccauccuccggacgaccaacggggacuuccugcacuuccugccccgcguguucagcgccgugggcaacaucugcuacaccccguccaagcucaucgaguacaccgacuucgccacgagcgcgugcguccuggccgccgagugcaccaucuucaaggacgccuccgggaagcccgugcccuacugcuacgacaccaacgugcuggagggcagcgucgccuacgagucccuccggcccgacacccgcuacgugcugauggacgggagcaucauccaguucccgaacacguaccuggagggcuccgugcgggucgugaccaccuucgacagcgaguacugccgccacgggaccugcgagcgguccgaggcgggggugugcgucagcacguccggccgcuggguguucaacaacgacuacuaccggagccuccccgggguguucugcggcgucgacgccgugaaccugcugaccaacauguucacgccccucauccagcccaucggcgcccuggacaucuccgccagcaucgucgccgggggcaucguggcgaucguggugaccugccuggccuacuacuucaugcgcuuccggcgcgccuucggggaguacagccacgucguggccuucaacacccuccuguuccugauguccuucaccguccucugccugaccccgguguacagcuuccugcccggcguguacuccgucaucuaccucuaccugaccuucuaccugacgaacgacgugagcuuccucgcccacauccaguggauggugauguucacgccccugguccccuucuggaucaccaucgcguacaucaucugcaucuccaccaagcacuucuacugguucuucagcaacuaccugaagcggcgcgugguguucaacggggucuccuucagcaccuucgaggaggccgcccucugcaccuuccugcugaacaaggagauguaccucaagcugcgguccgacgugcugcucccgcugacccaguacaaccgcuaccuggcccucuacaacaaguacaaguacuucagcggcgccauggacaccacguccuaccgggaggcggccugcugccaccuggccaaggcccugaacgacuucagcaacuccggcagcgacgugcucuaccagccgccccagaccuccaucaccagcgcgguccugcagugaggacuaguuauaagacugacuagcccgaugggccucccaacgggcccuccuccccuccuugcaccgagauuaauaaaaaaaaaaaaaaaaaaaaaaaaaaaaaaaaaaaaaaaaaaaaaaaaaaaaaaaaaaaaaaaaugcaucccccccccccccccccccccccccccccccaaaggcucuuuucagagccaccagaauu

SEQ ID NO: 22154 - RNA, 1723 nt, Artificial Sequence
  SARS-CoV-2__MT642360.1__non-structural protein 4 (NSP4) mRNA gc
aggagaaagcuuaccaugaagaucgugaacaacuggcugaagcagcucaucaaggucacccugguguuccuguucguggccgccaucuucuaccucaucacccccguccacgugaugagcaagcacacggacuucuccagcgagaucaucggcuacaaggcgaucgacgggggcgugacccgcgacaucgccuccaccgacacgugcuucgccaacaagcacgccgacuucgacaccugguucagccagcggggcggcuccuacaccaacgacaaggccugcccccugaucgcggccgucaucacccgcgaggugggguucgugguccccggccugcccggcaccauccuccggacgaccaacggggacuuccugcacuuccugccccgcguguucagcgccgugggcaacaucugcuacaccccguccaagcucaucgaguacaucgacuucgccaccagcgcgugcguccuggccgccgagugcacgaucuucaaggacgccuccgggaagcccgugcccuacugcuacgacaccaacgugcuggagggcagcgucgccuacgagucccuccggcccgacacccgcuacgugcugauggacgggagcaucauccaguucccgaacaccuaccuggagggcuccgugcgggucgugacgaccuucgacagcgaguacugccgccacgggaccugcgagcgguccgaggcgggggugugcgucagcaccuccggccgcugggugcucaacaacgacuacuaccggagccugcccgggguguucugcggcgucgacgccgugaaccugcucacgaacauguucacgccccugauccagcccaucggcgcccuggacaucuccgccagcaucgucgccgggggcaucguggcgaucguggugaccugccucgccuacuacuucaugcgcuuccggcgcgccuucggggaguacagccacgucguggccuucaacacccugcuguuccucauguccuucaccguccugugccugaccccgguguacagcuuccuccccggcguguacuccgucaucuaccuguaccugaccuucuaccucaccaacgacgugagcuuccuggcccacauccaguggauggugauguucacgccccugguccccuucuggaucaccaucgcguacaucaucugcaucuccaccaagcacuucuacugguucuucagcaacuaccucaagcggcgcgugguguucaacggggucuccuucagcaccuucgaggaggccgcccugugcacguuccugcucaacaaggagauguaccugaagcugcgguccgacgugcuccugccgcugacccaguacaaccgcuaccucgcccuguacaacaaguacaaguacuucagcggcgccauggacaccaccuccuaccgggaggcggccugcugccaccuggccaaggcccucaacgacuucagcaacuccggcagcgacgugcuguaccagccgccccagacguccaucaccagcgcgguccugcagugaggacuaguuauaagacugacuagcccgaugggccucccaacgggcccuccuccccuccuugcaccgagauuaauaaaaaaaaaaaaaaaaaaaaaaaaaaaaaaaaaaaaaaaaaaaaaaaaaaaaaaaaaaaaaaaaugcaucccccccccccccccccccccccccccccccaaaggcucuuuucagagccaccagaauu

SEQ ID NO: 22155 - RNA, 1723 nt, Artificial Sequence
  SARS-CoV-2__MT627615.1__non-structural protein 4 (NSP4) mRNA gc
aggagaaagcuuaccaugaagaucgugaacaacuggcugaagcagcucaucaaggucacccugguguuccuguucguggccgccaucuucuaccucaucacccccguccacgugaugagcaagcacacggacuucuccagcgaggugaucggcuacaaggcgaucgacgggggcgucacccgcgacaucgccuccaccgacacgugcuucgccaacaagcacgccgacuucgacaccugguucagccagcggggcggcuccuacaccaacgacaaggccugcccccugaucgcggccgugaucacccgcgaggugggguucgucgugcccggccugcccggcaccauccuccggacgaccaacggggacuuccugcacuuccugccccgcguguucagcgccgucggcaacaucugcuacaccccguccaagcucaucgaguacaccgacuucgccacgagcgcgugcgugcuggccgccgagugcaccaucuucaaggacgccuccgggaagcccgugcccuacugcuacgacaccaacguccuggagggcagcguggccuacgagucccuccggcccgacacccgcuacgugcugauggacgggagcaucauccaguucccgaacacguaccuggagggcuccguccggguggugaccaccuucgacagcgaguacugccgccacgggaccugcgagcgguccgaggcgggggucugcgugagcacguccggccgcugggugcucaacaacgacuacuaccggagccugcccggggucuucugcggcguggacgccgucaaccugcucaccaacauguucacgccccugauccagcccaucggcgcccuggacaucuccgccagcaucguggccgggggcaucguggcgaucgucgugaccugccucgccuacuacuucaugcgcuuccggcgcgccuucggggaguacagccacguggucgccuucaacacccugcuguuccucauguccuucaccgugcugugccugaccccgguguacagcuuccuccccggcgucuacuccgugaucuaccuguaccugaccuucuaccucacgaacgacgugagcuuccuggcccacauccaguggauggucauguucacgccccuggugcccuucuggaucaccaucgcguacaucaucugcaucuccaccaagcacuucuacugguucuucagcaacuaccucaagcggcgcguggucuucaacgggguguccuucagcaccuucgaggaggccgcccugugcaccuuccugcucaacaaggagauguaccugaagcugcgguccgacgugcuccugccgcugacccaguacaaccgcuaccucgcccuguacaacaaguacaaguacuucagcggcgccauggacaccacguccuaccgggaggcggccugcugccaccuggccaaggcccucaacgacuucagcaacuccggcagcgacguccuguaccagccgccccagaccuccaucaccagcgcggugcugcagugaggacuaguuauaagacugacuagcccgaugggccucccaacgggcccuccuccccuccuugcaccgagauuaauaaaaaaaaaaaaaaaaaaaaaaaaaaaaaaaaaaaaaaaaaaaaaaaaaaaaaaaaaaaaaaaaugcaucccccccccccccccccccccccccccccccaaaggcucuuuucagagccaccagaauu

SEQ ID NO: 22156 - RNA, 1723 nt, Artificial Sequence
  SARS-CoV-2__MT628156.1__non-structural protein 4 (NSP4) mRNA gc
aggagaaagcuuaccaugaagaucgugaacaacuggcugaagcagcucaucaaggucacccugguguuccuguucguggccgccaucuucuaccucaucacccccguccacgugaugagcaagcacacggacuucuccagcgagaucaucggcuacaaggcgaucgacgggggcgugacccgcgacaucgccuccaccgacacgugcuucgccaacaagcacgccgacuucgacaccugguucagccagcggggcggcuccuacaccaacgacaaggccugcccccugaucgcggccgucaucacccgcgaggugggguucgugguccccggccugcccggcaccauccuccggacgaccaacggggacuuccugcacuuccugccccgcguguucagcgccgugggcaacaucugcuacaccccguccaagcucaucgaguacaccgacuucgccacgagcgcgugcguccuggccgccgagugcaccaucuucaaggacgccuccgggaagcccgugcccuacugcuacgacaccaacgugcuggagggcagcgucgccuacgagucccuccggcccgacacccgcuacgugcugauggacgggagcaucauccaguucccgaacacguaccuggagggcuccgugcgggucgugaccaccuucgacagcgaguacugccgccacgggaccugcgagcgguccgaggcgggggugugcgucagcacguccggccgcugggugcucaacaacgacuacuaccggagccugcccgggguguucugcggcgucgacgccgugaaccugcucaccaacauguucacgccccugauccagcccaucggcgcccuggacaucuccgccagcaucgucgccgggggcaucguggcgaucguggucaccagccucgccuacuacuucaugcgcuuccggcgcgccuucggggaguacucccacgugguggccuucaacacccugcuguuccucaugagcuucaccguccugugccugaccccgguguacuccuuccuccccggcguguacagcgucaucuaccuguaccugaccuucuaccucacgaacgacguguccuuccuggcccacauccaguggauggugauguucacgccccugguccccuucuggaucaccaucgcguacaucaucugcaucagcaccaagcacuucuacugguucuucuccaacuaccucaagcggcgcgugguguucaacggggucagcuucuccaccuucgaggaggccgcccugugcaccuuccugcucaacaaggagauguaccugaagcugcggagcgacgugcuccugccgcugacccaguacaaccgcuaccucgcccuguacaacaaguacaaguacuucuccggcgccauggacaccacgagcuaccgggaggcggccugcugccaccuggccaaggcccucaacgacuucuccaacagcggcuccgacgugcuguaccagccgccccagaccagcaucaccuccgcgguccugcagugaggacuaguuauaagacugacuagcccgaugggccucccaacgggcccuccuccccuccuugcaccgagauuaauaaaaaaaaaaaaaaaaaaaaaaaaaaaaaaaaaaaaaaaaaaaaaaaaaaaaaaaaaaaaaaaaugcaucccccccccccccccccccccccccccccccaaaggcucuuuucagagccaccagaauu

SEQ ID NO: 22157 - RNA, 1723 nt, Artificial Sequence
  SARS-CoV-2__MT628225.1__non-structural protein 4 (NSP4) mRNA gc
aggagaaagcuuaccaugaagaucgugaacaacuggcugaagcagcucaucaaggucacccugguguuccuguucguggccgccaucuucuaccucaucacccccguccacgugaugagcaagcacacggacuucuccagcgagaucaucggcuacaaggcgaucgacgggggcgugacccgcgacaucgccuccaccgacacgugcuucgccaacaagcacgccgacuucgacaccugguucagccagcggggcggcuccuacaccaacgacaaggccugcccccugaucgcggccgucaucacccgcgaggugggguucgugguccccggccugcccggcaccauccuccggacgaccaacggggacuuccugcacuuccugccccgcguguucagcgccgugggcaacaucugcuacaccccguccaagcucaucgaguacaccgacuucgccacgagcgcgugcguccuggccgccgagugcaccaucuucaaggacgccuccgggaagcccgugcccuacugcuacgacaccaacgugcuggagggcagcgucgccuacgagucccuccggcccgacacccgcuacgugcugauggacgggagcaucauccaguucccgaacacguaccuggagggcuucgugcgggucgugaccaccuucgacuccgaguacugccgccacgggaccugcgagcggagcgaggcgggggugugcgucuccacgagcggccgcugggugcucaacaacgacuacuaccggucccugcccgggguguucugcggcgucgacgccgugaaccugcucaccaacauguucacgccccugauccagcccaucggcgcccuggacaucagcgccuccaucgucgccgggggcaucguggcgaucguggugaccugccucgccuacuacuucaugcgcuuccggcgcgccuucggggaguacagccacgucguggccuucaacacccugcuguuccucaugagcuucaccguccugugccugaccccgguguacuccuuccuccccggcguguacagcgucaucuaccuguaccugaccuucuaccucacgaacgacguguccuuccuggcccacauccaguggauggugauguucacgccccugguccccuucuggaucaccaucgcguacaucaucugcaucagcaccaagcacuucuacugguucuucuccaacuaccucaagcggcgcgugguguucaacggggucagcuucuccaccuucgaggaggccgcccugugcaccuuccugcucaacaaggagauguaccugaagcugcggagcgacgugcuccugccgcugacccaguacaaccgcuaccucgcccuguacaacaaguacaaguacuucuccggcgccauggacaccacgagcuaccgggaggcggccugcugccaccuggccaaggcccucaacgacuucuccaacagcggcuccgacgugcuguaccagccgccccagaccagcaucaccuccgcgguccugcagugaggacuaguuauaagacugacuagcccgaugggccucccaacgggcccuccuccccuccuugcaccgagauuaauaaaaaaaaaaaaaaaaaaaaaaaaaaaaaaaaaaaaaaaaaaaaaaaaaaaaaaaaaaaaaaaaugcaucccccccccccccccccccccccccccccccaaaggcucuuuucagagccaccagaauu

SEQ ID NO: 22158 - RNA, 1723 nt, Artificial Sequence
  SARS-CoV-2__MT632520.1__non-structural protein 4 (NSP4) mRNA gc
aggagaaagcuuaccaugaagaucgugaacaacuggcugaagcagcucaucaaggucacccugguguuccuguucguggucgccaucuucuaccucaucacccccgugcacgugaugagcaagcacacggacuucuccagcgagaucaucggcuacaaggccaucgacgggggcgucacccgcgacaucgcguccaccgacacgugcuucgccaacaagcacgccgacuucgacaccugguucagccagcggggcggcuccuacaccaacgacaaggccugcccccugaucgccgcggugaucacccgcgaggugggguucgucgugcccggccugcccggcaccauccuccggacgaccaacggggacuuccugcacuuccugccccgcguguucagcgccgucggcaacaucugcuacaccccguccaagcucaucgaguacaccgacuucgccacgagcgccugcgugcuggcggccgagugcaccaucuucaaggacgccuccgggaagcccgugcccuacugcuacgacaccaacguccuggagggcagcguggccuacgagucccuccggcccgacacccgcuacgugcugauggacgggagcaucauccaguucccgaacacguaccuggagggcuccguccggguggugaccaccuucgacagcgaguacugccgccacgggaccugcgagcgguccgaggccggggucugcgugagcacguccggccgcugggugcucaacaacgacuacuaccggagccugcccggggucuucugcggcguggacgcggucaaccugcucaccaacauguucacgccccugauccagcccaucggcgcccuggacaucuccgccagcaucguggccgggggcaucguggccaucgucgugaccugccucgcguacuacuucaugcgcuuccggcgcgccuucggggaguacagccacguggucgccuucaacacccugcuguuccucauguccuucaccgugcugugccugaccccgguguacagcuuccuccccggcgucuacuccgugaucuaccuguaccugaccuucuaccucacgaacgacgugagcuuccuggcccacauccaguggauggucauguucacgccccuggugcccuucuggaucaccaucgccuacaucaucugcaucuccaccaagcacuucuacugguucuucagcaacuaccucaagcggcgcguggucuucaacgggguguccuucagcaccuucgaggaggcggcccugugcaccuuccugcucaacaaggagauguaccugaagcugcgguccgacgugcuccugccgcugacccaguacaaccgcuaccucgcccuguacaacaaguacaaguacuucagcggcgccauggacaccacguccuaccgggaggccgcgugcugccaccuggccaaggcccucaacgacuucagcaacuccggcagcgacguccuguaccagccgccccagaccuccaucaccagcgccgugcugcagugaggacuaguuauaagacugacuagcccgaugggccucccaacgggcccuccuccccuccuugcaccgagauuaauaaaaaaaaaaaaaaaaaaaaaaaaaaaaaaaaaaaaaaaaaaaaaaaaaaaaaaaaaaaaaaaaugcaucccccccccccccccccccccccccccccccaaaggcucuuuucagagccaccagaauu

SEQ ID NO: 22159 - RNA, 1723 nt, Artificial Sequence
  SARS-CoV-2__MT632793.1__non-structural protein 4 (NSP4) mRNA gc
aggagaaagcuuaccaugaagaucgugaacaacuggcugaagcagcucaucaaggucacccugguguuccuguucguggccgccaucuucuaccucaucacccccguccacgugaugagcaagcacacggacuucuccagcgagaucaucggcuacaaggcgaucgacgggggcgugacccgcgacaucgccuccaccgacacgugcuucgccaacaagcacgccgacuucgacaccugguucagccagcggggcggcuccuacaccaacgacaaggccugcccccugaucgcggccgucaucacccgcgaggugggguucgugguccccggccugcccggcaccauccuccggacgaccaacggggacuuccugcacuuccugccccgcguguucagcgccgugggcaacaucugcuacaccccguccaagcucaucgaguacaccgacuucgccacgagcgcgugcguccuggccgccgagugcaccaucuucaaggacgccuccgggaagcccgugcccuacugcuacgacaccaacgugcuggagggcagcgucgccuacgagucccuccggcccgacacccgcuacgugcugauggacgggagcaucauccaguucccgaacacguaccuggagggcuccgugcgggucgugaccaccuucgacuucgaguacugccgccacgggaccugcgagcggagcgaggcgggggugugcgucuccacgagcggccgcugggugcucaacaacgacuacuaccggucccugcccgggguguucugcggcgucgacgccgugaaccugcucaccaacauguucacgccccugauccagcccaucggcgcccuggacaucagcgccuccaucgucgccgggggcaucguggcgaucguggugaccugccucgccuacuacuucaugcgcuuccggcgcgccuucggggaguacagccacgucguggccuucaacacccugcuguuccucaugagcuucaccguccugugccugaccccgguguacuccuuccuccccggcguguacagcgucaucuaccuguaccugaccuucuaccucacgaacgacguguccuuccuggcccacauccaguggauggugauguucacgccccugguccccuucuggaucaccaucgcguacaucaucugcaucagcaccaagcacuucuacugguucuucuccaacuaccucaagcggcgcgugguguucaacggggucagcuucuccaccuucgaggaggccgcccugugcaccuuccugcucaacaaggagauguaccugaagcugcggagcgacgugcuccugccgcugacccaguacaaccgcuaccucgcccuguacaacaaguacaaguacuucuccggcgccauggacaccacgagcuaccgggaggcggccugcugccaccuggccaaggcccucaacgacuucuccaacagcggcuccgacgugcuguaccagccgccccagaccagcaucaccuccgcgguccugcagugaggacuaguuauaagacugacuagcccgaugggccucccaacgggcccuccuccccuccuugcaccgagauuaauaaaaaaaaaaaaaaaaaaaaaaaaaaaaaaaaaaaaaaaaaaaaaaaaaaaaaaaaaaaaaaaaugcaucccccccccccccccccccccccccccccccaaaggcucuuuucagagccaccagaauu

SEQ ID NO: 22160 - RNA, 1723 nt, Artificial Sequence
  SARS-CoV-2__MT633007.1__non-structural protein 4 (NSP4) mRNA gc
aggagaaagcuuaccaugaagaucgugaacaacuggcugaagcagcucaucaaggucacccugguguuccuguucguggccgccaucuucuaccucaucacccccguccacgugaugagcaagcacacggacuucuccagcgagaucaucggcuacaaggcgaucgacgggggcgugacccgcgacaucgccuccaccgacacgugcuucgccaacaagcacgccgacuucgacaccugguucagccagcggggcggcuccuacaccaacgacaaggccugcccccugaucgcggccgucaucacccgcgaggugggguucgugguccccggccugcccggcaccauccuccggacgaccaacggggacuuccugcacuuccugccccgcguguucagcgccgugggcaacaucugcuacaccccguccaagcucaucgaguacaccgacuucgccacgagcgcgugcguccuggccgccgagugcaccaucuucaaggacgccuccgggaagcccgugcccuacugcuacgacaccaacgugcuggagggcagcgucgccuacgagucccuccggcccgacacccgcuacgugcugauggacgggagcaucauccaguucccgaacacguaccuggagggcuccgugcgggucgugaccaccuucgacagcgaguacugccgccacgggaccugcgagcgguccgaggcgggggugugcgucagcacguccggccgcugggugcucaacaacgacuacuaccggagccugcccgggguguucugcggcgucgacgccgugaaccugcucaccaacauguucacgccccugauccagcccaucggcgcccuggacaucuccgccagcaucgucgccgggggcaucguggcgaucguggugaccugccucgccuacuacuucaugcgcuuccggcgcgccuucggggaguacagccacgucguggccuucaacacccugcuguuccucauguccuucaucguccugugccugaccccgguguacagcuuccuccccggcguguacuccgucaucuaccuguaccugaccuucuaccucaccaacgacgugagcuuccuggcccacauccaguggauggugauguucacgccccugguccccuucuggaucaccaucgcguacaucaucugcaucuccaccaagcacuucuacugguucuucagcaacuaccucaagcggcgcgugguguucaacggggucuccuucagcaccuucgaggaggccgcccugugcacguuccugcucaacaaggagauguaccugaagcugcgguccgacgugcuccugccgcugacccaguacaaccgcuaccucgcccuguacaacaaguacaaguacuucagcggcgccauggacaccaccuccuaccgggaggcggccugcugccaccuggccaaggcccucaacgacuucagcaacuccggcagcgacgugcuguaccagccgccccagacguccaucaccagcgcgguccugcagugaggacuaguuauaagacugacuagcccgaugggccucccaacgggcccuccuccccuccuugcaccgagauuaauaaaaaaaaaaaaaaaaaaaaaaaaaaaaaaaaaaaaaaaaaaaaaaaaaaaaaaaaaaaaaaaaugcaucccccccccccccccccccccccccccccccaaaggcucuuuucagagccaccagaauu

SEQ ID NO: 22161 - RNA, 1723 nt, Artificial Sequence
  SARS-CoV-2__MT609566.1__non-structural protein 4 (NSP4) mRNA gc
aggagaaagcuuaccaugaagaucgugaacaacuggcugaagcagcucaucaaggucacccugguguuccuguucguggccgccaucuucuaccucaucacccccguccacgugaugagcaagcacacggacuucuccagcgagaucaucggcuacaaggcgaucgacgggggcgugacccgcgacaucgccuccaccgacacgugcuucgccaacaagcacgccgacuucgacaccugguucagccagcggggcggcuccuacaccaacgacaaggccugcccccugaucgcggccgucaucacccgcgaggugggguucgugguccccggccugcccggcaccauccuccggacgaccaacggggacuuccugcacuuccugccccgcguguucagcgccgugggcaacaucugcuacaccccguccaagcucaucgaguacaccgacuucgccacgagcgcgugcguccuggccgccgagugcaccaucuucaaggacgccuccgggaagcccgugcccuacugcuacgacaccaacgugcuggagggcagcgucgccuacgagucccuccggcccgacacccgcuacgugcugauggacgggagcaucauccaguucccgaacacguaccuggagggcuccgugcgggucgugaccaccuucgacagcgaguacugccgccacgggaccugcgagcgguccgaggcgggggugugcgucagcacguccggccgcugggugcucaacaacgacuacuaccggagccugcccgggguguucugcggcgucgacgccgugaaccugcucaccaacauguucacgccccugauccagcccaucggcgcccuggacaucuccgccagcaucgucgccgggggcaucguggcgaucguggugaccugccucgccuacuacuucaugcgcuuccggcgcgccuucggggaguacagccacgucguggccuucaacacccugcuguuccucauguccuucaccguccugugccugaccccgguguacagcuuccuccccggcguguacuccgucaucuaccuguaccugaccuucuaccucacgaacgacgugagcuuccuggcccacauccaguggauggugauguucacgccccugguccccuucuggaucaccaucgcguacaucaucugcaucuccaccaagcacuucuacugguucuucagcaacuaccucaagcggcgcgugguguucaacggggucuccuucagcaccuucgaggaggccgcccugugcaccuuccugcucaacaaggagauguaccugaagcugcgguccgacgugcuccugccgcugacccaguacaaccgcuaccucgcccuguacaacaaguacaaguacuucagcggcgccauggacaccaucuccuaccgggaggcggccugcugccaccuggccaaggcccucaacgacuucagcaacuccggcagcgacgugcuguaccagccgccccagacguccaucaccagcgcgguccugcagugaggacuaguuauaagacugacuagcccgaugggccucccaacgggcccuccuccccuccuugcaccgagauuaauaaaaaaaaaaaaaaaaaaaaaaaaaaaaaaaaaaaaaaaaaaaaaaaaaaaaaaaaaaaaaaaaugcaucccccccccccccccccccccccccccccccaaaggcucuuuucagagccaccagaauu

SEQ ID NO: 22162 - RNA, 1723 nt, Artificial Sequence
  SARS-CoV-2__MT609577.1__non-structural protein 4 (NSP4) mRNA gc
aggagaaagcuuaccaugaagaucgugaacaacuggcugaagcagcucaucaaggucacccugguguuccuguucguggccgccaucuucuaccucaucacccccguccacgugaugagcaagcacacggacuucuccagcgagaucaucggcuacaaggcgaucgacgggggcgugacccgcgacaucgccuccaccgacacgugcuucgccaacaagcacgccgacuucgacaccugguucagccagcggggcggcuccuacaccaacgacaaggccugcccccugaucgcggccgucaucacccgcgaggugggguucgugguccccggccugcccggcaccauccuccggacgaccaacggggacuuccugcacuuccugccccgcguguucagcgccgugggcaacaucugcuacaccccguccaagcucaucgaguacaccgacuucgccacgagcgcgugcguccuggccgccgagugcaccaucuucaaggacgccuccgggaagcccgugcccuacugcuacgacaccaacgugcuggagggcagcgucgccuacgagucccuccggcccgacacccgcuacgugcugauggacgggagcaucauccaguucccgaacacguaccuggagggcuccgugcgggucgugaccaccuucgacagcgaguacugccgccacgggaccugcgagcgguccgaggcgggggugugcgucagcacguccggccgcugggugcucaacaacgacuacuaccggagccugcccgggguguucugcggcgucgacgccgugaaccugcucaccaacauguucacgccccugauccagcccaucggcgcccuggacaucuccgccagcaucgucgccgggggcaucguggcgaucguggugaccugccucgccuacuacuucaugcgcuuccggcgcgccuucggggaguacagccacgucguggccuucaacacccugcuguuccucauguccuucaccguccugugccugaccccgguguacagcuuccuccccggcguguacuccgucaucuaccuguacuucaccuucuaccugacgaacgacgugagcuuccucgcccacauccaguggauggugauguucacgccccugguccccuucuggaucaccaucgcguacaucaucugcaucuccaccaagcacuucuacugguucuucagcaacuaccugaagcggcgcgugguguucaacggggucuccuucagcaccuucgaggaggccgcccucugcaccuuccugcugaacaaggagauguaccucaagcugcgguccgacgugcugcucccgcugacccaguacaaccgcuaccuggcccucuacaacaaguacaaguacuucagcggcgccauggacaccacguccuaccgggaggcggccugcugccaccuggccaaggcccugaacgacuucagcaacuccggcagcgacgugcucuaccagccgccccagaccuccaucaccagcgcgguccugcagugaggacuaguuauaagacugacuagcccgaugggccucccaacgggcccuccuccccuccuugcaccgagauuaauaaaaaaaaaaaaaaaaaaaaaaaaaaaaaaaaaaaaaaaaaaaaaaaaaaaaaaaaaaaaaaaaugcaucccccccccccccccccccccccccccccccaaaggcucuuuucagagccaccagaauu

SEQ ID NO: 22163 - RNA, 1723 nt, Artificial Sequence
  SARS-CoV-2__MT601291.1__non-structural protein 4 (NSP4) mRNA gc
aggagaaagcuuaccaugaagaucgugaacaacuggcugaagcagcucaucaaggucacccugguguuccuguucguggccgccaucuucuaccucaucacccccguccacgugaugagcaagcacacggacuucuccagcgagaucaucggcuacaaggcgaucgacgggggcgugacccgcgacaucgccuccaccgacacgugcuucgccaacaagcacgccgacuucgacaccugguucagccagcggggcggcuccuacaccaacgacaaggccugcccccugaucgcggccgucaucacccgcgaggugggguucgugguccccggccugcccggcaccauccuccggacgaccaacggggacuuccugcacuuccugccccgcguguucagcgccgugggcaacaucugcuacaccccguccaagcucaucgaguacaccgacuucgccacgagcgcgugcguccuggccgccgagugcaccaucuucaaggacgccuccgggaagcccgugcccuacugcuacgacaccaacgugcuggagggcagcgucgccuacgagucccuccggcccgacacccgcuacgugcugauggacgggagcaucauccaguucccgaacacguaccuggagggcuccgugcgggucgugaccaccuucgacagcgaguacugccgccacgggaccugcgagcgguccgaggcgggggugugcgucagcacguccggccgcugggugcucaacaacgacuacuaccggagccugcccgggguguucugcggcgucgacgccgugaaccugcucaccaacauguucacgccccugauccagcccaucggcgcccuggacaucuccgccagcaucgucgccgggggcaucguggcgaucguggugaccugccucgccuacuacuucaugcgcuuccggcgcgccuucggggaguacagccacgucguggccuucaacacccugcuguuccucauguccuucaccguccugugccugaccccgguguacagcuuccuccccggcguguacuccgucaucuaccuguaccugaccuucuaccucacgaacgacgugagcuuccuggcccacauccaguggauggugauguucacgccccugguccccuucuggaucaccaucgcguacaucaucugcaucuccaccaagcacuucuacugguucuucagcaacuaccucaagcggcgcguguucuucaacgggguguccuucagcaccuucgaggaggccgcccugugcaccuuccugcucaacaaggagauguaccugaagcugcgguccgacguccuccugccgcugacccaguacaaccgcuaccucgcccuguacaacaaguacaaguacuucagcggcgccauggacaccacguccuaccgggaggcggccugcugccaccuggccaaggcccucaacgacuucagcaacuccggcagcgacgugcuguaccagccgccccagaccuccaucaccagcgcggugcugcagugaggacuaguuauaagacugacuagcccgaugggccucccaacgggcccuccuccccuccuugcaccgagauuaauaaaaaaaaaaaaaaaaaaaaaaaaaaaaaaaaaaaaaaaaaaaaaaaaaaaaaaaaaaaaaaaaugcaucccccccccccccccccccccccccccccccaaaggcucuuuucagagccaccagaauu

SEQ ID NO: 22164 - RNA, 1723 nt, Artificial Sequence
  SARS-CoV-2__MT585084.1__non-structural protein 4 (NSP4) mRNA gc
aggagaaagcuuaccaugaagaucgugaacaacuggcugaagcagcucaucaaggucacccugguguuccuguucguggccgccaucuucuaccucaucacccccguccacgugaugagcaagcacacggacuucuccagcgagaucaucggcuacaaggcgaucgacgggggcgugacccgcgacaucgccuccaccgacacgugcuucgccaacaagcacgccgacuucgacaccugguucagccagcggggcggcuccuacaccaacgacaaggccugcccccugaucgcggccgucaucacccgcgaggugggguucgugguccccggccugcccggcaugauccuccggaccacgaacggggacuuccugcacuuccugccccgcguguucagcgccgugggcaacaucugcuacaccccguccaagcucaucgaguacaccgacuucgccaccagcgcgugcguccuggccgccgagugcacgaucuucaaggacgccuccgggaagcccgugcccuacugcuacgacaccaacgugcuggagggcagcgucgccuacgagucccuccggcccgacacccgcuacgugcugauggacgggagcaucauccaguucccgaacaccuaccuggagggcuccgugcgggucgugacgaccuucgacagcgaguacugccgccacgggaccugcgagcgguccgaggcgggggugugcgucagcaccuccggccgcugggugcucaacaacgacuacuaccggagccugcccgggguguucugcggcgucgacgccgugaaccugcucacgaacauguucacgccccugauccagcccaucggcgcccuggacaucuccgccagcaucgucgccgggggcaucguggcgaucguggugaccugccucgccuacuacuucaugcgcuuccggcgcgccuucggggaguacagccacgucguggccuucaacacccugcuguuccucauguccuucaccguccugugccugaccccgguguacagcuuccuccccggcguguacuccgucaucuaccuguaccugaccuucuaccucaccaacgacgugagcuuccuggcccacauccaguggauggugauguucacgccccugguccccuucuggaucaccaucgcguacaucaucugcaucuccaccaagcacuucuacugguucuucagcaacuaccucaagcggcgcgugguguucaacggggucuccuucagcaccuucgaggaggccgcccugugcacguuccugcucaacaaggagauguaccugaagcugcgguccgacgugcuccugccgcugacccaguacaaccgcuaccucgcccuguacaacaaguacaaguacuucagcggcgccauggacaccaccuccuaccgggaggcggccugcugccaccuggccaaggcccucaacgacuucagcaacuccggcagcgacgugcuguaccagccgccccagacguccaucaccagcgcgguccugcagugaggacuaguuauaagacugacuagcccgaugggccucccaacgggcccuccuccccuccuugcaccgagauuaauaaaaaaaaaaaaaaaaaaaaaaaaaaaaaaaaaaaaaaaaaaaaaaaaaaaaaaaaaaaaaaaaugcaucccccccccccccccccccccccccccccccaaaggcucuuuucagagccaccagaauu

SEQ ID NO: 22165 - RNA, 1723 nt, Artificial Sequence
  SARS-CoV-2__MT499215.1__non-structural protein 4 (NSP4) mRNA gc
aggagaaagcuuaccaugaagaucgugaacaacuggcugaagcagcucaucaaggucacccugguguuccuguucguggccgccaucuucuaccucaucacccccguccacgugaugagccgccacacggacuucuccagcgagaucaucggcuacaaggcgaucgacgggggcgugacccgggacaucgccuccaccgacacgugcuucgccaacaagcacgccgacuucgacaccugguucagccagcgcgggggcuccuacaccaacgacaaggccugcccccugaucgcggccgucaucacccgggaggugggguucgugguccccggccugcccggcaccauccuccgcacgaccaacggggacuuccugcacuuccugccccggguguucagcgccgugggcaacaucugcuacaccccguccaagcucaucgaguacaccgacuucgccacgagcgcgugcguccuggccgccgagugcaccaucuucaaggacgccuccgggaagcccgugcccuacugcuacgacaccaacgugcuggagggcagcgucgccuacgagucccuccgccccgacacccgguacgugcugauggacgggagcaucauccaguucccgaacacguaccuggagggcuccgugcgcgucgugaccaccuucgacagcgaguacugccggcacgggaccugcgagcgcuccgaggcgggcgugugcgucagcacguccggccggugggugcucaacaacgacuacuaccgcagccugcccgggguguucugcggcgucgacgccgugaaccugcucaccaacauguucacgccccugauccagcccaucggcgcccuggacaucuccgccagcaucgucgccgggggcaucguggcgaucguggugaccugccucgccuacuacuucaugcgguuccgccgggccuucggggaguacagccacgucguggccuucaacacccugcuguuccucauguccuucaccguccugugccugaccccgguguacagcuuccuccccggcguguacuccgucaucuaccuguaccugaccuucuaccucacgaacgacgugagcuuccuggcccacauccaguggauggugauguucacgccccugguccccuucuggaucaccaucgcguacaucaucugcaucuccaccaagcacuucuacugguucuucagcaacuaccucaagcgccgggugguguucaacggggucuccuucagcaccuucgaggaggccgcccugugcaccuuccugcucaacaaggagauguaccugaagcugcgcuccgacgugcuccugccgcugacccaguacaaccgguaccucgcccuguacaacaaguacaaguacuucagcggcgccauggacaccacguccuaccgcgaggcggccugcugccaccuggccaaggcccucaacgacuucagcaacuccggcagcgacgugcuguaccagccgccccagaccuccaucaccagcgcgguccugcagugaggacuaguuauaagacugacuagcccgaugggccucccaacgggcccuccuccccuccuugcaccgagauuaauaaaaaaaaaaaaaaaaaaaaaaaaaaaaaaaaaaaaaaaaaaaaaaaaaaaaaaaaaaaaaaaaugcaucccccccccccccccccccccccccccccccaaaggcucuuuucagagccaccagaauu

SEQ ID NO: 22166 - RNA, 1723 nt, Artificial Sequence
  SARS-CoV-2__MT499217.1__non-structural protein 4 (NSP4) mRNA gc
aggagaaagcuuaccaugaagaucgugaacaacuggcugaagcagcucaucaaggucacccugguguuccuguucguggccgccaucuucuaccucaucacccccguccacgugaugagccgccacacggacuucuccagcgagaucaucggcuacaaggcgaucgacgggggcgugacccgggacaucgccuccaccgacacgugcuucgccaacaagcacgccgacuucgacaccugguucaaccagcgcgggggcagcuacaccaacgacaaggccugcccccugaucgcggccgucaucacccgggaggugggguucgugguccccggccugcccggcaccauccuccgcacgaccaacggggacuuccugcacuuccugccccggguguucuccgccgugggcaacaucugcuacaccccgagcaagcucaucgaguacaccgacuucgccacguccgcgugcguccuggccgccgagugcaccaucuucaaggacgccagcgggaagcccgugcccuacugcuacgacaccaacgugcuggagggcuccgucgccuacgagagccuccgccccgacacccgguacgugcugauggacggguccaucauccaguucccgaacacguaccuggagggcagcgugcgcgucgugaccaccuucgacuccgaguacugccggcacgggaccugcgagcgcagcgaggcgggcgugugcgucuccacgagcggccggugggugcucaacaacgacuacuaccgcucccugcccgggguguucugcggcgucgacgccgugaaccugcucaccaacauguucacgccccugauccagcccaucggcgcccuggacaucagcgccuccaucgucgccgggggcaucguggcgaucguggugaccugccucgccuacuacuucaugcgguuccgccgggccuucggggaguacagccacgucguggccuucaacacccugcuguuccucaugagcuucaccguccugugccugaccccgguguacuccuuccuccccggcguguacagcgucaucuaccuguaccugaccuucuaccucacgaacgacguguccuuccuggcccacauccaguggauggugauguucacgccccugguccccuucuggaucaccaucgcguacaucaucugcaucagcaccaagcacuucuacugguucuucuccaacuaccucaagcgccgggugguguucaacggggucagcuucuccaccuucgaggaggccgcccugugcaccuuccugcucaacaaggagauguaccugaagcugcgcagcgacgugcuccugccgcugacccaguacaaccgguaccucgcccuguacaacaaguacaaguacuucuccggcgccauggacaccacgagcuaccgcgaggcggccugcugccaccuggccaaggcccucaacgacuucuccaacagcggcuccgacgugcuguaccagccgccccagaccagcaucaccuccgcgguccugcagugaggacuaguuauaagacugacuagcccgaugggccucccaacgggcccuccuccccuccuugcaccgagauuaauaaaaaaaaaaaaaaaaaaaaaaaaaaaaaaaaaaaaaaaaaaaaaaaaaaaaaaaaaaaaaaaaugcaucccccccccccccccccccccccccccccccaaaggcucuuuucagagccaccagaauu

SEQ ID NO: 22167 - RNA, 1723 nt, Artificial Sequence
  SARS-CoV-2__MT576530.1__non-structural protein 4 (NSP4) mRNA gc
aggagaaagcuuaccaugaagaucgugaacaacuggcugaagcagcucaucaaggucacccugguguuccuguucguggccgccaucuucuaccucaucacccccguccacgugaugagcaagcacacggacuucuccagcgagaucaucggcuacaaggcgaucgacgggggcgugacccgcgacaucgccuccaccgacacgugcuucgccaacaaguacgccgacuucgacaccugguucagccagcggggcggcuccuacaccaacgacaaggccugcccccugaucgcggccgucaucacccgcgaggugggguucgugguccccggccugcccggcaccauccuccggacgaccaacggggacuuccugcacuuccugccccgcguguucagcgccgugggcaacaucugcuacaccccguccaagcucaucgaguacaccgacuucgccacgagcgcgugcguccuggccgccgagugcaccaucuucaaggacgccuccgggaagcccgugcccuacugcuacgacaccaacgugcuggagggcagcgucgccuacgagucccuccggcccgacacccgcuacgugcugauggacgggagcaucauccaguucccgaacacguaccuggagggcuccgugcgggucgugaccaccuucgacagcgaguacugccgccacgggaccugcgagcgguccgaggcgggggugugcgucagcacguccggccgcugggugcucaacaacgacuacuaccggagccugcccgggguguucugcggcgucgacgccgugaaccugcucaccaacauguucacgccccugauccagcccaucggcgcccuggacaucuccgccagcaucgucgccgggggcaucguggcgaucguggugaccugccucgccuacuacuucaugcgcuuccggcgcgccuucggggaguacagccacgucguggccuucaacacccugcuguuccucauguccuucaccguccugugccugaccccgguguacagcuuccuccccggcguguacuccgucaucuaccuguaccugaccuucuaccucacgaacgacgugagcuuccuggcccacauccaguggauggugauguucacgccccugguccccuucuggaucaccaucgcguacaucaucugcaucuccaccaagcacuucuacugguucuucagcaacuaccucaagcggcgcgugguguucaacggggucuccuucagcaccuucgaggaggccgcccugugcaccuuccugcucaacaaggagauguaccugaagcugcgguccgacgugcuccugccgcugacccaguacaaccgcuaccucgcccuguacaacaaguacaaguacuucagcggcgccauggacaccacguccuaccgggaggcggccugcugccaccuggccaaggcccucaacgacuucagcaacuccggcagcgacgugcuguaccagccgccccagaccuccaucaccagcgcgguccugcagugaggacuaguuauaagacugacuagcccgaugggccucccaacgggcccuccuccccuccuugcaccgagauuaauaaaaaaaaaaaaaaaaaaaaaaaaaaaaaaaaaaaaaaaaaaaaaaaaaaaaaaaaaaaaaaaaugcaucccccccccccccccccccccccccccccccaaaggcucuuuucagagccaccagaauu

SEQ ID NO: 22168 - RNA, 1723 nt, Artificial Sequence
  SARS-CoV-2__MT520390.1__non-structural protein 4 (NSP4) mRNA gc
aggagaaagcuuaccaugaagaucgugaacaacuggcugaagcagcucaucaaggucacccugguguuccuguucguggccgccaucuucuaccucaucacccccguccacgugaugagcaagcacacggacuucuccagcgagaucaucggcuacaaggcgaucgacgggggcgugacccgcgacaucgccuacaccgacacgugcuucgccaacaagcacgccgacuucgacaccugguucucccagcggggcggcagcuacaccaacgacaaggccugcccccugaucgcggccgucaucacccgcgaggugggguucgugguccccggccugcccggcaccauccuccggacgaccaacggggacuuccugcacuuccugccccgcguguucuccgccgugggcaacaucugcuacaccccgagcaagcucaucgaguacaccgacuucgccacguccgcgugcguccuggccgccgagugcaccaucuucaaggacgccagcgggaagcccgugcccuacugcuacgacaccaacgugcuggagggcuccgucgccuacgagagccuccggcccgacacccgcuacgugcugauggacggguccaucauccaguucccgaacacguaccuggagggcagcgugcgggucgugaccaccuucgacuccgaguacugccgccacgggaccugcgagcggagcgaggcgggggugugcgucuccacgagcggccgcugggugcucaacaacgacuacuaccggucccugcccgggguguucugcggcgucgacgccgugaaccugcucaccaacauguucacgccccugauccagcccaucggcgcccuggacaucagcgccuccaucgucgccgggggcaucguggcgaucguggugaccugccucgccuacuacuucaugcgcuuccggcgcgccuucggggaguacagccacgucguggccuucaacacccugcuguuccucaugagcuucaccguccugugccugaccccgguguacuccuuccuccccggcguguacagcgucaucuaccuguaccugaccuucuaccucacgaacgacguguccuuccuggcccacauccaguggauggugauguucacgccccugguccccuucuggaucaccaucgcguacaucaucugcaucagcaccaagcacuucuacugguucuucuccaacuaccucaagcggcgcgugguguucaacggggucagcuucuccaccuucgaggaggccgcccugugcaccuuccugcucaacaaggagauguaccugaagcugcggagcgacgugcuccugccgcugacccaguacaaccgcuaccucgugcuguacaacaaguacaaguacuucuccggcgccauggacaccacgagcuaccgggaggccgcgugcugccaccuggccaaggcccucaacgacuucuccaacagcggcuccgacguccuguaccagccgccccagaccagcaucaccuccgccgugcugcagugaggacuaguuauaagacugacuagcccgaugggccucccaacgggcccuccuccccuccuugcaccgagauuaauaaaaaaaaaaaaaaaaaaaaaaaaaaaaaaaaaaaaaaaaaaaaaaaaaaaaaaaaaaaaaaaaugcaucccccccccccccccccccccccccccccccaaaggcucuuuucagagccaccagaauu

SEQ ID NO: 22169 - RNA, 1723 nt, Artificial Sequence
  SARS-CoV-2__MT539163.1__non-structural protein 4 (NSP4) mRNA gc
aggagaaagcuuaccaugaagaucgugaacaacuggcugaagcagcucaucaaggucacccugguguuccuguucguggccgccaucuucuaccucaucacccccguccacgugaugagcaagcacacggacuucuccagcgagaucaucggcuacaaggcgaucgacgggggcgugacccgcgacaucgccuccaccgacacgugcuucgccaacaagcacgccgacuucgacaccugguucagccagcggggcggcuccuacaccaacgacaaggccugcccccugaucgcggccgucaucacccgcgaggugggguucgugguccccggccugcccggcaccauccuccggacgaccaacggggacuuccugcacuuccugccccgcguguucagcgccgugggcaacaucugcuacaccccguccaagcucaucgaguacaccgacuucgccacgagcgcgugcguccuggccgccgagugcaccaucuucaaggacgccuccgggaagcccgugcccuacugcuacgacaccaacgugcuggagggcagcgucgccuacgagucccuccggcccgacacccgcuacgugcugauggacgggagcaucauccaguucccgaacacguaccuggagggcuccgugcgggucgugaccaccuucgacagcgaguacugccgccacgggaccugcgagcgguccgaggcgggggugugcgucagcacguccggccgcugggugcucaacaacgacuacuaccggagccugcccgggguguucugcggcgucgacgccgugaaccugcucaccaacauguucacgccccugauccagcccaucggcgcccuggacaucuccgccagcaucgucgccgggggcaucguggcgaucguggugaccugccucgccuacuacuucaugcgcuuccggcgcgccuucggggaguacagccacgucguggccuucuccacccugcuguuccucaugagcuucaccguccugugccugaccccgguguacuccuuccuccccggcguguacagcgucaucuaccuguaccugaccuucuaccucacgaacgacguguccuuccuggcccacauccaguggauggugauguucacgccccugguccccuucuggaucaccaucgcguacaucaucugcaucagcaccaagcacuucuacugguucuucuccaacuaccucaagcggcgcgugguguucaacggggucagcuucuccaccuucgaggaggccgcccugugcaccuuccugcucaacaaggagauguaccugaagcugcggagcgacgugcuccugccgcugacccaguacaaccgcuaccucgcccuguacaacaaguacaaguacuucuccggcgccauggacaccacgagcuaccgggaggcggccugcugccaccuggccaaggcccucaacgacuucuccaacagcggcuccgacgugcuguaccagccgccccagaccagcaucaccuccgcgguccugcagugaggacuaguuauaagacugacuagcccgaugggccucccaacgggcccuccuccccuccuugcaccgagauuaauaaaaaaaaaaaaaaaaaaaaaaaaaaaaaaaaaaaaaaaaaaaaaaaaaaaaaaaaaaaaaaaaugcaucccccccccccccccccccccccccccccccaaaggcucuuuucagagccaccagaauu

SEQ ID NO: 22170 - RNA, 1723 nt, Artificial Sequence
  SARS-CoV-2__MT407653.1__non-structural protein 4 (NSP4) mRNA gc
aggagaaagcuuaccaugaagaucgugaacaacuggcugaagcagcucaucaaggucacccugguguuccuguucguggccgccaucuucuaccucaucacccccguccacgugaugagcaagcacacggacuucuccagcgagaucaucggcuacaaggcgaucgacgggggcgugacccgcgacaucgccuccaccgacacgugcuucgccaacaagcacgccgacuucgacaccugguucagccagcggggcggcuccuacaccaacgacaaggccugcccccugaucgcggccgucaucacccgcgaggugggguucgugguccccggccugcccggcaccauccuccggacgaccaacggggacuuccugcacuuccugccccgcguguucagcgccgugggcaacaucugcuacaccccguccaagcucaucgaguacaccgacuucgccacgagcgcgugcguccuggccgccgagugcaccaucuucaaggacgccuccgggaagcccgugcccuacugcuacgacaccaacgugcuggagggcagcgucgccuacgagucccuccggcccgacacccgcuacgugcugauggacgggagcaucauccaguucccgaacacguaccuggagggcuccgugcgggucgugaccaccuucgacagcgaguacugccgccacgggaccugcgagcgguccgaggcgggggugugcgucagcacguccggccgcugggugcucaacaacgacuacuaccggagccugcccgggguguucugcggcgucgacgccgugaaccugcucaccaacauguucacgccccugaugcagcccaucggcgcccuggacaucuccgccagcaucgucgccgggggcaucguggcgaucguggugaccugccucgccuacuacuucaugcgcuuccggcgcgccuucggggaguacagccacgucguggccuucaacacccugcuguuccucauguccuucaccguccugugccugaccccgguguacagcuuccuccccggcguguacuccgucaucuaccuguaccugaccuucuaccucacgaacgacgugagcuuccuggcccacauccaguggauggugauguucacgccccugguccccuucuggaucaccaucgcguacaucaucugcaucuccaccaagcacuucuacugguucuucagcaacuaccucaagcggcgcgugguguucaacggggucuccuucagcaccuucgaggaggccgcccugugcaccuuccugcucaacaaggagauguaccugaagcugcgguccgacgugcuccugccgcugacccaguacaaccgcuaccucgcccuguacaacaaguacaaguacuucagcggcgccauggacaccacguccuaccgggaggcggccugcugccaccuggccaaggcccucaacgacuucagcaacuccggcagcgacgugcuguaccagccgccccagaccuccaucaccagcgcgguccugcagugaggacuaguuauaagacugacuagcccgaugggccucccaacgggcccuccuccccuccuugcaccgagauuaauaaaaaaaaaaaaaaaaaaaaaaaaaaaaaaaaaaaaaaaaaaaaaaaaaaaaaaaaaaaaaaaaugcaucccccccccccccccccccccccccccccccaaaggcucuuuucagagccaccagaauu

SEQ ID NO: 22171 - RNA, 1723 nt, Artificial Sequence
  SARS-CoV-2__MT535503.1__non-structural protein 4 (NSP4) mRNA gc
aggagaaagcuuaccaugaagaucgugaacaacuggcugaagcagcucaucaaggucacccugguguuccuguucguggccgccaucuucuaccucaucacccccguccacgugaugagcaagcacacggacuucuccagcgagaucaucggcuacaaggcgaucgacgggggcgugacccgcgacaucgccuccaccgacacgugcuucgccaacaagcacgccgacuucagccagcggggcggcuccuacaccaacgacaaggccugcccccugaucgcggccgucaucacccgcgaggugggguucgugguccccggccugcccggcaccauccuccggaccacgaacggggacuuccugcacuuccugccccgcguguucagcgccgugggcaacaucugcuacaccccguccaagcucaucgaguacaccgacuucgccaccagcgcgugcguccuggccgccgagugcacgaucuucaaggacgccuccgggaagcccgugcccuacugcuacgacaccaacgugcuggagggcagcgucgccuacgagucccuccggcccgacacccgcuacgugcugauggacgggagcaucauccaguucccgaacaccuaccuggagggcuccgugcgggucgugacgaccuucgacagcgaguacugccgccacgggaccugcgagcgguccgaggcgggggugugcgucagcaccuccggccgcugggugcucaacaacgacuacuaccggagccugcccgggguguucugcggcgucgacgccgugaaccugcucacgaacauguucacgccccugauccagcccaucggcgcccuggacaucuccgccagcaucgucgccgggggcaucguggcgaucguggugaccugccucgccuacuacuucaugcgcuuccggcgcgccuucggggaguacagccacgucguggccuucaacacccugcuguuccucauguccuucaccguccugugccugaccccgguguacagcuuccuccccggcguguacuccgucaucuaccuguaccugaccuucuaccucaccaacgacgugagcuuccuggcccacauccaguggauggugauguucacgccccugguccccuucuggaucaccaucgcguacaucaucugcaucuccaccaagcacuucuacugguucuucagcaacuaccucaagcggcgcgugguguucaacggggucuccuucagcaccuucgaggaggccgcccugugcacguuccugcucaacaaggagauguaccugaagcugcgguccgacgugcuccugccgcugacccaguacaaccgcuaccucgcccuguacaacaaguacaaguacuucagcggcgccauggacaccaccuccuaccgggaggcggccugcugccaccuggccaaggcccucaacgacuucagcaacuccggcagcgacgugcuguaccagccgccccagacguccaucaccagcgcgguccugcaguccggguuccgcugaggacuaguuauaagacugacuagcccgaugggccucccaacgggcccuccuccccuccuugcaccgagauuaauaaaaaaaaaaaaaaaaaaaaaaaaaaaaaaaaaaaaaaaaaaaaaaaaaaaaaaaaaaaaaaaaugcaucccccccccccccccccccccccccccccccaaaggcucuuuucagagccaccagaauu

SEQ ID NO: 22172 - RNA, 1723 nt, Artificial Sequence
  SARS-CoV-2__MT533204.1__non-structural protein 4 (NSP4) mRNA gc
aggagaaagcuuaccaugaagaucgugaacaacuggcugaagcagcucaucaaggucacccugguguuccuguucguggccgccaucuucuaccucaucacccccguccacgugaugagcaagcacacggacuucuccagcgagaucaucggcuacaaggcgaucgacgggggcgugacccgcgacaucgccuccaccgacacgugcuucgccaacaagcacgccgacuucgacaccugguucagccagcggggcggcuccuacaccaacgacaaggccugcccccugaucgcggccgucaucacccgcgaggugggguucgugguccccggccugcccggcaccauccuccggacgaccaacggggacuuccugcacuuccugccccgcguguucagcgccgugggcaacaucugcuacaccccguccaagcucaucgaguacaccgacuucgccacgagcgcgugcguccuggccgccgagugcaccaucuucaaggacgccuccgggcggcccgugcccuacugcuacgacaccaacgugcuggagggcagcgucgccuacgagucccuccgccccgacacccgguacgugcugauggacgggagcaucauccaguucccgaacacguaccuggagggcuccgugcgcgucgugaccaccuucgacagcgaguacugccggcacgggaccugcgagcgcuccgaggcgggggugugcgucagcacguccggccggugggugcucaacaacgacuacuaccgcagccugcccgggguguucugcggcgucgacgccgugaaccugcucaccaacauguucacgccccugauccagcccaucggcgcccuggacaucuccgccagcaucgucgccgggggcaucguggcgaucguggugaccugccucgccuacuacuucaugcgguuccgccgggccuucggggaguacagccacgucguggccuucaacacccugcuguuccucauguccuucaccguccugugccugaccccgguguacagcuuccuccccggcguguacuccgucaucuaccuguaccugaccuucuaccucacgaacgacgugagcuuccuggcccacauccaguggauggugauguucacgccccugguccccuucuggaucaccaucgcguacaucaucugcaucuccaccaagcacuucuacugguucuucagcaacuaccucaagcgccgggugguguucaacggggucuccuucagcaccuucgaggaggccgcccugugcaccuuccugcucaacaaggagauguaccugaagcugcgcuccgacgugcuccugccgcugacccaguacaaccgguaccucgcccuguacaacaaguacaaguacuucagcggcgccauggacaccacguccuaccgcgaggcggccugcugccaccuggccaaggcccucaacgacuucagcaacuccggcagcgacgugcuguaccagccgccccagaccuccaucaccagcgcgguccugcagugaggacuaguuauaagacugacuagcccgaugggccucccaacgggcccuccuccccuccuugcaccgagauuaauaaaaaaaaaaaaaaaaaaaaaaaaaaaaaaaaaaaaaaaaaaaaaaaaaaaaaaaaaaaaaaaaugcaucccccccccccccccccccccccccccccccaaaggcucuuuucagagccaccagaauu

SEQ ID NO: 22173 - RNA, 1723 nt, Artificial Sequence
  SARS-CoV-2__MT512440.1__non-structural protein 4 (NSP4) mRNA gc
aggagaaagcuuaccaugaagaucgugaacaacuggcugaagcagcucaucaaggucacccugguguuccuguucguggccgccaucuucuaccucaucacccccguccacgugaugagcaagcacacggacuucuccagcgagaucaucggcuacaaggcgaucgacgggggcgugacccgcgacaucgccuccaccgacacgugcuucgccaacaagcacgccgacuucgacaccugguucagccagcggggcggcuccuacaccaacgacaaggccugcccccugaucgcggccgucaucacccgcgaggugggguucgugguccccggccugcccggcaccauccuccggacgaccaacggggacuuccugcacuuccugccccgcguguucagcgccgugggcaacaucugcuacaccccguccaagcucaucgaguacaccgacuucgccacgagcgcgugcguccuggccgccgagugcaccaucuucaaggacgccuccgggaagcccgugcccuacugcuacgacaccaacgugcuggagggcagcgucgccuacgagucccuccggcccgacacccgcuacgugcugauggacgggagcaucauccaguucccgaacacguaccuggagggcuccgugcgggucgugaccaccuucgacagcgaguacugccgccacgggaccugcgagcgguccgaggcgggggugugcgucagcacguccggccgcugggugcucaacaacgacuacuaccggagccugcccgggguguucugcggcgucgacgccgugaaccugcucaccaacauguucacgccccugauccagcccaucggcgcccuggacaucuccgccagcaucgucgccgggggcaucguggcgaucguggugaccugccucgccuacuacuucaugcgcuuccggcgcgccuucggggaguacagccacgucguggccuucaacacccugcuguuccucauguccuucaccguccugugccugaccccgguguacagcuuccuccccggcguguacuccgucaucuaccuguaccugaccuucuaccucacgaacgacgugagcuuccuggcccacauccaguggauggugauguucacgccccugguccccuucuggaucaccaucgcguacaucaucugcaccuccaccaagcacuucuacugguucuucagcaacuaccucaagcggcgcgugguguucaacggggucuccuucagcaccuucgaggaggccgcccugugcaccuuccugcucaacaaggagauguaccugaagcugcgguccgacgugcuccugccgcugacccaguacaaccgcuaccucgcccuguacaacaaguacaaguacuucagcggcgccauggacacgaccuccuaccgggaggcggccugcugccaccuggccaaggcccucaacgacuucagcaacuccggcagcgacgugcuguaccagccgccccagaccuccaucaccagcgcgguccugcagugaggacuaguuauaagacugacuagcccgaugggccucccaacgggcccuccuccccuccuugcaccgagauuaauaaaaaaaaaaaaaaaaaaaaaaaaaaaaaaaaaaaaaaaaaaaaaaaaaaaaaaaaaaaaaaaaugcaucccccccccccccccccccccccccccccccaaaggcucuuuucagagccaccagaauu

SEQ ID NO: 22174 - RNA, 1723 nt, Artificial Sequence
  SARS-CoV-2__MT509489.1__non-structural protein 4 (NSP4) mRNA gc
aggagaaagcuuaccaugaagaucgugaacaacuggcugaagcagcucaucaaggucacccugguguuccuguucguggccgccaucuucuaccucaucacccccguccacgugaugagcaagcacacggacuucuccagcgagaucaucggcuacaaggugaucgacgggggcgucacccgcgacaucgcguccaccgacacgugcuucgccaacaagcacgccgacuucgacaccugguucagccagcggggcggcuccuacaccaacgacaaggccugcccccugaucgccgcggugaucacccgcgaggugggguucgucgugcccggccugcccggcaccauccuccggacgaccaacggggacuuccugcacuuccugccccgcguguucagcgccgucggcaacaucugcuacaccccguccaagcucaucgaguacaccgacuucgccacgagcgccugcgugcuggcggccgagugcaccaucuucaaggacgccuccgggaagcccgugcccuacugcuacgacaccaacguccuggagggcagcguggccuacgagucccuccggcccgacacccgcuacgugcugauggacgggagcaucauccaguucccgaacacguaccuggagggcuccguccggguggugaccaccuucgacagcgaguacugccgccacgggaccugcgagcgguccgaggccggggucugcgugagcacguccggccgcugggugcucaacaacgacuacuaccggagccugcccggggucuucugcggcguggacgcggucaaccugcucaccaacauguucacgccccugauccagcccaucggcgcccuggacaucuccgccagcaucguggccgggggcaucguggccaucgucgugaccugccucgcguacuacuucaugcgcuuccggcgcgccuucggggaguacagccacguggucgccuucaacacccugcuguuccucauguccuucaccgugcugugccugaccccgguguacagcuuccuccccggcgucuacuccgugaucuaccuguaccugaccuucuaccucacgaacgacgugagcuuccuggcccacauccaguggauggucauguucacgccccuggugcccuucuggaucaccaucgccuacaucaucugcaucuccaccaagcacuucuacugguucuucagcaacuaccucaagcggcgcguggucuucaacgggguguccuucagcaccuucgaggaggcggcccugugcaccuuccugcucaacaaggagauguaccugaagcugcgguccgacgugcuccugccgcugacccaguacaaccgcuaccucgcccuguacaacaaguacaaguacuucagcggcgccauggacaccacguccuaccgggaggccgcgugcugccaccuggccaaggcccucaacgacuucagcaacuccggcagcgacguccuguaccagccgccccagaccuccaucaccagcgccgugcugcagugaggacuaguuauaagacugacuagcccgaugggccucccaacgggcccuccuccccuccuugcaccgagauuaauaaaaaaaaaaaaaaaaaaaaaaaaaaaaaaaaaaaaaaaaaaaaaaaaaaaaaaaaaaaaaaaaugcaucccccccccccccccccccccccccccccccaaaggcucuuuucagagccaccagaauu

SEQ ID NO: 22175 - RNA, 1723 nt, Artificial Sequence
  SARS-CoV-2__MT506886.1__non-structural protein 4 (NSP4) mRNA gc
aggagaaagcuuaccaugaagaucgugaacaacuggcugaagcagcucaucaaggucacccugguguuccuguucguggccgccaucuucuaccucaucacccccguccacgugaugagcaagcacacggacuucuccagcgagaucaucggcuacaaggcgaucgacgggggcgugacccgcgacaucgccuccaccgacacgugcuucgccaacaagcacgccgacuucgacaccugguucagccagcggggcggcuccuacaccaacgacaaggccugcccccugaucgcggccgucaucacccgcgaggugggguucgugguccccggccugcccggcaccauccuccggacgaccaacggggacuuccugcacuuccugccccgcguguucagcgccgugggcaacaucugcuacaccccguccaagcucgucgaguacaccgacuucgccacgagcgcgugcgugcuggccgccgagugcaccaucuucaaggacgccuccgggaagcccgugcccuacugcuacgacaccaacguccuggagggcagcguggccuacgagucccuccggcccgacacccgcuacgugcugauggacgggagcaucauccaguucccgaacacguaccuggagggcuccguccggguggugaccaccuucgacagcgaguacugccgccacgggaccugcgagcgguccgaggcgggggucugcgugagcacguccggccgcugggugcucaacaacgacuacuaccggagccugcccggggucuucugcggcguggacgccgucaaccugcucaccaacauguucacgccccugauccagcccaucggcgcccuggacaucuccgccagcaucguggccgggggcaucguggcgaucgucgugaccugccucgccuacuacuucaugcgcuuccggcgcgccuucggggaguacagccacguggucgccuucaacacccugcuguuccucauguccuucaccgugcugugccugaccccgguguacagcuuccuccccggcgucuacuccgugaucuaccuguaccugaccuucuaccucacgaacgacgugagcuuccuggcccacauccaguggauggucauguucacgccccuggugcccuucuggaucaccaucgcguacaucaucugcaucuccaccaagcacuucuacugguucuucagcaacuaccucaagcggcgcguggucuucaacgggguguccuucagcaccuucgaggaggccgcccugugcaccuuccugcucaacaaggagauguaccugaagcugcgguccgacgugcuccugccgcugacccaguacaaccgcuaccucgcccuguacaacaaguacaaguacuucagcggcgccauggacaccacguccuaccgggaggcggccugcugccaccuggccaaggcccucaacgacuucagcaacuccggcagcgacguccuguaccagccgccccagaccuccaucaccagcgcggugcugcagugaggacuaguuauaagacugacuagcccgaugggccucccaacgggcccuccuccccuccuugcaccgagauuaauaaaaaaaaaaaaaaaaaaaaaaaaaaaaaaaaaaaaaaaaaaaaaaaaaaaaaaaaaaaaaaaaugcaucccccccccccccccccccccccccccccccaaaggcucuuuucagagccaccagaauu

SEQ ID NO: 22176 - RNA, 1723 nt, Artificial Sequence
  SARS-CoV-2__MT499188.1__non-structural protein 4 (NSP4) mRNA gc
aggagaaagcuuaccaugaagaucgugaacaacuggcugaagcagcucaucaaggucacccugguguuccuguucguggccgccaucuucuaccucaucacccccguccacgugaugagcaagcacacggacuucuccagcgagaucaucggcuacaaggcgaucgacgggggcgugacccgcgacaucgccuccaccgacacgugcuucgccaacaagcacgccgacuucgacaccugguucagccagcggggcggcuccuacaccaacgacaaggccugcccccugaucgcggccgucaucacccgcgaggugggguucgugguccccggccugcccggcaccgugcuccggacgaccaacggggacuuccugcacuuccugccccgcguguucagcgccgucggcaacaucugcuacaccccguccaagcucaucgaguacaccgacuucgccacgagcgcgugcgugcuggccgccgagugcaccaucuucaaggacgccuccgggaagcccgugcccuacugcuacgacaccaacguccuggagggcagcguggccuacgagucccuccggcccgacacccgcuacgugcugauggacgggagcaucauccaguucccgaacacguaccuggagggcuccguccggguggugaccaccuucgacagcgaguacugccgccacgggaccugcgagcgguccgaggcgggggucugcgugagcacguccggccgcugggugcucaacaacgacuacuaccggagccugcccggggucuucugcggcguggacgccgucaaccugcucaccaacauguucacgccccugauccagcccaucggcgcccuggacaucuccgccagcaucguggccgggggcaucguggcgaucgucgugaccugccucgccuacuacuucaugcgcuuccggcgcgccuucggggaguacagccacguggucgccuucaacacccugcuguuccucauguccuucaccgugcugugccugaccccgguguacagcuuccuccccggcgucuacuccgugaucuaccuguaccugaccuucuaccucacgaacgacgugagcuuccuggcccacauccaguggauggucauguucacgccccuggugcccuucuggaucaccaucgcguacaucaucugcaucuccaccaagcacuucuacugguucuucagcaacuaccucaagcggcgcguggucuucaacgggguguccuucagcaccuucgaggaggccgcccugugcaccuuccugcucaacaaggagauguaccugaagcugcgguccgacgugcuccugccgcugacccaguacaaccgcuaccucgcccuguacaacaaguacaaguacuucagcggcgccauggacaccacguccuaccgggaggcggccugcugccaccuggccaaggcccucaacgacuucagcaacuccggcagcgacguccuguaccagccgccccagaccuccaucaccagcgcggugcugcagugaggacuaguuauaagacugacuagcccgaugggccucccaacgggcccuccuccccuccuugcaccgagauuaauaaaaaaaaaaaaaaaaaaaaaaaaaaaaaaaaaaaaaaaaaaaaaaaaaaaaaaaaaaaaaaaaugcaucccccccccccccccccccccccccccccccaaaggcucuuuucagagccaccagaauu

SEQ ID NO: 22177 - RNA, 1723 nt, Artificial Sequence
  SARS-CoV-2__MT499209.1__non-structural protein 4 (NSP4) mRNA gc
aggagaaagcuuaccaugaagaucgugaacaacuggcugaagcagcucaucaaggucacccugguguuccuguucguggccgccaucuucuaccucaucacccccguccacgugaugagcaagcacacggacuucuccagcgagaucaucggcuacaaggcgaucgacgggggcgugacccgcgacaucgccuccaccgacacgugcuucgccaacaagcacgccgacuucgacaccugguucagccagcggggcggcuccuacaccaacgacaaggccugcccccugaucgcggccgucaucacccgcgaggugggguucgugguccccggccugcccggcaccauccuccggacgaccaacggggacuuccugcacuuccugccccgcguguucagcgccgugggcaacaucugcuacaccccguccaagcucaucgaguacaccgacuucgccacgagcgcgugcguccuggccgccgagugcaccaucuucaaggacgccuccgggaagcccgugcccuacugcuacgacaccaacgugcuggagggcagcgucgccuacgagucccuccggcccgacacccgcuacgugcugauggacgggagcaucauccaguucccgaacacguaccuggaguccagcgugcgggucgugaccaccuucgacuccgaguacugccgccacgggaccugcgagcggagcgaggcgggcgugugcgucuccacgagcgggcgcugggugcucaacaacgacuacuaccggucccugcccggcguguucugcggggucgacgccgugaaccugcucaccaacauguucacgccccugauccagcccaucggcgcccuggacaucagcgccagcaucgucgccggcgggaucguggcgaucguggugaccugccucgccuacuacuucaugcgcuuccggcgcgccuucggcgaguacucccacgucguggccuucaacacccugcuguuccucaugagcuucaccguccugugccugaccccgguguacuccuuccuccccgggguguacagcgucaucuaccuguaccugaccuucuaccucacgaacgacguguccuuccuggcccacauccaguggauggugauguucacgccccugguccccuucuggaucaccaucgcguacaucaucugcaucagcaccaagcacuucuacugguucuucuccaacuaccucaagcggcgcgugguguucaacggcgucagcuucuccaccuucgaggaggccgcccugugcaccuuccugcucaacaaggagauguaccugaagcugcggagcgacgugcuccugccgcugacccaguacaaccgcuaccucgcccuguacaacaaguacaaguacuucuccggggccauggacaccacgagcuaccgggaggcggccugcugccaccuggccaaggcccucaacgacuucuccaacagcggcuccgacgugcuguaccagccgccccagaccagcaucaccuccgcgguccugcagugaggacuaguuauaagacugacuagcccgaugggccucccaacgggcccuccuccccuccuugcaccgagauuaauaaaaaaaaaaaaaaaaaaaaaaaaaaaaaaaaaaaaaaaaaaaaaaaaaaaaaaaaaaaaaaaaugcaucccccccccccccccccccccccccccccccaaaggcucuuuucagagccaccagaauu

SEQ ID NO: 22178 - RNA, 1723 nt, Artificial Sequence
  SARS-CoV-2__MT477852.1__non-structural protein 4 (NSP4) mRNA gc
aggagaaagcuuaccaugaagaucgugaacaacuggcugaagcagcucaucaaggucacccugcuguuccucuucguggccgccaucuucuaccugaucacccccgugcacgucaugagcaagcacacggacuucuccagcgagaucaucggcuacaaggcgaucgacgggggcgugacccgcgacaucgccuccaccgacacgugcuucgccaacaagcacgccgacuucgacaccugguucagccagcggggcggcuccuacaccaacgacaaggccugcccccugaucgcggccgugaucacccgcgaggucggguucguggugcccggccuccccggcaccauccugcggacgaccaacggggacuuccugcacuuccucccccgcgucuucagcgccgugggcaacaucugcuacaccccguccaagcugaucgaguacaccgacuucgccacgagcgcgugcgugcuggccgccgagugcaccaucuucaaggacgccuccgggaagcccguccccuacugcuacgacaccaacgugcucgagggcagcguggccuacgagucccugcggcccgacacccgcuacguccugauggacgggagcaucauccaguucccgaacacguaccucgagggcuccgugcggguggucaccaccuucgacagcgaguacugccgccacgggaccugcgagcgguccgaggcgggggugugcgugagcacguccggccgcuggguccugaacaacgacuacuaccggagccugcccgggguguucugcggcguggacgccgucaaccuccugaccaacauguucacgccccugauccagcccaucggcgcccucgacaucuccgccagcaucguggccgggggcaucgucgcgaucguggugaccugccuggccuacuacuucaugcgcuuccggcgcgccuucggggaguacagccacgucguggccuucaacacccuccuguuccugauguccuucaccgugcugugccucaccccggucuacagcuuccugcccggcguguacuccgugaucuaccuguaccucaccuucuaccugacgaacgacgucagcuuccuggcccacauccaguggauggugauguucacgccccucgugcccuucuggaucaccaucgcguacaucaucugcaucuccaccaagcacuucuacugguucuucagcaacuaccugaagcggcgcgucguguucaacgggguguccuucagcaccuucgaggaggccgcccugugcaccuuccuccugaacaaggagauguaccugaagcuccgguccgacguccugcugccgcucacccaguacaaccgcuaccuggcccuguacaacaaguacaaguacuucagcggcgccauggacaccacguccuaccgggaggcggccugcugccaccucgccaaggcccugaacgacuucagcaacuccggcagcgacgugcuguaccagccgccccagaccuccaucaccagcgcggugcugcagugaggacuaguuauaagacugacuagcccgaugggccucccaacgggcccuccuccccuccuugcaccgagauuaauaaaaaaaaaaaaaaaaaaaaaaaaaaaaaaaaaaaaaaaaaaaaaaaaaaaaaaaaaaaaaaaaugcaucccccccccccccccccccccccccccccccaaaggcucuuuucagagccaccagaauu

SEQ ID NO: 22179 - RNA, 1723 nt, Artificial Sequence
  SARS-CoV-2__MT481932.1__non-structural protein 4 (NSP4) mRNA gc
aggagaaagcuuaccaugaagaucgugaacaacuggcugaagcagcucaucaaggucacccugguguuccuguucguggccgccaucuucuaccucaucacccccguccacgugaugagcaagcacacggacuucuccagcgagaucaucggcuacaaggcgaucgacgggggcgugacccgcgacaucgccuccaccgacacgugcuucgccaacaagcacgccgacuucgacaccugguucagccagcggggcggcuccuacaccaacgacaaggccugcccccugaucgcggccgucaucacccgcgaggugggguucgugguccccggccugcccggcaccauccuccggacgaccaacggggacuuccugcacuuccugccccgcguguucagcgccgugggcaacaucugcuacaccccguccaagcucaucgaguacaccgacuucgccacgagcgcgugcguccuggccgccgagugcaccaucuucaaggacgccuccgggaagcccgugcccuacugcuacgacaccaacgugcuggagggcagcgucgccuacgagucccuccggcccgacacccgcuacgugcugauggacgggagcaucauccaguucccgaacacguaccuggagggcuccgugcgggucgugaccaccuucgacagcgaguacugccgccacgggaccugcgagcgguccgaggcgggggugugcgucagcacguccggccgcugggugcucaacaacgacuacuaccggagccugcccgggguguucugcggcgucgacgccgugaaccugcucaccaacauguucacgccccugauccagcccaucggcgcccuggacaucuccgccagcaucgucgccgggggcaucguggcgaucguggugaccugccucgccuacuacuucaugcgcuuccggcgcgccuucggggaguacagccacgucguggccuucaacacccugcuguuccucauguccuucaccguccugugccugaccccgguguaccucuuccugcccggcguguacagcgucaucuaccuguaccucaccuucuaccugacgaacgacguguccuuccuggcccacauccaguggauggugauguucacgccccucguccccuucuggaucaccaucgcguacaucaucugcaucagcaccaagcacuucuacugguucuucuccaacuaccugaagcggcgcgugguguucaacggggucagcuucuccaccuucgaggaggccgcccugugcaccuuccuccugaacaaggagauguaccugaagcuccggagcgacgugcugcugccgcucacccaguacaaccgcuaccuggcccuguacaacaaguacaaguacuucuccggcgccauggacaccacgagcuaccgggaggcggccugcugccaccucgccaaggcccugaacgacuucuccaacagcggcuccgacgugcuguaccagccgccccagaccagcaucaccuccgcgguccugcagugaggacuaguuauaagacugacuagcccgaugggccucccaacgggcccuccuccccuccuugcaccgagauuaauaaaaaaaaaaaaaaaaaaaaaaaaaaaaaaaaaaaaaaaaaaaaaaaaaaaaaaaaaaaaaaaaugcaucccccccccccccccccccccccccccccccaaaggcucuuuucagagccaccagaauu

SEQ ID NO: 22180 - RNA, 1723 nt, Artificial Sequence
  SARS-CoV-2__MT482148.1__non-structural protein 4 (NSP4) mRNA gc
aggagaaagcuuaccaugaagaucgugaacaacuggcugaagcagcucaucaaggucacccugguguuccuguucguggccgccaucuucuaccucaucacccccguccacgugaugagcaagcacacggacuucuccagcgagaucaucggcuacaaggcgaucgacgggggcgugacccgcgacaucgccuccaccgacacgugcuucgccaacaagcacgccgacuucgacaccugguucagccagcggggcggcuccuacaccaacgacaaggccugcccccugaucgcggccgucaucacccgcgaggugggguucgugguccccggccugcccagcaccauccuccggacgaccaacggcgacuuccugcacuuccugccccgcguguucuccgccguggggaacaucugcuacaccccgagcaagcucaucgaguacaccgacuucgccacguccgcgugcguccuggccgccgagugcaccaucuucaaggacgccagcggcaagcccgugcccuacugcuacgacaccaacgugcuggagggguccgucgccuacgagagccuccggcccgacacccgcuacgugcugauggacggcuccaucauccaguucccgaacacguaccuggaggggagcgugcgggucgugaccaccuucgacuccgaguacugccgccacgggaccugcgagcggagcgaggcgggcgugugcgucuccacgagcgggcgcugggugcucaacaacgacuacuaccggucccugcccggcguguucugcggggucgacgccgugaaccugcucaccaacauguucacgccccugauccagcccaucggcgcccuggacaucagcgccagcaucgucgccggcgggaucguggcgaucguggugaccugccucgccuacuacuucaugcgcuuccggcgcgccuucggcgaguacucccacgucguggccuucaacacccugcuguuccucaugagcuucaccguccugugccugaccccgguguacuccuuccuccccgggguguacagcgucaucuaccuguaccugaccuucuaccucacgaacgacguguccuuccuggcccacauccaguggauggugauguucacgccccugguccccuucuggaucaccaucgcguacaucaucugcaucagcaccaagcacuucuacugguucuucuccaacuaccucaagcggcgcgugguguucaacggcgucagcuucuccaccuucgaggaggccgcccugugcaccuuccugcucaacaaggagauguaccugaagcugcggagcgacgugcuccugccgcugacccaguacaaccgcuaccucgcccuguacaacaaguacaaguacuucuccggggccauggacaccacgagcuaccgggaggcggccugcugccaccuggccaaggcccucaacgacuucuccaacagcggcuccgacgugcuguaccagccgccccagaucagcaucaccuccgcgguccugcagugaggacuaguuauaagacugacuagcccgaugggccucccaacgggcccuccuccccuccuugcaccgagauuaauaaaaaaaaaaaaaaaaaaaaaaaaaaaaaaaaaaaaaaaaaaaaaaaaaaaaaaaaaaaaaaaaugcaucccccccccccccccccccccccccccccccaaaggcucuuuucagagccaccagaauu

SEQ ID NO: 22181 - RNA, 1723 nt, Artificial Sequence
  SARS-CoV-2__MT079843.1__non-structural protein 4 (NSP4) mRNA gc
aggagaaagcuuaccaugaagaucgugaacaacuggcugaagcagcucaucaaggucacccugguguuccuguucguggccgccaucuucuaccucaucacccccguccacgugaugagcaagcacacggacuucuccagcgagaucaucggcuacaaggcgaucgacgggggcgugacccgcgacaucgccuccaccgacacgugcuucgccaacaagcacgccgacuucgacaccugguucagccagcggggcggcuccuacaccaacgacaaggccugcccccugaucgcggccgucaucacccgcgaggugggguucgugguccccggccugcccggcaccaucagccggacgaccaacggggacuuccuccacuuccugccccgcguguucuccgccgugggcaacaucugcuacaccccgagcaagcugaucgaguacaccgacuucgccacguccgcgugcguccucgccgccgagugcaccaucuucaaggacgccagcgggaagcccgugcccuacugcuacgacaccaacgugcuggagggcuccgucgccuacgagagccugcggcccgacacccgcuacgugcucauggacggguccaucauccaguucccgaacacguaccuggagggcagcgugcgggucgugaccaccuucgacuccgaguacugccgccacgggaccugcgagcggagcgaggcgggggugugcgucuccacgagcggccgcugggugcugaacaacgacuacuaccggucccuccccgggguguucugcggcgucgacgccgugaaccugcugaccaacauguucacgccccucauccagcccaucggcgcccuggacaucagcgccagcaucgucgccgggggcaucguggcgaucguggugaccugccuggccuacuacuucaugcgcuuccggcgcgccuucggggaguacucccacgucguggccuucaacacccuccuguuccugaugagcuucaccguccucugccugaccccgguguacuccuuccugcccggcguguacagcgucaucuaccucuaccugaccuucuaccugacgaacgacguguccuuccucgcccacauccaguggauggugauguucacgccccugguccccuucuggaucaccaucgcguacaucaucugcaucagcaccaagcacuucuacugguucuucuccaacuaccugaagcggcgcgugguguucaacggggucagcuucuccaccuucgaggaggccgcccucugcaccuuccugcugaacaaggagauguaccucaagcugcggagcgacgugcugcucccgcugacccaguacaaccgcuaccuggcccucuacaacaaguacaaguacuucuccggcgccauggacaccacgagcuaccgggaggcggccugcugccaccuggccaaggcccugaacgacuucuccaacagcggcuccgacgugcucuaccagccgccccagaccagcaucaccuccgcgguccugcagugaggacuaguuauaagacugacuagcccgaugggccucccaacgggcccuccuccccuccuugcaccgagauuaauaaaaaaaaaaaaaaaaaaaaaaaaaaaaaaaaaaaaaaaaaaaaaaaaaaaaaaaaaaaaaaaaugcaucccccccccccccccccccccccccccccccaaaggcucuuuucagagccaccagaauu

SEQ ID NO: 22182 - RNA, 1723 nt, Artificial Sequence
  SARS-CoV-2__MT459878.1__non-structural protein 4 (NSP4) mRNA gc
aggagaaagcuuaccaugaagaucgugaacaacuggcugaagcagcucaucaaggucacccugguguuccuguucguggccgccaucuucuaccucaucacccccguccacgugaugagcaagcacacggacuucuccagcgagaucaucggcuacaaggcgaucgacgggggcgugacccgcgacaucgccuccaccgacacgugcuucgccaacaagcacgccgacuucgacaccugguucagccagcggggcggcuccuacaccaacgacaaggccugcccccugaucgcggccgucaucacccgcgaggugggguucgugguccccggccugcccggcaccauccuccggacgaccaacggggacuuccugcacuuccugccccgcguguucagcgccgugggcaacaucugcuacaccccguccaagcucaucgaguacaccgacuucgccacgagcgcgugcguccuggccgccgagugcaccaucuucaaggacguguccgggaagcccgugcccuacugcuacgacaccaacguccuggagggcagcguggccuacgagucccuccggcccgacacccgcuacgugcugauggacgggagcaucauccaguucccgaacacguaccuggagggcuccguccggguggugaccaccuucgacagcgaguacugccgccacgggaccugcgagcgguccgaggccggggucugcgugagcacguccggccgcugggugcucaacaacgacuacuaccggagccugcccggggucuucugcggcguggacgcggucaaccugcucaccaacauguucacgccccugauccagcccaucggcgcccuggacaucuccgccagcaucguggccgggggcaucguggccaucgucgugaccugccucgcguacuacuucaugcgcuuccggcgcgccuucggggaguacagccacguggucgccuucaacacccugcuguuccucauguccuucaccgugcugugccugaccccgguguacagcuuccuccccggcgucuacuccgugaucuaccuguaccugaccuucuaccucacgaacgacgugagcuuccuggcccacauccaguggauggucauguucacgccccuggugcccuucuggaucaccaucgccuacaucaucugcaucuccaccaagcacuucuacugguucuucagcaacuaccucaagcggcgcguggucuucaacgggguguccuucagcaccuucgaggaggcggcccugugcaccuuccugcucaacaaggagauguaccugaagcugcgguccgacgugcuccugccgcugacccaguacaaccgcuaccucgcccuguacaacaaguacaaguacuucagcggcgccauggacaccacguccuaccgggaggccgcgugcugccaccuggccaaggcccucaacgacuucagcaacuccggcagcgacguccuguaccagccgccccagaccuccaucaccagcgccgugcugcagugaggacuaguuauaagacugacuagcccgaugggccucccaacgggcccuccuccccuccuugcaccgagauuaauaaaaaaaaaaaaaaaaaaaaaaaaaaaaaaaaaaaaaaaaaaaaaaaaaaaaaaaaaaaaaaaaugcaucccccccccccccccccccccccccccccccaaaggcucuuuucagagccaccagaauu

SEQ ID NO: 22183 - RNA, 1723 nt, Artificial Sequence
  SARS-CoV-2__MT459985.1__non-structural protein 4 (NSP4) mRNA gc
aggagaaagcuuaccaugaagaucgugaacaacuggcugaagcagcucaucaaggucacccugguguuccuguucguggccgccaucuucuaccucaucacccccguccacgugaugagcaagcacacggacuucuccagcgagaucaucggcuacaaggcgaucgacgggggcgugacccgcgacaucgccuccaccgacacgugcuucgccaacaagcacgccgacuucgacaccugguucagccagcggggcggcuccuacaccaacgacaaggccugcccccugaucgcggccgucaucacccgcgagguggggcuggugguccccggccuccccggcaccauccugcggacgaccaacggggacuuccugcacuuccucccccgcguguucagcgccgugggcaacaucugcuacaccccguccaagcugaucgaguacaccgacuucgccacgagcgcgugcguccuggccgccgagugcaccaucuucaaggacgccuccgggaagcccgugcccuacugcuacgacaccaacgugcucgagggcagcgucgccuacgagucccugcggcccgacacccgcuacgugcugauggacgggagcaucauccaguucccgaacacguaccucgagggcuccgugcgggucgugaccaccuucgacagcgaguacugccgccacgggaccugcgagcgguccgaggcgggggugugcgucagcacguccggccgcugggugcugaacaacgacuacuaccggagccugcccgggguguucugcggcgucgacgccgugaaccuccugaccaacauguucacgccccugauccagcccaucggcgcccucgacaucuccgccagcaucgucgccgggggcaucguggcgaucguggugaccugccuggccuacuacuucaugcgcuuccggcgcgccuucggggaguacagccacgucguggccuucaacacccuccuguuccugauguccuucaccguccugugccucaccccgguguacagcuuccugcccggcguguacuccgucaucuaccuguaccucaccuucuaccugacgaacgacgugagcuuccuggcccacauccaguggauggugauguucacgccccucguccccuucuggaucaccaucgcguacaucaucugcaucuccaccaagcacuucuacugguucuucagcaacuaccugaagcggcgcgugguguucaacggggucuccuucagcaccuucgaggaggccgcccugugcaccuuccuccugaacaaggagauguaccugaagcuccgguccgacgugcugcugccgcucacccaguacaaccgcuaccuggcccuguacaacaaguacaaguacuucagcggcgccauggacaccacguccuaccgggaggcggccugcugccaccucgccaaggcccugaacgacuucagcaacuccggcagcgacgugcuguaccagccgccccagaccuccaucaccagcgcgguccugcagugaggacuaguuauaagacugacuagcccgaugggccucccaacgggcccuccuccccuccuugcaccgagauuaauaaaaaaaaaaaaaaaaaaaaaaaaaaaaaaaaaaaaaaaaaaaaaaaaaaaaaaaaaaaaaaaaugcaucccccccccccccccccccccccccccccccaaaggcucuuuucagagccaccagaauu

SEQ ID NO: 22184 - RNA, 1723 nt, Artificial Sequence
  SARS-CoV-2__MT451244.1__non-structural protein 4 (NSP4) mRNA gc
aggagaaagcuuaccaugaagaucgugaacaacuggcugaagcagcucaucaaggucacccugguguuccuguucguggccgccaucuucuaccucaucacccccguccacgugaugagcaaguacacggacuucuccagcgagaucaucggcuacaaggcgaucgacgggggcgugacccgcgacaucgccuccaccgacacgugcuucgccaacaagcacgccgacuucgacaccugguucagccagcggggcggcuccuacaccaacgacaaggccugcccccugaucgcggccgucaucacccgcgaggugggguucgugguccccggccugcccggcaccauccuccggacgaccaacggggacuuccugcacuuccugccccgcguguucagcgccgugggcaacaucugcuacaccccguccaagcucaucgaguacaccgacuucgccacgagcgcgugcguccuggccgccgagugcaccaucuucaaggacgccuccgggaagcccgugcccuacugcuacgacaccaacgugcuggagggcagcgucgccuacgagucccuccggcccgacacccgcuacgugcugauggacgggagcaucauccaguucccgaacacguaccuggagggcuccgugcgggucgugaccaccuucgacagcgaguacugccgccacgggaccugcgagcgguccgaggcgggggugugcgucagcacguccggccgcugggugcucaacaacgacuacuaccggagccugcccgggguguucugcggcgucgacgccgugaaccugcucaccaacauguucacgccccugauccagcccaucggcgcccuggacaucuccgccagcaucgucgccgggggcaucguggcgaucguggugaccugccucgccuacuacuucaugcgcuuccggcgcgccuucggggaguacagccacgucguggccuucaacacccugcuguuccucauguccuucaccguccugugccugaccccgguguacagcuuccuccccggcguguacuccgucaucuaccuguaccugaccuucuaccucacgaacgacgugagcuuccuggcccacauccaguggauggugauguucacgccccugguccccuucuggaucaccaucgcguacaucaucugcaucuccaccaagcacuucuacugguucuucagcaacuaccucaagcggcgcgugguguucaacggggucuccuucagcaccuucgaggaggccgcccugugcaccuuccugcucaacaaggagauguaccugaagcugcgguccgacgugcuccugccgcugacccaguacaaccgcuaccucgcccuguacaacaaguacaaguacuucagcggcgccauggacaccacguccuaccgggaggcggccugcugccaccuggccaaggcccucaacgacuucagcaacuccggcagcgacgugcuguaccagccgccccagaccuccaucaccagcgcgguccugcagugaggacuaguuauaagacugacuagcccgaugggccucccaacgggcccuccuccccuccuugcaccgagauuaauaaaaaaaaaaaaaaaaaaaaaaaaaaaaaaaaaaaaaaaaaaaaaaaaaaaaaaaaaaaaaaaaugcaucccccccccccccccccccccccccccccccaaaggcucuuuucagagccaccagaauu

SEQ ID NO: 22185 - RNA, 1723 nt, Artificial Sequence
  SARS-CoV-2__MT451712.1__non-structural protein 4 (NSP4) mRNA gc
aggagaaagcuuaccaugaagaucgugaacaacuggcugaagcagcucaucaaggucacccugguguuccuguucguggccgccaucuucuaccucaucacccccguccacgugaugagcaagcacacggacuucuccagcgagaucaucggcuacaaggcgaucgacgggggcgugacccgcgacaucgccuccaccgacacgugcuucgccaacaagcacgccgacuucgacaccugguucagccagcggggcggcuccuacaccaacgacaaggccugcccccugaucgcggccgucaucacccgcgaggugagcuucgugguccccgggcugcccggcaccauccuccggacgaccaacggcgacuuccugcacuuccugccccgcguguucuccgccguggggaacaucugcuacaccccgagcaagcucaucgaguacaccgacuucgccacguccgcgugcguccuggccgccgagugcaccaucuucaaggacgccagcggcaagcccgugcccuacugcuacgacaccaacgugcuggagggguccgucgccuacgagagccuccggcccgacacccgcuacgugcugauggacggcuccaucauccaguucccgaacacguaccuggaggggagcgugcgggucgugaccaccuucgacuccgaguacugccgccacgggaccugcgagcggagcgaggcgggcgugugcgucuccacgagcgggcgcugggugcucaacaacgacuacuaccggucccugcccggcguguucugcggggucgacgccgugaaccugcucaccaacauguucacgccccugauccagcccaucggcgcccuggacaucagcgccagcaucgucgccggcgggaucguggcgaucguggugaccugccucgccuacuacuucaugcgcuuccggcgcgccuucggcgaguacucccacgucguggccuucaacacccugcuguuccucaugagcuucaccguccugugccugaccccgguguacuccuuccuccccgggguguacagcgucaucuaccuguaccugaccuucuaccucacgaacgacguguccuuccuggcccacauccaguggauggugauguucacgccccugguccccuucuggaucaccaucgcguacaucaucugcaucagcaccaagcacuucuacugguucuucuccaacuaccucaagcggcgcgugguguucaacggcgucagcuucuccaccuucgaggaggccgcccugugcaccuuccugcucaacaaggagauguaccugaagcugcggagcgacgugcuccugccgcugacccaguacaaccgcuaccucgcccuguacaacaaguacaaguacuucuccggggccauggacaccacgagcuaccgggaggcggccugcugccaccuggccaaggcccucaacgacuucuccaacagcggcuccgacgugcuguaccagccgccccagaccagcaucaccuccgcgguccugcagugaggacuaguuauaagacugacuagcccgaugggccucccaacgggcccuccuccccuccuugcaccgagauuaauaaaaaaaaaaaaaaaaaaaaaaaaaaaaaaaaaaaaaaaaaaaaaaaaaaaaaaaaaaaaaaaaugcaucccccccccccccccccccccccccccccccaaaggcucuuuucagagccaccagaauu

SEQ ID NO: 22186 - RNA, 1723 nt, Artificial Sequence
  SARS-CoV-2__MT451755.1__non-structural protein 4 (NSP4) mRNA gc
aggagaaagcuuaccaugaagaucgugaacaacuggcugaagcagcucaucaaggucacccugguguuccuguucguggccgccaucuucuaccucaucacccccguccacgugaugagcaagcacacggacuucuccagcgagaucaucggcuacaaggcgaucgacgggggcgugacccgcgacaucgccuccaccgacacgugcuucgccaacaagcacgccgacuucgacaccugguucagccagcggggcggcuccuacaccaacgacaaggccugcccccugaucgcggccgucaucacccgcgaggugggguucgugguccccggccugcccggcaccauccuccggacgaccaacggggacuuccugcacuuccugccccgcguguucagcgccgugggcaacaucugcuacaccccguccaagcucaucgaguacaccgacuucgccacgagcgcgugcguccuggccgccgagugcaccaucuucaaggacgccuccgggaagcccgugcccuacugcuacgacaccaacgugcuggagggcagcgucgccuacgagucccuccggcccgacacccgcuacgugcugauggacgggagcaucauccaguucccgaacacguaccuggagggcuccgugcgggucgugaccaccuucgacagcgaguacugccgccacgggaccugcgagcgguccgaggcgggggugugcgucagcacguccggccgcugggugcucaacaacgacuacuaccggagccugcccgggguguucugcggcgucgacgccgugaaccugcucaccaacauguucacgccccugauccagcccaucggcgcccuggacaucuccgccagcaucgucgccgggggcaucguggcgaucguggugaccugccucgccuacuacuucaugcgcuuccggcgcgccuucggggaguacagccacgucguggccuucaacacccugcuguuccucauguccuucaccguccugugccugaccccgguguacagcuuccuccccggcguguacuccgucaucuaccuguaccugaccuucuaccucacgaacgacgugagcuuccuggcccacauccaguggauggugauguucacgccccugguccccuucuggaucaccaucgcguacaucaucugcguguccaccaagcacuucuacugguucuucagcaacuaccucaagcggcgcguggucuucaacgggguguccuucagcaccuucgaggaggccgcccugugcaccuuccugcucaacaaggagauguaccugaagcugcgguccgacgugcuccugccgcugacccaguacaaccgcuaccucgcccuguacaacaaguacaaguacuucagcggcgccauggacaccacguccuaccgggaggcggccugcugccaccuggccaaggcccucaacgacuucagcaacuccggcagcgacguccuguaccagccgccccagaccuccaucaccagcgcggugcugcagugaggacuaguuauaagacugacuagcccgaugggccucccaacgggcccuccuccccuccuugcaccgagauuaauaaaaaaaaaaaaaaaaaaaaaaaaaaaaaaaaaaaaaaaaaaaaaaaaaaaaaaaaaaaaaaaaugcaucccccccccccccccccccccccccccccccaaaggcucuuuucagagccaccagaauu

SEQ ID NO: 22187 - RNA, 1723 nt, Artificial Sequence
  SARS-CoV-2__MT276600.1__non-structural protein 4 (NSP4) mRNA gc
aggagaaagcuuaccaugaagaucgugaacaacuggcugaagcagcucaucaaggucacccugguguuccuguucguggccgccaucuucuaccucaucacccccguccacgugaugagcaagcacacggacuucuccagcgagaucaucggcuacaaggcgaucgacgggggcgugacccgcgacaucgccuccaccgacacgugcuucgccaacaagcacgccgacuucgacaccugguucagccagcggggcggcuccuacaccaacgacaaggccugcccccugaucgcggccgucaucacccgcgaggugggguucgugguccccggccugcccggcaccauccuccggacgaccaacggggacuuccugcacuuccugccccgcguguucagcgccgugggcaacaucugcuacaccccguccaagcucaucgaguacaccgacuucgccacgagcgcgugcguccuggccgccgagugcaccaucuucaaggacgccuccgggaagcccgugcccuacugcuacgacaccaacgugcuggagggcagcgucgccuacgagucccuccggcccgacacccgcuacgugcugauggacgggagcaucauccaguucccgaacacguaccuggagggcuccgugcgggucgugaccaccuucgacagcgaguacugccgccacgggaccugcgagcgguccgaggcgggggugugcgucagcacguccggccgcugggugcucaacaacgacuacuaccggagccugcccgggguguucugcggcgucgacgccgugaaccugcucaccaacauguucacgccccugauccagcccaucggcgcccuggacaucuccgccagcaucgucgccgggggcaucguggcgaucguggugaccugccucgccuacuacuucaugcgcuuccggcgcgccuucggggaguacagccacgucguggccuucaacacccugcuguuccucauguccuucaccguccugugccugaccccgguguacagcuuccuccccggcguguacuccgucaucuaccuguaccugaccuucuaccucacgaacgacgugagcuuccuggcccacauccaguggauggugauguucacgccccugguccccuucuggaucaccaucgcguacaucaucugcaucuccaccaagcacuucuacugguucuucagcaacuaccucaagcggcgcgugguguucaacggggucuccuucagcaccuucgaggaggccgcccugugcaccuuccugcucaacaaggagauguaccugaagcugcgguccgacgugcuccugccgcugacccaguacaaccgcuaccucgcccuguacaacaaguacaaguacuucagcggcgccauggacaccacguccuaccgggaggcggccugcugcuaccuggccaaggcccucaacgacuucagcaacuccggcagcgacgugcuguaccagccgccccagaccuccaucaccagcgcgguccugcagugaggacuaguuauaagacugacuagcccgaugggccucccaacgggcccuccuccccuccuugcaccgagauuaauaaaaaaaaaaaaaaaaaaaaaaaaaaaaaaaaaaaaaaaaaaaaaaaaaaaaaaaaaaaaaaaaugcaucccccccccccccccccccccccccccccccaaaggcucuuuucagagccaccagaauu

SEQ ID NO: 22188 - RNA, 1723 nt, Artificial Sequence
  SARS-CoV-2__MT412337.1__non-structural protein 4 (NSP4) mRNA gc
aggagaaagcuuaccaugaagaucgugaacaacuggcugaagcagcucaucaaggucacccugguguuccuguucguggccgccaucuucuaccucaucacccccguccacgugaugagcaagcacacggacuucuccagcgagaucaucggcuacaaggcgaucgacgggggcgugacccgcgacaucgccuccaccgacacgugcuucgccaacaagcacgccgacuucgacaccugguucagccagcggggcggcuccuacaccaacgacaaggccugcccccugaucgcggccgucaucacccgcgaggugggguucgugguccccggccugcccggcaccauccuccggacgaccaacggggacuuccugcacuuccugccccgcguguucagcgccgugggcaacaucugcuacaccccguccaagcucaucgaguacaccgacuucgccacgagcgcgugcguccuggccgccgagugcaccaucuucaaggacgccuccgggaagcccgugcccuacugcuacgacaccaacgugcuggagggcagcgucgccuacgagucccuccggcccgacacccgcuacgugcugauggacgggagcaucauccaguucccgaacacguaccuggagggcuccgugcgggucgugaccaccuucgacagcgaguacugccgccacgggaccugcgagcgguccgaggcgggggugugcgucagcacguccggccgcugggugcucaacaacgacuacuaccggagccugcccgggguguucugcggcgucgacgccgugaaccugcucaccaacauguucaucccccugauccagcccaucggcgcccuggacaucuccgccagcaucgucgccgggggcaucguggcgaucguggugaccugccucgccuacuacuucaugcgcuuccggcgcgccuucggggaguacagccacgucguggccuucaacacccugcuguuccucauguccuucacgguccugugccugaccccgguguacagcuuccuccccggcguguacuccgucaucuaccuguaccugaccuucuaccucaccaacgacgugagcuuccuggcccacauccaguggauggugauguucacgccccugguccccuucuggaucaccaucgcguacaucaucugcaucuccaccaagcacuucuacugguucuucagcaacuaccucaagcggcgcgugguguucaacggggucuccuucagcaccuucgaggaggccgcccugugcacguuccugcucaacaaggagauguaccugaagcugcgguccgacgugcuccugccgcugacccaguacaaccgcuaccucgcccuguacaacaaguacaaguacuucagcggcgccauggacaccaccuccuaccgggaggcggccugcugccaccuggccaaggcccucaacgacuucagcaacuccggcagcgacgugcuguaccagccgccccagacguccaucaccagcgcgguccugcagugaggacuaguuauaagacugacuagcccgaugggccucccaacgggcccuccuccccuccuugcaccgagauuaauaaaaaaaaaaaaaaaaaaaaaaaaaaaaaaaaaaaaaaaaaaaaaaaaaaaaaaaaaaaaaaaaugcaucccccccccccccccccccccccccccccccaaaggcucuuuucagagccaccagaauu

SEQ ID NO: 22189 - RNA, 1723 nt, Artificial Sequence
  SARS-CoV-2__MT385450.1__non-structural protein 4 (NSP4) mRNA gc
aggagaaagcuuaccaugaagaucgugaacaacuggcugaagcagcucaucaaggucacccugguguuccuguucguggccgccaucuucuaccucaucacccccguccacgugaugagcaagcacacggacuucuccagcgagaucaucggcuacaaggcgaucgacgggggcgugacccgcgacaucgccuccaccgacacgugcuucgccaacaagcacgccgacuucgacaccugguucagccagcggggcggcuccuacaccaacgacaaggccugcccccugaucgcggccgucaucacccgcgaggugggguucgugguccccggccugcccggcaccauccuccggacgaccaacggggacuuccugcacuuccugccccgcguguucagcgccgugggcaacaucugcuacaccccguccaagcucaucgaguacaccgacuucgccacgagcgcgugcguccuggccgccgagugcaccaucuucaaggacgccuccgggaaccccgugcccuacugcuacgacaccaacgugcuggagggcagcgucgccuacgagucccuccggcccgacacccgcuacgugcugauggacgggagcaucauccaguucccgaacacguaccuggagggcuccgugcgggucgugaccaccuucgacagcgaguacugccgccacgggaccugcgagcgguccgaggcgggggugugcgucagcacguccggccgcugggugcucaacaacgacuacuaccggagccugcccgggguguucugcggcgucgacgccgugaaccugcucaccaacauguucacgccccugauccagcccaucggcgcccuggacaucuccgccagcaucgucgccgggggcaucguggcgaucguggugaccugccucgccuacuacuucaugcgcuuccggcgcgccuucggggaguacagccacgucguggccuucaacacccugcuguuccucauguccuucaccguccugugccugaccccgguguacagcuuccuccccggcguguacuccgucaucuaccuguaccugaccuucuaccucacgaacgacgugagcuuccuggcccacauccaguggauggugauguucacgccccugguccccuucuggaucaccaucgcguacaucaucugcaucuccaccaagcacuucuacugguucuucagcaacuaccucaagcggcgcgugguguucaacggggucuccuucagcaccuucgaggaggccgcccugugcaccuuccugcucaacaaggagauguaccugaagcugcgguccgacgugcuccugccgcugacccaguacaaccgcuaccucgcccuguacaacaaguacaaguacuucagcggcgccauggacaccacguccuaccgggaggcggccugcugccaccuggccaaggcccucaacgacuucagcaacuccggcagcgacgugcuguaccagccgccccagaccuccaucaccagcgcgguccugcagugaggacuaguuauaagacugacuagcccgaugggccucccaacgggcccuccuccccuccuugcaccgagauuaauaaaaaaaaaaaaaaaaaaaaaaaaaaaaaaaaaaaaaaaaaaaaaaaaaaaaaaaaaaaaaaaaugcaucccccccccccccccccccccccccccccccaaaggcucuuuucagagccaccagaauu

SEQ ID NO: 22190 - RNA, 1723 nt, Artificial Sequence
  SARS-CoV-2__MT252823.1__non-structural protein 4 (NSP4) mRNA gc
aggagaaagcuuaccaugaagaucgugaacaacuggcugaagcagcucaucaaggucacccugguguuccuguucguggccgccaucuucuaccucaucacccccguccacgugaugagcaagcacacggacuucuccagcgagaucaucggcuacaaggcgaucgacgggggcgugacccgcgacaucgccuccaccgacacgugcuucgccaacaagcacgccgacuucgacaccugguucagccagcggggcggcuccuacaccaacgacaaggccugcccccugaucgcggccgucaucacccgcgaggugggguucgugguccccggccugcccggcaccauccuccggacgaccaacggggacuuccugcacuuccugccccgcguguucagcgccgugggcaacaucugcuacaccccguccaagcucaucgaguacaccgacuucgccacgagcgcgugcguccuggccgccgagugcaccaucuucaaggacgccuccgggaagcccgugcccuacugcuacgacaccaacgugcuggagggcagcgucgccuacgagucccuccggcccgacacccgcuacgugcugauggacgggagcaucauccaguucccgaacacguaccuggagggcuccgugcgggucgugaccaccuucgacagcgaguacugccgccacgggaccugcgagcgguccgaggcgggggugugcgucagcacguccggccgcugggugcucaacaacgacuacuaccggagccugcccgggguguucugcggcgucgacgccgugaaccugcucaccaacauguucacgccccugauccagcccaucggcgcccuggacaucuccgccagcaucgucgccgggggcaucguggcgaucguggugaccugccucgccuacuacuucaugcgcuuccggcgcgccuucggggaguacagccacgucguggccuucaacacccugcuguuccucauguccuucaccguccugugccugaccccgguguacagcuuccuccccggcguguacuccgucaucuaccuguaccugaccuucuaccucacgaacgacgugagcuuccuggcccacauccaguggauggugauguucacgccccugguccccuucuggaucaccaucgcguacaucauccucaucuccaccaagcacuucuacugguucuucagcaacuaccugaagcggcgcgugguguucaacggggucuccuucagcaccuucgaggaggccgcccugugcaccuuccuccugaacaaggagauguaccugaagcuccgguccgacgugcugcugccgcucacccaguacaaccgcuaccuggcccuguacaacaaguacaaguacuucagcggcgccauggacaccacguccuaccgggaggcggccugcugccaccucgccaaggcccugaacgacuucagcaacuccggcagcgacgugcuguaccagccgccccagaccuccaucaccagcgcgguccugcagugaggacuaguuauaagacugacuagcccgaugggccucccaacgggcccuccuccccuccuugcaccgagauuaauaaaaaaaaaaaaaaaaaaaaaaaaaaaaaaaaaaaaaaaaaaaaaaaaaaaaaaaaaaaaaaaaugcaucccccccccccccccccccccccccccccccaaaggcucuuuucagagccaccagaauu

SEQ ID NO: 22191 - RNA, 1723 nt, Artificial Sequence
  SARS-CoV-2__MT358730.1__non-structural protein 4 (NSP4) mRNA gc
aggagaaagcuuaccaugaagaucgugaacaacuggcugaagcagcucaucaaggucacccugguguuccuguucguggccgccaucuucuaccucaucacccccguccacgugaugagcaagcacacggacuucuccagcgagaucaucggcuacaaggcgaucgacgggggcgugacccgcgacaucgccuccaccgacacgugcuucgccaacaagcacgccgacuucgacaccugguucagccagcgcgggggcuccuacaccaacgacaaggccugcccccugaucgcggccgucaucacccgggaggugggguucgugguccccggccugcccggcaccacgaagcggaccaccaacggggacuuccuccacuuccugccccgcguguucagcgccgugggcaacaucugcuacaccccguccaagcugaucgaguacacggacuucgccaccagcgcgugcguccucgccgccgagugcaccaucuucaaggacgccuccgggaagcccgugcccuacugcuacgacaccaacgugcuggagggcagcgucgccuacgagucccugcggcccgacacgcgcuacgugcucauggacgggagcaucauccaguucccgaacaccuaccuggagggcuccgugcgggucgugaccaccuucgacagcgaguacugccgccacggcacgugcgagcgguccgaggcgggggugugcgucagcaccuccggccgcugggugcugaacaacgacuacuaccggagccuccccgggguguucugcggcgucgacgccgugaaccugcugaccaacauguucaccccgcucauccagcccaucggcgcccuggacaucuccgccagcaucgucgccgggggcaucguggcgaucguggucacgugccuggccuacuacuucaugcgcuuccggcgcgccuucggggaguacagccacgugguggccuucaacacccuccuguuccugauguccuucaccguccucugccugacccccguguacagcuuccugcccggcguguacuccgucaucuaccucuaccugacguucuaccugaccaacgacgugagcuuccucgcccacauccaguggauggugauguucacgccccugguccccuucuggaucaccaucgcguacaucaucugcaucuccaccaagcacuucuacugguucuucagcaacuaccugaagcggcgcgugguguucaacggggucuccuucagcaccuucgaggaggccgcccucugcaccuuccugcugaacaaggagauguaccucaagcugcgguccgacgugcugcucccgcugacccaguacaaccgcuaccuggcccucuacaacaaguacaaguacuucagcggcgccauggacacgaccuccuaccgggaggcggccugcugccaccuggccaaggcccugaacgacuucagcaacuccggcagcgacgugcucuaccagccgccccagaccuccaucaccagcgcgguccugcagugaggacuaguuauaagacugacuagcccgaugggccucccaacgggcccuccuccccuccuugcaccgagauuaauaaaaaaaaaaaaaaaaaaaaaaaaaaaaaaaaaaaaaaaaaaaaaaaaaaaaaaaaaaaaaaaaugcaucccccccccccccccccccccccccccccccaaaggcucuuuucagagccaccagaauu

SEQ ID NO: 22192 - RNA, 1723 nt, Artificial Sequence
  SARS-CoV-2__MT345830.1__non-structural protein 4 (NSP4) mRNA gc
aggagaaagcuuaccaugaagaucgugaacaacuggcugaagcagcucaucaaggucacccugguguuccuguucguggccgccaucuucuaccucaucacccccguccacgugaugagcaagcacacggacuucuccagcgagaucaucggcuacaaggcgaucgacgggggcgugacccgcgacaucgccuccaccgacacgugcuucgccaacaagcacgccgacuucgacaccugguucagccagcggggcggcuccuacaccaacgacaaggccugcccccugaucgcggccgucaucacccgcgaggugggguucgugguccccggccugcccggcaccauccuccggacgaccaacggggacuuccugcacuuccugccccgcguguucagcgccgugggcaacaucugcuacaccccguccaagcucaucgaguacaccgacuucgccacgagcgcgugcguccuggccgccgagugcaccaucuucaaggacgccuccgggaagcccgugcccuacugcuacgacaccaacgugcuggagggcagcgucgccuacgagucccuccggcccgacacccgcuacgugcugauggacgggagcaucauccaguucccgaacacguaccuggagggcuccgugcgggucgugaccaccuucgacagcgaguacugccgccacgggaccugcgagcgguccgaggcgggggugugcgucagcacguccggccgcugggugcucaacaacgacuacuaccggagccugcccgggguguucugcggcgucgacgccgugaaccugcucaccaacauguucacgccccugauccagcccaucggcgcccuggacaucuccgccagcaucgucgccgggggcaucguggcgaucguggugaccugccucgccuacuacuucaugcgcuuccggcgcgccuucggggaguacagccacgucguggccuucaacacccugcuguuccucauguccuucaccguccugugccugaccccgguguacagcuuccuccccggcguguacuccgucaucuaccuguaccugaccuucuaccucacgaacgacgugagcuuccuggcccacauccaguggauggugauguucacgccccugguccccuucuggaucaccaucgcguacaucaucugcaucuccaccaagcacuucuacugguucuucagcaacuaccucaagcggcgcgugguguucaacggggucuccuucagcaccuucgaggaggccgcccugugcaccuuccugcucaacaaggagauguaccugaagcugcgguccgacgugcuccugccgcugacccaguacaaccgcuaccucgcccuguacaacaaguacaaguacuucagcggcgccauggacaccacguccuaccgggagguggcgugcugccaccuggccaaggcccucaacgacuucagcaacuccggcagcgacguccuguaccagccgccccagaccuccaucaccagcgccgugcugcagugaggacuaguuauaagacugacuagcccgaugggccucccaacgggcccuccuccccuccuugcaccgagauuaauaaaaaaaaaaaaaaaaaaaaaaaaaaaaaaaaaaaaaaaaaaaaaaaaaaaaaaaaaaaaaaaaugcaucccccccccccccccccccccccccccccccaaaggcucuuuucagagccaccagaauu

SEQ ID NO: 22193 - RNA, 1723 nt, Artificial Sequence
  SARS-CoV-2__MT345869.1__non-structural protein 4 (NSP4) mRNA gc
aggagaaagcuuaccaugaagaucgugaacaacuggcugaagcagcucaucaaggucacccugguguuccuguucguggccgccaucuucuaccucaucacccccguccacgugaugagcaagcacacggacuucuccagcgagaucaucggcuacaaggcgaucgacgggggcgugacccgcgacaucgccuccaccgacacgugcuucgccaacaagcacgccgacuucgacaccugguucagccagcggggcggcuccuacaccaacgacaaggccugcccccugaucgcggccgucaucacccgcgaggugggguucgugguccccggccugcccggcaccauccuccggacgaccaacggggacuuccugcacuuccugccccgcguguucagcgccgugggcaacaucugcuacaccccguccaagcucaucgaguacaccgacuucgccacgagcgcgugcguccuggccgccgagugcaccaucuucaaggacgccuccgggaagcccgugcccuacugcuacgacaccaacgugcuggagggcagcgucgccuacgagucccuccggcccgacacccgcuacgugcugauggacgggagcaucauccaguucccgaacacguaccuggagggcuccgugcgggucgugaccaccuucgacagcgaguacugccgccacgggaccugcgagcgguccgaggcgggggugugcgucagcacguccggccgcugggugcucaacaacgacuacuaccggagccugcccgggguguucugcggcgucgacgccgugaaccugcucaccaacauguucacgccccugauccagcccaucggcgcccuggacaucuccgccagcaucgucgccgggggcaucguggcgaucguggugaccugccucgccuacuacuucaugcgcuuccggcgcgccuucggggaguacagccacgucguggccuucaacacccugcuguuccucauguccuucaccguccugugccugaccccgguguacagcuuccuccccggcguguacuccgucaucuaccuguaccugaccuucuaccucacgaacgacgugagcuuccuggcccacauccaguggauggugauguucacgccccugguccccuucuggaucaccaucgcguacaucaucugcaucuccaccaagcacuucuacugguucuucagcaacuaccucaagcggcgcgugguguucaacggggucuccuucagcaccuucgaggaggccgcccugugcaccuuccugcucaacaaggagauguaccugaagcugcgguccgacgugcuccugccgcugacccaguacaaccgcuaccucgcccuguacaacaaguacaaguacuucagcggcgccauggacaccacguccuaccgggaggcggccugcugccaccuggccaaggcccucaacgacuucagcaacgcgggcuccgacgugcuguaccagccgccccagaccagcaucaccuccgccguccugcagugaggacuaguuauaagacugacuagcccgaugggccucccaacgggcccuccuccccuccuugcaccgagauuaauaaaaaaaaaaaaaaaaaaaaaaaaaaaaaaaaaaaaaaaaaaaaaaaaaaaaaaaaaaaaaaaaugcaucccccccccccccccccccccccccccccccaaaggcucuuuucagagccaccagaauu

SEQ ID NO: 22194 - RNA, 1723 nt, Artificial Sequence
  SARS-CoV-2__MT326052.1__non-structural protein 4 (NSP4) mRNA gc
aggagaaagcuuaccaugaagaucgugaacaacuggcugaagcagcucaucaaggucacccugguguuccuguucguggccgccaucuucuaccucaucacccccguccacgugaugagcaagcacacggacuucuccagcgagaucaucggcuacaaggcgaucgacgggggcgugacccgcgacaucgccuccaccgacacgugcuucgccaacaagcacgccgacuucgacaccugguucagccagcggggcggcuccuacaccaacgacaaggccugcccccugaucgcggccgucaucacccgcgaggugggguucgugguccccggccugcccggcaccauccuccggacgaccaacggggacuuccugcacuuccugccccgcguguucagcgccgugggcaacaucugcuacaccccguccaagcucaucgaguacaccgacuucgccacgagcgcgugcguccuggccgccgagugcaccaucuucaaggacgccuccgggaagcccgugcccuacugcuacgacaccaacgugcuggagggcagcgucgccuacgagucccuccggcccgacacccgcuacgugcugauggacgggagcaucauccaguucccgaacacguaccuggagggcuccgugcgggucgugaccaccuucgacagcgaguacugccgccacgggaccugcgagcgguccgaggcgggggugugcgucagcacguccggccgcugggugcucaacaacgacuacuaccggagccugcccgggguguucugcggcgucgacgccgugaaccugcucaccaacauguucacgccccugauccagcccaucggcgcccuggacaucuccgccagcaucgucgccgggggcaucguggcgaucguggugaccugccucgccuacuacuucaugcgcuuccggcgcgccuucggggaguacagccacgucguggccuucaacacccugcuguuccucauguccuucaccguccugugccugaccccgguguacagcuuccuccccggcguguacuccgucaucuaccuguaccugaccuucuaccucacgaacgacgugagcuuccuggcccacauccaguggauggugauguucacgccccugguccccuucuggaucaccaucgcguacaucaucugcaucuccaccaagcacuucuacugguucuucagcaacuaccucaagcggcgcgugguguucaacggggucuccuucagcaccuucgaggaggccgcccugugcaccuuccugcucaacaaggagauguaccugaagcugcgguccgacgugcuccugccgcugacccaguacaaccgcuaccucgcccuguacaacaaguacaaguacuucagcggcgccauggacaccacguccuaccgggaggcggccugcugccaccuggccaaggcccucaacgacuucagcaacuccggcuucgacgugcuguaccagccgccccagaccagcaucaccuccgcgguccugcagugaggacuaguuauaagacugacuagcccgaugggccucccaacgggcccuccuccccuccuugcaccgagauuaauaaaaaaaaaaaaaaaaaaaaaaaaaaaaaaaaaaaaaaaaaaaaaaaaaaaaaaaaaaaaaaaaugcaucccccccccccccccccccccccccccccccaaaggcucuuuucagagccaccagaauu

SEQ ID NO: 22195 - RNA, 1723 nt, Artificial Sequence
  SARS-CoV-2__MT293186.1__non-structural protein 4 (NSP4) mRNA gc
aggagaaagcuuaccaugaagaucgugaacaacuggcugaagcagcucaucaaggucacccugguguuccuguucguggccgccaucuucuaccucaucacccccguccacgugaugagcaagcacacggacuucuccagcgagaucaucggcuacaaggcgaucgacgggggcgugacccgcgacaucgccuccaccgacacgugcuucgccaacaagcacgccgacuucgacaccugguucagccagcggggcggcuccuacaccaacgacaaggccugcccccugaucgcggccgucaucacccgcgaggugggguucgugguccccggccugcccggcaccauccuccggacgaccaacggggacuuccugcacuuccugccccgcguguucagcgccgugggcaacaucugcuacaccccguccaagcucaucgaguacaccgacuucgccacgagcgcgugcguccuggccgccgagugcaccaucuucaaggacgccuccgggaagcccgugcccuacugcuacgacaccaacgugcuggagggcagcgucgccuacgagucccuccggcccgacacccgcuacgugcugauggacgggagcaucauccaguucccgaacacguaccuggagggcuccgugcgggucgugaccaccuucgacagcgaguacugccgccacgggaccugcgagcgguccgaggcgggggugugcgucagcacguccggccgcugggugcucaacaacgacuacuaccggagccugcccgggguguucugcggcgucgacgccgugaaccugcucaccaacauguucacgccccugauccagcccaucggcgcccuggacaucuccgccagcaucgucgccgggggcaucguggcgaucguggugaccugccucgccuacuacuucaugcgcuuccggcgcgccuucggggaguacagccacgucguggccuucaacacccugcuguuccucauguccuucaccguccugugccugaccccgguguacagcuuccuccccggcguguacuccgucaucuaccuguaccugaccuucuaccucacgaacgacgugagcuucuucgcccacauccaguggauggugauguucacgccccugguccccuucuggaucaccaucgcguacaucaucugcaucuccaccaagcacuucuacugguucuucagcaacuaccugaagcggcgcgugguguucaacggggucuccuucagcaccuucgaggaggccgcccucugcaccuuccugcugaacaaggagauguaccucaagcugcgguccgacgugcugcucccgcugacccaguacaaccgcuaccuggcccucuacaacaaguacaaguacuucagcggcgccauggacaccacguccuaccgggaggcggccugcugccaccuggccaaggcccugaacgacuucagcaacuccggcagcgacgugcucuaccagccgccccagaccuccaucaccagcgcgguccugcagugaggacuaguuauaagacugacuagcccgaugggccucccaacgggcccuccuccccuccuugcaccgagauuaauaaaaaaaaaaaaaaaaaaaaaaaaaaaaaaaaaaaaaaaaaaaaaaaaaaaaaaaaaaaaaaaaugcaucccccccccccccccccccccccccccccccaaaggcucuuuucagagccaccagaauu

SEQ ID NO: 22196 - RNA, 1723 nt, Artificial Sequence
  SARS-CoV-2__MT262993.1__non-structural protein 4 (NSP4) mRNA gc
aggagaaagcuuaccaugaagaucgugaacaacuggcugaagcagcucaucaaggucacccugguguuccuguucguggccgccaucuucuaccucaucacccccguccacgugaugagcaagcacacggacuucuccagcgagaucaucggcuacaaggcgaucgacgggggcgugacccgcgacaucgccuccaccgacacgugcuucgccaacaagcacgccgacuucgacaccugguucagccagcggggcggcuccuacaccaacgacaaggccugcccccugaucgcggccgucaucacccgcgaggugggguucgugguccccggccugcccggcaccauccuccggacgaccaacggggacuuccugcacuuccugccccgcguguucagcgccgugggcaacaucugcuacaccccguccaagcucaucgaguacaccgacuucgccacgagcgcgugcguccuggccgccgagugcaccaucuucaaggacgccuccgggaagcccgugcccuacugcuacgacaccaacgugcuggagggcagcgucgccuacgagucccuccggcccgacacccgcuacgugcugauggacgggagcaucauccaguucccgaacacguaccuggagggcuccgugcgggucgugaccaccuucgacagcgaguacugccgccacgggaccugcgagcgguccgaggcgggggugugcgucagcacguccggccgcugggugcucaacaacgacuacuaccggagccugcccgggguguucugcggcgucgacgccgugaaccugcucaccaacauguucacgccccugauccagcccaucggcgcccuggacaucuccgccagcaucgucgccgggggcaucguggcgaucguggugaccugccucgccuacuacuucaugcgcuuccggcgcgccuucggggaguacagccacgucguggccuucaacacccugcuguuccucauguccuucaccguccugugccugaccccgguguacagcuuccuccccggcguguacuccgucaucuaccuguaccugaccuucuaccucacgaacgacgugagcuuccuggcccacauccaguggauggugauguucacgccccugguccccuucuggaucaccaucgcguacaucaucugcaucuccaccaagcacagcaacuaccucaagcggcgcgugguguucaacggggucuccuucagcaccuucgaggaggccgcccugugcaccuuccugcucaacaaggagauguaccugaagcugcgguccgacgugcuccugccgcugacccaguacaaccgcuaccucgcccuguacaacaaguacaaguacuucagcggcgccauggacaccacguccuaccgggaggcggccugcugccaccuggccaaggcccucaacgacuucagcaacuccggcagcgacgugcuguaccagccgccccagaccuccaucaccagcgcgguccugcaguccggguuccgcaagugaggacuaguuauaagacugacuagcccgaugggccucccaacgggcccuccuccccuccuugcaccgagauuaauaaaaaaaaaaaaaaaaaaaaaaaaaaaaaaaaaaaaaaaaaaaaaaaaaaaaaaaaaaaaaaaaugcaucccccccccccccccccccccccccccccccaaaggcucuuuucagagccaccagaauu

SEQ ID NO: 22197 - RNA, 1723 nt, Artificial Sequence
  SARS-CoV-2__MT263074.1__non-structural protein 4 (NSP4) mRNA gc
aggagaaagcuuaccaugaagaucgugaacaacuggcugaagcagcucaucaaggucacccugguguuccuguucguggccgccaucuucuaccucaucacccccguccacgugaugagcaagcacacggacuucuccagcgagaucaucggcuacaaggcgaucgacgggggcgugacccgcgacaucgccuccaccgacacgugcuucgccaacaagcacgccgacuucgacaccugguucagccagcggggcggcuccuacaccaacgacaaggccugcccccugaucgcggccgucaucacccgcgaggugggguucgugguccccggccugcccggcaccauccuccggacgaccaacggggacuuccugcacuuccugccccgcguguucagcgccgugggcgacaucugcuacaccccguccaagcucaucgaguacaccgacuucgccacgagcgcgugcguccuggccgccgagugcaccaucuucaaggacgccuccgggaagcccgugcccuacugcuacgacaccaacgugcuggagggcagcgucgccuacgagucccuccggcccgacacccgcuacgugcugauggacgggagcaucauccaguucccgaacacguaccuggagggcuccgugcgggucgugaccaccuucgacagcgaguacugccgccacgggaccugcgagcgguccgaggcgggggugugcgucagcacguccggccgcugggugcucaacaacgacuacuaccggagccugcccgggguguucugcggcgucgacgccgugaaccugcucaccaacauguucacgccccugauccagcccaucggcgcccuggacaucuccgccagcaucgucgccgggggcaucguggcgaucguggugaccugccucgccuacuacuucaugcgcuuccggcgcgccuucggggaguacagccacgucguggccuucaacacccugcuguuccucauguccuucaccguccugugccugaccccgguguacagcuuccuccccggcguguacuccgucaucuaccuguaccugaccuucuaccucacgaacgacgugagcuuccuggcccacauccaguggauggugauguucacgccccugguccccuucuggaucaccaucgcguacaucaucugcaucuccaccaagcacuucuacugguucuucagcaacuaccucaagcggcgcgugguguucaacggggucuccuucagcaccuucgaggaggccgcccugugcaccuuccugcucaacaaggagauguaccugaagcugcgguccgacgugcuccugccgcugacccaguacaaccgcuaccucgcccuguacaacaaguacaaguacuucagcggcgccauggacaccacguccuaccgggaggcggccugcugccaccuggccaaggcccucaacgacuucagcaacuccggcagcgacgugcuguaccagccgccccagaccuccaucaccagcgcgguccugcagugaggacuaguuauaagacugacuagcccgaugggccucccaacgggcccuccuccccuccuugcaccgagauuaauaaaaaaaaaaaaaaaaaaaaaaaaaaaaaaaaaaaaaaaaaaaaaaaaaaaaaaaaaaaaaaaaugcaucccccccccccccccccccccccccccccccaaaggcucuuuucagagccaccagaauu

SEQ ID NO: 22198 - RNA, 1723 nt, Artificial Sequence
  SARS-CoV-2__MT263411.1__non-structural protein 4 (NSP4) mRNA gc
aggagaaagcuuaccaugaagaucgugaacaacuggcugaagcagcucaucaaggucacccugguguuccuguucguggccgccaucuucuaccucaucacccccguccacgugaugagcaagcacacggacuucuccagcgagaucaucggcuacaaggcgaucgacgggggcgugacccgcgacaucgccuccaccgacacgugcuucgccaacaagcacgccgacuucgacaccugguucagccagcggggcggcuccuacaccaacgacaaggccugcccccugaucgcggccgucaucacccgcgaggugggguucgugguccccggccugcccggcaccauccuccggacgaccaacggggacuuccugcacuuccugccccgcguguucagcgccgugggcaacaucugcuacaccccguccaagcucaucgaguacaccgacuucgccacgagcgcgugcguccuggccgccgagugcaccaucuucaaggacgccuccgggaagcccgugcccuacugcuacgacaccaacgugcuggagggcagcgucgccuacgagucccuccggcccgacacccgcuacgugcugauggacgggagcaucauccaguucccgaacacguaccuggagggcuccgugcgggucgugaccaccuucgacagcgaguacugccgccacgggaccugcgagcgguccgaggcgggggugugcgucagcacguccggccgcugggugcucaacaacgacuacuaccggagccugcccgggguguucugcggcgucgacgccgugaaccugcucaccaacauguucacgccccugauccagcccaucggcgcccuggacaucuccgccagcaucgucgccgggggcaucguggcgaucguggugaccugccucgccuacuacuucaugcgcuuccggcgcgccuucggggaguacagccacgucguggccuucaacacccugcuguuccucauguccuucaacguccugugccugaccccgguguacagcuuccuccccggcguguacuccgucaucuaccuguaccugaccuucuaccucaccaacgacgugagcuuccuggcccacauccaguggauggugauguucacgccccugguccccuucuggaucaccaucgcguacaucaucugcaucuccaccaagcacuucuacugguucuucagcaacuaccucaagcggcgcgugguguucaacggggucuccuucagcaccuucgaggaggccgcccugugcacguuccugcucaacaaggagauguaccugaagcugcgguccgacgugcuccugccgcugacccaguacaaccgcuaccucgcccuguacaacaaguacaaguacuucagcggcgccauggacaccaccuccuaccgggaggcggccugcugccaccuggccaaggcccucaacgacuucagcaacuccggcagcgacgugcuguaccagccgccccagacguccaucaccagcgcgguccugcagugaggacuaguuauaagacugacuagcccgaugggccucccaacgggcccuccuccccuccuugcaccgagauuaauaaaaaaaaaaaaaaaaaaaaaaaaaaaaaaaaaaaaaaaaaaaaaaaaaaaaaaaaaaaaaaaaugcaucccccccccccccccccccccccccccccccaaaggcucuuuucagagccaccagaauu

SEQ ID NO: 22199 - RNA, 1723 nt, Artificial Sequence
  SARS-CoV-2__MT240479.1__non-structural protein 4 (NSP4) mRNA gc
aggagaaagcuuaccaugaagaucgugaacaacuggcugaagcagcucaucaaggucacccugguguuccuguucguggccgccaucuucuaccucaucacccccguccacgugaugagcaagcacacggacuucuccagcgagaucaucggcuacaaggcgaucgacgggggcgugacccgcgacaucgccuccaccgacacgugcuucgccaacaagcacgccgacuucgacaccugguucagccagcggggcggcuccuacaccaacgacaaggccugcccgcugaucgcggccgucaucacccgcgaggugggguucgugguccccggccugcccggcaccauccuccggacgaccaacggggacuuccugcacuuccugccccgcguguucagcgccgugggcaacaucugcuacaccccguccaagcucaucgaguacaccgacuucgccacgagcgcgugcguccuggccgccgagugcaccaucuucaaggacgccuccgggaagcccgugcccuacugcuacgacaccaacgugcuggagggcagcgucgccuacgagucccuccggcccgacacccgcuacgugcugauggacgggagcaucauccaguuccugaacacguaccucgagggcuccgugcgggucgugaccaccuucgacagcgaguacugccgccacgggaccugcgagcgguccgaggcgggggugugcgucagcacguccggccgcugggugcugaacaacgacuacuaccggagccugccggggguguucugcggcgucgacgccgugaaccuccugaccaacauguucacgccccugauccagcccaucggcgcccucgacaucuccgccagcaucgucgccgggggcaucguggcgaucguggugaccugccuggccuacuacuucaugcgcuuccggcgcgccuucggggaguacagccacgucguggccuucaacacccuccuguuccugauguccuucaccguccugugccucacccccguguacagcuuccugccgggcguguacuccgucaucuaccuguaccucaccuucuaccugacgaacgacgugagcuuccuggcccacauccaguggauggugauguucacgccccucguccccuucuggaucaccaucgcguacaucaucugcaucuccaccaagcacuucuacugguucuucagcaacuaccugaagcggcgcgugguguucaacggggucuccuucagcaccuucgaggaggccgcccugugcaccuuccuccugaacaaggagauguaccugaagcuccgguccgacgugcugcugccccucacccaguacaaccgcuaccuggcccuguacaacaaguacaaguacuucagcggcgccauggacaccacguccuaccgggaggcggccugcugccaccucgccaaggcccugaacgacuucagcaacuccggcagcgacgugcuguaccagccgccccagaccuccaucaccagcgcgguccugcagugaggacuaguuauaagacugacuagcccgaugggccucccaacgggcccuccuccccuccuugcaccgagauuaauaaaaaaaaaaaaaaaaaaaaaaaaaaaaaaaaaaaaaaaaaaaaaaaaaaaaaaaaaaaaaaaaugcaucccccccccccccccccccccccccccccccaaaggcucuuuucagagccaccagaauu

SEQ ID NO: 22200 - RNA, 1099 nt, Artificial Sequence
  MERS-CoV/MERS-CoV-Jeddah-human-1__KF958702.1__non-structural protein 6 (NSP6) mRNA gc
aggagaaagcuuaccaugagcggcgugcgcaaggucaccuacgggaccgcccacuggcuguucgccacccucguguccaccuacgugaucauccugcaggcgaccaaguucacccuguggaacuaccucuucgagacgauccccacccagcuguucccgcuccuguucgucaccauggccuucgugaugcugcuggugaagcacaagcacaccuuccucacgcuguuccugcuccccgucgccaucugccugaccuacgccaacaucguguacgagcccaccacccccaucagcuccgcccugaucgcgguggccaacuggcucgccccgacgaacgccuacaugcggaccacccacaccgacaucggcgucuacaucagcaugucccuggugcuggugaucgucgugaagcgccucuacaaccccagccuguccaacuucgcgcuggcccucugcagcggggugauguggcuguacacguacuccaucggcgaggccagcucccccaucgccuaccuggucuucgugaccacccucaccagcgacuacacgaucaccguguucgucaccgugaaccuggccaaggugugcaccuacgcgaucuucgccuacagcccccagcugacgcucgucuucccggaggugaagaugauccugcugcucuacacgugccugggguucaugugcacgugcuacuucggcguguucucccugcucaaccugaagcugcgggcccccaugggcgucuacgacuucaagguguccacccaggaguuccgcuucaugaccgccaacaaccucaccgcgccccggaacagcugggaggccauggcccugaacuucaagcugaucgggaucggcgggacccccugcaucaaggucgccgccaugcagugaggacuaguuauaagacugacuagcccgaugggccucccaacgggcccuccuccccuccuugcaccgagauuaauaaaaaaaaaaaaaaaaaaaaaaaaaaaaaaaaaaaaaaaaaaaaaaaaaaaaaaaaaaaaaaaaugcaucccccccccccccccccccccccccccccccaaaggcucuuuucagagccaccagaauu

SEQ ID NO: 22201 - RNA, 1099 nt, Artificial Sequence; identical to SEQ ID NO: 22200
  MERS-CoV/Al-Hasa_4_2013__KF186564.1__non-structural protein 6 (NSP6) mRNA gc

SEQ ID NO: 22202 - RNA, 1099 nt, Artificial Sequence; identical to SEQ ID NO: 22200
  MERS-CoV/Riyadh_14_2013__KJ156934.1__non-structural protein 6 (NSP6) mRNA gc

SEQ ID NO: 22203 - RNA, 1099 nt, Artificial Sequence; identical to SEQ ID NO: 22200
  MERS-CoV/England 1__NC_038294.1__non-structural protein 6 (NSP6) mRNA gc

SEQ ID NO: 22204 - RNA, 1093 nt, Artificial Sequence
  SARS-CoV/Tor2__NC_004718.3__non-structural protein 6 (NSP6) mRNA gc
aggagaaagcuuaccaugggcaaguucaagaagaucgugaaggggacccaccacuggaugcugcucaccuuccugacgagccugcucauccugguccaguccacccaguggagccuguucuucuucguguacgagaacgccuuccuccccuucacccugggcaucauggccaucgcggccugcgccaugcugcucgugaagcacaagcacgccuuccugugccuguuccuccugccgucccuggccaccgucgcguacuucaacaugguguacaugcccgccagcugggugaugcgcaucaugacguggcucgagcuggccgacaccucccugagcggguaccggcucaaggacugcgucauguacgccuccgcgcuggugcugcucauccugaugaccgcccgcaccguguacgacgacgccgcccggcgcgucuggacgcugaugaacgugaucacccucguguacaaggucuacuacggcaacgcccuggaccaggcgaucagcaugugggcccuggugaucuccgugaccagcaacuacuccggggucgugaccacgaucauguuccucgcccgggccaucguguucgucugcguggaguacuacccccugcuguucaucaccggcaacacccuccagugcaucaugcugguguacugcuuccugggcuacugcugcugcugcuacuucggccucuucugccugcugaaccgcuacuuccggcucacccugggggucuacgacuaccuggugagcacgcaggaguuccgcuacaugaacucccaggggcuccugcccccgaaguccagcaucgacgccuucaagcugaacaucaagcuccugggcaucgggggcaagcccugcaucaagguggcgaccguccagugaggacuaguuauaagacugacuagcccgaugggccucccaacgggcccuccuccccuccuugcaccgagauuaauaaaaaaaaaaaaaaaaaaaaaaaaaaaaaaaaaaaaaaaaaaaaaaaaaaaaaaaaaaaaaaaaugcaucccccccccccccccccccccccccccccccaaaggcucuuuucagagccaccagaauu

SEQ ID NO: 22205 - RNA, 1084 nt, Artificial Sequence
  HCoV/OC43__NC_006213.1__non-structural protein 6 (NSP6) mRNA gc
aggagaaagcuuaccaugagcaagcgcacccggcuguucaagggcaccgugugcuggaucauggccuccacguuccucuucagcugcaucaucaccgccuucgucaaguggaccauguucauguacgugaccacgaacauguucuccaucaccuucugcgcgcugugcgugaucagccuggccaugcuccuggucaagcacaagcaccuguaccucaccauguacaucacccccgugcuguucacgcugcucuacaacaacuaccugguggucuacaagcacaccuuccgcggguacguguacgccuggcuguccuacuacgugccgagcgucgaguacaccuacaccgacgaggugaucuacggcaugcuccugcugguggggauggucuucgugacgcuccgguccaucaaccacgaccuguucagcuucaucauguucgugggccgccugaucuccgucuucagccucugguacaagggguccaaccuggaggaggagauccugcucaugcuggccagccuguucggcaccuacaccuggaccacggugcucuccauggccguggcgaaggucaucgccaaguggguggccgugaacguccuguacuucaccgacaucccccagaucaagaucgugcugcucugcuaccuguucaucggcuacaucaucagcugcuacugggggcuguucucccucaugaacagccuguuccggaugccccugggcguguacaacuacaagaucuccguccaggagcuccgcuacaugaacgccaacgggcugcggcccccgaagaacagcuucgaggcgcugaugcucaacuucaagcugcugggcaucgggggcgugcccaucaucgaggucucccaguuccagugaggacuaguuauaagacugacuagcccgaugggccucccaacgggcccuccuccccuccuugcaccgagauuaauaaaaaaaaaaaaaaaaaaaaaaaaaaaaaaaaaaaaaaaaaaaaaaaaaaaaaaaaaaaaaaaaugcaucccccccccccccccccccccccccccccccaaaggcucuuuucagagccaccagaauu

SEQ ID NO: 22206 - RNA, 1084 nt, Artificial Sequence
  HCoV/HKU1__NC_006577.2__non-structural protein 6 (NSP6) mRNA gc
aggagaaagcuuaccaugagcaagaccaagcgcuucaucaaggagaccaucuacuggauccugaucuccacguuccucuucagcugcaucaucuccgccuucgugaaguggaccaucuucauguacaucaacacccacaugaucggcgucacccugugcgugcugugcuucgugagcuucaugaugcuccuggucaagcacaagcacuucuaccugacgauguacaucauccccgugcucugcacccuguucuacgugaacuaccuggucguguacaaggagggguuccggggcuucaccuacguguggcucuccuacuucgucccggccgugaacuucaccuacguguacgaggucuucuacgggugcauccugugcguguucgcgaucuucaucacgaugcacagcaucaaccacgacaucuucucccugauguuccucgugggccgcaucgucacccugaucagcaugugguacuucggguccaaccuggaggaggacgugcuccuguucaucaccgccuuccugggcaccuacacguggaccaccauccucagccuggccaucgccaagaucguggccaacuggcuguccgucaacaucuucuacuucaccgacgugcccuacaucaagcucauccugcugagcuaccucuucaucggcuacauccuguccugcuacuggggguucuucagccugcucaacuccguguuccggaugcccaugggcgucuacaacuacaagaucagcgugcaggagcugcgcuacaugaacgcgaacgggcugcggcccccgcgcaacuccuucgaggccauccuccugaaccugaagcuccugggcaucgggggcgugcccgucaucgaggugagccagauccagugaggacuaguuauaagacugacuagcccgaugggccucccaacgggcccuccuccccuccuugcaccgagauuaauaaaaaaaaaaaaaaaaaaaaaaaaaaaaaaaaaaaaaaaaaaaaaaaaaaaaaaaaaaaaaaaaugcaucccccccccccccccccccccccccccccccaaaggcucuuuucagagccaccagaauu

SEQ ID NO: 22207 - RNA, 1060 nt, Artificial Sequence
  HCoV/229E/BN1/GER/2015__KU291448.1__non-structural protein 6 (NSP6) mRNA gc
aggagaaagcuuaccaugagcggcaagaccaccuccauguucaagagcaucucccuguucgccggguucuucgugauguucugggccgagcuguucgucuacacgaccaccaucugggugaaccccggcuuccucaccccguucaugauccugcucguggcgcugagccugugccucacguucgucgugaagcacaaggugcuguuccugcaggucuuccuccugcccuccaucaucguggccgccauccagaacugcgccugggacuaccacaucaccaaggugcuggccgagaaguucgacuacaacgucagcgugaugcagauggacauccagggguucgugaacaucuucaucugccucuucgucgcgcugcugcacaccuggcgcuucgccaaggagcggugcacccacuggugcacguaccucuucucccugaucgccgugcuguacaccgcccucuacagcuacgacuacgugucccugcuggucaugcuccugugcgcgaucagcaacgagugguacaucggcgccaucaucuuccgcaucugccgguucgggguggccuuccugcccguggaguacgucuccuacuucgacggcgugaagaccgugcuccuguucuacaugcugcucggcuucgucagcugcauguacuacgggcugcuguacuggaucaaccgcuucugcaagugcacccucggcguguacgacuucugcgugucccccgccgaguucaaguacauggucgccaacgggcugaacgcgccgaacggccccuucgacgcccuguuccucagcuucaagcugauggggaucggcggcccccggacgaucaagguguccaccguccagugaggacuaguuauaagacugacuagcccgaugggccucccaacgggcccuccuccccuccuugcaccgagauuaauaaaaaaaaaaaaaaaaaaaaaaaaaaaaaaaaaaaaaaaaaaaaaaaaaaaaaaaaaaaaaaaaugcaucccccccccccccccccccccccccccccccaaaggcucuuuucagagccaccagaauu

SEQ ID NO: 22208 - RNA, 1060 nt, Artificial Sequence
  HCoV/NL63/RPTEC/2004__JX504050.1__non-structural protein 6 (NSP6) mRNA gc
aggagaaagcuuaccaugagcggcaaggugaucuucgggcugaagaccauguuccucuucuccgucuucuucaccauguucugggccgagcuguucaucuacacgaacaccaucuggaucaaccccgugauccugaccccgaucuucugccuccugcuguuccucagccuggugcugaccauguuccucaagcacaaguuccuguuccugcaggucuuccuccugcccacggugaucgccaccgcgcuguacaacugcgugcucgacuacuacaucgucaaguuccuggccgaccacuucaacuacaacguguccgugcugcagauggacguccagggccucgugaacgugcuggucugccuguucgugguguuccuccacaccuggcgcuucagcaaggagcgguucacccacugguucacguacgucugcucccugaucgccguggccuacaccuacuucuacagcggggacuuccugucccuccuggugauguuccugugcgccaucagcuccgacugguacaucggcgcgaucgucuuccgccucagccggcugaucguguucuucucccccgagagcguguucuccgucuucggggacgugaagcugacccucguggucuaccugaucugcggcuaccuggugugcaccuacuggggcauccucuacugguucaaccgcuucuucaagugcacgaugggggucuacgacuucaaggugagcgccgccgaguucaaguacaugguggccaacggccugcacgcgccccacgggccguucgacgcccuguggcucuccuucaagcugcugggcaucgggggcgaccggugcaucaagaucagcaccguccagugaggacuaguuauaagacugacuagcccgaugggccucccaacgggcccuccuccccuccuugcaccgagauuaauaaaaaaaaaaaaaaaaaaaaaaaaaaaaaaaaaaaaaaaaaaaaaaaaaaaaaaaaaaaaaaaaugcaucccccccccccccccccccccccccccccccaaaggcucuuuucagagccaccagaauu

SEQ ID NO: 22209 - RNA, 1093 nt, Artificial Sequence
  Bat SARS-like CoV/WIV1__KF367457.1__non-structural protein 6 (NSP6) mRNA gc
aggagaaagcuuaccaugggcaaguucaagaagaucgugaaggggacccaccacuggaugcugcucaccuuccugacgagccugcucauccugguccaguccacccaguggagccuguucuucuucguguacgagaacgccuuccuccccuucacccugggcaucauggccaucgcggccugcgccaugcugcucgugaagcacaagcacgccuuccugugccuguuccuccugccgucccuggccaccgucgcguacuucaacaugguguacaugcccgccagcugggugaugcgcaucaugacgugguucgagcucgccgacaccucccugagcggguaccggcugaaggacugcgucauguacgccuccgcgcucgugcugcugauccucaugaccgcccgcaccguguacgacgacgccgcccggcgcgucuggacgcugaugaacgugaucacccugguguacaaggucuacuacggcaacgcccucgaccaggcgaucagcaugugggcccuggugaucuccgugaccagcaacuacuccggggucgugaccacgaucauguuccuggcccgggccaucguguucgucugcguggaguacuacccccuccuguucaucaccggcaacacccugcagugcaucaugcucguguacugcuuccugggcuacugcugcugcugcuacuucgggcuguucugccuccugaaccgcuacuuccggcugacccucggcgucuacgacuaccuggugagcacgcaggaguuccgcuacaugaacucccaggggcugcucccgcccaagagcuccaucgacgccuucaagcugaacaucaagcugcucggcaucgggggcaagcccugcaucaagguggcgaccguccagugaggacuaguuauaagacugacuagcccgaugggccucccaacgggcccuccuccccuccuugcaccgagauuaauaaaaaaaaaaaaaaaaaaaaaaaaaaaaaaaaaaaaaaaaaaaaaaaaaaaaaaaaaaaaaaaaugcaucccccccccccccccccccccccccccccccaaaggcucuuuucagagccaccagaauu

SEQ ID NO: 22210 - RNA, 1093 nt, Artificial Sequence
  BatCoV/HKU9-1 BF_005I__NC_009021.1__non-structural protein 6 (NSP6) mRNA gc
aggagaaagcuuaccaugggcaaguuccagagcauguuccgcuggacccugcagugguucgccaucaucuucgugcucaccauccugauccugcuccagcuggcccaguggacguucgucggggcgcugcccuucacccuccugcugccccucaucggcuucguggccgugugcgucggguucgugucccugcugaucaagcacaagcacaccuaccucaccguguaccugcugcccgucgccauggugacggccuacuacaacuuccaguacacccccgagggcgugcagggguaccuccugagccuguacaacuacgucaaccccggccggaucgacgugaucggcaccgaccuccugaccaugcugaucaucuccguggccugcacgcuccugagcguccgcauggugcggaccgacgcguacucccgcaucugguacgugugcaccgccgucggguggcuguacaacugcuggaccggcagcgccgacacgguggccaucuccuaccucaccuucauggugagcgucuucaccaacuacaccgggguggcgugcgccucccuguacgccgcccaguucaugguguggguccugaaguuccucgacccgacgauccugcugcucuacggccgguuccgcugcgugcuggugugcuaccugcucgucggguaccugugcacgugcuacuucggcguguucaaccugaucaaccgccucuuccggugcacccugggcaacuacgaguacgucgugagcucccaggagcugcgguacaugaacagccacgggcuccugccgcccaccaacuccuggcaggcccugaugcucaacaucaagcuggcgggcaucgggggcauccccaucuaccgcgugagcaccauccagugaggacuaguuauaagacugacuagcccgaugggccucccaacgggcccuccuccccuccuugcaccgagauuaauaaaaaaaaaaaaaaaaaaaaaaaaaaaaaaaaaaaaaaaaaaaaaaaaaaaaaaaaaaaaaaaaugcaucccccccccccccccccccccccccccccccaaaggcucuuuucagagccaccagaauu

SEQ ID NO: 22211 - RNA, 1063 nt, Artificial Sequence
  PEDV/NPL-PEDv/2013/P10__KJ778616.1__non-structural protein 6 (NSP6) mRNA gc
aggagaaagcuuaccaugagcggcuacgugucccgcgccugccggaacguccugcucguggggagcuuccugaccuucuucugguccgagcuggugagcuacaccaaguucuucugggucaaccccggcuacgugacgccgauguucgccugccucucccugcugagcucccuccugauguucacccugaagcacaagacccucuucuuccagguguuccugauccccgcgcugaucgucaccagcugcaucaaccucgccuucgacguggagguguacaacuaccuggccgagcacuucgacuaccacgucucccugaugggguucaacgcccagggccucgugaacaucuucgugugcuucgucgugacgauccugcacgggaccuacaccuggcgcuucuucaacacccccgugagcuccgucacguacgugguggcccugcucaccgcggccuacaacuacuucuacgccagcgacauccuguccugcgccaugacccuguucgcgagcgucaccggcaacugguucgugggcgccgugugcuacaaggccgccgucuacauggcccuccgguuccccacguucguggcgaucuucggggacaucaaguccgugauguucugcuaccugguccugggcuacuucacgugcugcuucuacgggauccucuacugguucaaccgcuucuucaaggugagcgucggcguguacgacuacaccguguccgccgccgaguucaaguacauggucgccaacgggcugcgggccccgaccggcacccuggacagccuccugcuguccgcgaagcucaucggcaucgggggcgagcgcaacaucaagaucagcagcgugcagugaggacuaguuauaagacugacuagcccgaugggccucccaacgggcccuccuccccuccuugcaccgagauuaauaaaaaaaaaaaaaaaaaaaaaaaaaaaaaaaaaaaaaaaaaaaaaaaaaaaaaaaaaaaaaaaaugcaucccccccccccccccccccccccccccccccaaaggcucuuuucagagccaccagaauu

SEQ ID NO: 22212 - RNA, 1084 nt, Artificial Sequence
  MHV/A59__NC_048217.1__non-structural protein 6 (NSP6) mRNA gc
aggagaaagcuuaccaugagcaagcgcacccgggugaucaaggggaccugcugcuggauccuggccuccacguuccucuucugcagcaucaucuccgccuucgucaaguggaccauguucauguacgugaccacccacaugcugggcgugacgcugugcgcgcucugcuucgucagcuucgccaugcugcugaucaagcacaagcaccucuaccugaccauguacaucaugcccgugcugugcacccucuucuacaccaacuaccugguggucuacaagcaguccuuccgcggccuggccuacgccuggcucagccacuucgugccggccguggacuacacguacauggacgagguccuguacgggguggugcugcucgucgcgaugguguucgugaccaugcgguccaucaaccacgacgucuucagcaucauguuccuggugggccgccuggugucccucgucagcaugugguacuucggggccaaccuggaggaggaggugcuccuguuccugaccucccuguucggcaccuacacguggaccaccaugcucagccuggccaccgccaaggugaucgcgaaguggcuggccgucaacgugcucuacuucacggacgugccccagaucaagcugguccugcucuccuaccugugcaucggcuacgugugcugcugcuacugggggauccugagccuccugaacuccaucuuccggaugccccugggcgucuacaacuacaagaucagcgugcaggagcuccgcuacaugaacgccaacgggcugcggcccccgcgcaacuccuucgaggcccugaugcucaacuucaagcugcugggcaucgggggcgugcccgucaucgaggugagccagauccagugaggacuaguuauaagacugacuagcccgaugggccucccaacgggcccuccuccccuccuugcaccgagauuaauaaaaaaaaaaaaaaaaaaaaaaaaaaaaaaaaaaaaaaaaaaaaaaaaaaaaaaaaaaaaaaaaugcaucccccccccccccccccccccccccccccccaaaggcucuuuucagagccaccagaauu

SEQ ID NO: 22213 - RNA, 1093 nt, Artificial Sequence
  SARS-CoV-2/Wuhan-Hu-1__NC_045512.2/MN908947.2/EPI_ISL_402128__non -structural protein 6 (NSP6) mRNA gc R9943
aggagaaagcuuaccaugagcgccgugaagcgcaccaucaagggcacccaccacuggcugcuccugacgauccugaccucccuccugguccuggugcagagcacccaguggucccucuucuucuuccuguacgagaacgccuuccugcccuucgcgauggggaucaucgccaugagcgccuucgccaugauguucgugaagcacaagcacgccuuccucugccuguuccugcucccgucccuggcgaccgucgccuacuucaacaugguguacaugcccgccagcugggugaugcggaucaugacguggcuggacauggucgacaccucccucagcggcuucaagcugaaggacugcgugauguacgccuccgcggugguccugcucauccugaugaccgcccgcaccguguacgacgacggggcccggcgcguguggacgcugaugaacguccucacccugguguacaagguguacuacggcaacgcccuggaccaggccaucagcaugugggcgcucaucaucuccgucaccagcaacuacuccgggguggugaccacggucauguuccuggcccggggcaucguguucaugugcguggaguacugccccaucuucuucaucaccggcaacacccugcagugcaucaugcucgucuacugcuuccugggguacuucugcacgugcuacuucggccuguucugccuccugaaccgcuacuuccggcugacccucgggguguacgacuaccuggugagcacccaggaguuccgcuacaugaacucccagggccugcugcccccgaagaacagcaucgacgccuucaagcucaacaucaagcugcucggggucggcggcaagcccugcaucaagguggccaccguccagugaggacuaguuauaagacugacuagcccgaugggccucccaacgggcccuccuccccuccuugcaccgagauuaauaaaaaaaaaaaaaaaaaaaaaaaaaaaaaaaaaaaaaaaaaaaaaaaaaaaaaaaaaaaaaaaaugcaucccccccccccccccccccccccccccccccaaaggcucuuuucagagccaccagaauu

SEQ ID NO: 22214 - RNA, 1093 nt, Artificial Sequence
  SARS-CoV-2__MT919768.1__non-structural protein 6 (NSP6) mRNA gc
aggagaaagcuuaccaugagcgccgugaagcgcaccaucaagggcacccaccacuggcugcuccugacgauccugaccucccuccugguccuggugcagagcacccaguggucccucuucuucuucuucuacgagaacgccuuccugcccuucgcgauggggaucaucgccaugagcgccuucgccaugauguucgugaagcacaagcacgccuuccugugccucuuccugcugccgucccucgcgaccgucgccuacuucaacaugguguacaugcccgccagcugggugaugcggaucaugacguggcuggacauggucgacaccucccugagcggcuucaagcucaaggacugcgugauguacgccuccgcggugguccugcugauccucaugaccgcccgcaccguguacgacgacggggcccggcgcguguggacgcugaugaacguccugacccucguguacaagguguacuacggcaacgcccuggaccaggccaucagcaugugggcgcugaucaucuccgucaccagcaacuacuccgggguggugaccacggucauguuccucgcccggggcaucguguucaugugcguggaguacugccccaucuucuucaucaccggcaacacccugcagugcaucaugcuggucuacugcuuccucggguacuucugcacgugcuacuucggccuguucugccugcucaaccgcuacuuccggcugacccuggggguguacgacuaccucgugagcacccaggaguuccgcuacaugaacucccagggccugcugcccccgaagaacagcaucgacgccuucaagcucaacaucaagcugcugggggucggcggcaagcccugcaucaagguggccaccguccagugaggacuaguuauaagacugacuagcccgaugggccucccaacgggcccuccuccccuccuugcaccgagauuaauaaaaaaaaaaaaaaaaaaaaaaaaaaaaaaaaaaaaaaaaaaaaaaaaaaaaaaaaaaaaaaaaugcaucccccccccccccccccccccccccccccccaaaggcucuuuucagagccaccagaauu

SEQ ID NO: 22215 - RNA, 1093 nt, Artificial Sequence
  SARS-CoV-2__MT920039.1__non-structural protein 6 (NSP6) mRNA gc
aggagaaagcuuaccaugagcgccgugaagcgcaccaucaagggcacccaccacuggcugcuccugacgauccugaccucccuccugguccuggugcagagcacccaguggucccucuucuucuuccuguacgagaacgccuuccugcccuucgcgauggggaucaucgccaugagcgccuucgccaugauguucgugaagcacaagcacgccuuccucugccuguuccugcucccgucccuggcgaccgucgccuacuucaacaugguguacaugcccgccagcugggugaugcggaucaugacguggcuggacauggucgacaccucccucagcggcuucaagcugaaggacugcgugauguacgccuccgcggugguccugcucauccuggugaccgcccgcaccguguacgacgacggggcccggcgcgucuggacgcugaugaacgugcucacccugguguacaaggucuacuacggcaacgcccuggaccaggccaucagcaugugggcgcucaucaucuccgugaccagcaacuacuccgggguggucaccacggugauguuccuggcccggggcaucguguucaugugcgucgaguacugccccaucuucuucaucaccggcaacacccugcagugcaucaugcucguguacugcuuccugggguacuucugcacgugcuacuucggccuguucugccuccugaaccgcuacuuccggcugacccucgggguguacgacuaccuggucagcacccaggaguuccgcuacaugaacucccagggccugcugcccccgaagaacagcaucgacgccuucaagcucaacaucaagcugcucggggugggcggcaagcccugcaucaaggucgccaccgugcagugaggacuaguuauaagacugacuagcccgaugggccucccaacgggcccuccuccccuccuugcaccgagauuaauaaaaaaaaaaaaaaaaaaaaaaaaaaaaaaaaaaaaaaaaaaaaaaaaaaaaaaaaaaaaaaaaugcaucccccccccccccccccccccccccccccccaaaggcucuuuucagagccaccagaauu

SEQ ID NO: 22216 - RNA, 1093 nt, Artificial Sequence
  SARS-CoV-2__MT913118.1__non-structural protein 6 (NSP6) mRNA gc
aggagaaagcuuaccaugagcgccgugaagcgcaccaucaagggcacccaccacuggcugcuccugacgauccugaccucccuccugguccuggugcagagcacccaguggucccucuucuucuuccuguacgagaacgccuuccugcccuucgcgauggggaucaucgccaugagcgccuucgccaugauguucgugaagcacaagcacgccuuccucugccuguuccugcucccgucccuggcgaccgucgccuacuucaacgugguguacaugcccgccagcugggucaugcggaucaugacguggcuggacaugguggacaccucccucagcggcuucaagcugaaggacugcgugauguacgccuccgcggucgugcugcucauccugaugaccgcccgcaccguguacgacgacggggcccggcgcgucuggacgcugaugaacgugcucacccugguguacaaggucuacuacggcaacgcccuggaccaggccaucagcaugugggcgcucaucaucuccgugaccagcaacuacuccgggguggucaccacggugauguuccuggcccggggcaucguguucaugugcgucgaguacugccccaucuucuucaucaccggcaacacccugcagugcaucaugcucguguacugcuuccugggguacuucugcacgugcuacuucggccuguucugccuccugaaccgcuacuuccggcugacccucgggguguacgacuaccuggucagcacccaggaguuccgcuacaugaacucccagggccugcugcccccgaagaacagcaucgacgccuucaagcucaacaucaagcugcucggggugggcggcaagcccugcaucaaggucgccaccgugcagugaggacuaguuauaagacugacuagcccgaugggccucccaacgggcccuccuccccuccuugcaccgagauuaauaaaaaaaaaaaaaaaaaaaaaaaaaaaaaaaaaaaaaaaaaaaaaaaaaaaaaaaaaaaaaaaaugcaucccccccccccccccccccccccccccccccaaaggcucuuuucagagccaccagaauu

SEQ ID NO: 22217 - RNA, 1093 nt, Artificial Sequence
  SARS-CoV-2__MT913130.1__non-structural protein 6 (NSP6) mRNA gc
aggagaaagcuuaccaugagcgccgugaagcgcaccaucaagggcacccaccacuggcugcuccugacgauccugaccucccuccugguccuggugcagagcacccaguggucccucuucuucuuccuguacgagaacgccuuccugcccuucgcgauggggaucaucgccaugagcgccuucgccaugauguucgugaagcacaagcacgccuuccucugccuguuccugcucccgucccuggcgaccgucgccuacuucaacaugguguacaugcccgccagcugggugaugcggaucaugacguggcuggacauggucgacaccucccucagcggcuucaagcugaaggacugcgugauguacgccuccgcggugguccugcucauccugaugaccgcccgcaccguguacgacgacggggcccggcgcguguggacgcugaugaacguccucacccugguguacaagguguacuacggcaacgcccuggaccaggccaucagcaugugggcgcucaucaucuccgucaccagcaacuacuccgggguggugaccacggucauguuccuggcccggggcaucguguucaugugcguggaguacugccccaucuucuucaucaccggcaacacccugcagugcaucaugcucgucuacugcuuccugggguacuucugcacgugcuacuucggccuguucugccuccugaaccgcuacuuccggcugacccucgggguguacgacuaccuggugagcacccaggaguuccgcuacaugaacucccagggccugcugcccccgaagaacagcaucgacgccuuccggcucaacaucaagcugcucggggucggcggcaagcccugcaucaagguggccaccguccagugaggacuaguuauaagacugacuagcccgaugggccucccaacgggcccuccuccccuccuugcaccgagauuaauaaaaaaaaaaaaaaaaaaaaaaaaaaaaaaaaaaaaaaaaaaaaaaaaaaaaaaaaaaaaaaaaugcaucccccccccccccccccccccccccccccccaaaggcucuuuucagagccaccagaauu

SEQ ID NO: 22218 - RNA, 1093 nt, Artificial Sequence
  SARS-CoV-2__MT893668.1__non-structural protein 6 (NSP6) mRNA gc
aggagaaagcuuaccaugagcgccgugaagcgcaccaucaagggcacccaccacuggcugcuccugacgauccugaccucccuccugguccuggugcagagcacccaguggucccucuucuucuuccuguacgagaacgccuuccugcccuucgcgauggggaucaucgccaugagcgccuucgccaugauguucgugaagcacaagcacgccuuccucugccuguuccugcucccgucccuggcgaccgucgccuacuucaacaugguguacaugcccgccagcugggugaugcggaucaugacguggcuggacauggucgacaccucccucagcggcuucaagcugaaggacugcgugauguacgccuccgcggugguccugcucauccugaugaccgcccgcaccguguacgacgacggggcccggcgcguguggacgcugaugaacguccucacccugguguacaagguguacuacggcaacgcccuggaccaggccaucagcaugugggcgcucaucaucuccgucaccagcaacuacuccgggguggugaccacggucauguuccuggcccggggcaucguguucaugugcguggaguacugccccaucuucuucaucaccggcaacacccugcagugcaucaugcucgucuacugcuuccugggguacuucugcacgugcuacuucggccuguucugccuccugaaccgcuaccugcggcucacccuggggguguacgacuaccuggugagcacccaggaguuccgcuacaugaacucccagggccuccugcccccgaagaacagcaucgacgccuucaagcugaacaucaagcuccugggggucggcggcaagcccugcaucaagguggccaccguccagugaggacuaguuauaagacugacuagcccgaugggccucccaacgggcccuccuccccuccuugcaccgagauuaauaaaaaaaaaaaaaaaaaaaaaaaaaaaaaaaaaaaaaaaaaaaaaaaaaaaaaaaaaaaaaaaaugcaucccccccccccccccccccccccccccccccaaaggcucuuuucagagccaccagaauu

SEQ ID NO: 22219 - RNA, 1093 nt, Artificial Sequence
  SARS-CoV-2__MT890238.1__non-structural protein 6 (NSP6) mRNA gc
aggagaaagcuuaccaugagcgccgugaagcgcaccaucaagggcacccaccacuggcugcuccugacgauccugaccucccuccugguccuggugcagagcacccaguggucccucuucuucuuccuguacgagaacgccuuccugcccuucgcgauggggaucaucgccaugagcgccuucgccaugauguucgugaagcacaagcacgccuuccucugccuguuccugcucccgucccuggcgaccgucgccuacuucaacaugguguacauccccgccagcugggugaugcggaucaugacguggcuggacauggucgacaccucccucagcggcuucaagcugaaggacugcgugauguacgccuccgcggugguccugcucauccugaugaccgcccgcaccguguacgacgacggggcccggcgcguguggacgcugaugaacguccucacccugguguacaagguguacuacggcaacgcccuggaccaggccaucagcaugugggcgcucaucaucuccgucaccagcaacuacuccgggguggugaccacggucauguuccuggcccggggcaucguguucaugugcguggaguacugccccaucuucuucaucaccggcaacacccugcagugcaucaugcucgucuacugcuuccugggguacuucugcacgugcuacuucggccuguucugccuccugaaccgcuacuuccggcugacccucgggguguacgacuaccuggugagcacccaggaguuccgcuacaugaacucccagggccugcugcccccgaagaacagcaucgacgccuucaagcucaacaucaagcugcucggggucggcggcaagcccugcaucaagguggccaccguccagugaggacuaguuauaagacugacuagcccgaugggccucccaacgggcccuccuccccuccuugcaccgagauuaauaaaaaaaaaaaaaaaaaaaaaaaaaaaaaaaaaaaaaaaaaaaaaaaaaaaaaaaaaaaaaaaaugcaucccccccccccccccccccccccccccccccaaaggcucuuuucagagccaccagaauu

SEQ ID NO: 22220 - RNA, 1093 nt, Artificial Sequence
  SARS-CoV-2__MT890355.1__non-structural protein 6 (NSP6) mRNA gc
aggagaaagcuuaccaugagcgccgugaagcgcaccaucaagggcacccaccacuggcugcuccugacgauccugaccucccuccugguccuggugcagagcacccaguggucccucuucuucuuccuguacgagaacgccuuccugcccuucgcgauggggaucaucgccaugagcgccuucgccaugauguucgugaagcacaagcacgccuuccucugccuguuccugcucccgucccuggcgaccgucgccuacuucaacaugguguacaugcccgccagcugggugaugcggaucaugacguggcuggacauggucgacaccucccucagcggcuucaagcugaaggacugcgugauguacgccuccgcggugguccugcucauccugaugaccgcccgcaccguguacgacgacggggcccggcgcguguggacgcugaugaacguccucacccugguguacaagguguacuacggcaacgcccuggaccaggccaucagcaugugggcgcucaucaucuccgucaccagcaacuacuccgggguggugaccacggucauguuccuggcccggggcaucguguucaugugcguggaguacugccccaucuucuucaucaccggcaacacccugcacugcaucaugcucgucuacugcuuccugggguacuucugcacgugcuacuucggccuguucugccuccugaaccgcuacuuccggcugacccucgggguguacgacuaccuggugagcacccaggaguuccgcuacaugaacucccagggccugcugcccccgaagaacagcaucgacgccuucaagcucaacaucaagcugcucggggucggcggcaagcccugcaucaagguggccaccguccagugaggacuaguuauaagacugacuagcccgaugggccucccaacgggcccuccuccccuccuugcaccgagauuaauaaaaaaaaaaaaaaaaaaaaaaaaaaaaaaaaaaaaaaaaaaaaaaaaaaaaaaaaaaaaaaaaugcaucccccccccccccccccccccccccccccccaaaggcucuuuucagagccaccagaauu

SEQ ID NO: 22221 - RNA, 1093 nt, Artificial Sequence
  SARS-CoV-2__MT889692.1__non-structural protein 6 (NSP6) mRNA gc
aggagaaagcuuaccaugagcgccgugaagcgcaccaucaagggcacccaccacuggcugcuccugacgauccugaccucccuccugguccuggugcagagcacccaguggucccucuucuucuuccuguacgagaacgccuuccugcccuucgcgauggggaucaucgccaugagcgccuucgccaugauguucgugaagcacaagaacgccuuccucugccuguuccugcucccgucccuggcgaccgucgccuacuucaacaugguguacaugcccgccagcugggugaugcggaucaugacguggcuggacauggucgacaccucccucagcggcuucaagcugaaggacugcgugauguacgccuccgcggugguccugcucauccugaugaccgcccgcaccguguacgacgacggggcccggcgcguguggacgcugaugaacguccucacccugguguacaagguguacuacggcaacgcccuggaccaggccaucagcaugugggcgcucaucaucuccgucaccagcaacuacuccgggguggugaccacggucauguuccuggcccggggcaucguguucaugugcguggaguacugccccaucuucuucaucaccggcaacacccugcagugcaucaugcucgucuacugcuuccugggguacuucugcacgugcuacuucggccuguucugccuccugaaccgcuacuuccggcugacccucgggguguacgacuaccuggugagcacccaggaguuccgcuacaugaacucccagggccugcugcccccgaagaacagcaucgacgccuucaagcucaacaucaagcugcucggggucggcggcaagcccugcaucaagguggccaccguccagugaggacuaguuauaagacugacuagcccgaugggccucccaacgggcccuccuccccuccuugcaccgagauuaauaaaaaaaaaaaaaaaaaaaaaaaaaaaaaaaaaaaaaaaaaaaaaaaaaaaaaaaaaaaaaaaaugcaucccccccccccccccccccccccccccccccaaaggcucuuuucagagccaccagaauu

SEQ ID NO: 22222 - RNA, 1093 nt, Artificial Sequence
  SARS-CoV-2__MT886314.1__non-structural protein 6 (NSP6) mRNA gc
aggagaaagcuuaccaugagcgccgugaagcgcaccaucaagggcacccaccacuggcugcuccugacgauccugaccucccuccugguccuggugcagagcacccaguggucccucuucuucuuccuguacgagaacgccuuccugcccuucgcgauggggaucaucgccaugagcgccuucgccaugauguucgugaagcacaagcacgccuuccucugccuguuccugcucccgucccuggcgaccgucgccuacuucaacaugguguacaugcccgccagcugggugaugcggaucaugacguggcuggacauggucgacaccucccucagcggcuucaagcugaaggacugcgugauguacgccuccgcggugguccugcucauccugaugaccgcccgcaccguguacgacgacggggcccggcgcguguggacgcugaugaacguccucacccugguguacaagguguacuacggcaacgcccuggaccaggccaucagcaugugggcgcucaucaucuccgucaccagcaacuacuccgggguggugaccacggucauguuccuggcccggagcaucguguucaugugcguggaguacugccccaucuucuucaucaccggcaacacccugcagugcaucaugcucgucuacugcuuccugggcuacuucugcacgugcuacuucgggcuguucugccuccugaaccgcuacuuccggcugacccucggcguguacgacuaccugguguccacccaggaguuccgcuacaugaacagccaggggcugcugcccccgaagaacuccaucgacgccuucaagcucaacaucaagcugcucggcgucgggggcaagcccugcaucaagguggccaccguccagugaggacuaguuauaagacugacuagcccgaugggccucccaacgggcccuccuccccuccuugcaccgagauuaauaaaaaaaaaaaaaaaaaaaaaaaaaaaaaaaaaaaaaaaaaaaaaaaaaaaaaaaaaaaaaaaaugcaucccccccccccccccccccccccccccccccaaaggcucuuuucagagccaccagaauu

SEQ ID NO: 22223 - RNA, 1093 nt, Artificial Sequence
  SARS-CoV-2__MT886376.1__non-structural protein 6 (NSP6) mRNA gc
aggagaaagcuuaccaugagcgccgugaagcgcaccaucaagggcacccaccacuggcugcuccugacgauccugaccucccuccugguccuggugcagagcacccaguggucccucuucuucuuccuguacgagaacgccuuccugcccuucgcgauggggaucaucgccaugagcgccuucgccaugauguucgugaagcacaagcacgccuuccucugccuguuccugcucccgucccuggcgaccgucgccuacuucaacauguucuacaugcccgccagcugggugaugcggaucaugacguggcuggacaugguggacaccucccucagcggcuucaagcugaaggacugcgucauguacgccuccgcgguggugcugcucauccugaugaccgcccgcaccgucuacgacgacggggcccggcgcguguggacgcugaugaacgugcucacccuggucuacaagguguacuacggcaacgcccuggaccaggccaucagcaugugggcgcucaucaucuccgugaccagcaacuacuccggggucgugaccacggugauguuccuggcccggggcaucgucuucaugugcguggaguacugccccaucuucuucaucaccggcaacacccugcagugcaucaugcucguguacugcuuccugggguacuucugcacgugcuacuucggccuguucugccuccugaaccgcuacuuccggcugacccucggggucuacgacuaccuggugagcacccaggaguuccgcuacaugaacucccagggccugcugcccccgaagaacagcaucgacgccuucaagcucaacaucaagcugcucggggugggcggcaagcccugcaucaaggucgccaccgugcagugaggacuaguuauaagacugacuagcccgaugggccucccaacgggcccuccuccccuccuugcaccgagauuaauaaaaaaaaaaaaaaaaaaaaaaaaaaaaaaaaaaaaaaaaaaaaaaaaaaaaaaaaaaaaaaaaugcaucccccccccccccccccccccccccccccccaaaggcucuuuucagagccaccagaauu

SEQ ID NO: 22224 - RNA, 1093 nt, Artificial Sequence
  SARS-CoV-2__MT873090.1__non-structural protein 6 (NSP6) mRNA gc
aggagaaagcuuaccaugagcgccgugaagcgcaccaucaagggcacccaccacuggcugcuccugacgauccugaccucccuccugguccuggugcagagcacccaguggucccucuucuucuuccuguacgagaacgccuuccugcccuucgcgauggggaucaucgccaugagcgccuucgccaugauguucgugaagcacaagcacgccuuccucugccuguuccugcucccgucccuggcgaccgucgccuacuucaacaugguguacaugcccgccagcugggugaugcggaucaugacguggcuggacauggucgacaccucccucagcggcuucaagcugaaggacugcgugauguacgccuccgcggugguccugcucauccugaugaccgcccgcaccguguacgacgacggggcccggcgcguguggacgcugaugaacguccucacccugguguacaagguguacuacggcaacgcccuggaccaggucaucagcaugugggcccucaucaucuccgugaccagcaacuacuccgggguggucaccacggugauguuccuggcgcggggcaucguguucaugugcgucgaguacugccccaucuucuucaucaccggcaacacccugcagugcaucaugcucguguacugcuuccugggguacuucugcacgugcuacuucggccuguucugccuccugaaccgcuacuuccggcugacccucgggguguacgacuaccuggucagcacccaggaguuccgcuacaugaacucccagggccugcugcccccgaagaacagcaucgacgccuucaagcucaacaucaagcugcucggggugggcggcaagcccugcaucaaggucgccaccgugcagugaggacuaguuauaagacugacuagcccgaugggccucccaacgggcccuccuccccuccuugcaccgagauuaauaaaaaaaaaaaaaaaaaaaaaaaaaaaaaaaaaaaaaaaaaaaaaaaaaaaaaaaaaaaaaaaaugcaucccccccccccccccccccccccccccccccaaaggcucuuuucagagccaccagaauu

SEQ ID NO: 22225 - RNA, 1093 nt, Artificial Sequence
  SARS-CoV-2__MT873137.1__non-structural protein 6 (NSP6) mRNA gc
aggagaaagcuuaccaugagcgccgugaagcgcaccaucaagggcacccaccacuggcugcuccugacgauccugaccucccuccugguccuggugcagagcacccaguggucccucuucuucuuccuguacgagaacgccuuccugcccuucgcgauggggaucaucgccaugagcgccuucgccaugauguucgugaagcacaagcacgccuuccucugccuguuccugcucccgucccuggcgaccgucgccuacuucaacaugguguacaugcccgccagcugggugaugcggaucaugacguggcuggacauggucgacaccucccucagcggcuucaagcugaaggacugcgugauguacgccuccgcggugguccugcucauccugaugaccgcccgcaccguguacgacgacggggcccggcgcguguggacgcugaugaacguccucacccuguucuacaagguguacuacggcaacgcccuggaccaggccaucagcaugugggcgcucaucaucuccgugaccagcaacuacuccggggucgugaccacggugauguuccuggcccggggcaucgucuucaugugcguggaguacugccccaucuucuucaucaccggcaacacccugcagugcaucaugcucguguacugcuuccugggguacuucugcacgugcuacuucggccuguucugccuccugaaccgcuacuuccggcugacccucggggucuacgacuaccuggugagcacccaggaguuccgcuacaugaacucccagggccugcugcccccgaagaacagcaucgacgccuucaagcucaacaucaagcugcucggggugggcggcaagcccugcaucaaggucgccaccgugcagugaggacuaguuauaagacugacuagcccgaugggccucccaacgggcccuccuccccuccuugcaccgagauuaauaaaaaaaaaaaaaaaaaaaaaaaaaaaaaaaaaaaaaaaaaaaaaaaaaaaaaaaaaaaaaaaaugcaucccccccccccccccccccccccccccccccaaaggcucuuuucagagccaccagaauu

SEQ ID NO: 22226 - RNA, 1093 nt, Artificial Sequence
  SARS-CoV-2__MT873178.1__non-structural protein 6 (NSP6) mRNA gc
aggagaaagcuuaccaugagcgccgugaagcgcaccaucaagggcacccaccacuggcugcuccugacgauccugaccucccuccugguccuggugcagagcacccaguggucccucuucuucuuccuguacgagaacgccuuccugcccuucgcgauggggaucaucgccaugagcgccuucgccaugauguucgugaagcacaagcacgccuuccucugccuguuccugcucccgucccuggcgaccgucgccuacuucaacaugguguacaugcccgccagcugggugaugcggaucaugacguggcuggacauggucgacaccucccucagcggcuucaagcugaaggacugcgugauguacgccuccgcggugguccugcucauccugaugaccgcccgcaccguguacgacgacggggcccggcgcguguggacgcugaugaacguccucacccugguguacaagguguacuacggcaacgcccuggaccaggccaucagcaugugggcgcucaucaucuccgucaccagcaacuacuccgggguggugaccacggucauguuccuggcccggggcaucguguucaugugcguggaguacugccccaucuucuucaucaccggcaacacccugcagugcaucaugcucgucuacugcuuccugggguacuucugcacgugcuacuucggccuguucugccuccugaaccgcuacuuccggcugacccucgggguguacgacuaccuggugagcacccaggaguuccgcuacaugaacucccagggccugcugcccccgaagaacagcaucggggccuucaagcucaacaucaagcugcucggcgucggcgggaagcccugcaucaagguggccaccguccagugaggacuaguuauaagacugacuagcccgaugggccucccaacgggcccuccuccccuccuugcaccgagauuaauaaaaaaaaaaaaaaaaaaaaaaaaaaaaaaaaaaaaaaaaaaaaaaaaaaaaaaaaaaaaaaaaugcaucccccccccccccccccccccccccccccccaaaggcucuuuucagagccaccagaauu

SEQ ID NO: 22227 - RNA, 1093 nt, Artificial Sequence
  SARS-CoV-2__MT873456.1__non-structural protein 6 (NSP6) mRNA gc
aggagaaagcuuaccaugagcgccgugaagcgcaccaucaagggcacccaccacuggcugcuccugacgauccugaccucccuccugguccuggugcagagcacccaguggucccucuucuucuuccuguacgagaacgccuuccugcccuucgcgauggggaucaucgccaugagcgccuucgccaugauguucgugaagcacaagcacgccuuccucugccuguuccugcucccgucccuggcgaccgucgccuacuucaacaugguguacaugcccgccagcugggugaugcggaucaugacguggcuggacauggucgacaccucccucagcggcuucaagcugaaggacugcgugauguacgccuccgcggugguccugcucauccugaugaccgcccgcaccguguacgacgacggggcccggcgcguguggacgcugaugaacguccucacccugguguacaagguguacuacggcaacgcccugaaccaggccaucagcaugugggcgcucaucaucuccgucaccagcaacuacuccgggguggugaccacggucauguuccuggcccggggcaucguguucaugugcguggaguacugccccaucuucuucaucaccggcaacacccugcagugcaucaugcucgucuacugcuuccugggguacuucugcacgugcuacuucggccuguucugccuccugaaccgcuacuuccggcugacccucgggguguacgacuaccuggugagcacccaggaguuccgcuacaugaacucccagggccugcugcccccgaagaacagcaucgacgccuucaagcucaacaucaagcugcucggggucggcggcaagcccugcaucaagguggccaccguccagugaggacuaguuauaagacugacuagcccgaugggccucccaacgggcccuccuccccuccuugcaccgagauuaauaaaaaaaaaaaaaaaaaaaaaaaaaaaaaaaaaaaaaaaaaaaaaaaaaaaaaaaaaaaaaaaaugcaucccccccccccccccccccccccccccccccaaaggcucuuuucagagccaccagaauu

SEQ ID NO: 22228 - RNA, 1093 nt, Artificial Sequence
  SARS-CoV-2__MT876554.1__non-structural protein 6 (NSP6) mRNA gc
aggagaaagcuuaccaugagcgccgugaagcgcaccaucaagggcacccaccacuggcugcuccugacgauccugaccucccuccuguuccugguccagagcacccaguggucccucuucuucuuccuguacgagaacgccuuccugcccuucgcgauggggaucaucgccaugagcgccuucgccaugauguucgugaagcacaagcacgccuuccucugccuguuccugcucccgucccuggcgaccguggccuacuucaacauggucuacaugcccgccagcugggugaugcggaucaugacguggcuggacaugguggacaccucccucagcggcuucaagcugaaggacugcgucauguacgccuccgcgguggugcugcucauccugaugaccgcccgcaccgucuacgacgacggggcccggcgcguguggacgcugaugaacgugcucacccuggucuacaagguguacuacggcaacgcccuggaccaggccaucagcaugugggcgcucaucaucuccgugaccagcaacuacuccggggucgugaccacggugauguuccuggcccggggcaucgucuucaugugcguggaguacugccccaucuucuucaucaccggcaacacccugcagugcaucaugcucguguacugcuuccugggguacuucugcacgugcuacuucggccuguucugccuccugaaccgcuacuuccggcugacccucggggucuacgacuaccuggugagcacccaggaguuccgcuacaugaacucccagggccugcugcccccgaagaacagcaucgacgccuucaagcucaacaucaagcugcucggggugggcggcaagcccugcaucaaggucgccaccgugcagugaggacuaguuauaagacugacuagcccgaugggccucccaacgggcccuccuccccuccuugcaccgagauuaauaaaaaaaaaaaaaaaaaaaaaaaaaaaaaaaaaaaaaaaaaaaaaaaaaaaaaaaaaaaaaaaaugcaucccccccccccccccccccccccccccccccaaaggcucuuuucagagccaccagaauu

SEQ ID NO: 22229 - RNA, 1093 nt, Artificial Sequence
  SARS-CoV-2__MT876555.1__non-structural protein 6 (NSP6) mRNA gc
aggagaaagcuuaccaugagcgccgugaagcgcaccaucaagggcacccaccacuggcugcuccugacgauccugaccuccauccucguccuggugcagagcacccaguggucccuguucuucuuccucuacgagaacgccuuccugcccuucgcgauggggaucaucgccaugagcgccuucgccaugauguucgugaagcacaagcacgccuuccugugccucuuccugcugccgucccucgcgaccgucgccuacuucaacaugguguacaugcccgccagcugggugaugcggaucaugacguggcuggacauggucgacaccucccugagcggcuucaagcucaaggacugcgugauguacgccuccgcggugguccugcugauccucaugaccgcccgcaccguguacgacgacggggcccggcgcguguggacgcugaugaacguccugacccucguguacaagguguacuacggcaacgcccuggaccaggccaucagcaugugggcgcugaucaucuccgucaccagcaacuacuccgggguggugaccacggucauguuccucgcccggggcaucguguucaugugcguggaguacugccccaucuucuucaucaccggcaacacccugcagugcaucaugcuggucuacugcuuccucggguacuucugcacgugcuacuucggccuguucugccugcucaaccgcuacuuccggcugacccuggggguguacgacuaccucgugagcacccaggaguuccgcuacaugaacucccagggccugcugcccccgaagaacagcaucgacgccuucaagcucaacaucaagcugcugggggucggcggcaagcccugcaucaagguggccaccguccagugaggacuaguuauaagacugacuagcccgaugggccucccaacgggcccuccuccccuccuugcaccgagauuaauaaaaaaaaaaaaaaaaaaaaaaaaaaaaaaaaaaaaaaaaaaaaaaaaaaaaaaaaaaaaaaaaugcaucccccccccccccccccccccccccccccccaaaggcucuuuucagagccaccagaauu

SEQ ID NO: 22230 - RNA, 1093 nt, Artificial Sequence
  SARS-CoV-2__MT877304.1__non-structural protein 6 (NSP6) mRNA gc
aggagaaagcuuaccaugagcgccgugaagcgcaccaucaagggcacccaccacuggcugcuccugacgauccugaccucccuccugguccuggugcagagcacccaguggucccucuucuucuuccuguacgagaacgccuuccugcccuucgcgauggggaucaucgccaugagcgccuucgccaugauguucaucaagcacaagcacgccuuccucugccuguuccugcucccgucccuggcgaccguggccuacuucaacauggucuacaugcccgccagcugggugaugcggaucaugacguggcuggacaugguggacaccucccucagcggcuucaagcugaaggacugcgucauguacgccuccgcgguggugcugcucauccugaugaccgcccgcaccgucuacgacgacggggcccggcgcguguggacgcugaugaacgugcucacccuggucuacaagguguacuacggcaacgcccuggaccaggccaucagcaugugggcgcucaucaucuccgugaccagcaacuacuccggggucgugaccacggugauguuccuggcccggggcaucgucuucaugugcguggaguacugccccaucuucuucaucaccggcaacacccugcagugcaucaugcucguguacugcuuccugggguacuucugcacgugcuacuucggccuguucugccuccugaaccgcuacuuccggcugacccucggggucuacgacuaccuggugagcacccaggaguuccgcuacaugaacucccagggccugcugcccccgaagaacagcaucgacgccuucaagcucaacaucaagcugcucggggugggcggcaagcccugcaucaaggucgccaccgugcagugaggacuaguuauaagacugacuagcccgaugggccucccaacgggcccuccuccccuccuugcaccgagauuaauaaaaaaaaaaaaaaaaaaaaaaaaaaaaaaaaaaaaaaaaaaaaaaaaaaaaaaaaaaaaaaaaugcaucccccccccccccccccccccccccccccccaaaggcucuuuucagagccaccagaauu

SEQ ID NO: 22231 - RNA, 1093 nt, Artificial Sequence
  SARS-CoV-2__MT873803.1__non-structural protein 6 (NSP6) mRNA gc
aggagaaagcuuaccaugagcgccgugaagcgcaccaucaagggcacccaccacuggcugcuccugacgauccugaccucccuccugguccuggugcagagcacccaguggucccucuucuucuuccuguacgagaacgccuuccugcccuucgcgauggggaucaucgccaugagcgccuucgccaugauguucgugaagcacaagcacgccuuccucugccuguuccugcucccgucccuggcgaccgucgccuacuucaacaugguguacaugcccgccagcugggugaugcggaucaugacguggcuggacauggucgacaccucccucagcggcuucaagcugaaggacugcgugauguacgccuccgcggugguccugcucauccugaugaccgcccgcaccguguacgacgacggggugcggcgcgucuggacgcugaugaacgugcucacccugguguacaaggucuacuacggcaacgcccuggaccaggccaucagcaugugggcccucaucaucuccgugaccagcaacuacuccgggguggucaccacggugauguuccuggcgcggggcaucguguucaugugcgucgaguacugccccaucuucuucaucaccggcaacacccugcagugcaucaugcucguguacugcuuccugggguacuucugcacgugcuacuucggccuguucugccuccugaaccgcuacuuccggcugacccucgggguguacgacuaccuggucagcacccaggaguuccgcuacaugaacucccagggccugcugcccccgaagaacagcaucgacgccuucaagcucaacaucaagcugcucggggugggcggcaagcccugcaucaaggucgccaccgugcagugaggacuaguuauaagacugacuagcccgaugggccucccaacgggcccuccuccccuccuugcaccgagauuaauaaaaaaaaaaaaaaaaaaaaaaaaaaaaaaaaaaaaaaaaaaaaaaaaaaaaaaaaaaaaaaaaugcaucccccccccccccccccccccccccccccccaaaggcucuuuucagagccaccagaauu

SEQ ID NO: 22232 - RNA, 1093 nt, Artificial Sequence
  SARS-CoV-2__MT856453.1__non-structural protein 6 (NSP6) mRNA gc
aggagaaagcuuaccaugagcgccgugaagcgcaccaucaagggcacccaccacuggcugcuccugacgauccugaccucccuccugguccuggugcagagcacccaguggucccucuucuucuuccuguacgagaacgccuuccugcccuucgcgauggggaucaucgccaugagcgccuucgccaugauguucgugaagcacaagcacgccuuccucugccuguuccugcucccgucccuggcgaccgucgccuacuucaacaugguguacaugcccgccagcugggugaugcggaucaugacguggcuggacauggucgacaccucccucagcggcuucaagcugaaggacugcgugauguacgccuccgcggugguccugcucacccugaugaccgcccgcacgguguacgacgacggggcccggcgcguguggacccugaugaacguccucacccugguguacaagguguacuacggcaacgcccuggaccaggccaucagcaugugggcgcucaucaucuccgucaccagcaacuacuccgggguggugacgaccgucauguuccuggcccggggcaucguguucaugugcguggaguacugccccaucuucuucaucaccggcaacacccugcagugcaucaugcucgucuacugcuuccugggguacuucugcacgugcuacuucggccuguucugccuccugaaccgcuacuuccggcugacccucgggguguacgacuaccuggugagcacccaggaguuccgcuacaugaacucccagggccugcugcccccgaagaacagcaucgacgccuucaagcucaacaucaagcugcucggggucggcggcaagcccugcaucaagguggccaccguccagugaggacuaguuauaagacugacuagcccgaugggccucccaacgggcccuccuccccuccuugcaccgagauuaauaaaaaaaaaaaaaaaaaaaaaaaaaaaaaaaaaaaaaaaaaaaaaaaaaaaaaaaaaaaaaaaaugcaucccccccccccccccccccccccccccccccaaaggcucuuuucagagccaccagaauu

SEQ ID NO: 22233 - RNA, 1093 nt, Artificial Sequence
  SARS-CoV-2__MT856455.1__non-structural protein 6 (NSP6) mRNA gc
aggagaaagcuuaccaugagcgccgugaagcgcaccaucaagggcacccaccacuggcugcuccugacgauccugaccucccuccugguccuggugcagagcacccaguggucccucuucuucuuccuguacgagaacgccuuccugcccuucgcgauggggaucaucgccaugagcgccuucgccaugauguucgugaagcacaagcacgccuuccucugccuguuccugcucccgucccuggcgaccgucgccuacuucaacaugguguacaugcccgccagcugggugaugcggaucaugacguggcuggacauggucgacaccucccucagcggcuucaagcugaaggacugcgugauguacgccuccgcggugguccugcucauccugaugaccgcccgcaccguguacgacgacggggcccggcgcguguggacgcugaugaacguccucacccugguguacaagguguacuacggcaacgcccuggaccaggccaucagcaugugggcgcucaucaucuccgucaccagcaacuacuccgggguggugaccacggucauguuccuggcccggggcaucguguucaugugcguggaguacugccccaucuucuucaucaccggcaacacccugcagugcgucaugcucguguacugcuuccugggguacuucugcacgugcuacuucggccuguucugccuccugaaccgcuacuuccggcugacccucgggguguacgacuaccuggucagcacccaggaguuccgcuacaugaacucccagggccugcugcccccgaagaacagcaucgacgccuucaagcucaacaucaagcugcucggggugggcggcaagcccugcaucaaggucgccaccgugcagugaggacuaguuauaagacugacuagcccgaugggccucccaacgggcccuccuccccuccuugcaccgagauuaauaaaaaaaaaaaaaaaaaaaaaaaaaaaaaaaaaaaaaaaaaaaaaaaaaaaaaaaaaaaaaaaaugcaucccccccccccccccccccccccccccccccaaaggcucuuuucagagccaccagaauu

SEQ ID NO: 22234 - RNA, 1093 nt, Artificial Sequence
  SARS-CoV-2__MT846438.1__non-structural protein 6 (NSP6) mRNA gc
aggagaaagcuuaccaugagcgccgugaagcgcaccaucaagggcacccaccacuggcugcuccugacgauccugaccucccuccugguccuggugcagagcacccaguggucccucuucuucuuccuguacgagaacgccuuccugcccuucgcgauggggaucaucgugaugagcgccuucgccaugauguucgucaagcacaagcacgccuuccucugccuguuccugcucccgucccuggccaccguggcguacuucaacaugguguacaugcccgccagcugggucaugcggaucaugacguggcuggacaugguggacaccucccucagcggcuucaagcugaaggacugcgugauguacgccuccgccgucgugcugcucauccugaugaccgcgcgcaccguguacgacgacggggcccggcgcgucuggacgcugaugaacgugcucacccugguguacaaggucuacuacggcaacgcccuggaccaggccaucagcaugugggcccucaucaucuccgugaccagcaacuacuccgggguggucaccacggugauguuccuggcgcggggcaucguguucaugugcgucgaguacugccccaucuucuucaucaccggcaacacccugcagugcaucaugcucguguacugcuuccugggguacuucugcacgugcuacuucggccuguucugccuccugaaccgcuacuuccggcugacccucgggguguacgacuaccuggucagcacccaggaguuccgcuacaugaacucccagggccugcugcccccgaagaacagcaucgacgccuucaagcucaacaucaagcugcucggggugggcggcaagcccugcaucaaggucgccaccgugcagugaggacuaguuauaagacugacuagcccgaugggccucccaacgggcccuccuccccuccuugcaccgagauuaauaaaaaaaaaaaaaaaaaaaaaaaaaaaaaaaaaaaaaaaaaaaaaaaaaaaaaaaaaaaaaaaaugcaucccccccccccccccccccccccccccccccaaaggcucuuuucagagccaccagaauu

SEQ ID NO: 22235 - RNA, 1093 nt, Artificial Sequence
  SARS-CoV-2__MT846506.1__non-structural protein 6 (NSP6) mRNA gc
aggagaaagcuuaccaugagcgccgugaagcgcaccaucaagggcacccaccacuggcugcuccugacgauccugaccucccuccugguccuggugcagagcacccaguggucccucuucuucuuccuguacgagaacgccuuccugcccuucgcgauggggaucaucgccaugagcgccuucgccaugauguucgugaagcacaagcacgccuuccucugccuguuccugcucccgucccuggcgaccgucgccuacuucaacaugguguacaugcccgccagcugggugaugcggaucaugacguggcuggacauggucgacaccucccucagcggcuucaagcugaaggacugcgugauguacgccuccgcggugguccugcucauccugaugaccgcccgcaccguguacgacgacggggcccggcgcguguggacgcugaugaacguccucacccugguguacaagguguacuacggcaacgcccuggaccaggccaucagcaugugggcgcucaucaucuccgucaccagcaacuacuccgggguggugaccacggucauguuccuggcccggggcaucguguucaugugcguggaguacugccccaucuucuucaucaccggcaacacccugcagugcaucaugcucgucuacugcuuccugggguacuucugcacgugcuacuucggccuguucugccuccugaaccgcuacuuccggcugacccucgggguguacgacuaccuggugagcacccaggaguuccgcuacaugaacucccagggccugcugcccccgaagaacagcaucgaggccuucaagcucaacaucaagcugcucggggucggcggcaagcccugcaucaagguggccaccguccagugaggacuaguuauaagacugacuagcccgaugggccucccaacgggcccuccuccccuccuugcaccgagauuaauaaaaaaaaaaaaaaaaaaaaaaaaaaaaaaaaaaaaaaaaaaaaaaaaaaaaaaaaaaaaaaaaugcaucccccccccccccccccccccccccccccccaaaggcucuuuucagagccaccagaauu

SEQ ID NO: 22236 - RNA, 1093 nt, Artificial Sequence
  SARS-CoV-2__MT846514.1__non-structural protein 6 (NSP6) mRNA gc
aggagaaagcuuaccaugagcgccgugaagcgcaccaucaagggcacccaccacuggcugcuccugacgauccugaccucccuccugguccuggugcagagcacccaguggucccucuucuucuuccuguacgagaacgccuuccugcccuucgcgauggggaucaucgccaugagcgccuucgccaugauguucgugaagcacaagcacgccuuccucugccuguuccugcucccgucccuggcgaccgucgccuacuucaacaugguguacaugcccgccagcugggugaugcggaucaugacguggcuggacauggucgacaccucccucagcggcuucaagcugaaggacugcgugauguacgccuccgcggugguccugcucauccugaugaccgcccgcaccguguacgacgacggggcccggcgcguguggacgcugaugaacguccucacccugguguacaagguguacuacggcaacgcccuggaccaggccaucagcaugugggcgcucaucaucuccgucaccagcaacuacuccgggguggugaccacggucauguuccuggcccggggcaucguguucaugugcguggaguacugccccaucuucuucaucaccggcaacacccugcagugcaucaugcucgucuacugcuuccugggguacuucugcacgugcuacuucggccuguucugccuccugaaccgcuacuuccggcugacccucgggguguacgacuaccuggugagcacccaggaguuccgcuacaugaacucccagggccugcugcccccgaacaacagcaucgacgccuucaagcucaacaucaagcugcucggggucggcggcaagcccugcaucaagguggccaccguccagugaggacuaguuauaagacugacuagcccgaugggccucccaacgggcccuccuccccuccuugcaccgagauuaauaaaaaaaaaaaaaaaaaaaaaaaaaaaaaaaaaaaaaaaaaaaaaaaaaaaaaaaaaaaaaaaaugcaucccccccccccccccccccccccccccccccaaaggcucuuuucagagccaccagaauu

SEQ ID NO: 22237 - RNA, 1093 nt, Artificial Sequence
  SARS-CoV-2__MT843314.1__non-structural protein 6 (NSP6) mRNA gc
aggagaaagcuuaccaugagcgccgugaagcgcaccaucaagggcacccaccacuggcugcuccugacgauccugaccucccuccugguccuggugcagagcacccaguggucccucuucuucuuccuguacgagaacgccuuccugcccuucgugauggggaucaucgcgaugagcgccuucgccaugauguucgucaagcacaagcacgccuuccucugccuguuccugcucccgucccuggccaccguggcguacuucaacaugguguacaugcccgccagcugggucaugcggaucaugacguggcuggacaugguggacaccucccucagcggcuucaagcugaaggacugcgugauguacgccuccgccgucgugcugcucauccugaugaccgcgcgcaccguguacgacgacggggcccggcgcgucuggacgcugaugaacgugcucacccugguguacaaggucuacuacggcaacgcccuggaccaggccaucagcaugugggcccucaucaucuccgugaccagcaacuacuccgggguggucaccacggugauguuccuggcgcggggcaucguguucaugugcgucgaguacugccccaucuucuucaucaccggcaacacccugcagugcaucaugcucguguacugcuuccugggguacuucugcacgugcuacuucggccuguucugccuccugaaccgcuacuuccggcugacccucgggguguacgacuaccuggucagcacccaggaguuccgcuacaugaacucccagggccugcugcccccgaagaacagcaucgacgccuucaagcucaacaucaagcugcucggggugggcggcaagcccugcaucaaggucgccaccgugcagugaggacuaguuauaagacugacuagcccgaugggccucccaacgggcccuccuccccuccuugcaccgagauuaauaaaaaaaaaaaaaaaaaaaaaaaaaaaaaaaaaaaaaaaaaaaaaaaaaaaaaaaaaaaaaaaaugcaucccccccccccccccccccccccccccccccaaaggcucuuuucagagccaccagaauu

SEQ ID NO: 22238 - RNA, 1093 nt, Artificial Sequence
  SARS-CoV-2__MT831149.1__non-structural protein 6 (NSP6) mRNA gc
aggagaaagcuuaccaugagcgccgugaagcgcaccaucaagggcacccaccacuggcugcuccugacgauccugaccucccuccugguccuggugcagagcacccaguggucccucuucuucuuccuguacgagaacgccuuccugcccuucgcgauggggaucaucgccaugagcgccuucgccaugauguucgugaagcacaagcacgccuuccucugccuguuccugcucccgucccuggcgaccgucgccuacuucaacaugguguacaugcccgccagcugggugaugcggaucaugacguggcuggacauggucgacaccucccucagcggcuucaagcugaaggacugcgugauguacgccuccgcggugguccugcucauccugaugaccgcccgcaccguguacgacgacggggcccggcgcguguggacgcugaugaacguccucacccugguguacaagguguacuacggcaacgcccuggaccaggccaucagcaugugggcguucaucaucuccgucaccagcaacuacuccgggguggugaccacggucauguuccucgcccggggcaucguguucaugugcguggaguacugccccaucuucuucaucaccggcaacacccugcagugcaucaugcuggucuacugcuuccucggguacuucugcacgugcuacuucggccuguucugccugcucaaccgcuacuuccggcugacccuggggguguacgacuaccucgugagcacccaggaguuccgcuacaugaacucccagggccugcugcccccgaagaacagcaucgacgccuucaagcucaacaucaagcugcugggggucggcggcaagcccugcaucaagguggccaccguccagugaggacuaguuauaagacugacuagcccgaugggccucccaacgggcccuccuccccuccuugcaccgagauuaauaaaaaaaaaaaaaaaaaaaaaaaaaaaaaaaaaaaaaaaaaaaaaaaaaaaaaaaaaaaaaaaaugcaucccccccccccccccccccccccccccccccaaaggcucuuuucagagccaccagaauu

SEQ ID NO: 22239 - RNA, 1093 nt, Artificial Sequence
  SARS-CoV-2__MT831152.1__non-structural protein 6 (NSP6) mRNA gc
aggagaaagcuuaccaugagcgccgugaagcgcaccaucaacggcacccaccacuggcugcuccugacgauccugaccucccuccugguccuggugcagagcacccaguggucccucuucuucuuccuguacgagaacgccuuccugcccuucgcgauggggaucaucgccaugagcgccuucgccaugauguucgugaagcacaagcacgccuuccucugccuguuccugcucccgucccuggcgaccgucgccuacuucaacaugguguacaugcccgccagcugggugaugcggaucaugacguggcuggacauggucgacaccucccucagcggcuucaagcugaaggacugcgugauguacgccuccgcggugguccugcucauccugaugaccgcccgcaccguguacgacgacggggcccggcgcguguggacgcugaugaacguccucacccugguguacaagguguacuacggcaacgcccuggaccaggccaucagcaugugggcgcucaucaucuccgucaccagcaacuacuccgggguggugaccacggucauguuccuggcccggggcaucguguucaugugcguggaguacugccccaucuucuucaucaccggcaacacccugcagugcaucaugcucgucuacugcuuccugggguacuucugcacgugcuacuucggccuguucugccuccugaaccgcuacuuccggcugacccucgggguguacgacuaccuggugagcacccaggaguuccgcuacaugaacucccagggccugcugcccccgaagaacagcaucgacgccuucaagcucaacaucaagcugcucggggucggcggcaagcccugcaucaagguggccaccguccagugaggacuaguuauaagacugacuagcccgaugggccucccaacgggcccuccuccccuccuugcaccgagauuaauaaaaaaaaaaaaaaaaaaaaaaaaaaaaaaaaaaaaaaaaaaaaaaaaaaaaaaaaaaaaaaaaugcaucccccccccccccccccccccccccccccccaaaggcucuuuucagagccaccagaauu

SEQ ID NO: 22240 - RNA, 1093 nt, Artificial Sequence
  SARS-CoV-2__MT831226.1__non-structural protein 6 (NSP6) mRNA gc
aggagaaagcuuaccaugagcgccgugaagcgcaccaucaagggcacccaccacuggcugcuccugacgaaccugaccucccuccugguccuggugcagagcacccaguggucccucuucuucuuccuguacgagaacgccuuccugcccuucgcgauggggaucaucgccaugagcgccuucgccaugauguucgugaagcacaagcacgccuuccucugccuguuccugcucccgucccuggcgaccgucgccuacuucaacaugguguacaugcccgccagcugggugaugcggaucaugacguggcuggacauggucgacaccucccucagcggcuucaagcugaaggacugcgugauguacgccuccgcggugguccugcucauccugaugaccgcccgcaccguguacgacgacggggcccggcgcguguggacgcugaugaacguccucacccugguguacaagguguacuacggcaacgcccuggaccaggccaucagcaugugggcgcucaucaucuccgucaccagcaacuacuccgggguggugaccacggucauguuccuggcccggggcaucguguucaugugcguggaguacugccccaucuucuucaucaccggcaacacccugcagugcaucaugcucgucuacugcuuccugggguacuucugcacgugcuacuucggccuguucugccuccugaaccgcuacuuccggcugacccucgggguguacgacuaccuggugagcacccaggaguuccgcuacaugaacucccagggccugcugcccccgaagaacagcaucgacgccuucaagcucaacaucaagcugcucggggucggcggcaagcccugcaucaagguggccaccguccagugaggacuaguuauaagacugacuagcccgaugggccucccaacgggcccuccuccccuccuugcaccgagauuaauaaaaaaaaaaaaaaaaaaaaaaaaaaaaaaaaaaaaaaaaaaaaaaaaaaaaaaaaaaaaaaaaugcaucccccccccccccccccccccccccccccccaaaggcucuuuucagagccaccagaauu

SEQ ID NO: 22241 - RNA, 1093 nt, Artificial Sequence
  SARS-CoV-2__MT831341.1__non-structural protein 6 (NSP6) mRNA gc
aggagaaagcuuaccaugagcgccgugaagcgcaccaucaagggcacccaccacuggcugcuccugacgauccugaccucccuccugguccuggugcagagcacccaguggucccucuucuucuucuucuacgagaacgccuuccugcccuucgcgauggggaucaucgccaugagcgccuucgccaugauguucgugaagcacaagcacgccuuccugugccucuuccugcugccgucccucgcgaccgucgccuacuucaacaugguguacaugcccgccagcugggugaugcggaucaugacguggcuggacauggucgacaccucccugagcggcuucaagcucaaggacugcgugauguacgccuccgcggugguccugcugauccucaugaccgcccgcaccguguacgacgacggggcccggcgcguguggacgcugaugaacguccugacccucuucuacaagguguacuacggcaacgcccuggaccaggccaucagcaugugggcgcugaucaucuccgugaccagcaacuacuccggggucgugaccacggugauguuccucgcccggggcaucgucuucaugugcguggaguacugccccaucuucuucaucaccggcaacacccugcagugcaucaugcugguguacugcuuccucggguacuucugcacgugcuacuucggccuguucugccugcucaaccgcuacuuccggcugacccugggggucuacgacuaccucgugagcacccaggaguuccgcuacaugaacucccagggccugcugcccccgaagaacagcaucgacgccuucaagcucaacaucaagcugcugggggugggcggcaagcccugcaucaaggucgccaccgugcagugaggacuaguuauaagacugacuagcccgaugggccucccaacgggcccuccuccccuccuugcaccgagauuaauaaaaaaaaaaaaaaaaaaaaaaaaaaaaaaaaaaaaaaaaaaaaaaaaaaaaaaaaaaaaaaaaugcaucccccccccccccccccccccccccccccccaaaggcucuuuucagagccaccagaauu

SEQ ID NO: 22242 - RNA, 1093 nt, Artificial Sequence
  SARS-CoV-2__MT831729.1__non-structural protein 6 (NSP6) mRNA gc
aggagaaagcuuaccaugagcgccgugaagcgcaccaucaagggcacccaccacuggcugcuccugacgauccugaccucccuccugguccuggugcagagcacccaguggucccucuucuucuuccuguacgagaacgccuuccugcccuucgcgauggggaucaucgccaugagcgccuucgccaugauguucgugaagcacaagcacgccuuccucugccuguuccugcucccgucccuggcgaccgucgccuacuucaacaugguguacaugcccgccagcugggugaugcggaucaugacguggcuggacauggucgacaccucccucagcggcuucaagcugaaggacugcgugauguacguguccgccgucgugcugcucauccugaugaccgcgcgcaccguguacgacgacggggcccggcgcgucuggacgcugaugaacgugcucacccugguguacaaggucuacuacggcaacgcccuggaccaggccaucagcaugugggcccucaucaucuccgugaccagcaacuacuccgggguggucaccacggugauguuccuggcgcggggcaucguguucaugugcgucgaguacugccccaucuucuucaucaccggcaacacccugcagugcaucaugcucguguacugcuuccugggguacuucugcacgugcuacuucggccuguucugccuccugaaccgcuacuuccggcugacccucgggguguacgacuaccuggucagcacccaggaguuccgcuacaugaacucccagggccugcugcccccgaagaacagcaucgacgccuucaagcucaacaucaagcugcucggggugggcggcaagcccugcaucaaggucgccaccgugcagugaggacuaguuauaagacugacuagcccgaugggccucccaacgggcccuccuccccuccuugcaccgagauuaauaaaaaaaaaaaaaaaaaaaaaaaaaaaaaaaaaaaaaaaaaaaaaaaaaaaaaaaaaaaaaaaaugcaucccccccccccccccccccccccccccccccaaaggcucuuuucagagccaccagaauu

SEQ ID NO: 22243 - RNA, 1093 nt, Artificial Sequence
  SARS-CoV-2__MT834038.1__non-structural protein 6 (NSP6) mRNA gc
aggagaaagcuuaccaugagcgccgugaagcgcaccaucaagggcacccaccacuggcugcuccugacgauccugaccucccuccugguccuggugcagagcacccaguggucccucuucuucuuccuguacgagaacgccuuccugcccuucgcgauggggaucaucgccaugagcgccuucgccaugauguucgugaagcacaagcacgccuuccucugccuguuccugcucccgucccuggcgaccgucgccuacuucaacaugguguacaugcccgccagcugggugaugcggaucaugacguggcuggacauggucgacaccucccucagcggcuucaagcugaaggacugcgggauguacgccuccgcgguggugcugcucauccugaugaccgcccgcaccgucuacgacgacggcgcccggcgcguguggacgcugaugaacgugcucacccuggucuacaagguguacuacgggaacgcccuggaccaggccaucagcaugugggcgcucaucaucuccgugaccagcaacuacuccggcgucgugaccacggugauguuccuggcccggggcaucgucuucaugugcguggaguacugccccaucuucuucaucaccgggaacacccugcagugcaucaugcucguguacugcuuccugggcuacuucugcacgugcuacuucgggcuguucugccuccugaaccgcuacuuccggcugacccucggcgucuacgacuaccuggugagcacccaggaguuccgcuacaugaacucccaggggcugcugcccccgaagaacagcaucgacgccuucaagcucaacaucaagcugcucggcgugggcgggaagcccugcaucaaggucgccaccgugcagugaggacuaguuauaagacugacuagcccgaugggccucccaacgggcccuccuccccuccuugcaccgagauuaauaaaaaaaaaaaaaaaaaaaaaaaaaaaaaaaaaaaaaaaaaaaaaaaaaaaaaaaaaaaaaaaaugcaucccccccccccccccccccccccccccccccaaaggcucuuuucagagccaccagaauu

SEQ ID NO: 22244 - RNA, 1093 nt, Artificial Sequence
  SARS-CoV-2__MT834100.1__non-structural protein 6 (NSP6) mRNA gc
aggagaaagcuuaccaugagcgccgugaagcgcaccaucaagggcaccuaccacuggcugcuccugacgauccugaccucccuccugguccuggugcagagcacccaguggucccucuucuucuuccuguacgagaacgccuuccugcccuucgcgauggggaucaucgccaugagcgccuucgccaugauguucgugaagcacaagcacgccuuccucugccuguuccugcucccgucccuggcgaccgucgccuacuucaacaugguguacaugcccgccagcugggugaugcggaucaugacguggcuggacauggucgacaccucccucagcggcuucaagcugaaggacugcgugauguacgccuccgcggugguccugcucauccugaugaccgcccgcaccguguacgacgacggggcccggcgcguguggacgcugaugaacguccucacccugguguacaagguguacuacggcaacgcccuggaccaggccaucagcaugugggcgcucaucaucuccgucaccagcaacuacuccgggguggugaccacggucauguuccuggcccggggcaucguguucaugugcguggaguacugccccaucuucuucaucaccggcaacacccugcagugcaucaugcucgucuacugcuuccugggguacuucugcacgugcuacuucggccuguucugccuccugaaccgcuacuuccggcugacccucgggguguacgacuaccuggugagcacccaggaguuccgcuacaugaacucccagggccugcugcccccgaagaacagcaucgacgccuucaagcucaacaucaagcugcucggggucggcggcaagcccugcaucaagguggccaccguccagugaggacuaguuauaagacugacuagcccgaugggccucccaacgggcccuccuccccuccuugcaccgagauuaauaaaaaaaaaaaaaaaaaaaaaaaaaaaaaaaaaaaaaaaaaaaaaaaaaaaaaaaaaaaaaaaaugcaucccccccccccccccccccccccccccccccaaaggcucuuuucagagccaccagaauu

SEQ ID NO: 22245 - RNA, 1093 nt, Artificial Sequence
  SARS-CoV-2__MT834849.1__non-structural protein 6 (NSP6) mRNA gc
aggagaaagcuuaccaugagcgccgugaagcgcaccaucaagggcacccaccacuggcugcuccugacgauccugaccucccuccugguccuggugcagagcacccaguggucccucuucuucuuccuguacgagaacgccuuccugcccuucgcgauggggaucaucgccaugagcgccuucgccaugauguucgugaagcacaagcacgccuuccucugccuguuccugcucccgucccuggcgaccgucgccuacuucaacaugguguacaugcccgccagcugggugaugcggaucaugacguggcuggacauggucgacaccucccucagcggcuucaagcugaaggacugcgugauguacgccuccgcggugguccugcucauccugaugaccgcccgcaccguguacgacgacggggcccggcgcguguggacgcugaugaacguccucacccuggccuacaagguguacuacggcaacgcccuggaccaggcgaucagcaugugggcccucaucaucuccgugaccagcaacuacuccggggucgugaccacggugauguuccuggcccggggcaucgucuucaugugcguggaguacugccccaucuucuucaucaccggcaacacccugcagugcaucaugcucguguacugcuuccugggguacuucugcacgugcuacuucggccuguucugccuccugaaccgcuacuuccggcugacccucggggucuacgacuaccuggugagcacccaggaguuccgcuacaugaacucccagggccugcugcccccgaagaacagcaucgacgccuucaagcucaacaucaagcugcucggggugggcggcaagcccugcaucaaggucgccaccgugcagugaggacuaguuauaagacugacuagcccgaugggccucccaacgggcccuccuccccuccuugcaccgagauuaauaaaaaaaaaaaaaaaaaaaaaaaaaaaaaaaaaaaaaaaaaaaaaaaaaaaaaaaaaaaaaaaaugcaucccccccccccccccccccccccccccccccaaaggcucuuuucagagccaccagaauu

SEQ ID NO: 22246 - RNA, 1093 nt, Artificial Sequence
  SARS-CoV-2__MT825091.1__non-structural protein 6 (NSP6) mRNA gc
aggagaaagcuuaccaugagcgccgugaagcgcaccaucaagggcacccaccacuggcugcuccugacgauccugaccucccuccugguccuggugcagagcacccaguggucccucuucuucuuccuguacgagaacgccuuccugcccuucgcgauggacaucaucgccauguacgccuucgccaugauguucgugaagcacaagaacgccuuccucuaccuguaccugcucccgagccuggcgaccgucgccuacuucaacaugguguacaugcuggccuccugggugaugcggaucaugacguggcucgacaugggggacaccagccuguccggcuucaagcugaaggacugcgucauguacgccagcgggguggugcuccugauccugaugaccgcgcgcaccgucuacgacgacggcgcccggcgcgugcucacgcugaugaacgugcugacccucgucuacaagguguacuacgggaacgcccuggaccaggccaucuccaugugggcccugaucaucagcgugaccuccaacuacagcggcgucgugaccacggugaugucccucgcgcgggacaucgucuucaugugcguggaguacugccccaucuucuucaucaccggcaacacccugcagugcaucaugcugguguacugcuuccucggguacagcuacacgugcuacuucggccuguucugccugcucaaccgcuacuuccggcugacccugggggucuacgacuaccucguguccacccaggaguuccgcuacaugaacagccagggccugcugccgcccaagaacuccaucgacgccuucaagcucaacaucaagcugcugggggugggcggcaagcccugcaucaaggucgccaccgugcagugaggacuaguuauaagacugacuagcccgaugggccucccaacgggcccuccuccccuccuugcaccgagauuaauaaaaaaaaaaaaaaaaaaaaaaaaaaaaaaaaaaaaaaaaaaaaaaaaaaaaaaaaaaaaaaaaugcaucccccccccccccccccccccccccccccccaaaggcucuuuucagagccaccagaauu

SEQ ID NO: 22247 - RNA, 1093 nt, Artificial Sequence
  SARS-CoV-2__MT821674.1__non-structural protein 6 (NSP6) mRNA gc
aggagaaagcuuaccaugagcgccgugaagcgcaccaucaagggcacccaccacuggcugcuccugacgauccugaccucccuccugguccuggugcagagcacccaguggucccucuucuucuuccuguacgagaacguguuccugcccuucgccauggggaucaucgcgaugagcgccuucgccaugauguucgucaagcacaagcacgccuuccucugccuguuccugcucccgucccuggccaccguggcguacuucaacaugguguacaugcccgccagcugggucaugcggaucaugacguggcuggacaugguggacaccucccucagcggcuucaagcugaaggacugcgugauguacgccuccgccgucgugcugcucauccugaugaccgcgcgcaccguguacgacgacggggcccggcgcgucuggacgcugaugaacgugcucacccugguguacaaggucuacuacggcaacgcccuggaccaggccaucagcaugugggcccucaucaucuccgugaccagcaacuacuccgggguggucaccacggugauguuccuggcgcggggcaucguguucaugugcgucgaguacugccccaucuucuucaucaccggcaacacccugcagugcaucaugcucguguacugcuuccugggguacuucugcacgugcuacuucggccuguucugccuccugaaccgcuacuuccggcugacccucgggguguacgacuaccuggucagcacccaggaguuccgcuacaugaacucccagggccugcugcccccgaagaacagcaucgacgccuucaagcucaacaucaagcugcucggggugggcggcaagcccugcaucaaggucgccaccgugcagugaggacuaguuauaagacugacuagcccgaugggccucccaacgggcccuccuccccuccuugcaccgagauuaauaaaaaaaaaaaaaaaaaaaaaaaaaaaaaaaaaaaaaaaaaaaaaaaaaaaaaaaaaaaaaaaaugcaucccccccccccccccccccccccccccccccaaaggcucuuuucagagccaccagaauu

SEQ ID NO: 22248 - RNA, 1093 nt, Artificial Sequence
  SARS-CoV-2__MT821782.1__non-structural protein 6 (NSP6) mRNA gc
aggagaaagcuuaccaugagcgccgugaagcgcaccaucaagggcacccaccacuggcugcuccugacgauccugaccuccuuccucguccuggugcagagcacccaguggucccuguucuucuuccucuacgagaacgccuuccugcccuucgcgauggggaucaucgccaugagcgccuucgccaugauguucgugaagcacaagcacgccuuccugugccucuuccugcugccgucccucgcgaccgucgccuacuucaacaugguguacaugcccgccagcugggugaugcggaucaugacguggcuggacauggucgacaccucccugagcggcuucaagcucaaggacugcgugauguacgccuccgcggugguccugcugauccucaugaccgcccgcaccguguacgacgacggggcccggcgcguguggacgcugaugaacguccugacccucguguacaagguguacuacggcaacgcccuggaccaggccaucagcaugugggcgcugaucaucuccgucaccagcaacuacuccgggguggugaccacggucauguuccucgcccggggcaucguguucaugugcguggaguacugccccaucuucuucaucaccggcaacacccugcagugcaucaugcuggucuacugcuuccucggguacuucugcacgugcuacuucggccuguucugccugcucaaccgcuacuuccggcugacccuggggguguacgacuaccucgugagcacccaggaguuccgcuacaugaacucccagggccugcugcccccgaagaacagcaucgacgccuucaagcucaacaucaagcugcugggggucggcggcaagcccugcaucaagguggccaccguccagugaggacuaguuauaagacugacuagcccgaugggccucccaacgggcccuccuccccuccuugcaccgagauuaauaaaaaaaaaaaaaaaaaaaaaaaaaaaaaaaaaaaaaaaaaaaaaaaaaaaaaaaaaaaaaaaaugcaucccccccccccccccccccccccccccccccaaaggcucuuuucagagccaccagaauu

SEQ ID NO: 22249 - RNA, 1093 nt, Artificial Sequence
  SARS-CoV-2__MT821787.1__non-structural protein 6 (NSP6) mRNA gc
aggagaaagcuuaccaugagcgccgugaagcgcaccaucaagggcacccaccacuggcugcuccugacgauccugaccucccuccugguccuggugcagagcacccaguggucccucuucuucuuccuguacgagaacgccuuccugcccuucgcgauggggaucaucgccaugagcgccuucgccaugauguucgugaagcacaagcacgccuuccucugccuguuccugcucccgucccuggcgaccgucguguacuucaacaugguguacaugcccgccagcugggucaugcggaucaugacguggcuggacaugguggacaccucccucagcggcuucaagcugaaggacugcgugauguacgccuccgccgucgugcugcucauccugaugaccgcgcgcaccguguacgacgacggggcccggcgcgucuggacgcugaugaacgugcucacccugguguacaaggucuacuacggcaacgcccuggaccaggccaucagcaugugggcccucaucaucuccgugaccagcaacuacuccgggguggucaccacggugauguuccuggcgcggggcaucguguucaugugcgucgaguacugccccaucuucuucaucaccggcaacacccugcagugcaucaugcucguguacugcuuccugggguacuucugcacgugcuacuucggccuguucugccuccugaaccgcuacuuccggcugacccucgggguguacgacuaccuggucagcacccaggaguuccgcuacaugaacucccagggccugcugcccccgaagaacagcaucgacgccuucaagcucaacaucaagcugcucggggugggcggcaagcccugcaucaaggucgccaccgugcagugaggacuaguuauaagacugacuagcccgaugggccucccaacgggcccuccuccccuccuugcaccgagauuaauaaaaaaaaaaaaaaaaaaaaaaaaaaaaaaaaaaaaaaaaaaaaaaaaaaaaaaaaaaaaaaaaugcaucccccccccccccccccccccccccccccccaaaggcucuuuucagagccaccagaauu

SEQ ID NO: 22250 - RNA, 1093 nt, Artificial Sequence
  SARS-CoV-2__MT810523.1__non-structural protein 6 (NSP6) mRNA gc
aggagaaagcuuaccaugagcgccgugaagcgcaccaucaagggcacccaccacuggcugcuccugacgauccugaccucccuccugguccuggugcagagcacccaguggucccucuucuucuuccuguacgagaacgccuuccugcccuucgcgauggggaucaucgccaugagcgccuucuccaugauguucgugaagcacaagcacgccuuccucugccuguuccugcucccgagccuggccaccgucgcguacuucaacaugguguacaugcccgccuccugggugaugcggaucaugacguggcuggacauggucgacaccagccucuccggcuucaagcugaaggacugcgugauguacgccagcgccgugguccugcucauccugaugaccgcgcgcaccguguacgacgacggggcccggcgcguguggacgcugaugaacguccucacccugguguacaagguguacuacggcaacgcccuggaccaggccaucuccaugugggcccucaucaucagcgucaccuccaacuacagcgggguggugaccacggucauguuccuggcgcggggcaucguguucaugugcguggaguacugccccaucuucuucaucaccggcaacacccugcagugcaucaugcucgucuacugcuuccugggguacuucugcacgugcuacuucggccuguucugccuccugaaccgcuacuuccggcugacccucgggguguacgacuaccugguguccacccaggaguuccgcuacaugaacagccagggccugcugcccccgaagaacuccaucgacgccuucaagcucaacaucaagcugcucggggucggcggcaagcccugcaucaagguggccaccguccagugaggacuaguuauaagacugacuagcccgaugggccucccaacgggcccuccuccccuccuugcaccgagauuaauaaaaaaaaaaaaaaaaaaaaaaaaaaaaaaaaaaaaaaaaaaaaaaaaaaaaaaaaaaaaaaaaugcaucccccccccccccccccccccccccccccccaaaggcucuuuucagagccaccagaauu

SEQ ID NO: 22251 - RNA, 1093 nt, Artificial Sequence
  SARS-CoV-2__MT810568.1__non-structural protein 6 (NSP6) mRNA gc
aggagaaagcuuaccaugagcgccgugaagcgcaccaucaagggcacccaccacuggcugcuccugacgauccugaccucccuccugguccuggugcagagcacccaguggucccucuucuucuuccuguacgagaacgccuuccugagcuucgcgauggggaucaucgccauguccgccuucgccaugauguucgugaagcacaagcacgccuuccucugccuguuccugcuccccagccuggcgaccgucgccuacuucaacaugguguacaugccggccuccugggugaugcggaucaugacguggcuggacauggucgacaccagccucuccggcuucaagcugaaggacugcgugauguacgccagcgcggugguccugcucauccugaugaccgcccgcaccguguacgacgacggggcccggcgcguguggacgcugaugaacguccucacccugguguacaagguguacuacggcaacgcccuggaccaggccaucuccaugugggcgcucaucaucagcgucaccuccaacuacagcgggguggugaccacggucauguuccuggcccggggcaucguguucaugugcguggaguacugccccaucuucuucaucaccggcaacacccugcagugcaucaugcucgucuacugcuuccugggguacuucugcacgugcuacuucggccuguucugccuccugaaccgcuacuuccggcugacccucgggguguacgacuaccugguguccacccaggaguuccgcuacaugaacagccagggccugcucccgcccaagaacuccaucgacgccuucaagcugaacaucaagcugcucggggucggcggcaagcccugcaucaagguggccaccguccagugaggacuaguuauaagacugacuagcccgaugggccucccaacgggcccuccuccccuccuugcaccgagauuaauaaaaaaaaaaaaaaaaaaaaaaaaaaaaaaaaaaaaaaaaaaaaaaaaaaaaaaaaaaaaaaaaugcaucccccccccccccccccccccccccccccccaaaggcucuuuucagagccaccagaauu

SEQ ID NO: 22252 - RNA, 1093 nt, Artificial Sequence
  SARS-CoV-2__MT810731.1__non-structural protein 6 (NSP6) mRNA gc
aggagaaagcuuaccaugagcgccgugaagcgcaccaucaagggcacccaccacuggcugcuccugacgauccugaccucccuccugguccuggugcagagcacccaguggucccucuucuucuuccuguacgagaacgccuuccugcccuucgcgauggggaucaucgccaugagcgccuucgccaugauguucgugaagcacaagcacgccuuccucugccuguuccugcucccgucccuggcgaccgucgccuacuucaacaugguguacaugcccgccagcugggugaugcggaucaugacguggcuggacauggucgacaccucccucuucggcuucaagcugaaggacugcgugauguacgccagcgcggugguccugcucauccugaugaccgcccgcaccguguacgacgacggggcccggcgcguguggacgcugaugaacguccucacccugguguacaagguguacuacggcaacgcccuggaccaggccaucuccaugugggcgcucaucaucagcgucaccuccaacuacagcgggguggugaccacggucauguuccuggcccggggcaucguguucaugugcguggaguacugccccaucuucuucaucaccggcaacacccugcagugcaucaugcucgucuacugcuuccugggguacuucugcacgugcuacuucggccuguucugccuccugaaccgcuacuuccggcugacccucgggguguacgacuaccugguguccacccaggaguuccgcuacaugaacagccagggccugcugcccccgaagaacuccaucgacgccuucaagcucaacaucaagcugcucggggucggcggcaagcccugcaucaagguggccaccguccagugaggacuaguuauaagacugacuagcccgaugggccucccaacgggcccuccuccccuccuugcaccgagauuaauaaaaaaaaaaaaaaaaaaaaaaaaaaaaaaaaaaaaaaaaaaaaaaaaaaaaaaaaaaaaaaaaugcaucccccccccccccccccccccccccccccccaaaggcucuuuucagagccaccagaauu

SEQ ID NO: 22253 - RNA, 1093 nt, Artificial Sequence
  SARS-CoV-2__MT811234.1__non-structural protein 6 (NSP6) mRNA gc
aggagaaagcuuaccaugagcgccgugaagcgcaccaucaagggcacccaccacuggcugcuccugacgauccugaccucccuccugguccuggugcagagcacccaguggucccucuucuucuuccuguacgagaacgccuuccugcccuucgcgauggggaucaucgccaugagcgccuucgccaugauguucgugaagcacaagcacgccuuccucugccuguuccugcucccgucccuggcgaccgucgccuacuucaacaugguguacaugcccgccagcuggcugaugcggaucaugacguggcucgacaugguggacaccucccugagcggcuucaagcugaaggacugcgucauguacgccuccgcgguggugcuccugauccugaugaccgcccgcaccgucuacgacgacggggcccggcgcguguggacgcucaugaacgugcugacccuggucuacaagguguacuacggcaacgcccucgaccaggccaucagcaugugggcgcugaucaucuccgugaccagcaacuacuccggggucgugaccacggugauguuccuggcccggggcaucgucuucaugugcguggaguacugccccaucuucuucaucaccggcaacacccuccagugcaucaugcugguguacugcuuccugggguacuucugcacgugcuacuucggccucuucugccugcugaaccgcuacuuccggcucacccugggggucuacgacuaccuggugagcacccaggaguuccgcuacaugaacucccagggccuccugcccccgaagaacagcaucgacgccuucaagcugaacaucaagcuccugggggugggcggcaagcccugcaucaaggucgccaccgugcagugaggacuaguuauaagacugacuagcccgaugggccucccaacgggcccuccuccccuccuugcaccgagauuaauaaaaaaaaaaaaaaaaaaaaaaaaaaaaaaaaaaaaaaaaaaaaaaaaaaaaaaaaaaaaaaaaugcaucccccccccccccccccccccccccccccccaaaggcucuuuucagagccaccagaauu

SEQ ID NO: 22254 - RNA, 1093 nt, Artificial Sequence
  SARS-CoV-2__MT811513.1__non-structural protein 6 (NSP6) mRNA gc
aggagaaagcuuaccaugagcgccgugaagcgcaccaucaagggcacccaccacuggcugcuccugacgauccugaccucccuccugguccuggugcagagcacccagugguuccucuucuucuuccuguacgagaacgccuuccugcccuucgcgauggggaucaucgccauguccgccuucgccaugauguucgugaagcacaagcacgccuuccucugccuguuccugcucccgagccuggcgaccgucgccuacuucaacaugguguacaugcccgccuccugggugaugcggaucaugacguggcuggacauggucgacaccagccucuccggcuucaagcugaaggacugcgugauguacgccagcgcggugguccugcucauccugaugaccgcccgcaccguguacgacgacggggcccggcgcguguggacgcugaugaacguccucacccugguguacaagguguacuacggcaacgcccuggaccaggccaucuccaugugggcgcucaucaucagcgucaccuccaacuacagcgggguggugaccacggucauguuccuggcccggggcaucguguucaugugcguggaguacugccccaucuucuucaucaccggcaacacccugcagugcaucaugcucgucuacugcuuccugggguacuucugcacgugcuacuucggccuguucugccuccugaaccgcuacuuccggcugacccucgggguguacgacuaccugguguccacccaggaguuccgcuacaugaacagccagggccugcugcccccgaagaacuccaucgacgccuucaagcucaacaucaagcugcucggggucggcggcaagcccugcaucaagguggccaccguccagugaggacuaguuauaagacugacuagcccgaugggccucccaacgggcccuccuccccuccuugcaccgagauuaauaaaaaaaaaaaaaaaaaaaaaaaaaaaaaaaaaaaaaaaaaaaaaaaaaaaaaaaaaaaaaaaaugcaucccccccccccccccccccccccccccccccaaaggcucuuuucagagccaccagaauu

SEQ ID NO: 22255 - RNA, 1093 nt, Artificial Sequence
  SARS-CoV-2__MT811530.1__non-structural protein 6 (NSP6) mRNA gc
aggagaaagcuuaccaugagcgccgugaagcgcaccaucaagggcacccaccacuggcugcuccugacgauccugaccucccuccugguccuggugcagagcacccaguggucccucuucuucuuccuguacgagaacgccuuccugcccuucgcgauggggaucaucgccaugagcgccuucgccaugauguucgugaagcacaagcacgccuuccucugccuguuccugcucccgucccuggcgaccgucgccuacuucaacaugguguacaugcccgccagcugggugaugcggaucaugacguggcuggacauggucgacaccucccucagcggcuucaagcugaaggacugcgugauguacgccuccgcggugguccugcucauccugaugaccgcccgcaccguguacgacgacggggcccggcgcguguggacgcugaugaacguccucacccugguguacaagguguacuacggcaacgcccuggaccaggccaucagcaugugggcgcucaucaucuccgucaccagcaacuacuccgggguggugaccacggucauguuccuggcccggggcaucguguucaugugcguggaguacugccccaucuucuucaucaccggcaacacccugcagugcaucaugcucgucuacugcuuccugggguacuucugcacgugcuacuucggccuguucugccuccugaaccgcuacuuccggcugacccucgggguguacgacuaccuggugagcacccaggaguuccgcuacaugaacucccacggccugcugcccccgaagaacagcaucgacgccuucaagcucaacaucaagcugcucggggucggcggcaagcccugcaucaagguggccaccguccagugaggacuaguuauaagacugacuagcccgaugggccucccaacgggcccuccuccccuccuugcaccgagauuaauaaaaaaaaaaaaaaaaaaaaaaaaaaaaaaaaaaaaaaaaaaaaaaaaaaaaaaaaaaaaaaaaugcaucccccccccccccccccccccccccccccccaaaggcucuuuucagagccaccagaauu

SEQ ID NO: 22256 - RNA, 1093 nt, Artificial Sequence
  SARS-CoV-2__MT811552.1__non-structural protein 6 (NSP6) mRNA gc
aggagaaagcuuaccaugagcgccgugaagcgcaccaucaagggcacccaccacuggcugcuccugacgauccugaccucccuccugguccuggugcagagcacccaguggucccucuucuucuucuucuucuacgagaacgccuuccugcccuucgcgauggggaucaucgccaugagcgccuucgccaugauguucgugaagcacaagcacgccuuccugugccucuuccugcugccgucccucgcgaccgucgccuacuucaacaugguguacaugcccgccagcugggugaugcggaucaugacguggcuggacauggucgacaccucccugagcggcuucaagcucaaggacugcgugauguacgccuccgcggugguccugcugauccucaugaccgcccgcaccguguacgacgacggggcccggcgcguguggacgcugaugaacguccugacccucguguacaagguguacuacggcaacgcccuggaccaggccaucagcaugugggcgcugaucaucuccgucaccagcaacuacuccgggguggugaccacggucauguuccucgcccggggcaucguguucaugugcguggaguacugccccaucuucuucaucaccggcaacacccugcagugcaucaugcuggucuacugcuuccucggguacuucugcacgugcuacuucggccuguucugccugcucaaccgcuacuuccggcugacccuggggguguacgacuaccucgugagcacccaggaguuccgcuacaugaacucccagggccugcugcccccgaagaacagcaucgacgccuucaagcucaacaucaagcugcugggggucggcggcaagcccugcaucaagguggccaccgucugaggacuaguuauaagacugacuagcccgaugggccucccaacgggcccuccuccccuccuugcaccgagauuaauaaaaaaaaaaaaaaaaaaaaaaaaaaaaaaaaaaaaaaaaaaaaaaaaaaaaaaaaaaaaaaaaugcaucccccccccccccccccccccccccccccccaaaggcucuuuucagagccaccagaauu

SEQ ID NO: 22257 - RNA, 1093 nt, Artificial Sequence
  SARS-CoV-2__MT800794.1__non-structural protein 6 (NSP6) mRNA gc
aggagaaagcuuaccaugagcgccgugaagcgcaccaucaagggcacccaccacuggcugcuccugacgauccugaccucccuccugguccuggugcagagcacccaguggucccucuucuucuuccuguacgagaacgccuuccugcccuucgcgauggggaucaucgccaugagcgccuucgccaugauguucgugaagcacaagcacgccuuccucugccuguuccugcucccgucccuggcgaccgucgccuacuucaacaugguguacaugcccgccagcugggugaugcggaucaugacguggcuggacauggucgacaccucccucagcggcuucaagcugaaggacugcgugauguacgccuccgcggugguccugcucauccugaugaccgcccgcaccguguacgacgacggggcccggcgcguguggacguucaugaacguccugacccucguguacaagguguacuacggcaacgcccuggaccaggccaucagcaugugggcgcugaucaucuccgucaccagcaacuacuccgggguggugaccacggucauguuccucgcccggggcaucguguucaugugcguggaguacugccccaucuucuucaucaccggcaacacccugcagugcaucaugcuggucuacugcuuccucggguacuucugcacgugcuacuucggccuguucugccugcucaaccgcuacuuccggcugacccuggggguguacgacuaccucgugagcacccaggaguuccgcuacaugaacucccagggccugcugcccccgaagaacagcaucgacgccuucaagcucaacaucaagcugcugggggucggcggcaagcccugcaucaagguggccaccguccagugaggacuaguuauaagacugacuagcccgaugggccucccaacgggcccuccuccccuccuugcaccgagauuaauaaaaaaaaaaaaaaaaaaaaaaaaaaaaaaaaaaaaaaaaaaaaaaaaaaaaaaaaaaaaaaaaugcaucccccccccccccccccccccccccccccccaaaggcucuuuucagagccaccagaauu

SEQ ID NO: 22258 - RNA, 1093 nt, Artificial Sequence
  SARS-CoV-2__MT786438.1__non-structural protein 6 (NSP6) mRNA gc
aggagaaagcuuaccaugagcgccgugaagcgcaccaucaagggcaccuaccacuggcugcuccugacgauccugaccucccuccugguccuggugcagagcacccaguggucccucuucuucuucuucuacgagaacgccuuccugcccuucgcgauggggaucaucgccaugagcgccuucgccaugauguucgugaagcacaagcacgccuuccugugccucuuccugcugccgucccucgcgaccgucgccuacuucaacaugguguacaugcccgccagcugggugaugcggaucaugacguggcuggacauggucgacaccucccugagcggcuucaagcucaaggacugcgugauguacgccuccgcggugguccugcugauccucaugaccgcccgcaccguguacgacgacggggcccggcgcguguggacgcugaugaacguccugacccucguguacaagguguacuacggcaacgcccuggaccaggccaucagcaugugggcgcugaucaucuccgucaccagcaacuacuccgggguggugaccacggucauguuccucgcccggggcaucguguucaugugcguggaguacugccccaucuucuucaucaccggcaacacccugcagugcaucaugcuggucuacugcuuccucggguacuucugcacgugcuacuucggccuguucugccugcucaaccgcuacuuccggcugacccuggggguguacgacuaccucgugagcacccaggaguuccgcuacaugaacucccagggccugcugcccccgaagaacagcaucgacgccuucaagcucaacaucaagcugcugggggucggcggcaagcccugcaucaagguggccaccguccagugaggacuaguuauaagacugacuagcccgaugggccucccaacgggcccuccuccccuccuugcaccgagauuaauaaaaaaaaaaaaaaaaaaaaaaaaaaaaaaaaaaaaaaaaaaaaaaaaaaaaaaaaaaaaaaaaugcaucccccccccccccccccccccccccccccccaaaggcucuuuucagagccaccagaauu

SEQ ID NO: 22259 - RNA, 1093 nt, Artificial Sequence
  SARS-CoV-2__MT786845.1__non-structural protein 6 (NSP6) mRNA gc
aggagaaagcuuaccaugagcgccgugaagcgcaccaucaagggcacccaccacuggcugcuccugacgauccugaccucccuccugguccuggugcagagcacccaguggucccucuucuucuuccuguacgagaacgccuuccugcccuucgcgauggggaucaucgccaugagcgccuucgccaugauguucgugaagcacaagcacgccuuccucugccuguuccugcucccgucccuggcgaccgucgccuacuucaacaugguguacaugcccgccagcugggugaugcggaucaugacguggcuggacauggucgacaccucccucagcggcuucaagcugaaggacugcgugauguacgccuccgcggugguccugcucauccugaugaccgcccgcaccguguacgacgacggggcccggcgcguguggacgcugaugaacguccucacccugguguacaagguguacuacggcaacgcccuggaccaggccaucagcaugugggcgcucaucaucuccgucaccagcaacuacuccgggguggugaccacggucauguuccuggcccggggcaucguguucaugugcguggaguacugccccaucuucuucaucaccggcaacacccugcagugcaucaugcucgucuacugcuuccugggguacuucugcacgugcuacuucggccuguucugccuccugaaccgcuacuuccggcugacccucgggguguacgacuaccuggugagcacccaggaguuccgcuacaugaacucccagggccuguucccgcccaagaacagcaucgacgccuucaagcucaacaucaagcugcugggggucggcggcaagcccugcaucaagguggccaccguccagugaggacuaguuauaagacugacuagcccgaugggccucccaacgggcccuccuccccuccuugcaccgagauuaauaaaaaaaaaaaaaaaaaaaaaaaaaaaaaaaaaaaaaaaaaaaaaaaaaaaaaaaaaaaaaaaaugcaucccccccccccccccccccccccccccccccaaaggcucuuuucagagccaccagaauu

SEQ ID NO: 22260 - RNA, 1093 nt, Artificial Sequence
  SARS-CoV-2__MT764170.1__non-structural protein 6 (NSP6) mRNA gc
aggagaaagcuuaccaugagcgccgugaagcgcaccaucaagggcacccaccacuggcugcuccugacgauccugaccucccuccugguccuggugcagagcacccaguggucccucuucuucuuccuguacgagaacgccuuccugcccuucgcgauggggaucaucgccaugagcgccuucgccaugauguucgugaagcacaagcacgccuuccucugccuguuccugcucccgucccuggcgaccgucgccuacuucaacaugguguacaugcccgccagcugggugaugcggaucaugacguggcuggacauggucgacaccucccucagcggcuucaagcugaaggacugcgugauguacgccuccgcggugguccugcucauccugaugaccgcccgcaccguguacgacgacggggcccggcgcguguggacgcugaugaacguccucacccugguguacaagguguacuacggcaacgcccuggaccaggccaucagcaugugggcgcucaucaucuccgucaccagcaacuacuccgggguggugaccacggucaucuuccuggcccggggcaucguguucaugugcguggaguacugccccaucuucuucaucaccggcaacacccugcagugcaucaugcucgucuacugcuuccugggguacuucugcacgugcuacuucggccuguucugccuccugaaccgcuacuuccggcugacccucgggguguacgacuaccuggugagcacccaggaguuccgcuacaugaacucccagggccugcugcccccgaagaacagcaucgacgccuucaagcucaacaucaagcugcucggggucggcggcaagcccugcaucaagguggccaccguccagugaggacuaguuauaagacugacuagcccgaugggccucccaacgggcccuccuccccuccuugcaccgagauuaauaaaaaaaaaaaaaaaaaaaaaaaaaaaaaaaaaaaaaaaaaaaaaaaaaaaaaaaaaaaaaaaaugcaucccccccccccccccccccccccccccccccaaaggcucuuuucagagccaccagaauu

SEQ ID NO: 22261 - RNA, 1093 nt, Artificial Sequence
  SARS-CoV-2__MT755837.1__non-structural protein 6 (NSP6) mRNA gc
aggagaaagcuuaccaugagcgccgugaagcgcaccaucaagggcacccaccacuggcugcuccugacgauccugaccucccuccugguccuggugcagagcacccaguggucccucuucuucuuccuguacgagaacgccuuccugcccuucgcgauggggaucaucgccaugagcgccuucgccaugauguucgugaagcacaagcacgccuuccucugccuguuccugcucccgucccuggcgaccgucgccuacuucaacaugguguacaugcccgccagcugggugaugcggaucaugacguggcuggacauggucgacaccucccucagcggcuucaagcugaaggacugcgugauguacgccuccgcggugguccugcucauccugaugaccgcccgcaccguguacgacgacggggcccggcgcguguggacgcugaugaacguccucacccugguguacaagguguacuacggcaacgcccuggaccaggccaucagcaugugggcgcucaucaucuccgucaccagcaacuacuccgggguggugaccacggucauguuccugacccggggcaucguguucaugugcguggaguacugccccaucuucuucaucaccggcaacacccugcagugcaucaugcucgucuacugcuuccugggguacuucugcacgugcuacuucggccuguucugccuccugaaccgcuacuuccggcugacccucgggguguacgacuaccuggugagcacccaggaguuccgcuacaugaacucccagggccugcugcccccgaagaacagcaucgacgccuucaagcucaacaucaagcugcucggggucggcggcaagcccugcaucaagguggccaccguccagugaggacuaguuauaagacugacuagcccgaugggccucccaacgggcccuccuccccuccuugcaccgagauuaauaaaaaaaaaaaaaaaaaaaaaaaaaaaaaaaaaaaaaaaaaaaaaaaaaaaaaaaaaaaaaaaaugcaucccccccccccccccccccccccccccccccaaaggcucuuuucagagccaccagaauu

SEQ ID NO: 22262 - RNA, 1093 nt, Artificial Sequence
  SARS-CoV-2__MT755955.1__non-structural protein 6 (NSP6) mRNA gc
aggagaaagcuuaccaugagcgccgugaagcgcaccaucaagggcacccaccacuggcugcuccugacgauccugaccucccuccugguccuggugcagagcacccaguggucccucuucuucuuccuguacgagaacgccuuccugcccuucgcgauggggaucaucgccaugagcgccuucgccaugauguucgugaagcacaagcacgccuuccucugccuguuccugcucccgucccuggcgaccgucgccuacuucaacaugguguacaugcccgccagcugggugaugcggaucaugacguggcuggacauggucgacaccucccucagcggcuucaagcugaaggacugcgugauguacgccuccgcggugguccugcucauccugaugaccgcccgcaccguguacgacgacggggcccggcgcguguggacgcugaugaacguccucacccugguguacaagguguacuacggcaacgcccuggaccaggccaucagcaugugggcgcucaucaucuccgucaccagcaacuacuccgggguggugaccacggucauguuccuggcccggggcaucguguucaugugcguggaguacugccccaucuucuucaucaccggcaacacccugcagugcaucaugcucgucuacugcuuccugggguacuucugcacgugcuacuucggccuguucugccuccugaaccgcuacuuccggcugacccucgggguguacgacuaccuggugagcacccaggaguuccgcuacaugaacucccagggccugcugcccccgaagaacagcaucgacgccuucgagcucaacaucaagcugcucggggucggcggcaagcccugcaucaagguggccaccguccagugaggacuaguuauaagacugacuagcccgaugggccucccaacgggcccuccuccccuccuugcaccgagauuaauaaaaaaaaaaaaaaaaaaaaaaaaaaaaaaaaaaaaaaaaaaaaaaaaaaaaaaaaaaaaaaaaugcaucccccccccccccccccccccccccccccccaaaggcucuuuucagagccaccagaauu

SEQ ID NO: 22263 - RNA, 1093 nt, Artificial Sequence
  SARS-CoV-2__MT757073.1__non-structural protein 6 (NSP6) mRNA gc
aggagaaagcuuaccaugagcgccgugaagcgcaccaucaagggcacccaccacuggcugcuccugacgauccugaccucccuccugguccuggugcagagcacccaguggucccucuucuucuuccuguacgagaacgccuuccugcccuucgcgauggggaucaucgccaugagcgccuucgccaugauguucgugaagcacaagcacgccuuccucugccuguuccugcucccguccuucgcgaccgucgccuacuucaacaugguguacaugcccgccagcugggugaugcggaucaugacguggcuggacauggucgacaccucccugagcggcuucaagcucaaggacugcgugauguacgccuccgcggugguccugcugauccucaugaccgcccgcaccguguacgacgacggggcccggcgcguguggacgcugaugaacguccugacccucguguacaagguguacuacggcaacgcccuggaccaggccaucagcaugugggcgcugaucaucuccgucaccagcaacuacuccgggguggugaccacggucauguuccucgcccggggcaucguguucaugugcguggaguacugccccaucuucuucaucaccggcaacacccugcagugcaucaugcuggucuacugcuuccucggguacuucugcacgugcuacuucggccuguucugccugcucaaccgcuacuuccggcugacccuggggguguacgacuaccucgugagcacccaggaguuccgcuacaugaacucccagggccugcugcccccgaagaacagcaucgacgccuucaagcucaacaucaagcugcugggggucggcggcaagcccugcaucaagguggccaccguccagugaggacuaguuauaagacugacuagcccgaugggccucccaacgggcccuccuccccuccuugcaccgagauuaauaaaaaaaaaaaaaaaaaaaaaaaaaaaaaaaaaaaaaaaaaaaaaaaaaaaaaaaaaaaaaaaaugcaucccccccccccccccccccccccccccccccaaaggcucuuuucagagccaccagaauu

SEQ ID NO: 22264 - RNA, 1093 nt, Artificial Sequence
  SARS-CoV-2__MT745644.1__non-structural protein 6 (NSP6) mRNA gc
aggagaaagcuuaccaugagcgccgccaagcgcaccaucaagggcacccaccacuggcugcuccugacgauccugaccucccuccuggugcugguccagagcacccaguggucccucuucuucuuccuguacgagaacgcguuccugcccuucgccauggggaucaucgccaugagcgccuucgccaugauguucgugaagcacaagcacgcguuccucugccuguuccugcucccgucccuggccaccguggccuacuucaacauggucuacaugcccgccagcugggugaugcggaucaugacguggcuggacaugguggacaccucccucagcggcuucaagcugaaggacugcgucauguacgcguccgccguggugcugcucauccugaugaccgcccgcaccgucuacgacgacggggcccggcgcguguggacgcugaugaacgugcucacccuggucuacaagguguacuacggcaacgcccuggaccaggcgaucagcaugugggcccucaucaucuccgugaccagcaacuacuccggggucgugaccacggugauguuccuggcccggggcaucgucuucaugugcguggaguacugccccaucuucuucaucaccggcaacacccugcagugcaucaugcucguguacugcuuccugggguacuucugcacgugcuacuucggccuguucugccuccugaaccgcuacuuccggcugacccucggggucuacgacuaccuggugagcacccaggaguuccgcuacaugaacucccagggccugcugcccccgaagaacagcaucgacgccuucaagcucaacaucaagcugcucggggugggcggcaagcccugcaucaaggucgccaccgugcagugaggacuaguuauaagacugacuagcccgaugggccucccaacgggcccuccuccccuccuugcaccgagauuaauaaaaaaaaaaaaaaaaaaaaaaaaaaaaaaaaaaaaaaaaaaaaaaaaaaaaaaaaaaaaaaaaugcaucccccccccccccccccccccccccccccccaaaggcucuuuucagagccaccagaauu

SEQ ID NO: 22265 - RNA, 1093 nt, Artificial Sequence
  SARS-CoV-2__MT750188.1__non-structural protein 6 (NSP6) mRNA gc
aggagaaagcuuaccaugagcgccgugaagcgcaccaucaagggcacccaccacuggcugcuccugacgauccugaccucccuccugguccuggugcagagcacccaguggucccucuucuucuuccuguacgagaacgccuuccugcccuucgcgauggggaucaucgccaugagcgccuucgccaugauguucgugaagcacaagcacgccuuccucugccuguuccugcucccgucccuggcgaccaucgccuacuucaacauggucuacaugcccgccagcugggugaugcggaucaugacguggcuggacaugguggacaccucccucagcggcuucaagcugaaggacugcgucauguacgccuccgcgguggugcugcucauccugaugaccgcccgcaccgucuacgacgacggggcccggcgcguguggacgcugaugaacgugcucacccuggucuacaagguguacuacggcaacgcccuggaccaggccaucagcaugugggcgcucaucaucuccgugaccagcaacuacuccggggucgugaccacggugauguuccuggcccggggcaucgucuucaugugcguggaguacugccccaucuucuucaucaccggcaacacccugcagugcaucaugcucguguacugcuuccugggguacuucugcacgugcuacuucggccuguucugccuccugaaccgcuacuuccggcugacccucggggucuacgacuaccuggugagcacccaggaguuccgcuacaugaacucccagggccugcugcccccgaagaacagcaucgacgccuucaagcucaacaucaagcugcucggggugggcggcaagcccugcaucaaggucgccaccgugcagugaggacuaguuauaagacugacuagcccgaugggccucccaacgggcccuccuccccuccuugcaccgagauuaauaaaaaaaaaaaaaaaaaaaaaaaaaaaaaaaaaaaaaaaaaaaaaaaaaaaaaaaaaaaaaaaaugcaucccccccccccccccccccccccccccccccaaaggcucuuuucagagccaccagaauu

SEQ ID NO: 22266 - RNA, 1093 nt, Artificial Sequence
  SARS-CoV-2__MT740392.1__non-structural protein 6 (NSP6) mRNA gc
aggagaaagcuuaccaugagcgccgugaagcgcaccaucaagggcacccaccacuggcugcuccugacgauccugaccucccuccugguccuggugcagagcacccaguggucccucuucuucuuccuguacgagaacgccuuccugcccuucgcgauggggaucaucgccaugagcgccuucgccaugauguucgugaagcacaagcacgccuuccucugccuguuccugcucccgucccuggcgaccgucgccuacuucaacaugguguacaugcccgccagcugggugaugcggaucaugacguggcuggacauggucgacaccucccucagcggcuucaagcugaaggacugcgugauguacgccuccgcgcuggugcuccugauccugaugaccgcccgcaccgucuacgacgacggggcccggcgcguguggacgcucaugaacgugcugacccuggucuacaagguguacuacggcaacgcccucgaccaggccaucagcaugugggcgcugaucaucuccgugaccagcaacuacuccggggucgugaccacggugauguuccuggcccggggcaucgucuucaugugcguggaguacugccccaucuucuucaucaccggcaacacccuccagugcaucaugcugguguacugcuuccugggguacuucugcacgugcuacuucggccucuucugccugcugaaccgcuacuuccggcucacccugggggucuacgacuaccuggugagcacccaggaguuccgcuacaugaacucccagggccuccugcccccgaagaacagcaucgacgccuucaagcugaacaucaagcuccugggggugggcggcaagcccugcaucaaggucgccaccgugcagugaggacuaguuauaagacugacuagcccgaugggccucccaacgggcccuccuccccuccuugcaccgagauuaauaaaaaaaaaaaaaaaaaaaaaaaaaaaaaaaaaaaaaaaaaaaaaaaaaaaaaaaaaaaaaaaaugcaucccccccccccccccccccccccccccccccaaaggcucuuuucagagccaccagaauu

SEQ ID NO: 22267 - RNA, 1093 nt, Artificial Sequence
  SARS-CoV-2__MT738101.1__non-structural protein 6 (NSP6) mRNA gc
aggagaaagcuuaccaugagcgccgugaagcgcaccaucaagggcacccaccacuggcugcuccugaucauccugacgucccuccugguccuggugcagagcacccaguggucccucuucuucuuccuguacgagaacgccuuccugcccuucgcgauggggaucaucgccaugagcgccuucgccaugauguucgugaagcacaagcacgccuuccucugccuguuccugcucccgucccuggcgaccgucgccuacuucaacaugguguacaugcccgccagcugggugaugcggaucaugaccuggcuggacauggucgacacgucccucagcggcuucaagcugaaggacugcgugauguacgccuccgcggugguccugcucauccugaugaccgcccgcaccguguacgacgacggggcccggcgcguguggacccugaugaacguccucacgcugguguacaagguguacuacggcaacgcccuggaccaggccaucagcaugugggcgcucaucaucuccgucaccagcaacuacuccgggguggugaccaccgucauguuccuggcccggggcaucguguucaugugcguggaguacugccccaucuucuucaucacgggcaacacccugcagugcaucaugcucgucuacugcuuccugggguacuucugcacgugcuacuucggccuguucugccuccugaaccgcuacuuccggcugacccucgggguguacgacuaccuggugagcacccaggaguuccgcuacaugaacucccagggccugcugcccccgaagaacagcaucgacgccuucaagcucaacaucaagcugcucggggucggcggcaagcccugcaucaagguggccaccguccagugaggacuaguuauaagacugacuagcccgaugggccucccaacgggcccuccuccccuccuugcaccgagauuaauaaaaaaaaaaaaaaaaaaaaaaaaaaaaaaaaaaaaaaaaaaaaaaaaaaaaaaaaaaaaaaaaugcaucccccccccccccccccccccccccccccccaaaggcucuuuucagagccaccagaauu

SEQ ID NO: 22268 - RNA, 1093 nt, Artificial Sequence
  SARS-CoV-2__MT706176.1__non-structural protein 6 (NSP6) mRNA gc
aggagaaagcuuaccaugagcgccgugaagcgcaccauccggggcacccaccacuggcugcuccugacgauccugaccucccuccugguccuggugcagagcacccaguggucccucuucuucuuccuguacgagaacgccuuccugcccuucgcgauggggaucaucgccaugagcgccuucgccaugauguucgugaagcacaagcacgccuuccucugccuguuccugcucccgucccuggcgaccgucgccuacuucaacaugguguacaugcccgccagcugggugaugcgcaucaugacguggcuggacauggucgacaccucccucagcggcuucaagcugaaggacugcgugauguacgccuccgcggugguccugcucauccugaugaccgcccggaccguguacgacgacggggcccgccggguguggacgcugaugaacguccucacccugguguacaagguguacuacggcaacgcccuggaccaggccaucagcaugugggcgcucaucaucuccgucaccagcaacuacuccgggguggugaccacggucauguuccuggcccgcggcaucguguucaugugcguggaguacugccccaucuucuucaucaccggcaacacccugcagugcaucaugcucgucuacugcuuccugggguacuucugcacgugcuacuucggccuguucugccuccugaaccgguacuuccgccugacccucgggguguacgacuaccuggugagcacccaggaguuccgguacaugaacucccagggccugcugcccccgaagaacagcaucgacgccuucaagcucaacaucaagcugcucggggucggcggcaagcccugcaucaagguggccaccguccagugaggacuaguuauaagacugacuagcccgaugggccucccaacgggcccuccuccccuccuugcaccgagauuaauaaaaaaaaaaaaaaaaaaaaaaaaaaaaaaaaaaaaaaaaaaaaaaaaaaaaaaaaaaaaaaaaugcaucccccccccccccccccccccccccccccccaaaggcucuuuucagagccaccagaauu

SEQ ID NO: 22269 - RNA, 1093 nt, Artificial Sequence
  SARS-CoV-2__MT706225.1__non-structural protein 6 (NSP6) mRNA gc
aggagaaagcuuaccaugagcgccgugaagcgcaccaucaagggcacccaccacuggcugcuccugacgauccugaccucccuccugguccuggugcagagcacccaguggucccucuucuucuuccuguacgagaacgccuuccugcccuucgcgauggggaucaucgccaugagcgccuucgccaugauguucgugaagcacaagcacgccuuccucugccuguuccugcucccgucccuggcgaccgucgccuacuucaacaugguguacaugcccgccagcugggugaugcggaucaugacguggcuggacauggucgacaccucccucagcggcuucaagcugaaggacugcgugauguacgccuccgcggugguccugcucauccugaugaccgcccgcaccguguacgacgacggggcccggcgcguguggacgcugaugaacguccucacccugguguacaagguguacuacggcaacgcccuggaccaggccaucagcaugugggcgcucaucaucuccgucaccagcaacuacuccgggguggugaccacggucauguuccuggcccggggcaucguguucaugugcguggaguacugccccaucuucuucaucaccggcaacaccuuccagugcaucaugcuggucuacugcuuccucggguacuucugcacgugcuacuucggccuguucugccugcucaaccgcuacuuccggcugacccuggggguguacgacuaccucgugagcacccaggaguuccgcuacaugaacucccagggccugcugcccccgaagaacagcaucgacgccuucaagcucaacaucaagcugcugggggucggcggcaagcccugcaucaagguggccaccguccagugaggacuaguuauaagacugacuagcccgaugggccucccaacgggcccuccuccccuccuugcaccgagauuaauaaaaaaaaaaaaaaaaaaaaaaaaaaaaaaaaaaaaaaaaaaaaaaaaaaaaaaaaaaaaaaaaugcaucccccccccccccccccccccccccccccccaaaggcucuuuucagagccaccagaauu

SEQ ID NO: 22270 - RNA, 1093 nt, Artificial Sequence
  SARS-CoV-2__MT703973.1__non-structural protein 6 (NSP6) mRNA gc
aggagaaagcuuaccaugagcgccgugaagcgcaccaucaagggcacccaccacuggcugcucaucacgauccugaccucccugcucguccuggugcagagcacccaguggucccuguucuucuuccucuacgagaacgccuuccugcccuucgcgauggggaucaucgccaugagcgccuucgccaugauguucgugaagcacaagcacgccuuccugugccucuuccugcugccgucccucgcgaccgucgccuacuucaacaugguguacaugcccgccagcugggugaugcggaucaugacguggcuggacauggucgacaccucccugagcggcuucaagcucaaggacugcgugauguacgccuccgcggugguccugcugauccucaugaccgcccgcaccguguacgacgacggggcccggcgcguguggacgcugaugaacguccugacccucguguacaagguguacuacggcaacgcccuggaccaggccaucagcaugugggcgcugaucaucuccgucaccagcaacuacuccgggguggugaccacggucauguuccucgcccggggcaucguguucaugugcguggaguacugccccaucuucuucaucaccggcaacacccugcagugcaucaugcuggucuacugcuuccucggguacuucugcacgugcuacuucggccuguucugccugcucaaccgcuacuuccggcugacccuggggguguacgacuaccucgugagcacccaggaguuccgcuacaugaacucccagggccugcugcccccgaagaacagcaucgacgccuucaagcucaacaucaagcugcugggggucggcggcaagcccugcaucaagguggccaccguccagugaggacuaguuauaagacugacuagcccgaugggccucccaacgggcccuccuccccuccuugcaccgagauuaauaaaaaaaaaaaaaaaaaaaaaaaaaaaaaaaaaaaaaaaaaaaaaaaaaaaaaaaaaaaaaaaaugcaucccccccccccccccccccccccccccccccaaaggcucuuuucagagccaccagaauu

SEQ ID NO: 22271 - RNA, 1093 nt, Artificial Sequence
  SARS-CoV-2__MT704049.1__non-structural protein 6 (NSP6) mRNA gc
aggagaaagcuuaccaugagcgccgugaagcgcaccaucaagggcacccaccacuggcugcuccugacgauccugaccucccuccugguccuggugcagagcacccaguggucccucuucuucuuccuguacgagaacgccuuccugcccuucgcgauggggaucaucgccaugagcgccuucgccaugauguucgugaagcacaagcacgccuuccucugccuguuccugcucccgucccuggcgaccgucgccuacuucaacaugguguacaugcccgccagcugggugaugcggaucaugacguggcuggacauggucgacaccucccucagcggcuucaagcugaaggacugcgugauguacgccuccgcggugguccugcucauccugaugaccgcccgcaccguguacgacgacggggcccggcgcguguggacgcugaugaacguccucacccugguguacaagguguacuacggcaacgcccuggaccaggccaucagcaugugggcgcucaucaucuccgucaccagcaacuacuccgggguggugaccacggucauguuccuggcccggggcaucguguucaugugcguggaguacugccccaucuucuucaucgccggcaacacccugcagugcaucaugcucgucuacugcuuccugggguacuucugcacgugcuacuucggccuguucugccuccugaaccgcuacuuccggcugacccucgggguguacgacuaccuggugagcacccaggaguuccgcuacaugaacucccagggccugcugcccccgaagaacagcaucgacgccuucaagcucaacaucaagcugcucggggucggcggcaagcccugcaucaagguggccaccguccagugaggacuaguuauaagacugacuagcccgaugggccucccaacgggcccuccuccccuccuugcaccgagauuaauaaaaaaaaaaaaaaaaaaaaaaaaaaaaaaaaaaaaaaaaaaaaaaaaaaaaaaaaaaaaaaaaugcaucccccccccccccccccccccccccccccccaaaggcucuuuucagagccaccagaauu

SEQ ID NO: 22272 - RNA, 1093 nt, Artificial Sequence
  SARS-CoV-2__MT678839.1__non-structural protein 6 (NSP6) mRNA gc
aggagaaagcuuaccaugagcgccgugaagcgcaccaucaagggcacccaccacuggcugcuccugacgauccugaccucccuccugguccuggugcagagcacccaguggucccucuucuucuucuucuacgagaacgccuuccugcccuucgcgauggggaucaucgccaugagcgccuucgccaugauguucgugaagcacaagcacgccuuccugugccucuuccugcugccgucccucgcgaccgucgccuacuucaacaugguguacaugcccgccagcugggugaugcggaucaugacguggcuggacauggucaucaccucccugagcggcuucaagcucaaggacugcgugauguacgccuccgcggugguccugcugauccucaugaccgcccgcaccguguacgacgacggggcccggcgcguguggacgcugaugaacguccugacccucguguacaagguguacuacggcaacgcccuggaccaggccaucagcaugugggcgcugaucaucuccgucaccagcaacuacuccgggguggugaccacggucauguuccucgcccggggcaucguguucaugugcguggaguacugccccaucuucuucaucaccggcaacacccugcagugcaucaugcuggucuacugcuuccucggguacuucugcacgugcuacuucggccuguucugccugcucaaccgcuacuuccggcugacccuggggguguacgacuaccucgugagcacccaggaguuccgcuacaugaacucccagggccugcugcccccgaagaacagcaucgacgccuucaagcucaacaucaagcugcugggggucggcggcaagcccugcaucaagguggccaccguccagugaggacuaguuauaagacugacuagcccgaugggccucccaacgggcccuccuccccuccuugcaccgagauuaauaaaaaaaaaaaaaaaaaaaaaaaaaaaaaaaaaaaaaaaaaaaaaaaaaaaaaaaaaaaaaaaaugcaucccccccccccccccccccccccccccccccaaaggcucuuuucagagccaccagaauu

SEQ ID NO: 22273 - RNA, 1093 nt, Artificial Sequence
  SARS-CoV-2__MT664169.1__non-structural protein 6 (NSP6) mRNA gc
aggagaaagcuuaccaugagcgccgugaagcgcaccaucaagggcacccaccacuggcugcuccugacgauccugaccucccuccugguccuggugcagagcacccaguggucccucuucuucuuccuguacgagaacgccuuccugcccuucgcgauggggaccaucgccaugagcgccuucgccaugauguucgugaagcacaagcacgccuuccucugccuguuccugcucccgucccuggcgacggucgccuacuucaacaugguguacaugcccgccagcugggugaugcggaucaugaccuggcuggacauggucgacaccucccucagcggcuucaagcugaaggacugcgugauguacgccuccgcggugguccugcucauccugaugaccgcccgcacgguguacgacgacggggcccggcgcguguggacccugaugaacguccucacccugguguacaagguguacuacggcaacgcccuggaccaggccaucagcaugugggcgcucaucaucuccgucaccagcaacuacuccgggguggugacgaccgucauguuccuggcccggggcaucguguucaugugcguggaguacugccccaucuucuucaucaccggcaacacccugcagugcaucaugcucgucuacugcuuccugggguacuucugcacgugcuacuucggccuguucugccuccugaaccgcuacuuccggcugacccucgggguguacgacuaccuggugagcacccaggaguuccgcuacaugaacucccagggccugcugcccccgaagaacagcaucgacgccuucaagcucaacaucaagcugcucggggucggcggcaagcccugcaucaagguggccaccguccagugaggacuaguuauaagacugacuagcccgaugggccucccaacgggcccuccuccccuccuugcaccgagauuaauaaaaaaaaaaaaaaaaaaaaaaaaaaaaaaaaaaaaaaaaaaaaaaaaaaaaaaaaaaaaaaaaugcaucccccccccccccccccccccccccccccccaaaggcucuuuucagagccaccagaauu

SEQ ID NO: 22274 - RNA, 1093 nt, Artificial Sequence
  SARS-CoV-2__MT646087.1__non-structural protein 6 (NSP6) mRNA gc
aggagaaagcuuaccaugagcgccgugaagcgcaccaucaagggcacccaccacuggcugcuccugacgauccugaccucccuccugguccuggugcagagcacccaguggucccucuucuucuuccuguacgagaacgccuuccugcccuucgcgauggggaucaucgccaugagcgccuucgccaugauguucgugaagcacaagcacgccuuccucugccuguuccugcucccgucccuggcgaccgucgccuacuucaacaugguguacaugcccgccagcugggugaugcggaucaugacguggcuggacauggucgacaccucccucagcggcuucaagcugaaggacugcgugauguacgccuccgcggugguccugcucauccugaugaccgcccgcaccguguacgacgacggggcccggcgcguguggacgcugaucaacguccucacccugguguacaagguguacuacggcaacgcccuggaccaggccaucagcaugugggcgcucaucaucuccgucaccagcaacuacuccgggguggugaccacggucauguuccuggcccggggcaucguguucaugugcguggaguacugccccaucuucuucaucaccggcaacacccugcagugcaucaugcucgucuacugcuuccugggguacuucugcacgugcuacuucggccuguucugccuccugaaccgcuacuuccggcugacccucgggguguacgacuaccuggugagcacccaggaguuccgcuacaugaacucccagggccugcugcccccgaagaacagcaucgacgccuucaagcucaacaucaagcugcucggggucggcggcaagcccugcaucaagguggccaccguccagugaggacuaguuauaagacugacuagcccgaugggccucccaacgggcccuccuccccuccuugcaccgagauuaauaaaaaaaaaaaaaaaaaaaaaaaaaaaaaaaaaaaaaaaaaaaaaaaaaaaaaaaaaaaaaaaaugcaucccccccccccccccccccccccccccccccaaaggcucuuuucagagccaccagaauu

SEQ ID NO: 22275 - RNA, 1093 nt, Artificial Sequence
  SARS-CoV-2__MT641533.1__non-structural protein 6 (NSP6) mRNA gc
aggagaaagcuuaccaugagcgccgugaagcgcaccaucaagggcacccaccacuggcugcuccugacgauccugaccucccuccugguccuggugcagagcacccaguggucccucuucuucuuccuguacgagaacgccuuccugcccuucgcgauggggaucaucgccaugagcgccuucgccaugauguucgugaagcacaagcacgccuuccucugccuguuccugcucccgucccuggcgaccgucgccuacuucaacaugguguacaugcccgccagcugggugaugcggaucaugacguggcuggacauggucgacaccucccucagcggcuucaagcugaaggacugcgugauguacgccuccgcggugguccugcucauccugaugaccgcccgcaccguguacgacgacggggcccggcgcguguggacgcugaugaacguccucacccugguguacaagguguacuacggcaacgcccuggaccaggccaucuacaugugggcgcucaucaucagcgucaccuccaacuacagcgggguggugaccacggucauguuccuggcccggggcaucguguucaugugcguggaguacugccccaucuucuucaucaccggcaacacccugcagugcaucaugcucgucuacugcuuccugggguacuucugcacgugcuacuucggccuguucugccuccugaaccgcuacuuccggcugacccucgggguguacgacuaccugguguccacccaggaguuccgcuacaugaacagccagggccugcugcccccgaagaacuccaucgacgccuucaagcucaacaucaagcugcucggggucggcggcaagcccugcaucaagguggccaccguccagugaggacuaguuauaagacugacuagcccgaugggccucccaacgggcccuccuccccuccuugcaccgagauuaauaaaaaaaaaaaaaaaaaaaaaaaaaaaaaaaaaaaaaaaaaaaaaaaaaaaaaaaaaaaaaaaaugcaucccccccccccccccccccccccccccccccaaaggcucuuuucagagccaccagaauu

SEQ ID NO: 22276 - RNA, 1093 nt, Artificial Sequence
  SARS-CoV-2__MT641630.1__non-structural protein 6 (NSP6) mRNA gc
aggagaaagcuuaccaugagcgccgugaagcgcaccaucaagggcacccaccacuggcugcuccugacgauccugaccucccuccugguccuggugcagagcacccaguggucccucuucuucuuccuguacgagaacgccuuccugcccuucgcgauggggaucaucgccaugagcgccuucgccaugauguucgugaagcacaagcacgccuuccucugccuguuccugcucccgucccuggcgaccgucgccuacuucaacaugguguacaugcccgccagcugggugaugcggaucaugacguggcuggacauggucgacaccucccucagcggcuucaagcugaaggacugcgugauguacgccuccgcggugguccugcucauccugaugaccgcccgcaccguguacgacgacggggcccggcgcguguggacgcugaugaacguccucacccugguguacaagguguacuacggcaacgcccuggaccaggccaucagcaugugggcgcucaucaucuccgucaccagcaacuacuccgggguggugaccacggucauguuccuggcccggggcaucguguucaugugcguggaguaccgccccaucuucuucaucaccggcaacacccugcagugcaucaugcucgucuacugcuuccugggguacuucugcacgugcuacuucggccuguucugccuccugaaccgguacuuccgccugacccucgggguguacgacuaccuggugagcacccaggaguuccgguacaugaacucccagggccugcugcccccgaagaacagcaucgacgccuucaagcucaacaucaagcugcucggggucggcggcaagcccugcaucaagguggccaccguccagugaggacuaguuauaagacugacuagcccgaugggccucccaacgggcccuccuccccuccuugcaccgagauuaauaaaaaaaaaaaaaaaaaaaaaaaaaaaaaaaaaaaaaaaaaaaaaaaaaaaaaaaaaaaaaaaaugcaucccccccccccccccccccccccccccccccaaaggcucuuuucagagccaccagaauu

SEQ ID NO: 22277 - RNA, 1093 nt, Artificial Sequence
  SARS-CoV-2__MT641677.1__non-structural protein 6 (NSP6) mRNA gc
aggagaaagcuuaccaugagcgccgugaagcgcaccaucaagggcacccaccacuggcugcuccugacgauccugaccucccuccugguccuggugcagagcacccaguggucccucuucuucuuccuguacgagaacgccuuccugcccuucgcgauggggaucaucgccaugagcgccuucgccaugauguucgugaagcacaagcacgccuuccucugccuguuccugcucccgucccuggcgaccgucgccuacuucaacaugguguacaugcccgccagcugggugaugcggaucaugacguggcuggacauggucgacaccucccucagcggcuucaagcugaaggacugcgugauguacgccuccgcggugguccugcucauccugaugaccgcccgcaccguguacgacgacggggcccggcgcguguggacgcugaugaacguccucacccugguguacaagguguacuacggcaacgcccuggaccaggccaucagcaugugggcgcucaucaucuccgucaccagcaacuacuccgggguggugaccacggucauguuccuggcccgggugaucguguucaugugcgucgaguacugccccaucuucuucaucaccggcaacacccugcagugcaucaugcucguguacugcuuccugggcuacuucugcacgugcuacuucgggcuguucugccuccugaaccgcuacuuccggcugacccucggcguguacgacuaccuggucagcacccaggaguuccgcuacaugaacucccaggggcugcugcccccgaagaacagcaucgacgccuucaagcucaacaucaagcugcucggcgucgggggcaagcccugcaucaagguggccaccgugcagugaggacuaguuauaagacugacuagcccgaugggccucccaacgggcccuccuccccuccuugcaccgagauuaauaaaaaaaaaaaaaaaaaaaaaaaaaaaaaaaaaaaaaaaaaaaaaaaaaaaaaaaaaaaaaaaaugcaucccccccccccccccccccccccccccccccaaaggcucuuuucagagccaccagaauu

SEQ ID NO: 22278 - RNA, 1093 nt, Artificial Sequence
  SARS-CoV-2__MT642305.1__non-structural protein 6 (NSP6) mRNA gc
aggagaaagcuuaccaugagcgccgugaagcgcaccaucaagggcacccaccacuggcugcuccugacgauccugaccucccuccugguccuggugcagagcacccaguggucccucuucuucuucuucuacgagaacgccuuccugcccuucgcgauggggaucaucgccaugagcgccuucgccaugauguucgugaagcacaagcacgccuuccugugccucuuccugcugccgucccucgcgaccgucgccuacuucaacaugguguacaugcccgccagcugggugaugcggaucaugacguggcuggacauggucgacaccucccugagcggcuucaagcucaaggacugcgugauguacgccuccgcggugguccugcugauccucaugaccgcccgcaccguguacgacgacggggcccggcgcguguggacgcugaugaacguccugacccucguguacaaguucuacuacggcaacgcccuggaccaggccaucagcaugugggcgcugaucaucuccgugaccagcaacuacuccggggucgugaccacggugauguuccucgcccggggcaucgucuucaugugcguggaguacugccccaucuucuucaucaccggcaacacccugcagugcaucaugcugguguacugcuuccucggguacuucugcacgugcuacuucggccuguucugccugcucaaccgcuacuuccggcugacccugggggucuacgacuaccucgugagcacccaggaguuccgcuacaugaacucccagggccugcugcccccgaagaacagcaucgacgccuucaagcucaacaucaagcugcugggggugggcggcaagcccugcaucaaggucgccaccgugcagugaggacuaguuauaagacugacuagcccgaugggccucccaacgggcccuccuccccuccuugcaccgagauuaauaaaaaaaaaaaaaaaaaaaaaaaaaaaaaaaaaaaaaaaaaaaaaaaaaaaaaaaaaaaaaaaaugcaucccccccccccccccccccccccccccccccaaaggcucuuuucagagccaccagaauu

SEQ ID NO: 22279 - RNA, 1093 nt, Artificial Sequence
  SARS-CoV-2__MT635270.1__non-structural protein 6 (NSP6) mRNA gc
aggagaaagcuuaccaugagcgccgugaagcgcaccaucaagggcacccaccacuggcugcuccugacgauccugaccucccuccugguccuggugcagagcacccaguggucccucuucuucuuccuguacgagaacgccuuccugcccuucgcgauggggaucaucgccaugagcgccuucgccaugauguucgugaagcacaagcacgccuuccucugccuguuccugcucccgucccuggcgaccgucgccuacuucaacaugguguacaugcccgccagcugggugaugcggaucaugacguggcuggacauggucgacaccucccucagcggcuucaagcugaaggacugcgugauguacgccuccgcggugguccugcucauccugaugaccgcccgcaccguguacgacgacggggcccggcgcguguggacgcugaugaacguccucacccugguguacaagguguacuacggcaacgcccuggaccaggccaucagcaugugggcgcucaucaucuccgucaccagcaacuacuccgggguggugaccacggucauguuccuggcccggggcaucuucuucaugugcguggaguacugccccaucuucuucaucaccggcaacacccugcagugcaucaugcucguguacugcuuccugggguacuucugcacgugcuacuucggccuguucugccuccugaaccgcuacuuccggcugacccucggggucuacgacuaccuggugagcacccaggaguuccgcuacaugaacucccagggccugcugcccccgaagaacagcaucgacgccuucaagcucaacaucaagcugcucggggugggcggcaagcccugcaucaaggucgccaccgugcagugaggacuaguuauaagacugacuagcccgaugggccucccaacgggcccuccuccccuccuugcaccgagauuaauaaaaaaaaaaaaaaaaaaaaaaaaaaaaaaaaaaaaaaaaaaaaaaaaaaaaaaaaaaaaaaaaugcaucccccccccccccccccccccccccccccccaaaggcucuuuucagagccaccagaauu

SEQ ID NO: 22280 - RNA, 1093 nt, Artificial Sequence
  SARS-CoV-2__MT627427.1__non-structural protein 6 (NSP6) mRNA gc
aggagaaagcuuaccaugagcgccgugaagcgcaccaucaagggcacccaccacuggcugcuccugacgauccugaccucccuccugguccuggugcagagcacccaguggucccucuucuucuucuucuacgagaacgccuuccugcccuucagcauggggaucaucgcgauguccgccuucgccaugauguucgugaagcacaagcacgccuuccugugccucuuccugcugccgagccucgccaccgucgcguacuucaacaugguguacaugcccgccuccugggugaugcggaucaugacguggcuggacauggucgacaccagccuguccggcuucaagcucaaggacugcgugauguacgccagcgccgugguccugcugauccucaugaccgcgcgcaccguguacgacgacggggcccggcgcguguggacgcugaugaacguccugacccucguguacaagguguacuacggcaacgcccuggaccaggccaucuccaugugggcccugaucaucagcgucaccuccaacuacagcgggguggugaccacggucauguuccucgcgcggggcaucguguucaugugcguggaguacugccccaucuucuucaucaccggcaacacccugcagugcaucaugcuggucuacugcuuccucggguacuucugcacgugcuacuucggccuguucugccugcucaaccgcuacuuccggcugacccuggggguguacgacuaccucguguccacccaggaguuccgcuacaugaacagccagggccugcugcccccgaagaacuccaucgacgccuucaagcucaacaucaagcugcugggggucggcggcaagcccugcaucaagguggccaccguccagugaggacuaguuauaagacugacuagcccgaugggccucccaacgggcccuccuccccuccuugcaccgagauuaauaaaaaaaaaaaaaaaaaaaaaaaaaaaaaaaaaaaaaaaaaaaaaaaaaaaaaaaaaaaaaaaaugcaucccccccccccccccccccccccccccccccaaaggcucuuuucagagccaccagaauu

SEQ ID NO: 22281 - RNA, 1093 nt, Artificial Sequence
  SARS-CoV-2__MT632596.1__non-structural protein 6 (NSP6) mRNA gc
aggagaaagcuuaccaugagcgccgugaagcgcaccaucaagggcacccaccacuggcugcuccugacgauccugaccucccuccugguccuggugcagagcacccaguggucccucuucuucuuccuguacgagaacgccuuccugcccuucgcgauggggaucaucgccaugagcgccuucgccaugauguucgugaagcacaagcacgccuuccucugccuguuccugcucccgucccuggcgaccgucgccuacuucaacaugguguacaugcccgccagcugggugaugcggaucaugacguggcuggacauggucgacaccucccucagcggcuucaagcugaaggacugcgugauguacgccuccgcggugguccugcucauccugaugaccgcccgcaccguguacgacgacggggcccggcgcguguggacgcugaugaacguccucacccugguguacaagguguacuacggcaacgcccuggaccaggccaucagcaugugggcgcucaucaucuccgucaccagcaacuacuccgggguggugaccacggucauguuccuggcccggggcaucguguucaugugcguggaguacugccccaucuucuucaucaccggcaacacccugcagugcaucaugcucgucuacugcuuccugggguacuucugcacgugcuacuucggccuguucugccuccugaaccgcuacuuccggcugacccucgggguguacgacuaccuggugagcacccaggaguuccgcuacaugaacucccagggccugcugcccccgaagaacagcaucgacgccuucaagcucaacgucaagcugcucggggugggcggcaagcccugcaucaaggucgccaccgugcagugaggacuaguuauaagacugacuagcccgaugggccucccaacgggcccuccuccccuccuugcaccgagauuaauaaaaaaaaaaaaaaaaaaaaaaaaaaaaaaaaaaaaaaaaaaaaaaaaaaaaaaaaaaaaaaaaugcaucccccccccccccccccccccccccccccccaaaggcucuuuucagagccaccagaauu

SEQ ID NO: 22282 - RNA, 1093 nt, Artificial Sequence
  SARS-CoV-2__MT632820.1__non-structural protein 6 (NSP6) mRNA gc
aggagaaagcuuaccaugagcgccgugaagcgcaccaucaagggcacccaccacuggcugcuccugacgauccugaccucccuccugguccuggugcagagcacccaguggucccucuucuucuuccuguacgagaacgccuuccugcccuucgcgauggggaucaucgccaugagcgccuucgccaugauguucgugaagcacaagcacgccuuccucugccuguuccugcucccgucccuggcgaccgucgccuacuucaacaugguguacaugcccgccagcugggugaugcggaucaugacguggcuggacauggucgacaccucccucagcggcuucaagcugaaggacugcgugauguacgccuccgcggugguccugcucauccugaugaccgcccgcaccguguacgacgacggggcccggcgcguguggacgcugaugaacguccucacccugguguacaagguguacuacggcaacgcccuggaccaggccaucagcaugugggcgcucaucaucuccgucaccagcaacuacuccgggguggugaccacggucauguuccuggcccggggcaucguguucaugugcguggaguacugccccaucuucuucaucaccggcaacacccugcgcugcaucaugcucgucuacugcuuccugggguacuucugcacgugcuacuucggccuguucugccuccugaaccgguacuuccgccugacccucgggguguacgacuaccuggugagcacccaggaguuccgguacaugaacucccagggccugcugcccccgaagaacagcaucgacgccuucaagcucaacaucaagcugcucggggucggcggcaagcccugcaucaagguggccaccguccagugaggacuaguuauaagacugacuagcccgaugggccucccaacgggcccuccuccccuccuugcaccgagauuaauaaaaaaaaaaaaaaaaaaaaaaaaaaaaaaaaaaaaaaaaaaaaaaaaaaaaaaaaaaaaaaaaugcaucccccccccccccccccccccccccccccccaaaggcucuuuucagagccaccagaauu

SEQ ID NO: 22283 - RNA, 1093 nt, Artificial Sequence
  SARS-CoV-2__MT614531.1__non-structural protein 6 (NSP6) mRNA gc
aggagaaagcuuaccaugagcgccgugaagcgcaccaucaagggcacccaccacuggcugcuccugacgauccugaccucccuccugguccuggugcagagcacccaguggucccucuucuucuuccuguacgagaacgccuuccugcccuucgcgauggggaucaucgccaugagcgccuucgccaccauguucgugaagcacaagcacgccuuccucugccuguuccugcucccgucccuggcgacggucgccuacuucaacaugguguacaugcccgccagcugggugaugcggaucaugaccuggcuggacauggucgacaccucccucagcggcuucaagcugaaggacugcgugauguacgccuccgcggugguccugcucauccugaugaccgcccgcacgguguacgacgacggggcccggcgcguguggacccugaugaacguccucacccugguguacaagguguacuacggcaacgcccuggaccaggccaucagcaugugggcgcucaucaucuccgucaccagcaacuacuccgggguggugacgaccgucauguuccuggcccggggcaucguguucaugugcguggaguacugccccaucuucuucaucaccggcaacacccugcagugcaucaugcucgucuacugcuuccugggguacuucugcacgugcuacuucggccuguucugccuccugaaccgcuacuuccggcugacccucgggguguacgacuaccuggugagcacccaggaguuccgcuacaugaacucccagggccugcugcccccgaagaacagcaucgacgccuucaagcucaacaucaagcugcucggggucggcggcaagcccugcaucaagguggccaccguccagugaggacuaguuauaagacugacuagcccgaugggccucccaacgggcccuccuccccuccuugcaccgagauuaauaaaaaaaaaaaaaaaaaaaaaaaaaaaaaaaaaaaaaaaaaaaaaaaaaaaaaaaaaaaaaaaaugcaucccccccccccccccccccccccccccccccaaaggcucuuuucagagccaccagaauu

SEQ ID NO: 22284 - RNA, 1093 nt, Artificial Sequence
  SARS-CoV-2__MT609566.1__non-structural protein 6 (NSP6) mRNA gc
aggagaaagcuuaccaugagcgccgugaagcgcaccaucaagggcacccaccacuggcugcuccugacgauccugaccucccuccugguccuggugcagagcacccaguggucccucuucuucuuccuguacgagaacgccuuccugcccuucgcgauggggaucaucgccaugagcgccuucgccaugauguucgugaagcacaagcacgccuuccucugccuguuccugcucccgucccuggcgaccgucgccuacuucaacaugguguacaugcccgccagcugggugaugcggaucaugacguggcuggacauggucgacaccucccucagcggcuucaagcugaaggacugcgugauguacgccuccgcggugguccugcucauccugaugaccgugcgcaccguguacgacgacggggcccggcgcgucuggacgcugaugaacgugcucacccugguguacaaggucuacuacggcaacgcccuggaccaggccaucagcaugugggcccucaucaucuccgugaccagcaacuacuccgggguggucaccacggugauguuccuggcgcggggcaucguguucaugugcgucgaguacugccccaucuucuucaucaccggcaacacccugcagugcaucaugcucguguacugcuuccugggguacuucugcacgugcuacuucggccuguucugccuccugaaccgcuacuuccggcugacccucgggguguacgacuaccuggucagcacccaggaguuccgcuacaugaacucccagggccugcugcccccgaagaacagcaucgacgccuucaagcucaacaucaagcugcucggggugggcggcaagcccugcaucaaggucgccaccgugcagugaggacuaguuauaagacugacuagcccgaugggccucccaacgggcccuccuccccuccuugcaccgagauuaauaaaaaaaaaaaaaaaaaaaaaaaaaaaaaaaaaaaaaaaaaaaaaaaaaaaaaaaaaaaaaaaaugcaucccccccccccccccccccccccccccccccaaaggcucuuuucagagccaccagaauu

SEQ ID NO: 22285 - RNA, 1093 nt, Artificial Sequence
  SARS-CoV-2__MT585032.1__non-structural protein 6 (NSP6) mRNA gc
aggagaaagcuuaccaugagcgccgugaagcgcaccaucaagggcacccaccacuggcugcuccugacgauccugaccucccuccugguccuggugcagagcacccaguggucccucuucuucuuccuguacgagaacgccuuccugcccuucgcgauggggaucaucgccaugagcgccuucgccaugauguucgugaagcacaagcacgccuuccucugccuguuccugcucccgucccuggcgaccgucgccuacuucaacaugguguacaugcccgccagcugggugaugcggaucaugacguggcuggacauggucgacaccucccucagcggcuucaagcugaaggacugcgugauguacgccuccgcggugguccugcucauccugaugaccgcccgcaccguguacgacgacggggcccggcgcguguggacgcugaugaacguccucacccugguguacaagguguacuacggcagcgcccuggaccaggccaucuccaugugggcgcucaucaucagcgucaccuccaacuacagcgggguggugaccacggucauguuccuggcccggggcaucguguucaugugcguggaguacugccccaucuucuucaucaccggcaacacccugcagugcaucaugcucgucuacugcuuccugggguacuucugcacgugcuacuucggccuguucugccuccugaaccgcuacuuccggcugacccucgggguguacgacuaccugguguccacccaggaguuccgcuacaugaacagccagggccugcugcccccgaagaacuccaucgacgccuucaagcucaacaucaagcugcucggggucggcggcaagcccugcaucaagguggccaccguccagugaggacuaguuauaagacugacuagcccgaugggccucccaacgggcccuccuccccuccuugcaccgagauuaauaaaaaaaaaaaaaaaaaaaaaaaaaaaaaaaaaaaaaaaaaaaaaaaaaaaaaaaaaaaaaaaaugcaucccccccccccccccccccccccccccccccaaaggcucuuuucagagccaccagaauu

SEQ ID NO: 22286 - RNA, 1093 nt, Artificial Sequence
  SARS-CoV-2__MT585090.1__non-structural protein 6 (NSP6) mRNA gc
aggagaaagcuuaccaugagcgccgugaagcgcaccaucaagggcacccaccacuggcugcuccugacgauccugaccucccuccugguccuggugcagagcacccaguggucccucuucuucuuccuguacgagaacgccuuccugcccuucgcgauggggaucaucgccaugagcgccuucgccaugauguucgugaagcacaagcacgccuuccucugccuguuccugcucccgucccuggcgaccgucgccuacuucaacaugguguacaugcccgccagcugggugaugcggaucaugacguggcugggcauggucgacaccucccucagcggguucaagcugaaggacugcgugauguacgccuccgcggugguccugcucauccugaugaccgcccgcaccguguacgacgacggcgcccggcgcguguggacgcugaugaacguccucacccugguguacaagguguacuacgggaacgcccuggaccaggccaucagcaugugggcgcucaucaucuccgucaccagcaacuacuccggcguggugaccacggucauguuccuggcccggggcaucguguucaugugcguggaguacugccccaucuucuucaucaccgggaacacccugcagugcaucaugcucgucuacugcuuccugggcuacuucugcacgugcuacuucgggcuguucugccuccugaaccgcuacuuccggcugacccucggcguguacgacuaccuggugagcacccaggaguuccgcuacaugaacucccaggggcugcugcccccgaagaacagcaucgacgccuucaagcucaacaucaagcugcucggcgucggcgggaagcccugcaucaagguggccaccguccagugaggacuaguuauaagacugacuagcccgaugggccucccaacgggcccuccuccccuccuugcaccgagauuaauaaaaaaaaaaaaaaaaaaaaaaaaaaaaaaaaaaaaaaaaaaaaaaaaaaaaaaaaaaaaaaaaugcaucccccccccccccccccccccccccccccccaaaggcucuuuucagagccaccagaauu

SEQ ID NO: 22287 - RNA, 1093 nt, Artificial Sequence
  SARS-CoV-2__MT576056.1__non-structural protein 6 (NSP6) mRNA gc
aggagaaagcuuaccaugagcgccgugaagcgcaccaucaagggcacccaccacuggcugcuccugacgauccugaccucccuccugguccuggugcagagcacccaguggucccucuucuucuuccuguacgagaacgccuuccugcccuucgcgauggggaucaucgccaugagcgccuucgccaugauguucgugaagcacaagcacgccuuccucugccuguuccugcucccgucccuggcgaccgucgccuacuucaacaugguguacaugcccgccagcugggugaugcggaucaugacguggcuggacauggucgacaccucccucagcggcuucaagcugaaggacugcgugauguacgccuccgcggugguccugcucauccugaugaccgcccgcaccguguacgacgacggggcccggcgcguguggacgcugaugaacguccucacccugguguacaagguguacuacggcaacgcccuggaccaggccaccagcaugugggcgcucaucaucuccgucaccagcaacuacuccgggguggugacgaccgucauguuccuggcccggggcaucguguucaugugcguggaguacugccccaucuucuucaucaccggcaacacccugcagugcaucaugcucgucuacugcuuccugggguacuucugcacgugcuacuucggccuguucugccuccugaaccgcuacuuccggcugacccucgggguguacgacuaccuggugagcacccaggaguuccgcuacaugaacucccagggccugcugcccccgaagaacagcaucgacgccuucaagcucaacaucaagcugcucggggucggcggcaagcccugcaucaagguggccaccguccagugaggacuaguuauaagacugacuagcccgaugggccucccaacgggcccuccuccccuccuugcaccgagauuaauaaaaaaaaaaaaaaaaaaaaaaaaaaaaaaaaaaaaaaaaaaaaaaaaaaaaaaaaaaaaaaaaugcaucccccccccccccccccccccccccccccccaaaggcucuuuucagagccaccagaauu

SEQ ID NO: 22288 - RNA, 1093 nt, Artificial Sequence
  SARS-CoV-2__MT520221.1__non-structural protein 6 (NSP6) mRNA gc
aggagaaagcuuaccaugagcgccgugaagcgcaccaucaagggcacccaccacuggcugcuccugacgauccugaccucccuccugguccuggugcagagcacccaguggucccucuucuucuuccuguacgagaacgccuuccugcccuucgcgauggggaucaucgccaugagcgccuucgccaugauguucgugaagcacaagcacgccuuccucugccuguuccugcucccgucccuggcgaccgucgccuacuucaacaugguguacaugcccgccagcugggugaugcggaucaugacguggcuggacauggucgacaccucccucagcggcuucaagcugaaggacugcgugauguacgccuccgcggugguccugcucauccugaugaccgcccgcaccguguacgacgacggggcccggcgcguguggacgcugaugaacguccucacccugguguacaagguguacuacggcaacgcccuggaccaggccaucagcaugugggcgcucaucaucuccgucaccagcaacuacuccgggguggugaccacggucauguucagcgcccggggcaucguguucaugugcguggaguacugccccaucuucuucaucaccggcaacacccugcagugcaucaugcuggucuacugcuuccucggguacuucugcacgugcuacuucggccuguucugccugcucaaccgcuacuuccggcugacccuggggguguacgacuaccucguguccacccaggaguuccgcuacaugaacagccagggccugcugcccccgaagaacuccaucgacgccuucaagcucaacaucaagcugcugggggucggcggcaagcccugcaucaagguggccaccguccagugaggacuaguuauaagacugacuagcccgaugggccucccaacgggcccuccuccccuccuugcaccgagauuaauaaaaaaaaaaaaaaaaaaaaaaaaaaaaaaaaaaaaaaaaaaaaaaaaaaaaaaaaaaaaaaaaugcaucccccccccccccccccccccccccccccccaaaggcucuuuucagagccaccagaauu

SEQ ID NO: 22289 - RNA, 1093 nt, Artificial Sequence
  SARS-CoV-2__MT520402.1__non-structural protein 6 (NSP6) mRNA gc
aggagaaagcuuaccaugagcgccgugaagcgcaccaucaagggcacccaccacuggcugcuccugacgauccugaccucccuccugguccuggugcagagcacccaguggucccucuucuucuuccuguacgagaacgccuuccugcccuucgcgauggggaucaucgccaugagcgccuucgccaugauguucgugaagcacaagcacgccuuccucugccuguuccugcucccgucccuggcgaccgucgccuacuucaacaugguguacaugcccgccagcugggugaugcggaucaugacguggcuggacauggucgacaccucccucagcggcuucaagcugaaggacugcgugauguacgccuccgcggugguccugcucauccugaugaccgcccgcaccguguacgacgacggggcccggcgcguguggacgcugaugaacguccucacccugguguacaagguguacuacggcaacgcccuggaccaggccaucagcaugugggcgcucaucaucuccgucaccagcaacuacuccgggguggugaccacggucauguuccuggcccggggcgugguguucaugugcgucgaguacugccccaucuucuucaucaccggcaacacccugcagugcaucaugcucguguacugcuuccugggguacuucugcacgugcuacuucggccuguucugccuccugaaccgcuacuuccggcugacccucgggguguacgacuaccuggucagcacccaggaguuccgcuacaugaacucccagggccugcugcccccgaagaacagcaucgacgccuucaagcucaacaucaagcugcucggggugggcggcaagcccugcaucaaggucgccaccgugcagugaggacuaguuauaagacugacuagcccgaugggccucccaacgggcccuccuccccuccuugcaccgagauuaauaaaaaaaaaaaaaaaaaaaaaaaaaaaaaaaaaaaaaaaaaaaaaaaaaaaaaaaaaaaaaaaaugcaucccccccccccccccccccccccccccccccaaaggcucuuuucagagccaccagaauu

SEQ ID NO: 22290 - RNA, 1093 nt, Artificial Sequence
  SARS-CoV-2__MT520437.1__non-structural protein 6 (NSP6) mRNA gc
aggagaaagcuuaccaugagcgccgugaagcgcaccaucaagggcacccaccacuggcugcuccugacgauccugaccucccuccugguccuggugcagagcacccaguggucccucuucuucuucuucuacgagaacgccuuccugcccuucgcgauggggaucaucgccaugagcgccuucgccaugauguucgugaagcacaagcacgccuuccugugccucuuccugcugccgucccucgcgaccgucgccuacuucaacaugguguacaugcccgccagcugggugaugcggaucaugacguggcuggacauggucgacaccucccugagcggcuucaagcucaaggacugcgugauguacgccuccgcggugguccugcugauccucaugaccgcccgcaccguguacgacgacggggcccggcgcguguggacgcugaugaacguccugacccucguguacaagguguacuacggcaacgcccuggaccaggccaucagcaugugggcgcugaucaucuccgucaccagcaacuacuccgggguggugaccacggucauguuccucgcccggagcaucguguucaugugcguggaguacugccccaucuucuucaucaccggcaacacccugcagugcaucaugcuggucuacugcuuccucggcuacuucugcacgugcuacuucgggcuguucugccugcucaaccgcuacuuccggcugacccugggcguguacgacuaccucguguccacccaggaguuccgcuacaugaacagccaggggcugcugcccccgaagaacuccaucgacgccuucaagcucaacaucaagcugcugggcgucgggggcaagcccugcaucaagguggccaccguccagugaggacuaguuauaagacugacuagcccgaugggccucccaacgggcccuccuccccuccuugcaccgagauuaauaaaaaaaaaaaaaaaaaaaaaaaaaaaaaaaaaaaaaaaaaaaaaaaaaaaaaaaaaaaaaaaaugcaucccccccccccccccccccccccccccccccaaaggcucuuuucagagccaccagaauu

SEQ ID NO: 22291 - RNA, 1093 nt, Artificial Sequence
  SARS-CoV-2__MT558680.1__non-structural protein 6 (NSP6) mRNA gc
aggagaaagcuuaccaugagcgccgugaagcgcaccaucaagggcacccaccacuggcugcuccugacgauccugaccucccuccugguccuggugcagagcacccaguggucccucuucuucuuccuguacgagaacgccuuccugcccuucgcgauggggaucaucgccaugagcgccuucgccaugauguucgugaagcacaagcacgccuuccucugccuguuccugcucccgucccuggcgaccgucgccuacuucaacaugguguacaugcccgccagcugggugaugcggaucaugacguggcuggacauggucgacaccucccucagcggcuucaagcugaaggacugcgugauguacgccuccgcggugguccugcucauccugaugaccgcccgcaccguguacgacgacggggcccggcgcguguggacgcugaugaacguccucacccugguguacaagguguacuacggcaacgcccuggaccaggccaucagcaugugggcgcucaucaucuccgucaccagcaacuacuccgggguggugaccacggucauguuccuggcccggggcaucguguucaugugcguggaguacugccccaucuucuucaucaccggcaacacccugcagugcaucaugcucgucuacugcuuccugggguacuucugcacgugcuacuucggccuguucugccuccugaaccgcuacuuccggcugacccucgggguguacgacuaccuggugagcacccaggaguuccgcuacaugaacucccagggccugcugcccccgaagaacagcaucgacgccuucaagcucaacaucaagcugcucggggucggcggcaagcccugcaucaagguggccaucguccagugaggacuaguuauaagacugacuagcccgaugggccucccaacgggcccuccuccccuccuugcaccgagauuaauaaaaaaaaaaaaaaaaaaaaaaaaaaaaaaaaaaaaaaaaaaaaaaaaaaaaaaaaaaaaaaaaugcaucccccccccccccccccccccccccccccccaaaggcucuuuucagagccaccagaauu

SEQ ID NO: 22292 - RNA, 1093 nt, Artificial Sequence
  SARS-CoV-2__MT539174.1__non-structural protein 6 (NSP6) mRNA gc
aggagaaagcuuaccaugagcgccgugaagcgcaccaucaagggcacccaccacuggcugcuccugacgauccugaccucccuccugguccuggugcagagcacccaguggucccucuucuucuuccuguacgagaacgccuuccugcccuucgcgauggggaucaucgccaugagcgccuucgccaugauguucgugaagcacaagcacgccuuccucugccuguuccugcucccgucccuggcgaccgucgccuacuucaacaugguguacaugcccgccagcugggugaugcggaucaugacguggcuggacauggucgacaccucccucagcggcuucaagcugaagaacugcgugauguacgccuccgcggugguccugcucauccugaugaccgcccgcaccguguacgacgacggggcccggcgcguguggacgcugaugaacguccucacccugguguacaagguguacuacggcaacgcccuggaccaggccaucagcaugugggcgcucaucaucuccgucaccagcaacuacuccgggguggugaccacggucauguuccuggcccggggcaucguguucaugugcguggaguacugccccaucuucuucaucaccggcaacacccugcagugcaucaugcucgucuacugcuuccugggguacuucugcacgugcuacuucggccuguucugccuccugaaccgcuacuuccggcugacccucgggguguacgacuaccuggugagcacccaggaguuccgcuacaugaacucccagggccugcugcccccgaagaacagcaucgacgccuucaagcucaacaucaagcugcucggggucggcggcaagcccugcaucaagguggccaccguccagugaggacuaguuauaagacugacuagcccgaugggccucccaacgggcccuccuccccuccuugcaccgagauuaauaaaaaaaaaaaaaaaaaaaaaaaaaaaaaaaaaaaaaaaaaaaaaaaaaaaaaaaaaaaaaaaaugcaucccccccccccccccccccccccccccccccaaaggcucuuuucagagccaccagaauu

SEQ ID NO: 22293 - RNA, 1093 nt, Artificial Sequence
  SARS-CoV-2__MT461620.1__non-structural protein 6 (NSP6) mRNA gc
aggagaaagcuuaccaugagcgccgugaagcgcaucaucaagggcacccaccacuggcugcuccugaccauccugacgucccuccugguccuggugcagagcacccaguggucccucuucuucuuccuguacgagaacgccuuccugcccuucgcgauggggaucaucgccaugagcgccuucgccaugauguucgugaagcacaagcacgccuuccucugccuguuccugcucccgucccuggcgaccgucgccuacuucaacaugguguacaugcccgccagcugggugaugcggaucaugaccuggcuggacauggucgacacgucccucagcggcuucaagcugaaggacugcgugauguacgccuccgcggugguccugcucauccugaugaccgcccgcaccguguacgacgacggggcccggcgcguguggacccugaugaacguccucacgcugguguacaagguguacuacggcaacgcccuggaccaggccaucagcaugugggcgcucaucaucuccgucaccagcaacuacuccgggguggugaccaccgucauguuccuggcccggggcaucguguucaugugcguggaguacugccccaucuucuucaucacgggcaacacccugcagugcaucaugcucgucuacugcuuccugggguacuucugcacgugcuacuucggccuguucugccuccugaaccgcuacuuccggcugacccucgggguguacgacuaccuggugagcacccaggaguuccgcuacaugaacucccagggccugcugcccccgaagaacagcaucgacgccuucaagcucaacaucaagcugcucggggucggcggcaagcccugcaucaagguggccaccguccagugaggacuaguuauaagacugacuagcccgaugggccucccaacgggcccuccuccccuccuugcaccgagauuaauaaaaaaaaaaaaaaaaaaaaaaaaaaaaaaaaaaaaaaaaaaaaaaaaaaaaaaaaaaaaaaaaugcaucccccccccccccccccccccccccccccccaaaggcucuuuucagagccaccagaauu

SEQ ID NO: 22294 - RNA, 1093 nt, Artificial Sequence
  SARS-CoV-2__MT461630.1__non-structural protein 6 (NSP6) mRNA gc
aggagaaagcuuaccaugagcgccgugaagcgcaccaucaagggcacccaccacuggcugcuccugacgauccugaccucccuccugguccuggugcagagcacccaguggucccucuucuucuuccuguacgagaacgccuuccugcccuucgcgauggggaucaucgccaugagcgccuucgccaugauguucgugaagcacaagcacgccuuccucugccuguuccugcucccgucccuggcgaccgucgccuacuucaacaugguguacaugcccgccagcugggugaugcggaucaugacguggcuggacauggucgacaccucccucagcggcuucaagcugaaggacugcgugauguacgccuccgcggugguccugcucauccugaugaccgcccgcaccguguacgacgacggggcccggcgcguguggacgcugaugaacguccucacccugguguacaagguguacuacggcaacgcccuggaccaggccaucagcaugugggcgcucaucaucuccgucaccagcaacuacuccgggguggugaccacggucauguuccuggcccggggcaucguguucaugugcguggaguacugccccaucuucuucaucaccggcaacacccugcagugcaucaugcucgucuacugcuuccugggguacuucugcacgugcuacuucggccuguucugccuccugaaccgcuacuuccggcugacccucgggguguacgacuaccuggugagcacccaggaguuccgcuacaugaacucccagggccugcugcccccgaagaacagcaucgacgccuucaagcucaacaucaagcugcucggggucuccggcaagcccugcaucaagguggccaccguccagugaggacuaguuauaagacugacuagcccgaugggccucccaacgggcccuccuccccuccuugcaccgagauuaauaaaaaaaaaaaaaaaaaaaaaaaaaaaaaaaaaaaaaaaaaaaaaaaaaaaaaaaaaaaaaaaaugcaucccccccccccccccccccccccccccccccaaaggcucuuuucagagccaccagaauu

SEQ ID NO: 22295 - RNA, 1093 nt, Artificial Sequence
  SARS-CoV-2__MT451074.1__non-structural protein 6 (NSP6) mRNA gc
aggagaaagcuuaccaugagcgccgugaagcgcaccaucaagggcacccaccacuggcugcuccugacgauccugaccucccuccugguccuggugcagagcacccaguggucccucuucuucuucuucuacgagaacgccuuccugcccuucgcgauggggaucaucgccaugagcgccuucgccaugauguucgugaagcacaagcacgccuuccugugccucuuccugcugccgucccucgcgaccgucgccuacuucaacaugguguacaugcccgccagcugggugaugcggaucaugacguggcuggacauggucgacaccucccugagcggcuucaagcucaaggacugcgugauguacgccuccgcggugguccugcugauccucaugaccgcccgcaccguguacgacgacguggcccggcgcgucuggacgcugaugaacgugcugacccucguguacaaggucuacuacgggaacgcccuggaccaggccaucagcaugugggcgcugaucaucuccgugaccagcaacuacuccggcguggucaccacggugauguuccucgcccgggggaucguguucaugugcgucgaguacugccccaucuucuucaucaccggcaacacccugcagugcaucaugcugguguacugcuuccucggcuacuucugcacgugcuacuucgggcuguucugccugcucaaccgcuacuuccggcugacccugggcguguacgacuaccucgucagcacccaggaguuccgcuacaugaacucccaggggcugcugcccccgaagaacagcaucgacgccuucaagcucaacaucaagcugcugggcgucgggggcaagcccugcaucaagguggccaccgugcagugaggacuaguuauaagacugacuagcccgaugggccucccaacgggcccuccuccccuccuugcaccgagauuaauaaaaaaaaaaaaaaaaaaaaaaaaaaaaaaaaaaaaaaaaaaaaaaaaaaaaaaaaaaaaaaaaugcaucccccccccccccccccccccccccccccccaaaggcucuuuucagagccaccagaauu

SEQ ID NO: 22296 - RNA, 1093 nt, Artificial Sequence
  SARS-CoV-2__MT434803.1__non-structural protein 6 (NSP6) mRNA gc
aggagaaagcuuaccaugagcgccgugaagcgcaccaucaagggcacccaccacuggcugcuccugacgauccugaccucccuccugguccuggugcagagcacccaguggucccucuucuucuuccuguacgagaacgccuuccugcccuucgcgauggggaucaucgccaugagcgccuucgccaugauguucgugaagcacaagcacgccuuccucugccuguuccugcucccgucccuggcgaccgucgccuacuucaacaugguguacaugcccgccagcugggugaugcggaucaugacguggcuggacauggucgacaccucccucagcuccuucaagcugaaggacugcgugauguacgccagcgcggugguccugcucauccugaugaccgcccgcaccguguacgacgacggcgcccggcgcguguggacgcugaugaacguccucacccugguguacaagguguacuacgggaacgcccuggaccaggccaucuccaugugggcgcucaucaucagcgucaccuccaacuacagcggcguggugaccacggucauguuccuggcccgggggaucguguucaugugcguggaguacugccccaucuucuucaucaccggcaacacccugcagugcaucaugcucgucuacugcuuccugggcuacuucugcacgugcuacuucgggcuguucugccuccugaaccgcuacuuccggcugacccucggcguguacgacuaccugguguccacccaggaguuccgcuacaugaacagccaggggcugcugcccccgaagaacuccaucgacgccuucaagcucaacaucaagcugcucggcgucgggggcaagcccugcaucaagguggccaccguccagugaggacuaguuauaagacugacuagcccgaugggccucccaacgggcccuccuccccuccuugcaccgagauuaauaaaaaaaaaaaaaaaaaaaaaaaaaaaaaaaaaaaaaaaaaaaaaaaaaaaaaaaaaaaaaaaaugcaucccccccccccccccccccccccccccccccaaaggcucuuuucagagccaccagaauu

SEQ ID NO: 22297 - RNA, 1093 nt, Artificial Sequence
  SARS-CoV-2__MT434813.1__non-structural protein 6 (NSP6) mRNA gc
aggagaaagcuuaccaugagcgccgugaagcgcaccaucaagggcacccaccacuggcugcuccugacgauccugaccucccuccugguccuggugcagagcacccaguggucccucuucuucuuccuguacgagaacgccuuccugcccuucgcgauggggaucaucgccaugagcgccuucgccaugauguucgugaagcacaagcacgccuuccucugccuguuccugcucccgucccuggcgaccgucgccuacuucagcaugguguacaugcccgccuccugggugaugcggaucaugacguggcuggacauggucgacaccagccucuccggcuucaagcugaaggacugcgugauguacgccagcgcggugguccugcucauccugaugaccgcccgcaccguguacgacgacggggcccggcgcguguggacgcugaugaacguccucacccugguguacaagguguacuacggcaacgcccuggaccaggccaucuccaugugggcgcucaucaucagcgucaccuccaacuacagcgggguggugaccacggucauguuccuggcccggggcaucguguucaugugcguggaguacugccccaucuucuucaucaccggcaacacccugcagugcaucaugcucgucuacugcuuccugggguacuucugcacgugcuacuucggccuguucugccuccugaaccgcuacuuccggcugacccucgggguguacgacuaccugguguccacccaggaguuccgcuacaugaacagccagggccugcugcccccgaagaacuccaucgacgccuucaagcucaacaucaagcugcucggggucggcggcaagcccugcaucaagguggccaccguccagugaggacuaguuauaagacugacuagcccgaugggccucccaacgggcccuccuccccuccuugcaccgagauuaauaaaaaaaaaaaaaaaaaaaaaaaaaaaaaaaaaaaaaaaaaaaaaaaaaaaaaaaaaaaaaaaaugcaucccccccccccccccccccccccccccccccaaaggcucuuuucagagccaccagaauu

SEQ ID NO: 22298 - RNA, 1093 nt, Artificial Sequence
  SARS-CoV-2__MT385437.1__non-structural protein 6 (NSP6) mRNA gc
aggagaaagcuuaccaugagcgccgugaagcgcaccaucaagggcacccaccacuggcugcuccugacgauccugaccucccuccugguccuggugcagagcacccaguggucccucuucuucuuccuguacgagaacgccuuccugcccuucgcgauggggaucaucgccaugagcgccuucgccaugauguucgugaagcacaagcacgccuuccucugccuguuccugcucccgucccuggcgaccgucgccuacuucaacaugguguacaugcccgccagcugggugaugcggaucaugacguggcuggacauggucgacaccucccucagcggcuucaagcugaaggacugcgugauguacgccuccgcggugguccugcucauccugaugaccgcccgcaccguguacgacgacagcgcccggcgcguguggacgcugaugaacguccucacccugguguacaagguguacuacgggaacgcccuggaccaggccaucuccaugugggcgcucaucaucagcgucaccuccaacuacagcggcguggugaccacggucauguuccuggcccgggggaucguguucaugugcguggaguacugccccaucuucuucaucaccggcaacacccugcagugcaucaugcucgucuacugcuuccugggcuacuucugcacgugcuacuucgggcuguucugccuccugaaccgcuacuuccggcugacccucggcguguacgacuaccugguguccacccaggaguuccgcuacaugaacagccaggggcugcugcccccgaagaacuccaucgacgccuucaagcucaacaucaagcugcucggcgucgggggcaagcccugcaucaagguggccaccguccagugaggacuaguuauaagacugacuagcccgaugggccucccaacgggcccuccuccccuccuugcaccgagauuaauaaaaaaaaaaaaaaaaaaaaaaaaaaaaaaaaaaaaaaaaaaaaaaaaaaaaaaaaaaaaaaaaugcaucccccccccccccccccccccccccccccccaaaggcucuuuucagagccaccagaauu

SEQ ID NO: 22299 - RNA, 1093 nt, Artificial Sequence
  SARS-CoV-2__MT358678.1__non-structural protein 6 (NSP6) mRNA gc
aggagaaagcuuaccaugagcgccgugaagcgcaccaucaagggcacccaccacuggcugcuccugacgauccugaccucccuccugguccuggugcagagcacccaguggucccucuucuucuuccuguacgagaacgccuuccugcccuucgcgauggggaucaucgccaugagcgccuucgccaugauguucgugaagcacaagcacgccuuccucugccuguuccugcucccgucccuggcgaccgucgccuacuucaacaugguguacaugcccgccagcugggugaugcggaucaugacguggcuggacauggucgacaccucccucagcggcuucaagcugaaggacugcgugauguacgccuccgcggugguccugcucauccugaugaccgcccgcaccguguacgacgacggggcccggcgcguguggacgcugaugaacguccucacccugguguacaagguguacuacggcaacgcccuggaccaggccaucagcaugugggcgcucaucaucuccgucaccagcaacuacuccgggguggugaccacggucauguuccuggcccggggcaucguguucaugugcguggaguacugccccaucuucuucaucaccggcaacacccugcagugcaucaugcucgucuacugcuuccugggguacuucugcacgugcuacuucggccuguucugccuccugaaccgcuacuuccggcugacccucgggguguacgacuaccuggugagcacccaggaguuccgcuacaugaacucccugggccuccugcccccgaagaacagcaucgacgccuucaagcugaacaucaagcuccugggggucggcggcaagcccugcaucaagguggccaccguccagugaggacuaguuauaagacugacuagcccgaugggccucccaacgggcccuccuccccuccuugcaccgagauuaauaaaaaaaaaaaaaaaaaaaaaaaaaaaaaaaaaaaaaaaaaaaaaaaaaaaaaaaaaaaaaaaaugcaucccccccccccccccccccccccccccccccaaaggcucuuuucagagccaccagaauu

SEQ ID NO: 22300 - RNA, 1093 nt, Artificial Sequence
  SARS-CoV-2__MT358402.1__non-structural protein 6 (NSP6) mRNA gc
aggagaaagcuuaccaugagcgccgugaagcgcaccaucaagggcacccaccacuggcugcuccugacgauccugaccucccuccugguccuggugcagagcacccaguggucccucuucuucuuccuguacgagaacgccuuccugcccuucgcgauggggaucaccgccaugagcgccuucgccaugauguucgugaagcacaagcacgccuuccucugccuguuccugcucccgucccuggcgacggucgccuacuucaacaugguguacaugcccgccagcugggugaugcggaucaugaccuggcuggacauggucgacaccucccucagcggcuucaagcugaaggacugcgugauguacgccuccgcggugguccugcucauccugaugaccgcccgcacgguguacgacgacggggcccggcgcguguggacccugaugaacguccucacccugguguacaagguguacuacggcaacgcccuggaccaggccaucagcaugugggcgcucaucaucuccgucaccagcaacuacuccgggguggugacgaccgucauguuccuggcccggggcaucguguucaugugcguggaguacugccccaucuucuucaucaccggcaacacccugcagugcaucaugcucgucuacugcuuccugggguacuucugcacgugcuacuucggccuguucugccuccugaaccgcuacuuccggcugacccucgggguguacgacuaccuggugagcacccaggaguuccgcuacaugaacucccagggccugcugcccccgaagaacagcaucgacgccuucaagcucaacaucaagcugcucggggucggcggcaagcccugcaucaagguggccaccguccagugaggacuaguuauaagacugacuagcccgaugggccucccaacgggcccuccuccccuccuugcaccgagauuaauaaaaaaaaaaaaaaaaaaaaaaaaaaaaaaaaaaaaaaaaaaaaaaaaaaaaaaaaaaaaaaaaugcaucccccccccccccccccccccccccccccccaaaggcucuuuucagagccaccagaauu

SEQ ID NO: 22301 - RNA, 1093 nt, Artificial Sequence
  SARS-CoV-2__MT326071.1__non-structural protein 6 (NSP6) mRNA gc
aggagaaagcuuaccaugagcgccgugaagcgcaccaucaagggcacccaccacuggcugcuccugacgauccugaccucccuccugguccuggugcagagcacccaguggucccucuucuucuuccuguacgagaacgccuuccugcccuucgcgauggggaucaucgccaugagcgccuucgccaugauguucgugaagcacaagcacgccuuccucugccuguuccugcucccgucccuggcgaccgucgccuacuucaacaugguguacaugcccgccagcugggugaugcggaucaugacguggcuggacaccucccucagcggcuucaagcugaaggacugcgucauguacgccuccgcgguggugcugcucauccugaugaccgcccgcaccgucuacgacgacggggcccggcgcguguggacgcugaugaacgugcucacccuggucuacaagguguacuacggcaacgcccuggaccaggccaucagcaugugggcgcucaucaucuccgugaccagcaacuacuccggggucgugaccacggugauguuccuggcccggggcaucgucuucaugugcguggaguacugccccaucuucuucaucaccggcaacacccugcagugcaucaugcucguguacugcuuccugggguacuucugcacgugcuacuucggccuguucugccuccugaaccgcuacuuccggcugacccucggggucuacgacuaccuggugagcacccaggaguuccgcuacaugaacucccagggccugcugcccccgaagaacagcaucgacgccuucaagcucaacaucaagcugcucggggugggcggcaagcccugcaucaaggucgccaccgugcaguccaagaugugaggacuaguuauaagacugacuagcccgaugggccucccaacgggcccuccuccccuccuugcaccgagauuaauaaaaaaaaaaaaaaaaaaaaaaaaaaaaaaaaaaaaaaaaaaaaaaaaaaaaaaaaaaaaaaaaugcaucccccccccccccccccccccccccccccccaaaggcucuuuucagagccaccagaauu

SEQ ID NO: 22302 - RNA, 1093 nt, Artificial Sequence
  SARS-CoV-2__MT326117.1__non-structural protein 6 (NSP6) mRNA gc
aggagaaagcuuaccaugagcgccgugaagcgcaccaucaagggcacccaccacuggcugcuccugacgauccugaccucccuccugguccuggugcagagcacccaguggucccucuucuucuucuucuacgagaacgccuuccugcccuucgcgauggggaucaucgccaugagcgccuucgccaugauguucgugaagcacaagcacgccuuccugugccucuuccugcugccgucccucgcgaccgucgccuacuucaacaugguguacaugcccgccagcugggugaugcggaucaugacguggcuggacauggucgacaccucccugagcggcuucaagcucaaggacugcgugauguacgccuccgcggugguccugcugauccucaugaccgcccgcaccguguacgacgacggggcccggcgcguguggacgcugaugaacguccugacccucguguacaagguguacuacggcaacgcccuggaccaggccaucagcaugugggcgcugaucaucuccgucaccagcaacuacuccgggguggugaccacggucauguuccucgcccggggcaucgugaugugcguggaguacugccccaucuucuucaucaccggcaacacccugcagugcaucaugcuggucuacugcuuccucggguacuucugcacgugcuacuucggccuguucugccugcucaaccgcuacuuccggcugacccuggggguguacgacuaccucgugagcacccaggaguuccgcuacaugaacucccagggccugcugcccccgaagaacagcaucgacgccuucaagcucaacaucaagcugcugggggucggcggcaagcccugcaucaagguggccaccguccaguccugaggacuaguuauaagacugacuagcccgaugggccucccaacgggcccuccuccccuccuugcaccgagauuaauaaaaaaaaaaaaaaaaaaaaaaaaaaaaaaaaaaaaaaaaaaaaaaaaaaaaaaaaaaaaaaaaugcaucccccccccccccccccccccccccccccccaaaggcucuuuucagagccaccagaauu

SEQ ID NO: 22303 - RNA, 529 nt, Artificial Sequence
  MERS-CoV/MERS-CoV-Jeddah-human-1__KF958702.1__ORF3 protein mRNA gc
aggagaaagcuuaccaugcgcgugcagcggcccccgacccugcuccuggucuucagccugucccuccuggugaccgccuucagcaagccccuguacgugcccgagcacugccagaacuacuccggcugcaugcuccgcgccugcaucaagacggcgcaggccgacaccgccgggcuguacaccaacuuccggaucgacguccccagcgccgaguccaccggcacgcagagcguguccguggaccgcgagagcaccuccacccacgacgggccgaacgagcacgucaccaucgugaaccugcucgacgugggcuacagcgucaacugaggacuaguuauaagacugacuagcccgaugggccucccaacgggcccuccuccccuccuugcaccgagauuaauaaaaaaaaaaaaaaaaaaaaaaaaaaaaaaaaaaaaaaaaaaaaaaaaaaaaaaaaaaaaaaaaugcaucccccccccccccccccccccccccccccccaaaggcucuuuucagagccaccagaauu

SEQ ID NO: 22304 - RNA, 529 nt, Artificial Sequence
  MERS-CoV/Al-Hasa_4_2013__KF186564.1__ORF3 protein mRNA gc
aggagaaagcuuaccaugcgcgugcagcggcccccgacccugcuccuggucuucagccugucccuccuggugaccgccuucagcaagccccuguacgugcccgagcacugccagaacuacuccggcugcaugcuccgcgccugcaucaagacggcgcaggccgacaccgccgggcuguacaccaacagccggaucgacguccccuccgccgagagcaccggcacgcaguccgugagcguggaccgcgaguccaccagcacccacgacgggccgaccgagcacgucacguccgugaaccuguucgacgugggcuacagcgucaacugaggacuaguuauaagacugacuagcccgaugggccucccaacgggcccuccuccccuccuugcaccgagauuaauaaaaaaaaaaaaaaaaaaaaaaaaaaaaaaaaaaaaaaaaaaaaaaaaaaaaaaaaaaaaaaaaugcaucccccccccccccccccccccccccccccccaaaggcucuuuucagagccaccagaauu

SEQ ID NO: 22305 - RNA, 529 nt, Artificial Sequence
  MERS-CoV/Riyadh_14_2013__KJ156934.1__ORF3 protein mRNA gc
aggagaaagcuuaccaugcgcgugcagcggcccccgacccugcuccuggucuucagccugucccuccuggugaucgccuucagcaagccccuguacgugcccgagcacugccagaacuacuccggcugcaugcuccgcgccugcaucaagaccgcgcaggccgacacggccgggcuguacaccaacuuccggaucgacguccccagcgccgaguccaccggcacccagagcguguccguggaccgcgagagcacguccacccacgacgggccgaccgagcacgucaccagcgugaaccuguucgacgugggcuacuccgucaacugaggacuaguuauaagacugacuagcccgaugggccucccaacgggcccuccuccccuccuugcaccgagauuaauaaaaaaaaaaaaaaaaaaaaaaaaaaaaaaaaaaaaaaaaaaaaaaaaaaaaaaaaaaaaaaaaugcaucccccccccccccccccccccccccccccccaaaggcucuuuucagagccaccagaauu

SEQ ID NO: 22306 - RNA, 529 nt, Artificial Sequence
  MERS-CoV/England 1__NC_038294.1__ORF3 protein mRNA gc
aggagaaagcuuaccaugcgcgugcagcggcccccgacccugcuccuggucuucagccugucccuccuggugaccgccuucagcaagccccuguacgugcccgagcacugccagaacuacuccggcugcaugcuccgcgccugcaucaagacggcgcaggccgacaccgccgggcuguacaccaacuuccggaucgacguccccagcgccgaguccaccggcacgcagagcguguccguggaccgcgagagcaccuccacccacgacgggccgaccgagcacgucacgagcgugaaccuguucgacgugggcuacuccgucaacugaggacuaguuauaagacugacuagcccgaugggccucccaacgggcccuccuccccuccuugcaccgagauuaauaaaaaaaaaaaaaaaaaaaaaaaaaaaaaaaaaaaaaaaaaaaaaaaaaaaaaaaaaaaaaaaaugcaucccccccccccccccccccccccccccccccaaaggcucuuuucagagccaccagaauu

SEQ ID NO: 22307 - RNA, 1042 nt, Artificial Sequence
  SARS-CoV/Tor2__NC_004718.3__ORF3a protein mRNA gc
aggagaaagcuuaccauggaccuguucaugcgcuucuucacccuccggagcaucaccgcccagcccgugaagaucgacaacgccuccccggcgagcacgguccacgccaccgccaccaucccccugcaggccucccugcccuucggcuggcucgugaucgggguggccuuccuggcggucuuccagagcgccaccaagaucaucgcccugaacaagcgcuggcagcucgcccuguacaagggcuuccaguucaucugcaaccugcuccugcuguucgugacgaucuacucccaccuccugcugguggcggccgggauggaggcccaguuccucuaccuguacgcccugaucuacuuccuccagugcaucaacgccugccggaucaucaugcgcugcuggcugugcuggaagugcaagagcaagaacccccugcucuacgacgcgaacuacuucgucugcuggcacacccacaacuacgacuacugcaucccguacaacuccgugaccgacaccaucguggucacggagggcgacgggaucagcacccccaagcugaaggaggacuaccagaucggcggcuacuccgaggaccggcacagcggggugaaggacuacguggucgugcacggcuacuucaccgagguguacuaccagcuggaguccacccagaucacgaccgacaccgggaucgagaacgccaccuucuucaucuucaacaagcucgucaaggacccgcccaacgugcagauccacacgaucgacggcagcuccgggguggccaaccccgccauggaccccaucuacgacgagcccaccaccaccacgagcgucccccugugaggacuaguuauaagacugacuagcccgaugggccucccaacgggcccuccuccccuccuugcaccgagauuaauaaaaaaaaaaaaaaaaaaaaaaaaaaaaaaaaaaaaaaaaaaaaaaaaaaaaaaaaaaaaaaaaugcaucccccccccccccccccccccccccccccccaaaggcucuuuucagagccaccagaauu

SEQ ID NO: 22308 - RNA, 547 nt, Artificial Sequence
  HCoV/OC43__NC_006213.1__ORF3 protein mRNA gc
aggagaaagcuuaccauggacaucuggcgccccgagaagaaguaccugcgguacaucaacggcuucaacgugagcgagcucgaggacgccugcuucaaguucaacuaccaguucccgaaggucggguacugccgcgugcccucccacgccuggugccggaaccagggccgcuucugcgcgaccuucacccuguacggcaagagcaagcacuacgacaaguacuucggggugaucaacggguucacggccuucgccaacaccgucgaggacgccgugaacaagcugguguuccucgccgucgacuucaucaccuggcggcgccaggagcugaacguguacggcugaggacuaguuauaagacugacuagcccgaugggccucccaacgggcccuccuccccuccuugcaccgagauuaauaaaaaaaaaaaaaaaaaaaaaaaaaaaaaaaaaaaaaaaaaaaaaaaaaaaaaaaaaaaaaaaaugcaucccccccccccccccccccccccccccccccaaaggcucuuuucagagccaccagaauu

SEQ ID NO: 22309 - RNA, 547 nt, Artificial Sequence
  HCoV/HKU1__NC_006577.2__ORF3 protein mRNA gc
aggagaaagcuuaccauggacguguggcgccccagcuacacccacucccuggucauccgggaguucggcgugaccaaccucgaggaccugugccugaaguacaacuacugccagccgaucgugggguacugcaucgucccccucaacguguggugccgcaaguucggcaaguucgccagccacuucacgcugcggucccacgacaucagccacuccaacaacuucgggguggucaccagcuucaccaccuacggcaacacgguguccgaggccgugagccgccuggucgaguccgcgagcgaguucaucguguggcgggccgaggcccucaacaaguacgggugaggacuaguuauaagacugacuagcccgaugggccucccaacgggcccuccuccccuccuugcaccgagauuaauaaaaaaaaaaaaaaaaaaaaaaaaaaaaaaaaaaaaaaaaaaaaaaaaaaaaaaaaaaaaaaaaugcaucccccccccccccccccccccccccccccccaaaggcucuuuucagagccaccagaauu

SEQ ID NO: 22310 - RNA, 877 nt, Artificial Sequence
  HCoV/229E/BN1/GER/2015__KU291448.1__ORF3 protein mRNA gc
aggagaaagcuuaccauggcccugggccucuucacccugcaguucgugagcgccgucaaccagucccugaucaagagcaagguguccgcggaggugagccgccaggucauccaggacgugaaggacgggaccgugacguucaaccuccuggccuacacccugaugucccucuucgucguguacuucgcccuguucaaggcccggagccaccgcggccgguccgcccugaucguguucaagauccucauccuguucgucuacgugccccugcucuacuggagccaggcguacaucgacgccacccugaucgccgugauccugcucgggcgcuucuuccacaccgccuggcacugcuggcuguacaagacgugggacuucaucgucuucaacgugaccacccugugcuacgugcagggcaagugcugguuccucgagaacaaggcgcugaagccguucgucugcuucuacgggggcgaccaguuccuguacaucggcgaccggaucgugaccuaccucuccacgaacgaccuguacguggcccugcgcgggcggaucgacaaggaccucagccugucccgcaaggucgagcuguacaacggcgagugcguguaccucuucugcgagcaccccgccguggggaucgucaacaccgacuucaagcuggagauccacugaggacuaguuauaagacugacuagcccgaugggccucccaacgggcccuccuccccuccuugcaccgagauuaauaaaaaaaaaaaaaaaaaaaaaaaaaaaaaaaaaaaaaaaaaaaaaaaaaaaaaaaaaaaaaaaaugcaucccccccccccccccccccccccccccccccaaaggcucuuuucagagccaccagaauu

SEQ ID NO: 22311 - RNA, 895 nt, Artificial Sequence
  HCoV/NL63/RPTEC/2004__JX504050.1__ORF3 protein mRNA gc
aggagaaagcuuaccaugcccuucggcgggcuguuccagcucacccuggagagcaccaucaacaaguccguggccaaccugaagcucccgccccacgacgucacggugcugcgcgacaaccugaagcccgugaccacccucagcaccaucacggccuaccugcuggucucccucuucgugaccuacuucgcgcuguucaagccccugaccgcccggggccgcguggccugcuucguccucaagcugcugacccucuucguguacgugccgcugcugguccucuucgggauguaccuggacagcuucaucaucuucuccacgcugcuguuccgguucauccacgugggcuacuacgccuaccuguacaagaacuucagcuucgugcuguucaacgucaccaagcucugcuucguguccgggaagugcugguaccuggagcagagcuucuacgagaaccgcuucgccgcgaucuacggcggcgaccacuacgugguccucgggggcgagaccaucaccuucguguccuucgacgaccucuacguggccauccgggggagcugcgagaagaaccugcagcugaugcgcaaggucgaccucuacaacggcgccgugaucuacaucuucgccgaggagcccguggucgggaucguguacuccagccagcuguacgaggacgugcccuccaucaacugaggacuaguuauaagacugacuagcccgaugggccucccaacgggcccuccuccccuccuugcaccgagauuaauaaaaaaaaaaaaaaaaaaaaaaaaaaaaaaaaaaaaaaaaaaaaaaaaaaaaaaaaaaaaaaaaugcaucccccccccccccccccccccccccccccccaaaggcucuuuucagagccaccagaauu

SEQ ID NO: 22312 - RNA, 1042 nt, Artificial Sequence
  Bat SARS-like CoV/WIV1__KF367457.1__ORF3 protein mRNA gc
aggagaaagcuuaccauggaccuguucaugcgcaucuucacccucggccccaucaccgcccagccggggaagaucgacaacgccagccccgcguccacggugcacgccaccgccaccaucccccugcaggccagccugcccuucggcuggcucgucaucgggguggccuuccuggcgguguuccaguccgccaccaagaucaucagccugaacaagcgguggcagcucgcccuguacaagggcuuccaguucaucugcaaccugcuccugcuguucgucacgaucuacucccaccuccugcugguggccgcggggauggaggcccaguuccucuaccuguacgcccugaucuacuuccuccagugcaucaacgccugccgcaucaucaugcggugcuggcugugcuggaagugcaagagcaagaacccgcugcucuacgacgccaacuacuucgugugcuggcacacccacaacuacgacuacugcauccccuacaacuccgucaccgacaccaucguggugacggcgggcgacggcaucagcacccccaagcugaaggaggacuaccagaucgggggcuacuccgagaacuggcacagcggggucaaggacuacguggugguccacggcuacuucaccgagguguacuaccagcuggaguccacccagaucacgaccgacaccgggaucgagaacgccaccuucuucaucuucaacaagcucgugaaggacccgcccaacguccagauccacacgaucgacggcagcuccggcguggugaaccccgccauggaccccaucuacgacgagcccaccaccaccacgagcgucccgcugugaggacuaguuauaagacugacuagcccgaugggccucccaacgggcccuccuccccuccuugcaccgagauuaauaaaaaaaaaaaaaaaaaaaaaaaaaaaaaaaaaaaaaaaaaaaaaaaaaaaaaaaaaaaaaaaaugcaucccccccccccccccccccccccccccccccaaaggcucuuuucagagccaccagaauu

SEQ ID NO: 22313 - RNA, 880 nt, Artificial Sequence
  BatCoV/HKU9-1 BF_005I__NC_009021.1__ORF3 protein mRNA gc
aggagaaagcuuaccaugaaccuguacaaccucgugcgcgacgcccugcggcccagcuacgccaccgucuccccgagcguggacgagcccaccguggacaacaacuucgucgcgcuguccugcuacgccacgcucagcgugcugcuguacuaccuccagcgcgugaagcagcccuaccuguccaugcuguuccacauccucuucugccugagccaggucugcauggugaucuggcugaucuucuccgccaacuucuacgugagccucuucgcccagugcaugcuggucgugugcgcccugggcugcuuccucgagcggaccauccuguccaucaagcugcgcagcauggcgcccuucauguccauggccgacaacuucgccaucaucaagacgaccugcaacaacuacguguucccggucgagcggagcuccgacaaccucguggugcugaccaccagccgcgggaucuacuccaacggcgucuucaugaagggggccaucaccgugagcgacaacgcgcugguggucucccucuucaagagccacucccugcugcucgaccggguggagcacggcuacgacuacaccguguucaucuacaucaacagcgucauccugcagaacaucaagcccacggugagcguggucaacaccgaguucaccgacguggagcugugaggacuaguuauaagacugacuagcccgaugggccucccaacgggcccuccuccccuccuugcaccgagauuaauaaaaaaaaaaaaaaaaaaaaaaaaaaaaaaaaaaaaaaaaaaaaaaaaaaaaaaaaaaaaaaaaugcaucccccccccccccccccccccccccccccccaaaggcucuuuucagagccaccagaauu

SEQ ID NO: 22314 - RNA, 892 nt, Artificial Sequence
  PEDV/NPL-PEDv/2013/P10__KJ778616.1__ORF3 protein mRNA gc
aggagaaagcuuaccauguuccugggccucuuccaguacaccaucgacaccguggucaaggacgugagcaaguccgccaaccugagccuggacgccgugcaggagcucgagcugaacgucgugcccauccgccaggcguccaacgugacgggguuccuguucaccagcgucuucaucuacuucuucgcccucuucaaggccuccagccugcggcgcaacuacaucaugcuggccgcccgguucgcggugaucgugcucuacugcccgcugcuguacuacugcggcgccuuccucgacgccaccaucaucugcugcacccugaucgggcgccugugccucgucugcuucuacuccuggcgguacaagaacgcccuguucaucaucuucaacacgaccacccugagcuuccucaacggcaaggcggccuacuacgacgggaaguccaucgugauccuggagggcggcgaccacuacaucaccuucgggaacagcuucguggccuucgucuccagcaucgaccuguaccucgccauccgcggccggcaggaggccgaccugcagcugcuccgcacgguggagcugcuggacgggaagaagcucuacguguucucccagcaccagaucgucggcaucaccaacgcggccuucgacagcauccagcuggacgaguacgccaccaucuccgagugaggacuaguuauaagacugacuagcccgaugggccucccaacgggcccuccuccccuccuugcaccgagauuaauaaaaaaaaaaaaaaaaaaaaaaaaaaaaaaaaaaaaaaaaaaaaaaaaaaaaaaaaaaaaaaaaugcaucccccccccccccccccccccccccccccccaaaggcucuuuucagagccaccagaauu

SEQ ID NO: 22315 - RNA, 1045 nt, Artificial Sequence
  SARS-CoV-2/Wuhan-Hu-1__NC_045512.2/MN908947.2/EPI_ISL_402128__ORF 3a protein (ORF3a) mRNA gc R9944
aggagaaagcuuaccauggaccuguucaugcgcaucuucaccaucggcaccgugacgcucaagcagggggagaucaaggacgccacccccagcgacuucguccgggccaccgcgaccaucccgauccaggccucccugcccuucggcuggcugaucguggggguggcccuccuggccgucuuccagagcgccuccaagaucaucacgcugaagaagcgcuggcagcucgcgcugagcaagggcgugcacuucgugugcaaccugcuccugcuguucgucaccguguacucccaccuccugcugguggccgccgggcucgaggcccccuuccuguaccuguacgcgcucgucuacuuccugcagagcaucaacuucgugcggaucaucaugcgccuguggcucugcuggaagugccgguccaagaacccccugcuguacgacgccaacuacuuccucugcuggcacaccaacugcuacgacuacugcaucccguacaacagcgugaccuccagcaucgucaucacguccggcgacggcaccaccagccccaucuccgagcacgacuaccagaucgggggcuacaccgagaagugggagagcggggugaaggacugcgugguccugcacuccuacuucacgagcgacuacuaccagcuguacuccacccagcucagcaccgacaccggcguggagcacgugacguucuucaucuacaacaagaucgucgacgagcccgaggagcacgugcagauccacaccaucgacggguccagcggcguggucaaccccgugauggagccgaucuacgacgagcccaccaccacgaccagcgugccccugugaggacuaguuauaagacugacuagcccgaugggccucccaacgggcccuccuccccuccuugcaccgagauuaauaaaaaaaaaaaaaaaaaaaaaaaaaaaaaaaaaaaaaaaaaaaaaaaaaaaaaaaaaaaaaaaaugcaucccccccccccccccccccccccccccccccaaaggcucuuuucagagccaccagaauu

SEQ ID NO: 22316 - RNA, 1045 nt, Artificial Sequence
  SARS-CoV-2__MT919525.1__ORF3a protein mRNA gc
aggagaaagcuuaccauggaccuguucaugcgcaucuucaccaucggcaccgugacgcucaagcagggggagaucaaggacgccacccccagcgacuucguccgggccaccgcgaccaucccgauccaggccucccugcccuucggcuggcugaucguggggguggcccuccuggccgucuuccagagcgccuccaagaucaucacgcugaagaagcgcuggcagcucgcgcugagcaagggcgugcacuucgugugcaaccugcuccugcuguucgucaccguguacucccaccuccugcugguggccgccgggcucgaggcccccuuccuguaccuguacgcgcucgucuacuuccugcagagcaucaacuucgugcggaucaucaugcgccuguggcucugcuggaagugccgguccaagaacccccugcuguacgacgccaacuacuuccucugcuggcacaccaacugcuacgacuacugcaucccguacaacagcgugaccuccagcaucgucaucacguccggcgacggcaccaccagccccaucuccgaguacgacuaccagaucgggggcuacaccgagaagugggagagcggggugaaggacugcgugguccugcacuccuacuucacgagcgacuacuaccagcuguacuccacccagcucagcaccgacaccggcguggagcacgugacguucuucaucuacaacaagaucgucgacgagcccgaggagcacgugcagauccacaccaucgacggguccagcggcguggucaaccccgugauggagccgaucuacgacgagcccaccaccacgaccagcgugccccugugaggacuaguuauaagacugacuagcccgaugggccucccaacgggcccuccuccccuccuugcaccgagauuaauaaaaaaaaaaaaaaaaaaaaaaaaaaaaaaaaaaaaaaaaaaaaaaaaaaaaaaaaaaaaaaaaugcaucccccccccccccccccccccccccccccccaaaggcucuuuucagagccaccagaauu

SEQ ID NO: 22317 - RNA, 1045 nt, Artificial Sequence
  SARS-CoV-2__MT919995.1__ORF3a protein mRNA gc
aggagaaagcuuaccauggaccuguucaugcgcaucuucaccaucggcaccgugacgcucaagcagggggagaucaaggacgccacccccagcgacuucguccgggccaccgcgaccaucccgauccaggccucccugcccuucguguggcugaucgugggcgucgcccuccuggccguguuccacagcgccuccaagaucaucacgcugaagaagcgcuggcagcucgcgcugagcaagggggugcacuucgucugcaaccugcuccugcuguucgugaccguguacucccaccuccugcuggucgccgccggccucgaggcccccuuccuguaccuguacgcgcucguguacuuccugcagagcaucaacuucgugcggaucaucaugcgccuguggcucugcuggaagugccgguccaagaacccccugcuguacgacgccaacuacuuccucugcuggcacaccaacugcuacgacuacugcaucccguacaacagcgucaccuccagcaucgugaucacguccggggacggcaccaccagccccaucuccgagcacgacuaccagaucggcggguacaccgagaagugggagagcggcgugaaggacugcgucgugcugcacuccuacuucacgagcgacuacuaccagcuguacuccacccagcucagcaccgacaccgggguggagcacgucacguucuucaucuacaacaagaucguggacgagcccgaggagcacgugcagauccacaccaucgacggcuccagcggggucgugaaccccgugauggagccgaucuacgacgagcccaccaccacgaccagcgucccccugugaggacuaguuauaagacugacuagcccgaugggccucccaacgggcccuccuccccuccuugcaccgagauuaauaaaaaaaaaaaaaaaaaaaaaaaaaaaaaaaaaaaaaaaaaaaaaaaaaaaaaaaaaaaaaaaaugcaucccccccccccccccccccccccccccccccaaaggcucuuuucagagccaccagaauu

SEQ ID NO: 22318 - RNA, 1045 nt, Artificial Sequence
  SARS-CoV-2__MT919996.1__ORF3a protein mRNA gc
aggagaaagcuuaccauggaccuguucaugcgcaucuucaccaucggcaccgugacgcucaagcagggggagaucaaggacgccacccccagcgacuucguccgggccaccgcgaccaucccgauccaggccucccugcccuucggcuggcugaucguggggguggcccuccuggccgucuuccacagcgccuccaagaucaucacgcugaagaagcgcuggcagcucgcgcugagcaagggcgugcacuucgugugcaaccugcuccugcuguucgucaccguguacucccaccuccugcugguggccgccgggcucgaggcccccuuccuguaccuguacgcgcucgucuacuuccugcagagcaucaacuucgugcggaucaucaugcgccuguggcucugcuggaagugccgguccaagaacccccugcuguacgacgccaacuacuuccucugcuggcacaccaacugcuacgacuacugcaucccguacaacagcgugaccuccagcaucgucaucacguccggcgacggcaccaccagccccaucuccgagcacgacuaccagaucgggggcuacaccgagaagugggagagcggggugaaggacugcgugguccugcacuccuacuucacgagcgacuacuaccagcuguacuccacccagcucagcaccgacaccggcguggagcacgugacguucuucaucuacaacaagaucgucgacgagcccgaggagcacgugcagauccacaccaucgacggguccagcggcguggucaaccccgugauggagccgaucuacgacgagcccaccaccacgaccagcgugccccugugaggacuaguuauaagacugacuagcccgaugggccucccaacgggcccuccuccccuccuugcaccgagauuaauaaaaaaaaaaaaaaaaaaaaaaaaaaaaaaaaaaaaaaaaaaaaaaaaaaaaaaaaaaaaaaaaugcaucccccccccccccccccccccccccccccccaaaggcucuuuucagagccaccagaauu

SEQ ID NO: 22319 - RNA, 1045 nt, Artificial Sequence
  SARS-CoV-2__MT920030.1__ORF3a protein mRNA gc
aggagaaagcuuaccauggaccuguucaugcgcaucuucaccaucggcaccgugacgcucaagcagggggagaucaaggacgccacccccagcgacuucguccgggccaccgcgaccaucccgauccaggccucccugcccuucggcuggcugaucguggggguggcccuccuggccgucuuccagagcgccuccaagaucaucacgcugaagaagcgcuggcagcucgcgcugagcaagggcgugcacuucgugugcaaccugcuccugcuguucgucaccguguacucccaccuccugcugguggccgccgggcucgaggcccccuuccuguaccuguacgcgcucgucuacuuccugcagagcaucaacuucgugcggaucaucaugcgccuguggcucugcuggaagugccgguccaagaacccccugcuguacgacgccaacuacuuccucugcuggcacaccaacugcuacgacuacugcaucccguacaacagcgugaccuccagcaucgucaucacguccggcgacggcaccaccagccccaucuccgagcacgacuaccagaucgggggcuacaccgagaagugggagagcggggugaaggacugcgugguccugcacuccuacuucacgagcgacuacuaccagcuguacuccacccagcucagcaccgacaccggcguggagcacgugacguucuucaucuacaacaagaucgucgacgagcccgaggagcacgugcagauccacaccaucgacguguccagcggggucgugaaccccgugauggagccgaucuacgacgagcccaccaccacgaccagcgucccccugugaggacuaguuauaagacugacuagcccgaugggccucccaacgggcccuccuccccuccuugcaccgagauuaauaaaaaaaaaaaaaaaaaaaaaaaaaaaaaaaaaaaaaaaaaaaaaaaaaaaaaaaaaaaaaaaaugcaucccccccccccccccccccccccccccccccaaaggcucuuuucagagccaccagaauu

SEQ ID NO: 22320 - RNA, 1045 nt, Artificial Sequence
  SARS-CoV-2__MT913045.1__ORF3a protein mRNA gc
aggagaaagcuuaccauggaccuguucaugcgcaucuucaccaucggcaccgugacgcucaagcagggggagaucaaggacgccacccccagcgacuucguccgggccaccgcgaccaucccgauccaggccucccugcccuucggcuggcugaucguggggguggcccuccuggccgucuuccacagcgccuccaagaucaucacgcugaagaagcgcuggcagcucgcgcugagcaagggcgugcacuucgugugcaacuuccugcuccuguucgucaccguguacucccaccuccugcugguggccgccgggcuggaggcccccuuccucuaccuguacgcgcuggucuacuuccuccagagcaucaacuucgugcggaucaucaugcgccuguggcugugcuggaagugccgguccaagaacccccuccuguacgacgccaacuacuuccugugcuggcacaccaacugcuacgacuacugcaucccguacaacagcgugaccuccagcaucgucaucacguccggcgacggcaccaccagccccaucuccgagcacgacuaccagaucgggggcuacaccgagaagugggagagcggggugaaggacugcgugguccuccacuccuacuucacgagcgacuacuaccagcuguacuccacccagcugagcaccgacaccggcguggagcacgugacguucuucaucuacaacaagaucgucgacgagcccgaggagcacgugcagauccacaccaucgacggguccagcggcguggucaaccccgugauggagccgaucuacgacgagcccaccaccacgaccagcgugccccucugaggacuaguuauaagacugacuagcccgaugggccucccaacgggcccuccuccccuccuugcaccgagauuaauaaaaaaaaaaaaaaaaaaaaaaaaaaaaaaaaaaaaaaaaaaaaaaaaaaaaaaaaaaaaaaaaugcaucccccccccccccccccccccccccccccccaaaggcucuuuucagagccaccagaauu

SEQ ID NO: 22321 - RNA, 1045 nt, Artificial Sequence
  SARS-CoV-2__MT913078.1__ORF3a protein mRNA gc
aggagaaagcuuaccauggaccuguucaugcgcaucuucaccaucggcaccgugacgcucaagcagggggagaucaaggacgccacccccagcgacuucguccgggccaccgcgaccaucccgauccaggccucccugcccuucggcuggcugaucgugggggccgcccuccuggccguguuccacagcgcguccaagaucaucacgcugaagaagcgcuggcagcucgcccugagcaagggcguccacuucgugugcaaccugcuccugcuguucgugaccgucuacucccaccuccugcugguggccgccgggcucgaggcgcccuuccuguaccuguacgcccucguguacuuccugcagagcaucaacuucguccggaucaucaugcgccuguggcucugcuggaagugccgguccaagaacccccugcuguacgacgccaacuacuuccucugcuggcacaccaacugcuacgacuacugcaucccguacaacagcgugaccuccagcaucgugaucacguccggcgacggcaccaccagccccaucuccgagcacgacuaccagaucgggggcuacaccgagaagugggagagcggggucaaggacugcguggugcugcacuccuacuucacgagcgacuacuaccagcuguacuccacccagcucagcaccgacaccggcgucgagcacgugacguucuucaucuacaacaagaucguggacgagcccgaggagcacguccagauccacaccaucgacggguccagcggcguggugaaccccgucauggagccgaucuacgacgagcccaccaccacgaccagcgugccccugugaggacuaguuauaagacugacuagcccgaugggccucccaacgggcccuccuccccuccuugcaccgagauuaauaaaaaaaaaaaaaaaaaaaaaaaaaaaaaaaaaaaaaaaaaaaaaaaaaaaaaaaaaaaaaaaaugcaucccccccccccccccccccccccccccccccaaaggcucuuuucagagccaccagaauu

SEQ ID NO: 22322 - RNA, 1039 nt, Artificial Sequence
  SARS-CoV-2__MT913086.1__ORF3a protein mRNA gc
aggagaaagcuuaccauggaccuguucaugcgcaucuucaccaucggcaccgugacgcucaagcagggggagaucaaggacgccacccccagcgacuucguccgggccaccgcgaccauccaggccucccugccguucggcuggcugaucguggggguggcccuccuggccgucuuccacagcgccuccaagaucaucacgcugaagaagcgcuggcagcucgcgcugagcaagggcgugcacuucgugugcaaccugcuccugcuguucgucaccguguacucccaccuccugcugguggccgccgggcucgaggcccccuuccuguaccuguacgcgcucgucuacuuccugcagagcaucaacuucgugcggaucaucaugcgccuguggcucugcuggaagugccgguccaagaacccccugcuguacgacgccaacuacuuccucugcuggcacaccaacugcuacgacuacugcauccccuacaacagcgugaccuccagcaucgucaucacguccggcgacggcaccaccagcccgaucuccgagcacgacuaccagaucgggggcuacaccgagaagugggagagcggggugaaggacugcgugguccugcacuccuacuucacgagcgacuacuaccagcuguacuccacccagcucagcaccgacaccggcguggagcacgugacguucuucaucuacaacaagaucgucgacgagcccgaggagcacgugcagauccacaccaucgacggguccagcggcguggucaaccccgugauggagcccaucuacgacgagccgaccaccacgaccagcgugccccugugaggacuaguuauaagacugacuagcccgaugggccucccaacgggcccuccuccccuccuugcaccgagauuaauaaaaaaaaaaaaaaaaaaaaaaaaaaaaaaaaaaaaaaaaaaaaaaaaaaaaaaaaaaaaaaaaugcaucccccccccccccccccccccccccccccccaaaggcucuuuucagagccaccagaauu

SEQ ID NO: 22323 - RNA, 1045 nt, Artificial Sequence
  SARS-CoV-2__MT913089.1__ORF3a protein mRNA gc
aggagaaagcuuaccauggaccuguucaugcgcaucuucaccaucggcaccgugacgcucaagcagggggagaucaaggacgccacccccagcgacuucguccgggccaccgcgaccaucccgauccaggccucccugcccuucggcuggcugaucguggggguggcccuccuggccgucuuccagagcgccuccaagaucaucacgcugaagaagcgcuggcagcucgcgcugagcaagggcgugcacuucgugugcaaccugcuccugcuguucgucaccguguacuccuaccuccugcugguggccgccgggcucgaggcccccuuccuguaccuguacgcgcucgucuacuuccugcagagcaucaacuucgugcggaucaucaugcgccuguggcucugcuggaagugccgguccaagaacccccugcuguacgacgccaacuacuuccucugcuggcacaccaacugcuacgacuacugcaucccguacaacagcgugaccuccagcaucgucaucacguccggcgacggcaccaccagccccaucuccgagcacgacuaccagaucgggggcuacaccgagaagugggagagcggggugaaggacugcgugguccugcacuccuacuucacgagcgacuacuaccagcuguacuccacccagcucagcaccgacaccggcguggagcacgugacguucuucaucuacaacaagaucgucgacgagcccgaggagcacgugcagauccacaccaucgacggguccagcggcguggucaaccccgugauggagccgaucuacgacgagcccaccaccacgaccagcgugccccugugaggacuaguuauaagacugacuagcccgaugggccucccaacgggcccuccuccccuccuugcaccgagauuaauaaaaaaaaaaaaaaaaaaaaaaaaaaaaaaaaaaaaaaaaaaaaaaaaaaaaaaaaaaaaaaaaugcaucccccccccccccccccccccccccccccccaaaggcucuuuucagagccaccagaauu

SEQ ID NO: 22324 - RNA, 1045 nt, Artificial Sequence
  SARS-CoV-2__MT913110.1__ORF3a protein mRNA gc
aggagaaagcuuaccauggaccuguucaugcgcaucuucaccaucggcaccgugacgcucaagcagggggagaucaaggacagcacccccuccgacuucguccgggccaccgccaccaucccgauccaggcgagccugcccuucggcuggcugaucguggggguggcccuccuggccuucuuccacuccgccagcaagaucaucacgcugaagaagcgcuggcagcucgcccuguccaagggcguccacuucgugugcaaccugcuccugcuguucgugaccgucuacagccaccuccugcugguggcggccgggcucgaggcccccuuccuguaccuguacgcccucguguacuuccugcaguccaucaacuucguccggaucaucaugcgccuguggcucugcuggaagugccggagcaagaacccccugcuguacgacgcgaacuacuuccucugcuggcacaccaacugcuacgacuacugcaucccguacaacuccgugaccagcuccaucgugaucacgagcggcgacggcaccaccucccccaucagcgagcacgacuaccagaucgggggcuacaccgagaagugggaguccggggucaaggacugcguggugcugcacagcuacuucacguccgacuacuaccagcuguacagcacccagcucuccaccgacaccggcgucgagcacgugacguucuucaucuacaacaagaucguggacgagcccgaggagcacguccagauccacaccaucgacgggagcagcggcguggugaaccccgucauggagccgaucuacgacgagcccaccaccacgaccuccgugccccugugaggacuaguuauaagacugacuagcccgaugggccucccaacgggcccuccuccccuccuugcaccgagauuaauaaaaaaaaaaaaaaaaaaaaaaaaaaaaaaaaaaaaaaaaaaaaaaaaaaaaaaaaaaaaaaaaugcaucccccccccccccccccccccccccccccccaaaggcucuuuucagagccaccagaauu

SEQ ID NO: 22325 - RNA, 1045 nt, Artificial Sequence
  SARS-CoV-2__MT913118.1__ORF3a protein mRNA gc
aggagaaagcuuaccauggaccuguucaugcgcaucuucaccaucggcaccgugacgcucaagcagggggagaucaaggacgccacccccagcgacuucguccgggccaccgcgaccaucccgauccaggccucccugcccuucggcuggcugaucguggggguggcccuccuggccgucuuccacagcgccuccaagaucaucacgcugaagaagcgcuggcagcucgcgcugagcaagggcgugcacuucgugugcaaccugcuccugcugcucgucaccguguacucccaccuccugcugguggccgccgggcuggaggcccccuuccuguaccucuacgcgcuggucuacuuccugcagagcaucaacuucgugcggaucaucaugcgccucuggcugugcuggaagugccgguccaagaacccccugcucuacgacgccaacuacuuccugugcuggcacaccaacugcuacgacuacugcaucccguacaacagcgugaccuccagcaucgucaucacguccggcgacggcaccaccagccccaucuccgagcacgacuaccagaucgggggcuacaccgagaagugggagagcggggugaaggacugcgugguccugcacuccuacuucacgagcgacuacuaccagcucuacuccacccagcugagcaccgacaccggcguggagcacgugacguucuucaucuacaacaagaucgucgacgagcccgaggagcacgugcagauccacaccaucgacggguccagcggcguggucaaccccgugauggagccgaucuacgacgagcccaccaccacgaccagcgugccccugugaggacuaguuauaagacugacuagcccgaugggccucccaacgggcccuccuccccuccuugcaccgagauuaauaaaaaaaaaaaaaaaaaaaaaaaaaaaaaaaaaaaaaaaaaaaaaaaaaaaaaaaaaaaaaaaaugcaucccccccccccccccccccccccccccccccaaaggcucuuuucagagccaccagaauu

SEQ ID NO: 22326 - RNA, 1045 nt, Artificial Sequence
  SARS-CoV-2__MT913122.1__ORF3a protein mRNA gc
aggagaaagcuuaccauggaccuguucaugcgcaucuucaccaucggcaccgugacgcucaagcagggggagaucaaggacgccacccccagcgacuucguccgggccaccgcgaccaucccgauccaggccucccugcccuucggcuggcugaucguggggguggcccuccuggccgucuuccacagcgccuccaagaucaucacgcugaagaagcgcuggcagcucgcgcugagcaagggcgugcacuucgugugcaaccugcuccugcuguucgucaccguguacucccaccuccugcugguggccgccgggcucgaggcccccuuccuguaccuguacgcgcucgucuacuuccugcagagcaucaacuucgugcggaucaucaugcgccuguggcucugcuggaagugccgguccaagaacccccugcuguacgacgccaacuacuuccucugcuggcacaccaacugcuacgacuacugcaucccguacaacagcgugaccuccagcaucgucaucacguccggcgacggcaccaccagccccaucuccgagcacgacuaccacaucgggggcuacaccgagaagugggagagcggggugaaggacugcgugguccugcacuccuacuucacgagcgacuacuaccagcuguacuccacccagcucagcaccgacaccggcguggagcacgugacguucuucaucuacaacaagaucgucgacgagcccgaggagcacgugcagauccacaccaucgacggguccagcggcguggucaaccccgugauggagccgaucuacgacgagcccaccaccacgaccagcgugccccugugaggacuaguuauaagacugacuagcccgaugggccucccaacgggcccuccuccccuccuugcaccgagauuaauaaaaaaaaaaaaaaaaaaaaaaaaaaaaaaaaaaaaaaaaaaaaaaaaaaaaaaaaaaaaaaaaugcaucccccccccccccccccccccccccccccccaaaggcucuuuucagagccaccagaauu

SEQ ID NO: 22327 - RNA, 1045 nt, Artificial Sequence
  SARS-CoV-2__MT913127.1__ORF3a protein mRNA gc
aggagaaagcuuaccauggaccuguucaugcgcaucuucaccaucggcaccgugacgcucaagcagggggagaucaaggacgccacccccagcgacuucguccgggccaccgcgaccaucccgauccaggccucccugcccuucggcuggcugaucguggggguggcccuccuggccgucuuccagagcgccuccaagaucaucacgcugaagaagcgcuggcagcucgcgcugagcaagggcgugcacuucgugugcaaccugcuccugcuguucgucaccguguacucccaccuccugcugguggccgccgggcucgaggcccccuucuucuaccuguacgcgcuggucuacuuccuccagagcaucaacuucgugcggaucaucaugcgccuguggcugugcuggaagugccgguccaagaacccccuccuguacgacgccaacuacuuccugugcuggcacaccaacugcuacgacuacugcaucccguacaacagcgugaccuccagcaucgucaucacguccggcgacggcaccaccagccccaucuccgagcacgacuaccagaucgggggcuacaccgagaagugggagagcggggugaaggacugcgugguccuccacuccuacuucacgagcgacuacuaccagcuguacuccacccagcugagcaccgacaccggcguggagcacgugacguucuucaucuacaacaagaucgucgacgagcccgaggagcacgugcagauccacaccaucgacggguccagcggcguggucaaccccgugauggagccgaucuacgacgagcccaccaccacgaccagcgugccccucugaggacuaguuauaagacugacuagcccgaugggccucccaacgggcccuccuccccuccuugcaccgagauuaauaaaaaaaaaaaaaaaaaaaaaaaaaaaaaaaaaaaaaaaaaaaaaaaaaaaaaaaaaaaaaaaaugcaucccccccccccccccccccccccccccccccaaaggcucuuuucagagccaccagaauu

SEQ ID NO: 22328 - RNA, 1045 nt, Artificial Sequence
  SARS-CoV-2__MT913129.1__ORF3a protein mRNA gc
aggagaaagcuuaccauggaccuguucaugcgcaucuucaccaucggcaccgugacgcucaagcagggggagaucaaggacgccacccccagcgacuucguccgggccaccgcgaccaucccgauccaggccucccugcccuucggcuggcugaucguggggguggcccuccuggccgucuuccacagcgccuccaagaucaucacgcugaagaagcgcuggcagcucgcgcugagcaagggcgugcacuucgugugcaaccugcuccugcuguucgucaccguguacucccaccuccugcugguggccgccgggcucgaggcccccuuccuguaccuguacgcgcucgucuacuuccugcagagcaucaacuucgugcggaucaucaugcgccuguggcucugcuggaagugccgguccaagaacccccugcuguacgacgccaacuacuuccucugcuggcacaccaacugcuacgacuacugcaucccguacaacagccugaccuccagcaucgugaucacguccggcgacggcaccaccagccccaucuccgagcacgacuaccagaucgggggcuacaccgagaagugggagagcggggucaaggacugcguggugcugcacuccuacuucacgagcgacuacuaccagcucuacuccacccagcugagcaccgacaccggcgucgagcacgugacguucuucaucuacaacaagaucguggacgagcccgaggagcacguccagauccacaccaucgacggguccagcggcguggugaaccccgucauggagccgaucuacgacgagcccaccaccacgaccagcgugccccugugaggacuaguuauaagacugacuagcccgaugggccucccaacgggcccuccuccccuccuugcaccgagauuaauaaaaaaaaaaaaaaaaaaaaaaaaaaaaaaaaaaaaaaaaaaaaaaaaaaaaaaaaaaaaaaaaugcaucccccccccccccccccccccccccccccccaaaggcucuuuucagagccaccagaauu

SEQ ID NO: 22329 - RNA, 1045 nt, Artificial Sequence
  SARS-CoV-2__MT913131.1__ORF3a protein mRNA gc
aggagaaagcuuaccauggaccuguucaugcgcaucuucaccaucggcaccgugacgcucaagcagggggagaucaaggacgccacccccagcgacuucguccgggccaccgcgaccaucccgauccaggccucccugcccuucggcuggcugaucguggggguggcccuccuggccgucuuccacagcgccuccaagaucaucacgcugaagaagcgcuggcagcucgcgcugagcaagggcgugcacuucgugugcaaccugcuccugcuguucgucaucguguacucccaccuccugcugguggccgccgggcucgaggcccccuuccuguaccuguacgcgcucgucuacuuccugcagagcaucaacuucgugcggaucaucaugcgccuguggcucugcuggaagugccgguccaagaacccccugcuguacgacgccaacuacuuccucugcuggcacaccaacugcuacgacuacugcaucccguacaacagcgugaccuccagcaucgucaucaccuccggcgacggcacgaccagccccaucuccgagcacgacuaccagaucgggggcuacaccgagaagugggagagcggggugaaggacugcgugguccugcacuccuacuucaccagcgacuacuaccagcuguacuccacgcagcucagcaccgacaccggcguggagcacgugaccuucuucaucuacaacaagaucgucgacgagcccgaggagcacgugcagauccacacgaucgacggguccagcggcguggucaaccccgugauggagccgaucuacgacgagcccaccaccaccacgagcgugccccugugaggacuaguuauaagacugacuagcccgaugggccucccaacgggcccuccuccccuccuugcaccgagauuaauaaaaaaaaaaaaaaaaaaaaaaaaaaaaaaaaaaaaaaaaaaaaaaaaaaaaaaaaaaaaaaaaugcaucccccccccccccccccccccccccccccccaaaggcucuuuucagagccaccagaauu

SEQ ID NO: 22330 - RNA, 1045 nt, Artificial Sequence
  SARS-CoV-2__MT913141.1__ORF3a protein mRNA gc
aggagaaagcuuaccauggaccuguucaugcgcaucuucaccaucggcaccgugacgcucaagcagggggagaucaaggacgccacccccagcgacuucguccgggccaccgcgaccaucccgauccccgccucccugcccuucggcuggcugaucguggggguggcccuccuggccgucuuccagagcgccuccaagaucaucacgcugaagaagcgcuggcagcucgcgcugagcaagggcgugcacuucgugugcaaccugcuccugcuguucgucaccguguacucccaccuccugcugguggccgccgggcucgaggcccccuuccuguaccuguacgcgcucgucuacuuccugcagagcaucaacuucgugcggaucaucaugcgccuguggcucugcuggaagugccgguccaagaacccgcugcuguacgacgccaacuacuuccucugcuggcacaccaacugcuacgacuacugcauccccuacaacagcgugaccuccagcaucgucaucacguccggcgacggcaccaccagccccaucuccgagcacgacuaccagaucgggggcuacaccgagaagugggagagcggggugaaggacugcgugguccugcacuccuacuucacgagcgacuacuaccagcuguacuccacccagcucagcaccgacaccggcguggagcacgugacguucuucaucuacaacaagaucgucgacgagcccgaggagcacgugcagauccacaccaucgacggguccagcggcguggucaacccggugauggagcccaucuacgacgagcccaccaccacgaccagcgugccccugugaggacuaguuauaagacugacuagcccgaugggccucccaacgggcccuccuccccuccuugcaccgagauuaauaaaaaaaaaaaaaaaaaaaaaaaaaaaaaaaaaaaaaaaaaaaaaaaaaaaaaaaaaaaaaaaaugcaucccccccccccccccccccccccccccccccaaaggcucuuuucagagccaccagaauu

SEQ ID NO: 22331 - RNA, 1045 nt, Artificial Sequence
  SARS-CoV-2__MT907515.1__ORF3a protein mRNA gc
aggagaaagcuuaccauggaccuguucaugcgcaucuucaccaucggcaccgugacgcucaagcagggggagaucaaggacgccacccccagcgacuucguccgggccaccgcgaccaucccgauccaggccucccugcccuucggcuggcugaucguggggguggcccuccuggccgucuuccagagcgccuccaagaucaucacgcugaagaagcgcuggcagcucgcgcugagcaagggcgugcacuucgugugcaaccugcuccugcuguucgucaccguguacucccaccuccugcugguggccgccgggcucgaggcccccuuccuguaccuguacgcgcucgucuacuuccugcagagcaucaacuucgugcggaucaucaugcgccuguggcucugcuggaagugccgguccaagaacccccugcuguacgacgccaacuacuuccucugcuggcacaccaacugcuacgacuacugcaucccguacaacagcgugaccuccagcaucgucaucacguccggcgacggcaccaccagccccaucuccgagcacgacuaccagaucgggggcuacaccgagaagugggagagcguggugaaggacugcgucgugcugcacuccuacuucacgagcgacuacuaccagcuguacuccacccagcucagcaccgacaccgggguggagcacgucacguucuucaucuacaacaagaucguggacgagcccgaggagcacgugcagauccacaccaucgacggcuccagcggggucgugaaccccgugauggagccgaucuacgacgagcccaccaccacgaccagcgucccccugugaggacuaguuauaagacugacuagcccgaugggccucccaacgggcccuccuccccuccuugcaccgagauuaauaaaaaaaaaaaaaaaaaaaaaaaaaaaaaaaaaaaaaaaaaaaaaaaaaaaaaaaaaaaaaaaaugcaucccccccccccccccccccccccccccccccaaaggcucuuuucagagccaccagaauu

SEQ ID NO: 22332 - RNA, 1045 nt, Artificial Sequence
  SARS-CoV-2__MT907518.1__ORF3a protein mRNA gc
aggagaaagcuuaccauggaccuguucaugcgcaucuucaccaucggcaccgugacgcucaagcagggggagaucaaggacgccacccccagcgacuucguccgggccaccgcgaccaucccgauccaggccucccugcccuucggcuggcugaucguggggguggcccuccuggccgucuuccagagcgccuccaagaucaucacgcugaagaagcgcuggcagcucgcgcugagcaagggcgugcacuucgugugcaaccugcuccugcuguucgucaccguguacucccaccuccugcugguggccgccgggcucgaggcccccuuccuguaccuguacagccucgucuacuuccugcaguccaucaacuucgugcggaucaucaugcgccuguggcucugcuggaagugccggagcaagaacccccugcuguacgacgcgaacuacuuccucugcuggcacaccaacugcuacgacuacugcaucccguacaacuccgugaccagcuccaucgucaucacgagcggcgacggcaccaccucccccaucagcgagcacgacuaccagaucgggggcuacaccgagaagugggaguccggggugaaggacugcgugguccugcacagcuacuucacguccgacuacuaccagcuguacagcacccagcucuccaccgacaccggcguggagcacgugacguucuucaucuacaacaagaucgucgacgagcccgaggagcacgugcagauccacaccaucgacgggagcagcggcguggucaaccccgugauggagccgaucuacgacgagcccaccaccacgaccuccgugccccugugaggacuaguuauaagacugacuagcccgaugggccucccaacgggcccuccuccccuccuugcaccgagauuaauaaaaaaaaaaaaaaaaaaaaaaaaaaaaaaaaaaaaaaaaaaaaaaaaaaaaaaaaaaaaaaaaugcaucccccccccccccccccccccccccccccccaaaggcucuuuucagagccaccagaauu

SEQ ID NO: 22333 - RNA, 1045 nt, Artificial Sequence
  SARS-CoV-2__MT911811.1__ORF3a protein mRNA gc
aggagaaagcuuaccauggaccuguucaugcgcaucuucaccaucggcaccgugacgcucaagcagggggagaucaaggacgccacccccagcgacuucguccgggccaccgcgaccaucccgauccaggccucccugcccuucggccgccugaucguggggguggcccuccuggccgucuuccacagcgccuccaagaucaucacgcugaagaagcgguggcagcucgcgcugagcaagggcgugcacuucgugugcaaccugcuccugcuguucgucaucguguacucccaccuccugcugguggccgccgggcucgaggcccccuuccuguaccuguacgcgcucgucuacuuccugcagagcaucaacuucgugcgcaucaucaugcggcuguggcucugcuggaagugccgcuccaagaacccccugcuguacgacgccaacuacuuccucugcuggcacaccaacugcuacgacuacugcaucccguacaacagcgugaccuccagcaucgucaucaccuccggcgacggcacgaccagccccaucuccgagcacgacuaccagaucgggggcuacaccgagaagugggagagcggggugaaggacugcgugguccugcacuccuacuucaccagcgacuacuaccagcuguacuccacgcagcucagcaccgacaccggcguggagcacgugaccuucuucaucuacaacaagaucgucgacgagcccgaggagcacgugcagauccacacgaucgacggguccagcggcguggucaaccccgugauggagccgaucuacgacgagcccaccaccaccacgagcgugccccugugaggacuaguuauaagacugacuagcccgaugggccucccaacgggcccuccuccccuccuugcaccgagauuaauaaaaaaaaaaaaaaaaaaaaaaaaaaaaaaaaaaaaaaaaaaaaaaaaaaaaaaaaaaaaaaaaugcaucccccccccccccccccccccccccccccccaaaggcucuuuucagagccaccagaauu

SEQ ID NO: 22334 - RNA, 1045 nt, Artificial Sequence
  SARS-CoV-2__MT483876.1__ORF3a protein mRNA gc
aggagaaagcuuaccauggaccuguucaugcgcaucuucaccaucggcaccgugacgcucaagcagggggagaucaaggacgccacccccagcgacuucguccgggccaccgcgaccaucccgauccaggccucccugcccuucggcuggcugaucguggggguggcccuccuggccgucuuccagagcgccuccaagaucaucacgcugaagaagcgcuggcagcucgcgcugagcaagggcgugcacuucgugugcaaccugcuccugcuguucgucaccguguacucccaccuccugcugguggccgccgggcucgaggcccccuuccuguaccuguacgcgcucgucuacuuccugcagagcaucaacuucgugcggaucaucaugcgccuguggcucugcuggaagugccgguccaagaacccccugcuguacgacgccaacuacuuccucugcuggcacaccaacugcuacgacuacugcaucccguacaacagcgugaccuccagcaucgucaucacguccggcgacggcaccaccagccccaucuccgagcacgacuaccagaucgggggcuacaccgagaagugggagagcggggugaaggacugcgugguccugcacuccuacuucacgagcgacuacuaccagcuguacuccacccagcucagcaccggcaccgggguggagcacgugacguucuucaucuacaacaagaucgucgacgagcccgaggagcacgugcagauccacaccaucgacggcuccagcggcguggucaaccccgugauggagccgaucuacgacgagcccaccaccacgaccagcgugccccugugaggacuaguuauaagacugacuagcccgaugggccucccaacgggcccuccuccccuccuugcaccgagauuaauaaaaaaaaaaaaaaaaaaaaaaaaaaaaaaaaaaaaaaaaaaaaaaaaaaaaaaaaaaaaaaaaugcaucccccccccccccccccccccccccccccccaaaggcucuuuucagagccaccagaauu

SEQ ID NO: 22335 - RNA, 1045 nt, Artificial Sequence
  SARS-CoV-2__MT893659.1__ORF3a protein mRNA gc
aggagaaagcuuaccauggaccuguucaugcgcaucuucaccaucggcaccgugacgcucaagcagggggagaucaaggacgccacccccagcgacuucguccgggccaccgcgaccaucccgauccaggccucccugcccuucggcuggcugaucguggggguggcccuccuggccgucuuccacagcgccuccaagaucaucacgcugaagaagcgcuggcagcucgcgcugagcaagggcgugcacuucgugugcaaccugcuccugcuguucgucaccguguacucccaccuccugcugguggccgccgggcucgaggcccccuuccuguaccuguacgcgcucgucuacuuccugcagagcaucaacuucgugcggaucaucaugcgccuguggcucugcuggaagugccgguccaagaacccccugcuguacgacgccaacuacuuccucugcuggcacaccaacugcuacgacuacugcaucccguacaacagcgugaccuccagcaucgucaucacguccggcgacggcaccaccagccccaucuccgagcacgacuaccagaucgggggcuacaccgagaagugggagagcggggugaaggacugcgugcugcugcacuccuacuucacgagcgacuacuaccagcucuacuccacccagcugagcaccgacaccggcgucgagcacgugacguucuucaucuacaacaagaucguggacgagcccgaggagcacguccagauccacaccaucgacggguccagcggcguggugaaccccgucauggagccgaucuacgacgagcccaccaccacgaccagcgugccccugugaggacuaguuauaagacugacuagcccgaugggccucccaacgggcccuccuccccuccuugcaccgagauuaauaaaaaaaaaaaaaaaaaaaaaaaaaaaaaaaaaaaaaaaaaaaaaaaaaaaaaaaaaaaaaaaaugcaucccccccccccccccccccccccccccccccaaaggcucuuuucagagccaccagaauu

SEQ ID NO: 22336 - RNA, 1045 nt, Artificial Sequence
  SARS-CoV-2__MT893667.1__ORF3a protein mRNA gc
aggagaaagcuuaccauggaccuguucaugcgcaucuucaccaucggcaccgugacguucaagcagggggagaucaaggacgccacccccagcgacuucguccgggccaccgcgaccaucccgauccaggccucccuccccuucggcuggcugaucguggggguggcccugcucgccgucuuccagagcgccuccaagaucaucacgcugaagaagcgcuggcagcuggcgcucagcaagggcgugcacuucgugugcaaccugcugcuccuguucgucaccguguacucccaccuccugcugguggccgccgggcuggaggcccccuuccucuaccuguacgcgcuggucuacuuccuccagagcaucaacuucgugcggaucaucaugcgccuguggcugugcuggaagugccgguccaagaacccccuccuguacgacgccaacuacuuccugugcuggcacaccaacugcuacgacuacugcaucccguacaacagcgugaccuccagcaucgucaucacguccggcgacggcaccaccagccccaucuccgagcacgacuaccagaucgggggcuacaccgagaagugggagagcggggugaaggacugcgugguccuccacuccuacuucacgagcgacuacuaccagcuguacuccacccagcugagcaccgacaccggcguggagcacgugacguucuucaucuacaacaagaucgucgacgagcccgaggagcacgugcagauccacaccaucgacggguccagcggcguggucaaccccgugauggagccgaucuacgacgagcccaccaccacgaccagcgugccccucugaggacuaguuauaagacugacuagcccgaugggccucccaacgggcccuccuccccuccuugcaccgagauuaauaaaaaaaaaaaaaaaaaaaaaaaaaaaaaaaaaaaaaaaaaaaaaaaaaaaaaaaaaaaaaaaaugcaucccccccccccccccccccccccccccccccaaaggcucuuuucagagccaccagaauu

SEQ ID NO: 22337 - RNA, 1045 nt, Artificial Sequence
  SARS-CoV-2__MT893675.1__ORF3a protein mRNA gc
aggagaaagcuuaccauggaccuguucaugcgcaucuucaccaucggcaccgugacgcucaagcagggggagaucaaggacgccacccccagcgacuucguccgggccaccgcgaccaucccgauccaggccucccugcccuucggcuggcugaucguggggguggcccuccuggccgucuuccagagcgccuccaagaucaucacgcugaagaagcgcuggcagcucgcgcugagcaagggcgugcacuucgugugcaaccugcuccugcuguucgucaccguguacucccaccuccugcugguggccgccgggcucgaggcccccuuccuguaccuguacgcgcucgucuacuuccugcagagcaucaacuucgugcggaucaucaugcgccuguggcucugcuggaagugccgguccaagaacccccugcuguacgacgccaacuacuuccucugcuggcacaccaacugcuacgacuacugcaucccguacaacagcgugaccuccagcaucgucaucacguccggcgacggcaucaccagccccaucuccgagcacgacuaccagaucgggggcuacaccgagaagugggagagcggggugaaggacugcgugguccugcacuccuacuucaccagcgacuacuaccagcuguacuccacgcagcucagcaccgacaccggcguggagcacgugaccuucuucaucuacaacaagaucgucgacgagcccgaggagcacgugcagauccacacgaucgacggguccagcggcguggucaaccccgugauggagccgaucuacgacgagcccaccaccaccacgagcgugccccugugaggacuaguuauaagacugacuagcccgaugggccucccaacgggcccuccuccccuccuugcaccgagauuaauaaaaaaaaaaaaaaaaaaaaaaaaaaaaaaaaaaaaaaaaaaaaaaaaaaaaaaaaaaaaaaaaugcaucccccccccccccccccccccccccccccccaaaggcucuuuucagagccaccagaauu

SEQ ID NO: 22338 - RNA, 1045 nt, Artificial Sequence
  SARS-CoV-2__MT897460.1__ORF3a protein mRNA gc
aggagaaagcuuaccauggaccuguucaugcgcaucuucaccaucggcaccgugacgcucaaccagggggagaucaaggacgccacccccagcgacuucguccgggccaccgcgaccaucccgauccaggccucccugcccuucggcuggcugaucguggggguggcccuccuggccgucuuccacagcgccuccaagaucaucacgcugaagaagcgcuggcagcucgcgcugagcaagggcgugcacuucgugugcaaccugcuccugcuguucgucaccguguacucccaccuccugcugguggccgccgggcucgaggcccccuuccuguaccuguacgcgcucgucuacuuccugcagagcaucaacuucgugcggaucaucaugcgccuguggcucugcuggaagugccgguccaagaacccccugcuguacgacgccaacuacuuccucugcuggcacaccaacugcuacgacuacugcaucccguacaacagcgugaccuccagcaucgucaucacguccggcgacggcaccaccagccccaucuccgagcacgacuaccagaucgggggcuacaccgagaagugggagagcggggugaaggacugcgugguccugcacuccuacuucacgagcgacuacuaccagcuguacuccacccagcucagcaccgacaccggcguggagcacgugacguucuucaucuacaacaagaucgucgacgagcccgaggagcacgugcagauccacaccaucgacggguccagcggcguggucaaccccgugauggagccgaucuacgacgagcccaccaccacgaccagcgugccccugugaggacuaguuauaagacugacuagcccgaugggccucccaacgggcccuccuccccuccuugcaccgagauuaauaaaaaaaaaaaaaaaaaaaaaaaaaaaaaaaaaaaaaaaaaaaaaaaaaaaaaaaaaaaaaaaaugcaucccccccccccccccccccccccccccccccaaaggcucuuuucagagccaccagaauu

SEQ ID NO: 22339 - RNA, 1039 nt, Artificial Sequence
  SARS-CoV-2__MT890280.1__ORF3a protein mRNA gc
aggagaaagcuuaccauggaccuguucaugcgcaucuucaccaucggcaccgugacgcucaagcagggggagaucaaggacgccacccccagcgacuucguccgggccaccgcgaccaucccgauccaggccucccugcccuucggcuggcugaucguggggguggcccuccuggccgucuuccagagcgccuccaagaucaucacgcugaagaagcgcuggcagcucgcgcugagcaagggcgugcacuucgugugcaaccugcuccugcuguucgucaccguguacucccaccuccugcugguggccgccgggcucgaggcccccuuccuguacgcgcuggucuacuuccuccagagcaucaacuucgugcggaucaucaugcgccuguggcugugcuggaagugccgguccaagaacccccuccuguacgacgccaacuacuuccugugcuggcacaccaacugcuacgacuacugcaucccguacaacagcgugaccuccagcaucgucaucacguccggcgacggcaccaccagccccaucuccgagcacgacuaccagaucgggggcuacaccgagaagugggagagcggggugaaggacugcgugguccuccacuccuacuucacgagcgacuacuaccagcuguacuccacccagcugagcaccgacaccggcguggagcacgugacguucuucaucuacaacaagaucgucgacgagcccgaggagcacgugcagauccacaccaucgacggguccagcggcguggucaaccccgugauggagccgaucuacgacgagcccaccaccacgaccagcgugccccucugaggacuaguuauaagacugacuagcccgaugggccucccaacgggcccuccuccccuccuugcaccgagauuaauaaaaaaaaaaaaaaaaaaaaaaaaaaaaaaaaaaaaaaaaaaaaaaaaaaaaaaaaaaaaaaaaugcaucccccccccccccccccccccccccccccccaaaggcucuuuucagagccaccagaauu

SEQ ID NO: 22340 - RNA, 1045 nt, Artificial Sequence
  SARS-CoV-2__MT890290.1__ORF3a protein mRNA gc
aggagaaagcuuaccauggaccuguucaugcgcaucuucaccaucggcaccgugacgcucaagcagggggagaucaaggacgccacccccagcgacuucguccgggccaccgcgaccaucccgauccaggccucccugcccuucggcuggcugaucguggggguggcccuccuggccgucuuccacagcgccuccaagaucaucacgcugaagaagcgcuggcagcucgcgcugagcaagggcgugcacuucgugugcaaccugcuccugcuguucgucaccguguacucccaccuccugcugguggccgccgggcucgaggcccccuuccuguaccuguacgcgcucgucuacuuccugcagagcaucaacuucgugcggaucaucaugcgccuguggcucugcuggaagugccgguccaagaacccccugcuguacgacgccaacuacuuccucugcuggcacaccaacugcuacgacuacugcaucccguacaacagcgugaccuccagcaucgucaucacguccggcgacggcaccaccagccccaucuccgagcacgacuaccagaucgggggcuacaccgagaagugggagagcggggugaaggacugcgugguccugcacuccuacuucacgagcgacuacuaccaccuguacuccacccagcucagcaccgacaccggcguggagcacgugacguucuucaucuacaacaagaucgucgacgagcccgaggagcacgugcagauccacaccaucgacggguccagcggcguggucaaccccgugauggagccgaucuacgacgagcccaccaccacgaccagcgugccccugugaggacuaguuauaagacugacuagcccgaugggccucccaacgggcccuccuccccuccuugcaccgagauuaauaaaaaaaaaaaaaaaaaaaaaaaaaaaaaaaaaaaaaaaaaaaaaaaaaaaaaaaaaaaaaaaaugcaucccccccccccccccccccccccccccccccaaaggcucuuuucagagccaccagaauu

SEQ ID NO: 22341 - RNA, 1045 nt, Artificial Sequence
  SARS-CoV-2__MT890292.1__ORF3a protein mRNA gc
aggagaaagcuuaccauggaccuguucaugcgcaucuucaccaucggcaccgugacgcucaagcagggggagaucaaggacgccacccccagcgacuucguccgggccaccgcgaccaucccgauccaggccucccugcccuucggcuggcugaucguggggguggcccuccuggccgucuuccacagcgccuccaagaucaucacgcugaagaagcgcuggcagcucgcgcugagcaagggcgugcacuucgugugcaaccugcuccugcuguucgucaccguguacucccaccuccugcugguggccgccgggcucgaggcccccuuccuguaccuguacgcgcucgucuacuuccugcagagcaucaacuucgugcggaucaucaugcgccuguggcucugcuggaagugccgguccaagaacccccugcuguacgacgccaacuacuuccucugcuggcacaccaacugcuacgacuacugcaucccguacaacagcgugaccuccagcaucgucaucacguccugcgacggcaccaccagccccaucuccgagcacgacuaccagaucggcggguacaccgagaagugggagagcggcgugaaggacugcgugguccugcacuccuacuucacgagcgacuacuaccagcuguacuccacccagcucagcaccgacaccgggguggagcacgugacguucuucaucuacaacaagaucgucgacgagcccgaggagcacgugcagauccacaccaucgacggcuccagcgggguggucaaccccgugauggagccgaucuacgacgagcccaccaccacgaccagcgugccccugugaggacuaguuauaagacugacuagcccgaugggccucccaacgggcccuccuccccuccuugcaccgagauuaauaaaaaaaaaaaaaaaaaaaaaaaaaaaaaaaaaaaaaaaaaaaaaaaaaaaaaaaaaaaaaaaaugcaucccccccccccccccccccccccccccccccaaaggcucuuuucagagccaccagaauu

SEQ ID NO: 22342 - RNA, 1045 nt, Artificial Sequence
  SARS-CoV-2__MT890294.1__ORF3a protein mRNA gc
aggagaaagcuuaccauggaccuguucaugcgcaucuucaccaucggcaccgugacgcucaagcagggggagaucaaggacgccacccccagccacuucguccgggccaccgcgaccaucccgauccaggccucccugcccuucggcuggcugaucguggggguggcccuccuggccgucuuccacagcgccuccaagaucaucacgcugaagaagcgcuggcagcucgcgcugagcaagggcgugcacuucgugugcaaccugcuccugcuguucgucaccguguacucccaccuccugcugguggccgccgggcucgaggcccccuuccuguaccuguacgcgcucgucuacuuccugcagagcaucaacuucgugcggaucaucaugcgccuguggcucugcuggaagugccgguccaagaacccccugcuguacgacgccaacuacuuccucugcuggcacaccaacugcuacgacuacugcaucccguacaacagcgugaccuccagcaucgucaucacguccggcgacggcaccaccagccccaucuccgagcacgacuaccagaucgggggcuacaccgagaagugggagagcggggugaaggacugcgugguccugcacuccuacuucacgagcgacuacuaccagcuguacuccacccagcucagcaccgacaccggcguggagcacgugacguucuucaucuacaacaagaucgucgacgagcccgaggagcacgugcagauccacaccaucgacggguccagcggcguggucaaccccgugauggagccgaucuacgacgagcccaccaccacgaccagcgugccccugugaggacuaguuauaagacugacuagcccgaugggccucccaacgggcccuccuccccuccuugcaccgagauuaauaaaaaaaaaaaaaaaaaaaaaaaaaaaaaaaaaaaaaaaaaaaaaaaaaaaaaaaaaaaaaaaaugcaucccccccccccccccccccccccccccccccaaaggcucuuuucagagccaccagaauu

SEQ ID NO: 22343 - RNA, 1045 nt, Artificial Sequence
  SARS-CoV-2__MT890296.1__ORF3a protein mRNA gc
aggagaaagcuuaccauggaccuguucaugcgcaucuucaccaucggcaccgugacgcucaagcagggggagaucaaggacgccacccccagcgacuucguccgggccaccgcgaccaucccgauccaggccucccugcccuucggcuggcugaucguggggguggcccuccuggccgucuuccacagcgccuccaagaucaucacgcugaagaagcgcuggcagcucgcgcugagcaagggcgugcacuucgugugcaaccugcuccugcuguucgucaccguguacucccaccuccugcugguggccgccgggcucgaggcccccuuccuguaccuguacgcgcucgucuacuuccugcagagcaucaacuucgugcggaucaucaugcgccugugguucugcuggaagugccgguccaagaacccccuccuguacgacgccaacuacuuccugugcuggcacaccaacugcuacgacuacugcaucccguacaacagcgugaccuccagcaucgucaucacguccggcgacggcaccaccagccccaucuccgagcacgacuaccagaucgggggcuacaccgagaagugggagagcggggugaaggacugcgugguccuccacuccuacuucacgagcgacuacuaccagcuguacuccacccagcugagcaccgacaccggcguggagcacgugacguucuucaucuacaacaagaucgucgacgagcccgaggagcacgugcagauccacaccaucgacggguccagcggcguggucaaccccgugauggagccgaucuacgacgagcccaccaccacgaccagcgugccccucugaggacuaguuauaagacugacuagcccgaugggccucccaacgggcccuccuccccuccuugcaccgagauuaauaaaaaaaaaaaaaaaaaaaaaaaaaaaaaaaaaaaaaaaaaaaaaaaaaaaaaaaaaaaaaaaaugcaucccccccccccccccccccccccccccccccaaaggcucuuuucagagccaccagaauu

SEQ ID NO: 22344 - RNA, 1045 nt, Artificial Sequence
  SARS-CoV-2__MT890320.1__ORF3a protein mRNA gc
aggagaaagcuuaccauggaccuguucaugcgcaucuucaccaucggcaccgugacgcucaagcagggggagaucaaggacgccacccccagcgacuucguccgggccaccgcgaccaucccgauccaggccucccugcccuucggcuggcugaucguggggguggcccuccuggccgucuuccacagcgccuccaagaucaucacgcugaagaagcgcuggcagcucgcgcugagcaagggcgugcacuucgugugcaaccugcuccugcuguucgucaccguguacucccaccuccugcugguggccgccgggcucgaggcccuguuccuguaccucuacgcgcuggucuacuuccugcagagcaucaacuucgugcggaucaucaugcgccucuggcugugcuggaagugccgguccaagaacccccugcucuacgacgccaacuacuuccugugcuggcacaccaacugcuacgacuacugcauccccuacaacagcgugaccuccagcaucgucaucacguccggcgacggcaccaccagcccgaucuccgagcacgacuaccagaucgggggcuacaccgagaagugggagagcggggugaaggacugcgugguccugcacuccuacuucacgagcgacuacuaccagcucuacuccacccagcugagcaccgacaccggcguggagcacgugacguucuucaucuacaacaagaucgucgacgagcccgaggagcacgugcagauccacaccaucgacggguccagcggcguggucaaccccgugauggagcccaucuacgacgagccgaccaccacgaccagcgugccccugugaggacuaguuauaagacugacuagcccgaugggccucccaacgggcccuccuccccuccuugcaccgagauuaauaaaaaaaaaaaaaaaaaaaaaaaaaaaaaaaaaaaaaaaaaaaaaaaaaaaaaaaaaaaaaaaaugcaucccccccccccccccccccccccccccccccaaaggcucuuuucagagccaccagaauu

SEQ ID NO: 22345 - RNA, 1045 nt, Artificial Sequence
  SARS-CoV-2__MT890355.1__ORF3a protein mRNA gc
aggagaaagcuuaccauggaccuguucaugcgcaucuucaccaucggcaccgugacgcucaagcagggggagaucaaggacgccacccccagcgacuucguccgggccaccgcgaccaucccgauccaggccucccugcccuucggcuggcugaucguggggguggccuuccucgccgucuuccacagcgccuccaagaucaucacgcugaagaagcgcuggcagcuggcgcucagcaagggcgugcacuucgugugcaaccugcugcuccuguucgucaccguguacucccaccuccugcugguggccgccgggcuggaggcccccuuccucuaccuguacgcgcuggucuacuuccuccagagcaucaacuucgugcggaucaucaugcgccuguggcugugcuggaagugccgguccaagaacccccuccuguacgacgccaacuacuuccugugcuggcacaccaacugcuacgacuacugcaucccguacaacagcgugaccuccagcaucgucaucacguccggcgacggcaccaccagccccaucuccgagcacgacuaccagaucgggggcuacaccgagaagugggagagcggggugaaggacugcgugguccuccacuccuacuucacgagcgacuacuaccagcuguacuccacccagcugagcaccgacaccggcguggagcacgugacguucuucaucuacaacaagaucgucgacgagcccgaggagcacgugcagauccacaccaucgacggguccagcggcguggucaaccccgugauggagccgaucuacgacgagcccaccaccacgaccagcgugccccucugaggacuaguuauaagacugacuagcccgaugggccucccaacgggcccuccuccccuccuugcaccgagauuaauaaaaaaaaaaaaaaaaaaaaaaaaaaaaaaaaaaaaaaaaaaaaaaaaaaaaaaaaaaaaaaaaugcaucccccccccccccccccccccccccccccccaaaggcucuuuucagagccaccagaauu

SEQ ID NO: 22346 - RNA, 1045 nt, Artificial Sequence
  SARS-CoV-2__MT890356.1__ORF3a protein mRNA gc
aggagaaagcuuaccauggaccuguucaugcgcaucuucaccaucggcaccgugacgcucaagcaggucgagaucaaggacgccacccccagcgacuucgugcgggccaccgcgaccaucccgauccaggccucccugcccuucggguggcugaucgugggcgucgcccuccuggccguguuccacagcgccuccaagaucaucacgcugaagaagcgcuggcagcucgcgcugagcaagggggugcacuucgucugcaaccugcuccugcuguucgugaccguguacucccaccuccugcuggucgccgccggccucgaggcccccuuccuguaccuguacgcgcucguguacuuccugcagagcaucaacuucgugcggaucaucaugcgccuguggcucugcuggaagugccgguccaagaacccccugcuguacgacgccaacuacuuccucugcuggcacaccaacugcuacgacuacugcaucccguacaacagcgucaccuccagcaucgugaucacguccggggacggcaccaccagccccaucuccgagcacgacuaccagaucggcggguacaccgagaagugggagagcggcgugaaggacugcgucgugcugcacuccuacuucacgagcgacuacuaccagcuguacuccacccagcucagcaccgacaccgggguggagcacgucacguucuucaucuacaacaagaucguggacgagcccgaggagcacgugcagauccacaccaucgacggcuccagcggggucgugaaccccgugauggagccgaucuacgacgagcccaccaccacgaccagcgucccccugugaggacuaguuauaagacugacuagcccgaugggccucccaacgggcccuccuccccuccuugcaccgagauuaauaaaaaaaaaaaaaaaaaaaaaaaaaaaaaaaaaaaaaaaaaaaaaaaaaaaaaaaaaaaaaaaaugcaucccccccccccccccccccccccccccccccaaaggcucuuuucagagccaccagaauu

SEQ ID NO: 22347 - RNA, 1045 nt, Artificial Sequence
  SARS-CoV-2__MT892981.1__ORF3a protein mRNA gc
aggagaaagcuuaccauggaccuguucaugcgcaucuucaccaucggcaccgugacgcucaagcagggggagaucaaggacgccacccccagcgacuucguccgggccaccgcgaccaucccgauccaggcccugcugcccuucggcuggcucaucguggggguggcccugcuggccgucuuccacuccgccagcaagaucaucacgcucaagaagcgcuggcagcuggcgcuguccaagggcgugcacuucgugugcaaccuccugcugcuguucgucaccguguacagccaccuccugcucguggccgccgggcuggaggcccccuuccuguaccucuacgcgcuggucuacuuccugcaguccaucaacuucgugcggaucaucaugcgccucuggcugugcuggaagugccggagcaagaacccccugcucuacgacgccaacuacuuccugugcuggcacaccaacugcuacgacuacugcaucccguacaacuccgugaccagcuccaucgucaucacgagcggcgacggcaccaccucccccaucagcgagcacgacuaccagaucgggggcuacaccgagaagugggaguccggggugaaggacugcgugguccugcacagcuacuucacguccgacuacuaccagcucuacagcacccagcuguccaccgacaccggcguggagcacgugacguucuucaucuacaacaagaucgucgacgagcccgaggagcacgugcagauccacaccaucgacgggagcuccggcguggucaaccccgugauggagccgaucuacgacgagcccaccaccacgaccagcgugccccugugaggacuaguuauaagacugacuagcccgaugggccucccaacgggcccuccuccccuccuugcaccgagauuaauaaaaaaaaaaaaaaaaaaaaaaaaaaaaaaaaaaaaaaaaaaaaaaaaaaaaaaaaaaaaaaaaugcaucccccccccccccccccccccccccccccccaaaggcucuuuucagagccaccagaauu

SEQ ID NO: 22348 - RNA, 1045 nt, Artificial Sequence
  SARS-CoV-2__MT892985.1__ORF3a protein mRNA gc
aggagaaagcuuaccauggaccuguucaugcgcaucuucaccaucggcaccgugacgcucaagcagggggagaucaaggacgccacccccagcgacuucguccgggccaccgcgaccaucccgauccaggccucccugcccuucggcuggcugaucguggggguggcccuccuggccgucuuccagagcgccuccaagaucaucacgcugaagaagcgcuggcagcucgcgcugagcaagggcgugcacuucgugugcaaccugcuccugcuguucgucaccguguacucccaccuccugcugguggccgccgggcucgaggcccccuuccuguaccuguacgcgcucgucuacuuccugcagagcaucaacuucgugcggaucaucaugcgccuguggcucugcuggaagugccgguccaagaacccccugcuguacgacgccaacuacuuccucugcuggcacaccaacugcuacgacuacugcaucccguacaacagcgugaccuccagcaucgucaucacguccggcgacggcaccaccagccccaucuccgagcacgacuaccagaucgggggcuacaccgagaagugggagagcggggugaaggacugcgugguccugcacuccuacuucacgagcgacuacuaccagcuguacuccacccagcucagcaccgacaccggcguggagcacgugacguucuucaucuacaacaagaucgucgacgagcccgaggagcacgugcagauccacaccaucgacggguccagcggcguggucaaccccgugauggagagcaucuacgacgagccgaccaccacgaccuccgugccccugugaggacuaguuauaagacugacuagcccgaugggccucccaacgggcccuccuccccuccuugcaccgagauuaauaaaaaaaaaaaaaaaaaaaaaaaaaaaaaaaaaaaaaaaaaaaaaaaaaaaaaaaaaaaaaaaaugcaucccccccccccccccccccccccccccccccaaaggcucuuuucagagccaccagaauu

SEQ ID NO: 22349 - RNA, 1045 nt, Artificial Sequence
  SARS-CoV-2__MT892988.1__ORF3a protein mRNA gc
aggagaaagcuuaccauggaccuguucaugcgcaucuucaccaucggcaccgugacgcucaagcagggggagaucaaggacgccacccccagcgacuucguccgggccaccgcgaccaucccgauccaggccucccugcccuucggcuggcugaucguggggguggcccuccuggccgucuuccagagcgccuccaagaucaucacgcugaagaagcgcuggcagcucgcgcugagcaagggcgugcacuucgugugcaaccugcuccugcuguucgucaccguguacucccaccuccugcugguggccgccgggcucgaggcccccuuccuguaccuguacgcgcucgucuacuuccugcagagcaucaacuucgugcggaucaucaugcgccuguggcucugcuggaagugccgguccaagaacccccugaucuacgacgccaacuacuuccugugcuggcacaccaacugcuacgacuacugcaucccguacaacagcgugaccuccagcaucgucaucacguccggcgacggcaccaccagccccaucuccgagcacgacuaccagaucgggggcuacaccgagaagugggagagcggggugaaggacugcgugguccuccacuccuacuucacgagcgacuacuaccagcuguacuccacccagcugagcaccgacaccggcguggagcacgugacguucuucaucuacaacaagaucgucgacgagcccgaggagcacgugcagauccacaccaucgacggguccagcggcguggucaaccccgugauggagccgaucuacgacgagcccaccaccacgaccagcgugccccucugaggacuaguuauaagacugacuagcccgaugggccucccaacgggcccuccuccccuccuugcaccgagauuaauaaaaaaaaaaaaaaaaaaaaaaaaaaaaaaaaaaaaaaaaaaaaaaaaaaaaaaaaaaaaaaaaugcaucccccccccccccccccccccccccccccccaaaggcucuuuucagagccaccagaauu

SEQ ID NO: 22350 - RNA, 1045 nt, Artificial Sequence
  SARS-CoV-2__MT892993.1__ORF3a protein mRNA gc
aggagaaagcuuaccauggaccuguucaugcgcaucuucaccaucggcaccgugacgcucaagcagggggagaucaaggacgccacccccagcgacuucguccgggccaccgcgaccaucccgauccaggccucccugcccuucggcuggcugaucguggggguggcccucuucgccgucuuccagagcgccuccaagaucaucacgcugaagaagcgcuggcagcuggcgcucagcaagggcgugcacuucgugugcaaccugcugcuccuguucgucaccguguacucccaccuccugcugguggccgccgggcuggaggcccccuuccucuaccuguacgcgcuggucuacuuccuccagagcaucaacuucgugcggaucaucaugcgccuguggcugugcuggaagugccgguccaagaacccccuccuguacgacgccaacuacuuccugugcuggcacaccaacugcuacgacuacugcaucccguacaacagcgugaccuccagcaucgucaucacguccggcgacggcaccaccagccccaucuccgagcacgacuaccagaucgggggcuacaccgagaagugggagagcggggugaaggacugcgugguccuccacuccuacuucacgagcgacuacuaccagcuguacuccacccagcugagcaccgacaccggcguggagcacgugacguucuucaucuacaacaagaucgucgacgagcccgaggagcacgugcagauccacaccaucgacggguccagcggcguggucaaccccgugauggagccgaucuacgacgagcccaccaccacgaccagcgugccccucugaggacuaguuauaagacugacuagcccgaugggccucccaacgggcccuccuccccuccuugcaccgagauuaauaaaaaaaaaaaaaaaaaaaaaaaaaaaaaaaaaaaaaaaaaaaaaaaaaaaaaaaaaaaaaaaaugcaucccccccccccccccccccccccccccccccaaaggcucuuuucagagccaccagaauu

SEQ ID NO: 22351 - RNA, 1045 nt, Artificial Sequence
  SARS-CoV-2__MT893011.1__ORF3a protein mRNA gc
aggagaaagcuuaccauggaccuguucaugcgcaucuucaccaucggcaccgugacgcucaagcagggggagaucaaggacgccacccccagcgacuucguccgggccaccgcgaccaucccgauccaggccucccugcccuucggcuggcugaucguggggguggcccuccuggccgucuuccagagcgccuccaagaucaucacgcugaagaagcgcuggcagcucgcgcugagcaagggcgugcacuucgugugcaaccugcuccugcuguucgucaccguguacucccaccuccugcugguggccgccgggcucgaggcccccuuccuguaccuguacgcgcucgucuacuuccugcagagcaucaacuucgugcggaucaucaugcgccuguggcucugcuggaagugccgguccaagaacccccuguucuacgacgccaacuacuuccugugcuggcacaccaacugcuacgacuacugcaucccguacaacagcgugaccuccagcaucgucaucacguccggcgacggcaccaccagccccaucuccgagcacgacuaccagaucgggggcuacaccgagaagugggagagcggggugaaggacugcgugguccuccacuccuacuucacgagcgacuacuaccagcuguacuccacccagcugagcaccgacaccggcguggagcacgugacguucuucaucuacaacaagaucgucgacgagcccgaggagcacgugcagauccacaccaucgacguguccagcggggucgugaaccccgugauggagccgaucuacgacgagcccaccaccacgaccagcgucccccucugaggacuaguuauaagacugacuagcccgaugggccucccaacgggcccuccuccccuccuugcaccgagauuaauaaaaaaaaaaaaaaaaaaaaaaaaaaaaaaaaaaaaaaaaaaaaaaaaaaaaaaaaaaaaaaaaugcaucccccccccccccccccccccccccccccccaaaggcucuuuucagagccaccagaauu

SEQ ID NO: 22352 - RNA, 1045 nt, Artificial Sequence
  SARS-CoV-2__MT883503.1__ORF3a protein mRNA gc
aggagaaagcuuaccauggaccuguucaugcgcaucuucaccaucggcaccgugacgcucaagcagggggagaucaaggacgccacccccagcgacuucguccgggccaccgcgaccaucccgauccaggccucccugcccuucggcuggcugaucguggggguggcccuccuggccgucuuccagagcgccuccaagaucaucacgcugaagaagcgcuggcagcucgcgcugagcaagggcgugcacuucgugugcaaccugcuccugcuguucgucaccguguacucccaccuccugcugguggccgccgggcucgaggcccccuuccuguaccuguacgcgcucgucuacuuccugcagagcaucaacuucgugcggaucaucaugcgccuguggcucugcuggaagugccgguccaagaacccccugcuguacgacgccaacuacuuccucugcuggcacaccaacugcuacgacuacugcaucccguacaacagcgugaccuccagcaucgucaucacguccggcgacggcaccaccagccccaucuccgagcacgacuaccagaucgggggcuacaccgagaagugggagagcggggugaaggacugcgugguccugcacuccuacuucacgagcgacuacuaccagcuguacuccacccagcucagcaccgacaccggcguggagcacgugacguucuucaucuacaacaagaucgucgacgagcuggaggagcacgugcagauccacaccaucgacggguccagcggcguggucaaccccgugauggagcccaucuacgacgagccgaccaccacgaccagcgugccccugugaggacuaguuauaagacugacuagcccgaugggccucccaacgggcccuccuccccuccuugcaccgagauuaauaaaaaaaaaaaaaaaaaaaaaaaaaaaaaaaaaaaaaaaaaaaaaaaaaaaaaaaaaaaaaaaaugcaucccccccccccccccccccccccccccccccaaaggcucuuuucagagccaccagaauu

SEQ ID NO: 22353 - RNA, 1045 nt, Artificial Sequence
  SARS-CoV-2__MT886294.1__ORF3a protein mRNA gc
aggagaaagcuuaccauggaccuguucaugcgcaucuucaccaucggcaccgugacgcucaagcagggggagaucaaggacgccacccccagcgacuucguccgggccaccgcgaccaucccgauccaggccucccugcccuucggcuggcugaucguggggguggcccuccuggccgucuuccagagcgccuccaagaucaucacgcugaagaagcgcuggcagcucgcgcugagcaagggcgugcacuucgugugcaaccugcuccugcuguucgucaccguguacucccaccuccugcugguggccgccgggcucgaggcccccuuccuguaccuguacgcgcucgucuacuuccugcagagcaucaacuucgugcggaucaucaugcgccuguggcucugcuggaagugccgguccaagaacccccugcuguacgacgccaacuacuuccucugcuggcacaccaacugcuacgacuacugcgugccguacaacagcgucaccuccagcaucgugaucacguccggcgacggcaccaccagccccaucuccgagcacgacuaccagaucgggggcuacaccgagaagugggagagcggggugaaggacugcgucgugcugcacuccuacuucacgagcgacuacuaccagcuguacuccacccagcucagcaccgacaccggcguggagcacgucacguucuucaucuacaacaagaucguggacgagcccgaggagcacgugcagauccacaccaucgacggguccagcggcgucgugaaccccgugauggagccgaucuacgacgagcccaccaccacgaccagcgucccccugugaggacuaguuauaagacugacuagcccgaugggccucccaacgggcccuccuccccuccuugcaccgagauuaauaaaaaaaaaaaaaaaaaaaaaaaaaaaaaaaaaaaaaaaaaaaaaaaaaaaaaaaaaaaaaaaaugcaucccccccccccccccccccccccccccccccaaaggcucuuuucagagccaccagaauu

SEQ ID NO: 22354 - RNA, 1045 nt, Artificial Sequence
  SARS-CoV-2__MT886301.1__ORF3a protein mRNA gc
aggagaaagcuuaccauggaccuguucaugcgcaucuucaccaucggcaccgugacgcucaagcagggggagaucaaggacgccacccccagcgacuucguccgggccaccgcgaccaucccgauccaggccucccugcccuucggcuggcugaucguggggguggcccuccuggccgucuuccagagcgccuccaagaucaucacgcugaagaaccgcuggcagcucgcgcugagcaagggcgugcacuucgugugcaaccugcuccugcuguucgucaccguguacucccaccuccugcugguggccgccgggcucgaggcccccuuccuguaccuguacgcgcucgucuacuuccugcagagcaucaacuucgugcggaucaucaugcgccuguggcucugcuggaagugccgguccaagaacccccugcuguacgacgccaacuacuuccucugcuggcacaccaacugcuacgacuacugcaucccguacaacagcgugaccuccagcaucgucaucacguccggcgacggcaccaccagccccaucuccgagcacgacuaccagaucgggggcuacaccgagaagugggagagcggggugaaggacugcgugguccugcacuccuacuucacgagcgacuacuaccagcuguacuccacccagcucagcaccgacaccggcguggagcacgugacguucuucaucuacaacaagaucgucgacgagcccgaggagcacgugcagauccacaccaucgacggguccagcggcguggucaaccccgugauggagccgaucuacgacgagcccaccaccacgaccagcgugccccugugaggacuaguuauaagacugacuagcccgaugggccucccaacgggcccuccuccccuccuugcaccgagauuaauaaaaaaaaaaaaaaaaaaaaaaaaaaaaaaaaaaaaaaaaaaaaaaaaaaaaaaaaaaaaaaaaugcaucccccccccccccccccccccccccccccccaaaggcucuuuucagagccaccagaauu

SEQ ID NO: 22355 - RNA, 1045 nt, Artificial Sequence
  SARS-CoV-2__MT886348.1__ORF3a protein mRNA gc
aggagaaagcuuaccauggaccuguucaugcgcaucuucaccaucggcaccgugacgcucaagcagggggagaucaaggacgccacccccagcgacuucguccgggccaccgcgaccaucccgauccaggccucccugcccuucggcuggcugaucguggggguggcccuccuggccgucuuccacagcgccuccaagaucaucacgcugaagaagcgcuggcagcucgcgcugagcaagggcgugcacuucgugugcaaccugcuccugcuguucgucaccguguacucccaccuccugcugguggccgccggguucgaggcccccuuccucuaccuguacgcgcuggucuacuuccuccagagcaucaacuucgugcggaucaucaugcgccuguggcugugcuggaagugccgguccaagaacccccuccuguacgacgccaacuacuuccugugcuggcacaccaacugcuacgacuacugcaucccguacaacagcgugaccuccagcaucgucaucacguccggcgacggcaccaccagccccaucuccgagcacgacuaccagaucgggggcuacaccgagaagugggagagcggggugaaggacugcgugguccuccacuccuacuucacgagcgacuacuaccagcuguacuccacccagcugagcaccgacaccggcguggagcacgugacguucuucaucuacaacaagaucgucgacgagcccgaggagcacgugcagauccacaccaucgacggguccagcggcguggucaaccccgugauggagccgaucuacgacgagcccaccaccacgaccagcgugccccucugaggacuaguuauaagacugacuagcccgaugggccucccaacgggcccuccuccccuccuugcaccgagauuaauaaaaaaaaaaaaaaaaaaaaaaaaaaaaaaaaaaaaaaaaaaaaaaaaaaaaaaaaaaaaaaaaugcaucccccccccccccccccccccccccccccccaaaggcucuuuucagagccaccagaauu

SEQ ID NO: 22356 - RNA, 1045 nt, Artificial Sequence
  SARS-CoV-2__MT886385.1__ORF3a protein mRNA gc
aggagaaagcuuaccauggaccuguucaugcgcaucuucaccaucggcaccgugacgcucaagcagggggagaucaaggacgccacccccagcgacuucguccgggccaccgcgaccaucccgauccaggccucccugcccuucggcuggcugaucguggggguggcccuccuggccgucuuccacagcgccuccaagaucaucacgcugaagaagcgcuggcagcucgcgcugagcaagggcgugcacuucgugugcaaccugcuccugcuguucgucaccguguacucccaccuccugcugguggccgccgggcucgaggccagcuuccuguaccuguacgcgcucgucuacuuccugcaguccaucaacuucgugcggaucaucaugcgccuguggcucugcuggaagugccggagcaagaacccccugcuguacgacgccaacuacuuccucugcuggcacaccaacugcuacgacuacugcauccccuacaacuccgugaccagcuccaucgucaucacgagcggcgacggcaccaccuccccgaucagcgagcacgacuaccagaucgggggcuacaccgagaagugggaguccggggugaaggacugcgugguccugcacagcuacuucacguccgacuacuaccagcuguacagcacccagcucuccaccgacaccggcguggagcacgugacguucuucaucuacaacaagaucgucgacgagcccgaggagcacgugcagauccacaccaucgacgggagcagcggcguggucaaccccgugauggagcccaucuacgacgagccgaccaccacgaccuccgugccccugugaggacuaguuauaagacugacuagcccgaugggccucccaacgggcccuccuccccuccuugcaccgagauuaauaaaaaaaaaaaaaaaaaaaaaaaaaaaaaaaaaaaaaaaaaaaaaaaaaaaaaaaaaaaaaaaaugcaucccccccccccccccccccccccccccccccaaaggcucuuuucagagccaccagaauu

SEQ ID NO: 22357 - RNA, 1045 nt, Artificial Sequence
  SARS-CoV-2__MT873050.1__ORF3a protein mRNA gc
aggagaaagcuuaccauggaccuguucaugcgcaucuucaccaucggcaccgugacgcucaagcagggggagaucaaggacgccacccccagcgacuucguccgggccaccgcgaccaucccgauccaggccucccugcccuucggcuggcugaucguggggguggcccuccuggccgucuuccagagcgccuccaagaucaucacgcugaagaagcgcuggcagcucgcgcugagcaagggcgugcacuucgugugcaaccugcuccugcuguucgucaccguguacucccaccuccugcugguggccgccgggcucgaggcccccuuccuguacuucuacgcgcuggucuacuuccuccagagcaucaacuucgugcggaucaucaugcgccuguggcugugcuggaagugccgguccaagaacccccuccuguacgacgccaacuacuuccugugcuggcacaccaacugcuacgacuacugcaucccguacaacagcgugaccuccagcaucgucaucacguccggcgacggcaucaccagccccaucuccgagcacgacuaccagaucgggggcuacaccgagaagugggagagcggggugaaggacugcgugguccuccacuccuacuucaccagcgacuacuaccagcuguacuccacgcagcugagcaccgacaccggcguggagcacgugaccuucuucaucuacaacaagaucgucgacgagcccgaggagcacgugcagauccacacgaucgacggguccagcggcguggucaaccccgugauggagccgaucuacgacgagcccaccaccaccacgagcgugccccucugaggacuaguuauaagacugacuagcccgaugggccucccaacgggcccuccuccccuccuugcaccgagauuaauaaaaaaaaaaaaaaaaaaaaaaaaaaaaaaaaaaaaaaaaaaaaaaaaaaaaaaaaaaaaaaaaugcaucccccccccccccccccccccccccccccccaaaggcucuuuucagagccaccagaauu

SEQ ID NO: 22358 - RNA, 1045 nt, Artificial Sequence
  SARS-CoV-2__MT873062.1__ORF3a protein mRNA gc
aggagaaagcuuaccauggaccuguucgugcgcaucuucaccaucggcaccgucacgcucaagcagggggagaucaaggacgccacccccagcgacuucgugcgggccaccgcgaccaucccgauccaggccucccugcccuucggcuggcugaucgugggggucgcccuccuggccguguuccacagcgccuccaagaucaucacgcugaagaagcgcuggcagcucgcgcugagcaagggcgugcacuucgucugcaaccugcuccugcuguucgugaccguguacucccaccuccugcuggucgccgccgggcucgaggcccccuuccuguaccuguacgcgcucguguacuuccugcagagcaucaacuucgugcggaucaucaugcgccuguggcucugcuggaagugccgguccaagaacccccugcuguacgacgccaacuacuuccucugcuggcacaccaacugcuacgacuacugcaucccguacaacagcgucaccuccagcaucgugaucacguccggcgacggcaccaccagccccaucuccgagcacgacuaccagaucgggggcuacaccgagaagugggagagcggggugaaggacugcgucgugcugcacuccuacuucacgagcgacuacuaccagcuguacuccacccagcucagcaccgacaccggcguggagcacgucacguucuucaucuacaacaagaucguggacgagcccgaggagcacgugcagauccacaccaucgacggguccagcggcgucgugaaccccgugauggagccgaucuacgacgagcccaccaccacgaccagcgucccccugugaggacuaguuauaagacugacuagcccgaugggccucccaacgggcccuccuccccuccuugcaccgagauuaauaaaaaaaaaaaaaaaaaaaaaaaaaaaaaaaaaaaaaaaaaaaaaaaaaaaaaaaaaaaaaaaaugcaucccccccccccccccccccccccccccccccaaaggcucuuuucagagccaccagaauu

SEQ ID NO: 22359 - RNA, 1045 nt, Artificial Sequence
  SARS-CoV-2__MT873078.1__ORF3a protein mRNA gc
aggagaaagcuuaccauggaccuguucaugcgcaucuucaccaucggcaccgugacgcucaagcagggggagaucaaggacgccacccccagcgacuucguccgggccaccgcgaccaucccgauccaggccucccugcccuucggcuggcugaucguggggguggcccuccuggccgucuuccacagcgccuccaagaucaucacgcugaagaagcgcuggcagcucgcgcugagcaagggcgugcacuucgugugcaaccugcuccugcuguucgucaccguguacucccaccuccugcugguggccgccgggcucgaggcccccuuccuguaccuguacgcgcucgucuacuuccugcagagcaucaacuucgugcggaucaucaugcgccuguggcucugcugcaagugccgguccaagaacccccugcuguacgacgccaacuacuuccucugcuggcacaccaacugcuacgacuacugcaucccguacaacagcgugaccuccagcaucgucaucacguccggcgacggcaccaccagccccaucuccgagcacgacuaccagaucgggggcuacaccgagaagugggagagcggggugaaggacugcgugguccugcacuccuacuucacgagcgacuacuaccagcuguacuccacccagcucagcaccgacaccggcguggagcacgugacguucuucaucuacaacaagaucgucgacgagcccgaggagcacgugcagauccacaccaucgacggguccagcggcguggucaaccccgugauggagccgaucuacgacgagcccaccaccacgaccagcgugccccugugaggacuaguuauaagacugacuagcccgaugggccucccaacgggcccuccuccccuccuugcaccgagauuaauaaaaaaaaaaaaaaaaaaaaaaaaaaaaaaaaaaaaaaaaaaaaaaaaaaaaaaaaaaaaaaaaugcaucccccccccccccccccccccccccccccccaaaggcucuuuucagagccaccagaauu

SEQ ID NO: 22360 - RNA, 1045 nt, Artificial Sequence
  SARS-CoV-2__MT873085.1__ORF3a protein mRNA gc
aggagaaagcuuaccauggaccuguucaugcgcaucuucaccaucggcaccgugacgcucaagcagggggagaucaaggacgccacccccagcgacuucguccgggccaccgcgaccaucccgauccaggccucccugcccuucggcuggcugaucguggggguggcccuccuggccgucuuccacagcgccuccaagaucaucacgcugaagaagcgcuggcagcucgcgcugagcaagggcgugcacuucgugugcaaccugcuccugcuguucgucaccguguacucccacuuccuccugguggccgccgggcuggaggcccccuuccucuaccuguacgcgcuggucuacuuccuccagagcaucaacuucgugcggaucaucaugcgccuguggcugugcuggaagugccgguccaagaacccccuccuguacgacgccaacuacuuccugugcuggcacaccaacugcuacgacuacugcaucccguacaacagcgugaccuccagcaucgucaucacguccggcgacggcaccaccagccccaucuccgagcacgacuaccagaucgggggcuacaccgagaagugggagagcggggugaaggacugcgugguccuccacuccuacuucacgagcgacuacuaccagcuguacuccacccagcugagcaccgacaccggcguggagcacgugacguucuucaucuacaacaagaucgucgacgagcccgaggagcacgugcagauccacaccaucgacggguccagcggcguggucaaccccgugauggagccgaucuacgacgagcccaccaccacgaccagcgugccccucugaggacuaguuauaagacugacuagcccgaugggccucccaacgggcccuccuccccuccuugcaccgagauuaauaaaaaaaaaaaaaaaaaaaaaaaaaaaaaaaaaaaaaaaaaaaaaaaaaaaaaaaaaaaaaaaaugcaucccccccccccccccccccccccccccccccaaaggcucuuuucagagccaccagaauu

SEQ ID NO: 22361 - RNA, 1042 nt, Artificial Sequence
  SARS-CoV-2__MT873087.1__ORF3a protein mRNA gc
aggagaaagcuuaccauggaccuguucaugcgcaucuucaccaucggcaccgugacgcucaagcagggggagaucaaggacgccacccccagcgacuucguccgggccaccgcgaccaucccgauccaggccucccugcccuucggcuggcugaucguggggguggcccuccuggccgucuuccacagcgccuccaagaucaucacgcugaagaagcgcuggcagcucgcgcugagcaagggcgugcacuucgugugcaaccugcuccugcuguucgucaccguguacucccaccuccugcugguggccgccgggcucgaggcccccuuccuguaccuguacgcgcucgucuacuuccugcagagcaucaacuucgugcggaucaucaugcgccuguggcucugcuggaagugccgguccaagaacccccugcuguacgacgccaacuacuuccucugcuggcacaccaacugcuacgacuacugcaucccguacaacagcgugaccuccagcaucgucaucacguccggcgacggcaccaccagccccaucuccgagcacgacuaccagaucgggggcuacaccgagaagugggagagcggggugaaggacugcgugguccugcacuccuacuucacgagcgacuacuaccagcuguacuccacccagcucagcaccgacaccggcguggagcacgugacguucuucaucuacaacaagaucgucgacgagcccgaggagcacgugcagauccacaccaucgacggguccagcggcgugaaccccgucauggagccgaucuacgacgagcccaccaccacgaccagcgugccccugugaggacuaguuauaagacugacuagcccgaugggccucccaacgggcccuccuccccuccuugcaccgagauuaauaaaaaaaaaaaaaaaaaaaaaaaaaaaaaaaaaaaaaaaaaaaaaaaaaaaaaaaaaaaaaaaaugcaucccccccccccccccccccccccccccccccaaaggcucuuuucagagccaccagaauu

SEQ ID NO: 22362 - RNA, 1045 nt, Artificial Sequence
  SARS-CoV-2__MT873115.1__ORF3a protein mRNA gc
aggagaaagcuuaccauggaccuguucaugcgcaucuucaccaucggcaccgugacgcucaagcagggggagaucaaggacgccacccccagcgacuucguccgggccaccgcgaccaucccgauccaggccucccugcccuucggcuggcugaucguggggguggcccuccuggccgucuuccacagcgccuccaagaucaucacgcugaagaagcgcuggcagcucgcgcugagcaagggcgugcacuucgugugcaaccugcuccugcuguucgucaccguguacucccaccuccugcugguggccgccgggcucgaggcccccuuccuguaccuguacgcgcucgucuacuuccugcagagcaucaacuucgugcggaucaucaugcgccuguggcucugcuggaagugccgguccaagaacccccugcuguacgacgccaacuacuuccucugcuggcacaccaacugcuacgacuacugcaucccguacaacagcgugaccuccagcaucaucaucacguccggcgacggcaccaccagccccaucuccgagcacgacuaccagaucgggggcuacaccgagaagugggagagcggggucaaggacugcguggugcugcacuccuacuucacgagcgacuacuaccagcuguacuccacccagcucagcaccgacaccggcgucgagcacgugacguucuucaucuacaacaagaucguggacgagcccgaggagcacguccagauccacaccaucgacggguccagcggcguggugaaccccgucauggagccgaucuacgacgagcccaccaccacgaccagcgugccccugugaggacuaguuauaagacugacuagcccgaugggccucccaacgggcccuccuccccuccuugcaccgagauuaauaaaaaaaaaaaaaaaaaaaaaaaaaaaaaaaaaaaaaaaaaaaaaaaaaaaaaaaaaaaaaaaaugcaucccccccccccccccccccccccccccccccaaaggcucuuuucagagccaccagaauu

SEQ ID NO: 22363 - RNA, 1045 nt, Artificial Sequence
  SARS-CoV-2__MT873125.1__ORF3a protein mRNA gc
aggagaaagcuuaccauggaccuguucaugcgcaucuucaccaucggcaccgugacgcucaagcagggggagaucaaggacgccacccccagcgacuucguccgggccaccgcgaccaucccgauccaggccucccugcccuucggcuggcugaucguggggguggcccuccuggccgucuuccacagcgccuccaagaucaucacgcugaagaagcgcuggcagcucgcgcugagcaagggcgugcacuucgugugcaaccugcuccugcuguucgucaccguguacucccaccuccugcugguggccgccgggcucgaggcccccuuccuguaccuguacgcgcucgucuacuuccugcagagcaucaacuucgugcggaucaucaugcgccuguggcucugcuggaagugccgguccaagaacccccugcuguacgacgccaacuacuuccucugcuggcacaccaacugcuacgacuacugcaucccguacaacagcgugaccuccagcaucgucaucacguccggcgacggcaccaccagccccaucuccgagcacgacuaccagaucgggggcuacaccgagaagugggagagcggggugaaggacugcgugguccugcacuccuacuucacgagcgacuacuaccagcuguacuccacccagcucagcaccgacaccggcguggagcacgugacguucuucaucuacaacaagaucgucgacgagcccgaggagcacgugcagauccacaccaucgacggguccagccgcguggucaaccccgugauggagccgaucuacgacgagcccaccaccacgaccagcgugccccugugaggacuaguuauaagacugacuagcccgaugggccucccaacgggcccuccuccccuccuugcaccgagauuaauaaaaaaaaaaaaaaaaaaaaaaaaaaaaaaaaaaaaaaaaaaaaaaaaaaaaaaaaaaaaaaaaugcaucccccccccccccccccccccccccccccccaaaggcucuuuucagagccaccagaauu

SEQ ID NO: 22364 - RNA, 1045 nt, Artificial Sequence
  SARS-CoV-2__MT873139.1__ORF3a protein mRNA gc
aggagaaagcuuaccauggaccuguucaugcgcaucuucaccaucggcaccgugacgcucaagcagggggagaucaaggacgccacccccagcgacuucguccgggccaccgcgaccaucccgauccaggccucccugcccuucggcuggcugaucguggggguggcccuccuggccgucuuccacagcgccuccaagaucaucacgcugaagaagcgcuggcagcucgcgcugagcaagggcgugcacuucgugugcaaccugcuccugcuguucgucaccguguacucccaccuccugcugguggccgucgggcucgaggcccccuuccuguaccuguacgcccucguguacuuccugcagagcaucaacuucgugcggaucaucaugcgccuguggcucugcuggaagugccgguccaagaacccccugcuguacgacgcgaacuacuuccucugcuggcacaccaacugcuacgacuacugcaucccguacaacagcgucaccuccagcaucgugaucacguccggcgacggcaccaccagccccaucuccgagcacgacuaccagaucgggggcuacaccgagaagugggagagcggggugaaggacugcgucgugcugcacuccuacuucacgagcgacuacuaccagcuguacuccacccagcucagcaccgacaccggcguggagcacgucacguucuucaucuacaacaagaucgccgacgagcccgaggagcacgugcagauccacaccaucgacggguccagcggcguggucaaccccgugauggagccgaucuacgacgagcccaccaccacgaccagcgugccccugugaggacuaguuauaagacugacuagcccgaugggccucccaacgggcccuccuccccuccuugcaccgagauuaauaaaaaaaaaaaaaaaaaaaaaaaaaaaaaaaaaaaaaaaaaaaaaaaaaaaaaaaaaaaaaaaaugcaucccccccccccccccccccccccccccccccaaaggcucuuuucagagccaccagaauu

SEQ ID NO: 22365 - RNA, 1045 nt, Artificial Sequence
  SARS-CoV-2__MT873208.1__ORF3a protein mRNA gc
aggagaaagcuuaccauggaccuguucaugcgcaucuucaccaucggcaccgugacgcucaagcagggggagaucaaggacgccacccccagcgacuucguccgggccaccgcgaccaucccgauccaggccucccugcccuucggcuggcugaucguggggguggcccuccuggccgucuuccacagcgccuccaagaucaucacgcugaagaagcgcuggcagcucgcgcugagcaagggcgugcacuucgugugcaaccugcuccugcuguucgucaccguguacucccaccuccugcugguggccgccgggcucgaggcccccuuccuguaccuguacgcgcucgucuacuuccugcagagcaucaacuucgugcggaucaucaugcgccuguggcucugcuggaagugccgguccaagaacccccugcuguacgacgccaacuacuuccucugcuggcacaccaacugcuacgacuacugcaucccgcacaacagcgugaccuccagcaucgucaucacguccggcgacggcaccaccagccccaucuccgagcacgacuaccagaucgggggcuacaccgagaagugggagagcggggugaaggacugcgugguccugcacuccuacuucacgagcgacuacuaccagcuguacuccacccagcucagcaccgacaccggcguggagcacgugacguucuucaucuacaacaagaucgucgacgagcccgaggagcacgugcagauccacaccaucgacggguccagcggcguggucaaccccgugauggagccgaucuacgacgagcccaccaccacgaccagcgugccccugugaggacuaguuauaagacugacuagcccgaugggccucccaacgggcccuccuccccuccuugcaccgagauuaauaaaaaaaaaaaaaaaaaaaaaaaaaaaaaaaaaaaaaaaaaaaaaaaaaaaaaaaaaaaaaaaaugcaucccccccccccccccccccccccccccccccaaaggcucuuuucagagccaccagaauu

SEQ ID NO: 22366 - RNA, 1045 nt, Artificial Sequence
  SARS-CoV-2__MT873256.1__ORF3a protein mRNA gc
aggagaaagcuuaccauggaccuguucaugcgcaucuucaccaucggcaccgugacgcucaagcagggggagaucaaggacgccacccccagcgacuucguccgggccaccgcgaccaucccgauccaggccucccugcccuucggcuggcugaucguggggguggcccuccuggccgucuuccacagcgccuccaagaucaucacgcugaagaagcgcuggcagcucgcgcugagcaagggcgugcacuucgugugcaaccugcuccugcuguucgucaccguguacucccaccuccugcugguggccgccgggcucgaggcccccuuccuguaccuguacagccucgucuacuuccugcaguccaucaacuucgugcggaucaucaugcgccuguggcucugcuggaagugccggagcaagaacccccugcuguacgacgcgaacuacuuccucugcuggcacaccaacugcuacgacuacugcaucccguacaacuccgugaccagcuccaucgucaucacgagcggcgacggcaccaccucccccaucagcgagcacgacuaccagaucgggggcuacaccgagaagugggaguccggggugaaggacugcgugguccugcacagcuacuucacguccgacuacuaccagcuguacagcacccagcucuccaccgacaccggcguggagcacgugacguucuucaucuacaacaagaucgucgacgagcccgaggagcacgugcagauccacaccaucgacgggagcagcggcguggucaaccccgugauggagccgaucuacgacgagcccaccaccacgaccuccgugccccugugaggacuaguuauaagacugacuagcccgaugggccucccaacgggcccuccuccccuccuugcaccgagauuaauaaaaaaaaaaaaaaaaaaaaaaaaaaaaaaaaaaaaaaaaaaaaaaaaaaaaaaaaaaaaaaaaugcaucccccccccccccccccccccccccccccccaaaggcucuuuucagagccaccagaauu

SEQ ID NO: 22367 - RNA, 1045 nt, Artificial Sequence
  SARS-CoV-2__MT873272.1__ORF3a protein mRNA gc
aggagaaagcuuaccauggaccuguucaugcgcaucuucaccaucggcaccgugacgcucaagcagggggagaucaaggacgccacccccagcgacuucguccgggccaccgcgaccaucccgauccaggccucccugcccuucggcuggcugaucguggggguggcccuccuggccgucuuccacagcgccuccaagaucaucacgcugaagaagcgcuggcagcucgcgcugagcaagggcgugcacuucgugugcaaccugcuccugcuguucgucaccguguacucccaccuccugcugguggccgccgggcucgaggcccccuuccuguaccuguacgcgcucgucuacuuccugcagagcaucaacuucgugcgggugaucaugcgccuguggcucugcuggaagugccgguccaagaacccccugcuguacgacgccaacuacuuccucugcuggcacaccaacugcuacgacuacugcaucccguacaacagcgucaccuccagcaucgugaucacguccggcgacggcaccaccagccccaucuccgagcacgacuaccagaucgggggcuacaccgagaagugggagagcggggugaaggacugcgucgugcugcacuccuacuucacgagcgacuacuaccagcuguacuccacccagcucagcaccgacaccggcguggagcacgucacguucuucaucuacaacaagaucguggacgagcccgaggagcacgugcagauccacaccaucgacggguccagcggcgucgugaaccccgugauggagccgaucuacgacgagcccaccaccacgaccagcgucccccugugaggacuaguuauaagacugacuagcccgaugggccucccaacgggcccuccuccccuccuugcaccgagauuaauaaaaaaaaaaaaaaaaaaaaaaaaaaaaaaaaaaaaaaaaaaaaaaaaaaaaaaaaaaaaaaaaugcaucccccccccccccccccccccccccccccccaaaggcucuuuucagagccaccagaauu

SEQ ID NO: 22368 - RNA, 1045 nt, Artificial Sequence
  SARS-CoV-2__MT873280.1__ORF3a protein mRNA gc
aggagaaagcuuaccauggaccuguucaugcgcaucuucaccaucggcaccgugacgcucaagcagggggagaucaaggacgccacccccagcgacuucguccgggccaccgcgaccaucccgauccaggccucccugcccuucggcuggcugaucguggggguggcccuccuggccgucuuccacagcgccuccaagaucaucacgcugaagaagcgcuggcagcucgcgcugagcaagggcgugcacuucgugugcaaccugcuccugcuguucgucaccguguacucccaccuccugcugguggccgccgggcucgaggcccccuuccuguaccuguacgcgcucgucuacuuccugcagagcaucaacuucgugcggaucaucaugcgccuguggcucugcuggaagugccgguccaagaacccccugcuguacgacgccaacuacuuccucugcuggcacaccaacugcuacgacuacugcaucccguacaacagcgugaccuccagcaucgucaucacguccggcgacggcaucaccagccccaucuccgagcacgacuaccagaucgggggcuacaccgagaagugggagagcggggugaaggacugcgugguccugcacuccuacuucaccagcgacuacuaccagcuguacuccacgcagcucagcaccgacaccggcguggagcacgugaccuucuucaucuacaacaagaucgucgacgagcccgaggagcacgugcagauccacacgaucgacggguccagcggcguggucaaccccgugauggagccgaucuacgacgagcccaccaccaccacgagcgugccccugugaggacuaguuauaagacugacuagcccgaugggccucccaacgggcccuccuccccuccuugcaccgagauuaauaaaaaaaaaaaaaaaaaaaaaaaaaaaaaaaaaaaaaaaaaaaaaaaaaaaaaaaaaaaaaaaaugcaucccccccccccccccccccccccccccccccaaaggcucuuuucagagccaccagaauu

SEQ ID NO: 22369 - RNA, 1045 nt, Artificial Sequence
  SARS-CoV-2__MT873282.1__ORF3a protein mRNA gc
aggagaaagcuuaccauggaccuguucaugcgcaucuucaccaucggcacccucacgcugaagcagggggagaucaaggacgccacccccagcgacuucgugcgggccaccgcgaccaucccgauccaggccucccugcccuucggcuggcucaucgucgggguggcccugcuggccguguuccagagcgccuccaagaucaucacgcucaagaagcgcuggcagcuggcgcugagcaagggcguccacuucgugugcaaccuccugcugcuguucgugaccgucuacucccaccuccugcucguggccgccgggcuggaggcccccuuccuguaccucuacgcgcugguguacuuccugcagagcaucaacuucguccggaucaucaugcgccucuggcugugcuggaagugccgguccaagaacccccugcucuacgacgccaacuacuuccugugcuggcacaccaacugcuacgacuacugcaucccguacaacagcgugaccuccagcaucgugaucacguccggcgacggcaccaccagccccaucuccgagcacgacuaccagaucgggggcuacaccgagaagugggagagcggggucaaggacugcguggugcugcacuccuacuucacgagcgacuacuaccagcucuacuccacccagcugagcaccgacaccggcgucgagcacgugacguucuucaucuacaacaagaucguggacgagcccgaggagcacguccagauccacaccaucgacggguccagcggcguggugaaccccgucauggagccgaucuacgacgagcccaccaccacgaccagcgugccccugugaggacuaguuauaagacugacuagcccgaugggccucccaacgggcccuccuccccuccuugcaccgagauuaauaaaaaaaaaaaaaaaaaaaaaaaaaaaaaaaaaaaaaaaaaaaaaaaaaaaaaaaaaaaaaaaaugcaucccccccccccccccccccccccccccccccaaaggcucuuuucagagccaccagaauu

SEQ ID NO: 22370 - RNA, 1045 nt, Artificial Sequence
  SARS-CoV-2__MT873298.1__ORF3a protein mRNA gc
aggagaaagcuuaccauggaccuguucaugcgcaucuucaccaucggcaccgugacgcucaagcagggggagaucaaggacgccacccccagcgacuucguccgggccaccgcgaccaucccgauccaggccucccugcccuucggcuggcugaucguggggguggcccuccuggccgucuuccacagcgccuccaagaucaucacgcugaagaagcgcuggcagcucgcgcugagcaagggcgugcacuucgugugcaaccugcuccugcuguucgucaccguguacucccaccuccugcugguggccgccgggcucgaggcgccccugcuguaccucuacgcccuggucuacuuccugcagagcaucaacuucgugcggaucaucaugcgccucuggcugugcuggaagugccgguccaagaacccccugcucuacgacgccaacuacuuccugugcuggcacaccaacugcuacgacuacugcaucccguacaacagcgugaccuccagcaucgucaucacguccggcgacggcaccaccagccccaucuccgagcacgacuaccagaucgggggcuacaccgagaagugggagagcggggugaaggacugcgugguccugcacuccuacuucacgagcgacuacuaccagcucuacuccacccagcugagcaccgacaccggcguggagcacgugacguucuucaucuacaacaagaucgucgacgagcccgaggagcacgugcagauccacaccaucgacggguccagcggcguggucaaccccgugauggagccgaucuacgacgagcccaccaccacgaccagcgugccccugugaggacuaguuauaagacugacuagcccgaugggccucccaacgggcccuccuccccuccuugcaccgagauuaauaaaaaaaaaaaaaaaaaaaaaaaaaaaaaaaaaaaaaaaaaaaaaaaaaaaaaaaaaaaaaaaaugcaucccccccccccccccccccccccccccccccaaaggcucuuuucagagccaccagaauu

SEQ ID NO: 22371 - RNA, 1045 nt, Artificial Sequence
  SARS-CoV-2__MT873299.1__ORF3a protein mRNA gc
aggagaaagcuuaccauggaccuguucaugcgcaucuucaccaucggcaccgugacgcucaagcagggggagaucaaggacgccacccccagcgacuucguccgggccaccgcgaccaucccgauccaggccucccugcccuucggcuggcugaucguggggguggcccuccuggccgucuuccacagcgccuccaagaucaucacgcugaagaagcgcuggcagcucgcgcugagcaagggcgugcacuucgugugcaaccugcuccugcuguucgucaccguguacucccaccuccugcugguggccgccgggcucgaggcccccuuccuguaccuguacgcgcucgucuacuuccugcagagcaucaacuucgugcggaucaucaugcgccuguggcucugcuggaagugccgguccaagaacccccugcuguacgacgccaacuacuuccucugcuggcacaccaacugcuacgacuacugcaucccguacaacagcgugaccuccagcaucgucaucacguccggcgacggcaagaccagccccaucuccgagcacgacuaccagaucgggggcuacaccgagaagugggagagcggggugaaggacugcgugguccugcacuccuacuucaccagcgacuacuaccagcuguacuccacgcagcucagcaccgacaccggcguggagcacgugaccuucuucaucuacaacaagaucgucgacgagcccgaggagcacgugcagauccacacgaucgacggguccagcggcguggucaaccccgugauggagccgaucuacgacgagcccaccaccaccacgagcgugccccugugaggacuaguuauaagacugacuagcccgaugggccucccaacgggcccuccuccccuccuugcaccgagauuaauaaaaaaaaaaaaaaaaaaaaaaaaaaaaaaaaaaaaaaaaaaaaaaaaaaaaaaaaaaaaaaaaugcaucccccccccccccccccccccccccccccccaaaggcucuuuucagagccaccagaauu

SEQ ID NO: 22372 - RNA, 1045 nt, Artificial Sequence
  SARS-CoV-2__MT873363.1__ORF3a protein mRNA gc
aggagaaagcuuaccauggaccuguucaugcgcaucuucaccaucggcaccgugacgcucaagcagggggagaucaaggacgccacccccagcuacuucguccgggccaccgcgaccaucccgauccaggccucccugcccuucggcuggcugaucguggggguggcccuccuggccgucuuccacagcgccuccaagaucaucacgcugaagaagcgcuggcagcucgcgcugagcaagggcgugcacuucgugugcaaccugcuccugcuguucgucaccguguacucccaccuccugcugguggccgccgggcucgaggcccccuuccuguaccuguacgcgcucgucuacuuccugcagagcaucaacuucgugcggaucaucaugcgccuguggcucugcuggaagugccgguccaagaacccccugcuguacgacgccaacuacuuccucugcuggcacaccaacugcuacgacuacugcaucccguacaacagcgugaccuccagcaucgucaucacguccggcgacggcaccaccagccccaucuccgagcacgacuaccagaucgggggcuacaccgagaagugggagagcggggugaaggacugcgugguccugcacuccuacuucacgagcgacuacuaccagcuguacuccacccagcucagcaccgacaccggcguggagcacgugacguucuucaucuacaacaagaucgucgacgagcccgaggagcacgugcagauccacaccaucgacggguccagcggcguggucaaccccgugauggagccgaucuacgacgagcccaccaccacgaccagcgugccccugugaggacuaguuauaagacugacuagcccgaugggccucccaacgggcccuccuccccuccuugcaccgagauuaauaaaaaaaaaaaaaaaaaaaaaaaaaaaaaaaaaaaaaaaaaaaaaaaaaaaaaaaaaaaaaaaaugcaucccccccccccccccccccccccccccccccaaaggcucuuuucagagccaccagaauu

SEQ ID NO: 22373 - RNA, 1045 nt, Artificial Sequence
  SARS-CoV-2__MT873375.1__ORF3a protein mRNA gc
aggagaaagcuuaccauggaccuguucaugcgcaucuucaccaucggcaccgugacgcucaagcagggggagaucaaggacgccacccccagcgacuucguccgggccaccgcgaccaucccgauccaggccucccugcccuucggcuggcugaucguggggguggcccuccuggccgucuuccacagcgccuccaagaucaucacgcugaagaagcgcuggcagcucgcgcugagcaagggcgugcacuucgugugcaaccugcuccugcuguucgucaccguguacucccacauccuccugguggccgccgggcuggaggcccccuuccucuaccuguacgcgcuggucuacuuccuccagagcaucaacuucgugcggaucaucaugcgccuguggcugugcuggaagugccgguccaagaacccccuccuguacgacgccaacuacuuccugugcuggcacaccaacugcuacgacuacugcaucccguacaacagcgugaccuccagcaucgucaucacguccggcgacggcaccaccagccccaucuccgagcacgacuaccagaucgggggcuacaccgagaagugggagagcggggugaaggacugcgugguccuccacuccuacuucacgagcgacuacuaccagcuguacuccacccagcugagcaccgacaccggcguggagcacgugacguucuucaucuacaacaagaucgucgacgagcccgaggagcacgugcagauccacaccaucgacggguccagcggcguggucaaccccgugauggagccgaucuacgacgagcccaccaccacgaccagcgugccccucugaggacuaguuauaagacugacuagcccgaugggccucccaacgggcccuccuccccuccuugcaccgagauuaauaaaaaaaaaaaaaaaaaaaaaaaaaaaaaaaaaaaaaaaaaaaaaaaaaaaaaaaaaaaaaaaaugcaucccccccccccccccccccccccccccccccaaaggcucuuuucagagccaccagaauu

SEQ ID NO: 22374 - RNA, 1045 nt, Artificial Sequence
  SARS-CoV-2__MT876554.1__ORF3a protein mRNA gc
aggagaaagcuuaccauggaccuguucaugcgcaucuucaccaucggcaccgugacgcucaagcagggggagaucaaggacgccacccccagcgacuucguccgggccaccgcgaccaucccgauccaggccucccugcccuucggcuggcugaucguggggguggcccuccuggccgucuuccagagcgccuccaagaucaucacgcugaagaagcgcuggcagcucgcgcugagcaagggcgugcacuucgugugcaaccugcuccugcuguucgucaccguguacucccaccuccugcugguggccgccgggcucgaggcccccuuccuguaccuguacgcgcucgucuacuuccugcagagcaucaacuucgugcggaucaucaugcgccuguggcucugcuggaagugccgguccaagaacccccugcuguacgacgccaacuacuuccucugccugcacaccaacugcuacgacuacugcaucccguacaacagcgugaccuccagcaucgucaucacguccggcgacggcaccaccagccccaucuccgagcacgacuaccagaucgggggcuacaccgagaagugggagagcggggugaaggacugcgugguccugcacuccuacuucacgagcgacuacuaccagcucuacuccacccagcugagcaccgacaccggcguggagcacgugacguucuucaucuacaacaagaucgucgacgagcccgaggagcacgugcagauccacaccaucgacggguccagcggcguggucaaccccgugauggagccgaucuacgacgagcccaccaccacgaccagcgugccccugugaggacuaguuauaagacugacuagcccgaugggccucccaacgggcccuccuccccuccuugcaccgagauuaauaaaaaaaaaaaaaaaaaaaaaaaaaaaaaaaaaaaaaaaaaaaaaaaaaaaaaaaaaaaaaaaaugcaucccccccccccccccccccccccccccccccaaaggcucuuuucagagccaccagaauu

SEQ ID NO: 22375 - RNA, 1045 nt, Artificial Sequence
  SARS-CoV-2__MT872492.1__ORF3a protein mRNA gc
aggagaaagcuuaccauggaccuguucaugcgcaucuucaccaucggcaccgugacgcucaagcagggggagaucaaggacgccacccccagcgacuucguccgggccaccgcgaccaucccgauccaggccucccugcccuucggcuggcugaucguggggguggcccuccuggccgucuuccagagcgccuccaagaucaucacgcugaagaagcgcuggcagcucgcgcugagcaagggcgugcacuucgugugcaaccugcuccugcuguucgucaccguguacucccaccuccugcugguggccgccgggcucgaggccagcuuccuguaccuguacgcgcucgucuacuuccugcaguccaucaacuucgugcggaucaucaugcgccuguggcucugcuggaagugccggagcaagaacccccugcuguacgacgccaacuacuuccucugcuggcacaccaacugcuacgacuacugcauccccuacaacuccgugaccagcuccaucgucaucacgagcggcgacggcaccaccuccccgaucagcgagcacgacuaccagaucgggggcuacaccgagaagugggaguccggggugaaggacugcgugguccugcacagcuacuucacguccgacuacuaccagcuguacagcacccagcucuccaccgacaccggcguggagcacgugacguucuucaucuacaacaagaucgucgacgagcccgaggagcacgugcagauccacaccaucgacgggagcagcggcguggucaaccccgugauggagcccaucuacgacgagccgaccaccacgaccuccgugccccugugaggacuaguuauaagacugacuagcccgaugggccucccaacgggcccuccuccccuccuugcaccgagauuaauaaaaaaaaaaaaaaaaaaaaaaaaaaaaaaaaaaaaaaaaaaaaaaaaaaaaaaaaaaaaaaaaugcaucccccccccccccccccccccccccccccccaaaggcucuuuucagagccaccagaauu

SEQ ID NO: 22376 - RNA, 1045 nt, Artificial Sequence
  SARS-CoV-2__MT872494.1__ORF3a protein mRNA gc
aggagaaagcuuaccaugggccuguucaugcgcaucuucaccaucgggaccgugacgcucaagcagggcgagaucaaggacgccacccccagcgacuucguccgggccaccgcgaccaucccgauccaggccucccugcccuucggguggcugaucgugggcguggcccuccuggccgucuuccagagcgccuccaagaucaucacgcugaagaagcgcuggcagcucgcgcugagcaagggggugcacuucgugugcaaccugcuccugcuguucgucaccguguacucccaccuccugcugguggccgccggccucgaggcccccuuccuguaccuguacgcgcucgucuacuuccugcagagcaucaacuucgugcggaucaucaugcgccuguggcucugcuggaagugccgguccaagaacccccugcuguacgacgccaacuacuuccucugcuggcacaccaacugcuacgacuacugcaucccguacaacagcgugaccuccagcaucgucaucacguccggcgacgggaccaccagccccaucuccgagcacgacuaccagaucggcggguacaccgagaagugggagagcggcgugaaggacugcgugguccugcacuccuacuucacgagcgacuacuaccagcuguacuccacccagcucagcaccgacaccgggguggagcacgugacguucuucaucuacaacaagaucgucgacgagcccgaggagcacgugcagauccacaccaucgacggcuccagcggcguggucaaccccgugauggagccgaucuacgacgagcccaccaccacgaccagcgugccccugugaggacuaguuauaagacugacuagcccgaugggccucccaacgggcccuccuccccuccuugcaccgagauuaauaaaaaaaaaaaaaaaaaaaaaaaaaaaaaaaaaaaaaaaaaaaaaaaaaaaaaaaaaaaaaaaaugcaucccccccccccccccccccccccccccccccaaaggcucuuuucagagccaccagaauu

SEQ ID NO: 22377 - RNA, 1042 nt, Artificial Sequence
  SARS-CoV-2__MT846012.1__ORF3a protein mRNA gc
aggagaaagcuuaccauggaccuguucaugcgcaucuucaccaucggcaccgugacgcucaagcagggggagaucaaggacgccacccccagcgacuucguccgggccaccgcgaccaucccgauccaggccucccugcccuucggcuggcugaucguggggguggcccuccuggccgucuuccagagcgccuccaagaucaucacgcugaagaagcgcuggcagcucgcgcugagcaagggcgugcacuucgugugcaaccugcuccugcuguucgucaccguguacucccaccuccugcugguggccgccgggcucgaggcccccuuccuguaccuguacgcgcucgucuacuuccugcagagcaucaacuucgugcggaucaucaugcgccuguggcucugcuggaagugccgguccaagaacccccugcuguacgacgccaacuacuuccucugcuggcacaccaacugcuacgacuacugcaucccguacaacagcgugaccuccagcaucgucaucacguccggcgacggcaccaccagccccaucuccgagcacgacuaccagaucgggggcuacaccgagaagugggagagcggggugaaggacugcgugguccugcacuccuacuucacgagcgacuacuaccagcuguacuccacccagcucagcaccgacaccggcguggagcacgugacguucuucaucuacaacaagaucgucgacgagcccgaggagcacgugcagauccacaccaucgacggguccagcggcguggaccccgucauggagccgaucuacgacgagcccaccaccacgaccagcgugccccugugaggacuaguuauaagacugacuagcccgaugggccucccaacgggcccuccuccccuccuugcaccgagauuaauaaaaaaaaaaaaaaaaaaaaaaaaaaaaaaaaaaaaaaaaaaaaaaaaaaaaaaaaaaaaaaaaugcaucccccccccccccccccccccccccccccccaaaggcucuuuucagagccaccagaauu

SEQ ID NO: 22378 - RNA, 1045 nt, Artificial Sequence
  SARS-CoV-2__MT846420.1__ORF3a protein mRNA gc
aggagaaagcuuaccauggaccuguucaugcgcaucuucaccaucggcaccgugacgcucaagcaggucgagaucaaggacgccacccccagcgacuucgugcgggccaccgcgaccaucccgauccaggccucccugcccuucggguggcugaucgugggcgucgcccuccuggccguguuccagagcgccuccaagaucaucacgcugaagaagcgcuggcagcucgcgcugagcaagggggugcacuucgucugcaaccugcuccugcuguucgugaccguguacucccaccuccugcuggucgccgccggccucgaggcccccuuccuguaccuguacgcgcucguguacuuccugcagagcaucaacuucgugcggaucaucaugcgccuguggcucugcuggaagugccgguccaagaacccccugcuguacgacgccaacuacuuccucugcuggcacaccaacugcuacgacuacugcaucccguacaacagcgucaccuccagcaucgugaucacguccggggacggcaccaccagccccaucuccgagcacgacuaccagaucggcggguacaccgagaagugggagagcggcgugaaggacugcgucgugcugcacuccuacuucacgagcgacuacuaccagcuguacuccacccagcucagcaccgacaccgggguggagcacgucacguucuucaucuacaacaagaucguggacgagcccgaggagcacgugcagauccacaccaucgacggcuccagcggggucgugaaccccgugauggagccgaucuacgacgagcccaccaccacgaccagcgucccccugugaggacuaguuauaagacugacuagcccgaugggccucccaacgggcccuccuccccuccuugcaccgagauuaauaaaaaaaaaaaaaaaaaaaaaaaaaaaaaaaaaaaaaaaaaaaaaaaaaaaaaaaaaaaaaaaaugcaucccccccccccccccccccccccccccccccaaaggcucuuuucagagccaccagaauu

SEQ ID NO: 22379 - RNA, 1045 nt, Artificial Sequence
  SARS-CoV-2__MT846431.1__ORF3a protein mRNA gc
aggagaaagcuuaccauggaccuguucaugcgcaucuucaccaucggcaccgugacgcucaagcagggggagaucaaggacgccacccccagcgacuucguccgggccaccgcgaccaucccgauccaggccucccugcccuucggcuggcugaucguggggguggcccuccuggccgucuuccacagcgccuccaagaucaucacgcugaagaagcgcuggcagcucgcgcugagcaagggcgugcacuucgugugcaaccugcuccugcuguucgucaccguguacucccaccuccugcugguggccgccgggcucgaggcccccuuccuguaccuguacgcgcucgucuacuuccugcagagcaucaacuucgugcggaucaucaugcgccuguggcucugcuggaagugccgguccaagaacccccugcuguacgacgccaacuacuuccucugcuggcacaccaacugcuacgacuacugcaucccguacaacagcgugaccuccagcaucgucaucacguccggcgacggcaccaccagccccaucuccgagcacgacuaccagaucgggggcuacaccgagaagugggagagcggggugaaggacugcgugguccugcacuccuacuucacgagcgacuacuaccagcuguacuccacccagcucagcaccgacaccggcguggagcacgugacguucuucaucuacaacaagaucgucgacgagcccgaggagcacgugcagauccacaccaucgacggguccagcggcguggucaaccccgugauggagccgaucuacgacgagagcaccaccacgaccuccgugccccugugaggacuaguuauaagacugacuagcccgaugggccucccaacgggcccuccuccccuccuugcaccgagauuaauaaaaaaaaaaaaaaaaaaaaaaaaaaaaaaaaaaaaaaaaaaaaaaaaaaaaaaaaaaaaaaaaugcaucccccccccccccccccccccccccccccccaaaggcucuuuucagagccaccagaauu

SEQ ID NO: 22380 - RNA, 1045 nt, Artificial Sequence
  SARS-CoV-2__MT846433.1__ORF3a protein mRNA gc
aggagaaagcuuaccauggaccuguucaugcgcaucuucaccaucggcaccgugacgcucaagcagggggagaucaaggacgccacccccagcgacuucguccgggccaccgcgaccaucccgauccaggccucccugcccuucggcuggcugaucguggggguggcccuccugagcgucuuccaguccgccagcaagaucaucacgcugaagaagcgcuggcagcucgcccuguccaagggcgugcacuucgugugcaaccugcuccugcuguucgucaccguguacagccaccuccugcugguggcggccgggcucgaggcccccuuccuguaccuguacgcccucgucuacuuccugcaguccaucaacuucgugcggaucaucaugcgccuguggcucugcuggaagugccggagcaagaacccccugcuguacgacgcgaacuacuuccucugcuggcacaccaacugcuacgacuacugcaucccguacaacuccgugaccagcuccaucgucaucacgagcggcgacggcaccaccucccccaucagcgagcacgacuaccagaucgggggcuacaccgagaagugggaguccggggugaaggacugcgugguccugcacagcuacuucacguccgacuacuaccagcuguacagcacccagcucuccaccgacaccggcguggagcacgugacguucuucaucuacaacaagaucgucgacgagcccgaggagcacgugcagauccacaccaucgacgggagcagcggcguggucaaccccgugauggagccgaucuacgacgagcccaccaccacgaccuccgugccccugugaggacuaguuauaagacugacuagcccgaugggccucccaacgggcccuccuccccuccuugcaccgagauuaauaaaaaaaaaaaaaaaaaaaaaaaaaaaaaaaaaaaaaaaaaaaaaaaaaaaaaaaaaaaaaaaaugcaucccccccccccccccccccccccccccccccaaaggcucuuuucagagccaccagaauu

SEQ ID NO: 22381 - RNA, 1045 nt, Artificial Sequence
  SARS-CoV-2__MT846483.1__ORF3a protein mRNA gc
aggagaaagcuuaccauggaccuguucaugcgcaucuucaccaucggcaccgugacguucaagcagggggagaucaaggacgccacccccagcgacuucguccgggccaccgcgaccaucccgauccaggccucccuccccuucggcuggcugaucguggggguggcccugcucgccgucuuccagagcgccuccaagaucaucacgcugaagaagcgcuggcagcuggcgcucagcaagggcgugcacuucgugugcaaccugcugcuccuguucgucaccguguacucccaccuccugcugguggccgccgggcuggaggcccccuuccucuaccuguacgcgcuggucuacuuccuccagagcaucaacuucgugcggaucaucaugcgccuguggcugugcuggaagugccgguccaagaacccccuccuguacgacgccaacuacuuccugugcuggcacaccaacugcuacgacuacugcaucccguacaacagcgugaccuccagcaucgucaucacguccggcgacggcaccaccagccccaucuccgagcacgacuaccagaucgggggcuacaccgagaagugggagagcggggugaaggacugcgugguccuccacuccuacuucacgagcgacuacuaccagcuguacuccacccagcugagcaccgacaccggcguggagcacgugacguucuucaucuacaacaagaucgucgacgagcccgaggagcacgugcagauccacaccaucgacggguccagcggcguggucaaccccgugauggagccgaucuacgacgagcccaugaccaccacgagcgugccccucugaggacuaguuauaagacugacuagcccgaugggccucccaacgggcccuccuccccuccuugcaccgagauuaauaaaaaaaaaaaaaaaaaaaaaaaaaaaaaaaaaaaaaaaaaaaaaaaaaaaaaaaaaaaaaaaaugcaucccccccccccccccccccccccccccccccaaaggcucuuuucagagccaccagaauu

SEQ ID NO: 22382 - RNA, 1045 nt, Artificial Sequence
  SARS-CoV-2__MT846503.1__ORF3a protein mRNA gc
aggagaaagcuuaccauggaccuguucaugcgcaucuucaccaucggcaccgugacgcucaagcagggggagaucaaggacgccacccccagcgacuucguccgggccaccgcgaccaucccgauccaggccucccugcccuucggcuggcugaucguggggguggcccuccuggccgucuuccacagcgccuccaagaucaucacgcugaagaagcgcuggcagcucgcgcugagcaagggcguguacuucgugugcaaccugcuccugcuguucgucaccguguacucccaccuccugcugguggccgccgggcucgaggcccccuuccuguaccuguacgcgcucgucuacuuccugcagagcaucaacuucgugcggaucaucaugcgccuguggcucugcuggaagugccgguccaagaacccccugcuguacgacgccaacuacuuccucugcuggcacaccaacugcuacgacuacugcaucccguacaacagcgugaccuccagcaucgucaucacguccggcgacggcaccaccagccccaucuccgagcacgacuaccagaucgggggcuacaccgagaagugggagagcggggugaaggacugcgugguccugcacuccuacuucacgagcgacuacuaccagcuguacuccacccagcucagcaccgacaccggcguggagcacgugacguucuucaucuacaacaagaucgucgacgagcccgaggagcacgugcagauccacaccaucgacggguccagcggcguggucaaccccgugauggagccgaucuacgacgagcccaccaccacgaccagcgugccccugugaggacuaguuauaagacugacuagcccgaugggccucccaacgggcccuccuccccuccuugcaccgagauuaauaaaaaaaaaaaaaaaaaaaaaaaaaaaaaaaaaaaaaaaaaaaaaaaaaaaaaaaaaaaaaaaaugcaucccccccccccccccccccccccccccccccaaaggcucuuuucagagccaccagaauu

SEQ ID NO: 22383 - RNA, 1045 nt, Artificial Sequence
  SARS-CoV-2__MT846557.1__ORF3a protein mRNA gc
aggagaaagcuuaccauggaccuguucaugcgcaucuucaccaucggcaccgugacgcucaagcagagcgagaucaaggacgccacccccuccgacuucguccgggccaccgcgaccaucccgauccaggccagccugcccuucggguggcugaucgugggcguggcccuccuggccgucuuccacuccgccagcaagaucaucacgcugaagaagcgcuggcagcucgcgcuguccaagggggugcacuucgugugcaaccugcuccugcuguucgucaccguguacagccaccuccugcugguggccgccggccucgaggcccccuuccuguaccuguacgcgcucgucuacuuccugcaguccaucaacuucgugcggaucaucaugcgccuguggcucugcuggaagugccggagcaagaacccccugcuguacgacgccaacuacuuccucugcuggcacaccaacugcuacgacuacugcaucccguacaacuccgugaccagcuccaucgucaucacgagcggggacggcaccaccucccccaucagcgagcacgacuaccagaucggcggguacaccgagaagugggaguccggcgugaaggacugcgugguccugcacagcuacuucacguccgacuacuaccagcuguacagcacccagcucuccaccgacaccgggguggagcacgugacguucuucaucuacaacaagaucgucgacgagcccgaggagcacgugcagauccacaccaucgacggcagcagcgggguggucaaccccgugauggagccgaucuacgacgagcccaccaccacgaccuccgugccccugugaggacuaguuauaagacugacuagcccgaugggccucccaacgggcccuccuccccuccuugcaccgagauuaauaaaaaaaaaaaaaaaaaaaaaaaaaaaaaaaaaaaaaaaaaaaaaaaaaaaaaaaaaaaaaaaaugcaucccccccccccccccccccccccccccccccaaaggcucuuuucagagccaccagaauu

SEQ ID NO: 22384 - RNA, 1045 nt, Artificial Sequence
  SARS-CoV-2__MT846561.1__ORF3a protein mRNA gc
aggagaaagcuuaccauggaccuguucaugcgcaucuucaccaucggcaccgugacgcucaagcagggggagaucaaggacgccacccccagcgacuucguccgggccaccgcgaccaucccgauccaggccucccugcccuucggcuggcugaucguggggguggcccuccuggccgucuuccagagcgccuccaagaucaucacgcugaagaagcgcuggcagcucgcgcugagcaagggcgugcacuucgugugcaaccugcuccugcuguucgucaccguguacucccaccuccugcugguggccgccgggcucgaggcccccuuccuguaccuguacgcgcucgucuacuuccugcagagcaucaacuucgugcggaucaucaugcgccugugccucugcuggaagugccgguccaagaacccccugcuguacgacgccaacuacuuccucugcuggcacaccaacugcuacgacuacugcaucccguacaacagcgugaccuccagcaucgucaucacguccggcgacggcaccaccagccccaucuccgagcacgacuaccagaucgggggcuacaccgagaagugggagagcggggugaaggacugcgugguccugcacuccuacuucacgagcgacuacuaccagcuguacuccacccagcucagcaccgacaccggcguggagcacgugacguucuucaucuacaacaagaucgucgacgagcccgaggagcacgugcagauccacaccaucgacggguccagcggcguggucaaccccgugauggagccgaucuacgacgagcccaccaccacgaccagcgugccccugugaggacuaguuauaagacugacuagcccgaugggccucccaacgggcccuccuccccuccuugcaccgagauuaauaaaaaaaaaaaaaaaaaaaaaaaaaaaaaaaaaaaaaaaaaaaaaaaaaaaaaaaaaaaaaaaaugcaucccccccccccccccccccccccccccccccaaaggcucuuuucagagccaccagaauu

SEQ ID NO: 22385 - RNA, 1045 nt, Artificial Sequence
  SARS-CoV-2__MT846613.1__ORF3a protein mRNA gc
aggagaaagcuuaccauggaccuguucaugcgcaucuucaccaucggcaccgugacgcucaagcagggggagaucaaggacgccacccccagcgacuucguccgggccaccgcgaccaucccgauccaggccucccugcccuucggcuggcugaucguggggguggcccuccuggccgucuuccagagcgccuccaagaucaucacgcugaagaagcgcuggcagcucgcgcugagcaagggcgugcacuucgugugcaaccugcuccugcuguucgucaccguguacucccaccuccugcugguggccgccgggcucgaggcccccuuccuguaccuguacgcgcucgucuacuuccugcagagcaucaacuucgugcggaucaucaugcgccugugccucugcuggaagugccgguccaagaacccccugcuguacgacgccaacuacuuccucugcuggcacaccaacugcuacgacuacugcaucccguacaacagcgugaccuccagcaucgucaucacguccggcgacggcaccaccagccccaucuccgagcacgacuaccagaucgggggcuacaccgagaagugggagagcggggugaaggacugcgugguccugcacuccuacuucacgagcgacuacuaccagcuguacuccacccagcucagcaccgacaccggcguggagcacgugacguucuucaucuacaacaagaucgucgacgagcccgaggagcacgugcagaucuacaccaucgacggguccagcggcguggucaaccccgugauggagccgaucuacgacgagcccaccaccacgaccagcgugccccugugaggacuaguuauaagacugacuagcccgaugggccucccaacgggcccuccuccccuccuugcaccgagauuaauaaaaaaaaaaaaaaaaaaaaaaaaaaaaaaaaaaaaaaaaaaaaaaaaaaaaaaaaaaaaaaaaugcaucccccccccccccccccccccccccccccccaaaggcucuuuucagagccaccagaauu

SEQ ID NO: 22386 - RNA, 1045 nt, Artificial Sequence
  SARS-CoV-2__MT846636.1__ORF3a protein mRNA gc
aggagaaagcuuaccauggaccuguucaugcgcaucuucaccaucggcaccgugacgcucaagcagggggagaucaaggacgccacccccagcgacuucguccgggccaccgcgaccaucccgauccaggccucccugcccuucggcuggcugaucguggggguggcccuccuggccgucuuccacagcgccuccaagaucaucacgcugaagaagcgcuggcagcucgcgcugagcaagggcgugcacuucgugugcaaccugcuccugcuguucgucaccguguacucccaccuccugcugguggccgccgggcucgaggcccccuuccuguaccuguacgcgcucgucuacuuccugcagagcaucaacuucgugcggaucaucaugcgccuguggcucugcuggaagugccgguccaagaacccccugcuguacgacgccaacuacuuccucugcuggcacaccaacugcuacgacuacugcaucccguacaacagcgugaccuccagcaucgucaucacgcugggcgacggcaccaccucccccaucagcgagcacgacuaccagaucgggggcuacaccgagaagugggaguccggggugaaggacugcgugguccugcacagcuacuucacguccgacuacuaccagcucuacagcacccagcuguccaccgacaccggcguggagcacgugacguucuucaucuacaacaagaucgucgacgagcccgaggagcacgugcagauccacaccaucgacgggagcuccggcguggucaaccccgugauggagccgaucuacgacgagcccaccaccacgaccagcgugccccugugaggacuaguuauaagacugacuagcccgaugggccucccaacgggcccuccuccccuccuugcaccgagauuaauaaaaaaaaaaaaaaaaaaaaaaaaaaaaaaaaaaaaaaaaaaaaaaaaaaaaaaaaaaaaaaaaugcaucccccccccccccccccccccccccccccccaaaggcucuuuucagagccaccagaauu

SEQ ID NO: 22387 - RNA, 1045 nt, Artificial Sequence
  SARS-CoV-2__MT846666.1__ORF3a protein mRNA gc
aggagaaagcuuaccauggaccuguucaugcgcaucuucaccaucggcaccgugacgcucaagcagggggagaucaaggacgccacccccagcuacuucguccgggccaccgcgaccaucccgauccaggccucccugcccuucggcuggcugaucguggggguggcccuccuggccgucuuccagagcgccuccaagaucaucacgcugaagaagcgcuggcagcucgcgcugagcaagggcgugcacuucgugugcaaccugcuccugcuguucgucaccguguacucccaccuccugcugguggccgccgggcucgaggcccccuuccuguaccuguacgcgcucgucuacuuccugcagagcaucaacuucgugcggaucaucaugcgccuguggcucugcuggaagugccgguccaagaacccccugcuguacgacgccaacuacuuccucugcuggcacaccaacugcuacgacuacugcaucccguacaacagcgugaccuccagcaucgucaucacguccggcgacggcaccaccagccccaucuccgagcacgacuaccagaucgggggcuacaccgagaagugggagagcggggugaaggacugcgugguccugcacuccuacuucacgagcgacuacuaccagcuguacuccacccagcucagcaccgacaccggcguggagcacgugacguucuucaucuacaacaagaucgucgacgagcccgaggagcacgugcagauccacaccaucgacggguccagcggcguggucaaccccgugauggagccgaucuacgacgagcccaccaccacgaccagcgugccccugugaggacuaguuauaagacugacuagcccgaugggccucccaacgggcccuccuccccuccuugcaccgagauuaauaaaaaaaaaaaaaaaaaaaaaaaaaaaaaaaaaaaaaaaaaaaaaaaaaaaaaaaaaaaaaaaaugcaucccccccccccccccccccccccccccccccaaaggcucuuuucagagccaccagaauu

SEQ ID NO: 22388 - RNA, 1045 nt, Artificial Sequence
  SARS-CoV-2__MT846668.1__ORF3a protein mRNA gc
aggagaaagcuuaccauggaccuguucaugcgcaucuucaccaucggcaccgugacgcucaagcagggggagaucaaggacgccacccccagcgacuucguccgggccaccgcgaccaucccgauccaggccucccugcccuucggcugguucaucguggggguggcccugcucgccgucuuccagagcgccuccaagaucaucacgcugaagaagcgcuggcagcuggcgcucagcaagggcgugcacuucgugugcaaccugcugcuccuguucgucaccguguacucccaccuccugcugguggccgccgggcuggaggcccccuuccucuaccuguacgcgcuggucuacuuccuccagagcaucaacuucgugcggaucaucaugcgccuguggcugugcuggaagugccgguccaagaacccccuccuguacgacgccaacuacuuccugugcuggcacaccaacugcuacgacuacugcaucccguacaacagcgugaccuccagcaucgucaucacguccggcgacggcaccaccagccccaucuccgagcacgacuaccagaucgggggcuacaccgagaagugggagagcggggugaaggacugcgugguccuccacuccuacuucacgagcgacuacuaccagcuguacuccacccagcugagcaccgacaccggcguggagcacgugacguucuucaucuacaacaagaucgucgacgagcccgaggagcacgugcagauccacaccaucgacggguccagcggcguggucaaccccgugauggagccgaucuacgacgagcccaccaccacgaccagcgugccccucugaggacuaguuauaagacugacuagcccgaugggccucccaacgggcccuccuccccuccuugcaccgagauuaauaaaaaaaaaaaaaaaaaaaaaaaaaaaaaaaaaaaaaaaaaaaaaaaaaaaaaaaaaaaaaaaaugcaucccccccccccccccccccccccccccccccaaaggcucuuuucagagccaccagaauu

SEQ ID NO: 22389 - RNA, 1045 nt, Artificial Sequence
  SARS-CoV-2__MT846689.1__ORF3a protein mRNA gc
aggagaaagcuuaccauggaccuguucaugcgcaucuucaccaucggcaccgugacgcucaagcagggggagaucaaggacgccacccccagcgacuucguccgggccaccgcgaccaucccgauccaggccucccugcccuucggcuggcugaucguggggguggcccuccuggccgucuuccagagcgccuccaagaucaucacgcugaagaagcgcuggcagcucgcgcugagcaagggcgugcacuucgugugcaaccugcuccugcuguucgucaccguguacucccaccuccugcugguggccgccgggcucgaggcccccuuccuguaccuguacgcgcucgucuacuuccugcagagcaucaacuucgugaucaucaucaugcggcuguggcucugcuggaagugccgcuccaagaacccccugcuguacgacgccaacuacuuccucugcuggcacaccaacugcuacgacuacugcaucccguacaacagcgugaccuccagcaucgucaucacguccggcgacggcaccaccagccccaucuccgagcacgacuaccagaucgggggcuacaccgagaagugggagagcggggugaaggacugcgugguccugcacuccuacuucacgagcgacuacuaccagcuguacuccacccagcucagcaccgacaccggcguggagcacgugacguucuucaucuacaacaagaucgucgacgagcccgaggagcacgugcagauccacaccaucgacggguccagcggcguggucaaccccgugauggagccgaucuacgacgagcccaccaccacgaccagcgugccccugugaggacuaguuauaagacugacuagcccgaugggccucccaacgggcccuccuccccuccuugcaccgagauuaauaaaaaaaaaaaaaaaaaaaaaaaaaaaaaaaaaaaaaaaaaaaaaaaaaaaaaaaaaaaaaaaaugcaucccccccccccccccccccccccccccccccaaaggcucuuuucagagccaccagaauu

SEQ ID NO: 22390 - RNA, 1045 nt, Artificial Sequence
  SARS-CoV-2__MT847210.1__ORF3a protein mRNA gc
aggagaaagcuuaccauggaccuguucaugcgcaucuucaccaucggcaccgugacgcucaagcagggggagaucaaggacgccacccccagcgacuucguccgggccaccgcgaccaucccgauccaggccucccugcccuucggcuggcugaucgugguggucgcccuccuggccguguuccagagcgccuccaagaucaucacgcugaagaagcgcuggcagcucgcgcugagcaagggggugcacuucgucugcaaccugcuccugcuguucgugaccguguacucccaccuccugcuggucgccgccggccucgaggcccccuuccuguaccuguacgcgcucguguacuuccugcagagcaucaacuucgugcggaucaucaugcgccuguggcucugcuggaagugccgguccaagaacccccugcuguacgacgccaacuacuuccucugcuggcacaccaacugcuacgacuacugcaucccguacaacagcgucaccuccagcaucgugaucacguccggggacggcaccaccagccccaucuccgagcacgacuaccagaucggcggguacaccgagaagugggagagcggcgugaaggacugcgucgugcugcacuccuacuucacgagcgacuacuaccagcuguacuccacccagcucagcaccgacaccgggguggagcacgucacguucuucaucuacaacaagaucguggacgagcccgaggagcacgugcagauccacaccaucgacggcuccagcggggucgugaaccccgugauggagccgaucuacgacgagcccaccaccacgaccagcgucccccugugaggacuaguuauaagacugacuagcccgaugggccucccaacgggcccuccuccccuccuugcaccgagauuaauaaaaaaaaaaaaaaaaaaaaaaaaaaaaaaaaaaaaaaaaaaaaaaaaaaaaaaaaaaaaaaaaugcaucccccccccccccccccccccccccccccccaaaggcucuuuucagagccaccagaauu

SEQ ID NO: 22391 - RNA, 1045 nt, Artificial Sequence
  SARS-CoV-2__MT847211.1__ORF3a protein mRNA gc
aggagaaagcuuaccauggaccuguucaugcgcaucuucaccaucggcaccgugacgcucaagcagggggagaucaaggacgccacccccagcgacuucguccgggccaccgcgaccaucccgauccaggccucccugcccuucggcuggcugaucguggggguggcccuccuggccgucuuccagagcgccuccaagaucaucacgcugaagaagcgcuggcagcucgcgcugagcaagggcgugcacuucgugugcaaccugcuccugcuguucgucaccguguacucccaccuccugcugguggccgccgggcucgaggcccccuuccuguaccuguacgcgcucgucuacuuccugcagagcaucaacuucgugcggaucaucaugcgccuguggcucugcuggaagugccgguccaagaacccccugcuguacgacgccaacuacuuccucugcuggcacaccaacugcuacgacuacugcaucccguacaacagcgugaccuccagcaucgucaucacgcugggcgacggcaccaccucccccaucagcgagcacgacuaccagaucgggggcuacaccgagaagugggaguccggggugaaggacugcgugguccugcacagcuacuucacguccgacuacuaccagcucuacagcacccagcuguccaccgacaccggcguggagcacgugacguucuucaucuacaacaagaucgucgacgagcccgaggagcacgugcagauccacaccaucgacgggagcuccggcguggucaaccccgugauggagccgaucuacgacgagcccaccaccacgaccagcgugccccugugaggacuaguuauaagacugacuagcccgaugggccucccaacgggcccuccuccccuccuugcaccgagauuaauaaaaaaaaaaaaaaaaaaaaaaaaaaaaaaaaaaaaaaaaaaaaaaaaaaaaaaaaaaaaaaaaugcaucccccccccccccccccccccccccccccccaaaggcucuuuucagagccaccagaauu

SEQ ID NO: 22392 - RNA, 1045 nt, Artificial Sequence
  SARS-CoV-2__MT847220.1__ORF3a protein mRNA gc
aggagaaagcuuaccauggaccuguucaugcgcaucuucaccaucggcaccgugacgcucaagcagggggagaucaaggacgccacccccagcgacuucguccgggccaccgcgaccaucccgauccaggccucccugcccuucggcuggcugaucguggggguggcccuccuggccgucuuccagagcgccuccaagaucaucacgcugaagaagcgcuggcagcucgcgcugagcaagggcgugcacuucgugugcaaccugcuccugcuguucgucaccguguacucccaccuccugcugguggccgccgggcucgaggcccccuuccuguaccuguacgcgcucgucuacuuccugcagagcaucaacuucgugcggaucaucaugcgccuguggcucugcuggaagugccgguccaagaacccccugcuguacgacgccaacuacuuccucugcuggcacaccaacugcuacuacuacugcaucccguacaacagcgugaccuccagcaucgucaucacguccggcgacggcaccaccagccccaucuccgagcacgacuaccagaucgggggcuacaccgagaagugggagagcggggugaaggacugcgugguccugcacuccuacuucacgagcgacuacuaccagcuguacuccacccagcucagcaccgacaccggcguggagcacgugacguucuucaucuacaacaagaucgucgacgagcccgaggagcacgugcagauccacaccaucgacggguccagcggcguggucaaccccgugauggagccgaucuacgacgagcccaccaccacgaccagcgugccccugugaggacuaguuauaagacugacuagcccgaugggccucccaacgggcccuccuccccuccuugcaccgagauuaauaaaaaaaaaaaaaaaaaaaaaaaaaaaaaaaaaaaaaaaaaaaaaaaaaaaaaaaaaaaaaaaaugcaucccccccccccccccccccccccccccccccaaaggcucuuuucagagccaccagaauu

SEQ ID NO: 22393 - RNA, 1045 nt, Artificial Sequence
  SARS-CoV-2__MT847228.1__ORF3a protein mRNA gc
aggagaaagcuuaccauggaccuguucaugcgcaucuucaccaucggcaccgugacgcucaagcagggggagaucaaggacgccacccccagcgacuucguccgggccaccgcgaccaucccgauccaggccucccugcccuucggcuggcugaucguggggguggcccuccuggccgucuuccagagcgccuccaagaucaucacgcugaagaagcgcuggcagcucgcgcugagcaagggcgugcacuucgugugcaaccugcuccugcuguucgucaccguguacucccaccuccugcugguggccgccgggcucgaggcccccuuccuguaccuguacgcgcucgucuacuuccugcagagcaucaacuucgugcggaucaucaugcgccuguggcucugcuggaagugccgguccaagaacccccugcuguacgacgccaacuacuuccucugcuggcacaccaacugcuacgacuacugcaucccguacaacagcgugaccuccagcaucgucaucacguccggcgacggcaccaccagccccaucuccgagcacgacuaccagaucgggggcuacaccgagaagugggagagcggggugaaggacugcgugguccugcacuccuacuucacgagcgacuacuaccagcuguacuccacccagcucagcaccgacaccggcguggagcacgugacguucuucaucuacaacaagaucgucgacgaccccgaggcccacgugcagauccacaccaucgacggguccagcggcguggucaaccccgugauggagccgaucuacgacgagcccaccaccacgaccagcgugccccugugaggacuaguuauaagacugacuagcccgaugggccucccaacgggcccuccuccccuccuugcaccgagauuaauaaaaaaaaaaaaaaaaaaaaaaaaaaaaaaaaaaaaaaaaaaaaaaaaaaaaaaaaaaaaaaaaugcaucccccccccccccccccccccccccccccccaaaggcucuuuucagagccaccagaauu

SEQ ID NO: 22394 - RNA, 1045 nt, Artificial Sequence
  SARS-CoV-2__MT843309.1__ORF3a protein mRNA gc
aggagaaagcuuaccauggaccuguucaugcgcaucuucaccaucggcaccgugacgcucaagcagggggagaucaaggacgccacccccagcgacuucguccgggccaccgcgaccaucccgauccaggccucccugcccuucggcuggcugaucguggggguggcccuccuggccgucuuccacagcgccuccaagaucaucacgcugaagaagcgcuggcagcucgcgcuguucaagggcgugcacuucgugugcaaccugcuccugcuguucgucaccguguacagccaccuccugcugguggccgccgggcucgaggcccccuuccuguaccuguacgcgcucgucuacuuccugcaguccaucaacuucgugcggaucaucaugcgccuguggcucugcuggaagugccggagcaagaacccccugcuguacgacgccaacuacuuccucugcuggcacaccaacugcuacgacuacugcaucccguacaacuccgugaccagcuccaucgucaucacgagcggcgacggcaccaccucccccaucagcgagcacgacuaccagaucgggggcuacaccgagaagugggaguccggggugaaggacugcgugguccugcacagcuacuucacguccgacuacuaccagcuguacagcacccagcucuccaccgacaccggcguggagcacgugacguucuucaucuacaacaagaucgucgacgagcccgaggagcacgugcagauccacaccaucgacgggagcuccggcguggucaaccccgugauggagccgaucuacgacgagcccaccaccacgaccagcgugccccugugaggacuaguuauaagacugacuagcccgaugggccucccaacgggcccuccuccccuccuugcaccgagauuaauaaaaaaaaaaaaaaaaaaaaaaaaaaaaaaaaaaaaaaaaaaaaaaaaaaaaaaaaaaaaaaaaugcaucccccccccccccccccccccccccccccccaaaggcucuuuucagagccaccagaauu

SEQ ID NO: 22395 - RNA, 1045 nt, Artificial Sequence
  SARS-CoV-2__MT844023.1__ORF3a protein mRNA gc
aggagaaagcuuaccauggaccuguucaugcgcaucuucaccaucggcaccgugacgcucaagcagggggagaucaaguacgccacccccagcgacuucguccgggccaccgcgaccaucccgauccaggccucccugcccuucggcuggcugaucguggggguggcccuccuggccgucuuccagagcgccuccaagaucaucacgcugaagaagcgcuggcagcucgcgcugagcaagggcgugcacuucgugugcaaccugcuccugcuguucgucaccguguacucccaccuccugcugguggccgccgggcucgaggcccccuuccuguaccuguacgcgcucgucuacuuccugcagagcaucaacuucgugcggaucaucaugcgccuguggcucugcuggaagugccgguccaagaacccccugcuguacgacgccaacuacuuccucugcuggcacaccaacugcuacgacuacugcaucccguacaacagcgugaccuccagcaucgucaucacguccggcgacggcaccaccagccccaucuccgagcacgacuaccagaucgggggcuacaccgagaagugggagagcggggugaaggacugcgugguccugcacuccuacuucacgagcgacuacuaccagcuguacuccacccagcucagcaccgacaccggcguggagcacgugacguucuucaucuacaacaagaucgucgacgagcccgaggagcacgugcagauccacaccaucgacggguccagcggcguggucaaccccgugauggagccgaucuacgacgagcccaccaccacgaccagcgugccccugugaggacuaguuauaagacugacuagcccgaugggccucccaacgggcccuccuccccuccuugcaccgagauuaauaaaaaaaaaaaaaaaaaaaaaaaaaaaaaaaaaaaaaaaaaaaaaaaaaaaaaaaaaaaaaaaaugcaucccccccccccccccccccccccccccccccaaaggcucuuuucagagccaccagaauu

SEQ ID NO: 22396 - RNA, 1045 nt, Artificial Sequence
  SARS-CoV-2__MT844027.1__ORF3a protein mRNA gc
aggagaaagcuuaccauggaccuguucaugcgcaucuucaccaucggcaccgugacgcucaagcagggggagaucaaggacgccacccccagcgacuucguccgggccaccgcgaccaucccgauccaggccucccugcccuucggcuggcugaucguggggguggcccuccuggccgucuuccacagcgccuccaagaucaucacgcugaagaagcgcuggcagcucgcgcugagcaagggcgugcacuucgugugcaaccugcuccugcuguucgucaccguguacucccaccuccugcugguggccgccgggcucgaggcccccuuccuguaccuguacgcgcucgucuacuuccugcagagcaucaacuucgugcggaucaucaugcgccuguggcucugcuggaagugccgguccaagaacccccugcuguacgacgccaacuacuuccucugcuggcacaccaacugcuacgacuacugcaucccguacaacagcgugaccuccagcaucgucaucacguccggcgacggcaccaccagccccaucuccgagcacgacuaccagaucgggggcuacaccgagaagugggagagcggggugaaggacugcgugguccugcacuccuacuucacgagcgacuacuaccagcuguacuccgcccagcucagcaccgacaccggcguggagcacgugaccuucuucaucuacaacaagaucgucgacgagcccgaggagcacgugcagauccacacgaucgacggguccagcggcguggucaaccccgugauggagccgaucuacgacgagcccaccaccaccacgagcgugccccugugaggacuaguuauaagacugacuagcccgaugggccucccaacgggcccuccuccccuccuugcaccgagauuaauaaaaaaaaaaaaaaaaaaaaaaaaaaaaaaaaaaaaaaaaaaaaaaaaaaaaaaaaaaaaaaaaugcaucccccccccccccccccccccccccccccccaaaggcucuuuucagagccaccagaauu

SEQ ID NO: 22397 - RNA, 1045 nt, Artificial Sequence
  SARS-CoV-2__MT844038.1__ORF3a protein mRNA gc
aggagaaagcuuaccauggaccuguucaugcgcaucuucaccaucggcaccgugacgcucaagcagggggagaucaaggacgccacccccagcgacuucguccgggccaccgcgaccaucccgauccaggccucccugcccuucggcuggcugaucguggggguggcccuccuggccgucuuccagagcgccuccaagaucaucacgcugaagaagcgcuggcagcucgcgcugagcaagggcguguacuucgugugcaaccugcuccugcuguucgucaccguguacucccaccuccugcugguggccgccgggcucgaggcccccuuccuguaccuguacgcgcucgucuacuuccugcagagcaucaacuucgugcggaucaucaugcgccuguggcucugcuggaagugccgguccaagaacccccugcuguacgacgccaacuacuuccucugcuggcacaccaacugcuacgacuacugcaucccguacaacagcgugaccuccagcaucgucaucacguccggcgacggcaccaccagccccaucuccgagcacgacuaccagaucgggggcuacaccgagaagugggagagcggggugaaggacugcgugguccugcacuccuacuucacgagcgacuacuaccagcuguacuccacccagcucagcaccgacaccggcguggagcacgugacguucuucaucuacaacaagaucgucgacgagcccgaggagcacgugcagauccacaccaucgacggguccagcggcguggucaaccccgugauggagccgaucuacgacgagcccaccaccacgaccagcgugccccugugaggacuaguuauaagacugacuagcccgaugggccucccaacgggcccuccuccccuccuugcaccgagauuaauaaaaaaaaaaaaaaaaaaaaaaaaaaaaaaaaaaaaaaaaaaaaaaaaaaaaaaaaaaaaaaaaugcaucccccccccccccccccccccccccccccccaaaggcucuuuucagagccaccagaauu

SEQ ID NO: 22398 - RNA, 1045 nt, Artificial Sequence
  SARS-CoV-2__MT844046.1__ORF3a protein mRNA gc
aggagaaagcuuaccauggaccuguucaugcgcaucuucaccaucggcaccgugacgcucaagcagggggagaucaaggacgccacccccagcgacuucguccgggccaccgcgaccaucccgauccaggccucccugcccuucggcuggcugaucguggggguggcccuccuggccgucuuccacagcgccuccaagaucaucacgcugaagaagcgcuggcagcucgcgcugagcaagggcgugcacuucgugugcaaccugcuccugcuguucgucaccuucuacucccaccuccugcugguggccgccgggcucgaggcccccuuccuguaccuguacgcgcucguguacuuccugcagagcaucaacuucguccggaucaucaugcgccuguggcucugcuggaagugccgguccaagaacccccugcuguacgacgccaacuacuuccucugcuggcacaccaacugcuacgacuacugcaucccguacaacagcgugaccuccagcaucgugaucacguccggcgacggcaccaccagccccaucuccgagcacgacuaccagaucgggggcuacaccgagaagugggagagcggggucaaggacugcguggugcugcacuccuacuucacgagcgacuacuaccagcuguacuccacccagcucagcaccgacaccggcgucgagcacgugacguucuucaucuacaacaagaucguggacgagcccgaggagcacguccagauccacaccaucgacggguccagcggcguggugaaccccgucauggagccgaucuacgacgagcccaccaccacgaccagcgugccccugugaggacuaguuauaagacugacuagcccgaugggccucccaacgggcccuccuccccuccuugcaccgagauuaauaaaaaaaaaaaaaaaaaaaaaaaaaaaaaaaaaaaaaaaaaaaaaaaaaaaaaaaaaaaaaaaaugcaucccccccccccccccccccccccccccccccaaaggcucuuuucagagccaccagaauu

SEQ ID NO: 22399 - RNA, 1045 nt, Artificial Sequence
  SARS-CoV-2__MT831129.1__ORF3a protein mRNA gc
aggagaaagcuuaccauggaccuguucaugcgcaucuucaccaucggcaccgugacgcucaagcagggggagaccaaggacgccacccccagcgacuucguccgggccaccuccacgaucccgauccaggcgagccugcccuucggcuggcugaucguggggguggcccuccuggccgucuuccaguccgccagcaagaucaucacccugaagaagcgcuggcagcucgcccuguccaagggcgugcacuucgugugcaaccugcuccugcuguucgucaccguguacagccaccuccugcugguggcggccgggcucgaggcccccuuccuguaccuguacgcccucgucuacuuccugcaguccaucaacuucgugcggaucaucaugcgccuguggcucugcuggaagugccggagcaagaacccccugcuguacgacgcgaacuacuuccucugcuggcacaccaacugcuacgacuacugcaucccguacaacuccgugacgagcuccaucgucaucaccagcggcgacggcaccaccucccccaucagcgagcacgacuaccagaucgggggcuacacggagaagugggaguccggggugaaggacugcgugguccugcacagcuacuucaccuccgacuacuaccagcuguacagcacccagcucuccaccgacacgggcguggagcacgugaccuucuucaucuacaacaagaucgucgacgagcccgaggagcacgugcagauccacaccaucgacgggagcagcggcguggucaaccccgugauggagccgaucuacgacgagcccaccacgaccaccuccgugccccugugaggacuaguuauaagacugacuagcccgaugggccucccaacgggcccuccuccccuccuugcaccgagauuaauaaaaaaaaaaaaaaaaaaaaaaaaaaaaaaaaaaaaaaaaaaaaaaaaaaaaaaaaaaaaaaaaugcaucccccccccccccccccccccccccccccccaaaggcucuuuucagagccaccagaauu

SEQ ID NO: 22400 - RNA, 1045 nt, Artificial Sequence
  SARS-CoV-2__MT831140.1__ORF3a protein mRNA gc
aggagaaagcuuaccauggaccuguucaugcgcaucuucaccaucggcaccgugacgcucaagcagggggagaccaaggacgccacccccagcgacuucguccgggccaccgcgacgaucccgauccaggccucccugcccuucggcuggcugaucguggggguggcccuccuggccgucuuccagagcgccuccaagaucaucacccugaagaagcgcuggcagcucgcgcugagcaagggcgugcacuucgugugcaaccugcuccugcuguucgucaccguguacucccaccuccugcugguggccgccgggcucgaggcccccuuccuguaccuguacgcgcucgucuacuuccugcagagcaucaacuucgugcggaucaucaugcgccuguggcucugcuggaagugccgguccaagaacccccugcuguacgacgccaacuacuuccucugcuggcacaccaacugcuacgacuacugcaucccguacaacagcgugacguccagcaucgucaucaccuccggcgacggcaccaccagccccaucuccgagcacgacuaccagaucgggggcuacacggagaagugggagagcggggugaaggacugcgugguccugcacuccuacuucaccagcgacuacuaccagcuguacuccacccagcucagcaccgacacgggcguggagcacgugaccuucuucaucuacaacaagaucgucgacgagcccgaggagcacgugcagauccacaccaucgacggguccagcggcguggucaaccccgugauggagccgaucuacgacgagcccaccacgaccaccagcgugccccugugaggacuaguuauaagacugacuagcccgaugggccucccaacgggcccuccuccccuccuugcaccgagauuaauaaaaaaaaaaaaaaaaaaaaaaaaaaaaaaaaaaaaaaaaaaaaaaaaaaaaaaaaaaaaaaaaugcaucccccccccccccccccccccccccccccccaaaggcucuuuucagagccaccagaauu

SEQ ID NO: 22401 - RNA, 1045 nt, Artificial Sequence
  SARS-CoV-2__MT831162.1__ORF3a protein mRNA gc
aggagaaagcuuaccauggaccuguucaugcgcaucuucaccaucggcaccgugacgcucaagcagggggagaucaaggacgccacccccagcgacuucguccgggccaccgcgaccaucccgauccaggccucccugcccuucggcuggcugaucgugagcguggcccuccuggccgucuuccacuccgccagcaagaucaucacgcugaagaagcgcuggcagcucgcgcuguccaagggggugcacuucgugugcaaccugcuccugcuguucgucaccguguacagccaccuccugcugguggccgccggccucgaggcccccuuccuguaccuguacgcgcucgucuacuuccugcaguccaucaacuucgugcggaucaucaugcgccuguggcucugcuggaagugccggagcaagaacccccugcuguacgacgccaacuacuuccucugcuggcacaccaacugcuacgacuacugcaucccguacaacuccgugaccagcuccaucgucaucacgagcggggacggcaccaccucccccaucagcgagcacgacuaccagaucggcggguacaccgagaagugggaguccggcgugaaggacugcgugguccugcacagcuacuucacguccgacuacuaccagcuguacagcacccagcucuccaccgacaccgggguggagcacgugacguucuucaucuacaacaagaucgucgacgagcccgaggagcacgugcagauccacaccaucgacggcagcagcgggguggucaaccccgugauggagccgaucuacgacgagcccaccaccacgaccuccgugccccugugaggacuaguuauaagacugacuagcccgaugggccucccaacgggcccuccuccccuccuugcaccgagauuaauaaaaaaaaaaaaaaaaaaaaaaaaaaaaaaaaaaaaaaaaaaaaaaaaaaaaaaaaaaaaaaaaugcaucccccccccccccccccccccccccccccccaaaggcucuuuucagagccaccagaauu

SEQ ID NO: 22402 - RNA, 1045 nt, Artificial Sequence
  SARS-CoV-2__MT831177.1__ORF3a protein mRNA gc
aggagaaagcuuaccauggaccuguucaugcgcaucuucaccaucggcaccgugacgcucaagcagggggagaucaaggacgccacccccagcgacuucguccgggccaccgcgaccaucccgauccaggccucccugcccuucggcuggcugaucguggggguggcccuccuggccgucuuccagagcgccuccaagaucaucacgcugaagaagcgcuggcagcucgcgcugagcaagggcgugcacuucgugugcaaccugcuccugcuguucgucaccguguacucccaccuccugcugguggccgccgggcucgaggcccccuuccuguaccuguacgcgcucgucuacuuccugcagagcaucaacuucgugcggaucaucaugcgccuguggcucugccggaagugccgcuccaagaacccccugcuguacgacgccaacuacuuccucugcuggcacaccaacugcuacgacuacugcaucccguacaacagcgugaccuccagcaucgucaucacguccggcgacggcaccaccagccccaucuccgagcacgacuaccagaucgggggcuacaccgagaagugggagagcggggugaaggacugcgugguccugcacuccuacuucacgagcgacuacuaccagcuguacuccacccagcucagcaccgacaccggcguggagcacgugacguucuucaucuacaacaagaucgucgacgagcccgaggagcacgugcagauccacaccaucgacggguccagcggcguggucaaccccgugauggagccgaucuacgacgagcccaccaccacgaccagcgugccccugugaggacuaguuauaagacugacuagcccgaugggccucccaacgggcccuccuccccuccuugcaccgagauuaauaaaaaaaaaaaaaaaaaaaaaaaaaaaaaaaaaaaaaaaaaaaaaaaaaaaaaaaaaaaaaaaaugcaucccccccccccccccccccccccccccccccaaaggcucuuuucagagccaccagaauu

SEQ ID NO: 22403 - RNA, 1045 nt, Artificial Sequence
  SARS-CoV-2__MT831190.1__ORF3a protein mRNA gc
aggagaaagcuuaccauggaccuguucaugcgcaucuucaccaucggcaccgugacgcucaagcaggacgagaucaaggacgccacccccagcgacuucguccgggccaccgcgaccaucccgauccaggccucccugcccuucggguggcugaucgugggcguggcccuccuggccgucuuccagagcgccuccaagaucaucacgcugaagaagcgcuggcagcucgcgcugagcaagggggugcacuucgugugcaaccugcuccugcuguucgucaccguguacucccaccuccugcugguggccgccggccucgaggcccccuuccuguaccuguacgcgcucgucuacuuccugcagagcaucaacuucgugcggaucaucaugcgccuguggcucugcuggaagugccgguccaagaacccccugcuguacgacgccaacuacuuccucugcuggcacaccaacugcuacgacuacugcaucccguacaacagcgugaccuccagcaucgucaucacguccggggacggcaccaccagccccaucuccgagcacgacuaccagaucggcggguacaccgagaagugggagagcggcgugaaggacugcgugguccugcacuccuacuucacgagcgacuacuaccagcuguacuccacccagcucagcaccgacaccgggguggagcacgugacguucuucaucuacaacaagaucgucgacgagcccgaggagcacgugcagauccacaccaucgacggcuccagcgggguggucaaccccgugauggagccgaucuacgacgagcccaccaccacgaccagcgugccccugugaggacuaguuauaagacugacuagcccgaugggccucccaacgggcccuccuccccuccuugcaccgagauuaauaaaaaaaaaaaaaaaaaaaaaaaaaaaaaaaaaaaaaaaaaaaaaaaaaaaaaaaaaaaaaaaaugcaucccccccccccccccccccccccccccccccaaaggcucuuuucagagccaccagaauu

SEQ ID NO: 22404 - RNA, 1045 nt, Artificial Sequence
  SARS-CoV-2__MT831578.1__ORF3a protein mRNA gc
aggagaaagcuuaccauggaccuguucaugcgcaucuucaccaucggcaccgugacgcucaagcagggggagaucaaggacgccacccccagcgacuucguccgggccaccgcgaccaucccgauccaggccucccugcccuucggcuggcugaucguggggguggcccuccuggccgucuuccagagcgccuccaagaucaucacgcugaagaagcgcuggcagcucgcgcugagcaagggcgugcacuucgugugcaaccugcuccugcuguucgucaccguguacucccaccuccugcugguggccgucgggcucgaggcccccuuccuguaccuguacgcccucguguacuuccugcagagcaucaacuucgugcggaucaucaugcgccuguggcucugcuggaagugccgguccaagaacccccugcuguacgacgcgaacuacuuccucugcuggcacaccaacugcuacgacuacugcaucccguacaacagcgucaccuccagcaucgugaucacguccggcgacggcaccaccagccccaucuccgagcacgacuaccagaucgggggcuacaccgagaagugggagagcggggugaaggacugcgucgugcugcacuccuacuucacgagcgacuacuaccagcuguacuccacccagcucagcaccgacaccggcguggagcacgucacguucuucaucuacaacaagaucguggacgagcccgaggagcacgugcagauccacaccaucgacggguccagcggcgucgugaaccccgugauggagccgaucuacgacgagcccaccaccacgaccagcgucccccugugaggacuaguuauaagacugacuagcccgaugggccucccaacgggcccuccuccccuccuugcaccgagauuaauaaaaaaaaaaaaaaaaaaaaaaaaaaaaaaaaaaaaaaaaaaaaaaaaaaaaaaaaaaaaaaaaugcaucccccccccccccccccccccccccccccccaaaggcucuuuucagagccaccagaauu

SEQ ID NO: 22405 - RNA, 1045 nt, Artificial Sequence
  SARS-CoV-2__MT831593.1__ORF3a protein mRNA gc
aggagaaagcuuaccauggaccuguucaugcgcaucuucaccaucggcaccgugacgcucaagcagggggagaucaaggacgccacccccagcgacuucguccgggccaccgcgaccaucccgauccaggccucccugcccuucggcuggcugaucguggggguggcccuccuggccgucuuccacagcgccuccaagaucaucacgcugaagaagcgcuggcagcucgcgcugagcaagggcgugcacuucgugugcaaccugcuccugcuguucgucaccguguacucccaccuccugcugguggccgccgggcucgaggcccccuuccuguaccuguacgcgcucgucuacuuccugcagagcaucaacuucgugcggaucaucaugcgccuguggcucugcuggaagugccgguccaagaacccccugcuguacgacgccaacuacuuccucugcuggcacaccaacugcuacgacuacugcaucccguacaacagcgugaccuccagcaucgucaucacguccguggacggcaccaccagccccaucuccgagcacgacuaccagaucggcggguacaccgagaagugggagagcggcgugaaggacugcgucgugcugcacuccuacuucacgagcgacuacuaccagcuguacuccacccagcucagcaccgacaccgggguggagcacgucacguucuucaucuacaacaagaucguggacgagcccgaggagcacgugcagauccacaccaucgacggcuccagcggggucgugaaccccgugauggagccgaucuacgacgagcccaccaccacgaccagcgucccccugugaggacuaguuauaagacugacuagcccgaugggccucccaacgggcccuccuccccuccuugcaccgagauuaauaaaaaaaaaaaaaaaaaaaaaaaaaaaaaaaaaaaaaaaaaaaaaaaaaaaaaaaaaaaaaaaaugcaucccccccccccccccccccccccccccccccaaaggcucuuuucagagccaccagaauu

SEQ ID NO: 22406 - RNA, 1045 nt, Artificial Sequence
  SARS-CoV-2__MT831603.1__ORF3a protein mRNA gc
aggagaaagcuuaccauggaccuguucaugcgcaucuucaccaucggcaccgugacgcucaagcagggggagaucaaggacgccacccccagcgacuucguccgggccaccgcgaccaucccgauccaggccucccugcccuucggcuggcugaucguggggguggcccuccuggccgucuuccagagcgccuccaagaucaucacgcugaagaagcgcuggcagcucgcgcugagcaagggcgugcacuucgugugcaaccugcuccugcuguucgucaccguguacucccaccuccugcugguggccgccguccucgaggcccccuuccuguaccuguacgcgcucguguacuuccugcagagcaucaacuucgugcggaucaucaugcgccuguggcucugcuggaagugccgguccaagaacccccugcuguacgacgccaacuacuuccucugcuggcacaccaacugcuacgacuacugcaucccguacaacagcgucaccuccagcaucgugaucacguccggggacggcaccaccagccccaucuccgagcacgacuaccagaucggcggguacaccgagaagugggagagcggcgugaaggacugcgucgugcugcacuccuacuucacgagcgacuacuaccagcuguacuccacccagcucagcaccgacaccgggguggagcacgucacguucuucaucuacaacaagaucguggacgagcccgaggagcacgugcagauccacaccaucgacggcuccagcggggucgugaaccccgugauggagccgaucuacgacgagcccaccaccacgaccagcgucccccugugaggacuaguuauaagacugacuagcccgaugggccucccaacgggcccuccuccccuccuugcaccgagauuaauaaaaaaaaaaaaaaaaaaaaaaaaaaaaaaaaaaaaaaaaaaaaaaaaaaaaaaaaaaaaaaaaugcaucccccccccccccccccccccccccccccccaaaggcucuuuucagagccaccagaauu

SEQ ID NO: 22407 - RNA, 1045 nt, Artificial Sequence
  SARS-CoV-2__MT831635.1__ORF3a protein mRNA gc
aggagaaagcuuaccauggaccuguucaugcgcaucuucaccaucggcaccgugacgcucaagcagggggagaucaaggacgccacccccagcgacuucguccgggccaccgcgaccaucccgauccaggccucccugcccuucggcuggcugaucguggggguggcccuccuggccuucuuccacagcgccuccaagaucaucacgcugaagaagcgcuggcagcucgcgcugagcaagggcguccacuucgugugcaaccugcuccugcuguucgugaccgucuacucccaccuccugcugguggccgccgggcucgaggcccccuuccuguaccuguacgcgcucguguacuuccugcagagcaucaacuucguccggaucaucaugcgccuguggcucugcuggaagugccgguccaagaacccccugcuguacgacgccaacuacuuccucugcuggcacaccaacugcuacgacuacugcaucccguacaacagcgugaccuccagcaucgugaucacguccggcgacggcaccaccagccccaucuccgagcacgacuaccagaucgggggcuacaccgagaagugggagagcggggucaaggacugcguggugcugcacuccuacuucacgagcgacuacuaccagcuguacuccacccagcucagcaccgacaccggcgucgagcacgugacguucuucaucuacaacaagaucguggacgagcccgaggagcacguccagauccacaccaucgacggguccagcggcguggugaaccccgucauggagccgaucuacgacgagcccaccaccacgaccagcgugccccugugaggacuaguuauaagacugacuagcccgaugggccucccaacgggcccuccuccccuccuugcaccgagauuaauaaaaaaaaaaaaaaaaaaaaaaaaaaaaaaaaaaaaaaaaaaaaaaaaaaaaaaaaaaaaaaaaugcaucccccccccccccccccccccccccccccccaaaggcucuuuucagagccaccagaauu

SEQ ID NO: 22408 - RNA, 1045 nt, Artificial Sequence
  SARS-CoV-2__MT831646.1__ORF3a protein mRNA gc
aggagaaagcuuaccauggaccuguucaugcgcaucuucaccaucggcaccgugacgcucaagcagggggagaucaaggacgccacccccagcgacuucguccgggccaccgcgaccaucccgauccaggccucccugcccuucggcuggcugaucguggggguggcccuccuggccgucuuccagagcgccuccaagaucaucacgcugaagaagcgcuggcagcucgcgcugagcaagggcgugcacuucgugugcaaccugcuccugcuguucgucaccguguacucccaccuccugcugguggccgccgggcucgaggcccccuuccuguaccuguacgcgcucgucuacuuccugcagagcaucaacuucgugcggaucaucaugcgccuguggcucugcuggaagugccgguccaagaacccccugcuguacgacgccaacuacuuccucugcuggcacaccaacugcuacgacuacugcaucccguacaacagcgugaccuccagcaucgucaucacguccggcgacggcaccaccagccccaucuccgagcacgacuaccagaucgggggcuacaccgagaagugggagagcggggugaaggacugcgugguccugcacuccuacuucacgagcgacuacuaccagcuguacuccacccagcucagcaccgacaccggcuucgagcacgugacguucuucaucuacaacaagaucguggacgagcccgaggagcacguccagauccacaccaucgacggguccagcggcguggugaaccccgucauggagccgaucuacgacgagcccaccaccacgaccagcgugccccugugaggacuaguuauaagacugacuagcccgaugggccucccaacgggcccuccuccccuccuugcaccgagauuaauaaaaaaaaaaaaaaaaaaaaaaaaaaaaaaaaaaaaaaaaaaaaaaaaaaaaaaaaaaaaaaaaugcaucccccccccccccccccccccccccccccccaaaggcucuuuucagagccaccagaauu

SEQ ID NO: 22409 - RNA, 1045 nt, Artificial Sequence
  SARS-CoV-2__MT831682.1__ORF3a protein mRNA gc
aggagaaagcuuaccauggaccuguucaugcgcaucuucaccaucggcaccgugacgcucaagcagggggagaucaaggacgccacccccagcgacuucguccgggccaccgcgaccaucccgauccaggccucccugcccuucggcuggcugaucguggggguggcccuccuggccgucuuccagagcgccuccaagaucaucacgcugaagaagcgcuggcagcucgcgcugagcaagggcgugcacuucgugugcaaccugcuccugcuguucgucaccguguacucccaccuccugcugguggccgccgggcucgaggcccccuuccuguaccuguacgcgcucgucuacuuccugcagagcaucaacuucgugcggaucaucaugcgccuguggcucugcuggaagugccgguccaagaacccccugcuguacgacgccaacuacuuccucagcuggcacaccaacugcuacgacuacugcaucccguacaacuccgugaccagcuccaucgucaucacgagcggcgacggcaccaccucccccaucagcgagcacgacuaccagaucgggggcuacaccgagaagugggaguccggggugaaggacugcgugguccugcacagcuacuucacguccgacuacuaccagcuguacagcacccagcucuccaccgacaccggcguggagcacgugacguucuucaucuacaacaagaucgucgacgagcccgaggagcacgugcagauccacaccaucgacgggagcagcggcguggucaaccccgugauggagccgaucuacgacgagcccaccaccacgaccuccgugccccugugaggacuaguuauaagacugacuagcccgaugggccucccaacgggcccuccuccccuccuugcaccgagauuaauaaaaaaaaaaaaaaaaaaaaaaaaaaaaaaaaaaaaaaaaaaaaaaaaaaaaaaaaaaaaaaaaugcaucccccccccccccccccccccccccccccccaaaggcucuuuucagagccaccagaauu

SEQ ID NO: 22410 - RNA, 1045 nt, Artificial Sequence
  SARS-CoV-2__MT831729.1__ORF3a protein mRNA gc
aggagaaagcuuaccauggaccuguucaugcgcaucuucaccaucggcaccgugauccucaagcagggggagaucaaggacgccacgcccagcgacuucguccgggccaccgcgaccaucccgauccaggccucccugcccuucggcuggcugaucguggggguggcccuccuggccgucuuccacagcgccuccaagaucaucacccugaagaagcgcuggcagcucgcgcugagcaagggcgugcacuucgugugcaaccugcuccugcuguucgucacgguguacucccaccuccugcugguggccgccgggcucgaggcccccuuccuguaccuguacgcgcucgucuacuuccugcagagcaucaacuucgugcggaucaucaugcgccuguggcucugcuggaagugccgguccaagaacccccugcuguacgacgccaacuacuuccucugcuggcacaccaacugcuacgacuacugcaucccguacaacagcgugaccuccagcaucgucaucaccuccggcgacggcacgaccagccccaucuccgagcacgacuaccagaucgggggcuacaccgagaagugggagagcggggugaaggacugcgugguccugcacuccuacuucaccagcgacuacuaccagcuguacuccacgcagcucagcaccgacaccggcguggagcacgugaccuucuucaucuacaacaagaucgucgacgagcccgaggagcacgugcagauccacacgaucgacggguccagcggcguggucaaccccgugauggagccgaucuacgacgagcccaccaccaccacgagcgugccccugugaggacuaguuauaagacugacuagcccgaugggccucccaacgggcccuccuccccuccuugcaccgagauuaauaaaaaaaaaaaaaaaaaaaaaaaaaaaaaaaaaaaaaaaaaaaaaaaaaaaaaaaaaaaaaaaaugcaucccccccccccccccccccccccccccccccaaaggcucuuuucagagccaccagaauu

SEQ ID NO: 22411 - RNA, 1045 nt, Artificial Sequence
  SARS-CoV-2__MT831771.1__ORF3a protein mRNA gc
aggagaaagcuuaccauggaccuguucaugcgcaucuucaccaucggcaccgugacgcucaagcagggggagaucaaggacgccacccccagcgacuucguccgggccaccgcgaccaucccgauccaggccuccuuccccuucggcuggcugaucguggggguggcccugcucgccgucuuccagagcgccuccaagaucaucacgcugaagaagcgcuggcagcuggcgcucagcaagggcgugcacuucgugugcaaccugcugcuccuguucgucaccguguacucccaccuccugcugguggccgccgggcuggaggcccccuuccucuaccuguacgcgcuggucuacuuccuccagagcaucaacuucgugcggaucaucaugcgccuguggcugugcuggaagugccgguccaagaacccccuccuguacgacgccaacuacuuccugugcuggcacaccaacugcuacgacuacugcaucccguacaacagcgugaccuccagcaucgucaucacguccggcgacggcaccaccagccccaucuccgagcacgacuaccagaucgggggcuacaccgagaagugggagagcggggugaaggacugcgugguccuccacuccuacuucacgagcgacuacuaccagcuguacuccacccagcugagcaccgacaccggcguggagcacgugacguucuucaucuacaacaagaucgucgacgagcccgaggagcacgugcagauccacaccaucgacggguccagcggcguggucaaccccgugauggagccgaucuacgacgagcccaccaccacgaccagcgugccccucugaggacuaguuauaagacugacuagcccgaugggccucccaacgggcccuccuccccuccuugcaccgagauuaauaaaaaaaaaaaaaaaaaaaaaaaaaaaaaaaaaaaaaaaaaaaaaaaaaaaaaaaaaaaaaaaaugcaucccccccccccccccccccccccccccccccaaaggcucuuuucagagccaccagaauu

SEQ ID NO: 22412 - RNA, 1045 nt, Artificial Sequence
  SARS-CoV-2__MT831850.1__ORF3a protein mRNA gc
aggagaaagcuuaccauggaccuguucaugcgcaucuucaccaucggcaccgugacgcucaagcagggggagaucaaggacgccacccccagcgacuucguccgggccaccgcgaccaucccgauccaggccucccugcccuucggcuggcugaucguggggguggcccuccugacggucuuccacagcgccuccaagaucaucacccugaagaagcgcuggcagcucgcccugagcaagggcgugcacuucgugugcaaccugcuccugcuguucgucaccguguacucccaccuccugcugguggcggccgggcucgaggcccccuuccuguaccuguacgcccucgucuacuuccugcagagcaucaacuucgugcggaucaucaugcgccuguggcucugcuggaagugccgguccaagaacccccugcuguacgacgcgaacuacuuccucugcuggcacaccaacugcuacgacuacugcaucccguacaacagcgugacguccagcaucgucaucaccuccggcgacggcaccaccagccccaucuccgagcacgacuaccagaucgggggcuacacggagaagugggagagcggggugaaggacugcgugguccugcacuccuacuucaccagcgacuacuaccagcuguacuccacccagcucagcaccgacacgggcguggagcacgugaccuucuucaucuacaacaagaucgucgacgagcccgaggagcacgugcagauccacaccaucgacggguccagcggcguggucaaccccgugauggagccgaucuacgacgagcccaccacgaccaccagcgugccccugugaggacuaguuauaagacugacuagcccgaugggccucccaacgggcccuccuccccuccuugcaccgagauuaauaaaaaaaaaaaaaaaaaaaaaaaaaaaaaaaaaaaaaaaaaaaaaaaaaaaaaaaaaaaaaaaaugcaucccccccccccccccccccccccccccccccaaaggcucuuuucagagccaccagaauu

SEQ ID NO: 22413 - RNA, 1045 nt, Artificial Sequence
  SARS-CoV-2__MT833965.1__ORF3a protein mRNA gc
aggagaaagcuuaccauggaccuguucaugcgcaucuucaccaucggcaccgugacgcucaagcagggggagaucaaguacgccacccccagcgacuucguccgggccaccgcgaccaucccgauccaggccucccugcccuucggcuggcugaucguggggguggcccuccuggccgucuuccacagcgccuccaagaucaucacgcugaagaagcgcuggcagcucgcgcugagcaagggcgugcacuucgugugcaaccugcuccugcuguucgucaccguguacucccaccuccugcugguggccgccgggcucgaggcccccuuccuguaccuguacgcgcucgucuacuuccugcagagcaucaacuucgugcggaucaucaugcgccuguggcucugcuggaagugccgguccaagaacccccugcuguacgacgccaacuacuuccucugcuggcacaccaacugcuacgacuacugcaucccguacaacagcgugaccuccagcaucgucaucacguccggcgacggcaccaccagccccaucuccgagcacgacuaccagaucgggggcuacaccgagaagugggagagcggggugaaggacugcgugguccugcacuccuacuucacgagcgacuacuaccagcuguacuccacccagcucagcaccgacaccggcguggagcacgugacguucuucaucuacaacaagaucgucgacgagcccgaggagcacgugcagauccacaccaucgacggguccagcggcguggucaaccccgugauggagccgaucuacgacgagcccaccaccacgaccagcgugccccugugaggacuaguuauaagacugacuagcccgaugggccucccaacgggcccuccuccccuccuugcaccgagauuaauaaaaaaaaaaaaaaaaaaaaaaaaaaaaaaaaaaaaaaaaaaaaaaaaaaaaaaaaaaaaaaaaugcaucccccccccccccccccccccccccccccccaaaggcucuuuucagagccaccagaauu

SEQ ID NO: 22414 - RNA, 1045 nt, Artificial Sequence
  SARS-CoV-2__MT833976.1__ORF3a protein mRNA gc
aggagaaagcuuaccauggaccuguucaugcgcaucuucaccaucggcaccgugacgcucaagcagggggagaucaaggacgccacccccagcgacuucguccgggccaccgcgaccaucccgauccaggccucccugcccuucggcuggcugaucguggggguggcccuccuggccgucuuccagagcgccuccaagaucaucacgcugaagaagcgcuggcagcucgcgcugagcaagggcgugcacuucgugugcaaccugcuccugcuguuccucaccgucuacucccaccuccugcugguggccgccgggcuggaggcccccuuccuguaccucuacgcgcugguguacuuccugcagagcaucaacuucguccggaucaucaugcgccucuggcugugcuggaagugccgguccaagaacccccugcucuacgacgccaacuacuuccugugcuggcacaccaacugcuacgacuacugcaucccguacaacagcgugaccuccagcaucgugaucacguccggcgacggcaccaccagccccaucuccgagcacgacuaccagaucgggggcuacaccgagaagugggagagcggggucaaggacugcguggugcugcacuccuacuucacgagcgacuacuaccagcucuacuccacccagcugagcaccgacaccggcgucgagcacgugacguucuucaucuacaacaagaucguggacgagcccgaggagcacguccagauccacaccaucgacggguccagcggcguggugaaccccgucauggagccgaucuacgacgagcccaccaccacgaccagcgugccccugugaggacuaguuauaagacugacuagcccgaugggccucccaacgggcccuccuccccuccuugcaccgagauuaauaaaaaaaaaaaaaaaaaaaaaaaaaaaaaaaaaaaaaaaaaaaaaaaaaaaaaaaaaaaaaaaaugcaucccccccccccccccccccccccccccccccaaaggcucuuuucagagccaccagaauu

SEQ ID NO: 22415 - RNA, 1045 nt, Artificial Sequence
  SARS-CoV-2__MT833985.1__ORF3a protein mRNA gc
aggagaaagcuuaccauggaccuguucaugcgcaucuucaccaucggcaccgugacgcucaagcagggggagaucaaggacgccacccccagcgacuucguccgggccaccgcgaccaucccgauccaggccucccugcccuucggcuggcugaucguggggguggcccuccuggccgucuuccagagcgccuccaagaucaucacgcugaagaagcgcuggcagcucgcgcugagcaagggcgugcacuucgugugcaaccugcuccugcuguucgucaccguguacucccaccuccugcugguggccgccgggcucgaggcccccuuccuguaccuguacgcgcucgucuacuuccugcagagcaucaacuucgugcggaucaucaugcgccuguggcucugcuggaagugccgguccaagaacccccugcuguacgacgccaacuacuuccucugcuggcacaccaacugcuacgacuacugcaucccguacaacagcgugaccuccagcaucgucaucacguccggcgacggcaccaccauccccaucagcgagcacgacuaccagaucgggggcuacaccgagaagugggaguccggggugaaggacugcgugguccugcacagcuacuucacguccgacuacuaccagcuguacagcacccagcucuccaccgacaccggcguggagcacgugacguucuucaucuacaacaagaucgucgacgagcccgaggagcacgugcagauccacaccaucgacgggagcuccggcguggucaaccccgugauggagccgaucuacgacgagcccaccaccacgaccagcgugccccugugaggacuaguuauaagacugacuagcccgaugggccucccaacgggcccuccuccccuccuugcaccgagauuaauaaaaaaaaaaaaaaaaaaaaaaaaaaaaaaaaaaaaaaaaaaaaaaaaaaaaaaaaaaaaaaaaugcaucccccccccccccccccccccccccccccccaaaggcucuuuucagagccaccagaauu

SEQ ID NO: 22416 - RNA, 1045 nt, Artificial Sequence
  SARS-CoV-2__MT834019.1__ORF3a protein mRNA gc
aggagaaagcuuaccauggaccuguucaugcgcaucuucaccaucggcaccgugacgcucaagcagggggagaucaaggacgccacccccagcgacuucguccgggccaccgcgaccaucccgauccaggccucccugcccuucggcuggcugaucguggggguggcccuccuggccgucuuccagagcgccuccaagaucaucacgcugaagaagcgcuggcagcucgcgcugagcaagggcgugcacuucgugugcaaccugcuguuccuguucgucaccguguacucccaccuccuccugguggccgccgggcuggaggcccccuuccucuaccuguacgcgcuggucuacuuccuccagagcaucaacuucgugcggaucaucaugcgccuguggcugugcuggaagugccgguccaagaacccccuccuguacgacgccaacuacuuccugugcuggcacaccaacugcuacgacuacugcaucccguacaacagcgugaccuccagcaucgucaucacguccggcgacggcaccaccagccccaucuccgagcacgacuaccagaucgggggcuacaccgagaagugggagagcggggugaaggacugcgugguccuccacuccuacuucacgagcgacuacuaccagcuguacuccacccagcugagcaccgacaccggcguggagcacgugacguucuucaucuacaacaagaucgucgacgagcccgaggagcacgugcagauccacaccaucgacggguccagcggcguggucaaccccgugauggagccgaucuacgacgagcccaccaccacgaccagcgugccccucugaggacuaguuauaagacugacuagcccgaugggccucccaacgggcccuccuccccuccuugcaccgagauuaauaaaaaaaaaaaaaaaaaaaaaaaaaaaaaaaaaaaaaaaaaaaaaaaaaaaaaaaaaaaaaaaaugcaucccccccccccccccccccccccccccccccaaaggcucuuuucagagccaccagaauu

SEQ ID NO: 22417 - RNA, 1045 nt, Artificial Sequence
  SARS-CoV-2__MT834027.1__ORF3a protein mRNA gc
aggagaaagcuuaccauggaccuguucaugcgcaucuucaccaucggcaccgugacgcucaagcagggggagaccaaggacgccacccccagcgacuucguccgggccaccgcgacgaucccgauccaggccucccugcccuucggcuggcugaucguggggguggcccuccuggccgucuuccagagcgccuccaagaucaucacccugaagaagcgcuggcagcucgcgcugagcaagggcgugcacuucgugugcaaccugcuguuccuguucgucaccguguacucccaccuccuccugguggccgccgggcuggaggcccccuuccucuaccuguacgcgcuggucuacuuccuccagagcaucaacuucgugcggaucaucaugcgccuguggcugugcuggaagugccgguccaagaacccccuccuguacgacgccaacuacuuccugugcuggcacaccaacugcuacgacuacugcaucccguacaacagcgugacguccagcaucgucaucaccuccggcgacggcaccaccagccccaucuccgagcacgacuaccagaucgggggcuacacggagaagugggagagcggggugaaggacugcgugguccuccacuccuacuucaccagcgacuacuaccagcuguacuccacccagcugagcaccgacacgggcguggagcacgugaccuucuucaucuacaacaagaucgucgacgagcccgaggagcacgugcagauccacaccaucgacggguccagcggcguggucaaccccgugauggagccgaucuacgacgagcccaccacgaccaccagcgugccccucugaggacuaguuauaagacugacuagcccgaugggccucccaacgggcccuccuccccuccuugcaccgagauuaauaaaaaaaaaaaaaaaaaaaaaaaaaaaaaaaaaaaaaaaaaaaaaaaaaaaaaaaaaaaaaaaaugcaucccccccccccccccccccccccccccccccaaaggcucuuuucagagccaccagaauu

SEQ ID NO: 22418 - RNA, 1045 nt, Artificial Sequence
  SARS-CoV-2__MT834080.1__ORF3a protein mRNA gc
aggagaaagcuuaccauggaccuguucaugcgcaucuucaccaucggcaccgugacgcucaagcagggggagaucaaggacgccacccccagcgacuucguccgggccaccgcgaccaucccgauccaggcgccccugcccuucggcuggcugaucguggggguggcccuccuggccgucuuccacuccgccagcaagaucaucacgcugaagaagcgcuggcagcucgcccuguccaagggcgugcacuucgugugcaaccugcuccugcuguucgucaccguguacagccaccuccugcugguggccgccgggcucgaggcccccuuccuguaccuguacgcgcucgucuacuuccugcaguccaucaacuucgugcggaucaucaugcgccuguggcucugcuggaagugccggagcaagaacccgcugcuguacgacgccaacuacuuccucugcuggcacaccaacugcuacgacuacugcauccccuacaacuccgugaccagcuccaucgucaucacgagcggcgacggcaccaccucccccaucagcgagcacgacuaccagaucgggggcuacaccgagaagugggaguccggggugaaggacugcgugguccugcacagcuacuucacguccgacuacuaccagcuguacagcacccagcucuccaccgacaccggcguggagcacgugacguucuucaucuacaacaagaucgucgacgagcccgaggagcacgugcagauccacaccaucgacgggagcuccggcguggucaacccggugauggagcccaucuacgacgagcccaccaccacgaccagcgugccccugugaggacuaguuauaagacugacuagcccgaugggccucccaacgggcccuccuccccuccuugcaccgagauuaauaaaaaaaaaaaaaaaaaaaaaaaaaaaaaaaaaaaaaaaaaaaaaaaaaaaaaaaaaaaaaaaaugcaucccccccccccccccccccccccccccccccaaaggcucuuuucagagccaccagaauu

SEQ ID NO: 22419 - RNA, 1045 nt, Artificial Sequence
  SARS-CoV-2__MT834651.1__ORF3a protein mRNA gc
aggagaaagcuuaccauggaccuguucaugcgcaucuucaccaucggcaccgugacgcucaagcagggggagaucaaggacgccacccccagcgacuucguccgggccaccgcgaccaucccgauccaggccucccugcccuucggcuggcugaucguggggguggcccuccuggccgucuuccagagcgccuccaagaucaucacgcugaagaagcgcuggcagcucgcgcugagcaagggcgugcacuucgugugcaaccugcuccugcuguucgucaccguguacucccaccuccugcugguggccgccgggcucgaggcccccuuccuguaccuguacgcgcucgucuacuuccugcagagcaucaacuucgugcggaucaucaugcgccuguggcucugcuggaagugccgguccaagaacccccugcuguacgacgccaacuacuuccucugcuggcacaccaacugcuacgacuacugcaucccguacaacagcgugaccuccagcaucgucaucacguccggcgacggcaccaccagccccaucuccgagcacgacuaccagaucgggggcuacaccgagaagugggagagcggggugaaggacugcgugguccugcacuccuacuucacgagcgacuacuaccagcuguacuccacccagcucagcaccgacaccggcguggagcacgugacguucuucaucuacaacaagaucgucgacgggcccgaggagcacgugcagauccacaccaucgacggcuccagcggcguggucaaccccgugauggagccgaucuacgacgagcccaccaccacgaccagcgugccccugugaggacuaguuauaagacugacuagcccgaugggccucccaacgggcccuccuccccuccuugcaccgagauuaauaaaaaaaaaaaaaaaaaaaaaaaaaaaaaaaaaaaaaaaaaaaaaaaaaaaaaaaaaaaaaaaaugcaucccccccccccccccccccccccccccccccaaaggcucuuuucagagccaccagaauu

SEQ ID NO: 22420 - RNA, 991 nt, Artificial Sequence
  SARS-CoV-2__MT834849.1__ORF3a protein mRNA gc
aggagaaagcuuaccauggaccuguucaugcgcaucuucaccaucggcaccgugacgcucaagcagggggagaucaaggacgccacccccagcgacuucguccgggccaccgcgaccaucccgauccaggccucccugcccuucggcuggcugaucguggggguggcccuccuggccgucuuccacagcgccuccaagaucaucacgcugaagaagcgcuggcagcucgcgcugagcaagggcgugcacuucgugugcaaccugcuccugcuguucgucaccguguacucccaccuccugcugguggccgccgggcucgaggcccccuuccuguaccuguacgcgcucgucuacuuccugcagagcaucaacuucgugcggaucaucaugcgccuguggcucugcuggaagugccgguccaagaacccccugcuguacgacgccaacuacuuccucugcuggcacaccaacugcuacgacuacugcaucccguacaacagcgugaccuccagcaucgucaucacguccggcgacggcaccaccagccccaucuccgagcacgacuaccagaucgggggcuacaccgagaagugggagagcggggugaaggacugcgugguccugcacuccuacuucacgagcgacuacuaccagcuguacuccacccagcucagcaccgacaccggcguggagcacgugacguucuucaucuacaacaagaucgucgacgagcccgaggagcacgugcagauccacaccaucgacggguccagcggcgugauccagugaggacuaguuauaagacugacuagcccgaugggccucccaacgggcccuccuccccuccuugcaccgagauuaauaaaaaaaaaaaaaaaaaaaaaaaaaaaaaaaaaaaaaaaaaaaaaaaaaaaaaaaaaaaaaaaaugcaucccccccccccccccccccccccccccccccaaaggcucuuuucagagccaccagaauu

SEQ ID NO: 22421 - RNA, 1045 nt, Artificial Sequence
  SARS-CoV-2__MT704820.1__ORF3a protein mRNA gc
aggagaaagcuuaccauggaccuguucaugcgcaucuucaccaucggcaccgugacgcucaagcagggggagaucaaggacgccacccccagcgacuucguccgggccaccgcgaccaucccgauccaggccucccugcccuucggcuggcugaucuucgggguggcccuccuggccguguuccagagcgccuccaagaucaucacgcugaagaagcgcuggcagcucgcgcugagcaagggcguccacuucgugugcaaccugcuccugcuguucgugaccgucuacucccaccuccugcugguggccgccgggcucgaggcccccuuccuguaccuguacgcgcucguguacuuccugcagagcaucaacuucguccggaucaucaugcgccuguggcucugcuggaagugccgguccaagaacccccugcuguacgacgccaacuacuuccucugcuggcacaccaacugcuacgacuacugcaucccguacaacagcgugaccuccagcaucgugaucacguccggcgacggcaccaccagccccaucuccgagcacgacuaccagaucgggggcuacaccgagaagugggagagcggggucaaggacugcguggugcugcacuccuacuucacgagcgacuacuaccagcuguacuccacccagcucagcaccgacaccggcgucgagcacgugacguucuucaucuacaacaagaucguggacgagcccgaggagcacguccagauccacaccaucgacggguccagcggcguggugaaccccgucauggagccgaucuacgacgagcccaccaccacgaccagcgugccccugugaggacuaguuauaagacugacuagcccgaugggccucccaacgggcccuccuccccuccuugcaccgagauuaauaaaaaaaaaaaaaaaaaaaaaaaaaaaaaaaaaaaaaaaaaaaaaaaaaaaaaaaaaaaaaaaaugcaucccccccccccccccccccccccccccccccaaaggcucuuuucagagccaccagaauu

SEQ ID NO: 22422 - RNA, 1036 nt, Artificial Sequence
  SARS-CoV-2__MT827206.1__ORF3a protein mRNA gc
aggagaaagcuuaccauggaccuguucaugcgcaucuucaccaucggcaccgugacgcucaagcagggggagaucaaggacgccacccccagcgacuucguccgggccaccgcgaccaucccgauccaggccucccugcccuucggcuggcugaucguggggguggcccuccuggccgucuuccacagcgccuccaagaucaucacgcugaagaagcgcuggcagcucgcgcugagcaagggcgugcacuucgugugcaaccugcuccugcuguucgucaccguguacucccaccuccugcugguggccgccgggcucgaggcccccuuccuguaccuguacgcgcucgucuacuuccugcagagcaucaacuucgugcggaucaucaugcgccuguggcucugcuggaagugccgguccaagaacccccugcuguacgacgccaacuacuuccucugcuggcacaccaacugcuacgacuacugcaucccguacaacagcgugaccuccagcaucgucaucacguccggcgacggcaccaccagccccaucuccgagcacgacuaccagaucgggggcuacaccgagaagugggagagcggggugaaggacugcgugguccugcacuccuacuucacgagcgacuacuaccagcuguacuccacccagcucagcaccgacaccggcguggagcacgugacguucuucaucuacaacaagaucgucgacgagcccgaggagcacgugcagauccacaccaucgacggguccagcggcguggucauggagcccaucuacgacgagccgaccaccacgaccagcgugccccugugaggacuaguuauaagacugacuagcccgaugggccucccaacgggcccuccuccccuccuugcaccgagauuaauaaaaaaaaaaaaaaaaaaaaaaaaaaaaaaaaaaaaaaaaaaaaaaaaaaaaaaaaaaaaaaaaugcaucccccccccccccccccccccccccccccccaaaggcucuuuucagagccaccagaauu

SEQ ID NO: 22423 - RNA, 1045 nt, Artificial Sequence
  SARS-CoV-2__MT827249.1__ORF3a protein mRNA gc
aggagaaagcuuaccauggaccuguucaugcgcaucuucaccaucggcaccgugacgcucaagcagggggagaucaaggacgccacccccagcgacuucguccgggccaccgcgaccaucccgauccaggccucccugcccuucggcuggcugaucguggggguggcccuccuggccgucuuccacagcgccuccaagaucaucacgcugaagaagcgcuggcagcucgcgcugagcaagggcauccacuucgugugcaaccugcuccugcuguucgugaccgucuacucccaccuccugcugguggccgccgggcucgaggcccccuuccuguaccuguacgcgcucguguacuuccugcagagcaucaacuucguccggaucaucaugcgccuguggcucugcuggaagugccgguccaagaacccccugcuguacgacgccaacuacuuccucugcuggcacaccaacugcuacgacuacugcaucccguacaacagcgugaccuccagcaucgugaucacguccggcgacggcaccaccagccccaucuccgagcacgacuaccagaucgggggcuacaccgagaagugggagagcggggucaaggacugcguggugcugcacuccuacuucacgagcgacuacuaccagcuguacuccacccagcucagcaccgacaccggcgucgagcacgugacguucuucaucuacaacaagaucguggacgagcccgaggagcacguccagauccacaccaucgacggguccagcggcguggugaaccccgucauggagccgaucuacgacgagcccaccaccacgaccagcgugccccugugaggacuaguuauaagacugacuagcccgaugggccucccaacgggcccuccuccccuccuugcaccgagauuaauaaaaaaaaaaaaaaaaaaaaaaaaaaaaaaaaaaaaaaaaaaaaaaaaaaaaaaaaaaaaaaaaugcaucccccccccccccccccccccccccccccccaaaggcucuuuucagagccaccagaauu

SEQ ID NO: 22424 - RNA, 1045 nt, Artificial Sequence
  SARS-CoV-2__MT821572.1__ORF3a protein mRNA gc
aggagaaagcuuaccauggaccuguucaugcgcaucuucaccaucggcaccgugacgcucaagcagggggagaucaaggacgccacccccagcgacuucguccgggccaccgcgaccaucccgauccaggccucccugcccuucggcuggcugaucguggggguggcccuccuggccgucuuccacagcgccuccaagaucaucacgcugaagaagcgcuggcagcucgcgcugagcaagggcgugcacuucgugugcaaccugcuccugcuguucgucaccguguacucccaccuccugcugguggccgccgggcucgaggcccccuuccuguaccuguacgcgcucgucuacuuccugcagagcaucaacuucgugcggaucaucaugcgccuguggcucugcuggaagugccgguccaagaacccccugcuguacgacgccaacuacuuccucugcuggcacaccaacugcuacgacuacugcaucccguacaacagcgugaccuccagcaucgucaucacguccggcgacggcaccaccagccccaucuccgagcacgacuaccagaucgggggcuacaccgagaagugggagagcggggugaaggacugcgugguccugcacuccuacuucgccagcgacuacuaccagcuguacuccacgcagcucagcaccgacaccggcguggagcacgugaccuucuucaucuacaacaagaucgucgacgagcccgaggagcacgugcagauccacacgaucgacggguccagcggcguggucaaccccgugauggagccgaucuacgacgagcccaccaccaccacgagcgugccccugugaggacuaguuauaagacugacuagcccgaugggccucccaacgggcccuccuccccuccuugcaccgagauuaauaaaaaaaaaaaaaaaaaaaaaaaaaaaaaaaaaaaaaaaaaaaaaaaaaaaaaaaaaaaaaaaaugcaucccccccccccccccccccccccccccccccaaaggcucuuuucagagccaccagaauu

SEQ ID NO: 22425 - RNA, 1045 nt, Artificial Sequence
  SARS-CoV-2__MT821581.1__ORF3a protein mRNA gc
aggagaaagcuuaccauggaccuguucaugcgcaucuucaccaucggcaccgugacgcucaagcagggggagaucaaggacgccacccccagcgacuucguccgggccaccgcgaccaucccgauccaggccucccugcccuucggcuggcugaucguggggguggcccuccuggccgucuuccagagcgccuccaagaucaucacgcugaagaagcgcuggcagcucgcgcugagcaagggcgugcacuucgugugcaaccugcuccugcuguucgucaccguguacucccaccuccugcugguggccgccgggcucgaggcccccuuccuguaccuguacgcgcucgucuacuuccugcagagcaucaacuucgugcggaucaucaugcgccuguggcucugccggaagugccgcuccaagaacccccugcuguacgacgccaacuacuuccucugcuggcacaccaacugcuacgacuacugcaucccguacaacagcgugaccuccagcaucgucaucacguccggcgacggcaccaccagccccaucuccgagcacgacuaccagaucgggggcuacaccgagaagugggagagcggggugaaggacugcgugguccugcacuccuacuucacgagcgacuacuaccagcuguacuccacccagcucagcaccgacaccggcguggagcacgugacguucuucaucuacaacaagaucgucgacgagcccgaggagcacgugcagauccacaccaucgacggguccagcggcguggucaaccccgugauggagcugaucuacgacgagccgaccaccacgaccagcgugccccugugaggacuaguuauaagacugacuagcccgaugggccucccaacgggcccuccuccccuccuugcaccgagauuaauaaaaaaaaaaaaaaaaaaaaaaaaaaaaaaaaaaaaaaaaaaaaaaaaaaaaaaaaaaaaaaaaugcaucccccccccccccccccccccccccccccccaaaggcucuuuucagagccaccagaauu

SEQ ID NO: 22426 - RNA, 1045 nt, Artificial Sequence
  SARS-CoV-2__MT821673.1__ORF3a protein mRNA gc
aggagaaagcuuaccauggaccuguucaugcgcaucuucaccaucggcaccgugacgcucaagcagggggagaucaaggacgccacccccagcgacuucguccgggccaccgcgaccaucccgauccaggccucccugcccuucggcuggcugaucguggggguggcccuccuggccgucuuccagagcgccuccaagaucaucacgcugaagaagcgcuggcagcucgcgcugagcaagggcgugcacuucgugugcaaccugcuccugcuguucgucaccguguacucccaccuccugcugguggccgccgggcucgaggcccccuuccuguaccuguacgcgcucgucuacuuccugcagagcaucaacuucgugcggaucaucaugaugcuguggcucugcuggaagugccgcuccaagaacccccugcuguacgacgccaacuacuuccucugcuggcacaccaacugcuacgacuacugcaucccguacaacagcgugaccuccagcaucgucaucacguccggcgacggcaccaccagccccaucuccgagcacgacuaccagaucgggggcuacaccgagaagugggagagcggggugaaggacugcgugguccugcacuccuacuucacgagcgacuacuaccagcuguacuccacccagcucagcaccgacaccggcguggagcacgugacguucuucaucuacaacaagaucgucgacgagcccgaggagcacgugcagauccacaccaucgacggguccagcggcguggucaaccccgugauggagccgaucuacgacgagcccaccaccacgaccagcgugccccugugaggacuaguuauaagacugacuagcccgaugggccucccaacgggcccuccuccccuccuugcaccgagauuaauaaaaaaaaaaaaaaaaaaaaaaaaaaaaaaaaaaaaaaaaaaaaaaaaaaaaaaaaaaaaaaaaugcaucccccccccccccccccccccccccccccccaaaggcucuuuucagagccaccagaauu

SEQ ID NO: 22427 - RNA, 1045 nt, Artificial Sequence
  SARS-CoV-2__MT821764.1__ORF3a protein mRNA gc
aggagaaagcuuaccauggaccuguucaugcgcaucuucaccaucggcaccgugacgcucaagcagggggagaucaaggacgccacccccagcgacuucguccgggccaccgcgaccaucccgauccaggccucccugcccuucggcuggcugaucguggggguggcccuccuggccgucuuccagagcgccuccaagaucaucacgcugaagaagcgcuggcagcucgcgcugagcaagggcgugcacuucgugugcaaccugcuccugcuguucgucaccguguacucccaccuccugcugguggccgccgggcucgaggcccccuuccuguaccuguacgcgcucgucuacuuccugcagagcaucaacuucgugcggaucaucaugcgccuguggcucugcuggaagugccgguccaagaacccccugcuguacgacgccaacuacuuccucugcuggcacaccaacugcuacgacuacugcaucccguacaacagccugaccuccagcaucgugaucacguccggcgacggcaccaccagccccaucuccgagcacgacuaccagaucgggggcuacaccgagaagugggagagcggggucaaggacugcguggugcugcacuccuacuucacgagcgacuacuaccagcucuacuccacccagcugagcaccgacaccggcgucgagcacgugacguucuucaucuacaacaagaucguggacgagcccgaggagcacguccagauccacaccaucgacggguccagcggcguggugaaccccgucauggagccgaucuacgacgagcccaccaccacgaccagcgugccccugugaggacuaguuauaagacugacuagcccgaugggccucccaacgggcccuccuccccuccuugcaccgagauuaauaaaaaaaaaaaaaaaaaaaaaaaaaaaaaaaaaaaaaaaaaaaaaaaaaaaaaaaaaaaaaaaaugcaucccccccccccccccccccccccccccccccaaaggcucuuuucagagccaccagaauu

SEQ ID NO: 22428 - RNA, 1045 nt, Artificial Sequence
  SARS-CoV-2__MT820461.1__ORF3a protein mRNA gc
aggagaaagcuuaccauggaccuguucaugcgcaucuucaccaucggcaccgugacgcucaagcagggggagaucaaggacgccacccccagcgacuucguccgggccaccgcgaccaucccgauccaggccucccugcccuucggcuggcugaucguggggguggcccuccuggccgucuuccagagcgccuccaagaucaucacgcugaagaagcgcuggcagcucgcgcugagcgagggcgugcacuucgugugcaaccugcuccugcuguucgucaccguguacucccaccuccugcugguggccgccgggcucgaggcccccuuccuguaccuguacgcgcucgucuacuuccugcagagcaucaacuucgugcggaucaucaugcgccuguggcucugcuggaagugccgguccaagaacccccugcuguacgacgccaacuacuuccucugcuggcacaccaacugcuacgacuacugcaucccguacaacagcgugaccuccagcaucgucaucacguccggcgacggcaccaccagccccaucuccgagcacgacuaccagaucgggggcuacaccgagaagugggagagcggggugaaggacugcgugguccugcacuccuacuucacgagcgacuacuaccagcuguacuccacccagcucagcaccgacaccggcguggagcacgugacguucuucaucuacaacaagaucgucgacgagcccgaggagcacgugcagauccacaccaucgacggguccagcggcguggucaaccccgugauggagccgaucuacgacgagcccaccaccacgaccagcgugccccugugaggacuaguuauaagacugacuagcccgaugggccucccaacgggcccuccuccccuccuugcaccgagauuaauaaaaaaaaaaaaaaaaaaaaaaaaaaaaaaaaaaaaaaaaaaaaaaaaaaaaaaaaaaaaaaaaugcaucccccccccccccccccccccccccccccccaaaggcucuuuucagagccaccagaauu

SEQ ID NO: 22429 - RNA, 1045 nt, Artificial Sequence
  SARS-CoV-2__MT820489.1__ORF3a protein mRNA gc
aggagaaagcuuaccauggaccuguucaugcgcaucuucaccaucggcaccgugacgcucaagcagggggagaucaaggacgccacccccagcgacuucguccgggccaccgcgaccaucccgauccaggccucccugcccuucggcuggcugaucguggggguggcccuccuggccgucuuccacagcgccuccaagaucaucacgcugaagaagcgcuggcagcucgcgcugagcaagggcgugcacuucgugugcaaccugcuccugcuguucgucaccguguacucccaccuccugcugguggccgccgggcucgaggcccccuuccuguaccuguacgcgcucgucuacuuccugcagagcaucaacuucgugcggaucaucaugcgccuguggcucugcuggaagugccgguccaagaacccccugcuguacgacgccaacuacuuccucugcuggcacaccaacugcuacgacuacugcaucccguacaacagcgugaccucccugaucgucaucacgagcggcgacggcaccaccucccccaucagcgagcacgacuaccagaucgggggcuacaccgagaagugggaguccggggugaaggacugcgugguccugcacagcuacuucacguccgacuacuaccagcucuacagcacccagcuguccaccgacaccggcguggagcacgugacguucuucaucuacaacaagaucgucgacgagcccgaggagcacgugcagauccacaccaucgacgggagcuccggcguggucaaccccgugauggagccgaucuacgacgagcccaccaccacgaccagcgugccccugugaggacuaguuauaagacugacuagcccgaugggccucccaacgggcccuccuccccuccuugcaccgagauuaauaaaaaaaaaaaaaaaaaaaaaaaaaaaaaaaaaaaaaaaaaaaaaaaaaaaaaaaaaaaaaaaaugcaucccccccccccccccccccccccccccccccaaaggcucuuuucagagccaccagaauu

SEQ ID NO: 22430 - RNA, 1045 nt, Artificial Sequence
  SARS-CoV-2__MT810504.1__ORF3a protein mRNA gc
aggagaaagcuuaccauggaccuguucaugcgcaucuucaccaucggcaccgugacgcucaagcagggggagaucaaggacgccacccccagcgacuucguccgggccaccgcgaccauccugauccaggccucccugccguucggcuggcucaucguggggguggcccugcuggccgucuuccacagcgccuccaagaucaucacgcucaagaagcgcuggcagcuggcgcugagcaagggcgugcacuucgugugcaaccuccugcugcuguucgucaccguguacucccaccuccugcucguggccgccgggcuggaggcccccuuccuguaccucuacgcgcuggucuacuuccugcagagcaucaacuucgugcggaucaucaugcgccucuggcugugcuggaagugccgguccaagaacccccugcucuacgacgccaacuacuuccugugcuggcacaccaacugcuacgacuacugcauccccuacaacagcgugaccuccagcaucgucaucacguccggcgacggcaccaccagcccgaucuccgagcacgacuaccagaucgggggcuacaccgagaagugggagagcggggugaaggacugcgugguccugcacuccuacuucacgagcgacuacuaccagcucuacuccacccagcugagcaccgacaccggcguggagcacgugacguucuucaucuacaacaagaucgucgacgagcccgaggagcacgugcagauccacaccaucgacggguccagcggcguggucaaccccgugauggagcccaucuacgacgagccgaccaccacgaccagcgugccccugugaggacuaguuauaagacugacuagcccgaugggccucccaacgggcccuccuccccuccuugcaccgagauuaauaaaaaaaaaaaaaaaaaaaaaaaaaaaaaaaaaaaaaaaaaaaaaaaaaaaaaaaaaaaaaaaaugcaucccccccccccccccccccccccccccccccaaaggcucuuuucagagccaccagaauu

SEQ ID NO: 22431 - RNA, 1045 nt, Artificial Sequence
  SARS-CoV-2__MT810687.1__ORF3a protein mRNA gc
aggagaaagcuuaccauggaccuguucaugcgcaucuucaccaucggcaccgugacgcucaagcagggggagaucaaggacgccacccccagcgacuucguccgggccaccgcgaccaucccgauccaggccucccugcccuucggcuggcugaucguggggguggcccuccuggccgucuuccagagcgccuccaagaucaucacgcugaagaagcgcuggcagcucgcgcugagcaagggcgugcacuucgugugcaaccugcuccugcuguucgucaccguguacucccaccuccugcugguggccgccgggcucgaggcccccuuccuguaccuguacgcgcucgucuacuuccugcagagcaucaacuucgugcggaucaucaugcgccuguggcucugcuggaagugccgguccaagaacccccugcuguacgacgccaacuacuuccucugcuggcacaccaacugcuacgacuacugcaucccguacaacagcgugaccuccagcaucgucaucacguccggcgacggcaccaccagccccaucuccgagcacgaccaccagaucgggggcuacaccgagaagugggagagcggggugaaggacugcgugguccugcacuccuacuucacgagcgacuacuaccagcuguacuccacccagcucagcaccgacaccggcguggagcacgugacguucuucaucuacaacaagaucgucgacgagcccgaggagcacgugcagauccacaccaucgacggguccagcggcguggucaaccccgugauggagccgaucuacgacgagcccaccaccacgaccagcgugccccugugaggacuaguuauaagacugacuagcccgaugggccucccaacgggcccuccuccccuccuugcaccgagauuaauaaaaaaaaaaaaaaaaaaaaaaaaaaaaaaaaaaaaaaaaaaaaaaaaaaaaaaaaaaaaaaaaugcaucccccccccccccccccccccccccccccccaaaggcucuuuucagagccaccagaauu

SEQ ID NO: 22432 - RNA, 1045 nt, Artificial Sequence
  SARS-CoV-2__MT810721.1__ORF3a protein mRNA gc
aggagaaagcuuaccauguaccuguucaugcgcaucuucaccaucggcaccgugacgcucaagcagggggagaucaaggacgccacccccagcgacuucguccgggccaccgcgaccaucccgauccaggccucccugcccuucggcuggcugaucguggggguggcccuccuggccgucuuccagagcgccuccaagaucaucacgcugaagaagcgcuggcagcucgcgcugagcaagggcgugcacuucgugugcaaccugcuccugcuguucgucaccguguacucccaccuccugcugguggccgccgggcucgaggcccccuuccuguaccuguacgcgcucgucuacuuccugcagagcaucaacuucgugcggaucaucaugcgccuguggcucugcuggaagugccgguccaagaacccccugcuguacgacgccaacuacuuccucugcuggcacaccaacugcuacgacuacugcaucccguacaacagcgugaccuccagcaucgucaucacguccggcgacggcaccaccagccccaucuccgagcacgacuaccagaucgggggcuacaccgagaagugggagagcggggugaaggacugcgugguccugcacuccuacuucacgagcgacuacuaccagcuguacuccacccagcucagcaccgacaccggcguggagcacgugacguucuucaucuacaacaagaucgucgacgagcccgaggagcacgugcagauccacaccaucgacggguccagcggcguggucaaccccgugauggagccgaucuacgacgagcccaccaccacgaccagcgugccccugugaggacuaguuauaagacugacuagcccgaugggccucccaacgggcccuccuccccuccuugcaccgagauuaauaaaaaaaaaaaaaaaaaaaaaaaaaaaaaaaaaaaaaaaaaaaaaaaaaaaaaaaaaaaaaaaaugcaucccccccccccccccccccccccccccccccaaaggcucuuuucagagccaccagaauu

SEQ ID NO: 22433 - RNA, 1045 nt, Artificial Sequence
  SARS-CoV-2__MT810727.1__ORF3a protein mRNA gc
aggagaaagcuuaccauggaccuguucaugcgcaucuucaccaucggcaccgugacgcucaagcagggggagaucaaggacgccacccccagcgacuucguccgggccaccgcgaccaucccgauccaggccucccugcccuucggcuggcugaucguggggguggcccuccuggccgucuuccacagcgccuccaagaucaucacgcugaagaagcgcuggcagcucgcgcugagcaagggcgugcacuucgugugcaaccugcuccugcuguucgucaccguguacucccaccuccugcugguggccgccgggcucgaggcccccuuccuguaccuguacgcgcucgucuacuuccugcagagcaucaacuucgugcggaucaucaugcgccuguggcucugcuggaagugccgguccaagaacccccugcuguacgacgccaacuacuuccucugcuggcacaccaacugcuacgacuacugcaucccguacaacagcgugaccuccagcaucgucaucacguccggcgacggcaccaccagccccaucuccgagcacgacuaccagaucgggggcuacaccgagaagugggagagcggggugaaggacugcgugguccugcacuccuacuucacgagcgacuacuaccagcuguacuccacccagcucagcaccgacaccggcguggagcacgugacguucuucaucuacaacaagaucgucgacgagcccgaggagcacgugcagauccacaccaucgacggguccagcggcguggucaaccccgugauggagccgaucuacgacgagcccaccaccacgaccaucgugccccugugaggacuaguuauaagacugacuagcccgaugggccucccaacgggcccuccuccccuccuugcaccgagauuaauaaaaaaaaaaaaaaaaaaaaaaaaaaaaaaaaaaaaaaaaaaaaaaaaaaaaaaaaaaaaaaaaugcaucccccccccccccccccccccccccccccccaaaggcucuuuucagagccaccagaauu

SEQ ID NO: 22434 - RNA, 1045 nt, Artificial Sequence
  SARS-CoV-2__MT810789.1__ORF3a protein mRNA gc
aggagaaagcuuaccauggaccuguucaugcgcaucuucaccaucggcaccgugacgcucaagcagggggagaucaaggacgccacccccagcgacuucguccgggccaccgcgaccaucccgauccaggccucccugcccuucggcuggcugaucguggggguggcccuccuggccgucuuccagagcgccuccaagaucaucacgcugaagaagcgcuggcagcucgcgcugagcaagggcgugcacuucgugugcaaccugcuccugcuguucgucaccguguacucccaccuccugcugguggccgccgggcucgaggcccccuuccuguaccuguacguccucguguacuuccugcagagcaucaacuucgugcggaucaucaugcgccuguggcucugcuggaagugccgguccaagaacccccugcuguacgacgcgaacuacuuccucugcuggcacaccaacugcuacgacuacugcaucccguacaacagcgucaccuccagcaucgugaucacguccggcgacggcaccaccagccccaucuccgagcacgacuaccagaucgggggcuacaccgagaagugggagagcggggugaaggacugcgucgugcugcacuccuacuucacgagcgacuacuaccagcuguacuccacccagcucagcaccgacaccggcguggagcacgucacguucuucaucuacaacaagaucguggacgagcccgaggagcacgugcagauccacaccaucgacggguccagcggcgucgugaaccccgugauggagccgaucuacgacgagcccaccaccacgaccagcgucccccugugaggacuaguuauaagacugacuagcccgaugggccucccaacgggcccuccuccccuccuugcaccgagauuaauaaaaaaaaaaaaaaaaaaaaaaaaaaaaaaaaaaaaaaaaaaaaaaaaaaaaaaaaaaaaaaaaugcaucccccccccccccccccccccccccccccccaaaggcucuuuucagagccaccagaauu

SEQ ID NO: 22435 - RNA, 1045 nt, Artificial Sequence
  SARS-CoV-2__MT810827.1__ORF3a protein mRNA gc
aggagaaagcuuaccauggaccuguucaugcgcaucuucaccaucggcaccgugacgcucaagcagggggagaucaaggacgccacccccagcgacuucguccgggccaccgcgaccaucccgauccaggccucccugcccuucggcuggcugaucguggggguggcccuccuggccgucuuccacagcgccuccaagaucaucacgcugaagaagcgcuggcagcucgcgcugagcaagggcgugcacuucgugugcaaccugcuccugcuguucgucaccguguacucccaccuccugcugguggccgccgggcucgaggcccccuuccuguaccuguacgcgcucgucuacuuccugcagagcaucaacuucgugaagaucaucaugcggcuguggcucugcuggaagugccgcuccaagaacccccugcuguacgacgccaacuacuuccucugcuggcacaccaacugcuacgacuacugcaucccguacaacagcgugaccuccagcaucgucaucacguccggcgacggcaccaccagccccaucuccgagcacgacuaccagaucgggggcuacaccgagaagugggagagcggggugaaggacugcgugguccugcacuccuacuucacgagcgacuacuaccagcuguacuccacccagcucagcaccgacaccggcguggagcacgugacguucuucaucuacaacaagaucgucgacgagcccgaggagcacgugcagauccacaccaucgacggguccagcggcguggucaaccccgugauggagccgaucuacgacgagcccaccaccacgaccagcgugccccugugaggacuaguuauaagacugacuagcccgaugggccucccaacgggcccuccuccccuccuugcaccgagauuaauaaaaaaaaaaaaaaaaaaaaaaaaaaaaaaaaaaaaaaaaaaaaaaaaaaaaaaaaaaaaaaaaugcaucccccccccccccccccccccccccccccccaaaggcucuuuucagagccaccagaauu

SEQ ID NO: 22436 - RNA, 1045 nt, Artificial Sequence
  SARS-CoV-2__MT810843.1__ORF3a protein mRNA gc
aggagaaagcuuaccauggaccuguucaugcgcaucuucaccaucggcaccgugacgcucaagcagggggagaucaaggacgccacccccagcgacuucguccgggccaccgcgaccaucccgauccaggccucccugcccuucggcuggcugaucguggggguggcccuccuggccgucuuccagagcgccuccaagaucaucacgcugaagaagcgcuggcagcucgcgcugagcaagggcgugcacuucgugugcaaccugcuccugcuguucgucaccguguacucccaccuccugcugguggccgccgggcucgaggcccccuuccuguaccuguacgcgcucgucuacuuccugcagagcaucaacuucgugcggaucaucaugcgccuguggcucugcuggaagugccgguccaagaacccccugcuguacgacgccaacuacuuccucugcuggcacaccaacugcuacgacuacugcaucccguacaacagcgugaccucccugaucgucaucacgagcggcgacggcaccaccucccccaucagcgagcacgacuaccagaucgggggcuacaccgagaagugggaguccggggugaaggacugcgugguccugcacagcuacuucacguccgacuacuaccagcucuacagcacccagcuguccaccgacaccggcguggagcacgugacguucuucaucuacaacaagaucgucgacgagcccgaggagcacgugcagauccacaccaucgacgggagcuccggcguggucaaccccgugauggagccgaucuacgacgagcccaccaccacgaccagcgugccccugugaggacuaguuauaagacugacuagcccgaugggccucccaacgggcccuccuccccuccuugcaccgagauuaauaaaaaaaaaaaaaaaaaaaaaaaaaaaaaaaaaaaaaaaaaaaaaaaaaaaaaaaaaaaaaaaaugcaucccccccccccccccccccccccccccccccaaaggcucuuuucagagccaccagaauu

SEQ ID NO: 22437 - RNA, 1045 nt, Artificial Sequence
  SARS-CoV-2__MT810882.1__ORF3a protein mRNA gc
aggagaaagcuuaccauggaccuguucaugcgcaucuucaccaucggcaccgugacgcucaagcagggggagaucaaggacgccacccccagcgacuucguccgggccaccgcgaccaucccgauccaggccucccugcccuucggcuggcugaucguggggguggcccuccuggccgucuuccacagcgccuccaagaucaucacgcugaagaagcgcuggcagcucgcgcugagcaagggcgugcaguucgugugcaaccugcuccugcuguucgucaccguguacucccaccuccugcugguggccgccgggcucgaggcccccuuccuguaccuguacgcgcucgucuacuuccugcagagcaucaacuucgugcggaucaucaugcgccuguggcucugcuggaagugccgguccaagaacccccugcuguacgacgccaacuacuuccucugcuggcacaccaacugcuacgacuacugcaucccguacaacagcgugaccuccagcaucgucaucacguccggcgacggcaccaccagccccaucuccgagcacgacuaccagaucgggggcuacaccgagaagugggagagcggggugaaggacugcgugguccugcacuccuacuucacgagcgacuacuaccagcuguacuccacccagcucagcaccgacaccggcguggagcacgugacguucuucaucuacaacaagaucgucgacgagcccgaggagcacgugcagauccacaccaucgacggguccagcggcguggucaaccccgugauggagccgaucuacgacgagcccaccaccacgaccagcgugccccugugaggacuaguuauaagacugacuagcccgaugggccucccaacgggcccuccuccccuccuugcaccgagauuaauaaaaaaaaaaaaaaaaaaaaaaaaaaaaaaaaaaaaaaaaaaaaaaaaaaaaaaaaaaaaaaaaugcaucccccccccccccccccccccccccccccccaaaggcucuuuucagagccaccagaauu

SEQ ID NO: 22438 - RNA, 1045 nt, Artificial Sequence
  SARS-CoV-2__MT810900.1__ORF3a protein mRNA gc
aggagaaagcuuaccauggaccuguucaugcgcaucuucaccaucggcaccgugacgcucaagcagggggagaucaaggacgccacccccagcgacuucguccgggccaccgcgaccaucccgauccaggccucccugcccuucggcuggcugaucguggggguggcccuccuggccgucuuccacagcgccuccaagaucaucacgcugaagaagcgcuggcagcucgcgcugagcaagggcgugcacuucgugugcaaccugcuccugcuguucgucaccguguacucccaccuccugcugguggccgccgggcucgaggcccccuuccuguaccuguacgcgcucgucuacuuccugcagagcaucaacuucgugcggaucaucaugcgccuguggcucugcuggaagugccgguccaagaacccccugcuguacgacgccaacuacuuccucugcuggcacaccaacugcuacgacuacugcaucccguacaacagcgugaccuccagcaucgucaucacguccggcgacggcaccaccagccccaucuccgagcacgacuaccagaucgggggcuacaccgagaagugggagagcgggcugaaggacugcguggugcugcacuccuacuucacgagcgacuacuaccagcucuacuccacccagcugagcaccgacaccggcgucgagcacgugacguucuucaucuacaacaagaucguggacgagcccgaggagcacguccagauccacaccaucgacggguccagcggcguggugaaccccgucauggagccgaucuacgacgagcccaccaccacgaccagcgugccccugugaggacuaguuauaagacugacuagcccgaugggccucccaacgggcccuccuccccuccuugcaccgagauuaauaaaaaaaaaaaaaaaaaaaaaaaaaaaaaaaaaaaaaaaaaaaaaaaaaaaaaaaaaaaaaaaaugcaucccccccccccccccccccccccccccccccaaaggcucuuuucagagccaccagaauu

SEQ ID NO: 22439 - RNA, 1045 nt, Artificial Sequence
  SARS-CoV-2__MT810942.1__ORF3a protein mRNA gc
aggagaaagcuuaccauggaccuguucaugcgcaucuucaccaucggcaccgugacgcucaagcagggggagaucaaggacgccacccccagcgacuucguccgggccaccgcgaccaucccgauccaggccucccugcccuucggcuggcugaucguggggguggcccuccuggccggcuuccagagcgccuccaagaucaucacgcugaagaagcgcuggcagcucgcgcugagcaaggggguccacuucgugugcaaccugcuccugcuguucgugaccgucuacucccaccuccugcugguggccgccggccucgaggcccccuuccuguaccuguacgcgcucguguacuuccugcagagcaucaacuucguccggaucaucaugcgccuguggcucugcuggaagugccgguccaagaacccccugcuguacgacgccaacuacuuccucugcuggcacaccaacugcuacgacuacugcaucccguacaacagcgugaccuccagcaucgugaucacguccggcgacgggaccaccagccccaucuccgagcacgacuaccagaucggcggguacaccgagaagugggagagcggcgucaaggacugcguggugcugcacuccuacuucacgagcgacuacuaccagcuguacuccacccagcucagcaccgacaccggggucgagcacgugacguucuucaucuacaacaagaucguggacgagcccgaggagcacguccagauccacaccaucgacggcuccagcggcguggugaaccccgucauggagccgaucuacgacgagcccaccaccacgaccagcgugccccugugaggacuaguuauaagacugacuagcccgaugggccucccaacgggcccuccuccccuccuugcaccgagauuaauaaaaaaaaaaaaaaaaaaaaaaaaaaaaaaaaaaaaaaaaaaaaaaaaaaaaaaaaaaaaaaaaugcaucccccccccccccccccccccccccccccccaaaggcucuuuucagagccaccagaauu

SEQ ID NO: 22440 - RNA, 1045 nt, Artificial Sequence
  SARS-CoV-2__MT810985.1__ORF3a protein mRNA gc
aggagaaagcuuaccauggaccuguucaugcgcaucuucaccaucggcaccgugacgcucaagcagggggagaucaaggacgccacgccccuggacuucguccgggccaccgcgaccaucccgauccaggccagccugcccuucggcuggcucaucguggggguggcccugcuggccgucuuccaguccgccagcaagaucaucacccucaagaagcgcuggcagcuggcgcuguccaagggcgugcacuucgugugcaaccuccugcugcuguucgucaccguguacagccaccuccugcucguggccgccgggcuggaggcccccuuccuguaccucuacgcgcuggucuacuuccugcaguccaucaacuucgugcggaucaucaugcgccucuggcugugcuggaagugccggagcaagaacccccugcucuacgacgccaacuacuuccugugcuggcacaccaacugcuacgacuacugcaucccguacaacuccgugaccagcuccaucgucaucacgagcggcgacggcaccaccucccccaucagcgagcacgacuaccagaucgggggcuacaccgagaagugggaguccggggugaaggacugcgugguccugcacagcuacuucacguccgacuacuaccagcucuacagcacccagcuguccaccgacaccggcguggagcacgugacguucuucaucuacaacaagaucgucgacgagcccgaggagcacgugcagauccacaccaucgacgggagcuccggcguggucaaccccgugauggagccgaucuacgacgagcccaccaccacgaccagcgugccccugugaggacuaguuauaagacugacuagcccgaugggccucccaacgggcccuccuccccuccuugcaccgagauuaauaaaaaaaaaaaaaaaaaaaaaaaaaaaaaaaaaaaaaaaaaaaaaaaaaaaaaaaaaaaaaaaaugcaucccccccccccccccccccccccccccccccaaaggcucuuuucagagccaccagaauu

SEQ ID NO: 22441 - RNA, 1045 nt, Artificial Sequence
  SARS-CoV-2__MT811010.1__ORF3a protein mRNA gc
aggagaaagcuuaccauggaccuguucaugcgcaucuucaccaucggcaccgugacgcucaagcagggggagaucaaggacgccacccccagcgacuucguccgggccaccgcgaccaucccgauccaggccucccugcuguucggcuggcucaucguggggguggcccugcuggccgucuuccagagcgccuccaagaucaucacgcucaagaagcgcuggcagcuggcgcugagcaagggcgugcacuucgugugcaaccuccugcugcuguucgucaccguguacucccaccuccugcucguggccgccgggcuggaggcccccuuccuguaccucuacgcgcuggucuacuuccugcagagcaucaacuucgugcggaucaucaugcgccucuggcugugcuggaagugccgguccaagaacccccugcucuacgacgccaacuacuuccugugcuggcacaccaacugcuacgacuacugcauccccuacaacagcgugaccuccagcaucgucaucacguccggcgacggcaccaccagcccgaucuccgagcacgacuaccagaucgggggcuacaccgagaagugggagagcggggugaaggacugcgugguccugcacuccuacuucacgagcgacuacuaccagcucuacuccacccagcugagcaccgacaccggcguggagcacgugacguucuucaucuacaacaagaucgucgacgagcccgaggagcacgugcagauccacaccaucgacggguccagcggcguggucaaccccgugauggagcccaucuacgacgagccgaccaccacgaccagcgugccccugugaggacuaguuauaagacugacuagcccgaugggccucccaacgggcccuccuccccuccuugcaccgagauuaauaaaaaaaaaaaaaaaaaaaaaaaaaaaaaaaaaaaaaaaaaaaaaaaaaaaaaaaaaaaaaaaaugcaucccccccccccccccccccccccccccccccaaaggcucuuuucagagccaccagaauu

SEQ ID NO: 22442 - RNA, 1045 nt, Artificial Sequence
  SARS-CoV-2__MT811252.1__ORF3a protein mRNA gc
aggagaaagcuuaccauggaccuguucaugcgcaucuucaccaucggcaccgugacgcucaagcagggggagaucaaggacgccacccccagcgacuucguccgggccaccgcgaccaucccgauccaggccucccugcccuucggcuggcugaucguggggguggcccuccuggccgucuuccagagcgccuccaagaucaucacgcugaagaagcgcuggcagcucgcgcugagcaagggcgugcacuucgugugcaaccugcuccugcuguucgucaccguguacucccaccuccugcugguggccgccgggcucgaggcccccuuccuguaccuguacgcgcucgucuacuuccugcagagcaucaacuucgugcggaucaucaugcgccuguggcucugcuggaagugccgguccaagaacccccugcuguacgacgccaacuacuuccucugcuggcacaccaacugcuacgacuacugcaucccguacaacagcgugaccuccagcaucgucaucacguccggcgacggcaccaccagccccaucuccgagcacgacuaccagaucgggggcuacaccgagaagugggagagcggggugaaggacugcgugguccugcacuccuacuucacgagcgacuacuaccagcuguacuccacccagcucagcaccgacaccggcguggagcacgugacguucuucaucuacaacaagaucgucgacgagcccgaggagcacgugcagauccacaccaucgacggguccagcggcguggucaaccccgugauggagccgaucuacgacgagcccaagaccaccacgagcgugccccugugaggacuaguuauaagacugacuagcccgaugggccucccaacgggcccuccuccccuccuugcaccgagauuaauaaaaaaaaaaaaaaaaaaaaaaaaaaaaaaaaaaaaaaaaaaaaaaaaaaaaaaaaaaaaaaaaugcaucccccccccccccccccccccccccccccccaaaggcucuuuucagagccaccagaauu

SEQ ID NO: 22443 - RNA, 1045 nt, Artificial Sequence
  SARS-CoV-2__MT811259.1__ORF3a protein mRNA gc
aggagaaagcuuaccauggaccuguucaugcgcaucuucaccaucggcaccgugacgcucaagcagggggagaucaaggacgccacccccagcgacuucguccgggccaccgcgaccaucccgauccaggccucccugcccuucggcuggcugaucguggggguggcccuccuggccgucuuccacagcgccuccaagaucaucacgcugaagaagcgcuggcagcucgcgcugagcaagggcgugcacuucgugugcaaccugcuccugcuguucgucaccguguacucccaccuccugcugguggccgccgggcucgaggcccccuuccuguaccuguacgcgcucgucuacuuccugcagagcaucaacuucgugcggaucaucaugcgccuguggcucugcuggaagugccgguccaagaacccccugcuguacgacgccaacuacuuccucugcuggcacaccaacugcuacgacuacugcaucccguacaacagcgugaccuucuccaucgucaucacgagcggcgacggcaccaccucccccaucagcgagcacgacuaccagaucgggggcuacaccgagaagugggaguccggggugaaggacugcgugguccugcacagcuacuucacguccgacuacuaccagcuguacagcacccagcucuccaccgacaccggcguggagcacgugacguucuucaucuacaacaagaucgucgacgagcccgaggagcacgugcagauccacaccaucgacgggagcuccggcguggucaaccccgugauggagccgaucuacgacgagcccaccaccacgaccagcgugccccugugaggacuaguuauaagacugacuagcccgaugggccucccaacgggcccuccuccccuccuugcaccgagauuaauaaaaaaaaaaaaaaaaaaaaaaaaaaaaaaaaaaaaaaaaaaaaaaaaaaaaaaaaaaaaaaaaugcaucccccccccccccccccccccccccccccccaaaggcucuuuucagagccaccagaauu

SEQ ID NO: 22444 - RNA, 1045 nt, Artificial Sequence
  SARS-CoV-2__MT811301.1__ORF3a protein mRNA gc
aggagaaagcuuaccauggaccuguucaugcgcaucuucaccaucggcaccgugacgcucaagcagggggagaucaaggacgccacccccagcgacuucguccgggccaccgcgaccaucccgauccaggccucccugcccuucggcuggcugaucguggggguggcccuccuggccgucuuccagagcgccuccaagaucaucacgcugaagaagcgcuggcagcucgcgcugagcaagggcgugcacuucgugugcaaccugcuccugcuguucgucaccguguacucccaccuccugcugguggccgccgggcucgaggcccccuuccuguaccuguacgcgcucgucuacuuccugcagagcaucaacuucgugcggaucaucaugcgccuguggcucugcuggaagugccgguccaagaacccccugcuguacgacgccaacuacuucuucugcuggcacaccaacugcuacgacuacugcaucccguacaacagcgugaccuccagcaucgucaucacguccggcgacggcaccaccagccccaucuccgagcacgacuaccagaucgggggcuacaccgagaagugggagagcggggugaaggacugcgugguccuccacuccuacuucacgagcgacuacuaccagcuguacuccacccagcugagcaccgacaccggcguggagcacgugacguucuucaucuacaacaagaucgucgacgagcccgaggagcacgugcagauccacaccaucgacggguccagcggcguggucaaccccgugauggagccgaucuacgacgagcccaccaccacgaccagcgugccccucugaggacuaguuauaagacugacuagcccgaugggccucccaacgggcccuccuccccuccuugcaccgagauuaauaaaaaaaaaaaaaaaaaaaaaaaaaaaaaaaaaaaaaaaaaaaaaaaaaaaaaaaaaaaaaaaaugcaucccccccccccccccccccccccccccccccaaaggcucuuuucagagccaccagaauu

SEQ ID NO: 22445 - RNA, 1045 nt, Artificial Sequence
  SARS-CoV-2__MT811420.1__ORF3a protein mRNA gc
aggagaaagcuuaccauggaccuguucaugcgcaucuucaccaucggcaccgugacgcucaagcagggggagaucaaggacgccacccccagcgacuucguccgggccaccgcgaccaucccgauccaggccucccugcccuucggcuggcugaucguggggguggcccuccuggccgucuuccagagcgccuccaagaucaucacgcugaagaagcgcuggcagcucgcgcugagcaagggcgugcacuucgugugcaaccugcuccugcuguucgucaccguguacucccaccuccugcugguggccgccgggcucgaggcccccuuccuguaccuguacgcgcucgucuacuuccugcagagcaucaacuucgugcggaucaucaugcgccuguggcucugcugcaagugccgguccaagaacccccugcuguacgacgccaacuacuuccucugcuggcacaccaacugcuacgacuacugcaucccguacaacagcgugaccuccagcaucgucaucacguccggcgacggcaccaccagccccaucuccgagcacgacuaccagaucgggggcuacaccgagaagugggagagcggggugaaggacugcgugguccugcacuccuacuucacgagcgacuacuaccagcuguacuccacccagcucagcaccgacaccggcguggagcacgugacguucuucaucuacaacaagaucgucgacgagcccgaggagcacgugcagauccacaccaucgacggguccagcggcguggucaaccccgugauggagccgaucuacgacgagcccaccaccacgaccagcgugccccugugaggacuaguuauaagacugacuagcccgaugggccucccaacgggcccuccuccccuccuugcaccgagauuaauaaaaaaaaaaaaaaaaaaaaaaaaaaaaaaaaaaaaaaaaaaaaaaaaaaaaaaaaaaaaaaaaugcaucccccccccccccccccccccccccccccccaaaggcucuuuucagagccaccagaauu

SEQ ID NO: 22446 - RNA, 1045 nt, Artificial Sequence
  SARS-CoV-2__MT811464.1__ORF3a protein mRNA gc
aggagaaagcuuaccauggaccuguucaugcgcaucuucaccaucggcaccgugacgcucaagcagggggagaucaaggacgccacccccagcgacuucguccgggccaccgcgaccaucccgauccaggccucccugcccuucggcuggcugaucguggggguggcccuccuggccgucuuccagagcgccuccaagaucaucacgcugaagaagcgcuggcagcucgcgcugagcaagggcgugcacuucgugugcaaccugcuccugcuguucgucaccguguacucccaccuccugcugguggccgccgggcucgaggcccccuuccuguaccuguacgcgcucgucuacuuccugcagagcaucaacuucgugcggaucaucaugcgccuguggcucugcuggaagugccgguccaagaacccccugcuguacgacgccaacuacuuccucugcuggcacaccaacugcuacgacuacugcaucccgcacaacagcgugaccuccagcaucgucaucacguccggcgacggcaccaccagccccaucuccgagcacgacuaccagaucgggggcuacaccgagaagugggagagcggggugaaggacugcgugguccugcacuccuacuucacgagcgacuacuaccagcuguacuccacccagcucagcaccgacaccggcguggagcacgugacguucuucaucuacaacaagaucgucgacgagcccgaggagcacgugcagauccacaccaucgacggguccagcggcguggucaaccccgugauggagccgaucuacgacgagcccaccaccacgaccagcgugccccugugaggacuaguuauaagacugacuagcccgaugggccucccaacgggcccuccuccccuccuugcaccgagauuaauaaaaaaaaaaaaaaaaaaaaaaaaaaaaaaaaaaaaaaaaaaaaaaaaaaaaaaaaaaaaaaaaugcaucccccccccccccccccccccccccccccccaaaggcucuuuucagagccaccagaauu

SEQ ID NO: 22447 - RNA, 1045 nt, Artificial Sequence
  SARS-CoV-2__MT811495.1__ORF3a protein mRNA gc
aggagaaagcuuaccauggaccuguucaugcgcaucuucaccaucggcaccgugacgcucaagcagggggagaucaaggacgccacccccagcgacuucguccgggccaccgcgaccaucccgauccaggccucccugcccuucggcuggcugaucguggggguggcccuccuggccgucuuccacagcgccuccaagaucaucacgcugaagaagcgcuggcagcucgcgcugagcaagggcgugcacuucgugugcaaccugcuccugcuguucgucaccguguacucccaccuccugcugguggccgccgggcucgaggcccccuuccuguaccuguacgcgcucgucuacuuccugcagagcaucaacuucgugcggaucaucaugcgccuguggcucugcuggaagugccgguccaagaacccccugcuguacgacgccuacuacuuccucugcuggcacaccaacugcuacgacuacugcaucccguacaacagcgugaccuccagcaucgucaucacguccggcgacggcaccaccagccccaucuccgagcacgacuaccagaucgggggcuacaccgagaagugggagagcggggugaaggacugcgugguccugcacuccuacuucacgagcgacuacuaccagcuguacuccacccagcucagcaccgacaccggcguggagcacgugacguucuucaucuacaacaagaucgucgacgagcccgaggagcacgugcagauccacaccaucgacggguccagcggcguggucaaccccgugauggagccgaucuacgacgagcccaccaccacgaccagcgugccccugugaggacuaguuauaagacugacuagcccgaugggccucccaacgggcccuccuccccuccuugcaccgagauuaauaaaaaaaaaaaaaaaaaaaaaaaaaaaaaaaaaaaaaaaaaaaaaaaaaaaaaaaaaaaaaaaaugcaucccccccccccccccccccccccccccccccaaaggcucuuuucagagccaccagaauu

SEQ ID NO: 22448 - RNA, 1045 nt, Artificial Sequence
  SARS-CoV-2__MT811505.1__ORF3a protein mRNA gc
aggagaaagcuuaccauggaccuguucaugcgcaucuucaccaucggcaccgugacgcucaagcagggggagaucaaggacgccacccccagcgacuucguccgggccaccgcgaccaucccgauccaggccucccugcccuucggcuggcugaucguggggguggcccuccuggccgucuuccagagcgccuccaagaucaucacgcugaagaagcgcuggcagcucgcgcugagcaagggcgugcacuucgugugcaaccugcuccugcuguucgucaccguguacucccaccuccugcugguggccgccgggcucgaggcccccuuccuguaccuguacgcgcuccuguacuuccugcagagcaucaacuucguccggaucaucaugcgccucuggcugugcuggaagugccgguccaagaacccccugcucuacgacgccaacuacuuccugugcuggcacaccaacugcuacgacuacugcaucccguacaacagcgugaccuccagcaucgugaucacguccggcgacggcaccaccagccccaucuccgagcacgacuaccagaucgggggcuacaccgagaagugggagagcggggucaaggacugcguggugcugcacuccuacuucacgagcgacuacuaccagcucuacuccacccagcugagcaccgacaccggcgucgagcacgugacguucuucaucuacaacaagaucguggacgagcccgaggagcacguccagauccacaccaucgacggguccagcggcguggugaaccccgucauggagccgaucuacgacgagcccaccaccacgaccagcgugccccugugaggacuaguuauaagacugacuagcccgaugggccucccaacgggcccuccuccccuccuugcaccgagauuaauaaaaaaaaaaaaaaaaaaaaaaaaaaaaaaaaaaaaaaaaaaaaaaaaaaaaaaaaaaaaaaaaugcaucccccccccccccccccccccccccccccccaaaggcucuuuucagagccaccagaauu

SEQ ID NO: 22449 - RNA, 1045 nt, Artificial Sequence
  SARS-CoV-2__MT811513.1__ORF3a protein mRNA gc
aggagaaagcuuaccauggaccuguucaugcgcaucuucaccaucggcaccgugacgcucaagcagggggagaucaaggacgccacccccagcgacuucguccgggccaccgcgaccaucccgauccaggccucccugcccuucggcuggcugaucguggggguggcccuccuggccgucuuccagagcgccuccaagaucaucacgcugaagaagcgcuggcagcucgcgcugagcaagggcgugcacuucgugugcaaccugcuccugcuguucgucaccguguacucccaccuccugcugguggccgccgggcucgaggcccccuuccuguaccuguacgcgcucgucuacuuccugcagagcaucaacuucgugcggaucaucaugcgccuguggcucugcuggaagugccgguccaagaacccccugcuguacgacgccaacuacuuccucugcuggcacaccaacugcuacgacuacugcaucccguacaacagcgugaccuccagcaucgucaucacguccggcgacggcaccaccagccccaucuccgagcacgacuaccagaucgggggcuacaccgagaagugggagagcggggugaaggacugcgugguccugcacuccuacuucacgagcgacuacuaccagcuguacuccacccagcucagcaccgacaccggcguggagcacgugacguucuucaucuacaacaagaucgucgacgagcccgaggagcacgugcagauccacaccaucgacggguccagcggcguggucaacccccugauggagccgaucuacgacgagcccaccaccacgaccagcgugccccugugaggacuaguuauaagacugacuagcccgaugggccucccaacgggcccuccuccccuccuugcaccgagauuaauaaaaaaaaaaaaaaaaaaaaaaaaaaaaaaaaaaaaaaaaaaaaaaaaaaaaaaaaaaaaaaaaugcaucccccccccccccccccccccccccccccccaaaggcucuuuucagagccaccagaauu

SEQ ID NO: 22450 - RNA, 1045 nt, Artificial Sequence
  SARS-CoV-2__MT811520.1__ORF3a protein mRNA gc
aggagaaagcuuaccauggaccuguucaugcgcaucuucaccaucggcaccgugacgcucaagcagggggagaucaaggacgccacccccagcgacuucguccgggccaccgcgaccaucccgauccaggccucccugcccuucggcuggcugaucguggggguggcccuccuggccgucuuccagagcgccuccaagaucaucacgcugaagaagcgcuggcagcucgcgcugagcaagggcgugcacuucgugugcaaccugcuccugcuguucgucaccguguacucccaccuccugcugguggccgccuuccucgaggcccccuuccuguaccuguacgcgcucgucuacuuccugcagagcaucaacuucgugcggaucaucaugcgccuguggcucugcuggaagugccgguccaagaacccccugcuguacgacgccaacuacuuccucugcuggcacaccaacugcuacgacuacugcaucccguacaacagcgugaccuccagcaucgucaucacguccggggacggcaccaccagccccaucuccgagcacgacuaccagaucggcggguacaccgagaagugggagagcggcgugaaggacugcgugguccugcacuccuacuucacgagcgacuacuaccagcuguacuccacccagcucagcaccgacaccgggguggagcacgugacguucuucaucuacaacaagaucgucgacgagcccgaggagcacgugcagauccacaccaucgacggcuccagcgggguggucaaccccgugauggagccgaucuacgacgagcccaccaccacgaccagcgugccccugugaggacuaguuauaagacugacuagcccgaugggccucccaacgggcccuccuccccuccuugcaccgagauuaauaaaaaaaaaaaaaaaaaaaaaaaaaaaaaaaaaaaaaaaaaaaaaaaaaaaaaaaaaaaaaaaaugcaucccccccccccccccccccccccccccccccaaaggcucuuuucagagccaccagaauu

SEQ ID NO: 22451 - RNA, 1045 nt, Artificial Sequence
  SARS-CoV-2__MT811526.1__ORF3a protein mRNA gc
aggagaaagcuuaccauggaccuguucaugcgcaucuucaccaucggcaccgugacgcucaagcagggggagaucaaggacgccacccccagcgacuucguccgggccaccgcgaccaucccgauccaggccucccugcccuucggcuggcugaucguggggguggcccuccuggccgucuuccagagcgccuccaagaucaucacgcugaagaagcgcuggcagcucgcgcugagcaagggcgugcacuucgugugcaaccugcuccugcuguucgucaccguguacucccaccuccugcugguggccgccgggcucgaggcccccuuccuguaccuguacgcgcucgucuacuuccugcagagcauccacuucgugcggaucaucaugcgccuguggcucugcuggaagugccgguccaagaacccccugcuguacgacgccaacuacuuccucugcuggcacaccaacugcuacgacuacugcaucccguacaacagcgugaccuccagcaucgucaucacguccggcgacggcaccaccagccccaucuccgagcacgacuaccagaucgggggcuacaccgagaagugggagagcggggugaaggacugcgugguccugcacuccuacuucacgagcgacuacuaccagcuguacuccacccagcucagcaccgacaccggcguggagcacgugacguucuucaucuacaacaagaucgucgacgagcccgaggagcacgugcagauccacaccaucgacggguccagcggcguggucaaccccgugauggagccgaucuacgacgagcccaccaccacgaccagcgugccccugugaggacuaguuauaagacugacuagcccgaugggccucccaacgggcccuccuccccuccuugcaccgagauuaauaaaaaaaaaaaaaaaaaaaaaaaaaaaaaaaaaaaaaaaaaaaaaaaaaaaaaaaaaaaaaaaaugcaucccccccccccccccccccccccccccccccaaaggcucuuuucagagccaccagaauu

SEQ ID NO: 22452 - RNA, 1045 nt, Artificial Sequence
  SARS-CoV-2__MT811535.1__ORF3a protein mRNA gc
aggagaaagcuuaccauggaccuguucaugcgcaucuucaccaucggcaccgugacgcucaagcagggggagaucaaggacgccacccccagcgacuucguccgggccaccgcgaccaucccgauccaggccucccugcccuucggcuggcugaucguggggguggcccuccuggccgucuuccagagcgccuccaagaucaucacgcugaagaagcgcuggcagcucgcgcugagcaagggcgugcacuucgugugcaaccugcuccugcuguucgucaccguguacucccaccuccugcugguggccgccgggcucgaggcccccuuccuguaccuguacgcgcucgucuacuuccugcagagcaucaacuucgugcggaucaucaugcgccuguggcucugcuggaagugccgguccaagaacccccugcuguacgacgccaacuacuuccucugcuggcacaccaacugcuacgacuacugcaucccguacaacagcgugaccuccagcaucgucaucacguccggcgacggcaccaccagccccaucuccgagcacgacuaccagaucgggggcuacaccgagaagugggagagcggggugaaggacugcgugguccugcacuccuacuucacgagcgacuacuaccagcuguacuccacccaguucagcaccgacaccggcguggagcacgugacguucuucaucuacaacaagaucgucgacgagcccgaggagcacgugcagauccacaccaucgacggguccagcggcguggucaaccccgugauggagccgaucuacgacgagcccaccaccacgaccagcgugccccucugaggacuaguuauaagacugacuagcccgaugggccucccaacgggcccuccuccccuccuugcaccgagauuaauaaaaaaaaaaaaaaaaaaaaaaaaaaaaaaaaaaaaaaaaaaaaaaaaaaaaaaaaaaaaaaaaugcaucccccccccccccccccccccccccccccccaaaggcucuuuucagagccaccagaauu

SEQ ID NO: 22453 - RNA, 1045 nt, Artificial Sequence
  SARS-CoV-2__MT811544.1__ORF3a protein mRNA gc
aggagaaagcuuaccauggaccuguucaugcgcaucuucaccaucggcaccgugacgcucaagcagggggagaucaaggacgccacccccagcgacuucguccgggccaccgcgaccacgccgauccaggccucccugcccuucggcuggcugaucguggggguggcccuccuggccgucuuccacagcgccuccaagaucaucacccugaagaagcgcuggcagcucgcgcugagcaagggcgugcacuucgugugcaaccugcuccugcuguucgucaccguguacucccaccuccugcugguggccgccgggcucgaggcccccuuccuguaccuguacgcgcucgucuacuuccugcagagcaucaacuucgugcggaucaucaugcgccuguggcucugcuggaagugccgguccaagaacccccugcuguacgacgccaacuacuuccucugcuggcacaccaacugcuacgacuacugcaucccguacaacagcgugacguccagcaucgucaucaccuccggcgacggcaccaccagccccaucuccgagcacgacuaccagaucgggggcuacacggagaagugggagagcggggugaaggacugcgugguccugcacuccuacuucaccagcgacuacuaccagcuguacuccacccagcucagcaccgacacgggcguggagcacgugaccuucuucaucuacaacaagaucgucgacgagcccgaggagcacgugcagauccacaccaucgacggguccagcggcguggucaaccccgugauggagccgaucuacgacgagcccaccacgaccaccagcgugccccugugaggacuaguuauaagacugacuagcccgaugggccucccaacgggcccuccuccccuccuugcaccgagauuaauaaaaaaaaaaaaaaaaaaaaaaaaaaaaaaaaaaaaaaaaaaaaaaaaaaaaaaaaaaaaaaaaugcaucccccccccccccccccccccccccccccccaaaggcucuuuucagagccaccagaauu

SEQ ID NO: 22454 - RNA, 1045 nt, Artificial Sequence
  SARS-CoV-2__MT811711.1__ORF3a protein mRNA gc
aggagaaagcuuaccauggaccuguucaugcgcaucuucaccaucggcaccgugacgcucaagcagggggagaucaaggacgccacccccagcgacuucguccgggccaccgcgaccaucccgauccaggccucccugcccuucggcuggcugaucguggggguggcccuccuggccgucuuccacagcgccuccaagaucaucacgcugaagaagcgcuggcagcucgcgcugagcaagggcgugcacuucgugugcaaccugcuccugcuguucgucaccguguacucccaccuccugcugguggccgccgggcucgaggcccccuuccuguaccuguacgcgcucgucuacuuccugcagagcaucaacuucgugcggaucaucaugcgccuguggcucugcuggaagugccgguccaagaacccccugcuguacgacgccaacuacuuccucugcuggcacaccaacugcuacgacuacugcaucccguacaacagcgugaccuccagcaucgucaucacguccggcgacggcaccaccagccccaucuccgagcacgacuaccagaucgggggcuacaccgagaagugggagagcggggugaaggacugcgugguccugcacuccuacuucacgagcgacuacuaccagcuguacuccacccagcucagcaccgacaccggcguggagcacgugacguucuucaucuacaacaagaucgucgacgagcccgaggagcacgugcagauccacaccaucgacggguccagcggcguggucaaccccgugauggagccgaucuacgacgagcccaccaccacgaccagccugccccugugaggacuaguuauaagacugacuagcccgaugggccucccaacgggcccuccuccccuccuugcaccgagauuaauaaaaaaaaaaaaaaaaaaaaaaaaaaaaaaaaaaaaaaaaaaaaaaaaaaaaaaaaaaaaaaaaugcaucccccccccccccccccccccccccccccccaaaggcucuuuucagagccaccagaauu

SEQ ID NO: 22455 - RNA, 1045 nt, Artificial Sequence
  SARS-CoV-2__MT811727.1__ORF3a protein mRNA gc
aggagaaagcuuaccauggaccuguucaugcgcaucuucaccaucggcaccgugacgcucaagcagggggagaucaaggacgccacccccagcgacuucguccgggccaccgcgaccaucccgauccaggccucccugcccuucggcuggcugaucguggggguggcccuccuggccgucuuccacagcgccuccaagaucaucacgcugaagaagcgcuggcagcucgcgcugagcaagggcgugcacuucgugugcaaccugcuccugcuguucgucaccguguacucccaccuccugcugguggccgccgggcucgaggcccccuuccuguaccuguacgcgcucgucuacuuccugcagagcaucaacuucgugcggaucaucaugcgccuguggcucugcuggaagugccgguccaagaacccccugcuguacgacgccaacuacuuccucugcuggcacaccaacugcuacgacuacugcgugccguacaacagcgucaccuccagcaucgugaucacguccggcgacggcaccaccagccccaucuccgagcacgacuaccagaucgggggcuacaccgagaagugggagagcggggugaaggacugcgucgugcugcacuccuacuucacgagcgacuacuaccagcuguacuccacccagcucagcaccgacaccggcguggagcacgucacguucuucaucuacaacaagaucguggacgagcccgaggagcacgugcagauccacaccaucgacggguccagcggcgucgugaaccccgugauggagccgaucuacgacgagcccaccaccacgaccagcgucccccugugaggacuaguuauaagacugacuagcccgaugggccucccaacgggcccuccuccccuccuugcaccgagauuaauaaaaaaaaaaaaaaaaaaaaaaaaaaaaaaaaaaaaaaaaaaaaaaaaaaaaaaaaaaaaaaaaugcaucccccccccccccccccccccccccccccccaaaggcucuuuucagagccaccagaauu

SEQ ID NO: 22456 - RNA, 1045 nt, Artificial Sequence
  SARS-CoV-2__MT806773.1__ORF3a protein mRNA gc
aggagaaagcuuaccauggaccuguucaugcgcaucuucaccaucggcaccgugacgcucaagcagggggagaucaaggacgccacccccagcgacuucguccgggccaccgcgaccaucccgauccaggccucccugcccuucggcuggcugaucguggggguggcccuccuggccgucuuccacagcgccuccaagaucaucacgcugaagaagcgcuggcagcucgcgcugagcaagggcgugcacuucgugugcaaccugcuccugcuguucgucaccguguacucccaccuccugcugguggccgccgggcucgaggcccccuuccuguaccuguacgcgcucgucuacuuccugcagagcaucaacuucgugcggaucaucaugcgccuguggcucugccugaagugccgguccaagaacccccugcucuacgacgccaacuacuuccugugcuggcacaccaacugcuacgacuacugcaucccguacaacagcgugaccuccagcaucgucaucacguccggcgacggcaccaccagccccaucuccgagcacgacuaccagaucgggggcuacaccgagaagugggagagcggggugaaggacugcgugguccugcacuccuacuucacgagcgacuacuaccagcucuacuccacccagcugagcaccgacaccggcguggagcacgugacguucuucaucuacaacaagaucgucgacgagcccgaggagcacgugcagauccacaccaucgacggguccagcggcguggucaaccccgugauggagccgaucuacgacgagcccaccaccacgaccagcgugccccugugaggacuaguuauaagacugacuagcccgaugggccucccaacgggcccuccuccccuccuugcaccgagauuaauaaaaaaaaaaaaaaaaaaaaaaaaaaaaaaaaaaaaaaaaaaaaaaaaaaaaaaaaaaaaaaaaugcaucccccccccccccccccccccccccccccccaaaggcucuuuucagagccaccagaauu

SEQ ID NO: 22457 - RNA, 1045 nt, Artificial Sequence
  SARS-CoV-2__MT806884.1__ORF3a protein mRNA gc
aggagaaagcuuaccauggaccuguucaugaccaucuucaccaucggcacggugacccucaagcagggggagaucaaggacgccacccccagcgacuucguccgcgccaccgcgacgaucccgauccaggccucccugcccuucggcuggcugaucguggggguggcccuccuggccgucuuccacagcgccuccaagaucaucacccugaagaagcgguggcagcucgcgcugagcaagggcgugcacuucgugugcaaccugcuccugcuguucgucaccguguacucccaccuccugcugguggccgccgggcucgaggcccccuuccuguaccuguacgcgcucgucuacuuccugcagagcaucaacuucgugcgcaucaucaugcggcugugccucugcuggaagugccgcuccaagaacccccugcuguacgacgccaacuacuuccucugcuggcacaccaacugcuacgacuacugcaucccguacaacagcgugacguccagcaucgucaucaccuccggcgacggcaccaccagccccaucuccgagcacgacuaccagaucgggggcuacacggagaagugggagagcggggugaaggacugcgugguccugcacuccuacuucaccagcgacuacuaccagcuguacuccacccagcucagcaccgacacgggcguggagcacgugaccuucuucaucuacaacaagaucgucgacgagcccgaggagcacgugcagauccacaccaucgacggguccagcggcguggucaaccccgugauggagccgaucuacgacgagcccaccacgaccaccagcgugccccugugaggacuaguuauaagacugacuagcccgaugggccucccaacgggcccuccuccccuccuugcaccgagauuaauaaaaaaaaaaaaaaaaaaaaaaaaaaaaaaaaaaaaaaaaaaaaaaaaaaaaaaaaaaaaaaaaugcaucccccccccccccccccccccccccccccccaaaggcucuuuucagagccaccagaauu

SEQ ID NO: 22458 - RNA, 1045 nt, Artificial Sequence
  SARS-CoV-2__MT800021.1__ORF3a protein mRNA gc
aggagaaagcuuaccauggaccuguucaugcgcaucuucaccaucggcaccgugacgcucaagcagggggagaucaaggacgccacccccagcgacuucguccgggccaccgcgaccaucccgauccaggccucccugcccuucggcuggcugaucguggggguggcccuccuggccgucuuccagagcgccuccaagaucaucacgcugaagaagaucuggcagcucgcgcugagcaagggcgugcacuucgugugcaaccugcuccugcuguucgucaccguguacucccaccuccugcugguggccgccgggcucgaggcccccuuccuguaccuguacgcgcucgucuacuuccugcagagcaucaacuucgugcgcaucaucaugcggcuguggcucugcuggaagugccgcuccaagaacccccugcuguacgacgccaacuacuuccucugcuggcacaccaacugcuacgacuacugcaucccguacaacagcgugaccuccagcaucgucaucacguccggcgacggcaccaccagccccaucuccgagcacgacuaccagaucgggggcuacaccgagaagugggagagcggggugaaggacugcgugguccugcacuccuacuucacgagcgacuacuaccagcuguacuccacccagcucagcaccgacaccggcguggagcacgugacguucuucaucuacaacaagaucgucgacgagcccgaggagcacgugcagauccacaccaucgacggguccagcggcguggucaaccccgugauggagccgaucuacgacgagcccaccaccacgaccagcgugccccugugaggacuaguuauaagacugacuagcccgaugggccucccaacgggcccuccuccccuccuugcaccgagauuaauaaaaaaaaaaaaaaaaaaaaaaaaaaaaaaaaaaaaaaaaaaaaaaaaaaaaaaaaaaaaaaaaugcaucccccccccccccccccccccccccccccccaaaggcucuuuucagagccaccagaauu

SEQ ID NO: 22459 - RNA, 1036 nt, Artificial Sequence
  SARS-CoV-2__MT800029.1__ORF3a protein mRNA gc
aggagaaagcuuaccauggaccuguucaugcgcaucuucaccaucggcaccgugacgcucaagcagaaggacgccacccccagcgacuucguccgggccaccgcgaccaucccgauccaggccucccugcccuucggguggcugaucgugggcguggcccuccuggccgucuuccagagcgccuccaagaucaucacgcugaagaagcgcuggcagcucgcgcugagcaagggggugcacuucgugugcaaccugcuccugcuguucgucaccguguacucccaccuccugcugguggccgccggccucgaggcccccuuccuguaccuguacgcgcucgucuacuuccugcagagcaucaacuucgugcggaucaucaugcgccuguggcucugcuggaagugccgguccaagaacccccugcuguacgacgccaacuacuuccucugcuggcacaccaacugcuacgacuacugcaucccguacaacagcgugaccuccagcaucgucaucacguccggggacggcaccaccagccccaucuccgagcacgacuaccagaucggcggguacaccgagaagugggagagcggcgugaaggacugcgugguccugcacuccuacuucacgagcgacuacuaccagcuguacuccacccagcucagcaccgacaccgggguggagcacgugacguucuucaucuacaacaagaucgucgacgagcccgaggagcacgugcagauccacaccaucgacggcuccagcgggguggucaaccccgugauggagccgaucuacgacgagcccaccaccacgaccagcgugccccugugaggacuaguuauaagacugacuagcccgaugggccucccaacgggcccuccuccccuccuugcaccgagauuaauaaaaaaaaaaaaaaaaaaaaaaaaaaaaaaaaaaaaaaaaaaaaaaaaaaaaaaaaaaaaaaaaugcaucccccccccccccccccccccccccccccccaaaggcucuuuucagagccaccagaauu

SEQ ID NO: 22460 - RNA, 1042 nt, Artificial Sequence
  SARS-CoV-2__MT800036.1__ORF3a protein mRNA gc
aggagaaagcuuaccauggaccuguucaugcgcaucuucaccaucggcaccgugacgcucaagcagggggagaucaaggacgccacccccagcgacuucguccgggccaccgcgaccaucccgauccaggccucccugcccuucggcuggcugaucguggggguggcccuccuggccgucuuccacagcgccuccaagaucaucacgcugaagaagcgcuggcagcucgcgcugagcaagggcgugcacuucgugugcaaccugcuccugcuguucgucaccguguacucccaccuccugcugguggccgccgggcucgaggcccccuuccuguaccuguacgcgcucgucuacuuccugcagagcaucaacuucgugcggaucaucaugcgccuguggcucugcuggaagugccgguccaagaacccccugcuguacgacgccaacuacuuccucugcuggcacaccaacugcuacgacuacugcaucccguacaacagcgugaccuccagcaucgucaucacguccggcgacggcaccaccagccccaucuccgagcacgacuaccagaucgggggcuacaccgagaagugggagagcggggugaaggacugcgugguccugcacuccuacuucacgagcgacuacuaccagcuguacuccacccagcucagcaccgacaccggcguggagcacgugacguucuucaucuacaacaagaucgucgacgagcccgaggagcacgugcagauccacaccaucgacggguccagcggcguggaccccgucauggagccgaucuacgacgagcccaccaccacgaccagcgugccccugugaggacuaguuauaagacugacuagcccgaugggccucccaacgggcccuccuccccuccuugcaccgagauuaauaaaaaaaaaaaaaaaaaaaaaaaaaaaaaaaaaaaaaaaaaaaaaaaaaaaaaaaaaaaaaaaaugcaucccccccccccccccccccccccccccccccaaaggcucuuuucagagccaccagaauu

SEQ ID NO: 22461 - RNA, 1045 nt, Artificial Sequence
  SARS-CoV-2__MT800050.1__ORF3a protein mRNA gc
aggagaaagcuuaccauggaccuguucaugcgcaucuucaccaucggcaccgugacgcucaagcagggggagauccaggacgccacccccagcgacuucguccgggccaccgcgaccaucccgauccaggccucccugcccuucggcuggcugaucguggggguggcccuccuggccgucuuccagagcgccuccaagaucaucacgcugaagaagcgcuggcagcucgcgcugagcaagggcgugcacuucgugugcaaccugcuccugcuguucgucaccguguacucccaccuccugcugguggccgccgggcucgaggcccccuuccuguaccuguacgcgcucgucuacuuccugcagagcaucaacuucgugcggaucaucaugcgccuguggcucugcuggaagugccgguccaagaacccccugcuguacgacgccaacuacuuccucugcuggcacaccaacugcuacgacuacugcaucccguacaacagcgugaccuccagcaucgucaucacguccggcgacggcaccaccagccccaucuccgagcacgacuaccagaucgggggcuacaccgagaagugggagagcggggugaaggacugcgugguccugcacuccuacuucacgagcgacuacuaccagcuguacuccacccagcucagcaccgacaccggcguggagcacgugacguucuucaucuacaacaagaucgucgacgagcccgaggagcacgugcagauccacaccaucgacggguccagcggcguggucaaccccgugauggagccgaucuacgacgagcccaccaccacgaccagcgugccccugugaggacuaguuauaagacugacuagcccgaugggccucccaacgggcccuccuccccuccuugcaccgagauuaauaaaaaaaaaaaaaaaaaaaaaaaaaaaaaaaaaaaaaaaaaaaaaaaaaaaaaaaaaaaaaaaaugcaucccccccccccccccccccccccccccccccaaaggcucuuuucagagccaccagaauu

SEQ ID NO: 22462 - RNA, 1045 nt, Artificial Sequence
  SARS-CoV-2__MT801003.1__ORF3a protein mRNA gc
aggagaaagcuuaccauggaccuguucaugcgcaucuucaccaucggcaccgugacgcucaagcagggggagaucaaggacgccacccccagcgacuucguccgggccaccgcgaccaucccgauccaggccucccugcccuucggcuggcugaucguggggguggcccuccuggccgucuuccacagcgccuccaagaucaucacgcugaagaagcgcuggcagcucgcguucagcaagggcgugcacuucgugugcaaccugcugcuccuguucgucaccguguacucccaccuccugcugguggccgccgggcuggaggcccccuuccucuaccuguacgcgcuggucuacuuccuccagagcaucaacuucgugcggaucaucaugcgccuguggcugugcuggaagugccgguccaagaacccccuccuguacgacgccaacuacuuccugugcuggcacaccaacugcuacgacuacugcaucccguacaacagcgugaccuccagcaucgucaucacguccggcgacggcaccaccagccccaucuccgagcacgacuaccagaucgggggcuacaccgagaagugggagagcggggugaaggacugcgugguccuccacuccuacuucacgagcgacuacuaccagcuguacuccacccagcugagcaccgacaccggcguggagcacgugacguucuucaucuacaacaagaucgucgacgagcccgaggagcacgugcagauccacaccaucgacggguccagcggcguggucaaccccgugauggagccgaucuacgacgagcccaccaccacgaccagcgugccccucugaggacuaguuauaagacugacuagcccgaugggccucccaacgggcccuccuccccuccuugcaccgagauuaauaaaaaaaaaaaaaaaaaaaaaaaaaaaaaaaaaaaaaaaaaaaaaaaaaaaaaaaaaaaaaaaaugcaucccccccccccccccccccccccccccccccaaaggcucuuuucagagccaccagaauu

SEQ ID NO: 22463 - RNA, 1045 nt, Artificial Sequence
  SARS-CoV-2__MT252720.1__ORF3a protein mRNA gc
aggagaaagcuuaccauggaccuguucaugcgcaucuucaccaucggcaccgugacgcucaagcagggggagaucaaggacgccacccccagcgacuucguccgggccaccgcgaccaucccgauccaggccucccugcccuucggcuggcugaucguggggguggcccuccuggccgucuuccagagcgccuccaagaucaucacgcugaagaagcgcuggcagcucgcgcugagcaagggcgugcacuucgugugcaaccugcuccugcuguucgucaccguguacucccaccuccugcugguggccgccgggcucgaggcccccuuccuguaccuguacgcgcucgucuacuuccugcagagcaucaacuucgugcggaucaucaugcgccuguggcucugcuggaagugccgguccaagaacccccugcuguacgacgccaacuacuuccucugcuggcacaccaacugcuacgacuacugcaucccguacaacagcgugaccuccagcaucgucaucacguccggcgacggcaccaccagccccaucuccgagcacgacuaccagaucgggggcuacaccgagaagugggagagcggggugaaggacugcgugguccugcacuccuacuucacgagcgacuacuaccagcuguacuccacccagcucagcaccgacaccggcguggagcacgugacguucuucaucuacaacaagaucgucgacgagcccgaggagcacgugcagauccacaccaucgacugcuccagcgggguggucaaccccgugauggagccgaucuacgacgagcccaccaccacgaccagcgugccccugugaggacuaguuauaagacugacuagcccgaugggccucccaacgggcccuccuccccuccuugcaccgagauuaauaaaaaaaaaaaaaaaaaaaaaaaaaaaaaaaaaaaaaaaaaaaaaaaaaaaaaaaaaaaaaaaaugcaucccccccccccccccccccccccccccccccaaaggcucuuuucagagccaccagaauu

SEQ ID NO: 22464 - RNA, 1045 nt, Artificial Sequence
  SARS-CoV-2__MT252817.1__ORF3a protein mRNA gc
aggagaaagcuuaccauggaccuguucaugcgcaucuucaccaucggcaccgugacgcucaagcagggggagaucaaggacgccacccccagcgacuucguccgggccaccgcgaccaucccgauccaggccucccugcccuucggcuggcugaucguggggguggcccuccuggccgucuuccagagcgccuccaagaucaucacgcugaagaagcgcuggcagcucgcgcugagcaagggcgugcacuucgugugcaaccugcuccugcuguucgucaccguguacucccaccuccugcugguggccgccgggcucgaggcccccuuccuguaccuguacgcgcucgucuacuuccugcagagcaucaacuucgugcggaucaucaugcgccuguggcucugcuggaagugccgguccaagaacccccugcuguacgacgccaacuacuuccucugcuggcacaccaacugcuacgacuacugcaucccguacaacagcgugaccuccagcaucgucaucacguccggcgacggcaccaccagccccaucuccgagcacgacuaccagaucgggggcuacaccgagaagugggagagcggggugaaggacugcgugguccugcacuccuacuucacgagcgacuacuaccagcuguacuccacccagcucagcaccgacaccggcguggagcacgugacguucuucaucuacaacaagaucgucgacgagcccgaggagcacgugcagauccacaccaucgacggguccagccgcguggucaaccccgugauggagccgaucuacgacgagcccaccaccacgaccagcgugccccugugaggacuaguuauaagacugacuagcccgaugggccucccaacgggcccuccuccccuccuugcaccgagauuaauaaaaaaaaaaaaaaaaaaaaaaaaaaaaaaaaaaaaaaaaaaaaaaaaaaaaaaaaaaaaaaaaugcaucccccccccccccccccccccccccccccccaaaggcucuuuucagagccaccagaauu

SEQ ID NO: 22465 - RNA, 1045 nt, Artificial Sequence
  SARS-CoV-2__MT795875.1__ORF3a protein mRNA gc
aggagaaagcuuaccauggaccuguucaugcgcaucuucaccaucggcaccgugacgcucaagcagggggagaucaaggacgccacccccagcgacuucguccgggccaccgcgaccaucccgauccaggccucccugcccuucggcuggcugaucguggggguggcccuccuggccgucuuccagagcgccuccaagaucaucacgcugaagaagcgcuggcagcucgcgcugagcaagggcgugcacuucgugugcaaccugcuccugcuguucgucaccguguacucccaccuccugcugguggccgccgggcucgaggcccccuuccuguaccuguacgcgcucgucuacuuccugcagagcaucaacuucgugcggaucaucaugcgccuguggcucugcuggaagugccgguccaagaacccccugcuguacgacgccaacuacuuccucugcuggcacaccaacugcuacgacuacugcaucccguacaacagcgugaccuccagcaucgucaucacguccugcgacggcaccaccagccccaucuccgagcacgacuaccagaucggcggguacaccgagaagugggagagcggcgugaaggacugcgugguccugcacuccuacuucacgagcgacuacuaccagcuguacuccacccagcucagcaccgacaccgggguggagcacgugacguucuucaucuacaacaagaucgucgacgagcccgaggagcacgugcagauccacaccaucgacggcuccagcgggguggucaaccccgugauggagccgaucuacgacgagcccaccaccacgaccagcgugccccugugaggacuaguuauaagacugacuagcccgaugggccucccaacgggcccuccuccccuccuugcaccgagauuaauaaaaaaaaaaaaaaaaaaaaaaaaaaaaaaaaaaaaaaaaaaaaaaaaaaaaaaaaaaaaaaaaugcaucccccccccccccccccccccccccccccccaaaggcucuuuucagagccaccagaauu

SEQ ID NO: 22466 - RNA, 1045 nt, Artificial Sequence
  SARS-CoV-2__MT795884.1__ORF3a protein mRNA gc
aggagaaagcuuaccauggaccuguucaugcgcaucuucaccaucggcaccgugacgcucaagcagggggagaucaaggacgccacccccagcgacuucguccgggccaccgcgaccaucccgauccaggccucccugcccuucggcuggcugaucguggggguggcccuccacgccgucuuccacagcgccuccaagaucaucacgcugaagaagcgcuggcagcuggcgcucagcaagggcgugcacuucgugugcaaccugcugcuccuguucgucaccguguacucccaccuccugcugguggccgccgggcuggaggcccccuuccucuaccuguacgcgcuggucuacuuccuccagagcaucaacuucgugcggaucaucaugcgccuguggcugugcuggaagugccgguccaagaacccccuccuguacgacgccaacuacuuccugugcuggcacaccaacugcuacgacuacugcaucccguacaacagcgugaccuccagcaucgucaucacguccggcgacggcaccaccagccccaucuccgagcacgacuaccagaucgggggcuacaccgagaagugggagagcggggugaaggacugcgugguccuccacuccuacuucacgagcgacuacuaccagcuguacuccacccagcugagcaccgacaccggcguggagcacgugacguucuucaucuacaacaagaucgucgacgagcccgaggagcacgugcagauccacaccaucgacggguccagcggcguggucaaccccgugauggagccgaucuacgacgagcccaccaccacgaccagcgugccccucugaggacuaguuauaagacugacuagcccgaugggccucccaacgggcccuccuccccuccuugcaccgagauuaauaaaaaaaaaaaaaaaaaaaaaaaaaaaaaaaaaaaaaaaaaaaaaaaaaaaaaaaaaaaaaaaaugcaucccccccccccccccccccccccccccccccaaaggcucuuuucagagccaccagaauu

SEQ ID NO: 22467 - RNA, 1045 nt, Artificial Sequence
  SARS-CoV-2__MT797760.1__ORF3a protein mRNA gc
aggagaaagcuuaccauggaccuguucaugcgcaucuucaccaucggcaccgugacgcucaagcagggggagaucaaggacgccacccccagcgacuucguccgggccaccgcgaccaucccgauccaggccucccugcccuucggcugguucaucguggggguggcccugcucgccgucuuccacagcgccuccaagaucaucacgcugaagaagcgcuggcagcuggcgcucagcaagggcgugcacuucgugugcaaccugcugcuccuguucgucaccguguacucccaccuccugcugguggccgccgggcuggaggcccccuuccucuaccuguacgcgcuggucuacuuccuccagagcaucaacuucgugcggaucaucaugcgccuguggcugugcuggaagugccgguccaagaacccccuccuguacgacgccaacuacuuccugugcuggcacaccaacugcuacgacuacugcaucccguacaacagcgugaccuccagcaucgucaucacguccggcgacggcaccaccagccccaucuccgagcacgacuaccagaucgggggcuacaccgagaagugggagagcggggugaaggacugcgugguccuccacuccuacuucacgagcgacuacuaccagcuguacuccacccagcugagcaccgacaccggcguggagcacgugacguucuucaucuacaacaagaucgucgacgagcccgaggagcacgugcagauccacaccaucgacggguccagcggcguggucaaccccgugauggagccgaucuacgacgagcccaccaccacgaccagcgugccccucugaggacuaguuauaagacugacuagcccgaugggccucccaacgggcccuccuccccuccuugcaccgagauuaauaaaaaaaaaaaaaaaaaaaaaaaaaaaaaaaaaaaaaaaaaaaaaaaaaaaaaaaaaaaaaaaaugcaucccccccccccccccccccccccccccccccaaaggcucuuuucagagccaccagaauu

SEQ ID NO: 22468 - RNA, 1045 nt, Artificial Sequence
  SARS-CoV-2__MT791915.1__ORF3a protein mRNA gc
aggagaaagcuuaccauggaccuguucaugcgcaucuucaccaucggcaccgugacgcucaagcagggggagaucaaggacagcacccccuccgacuucguccgggccaccgccaccaucccgauccaggcgagccugcccuucggcuggcugaucguggggguggcccuccuggccgucuuccaguccgccagcaagaucaucacgcugaagaagcgcuggcagcucgcccuguccaagggcgugcacuucgugugcaaccugcuccugcuguucgucaccguguacagccaccuccugcugguggcggccgggcucgaggcccccuuccuguaccuguacgcccucgucuacuuccugcaguccaucaacuucgugcggaucaucaugcgccuguggcucugcuggaagugccggagcaagaacccccugcuguacgacgcgaacuacuuccucugcuggcacaccaacugcuacgacuacugcaucccguacaacuccgugaccagcuccaucgucaucacgagcggcgacggcaccaccucccccaucagcgagcacgacuaccagaucgggggcuacaccgagaagugggaguccggggugaaggacugcgugguccugcacagcuacuucacguccgacuacuaccagcuguacagcacccagcucuccaccgacaccggcguggagcacgugacguucuucaucuacaacaagaucgucgacgagcccgaggagcacgugcagauccacaccaucgacgugagcagcggggucgugaaccccgugauggagccgaucuacgacgagcccaccaccacgaccuccgucccccugugaggacuaguuauaagacugacuagcccgaugggccucccaacgggcccuccuccccuccuugcaccgagauuaauaaaaaaaaaaaaaaaaaaaaaaaaaaaaaaaaaaaaaaaaaaaaaaaaaaaaaaaaaaaaaaaaugcaucccccccccccccccccccccccccccccccaaaggcucuuuucagagccaccagaauu

SEQ ID NO: 22469 - RNA, 1045 nt, Artificial Sequence
  SARS-CoV-2__MT791954.1__ORF3a protein mRNA gc
aggagaaagcuuaccauggaccuguucaugcgcaucuucaccaucggcaccgugacgcucaagcagggggagaucaaggacgccacccccagcgacuucguccgggccaccgcgaccaucccgauccaggccucccugcccuucggcuggcugaucguggggguggcccuccuggccgucuucuacagcgccuccaagaucaucacgcugaagaagcgcuggcagcucgcgcugagcaagggcgugcacuucgugugcaaccugcuccugcuguucgucaccguguacucccaccuccugcugguggccgccgggcucgaggcccccuuccuguaccuguacgcgcucgucuacuuccugcagagcaucaacuucgugcggaucaucaugcgccuguggcucugcuggaagugccgguccaagaacccccugcuguacgacgccaacuacuuccucugcuggcacaccaacugcuacgacuacugcaucccguacaacagcgugaccuccagcaucgucaucacguccggcgacggcaccaccagccccaucuccgagcacgacuaccagaucgggggcuacaccgagaagugggagagcggggugaaggacugcgugguccugcacuccuacuucacgagcgacuacuaccagcuguacuccacccagcucagcaccgacaccggcguggagcacgugacguucuucaucuacaacaagaucgucgacgagcccgaggagcacgugcagauccacaccaucgacggguccagcggcguggucaaccccgugauggagccgaucuacgacgagcccaccaccacgaccagcgugccccugugaggacuaguuauaagacugacuagcccgaugggccucccaacgggcccuccuccccuccuugcaccgagauuaauaaaaaaaaaaaaaaaaaaaaaaaaaaaaaaaaaaaaaaaaaaaaaaaaaaaaaaaaaaaaaaaaugcaucccccccccccccccccccccccccccccccaaaggcucuuuucagagccaccagaauu

SEQ ID NO: 22470 - RNA, 1045 nt, Artificial Sequence
  SARS-CoV-2__MT786802.1__ORF3a protein mRNA gc
aggagaaagcuuaccauggaccuguucaugcgcaucuucaccaucggcaccgugacgcucaagcagggggagaucaaggacgccacccccagcgacuucguccgggccaccgcgaccaucccgauccaggccucccugcccuucggcuggcugaucguggggguggcccuccuggccgucuuccacagcgccuccaagaucaucacgcugaagaagcgcuggcagcucgcgcugagcaagggcgugcacuucgugugcaaccugcuccugcuguucgucaccguguacucccaccuccugcugguggccgccgggcucgaggcccccuuccuguaccuguacgcgcucgucuacuuccugcagagcaucaacuucgugcggaucaucaugcgccuguggcucugcuggaagugccgguccaagaacccccugcuguacgacgccaacuacuuccucugcuggcacaccaacugcuacuacuacugcaucccguacaacagcgugaccuccagcaucgucaucacguccggcgacggcaccaccagccccaucuccgagcacgacuaccagaucgggggcuacaccgagaagugggagagcggggugaaggacugcgugguccugcacuccuacuucacgagcgacuacuaccagcuguacuccacccagcucagcaccgacaccggcguggagcacgugacguucuucaucuacaacaagaucgucgacgagcccgaggagcacgugcagauccacaccaucgacggguccagcggcguggucaaccccgugauggagccgaucuacgacgagcccaccaccacgaccagcgugccccugugaggacuaguuauaagacugacuagcccgaugggccucccaacgggcccuccuccccuccuugcaccgagauuaauaaaaaaaaaaaaaaaaaaaaaaaaaaaaaaaaaaaaaaaaaaaaaaaaaaaaaaaaaaaaaaaaugcaucccccccccccccccccccccccccccccccaaaggcucuuuucagagccaccagaauu

SEQ ID NO: 22471 - RNA, 1045 nt, Artificial Sequence
  SARS-CoV-2__MT786838.1__ORF3a protein mRNA gc
aggagaaagcuuaccauggaccuguucaugcgcaccuucaccaucggcacggugacccucaagcagggggagaucaaggacgccacccccagcgacuucguccgggccaccgcgacgaucccgauccaggccucccugcccuucggcuggcugaucguggggguggcccuccuggccgucuuccacagcgccuccaagaucaucacccugaagaagcgcuggcagcucgcgcugagcaagggcgugcacuucgugugcaaccugcuccugcuguucgucaccguguacucccaccuccugcugguggccgccgggcucgaggcccccuuccuguaccuguacgcgcucgucuacuuccugcagagcaucaacuucgugcggaucaucaugcgccuguggcucugcuggaagugccgguccaagaacccccugcuguacgacgccaacuacuuccucugcuggcacaccaacugcuacgacuacugcaucccguacaacagcgugacguccagcaucgucaucaccuccggcgacggcaccaccagccccaucuccgagcacgacuaccagaucgggggcuacacggagaagugggagagcggggugaaggacugcgugguccugcacuccuacuucaccagcgacuacuaccagcuguacuccacccagcucagcaccgacacgggcguggagcacgugaccuucuucaucuacaacaagaucgucgacgagcccgaggagcacgugcagauccacaccaucgacggguccagcggcguggucaaccccgugauggagccgaucuacgacgagcccaccacgaccaccagcgugccccugugaggacuaguuauaagacugacuagcccgaugggccucccaacgggcccuccuccccuccuugcaccgagauuaauaaaaaaaaaaaaaaaaaaaaaaaaaaaaaaaaaaaaaaaaaaaaaaaaaaaaaaaaaaaaaaaaugcaucccccccccccccccccccccccccccccccaaaggcucuuuucagagccaccagaauu

SEQ ID NO: 22472 - RNA, 1045 nt, Artificial Sequence
  SARS-CoV-2__MT786846.1__ORF3a protein mRNA gc
aggagaaagcuuaccauggaccuguucaugcgcaucuucaccaucggcaccgugacgcucaagcagggggagaucaaggacgccacccccagcgacuucguccgggccaccgcgaccaucccgauccaggccucccugcccuucggcuggcugaucguggggguggcccuccuggccgucuuccagagcgccuccaagaucaucacgcugaagaagcgcuggcagcucgcgcugagcaagggcgugcacuucgugugcaaccugcuccugcuguucgucaccguguacucccaccuccugcugguggccgccgggcucgaggcccccuuccuguaccuguacgcgcucgucuacuuccugcagagcaucaacuucgugcggaucaucaugcgccuguggcucugcuggaagugccgguccaagaacccccugcuguacgacgccuacuacuuccucugcuggcacaccaacugcuacgacuacugcaucccguacaacagcgugaccuccagcaucgucaucacguccggcgacggcaccaccagccccaucuccgagcacgacuaccagaucgggggcuacaccgagaagugggagagcggggugaaggacugcgugguccugcacuccuacuucacgagcgacuacuaccagcuguacuccacccagcucagcaccgacaccggcguggagcacgugacguucuucaucuacaacaagaucgucgacgagcccgaggagcacgugcagauccacaccaucgacggguccagcggcguggucaaccccgugauggagccgaucuacgacgagcccaccaccacgaccagcgugccccugugaggacuaguuauaagacugacuagcccgaugggccucccaacgggcccuccuccccuccuugcaccgagauuaauaaaaaaaaaaaaaaaaaaaaaaaaaaaaaaaaaaaaaaaaaaaaaaaaaaaaaaaaaaaaaaaaugcaucccccccccccccccccccccccccccccccaaaggcucuuuucagagccaccagaauu

SEQ ID NO: 22473 - RNA, 1045 nt, Artificial Sequence
  SARS-CoV-2__MT789712.1__ORF3a protein mRNA gc
aggagaaagcuuaccauggaccuguucaugcgcaucuucaccaucggcaccgugacgcucaagcagggggagaucaaggacgccacccccagcgacuucguccgggccaccgcgaccaucccgauccaggccucccugcccuucggcuggcugaucguggggguggcccuccuggccgucuuccagagcgccuccaagaucaucacgcugaagaagcgcuggcagcucgcgcugagcaagggcgugcacuucgugugcaaccugcuccugcuguucgucaccguguacucccaccuccuguucguggccgccgggcuggaggcccccuuccucuaccuguacgcgcuggucuacuuccuccagagcaucaacuucgugcggaucaucaugcgccuguggcugugcuggaagugccgguccaagaacccccuccuguacgacgccaacuacuuccugugcuggcacaccaacugcuacgacuacugcaucccguacaacagcgugaccuccagcaucgucaucacguccggcgacggcaccaccagccccaucuccgagcacgacuaccagaucgggggcuacaccgagaagugggagagcggggugaaggacugcgugguccuccacuccuacuucacgagcgacuacuaccagcuguacuccacccagcugagcaccgacaccggcguggagcacgugacguucuucaucuacaacaagaucgucgacgagcccgaggagcacgugcagauccacaccaucgacggguccagcggcguggucaaccccgugauggagccgaucuacgacgagcccaccaccacgaccagcgugccccucugaggacuaguuauaagacugacuagcccgaugggccucccaacgggcccuccuccccuccuugcaccgagauuaauaaaaaaaaaaaaaaaaaaaaaaaaaaaaaaaaaaaaaaaaaaaaaaaaaaaaaaaaaaaaaaaaugcaucccccccccccccccccccccccccccccccaaaggcucuuuucagagccaccagaauu

SEQ ID NO: 22474 - RNA, 1045 nt, Artificial Sequence
  SARS-CoV-2__MT782364.1__ORF3a protein mRNA gc
aggagaaagcuuaccauggaccuguucaugcgcaucuucaccaucggcaccgugacgcucaagcagugcgagaucaaggacgccacccccagcgacuucguccgggccaccgcgaccaucccgauccaggccucccugcccuucggguggcugaucgugggcguggcccuccuggccgucuuccacagcgccuccaagaucaucacgcugaagaagcgcuggcagcucgcgcugagcaagggggugcacuucgugugcaaccugcuccugcuguucgucaccguguacucccaccuccugcugguggccgccggccucgaggcccccuuccuguaccuguacgcgcucgucuacuuccugcagagcaucaacuucgugcggaucaucaugcgccuguggcucugcuggaagugccgguccaagaacccccugcuguacgacgccaacuacuuccucugcuggcacaccaacugcuacgacuacugcaucccguacaacagcgugaccuccagcaucgucaucacguccggggacggcaccaccagccccaucuccgagcacgacuaccagaucggcggguacaccgagaagugggagagcggcgugaaggacugcgugguccugcacuccuacuucacgagcgacuacuaccagcuguacuccacccagcucagcaccgacaccgggguggagcacgugacguucuucaucuacaacaagaucgucgacgagcccgaggagcacgugcagauccacaccaucgacggcuccagcgggguggucaaccccgugauggagccgaucuacgacgagcccaccaccacgaccagcgugccccugugaggacuaguuauaagacugacuagcccgaugggccucccaacgggcccuccuccccuccuugcaccgagauuaauaaaaaaaaaaaaaaaaaaaaaaaaaaaaaaaaaaaaaaaaaaaaaaaaaaaaaaaaaaaaaaaaugcaucccccccccccccccccccccccccccccccaaaggcucuuuucagagccaccagaauu

SEQ ID NO: 22475 - RNA, 1045 nt, Artificial Sequence
  SARS-CoV-2__MT776411.1__ORF3a protein mRNA gc
aggagaaagcuuaccauggaccuguucaugcgcaucuucaccaucggcaccgugacgcucaagcagggggagaucaaggacgccacccccagcgacuucguccgggccaccgcgaccaucccgauccaggccucccugcccuucggcuggcugaucguggggguggcccuccuggccgucuuccagagcgccuccaagaucaucacgcugaagaagcgcuggcagcucgcgcugagcaagggcgugcacuucgugugcaaccugcuccugcuguucgucaccguguacucccaccuccugcugguggccgccgggcucgaggcccccuuccuguaccuguacgcgcucgucuacuuccugcagagcaucaacuucgugcggaucaucaugcgccuguggcucugcuggaagugccgguccaagaacccccugcuguacgacgccaacuacuuccucugcuggcacaccaacugcuacgacuacugcaucccguacaacagcgugaccuccagcaucgucaucacguccggcgacggcaccaccagccccaucuccgagcacgacuaccagaucgggggcuacaccgagaagugggagagcggggugaaggacugcgugguccugcacuccuacuucacgagcgacuacuaccagcuguacuccacccagagcuccaccgacaccggcguggagcacgugacguucuucaucuacaacaagaucgucgacgagcccgaggagcacgugcagauccacaccaucgacgggagcagcggcguggucaaccccgugauggagccgaucuacgacgagcccaccaccacgaccuccgugccccucugaggacuaguuauaagacugacuagcccgaugggccucccaacgggcccuccuccccuccuugcaccgagauuaauaaaaaaaaaaaaaaaaaaaaaaaaaaaaaaaaaaaaaaaaaaaaaaaaaaaaaaaaaaaaaaaaugcaucccccccccccccccccccccccccccccccaaaggcucuuuucagagccaccagaauu

SEQ ID NO: 22476 - RNA, 1045 nt, Artificial Sequence
  SARS-CoV-2__MT776420.1__ORF3a protein mRNA gc
aggagaaagcuuaccauggaccuguucaugcgcaucuucaccaucggcaccgugacgcucaagcagggggagaucaaggacgccacccccagcgacuucguccgggccaccgagaccaucccgauccaggcgucccugcccuucggcuggcugaucguggggguggcccuccuggccgucuuccacagcgccuccaagaucaucacgcugaagaagcgcuggcagcucgcccugagcaagggcgugcacuucgugugcaaccugcuccugcuguucgucaccguguacucccaccuccugcugguggcggccgggcucgaggcccccuuccuguaccuguacgcccucgucuacuuccugcagagcaucaacuucgugcggaucaucaugcgccuguggcucugcuggaagugccgguccaagaacccccugcuguacgacgcgaacuacuuccucugcuggcacaccaacugcuacgacuacugcaucccguacaacagcgugaccuccagcaucgucaucacguccggcgacggcaccaccagccccaucuccgagcacgacuaccagaucgggggcuacaccgagaagugggagagcggggugaaggacugcgugguccugcacuccuacuucacgagcgacuacuaccagcuguacuccacccagcucagcaccgacaccggcguggagcacgugacguucuucaucuacaacaagaucgucgacgagcccgaggagcacgugcagauccacaccaucgacggguccagcggcguggucaaccccgugauggagccgaucuacgacgagcccaccaccacgaccagcgugccccugugaggacuaguuauaagacugacuagcccgaugggccucccaacgggcccuccuccccuccuugcaccgagauuaauaaaaaaaaaaaaaaaaaaaaaaaaaaaaaaaaaaaaaaaaaaaaaaaaaaaaaaaaaaaaaaaaugcaucccccccccccccccccccccccccccccccaaaggcucuuuucagagccaccagaauu

SEQ ID NO: 22477 - RNA, 1045 nt, Artificial Sequence
  SARS-CoV-2__MT772428.1__ORF3a protein mRNA gc
aggagaaagcuuaccauggaccuguucaugcgcaucuucaccaucggcaccgugacgcucaagcagggggagaucaaggacgccacccccagcgacuucguccgggccaccgcgaccaucccgauccaggccucccugcccuucggcuggcugaucguggggguggcccuccuggccgucuuccacagcgccuccaagaucaucacgcugaagaagcgcuggcagcucgcgcugagcaagggcgugcacuucgugugcaaccugcuccugcuguuccucaccgucuacucccaccuccugcugguggccgccgggcuggaggcccccuuccuguaccucuacgcgcugguguacuuccugcagagcaucaacuucguccggaucaucaugcgccucuggcugugcuggaagugccgguccaagaacccccugcucuacgacgccaacuacuuccugugcuggcacaccaacugcuacgacuacugcaucccguacaacagcgugaccuccagcaucgugaucacguccggcgacggcaccaccagccccaucuccgagcacgacuaccagaucgggggcuacaccgagaagugggagagcggggucaaggacugcguggugcugcacuccuacuucacgagcgacuacuaccagcucuacuccacccagcugagcaccgacaccggcgucgagcacgugacguucuucaucuacaacaagaucguggacgagcccgaggagcacguccagauccacaccaucgacggguccagcggcguggugaaccccgucauggagccgaucuacgacgagcccaccaccacgaccagcgugccccugugaggacuaguuauaagacugacuagcccgaugggccucccaacgggcccuccuccccuccuugcaccgagauuaauaaaaaaaaaaaaaaaaaaaaaaaaaaaaaaaaaaaaaaaaaaaaaaaaaaaaaaaaaaaaaaaaugcaucccccccccccccccccccccccccccccccaaaggcucuuuucagagccaccagaauu

SEQ ID NO: 22478 - RNA, 1045 nt, Artificial Sequence
  SARS-CoV-2__MT772496.1__ORF3a protein mRNA gc
aggagaaagcuuaccauggaccuguucaugcgcaucuucaccaucggcaccgugacgcucaagcagggggagaucaaggacgccacccccagcgacuucguccgggccaccgcgaccaucccgauccaggccucccugcccuucggcuggcugaucguggggguggcccuccuggccgucuuccacagcgccuccaagaucaucacgcugaagaagcgcuggcagcucgcgcugagcaagggcgugcacuucgugugcaaccugcuccugcuguucgucaccguguacucccaccuccugcugguggccgccgggcucgaggcccccuuccuguaccuguacgcgcucgucuacuuccugcagagcaucaacuucgugcggaucaucaugcgccuguggcucugcuggaagugccgguccaagaacccccugcuguacgacgccaacuacuuccucugcuggcacaccaacugcuacgacuacugcaucccguacaacagcgugaccuccagcaucgucaucacguccggcgacggcaccaccagccccaucuccgagcacgacuaccagaucgggggcuacaccgagaagugggagagcggggugaaggacugcgugguccugcacuccuacuucacgagcgacuacuaccagcuguacuccacccagcucagcaccgacaccggcguggagcacgugacguucuucaucuacaacaagaucgucgacgagcuggaggagcacgugcagauccacaccaucgacggguccagcggcguggucaaccccgugauggagcccaucuacgacgagccgaccaccacgaccagcgugccccugugaggacuaguuauaagacugacuagcccgaugggccucccaacgggcccuccuccccuccuugcaccgagauuaauaaaaaaaaaaaaaaaaaaaaaaaaaaaaaaaaaaaaaaaaaaaaaaaaaaaaaaaaaaaaaaaaugcaucccccccccccccccccccccccccccccccaaaggcucuuuucagagccaccagaauu

SEQ ID NO: 22479 - RNA, 1045 nt, Artificial Sequence
  SARS-CoV-2__MT772558.1__ORF3a protein mRNA gc
aggagaaagcuuaccauggaccuguucaugcgcaucuucaccaucggcaccgugacgcucaagcagggggagaucaaggacgccacccccagcgacuucguccgggccaccgcgaccaucccgauccaggccucccugcccuucggcuggcugaucguggggguggcccuccuggccgucuuccagagcgccuccaagaucaucacgcugaagaagcgcuggcagcucgcgcugagcaagggcgugcacuucgugugcaaccugcuccugcuguucgucaccguguacucccaccuccugcugguggccgccgggcucgaggcccccuuccuguaccuguacgcgcucgucuacuuccugcagagcaucaacuucgugcggaucaucaugcgccuguggcucugcuggaagugccgguccaagaacccccugcuguacgacgccaacuacuuccucugcuggcacaccaacugcuacgacuacugcaccccguacaacagcgugacguccagcaucgucaucaccuccggcgacggcaccaccagccccaucuccgagcacgacuaccagaucgggggcuacacggagaagugggagagcggggugaaggacugcgugguccugcacuccuacuucaccagcgacuacuaccagcuguacuccacccagcucagcaccgacacgggcguggagcacgugaccuucuucaucuacaacaagaucgucgacgagcccgaggagcacgugcagauccacaccaucgacggguccagcggcguggucaaccccgugauggagccgaucuacgacgagcccaccacgaccaccagcgugccccugugaggacuaguuauaagacugacuagcccgaugggccucccaacgggcccuccuccccuccuugcaccgagauuaauaaaaaaaaaaaaaaaaaaaaaaaaaaaaaaaaaaaaaaaaaaaaaaaaaaaaaaaaaaaaaaaaugcaucccccccccccccccccccccccccccccccaaaggcucuuuucagagccaccagaauu

SEQ ID NO: 22480 - RNA, 1045 nt, Artificial Sequence
  SARS-CoV-2__MT758203.1__ORF3a protein mRNA gc
aggagaaagcuuaccauggaccuguucaugcgcaucuucaccaucggcaccgugacgcucaagcagggggagaucaaggacgccacccccagcgacuucguccgggccaccgcgaccaucccgauccaggccucccugcgcuucggcuggcugaucguggggguggcccuccuggccgucuuccacagcgccuccaagaucaucacgcugaagaagcgguggcagcucgcgcugagcaagggcgugcacuucgugugcaaccugcuccugcuguucgucaccguguacucccaccuccugcugguggccgccgggcucgaggcccccuuccuguaccuguacgcgcucgucuacuuccugcagagcaucaacuucgugcgcaucaucaugcggcuguggcucugcuggaagugccgcuccaagaacccccugcuguacgacgccaacuacuuccucugcuggcacaccaacugcuacgacuacugcauccccuacaacagcgugaccuccagcaucgucaucacguccggcgacggcaccaccagcccgaucuccgagcacgacuaccagaucgggggcuacaccgagaagugggagagcggggugaaggacugcgugguccugcacuccuacuucacgagcgacuacuaccagcuguacuccacccagcucagcaccgacaccggcguggagcacgugacguucuucaucuacaacaagaucgucgacgagcccgaggagcacgugcagauccacaccaucgacggguccagcggcguggucaaccccgugauggagcccaucuacgacgagccgaccaccacgaccagcgugccccugugaggacuaguuauaagacugacuagcccgaugggccucccaacgggcccuccuccccuccuugcaccgagauuaauaaaaaaaaaaaaaaaaaaaaaaaaaaaaaaaaaaaaaaaaaaaaaaaaaaaaaaaaaaaaaaaaugcaucccccccccccccccccccccccccccccccaaaggcucuuuucagagccaccagaauu

SEQ ID NO: 22481 - RNA, 1045 nt, Artificial Sequence
  SARS-CoV-2__MT759820.1__ORF3a protein mRNA gc
aggagaaagcuuaccauggaccuguucaugcgcaucuucaccaucggcaccgugacgcucaagcagggggagaucaaggacagcacccccuccgacuucguccgggccaccgccaccaucccgauccaggcgagccugcccuucggcuggcugaucguggggguggcccuccuggccgucuuccaguccgccagcaagaucaucacgcugaagaagcgcuggcagcucgcccuguccaagggcgugcacuucgugugcaaccugcuccugcuguucgucaccguguacagccaccuccugcugguggcggccgggcucgaggcccccuuccuguaccuguacgcccucgucuacuuccugcaguccaucaacuucgugcggaucaucaugcgccuguggcucugcuggaagugccggagcaagaacccccugcuguacgacgcgaacuacuuccucugcuggcacaccaacugcuacgacuacugcaucccguacaacuccgugaccagcuccaucgucaucacgagcggcgacggcaccaccucccccaucagcgagcacgacuaccagaucgggggcuacaccgagaagugggaguccggggugaaggacugcgugguccugcacagcuacuucacguccgacuacuaccagcuguacagcacccagcucuccaccgacaccggcguggagcacgugacguucuucaucuacaacaagaucgucgacgagcccgaggagcacgugcagauccacaccaucgacgggagcagcggcguggucaaccccgugauggagccgaucuacgacgagcccaccaccacgaccuccgugccccugugaggacuaguuauaagacugacuagcccgaugggccucccaacgggcccuccuccccuccuugcaccgagauuaauaaaaaaaaaaaaaaaaaaaaaaaaaaaaaaaaaaaaaaaaaaaaaaaaaaaaaaaaaaaaaaaaugcaucccccccccccccccccccccccccccccccaaaggcucuuuucagagccaccagaauu

SEQ ID NO: 22482 - RNA, 1045 nt, Artificial Sequence
  SARS-CoV-2__MT762396.1__ORF3a protein mRNA gc
aggagaaagcuuaccauggaccuguucaugcgcaucuucaccaucggcaccgugacgcucaagcagggggagaucaaggacgccacccccagcgacuucguccgggccaccgcgaccaucccgaucgaggccucccugcccuucggcuggcugaucguggggguggcccuccuggccgucuuccagagcgccuccaagaucaucacgcugaagaagcgcuggcagcucgcgcugagcaagggcgugcacuucgugugcaaccugcuccugcuguucgucaccguguacucccaccuccugcugguggccgccgggcucgaggcccccuuccuguaccuguacgcgcucgucuacuuccugcagagcaucaacuucgugcggaucaucaugcgccuguggcucugcuggaagugccgguccaagaacccccugcuguacgacgccaacuacuuccucugcuggcacaccaacugcuacgacuacugcaucccguacaacagcgugaccuccagcaucgucaucacguccggcgacggcaccaccagccccaucuccgagcacgacuaccagaucgggggcuacaccgagaagugggagagcggggugaaggacugcgugguccugcacuccuacuucacgagcgacuacuaccagcuguacuccacccagcucagcaccgacaccggcguggagcacgugacguucuucaucuacaacaagaucgucgacgagcccgaggagcacgugcagauccacaccaucgacggguccagcggcguggucaaccccgugauggagccgaucuacgacgagcccaccaccacgaccagcgugccccugugaggacuaguuauaagacugacuagcccgaugggccucccaacgggcccuccuccccuccuugcaccgagauuaauaaaaaaaaaaaaaaaaaaaaaaaaaaaaaaaaaaaaaaaaaaaaaaaaaaaaaaaaaaaaaaaaugcaucccccccccccccccccccccccccccccccaaaggcucuuuucagagccaccagaauu

SEQ ID NO: 22483 - RNA, 1045 nt, Artificial Sequence
  SARS-CoV-2__MT762397.1__ORF3a protein mRNA gc
aggagaaagcuuaccauggaccuguucaugcgcaucuucaccaucggcaccgugacgcucaagcagggggagaucaaggacgccacccccagcgacuucguccgggccaccgcgaccaucccgauccaggccucccugcccuucggccugcucaucguggggguggcccugcuggccgucuuccagagcgccuccaagaucaucauccucaagaagcgcuggcagcuggcgcugagcaagggcgugcacuucgugugcaaccuccugcugcuguucgucacgguguacucccaccuccugcucguggccgccgggcuggaggcccccuuccuguaccucuacgcgcuggucuacuuccugcagagcaucaacuucgugcggaucaucaugcgccucuggcugugcuggaagugccgguccaagaacccccugcucuacgacgccaacuacuuccugugcuggcacaccaacugcuacgacuacugcaucccguacaacagcgugaccuccagcaucgucaucaccuccggcgacggcacgaccagccccaucuccgagcacgacuaccagaucgggggcuacaccgagaagugggagagcggggugaaggacugcgugguccugcacuccuacuucaccagcgacuacuaccagcucuacuccacgcagcugagcaccgacaccggcguggagcacgugaccuucuucaucuacaacaagaucgucgacgagcccgaggagcacgugcagauccacacgaucgacggguccagcggcguggucaaccccgugauggagccgaucuacgacgagcccaccaccaccacgagcgugccccugugaggacuaguuauaagacugacuagcccgaugggccucccaacgggcccuccuccccuccuugcaccgagauuaauaaaaaaaaaaaaaaaaaaaaaaaaaaaaaaaaaaaaaaaaaaaaaaaaaaaaaaaaaaaaaaaaugcaucccccccccccccccccccccccccccccccaaaggcucuuuucagagccaccagaauu

SEQ ID NO: 22484 - RNA, 1045 nt, Artificial Sequence
  SARS-CoV-2__MT762398.1__ORF3a protein mRNA gc
aggagaaagcuuaccauggaccuguucaugcgcaucuucaccaucggcaccgugacgcucaagcagggggagaucaaggacgccacccccagcgacuucguccgggccaccgcgaccaucccgauccaggccucccugcccuucggcuggcugaucguggggguggcccuccuggccgucuuccacagcgccuccaagaucaucacgcugaagaagcgcuggcagcucgcgcugagcaagggcgugcacuucgugugcaaccugcuccugcuguucgucaccguguacucccaccuccugcugguggccgccgggcucgagagccccuuccuguaccuguacgcccucgucuacuuccugcaguccaucaacuucgugcggaucaucaugcgccuguggcucugcuggaagugccggagcaagaacccccugcuguacgacgcgaacuacuuccucugcuggcacaccaacugcuacgacuacugcaucccguacaacuccgugaccagcuccaucgucaucacgagcggcgacggcaccaccucccccaucagcgagcacgacuaccagaucgggggcuacaccgagaagugggaguccggggugaaggacugcgugguccugcacagcuacuucacguccgacuacuaccagcuguacagcacccagcucuccaccgacaccggcguggagcacgugacguucuucaucuacaacaagaucgucgacgagcccgaggagcacgugcagauccacaccaucgacgggagcagcggcguggucaaccccgugauggagccgaucuacgacgagcccaccaccacgaccuccgugccccugugaggacuaguuauaagacugacuagcccgaugggccucccaacgggcccuccuccccuccuugcaccgagauuaauaaaaaaaaaaaaaaaaaaaaaaaaaaaaaaaaaaaaaaaaaaaaaaaaaaaaaaaaaaaaaaaaugcaucccccccccccccccccccccccccccccccaaaggcucuuuucagagccaccagaauu

SEQ ID NO: 22485 - RNA, 1045 nt, Artificial Sequence
  SARS-CoV-2__MT755838.1__ORF3a protein mRNA gc
aggagaaagcuuaccauggaccuguucaugcgcaucuucaccaucggcaccgugacgcucaagcagggggagaucaaggacgccacccccagcgacuucguccgggccaccgcgaccaucccgauccaggccucccugcccuucggcuggcugaucguggggguggcccuccuggccgucuuccagagcgccuccaagaucaucacgcugaagaagcgcuggcagcucgcgcugagcaagggcgugcacuucgugugcaaccugcuccugcuguucgucaccguguacucccaccuccugcugguggccgccgggcucgaggcccccuuccuguaccuguacgcgcucgucuacuuccugcagagcaucaacuucgugcggaucaucaugcgccuguggcucugcuggaagugccgguccaagaacccccugcuguacgacgccaacuacuuccucugcuggcacaccaacugcuacgacuacugcaucccguacaacagcgugaccuccagcaucgucaucacguccggcgacggcaccaccagccccaucuccgagcacgacuaccagaucgggugcuacaccgagaagugggagagcggcgugaaggacugcgugguccugcacuccuacuucacgagcgacuacuaccagcuguacuccacccagcucagcaccgacaccgggguggagcacgugacguucuucaucuacaacaagaucgucgacgagcccgaggagcacgugcagauccacaccaucgacggcuccagcgggguggucaaccccgugauggagccgaucuacgacgagcccaccaccacgaccagcgugccccugugaggacuaguuauaagacugacuagcccgaugggccucccaacgggcccuccuccccuccuugcaccgagauuaauaaaaaaaaaaaaaaaaaaaaaaaaaaaaaaaaaaaaaaaaaaaaaaaaaaaaaaaaaaaaaaaaugcaucccccccccccccccccccccccccccccccaaaggcucuuuucagagccaccagaauu

SEQ ID NO: 22486 - RNA, 1042 nt, Artificial Sequence
  SARS-CoV-2__MT755858.1__ORF3a protein mRNA gc
aggagaaagcuuaccauggaccuguucaugcgcaucuucaccaucggcaccgugacgcucaagcagggggagaucaaggacgccacccccagcgacuucguccgggccaccgcgaccaucccgauccaggccucccugcccuucggcuggcugaucguggggguggcccuccuggccgucuuccagagcgccuccaagaucaucacgcugaagaagcgcuggcagcucgcgcugagcaagggcgugcacuucgugugcaaccugcuccugcuguucgucaccguguacucccaccuccugcugguggccgccgggcucgaggcccccuuccuguaccuguacgcgcucgucuacuuccugcagagcaucaacuucgugcggaucaucaugcgccuguggcucugcuggaagugccgguccaagaacccccugcuguacgacgccaacuacuuccucugcuggcacaccaacugcuacgacuacugcaucccguacaacagcgugaccuccagcaucgucaucacguccggcgacggcaccaccagccccaucuccgagcacgacuaccagaucgggggcuacaccgagaagugggagagcggggugaaggacugcgugguccugcacuccuacuucacgagcgacuacuaccagcuguacuccacccagcucagcaccgacaccggcguggagcacgugacguucuucaucuacaacaagaucgucgacgagcccgaggagcacgugcagauccacaccaucgacggguccagcggcgugaaccccgucauggagccgaucuacgacgagcccaccaccacgaccagcgugccccugugaggacuaguuauaagacugacuagcccgaugggccucccaacgggcccuccuccccuccuugcaccgagauuaauaaaaaaaaaaaaaaaaaaaaaaaaaaaaaaaaaaaaaaaaaaaaaaaaaaaaaaaaaaaaaaaaugcaucccccccccccccccccccccccccccccccaaaggcucuuuucagagccaccagaauu

SEQ ID NO: 22487 - RNA, 1045 nt, Artificial Sequence
  SARS-CoV-2__MT755886.1__ORF3a protein mRNA gc
aggagaaagcuuaccauggaccuguucaugcgcaucuucaccaucggcaccgugacgcucaagcagggggagaucaaggacgccacccccagcgacuucguccgggccaccgcgaccaucccgauccaggccucccugcccuucggcuggcugaucgugggggugagccuccuggccgucuuccacuccgccagcaagaucaucacgcugaagaagcgcuggcagcucgcccuguccaagggcgugcacuucgugugcaaccugcuccugcuguucgucaccguguacagccaccuccugcugguggcggccgggcucgaggcccccuuccuguaccuguacgcccucgucuacuuccugcaguccaucaacuucgugcggaucaucaugcgccuguggcucugcuggaagugccggagcaagaacccccugcuguacgacgcgaacuacuuccucugcuggcacaccaacugcuacgacuacugcaucccguacaacuccgugaccagcuccaucgucaucacgagcggcgacggcaccaccucccccaucagcgagcacgacuaccagaucgggggcuacaccgagaagugggaguccggggugaaggacugcgugguccugcacagcuacuucacguccgacuacuaccagcuguacagcacccagcucuccaccgacaccggcguggagcacgugacguucuucaucuacaacaagaucgucgacgagcccgaggagcacgugcagauccacaccaucgacgggagcagcggcguggucaaccccgugauggagccgaucuacgacgagcccaccaccacgaccuccgugccccugugaggacuaguuauaagacugacuagcccgaugggccucccaacgggcccuccuccccuccuugcaccgagauuaauaaaaaaaaaaaaaaaaaaaaaaaaaaaaaaaaaaaaaaaaaaaaaaaaaaaaaaaaaaaaaaaaugcaucccccccccccccccccccccccccccccccaaaggcucuuuucagagccaccagaauu

SEQ ID NO: 22488 - RNA, 1045 nt, Artificial Sequence
  SARS-CoV-2__MT755897.1__ORF3a protein mRNA gc
aggagaaagcuuaccauggaccuguucaugcgcaucuucaccaucggcaccgugacgcucaagcagggggagaucaaggacgccacccccagcgacuucguccgggccaccgcgaccaucccgauccaggccucccugcccuucggcuggcugaucguggggguggcccuccuggccgucuuccacagcgccuccaagaucaucacgcugaagaagcgcuggcagcucgcgcugagcaagggcgugcacuucgugugcaaccugcuccugcuguucgucaccguguacucccaccuccugcugguggccagcgggcucgaggcccccuuccuguaccuguacgcccucgucuacuuccugcaguccaucaacuucgugcggaucaucaugcgccuguggcucugcuggaagugccggagcaagaacccccugcuguacgacgcgaacuacuuccucugcuggcacaccaacugcuacgacuacugcaucccguacaacuccgugaccagcuccaucgucaucacgagcggcgacggcaccaccucccccaucagcgagcacgacuaccagaucgggggcuacaccgagaagugggaguccggggugaaggacugcgugguccugcacagcuacuucacguccgacuacuaccagcuguacagcacccagcucuccaccgacaccggcguggagcacgugacguucuucaucuacaacaagaucgucgacgagcccgaggagcacgugcagauccacaccaucgacgggagcagcggcguggucaaccccgugauggagccgaucuacgacgagcccaccaccacgaccuccgugccccugugaggacuaguuauaagacugacuagcccgaugggccucccaacgggcccuccuccccuccuugcaccgagauuaauaaaaaaaaaaaaaaaaaaaaaaaaaaaaaaaaaaaaaaaaaaaaaaaaaaaaaaaaaaaaaaaaugcaucccccccccccccccccccccccccccccccaaaggcucuuuucagagccaccagaauu

SEQ ID NO: 22489 - RNA, 1045 nt, Artificial Sequence
  SARS-CoV-2__MT755899.1__ORF3a protein mRNA gc
aggagaaagcuuaccauggaccuguucaugcgcaucuucaccaucggcaccgugacgcucaagcagggggagaucaaggacgccacccccagcgacuucguccgggccaccgcgaccaucccgauccaggccucccugcccuucggcuggcugaucguggggguggcccuccuggccgucuuccacagcgccuccaagaucaucacgcugaagaagcgcuggcagcucgcgcugagcaagggcgugcacuucgugugcaaccugcuccugcuguucgucaccguguacucccaccuccugcugguggccgccgggcucgaggcccccuuccuguaccuguacgcgcucgucuacuuccugcagagcaucaacuucgugcggaucaucaugcgccuguggcucugcuggaagugccgguccaagaacccccugcuguacgacgccaacuacuuccucugcuggcacaccaacugcuacgacuacugcaucccguacaacagcgugaccuccagcaucgucaucacguccggcgacggcaccaccagccccaucuccgagcacgacuaccagaucgggggcuacaccgagaagugggagagcggggugaaggacugcgugguccugcacuccuacuucacgagcgacuacuaccagcuguaccccacccagcucuccaccgacaccggcguggagcacgugacguucuucaucuacaacaagaucgucgacgagcccgaggagcacgugcagauccacaccaucgacgggagcuccggcguggucaacccggugauggagcccaucuacgacgagcccaccaccacgaccagcgugccccugugaggacuaguuauaagacugacuagcccgaugggccucccaacgggcccuccuccccuccuugcaccgagauuaauaaaaaaaaaaaaaaaaaaaaaaaaaaaaaaaaaaaaaaaaaaaaaaaaaaaaaaaaaaaaaaaaugcaucccccccccccccccccccccccccccccccaaaggcucuuuucagagccaccagaauu

SEQ ID NO: 22490 - RNA, 1045 nt, Artificial Sequence
  SARS-CoV-2__MT755901.1__ORF3a protein mRNA gc
aggagaaagcuuaccauggaccuguucaugcgcaucuucaccaucggcaccgugacgcucaagcagggggagaucaaggacgccacccccagcgacuucguccgggccaccgcgaccaucccgauccaggccucccugcccuucggcuggcugaucguggggguggcccuccuggccgucuuccagagcgccuccaagaucaucacgcugaagaagcgcuggcagcucgcgcugagcaagggcgugcacuucgugugcaaccugcuccugcuguucgucaccguguacucccaccuccugcugguggccgccgggcucgaggcccccuuccuguaccuguacgcgcucgucuacuuccugcagagcaucaacuucgugcggaucaucaugcgccuguggcucugcuggaagugccgguccaagaacccccugcuguacgacgccaacuacuuccucugcuggcacaccaacugcuacgacuacugcaucccguacaacagcgugaccuccagcaucgucaucacguccggcgacggcaccaccagccccaucuccgagcacgacuaccagaucgggggcuacaccgagaaguggcagagcggggugaaggacugcgugguccugcacuccuacuucacgagcgacuacuaccagcuguacuccacccagcucagcaccgacaccggcguggagcacgugacguucuucaucuacaacaagaucgucgacgagcccgaggagcacgugcagauccacaccaucgacggguccagcggcguggucaaccccgugauggagccgaucuacgacgagcccaccaccacgaccagcgugccccugugaggacuaguuauaagacugacuagcccgaugggccucccaacgggcccuccuccccuccuugcaccgagauuaauaaaaaaaaaaaaaaaaaaaaaaaaaaaaaaaaaaaaaaaaaaaaaaaaaaaaaaaaaaaaaaaaugcaucccccccccccccccccccccccccccccccaaaggcucuuuucagagccaccagaauu

SEQ ID NO: 22491 - RNA, 1045 nt, Artificial Sequence
  SARS-CoV-2__MT757016.1__ORF3a protein mRNA gc
aggagaaagcuuaccauggaccuguucaugcgcaucuucaccaucggcaccgugacgcucaagcagggggagaucaaggacgccacccccagccacuucguccgggccaccgcgaccaucccgauccaggccucccugcccuucggcuggcugaucguggggguggcccuccuggccgucuuccacagcgccuccaagaucaucacgcugaagaagcgcuggcagcucgcgcugagcaagggcgugcacuucgugugcaaccugcuccugcuguucgucaccguguacucccaccuccugcugguggccgccgggcucgaggcccccuuccuguaccuguacgcgcucgucuacuuccugcagagcaucaacuucgugcggaucaucaugcgccuguggcucugcuggaagugccgguccaagaacccccugcuguacgacgccaacuacuuccucugcuggcacaccaacugcuacgacuacugcaucccguacaacagcgugaccuccagcaucgucaucacguccggcgacggcaccaccagccccaucuccgagcacgacuaccagaucgggggcuacaccgagaagugggagagcggggugaaggacugcgugguccugcacuccuacuucacgagcgacuacuaccagcuguacuccacccagcucagcaccgacaccggcuucgagcacgugacguucuucaucuacaacaagaucguggacgagcccgaggagcacguccagauccacaccaucgacggguccagcggcguggugaaccccgucauggagccgaucuacgacgagcccaccaccacgaccagcgugccccugugaggacuaguuauaagacugacuagcccgaugggccucccaacgggcccuccuccccuccuugcaccgagauuaauaaaaaaaaaaaaaaaaaaaaaaaaaaaaaaaaaaaaaaaaaaaaaaaaaaaaaaaaaaaaaaaaugcaucccccccccccccccccccccccccccccccaaaggcucuuuucagagccaccagaauu

SEQ ID NO: 22492 - RNA, 1045 nt, Artificial Sequence
  SARS-CoV-2__MT757040.1__ORF3a protein mRNA gc
aggagaaagcuuaccauggaccuguucaugcgcaucuucaccaucggcaccgugacgcucaagcagggggagaucaaggacgccacccccagcgacuucguccgggccaccgcgaccaucccgauccaggccucccugcccuucggcuggcugaucguggggguggcccuccuggccgucuuccacagcgccuccaagaucaucacgcugaagaagcgcuggcagcucgcgcugagcaagggcgugcacuucgugugcaaccugcuccugcuguucgucaccguguacucccaccuccugcugguggccgccgggcucgaggcccccuuccuguaccuguacgcgcucgucuacuuccugcagagcaucaacuucgugcggaucaucaugcgccuguggcucugcuggaagugccgguccaagaacccccugcuguacgacgccaacuacuuccucugcuggcacaccaacugcuacgacuacugcaucccguacaacagcgugaccuccagcaucgucaucacguccggcgacggcaccaccagccccaucuccgagcacgacuaccagaucgggggcuacaccgagaagugggagagcggggugaaggacugcgugguccugcacuccuacuucacgagcuacuacuaccagcuguacuccacccagcucagcaccgacaccggcguggagcacgugacguucuucaucuacaacaagaucgucgacgagcccgaggagcacgugcagauccacaccaucgacggguccagcggcguggucaaccccgugauggagccgaucuacgacgagcccaccaccacgaccagcgugccccugugaggacuaguuauaagacugacuagcccgaugggccucccaacgggcccuccuccccuccuugcaccgagauuaauaaaaaaaaaaaaaaaaaaaaaaaaaaaaaaaaaaaaaaaaaaaaaaaaaaaaaaaaaaaaaaaaugcaucccccccccccccccccccccccccccccccaaaggcucuuuucagagccaccagaauu

SEQ ID NO: 22493 - RNA, 1045 nt, Artificial Sequence
  SARS-CoV-2__MT745584.1__ORF3a protein mRNA gc
aggagaaagcuuaccauggaccuguucaugcgcaucuucaccaucggcaccgugacgcucaagcagggggagaucaaggacgccacccccagcgacuucguccgggccaccgcgaccaucccgauccaggccucccugcccuucggcuggcugaucguggggguggcccuccuggccgucuuccacagcgccuccaagaucaucacgcugaagaagcgcuggcagcucgcgcugagcaagggcgugcacuucgugugcaaccugcuccugcuguucgucaccguguacucccaccuccugcugguggccgccgggcucgaggcccccuuccuguaccuguacgcgcucgucuacuuccugcagagcaucaacuucgugcggaucaucaugcgccuguggcucugcuggaagugccgguccaagaacccccugcuguacgacgccaacuacuuccucugcuggcacaccaacugcuacgacuacugcaucccguacaacagcgugaccuccagcaucgucaucacguccggcgacggcaccaccagccccaucuccgagcacgacuaccagaucgggggcuacaccgagaagugggagagcggggugaaggacugcgugguccugcacuccuacuucacgagcgacuacuaccagcuguacuccacccagcucagcaccgacaccggccuggagcacgugacguucuucaucuacaacaagaucguggacgagcccgaggagcacguccagauccacaccaucgacggguccagcggcguggugaaccccgucauggagccgaucuacgacgagcccaccaccacgaccagcgugccccugugaggacuaguuauaagacugacuagcccgaugggccucccaacgggcccuccuccccuccuugcaccgagauuaauaaaaaaaaaaaaaaaaaaaaaaaaaaaaaaaaaaaaaaaaaaaaaaaaaaaaaaaaaaaaaaaaugcaucccccccccccccccccccccccccccccccaaaggcucuuuucagagccaccagaauu

SEQ ID NO: 22494 - RNA, 1045 nt, Artificial Sequence
  SARS-CoV-2__MT745651.1__ORF3a protein mRNA gc
aggagaaagcuuaccauggaccuguucaugcgcaucuucaccaucggcaccgugacgcucaagcagggggagaucaaggacagcacccccuccgacuucguccgggccaccgccaccaucccgauccaggcgagccugcccuucggcuggcugaucguggggguggcccuccuggccgucuuccacuccgccagcaagaucaucacgcugaagaagcgcuggcagcucgcccuguccaagggcgugcacuucgugugcaaccugcuccugcuguucgucaccguguacagccaccuccugcugguggcggccgggcucgaggcccccuuccuguaccuguacgcccucgucuacuuccugcaguccaucaacuucgugcggaucaucaugcgccuguggcucugcuggaagugccggagcaagaacccccugcuguacgacgcgaacuacuuccucugcuggcacaccaacugcuacgacuacugcaucccguacaacuccgugaccagcuccaucgucaucacgagcggcgacggcaccaccucccccaucagcgagcacgacuaccagaucgggggcuacaccgagaagugggaguccggggugaaggacugcgugguccugcacagcuacuucacguccgacuacuaccagcuguacagcacccagcucuccaccgacaccggcguggagcacgugacguucuucaucuacaacaagaucgucgacgagcccgaggagcacgugcagauccacaccaucgacgggagcagcggcguggucaaccccgugauggagccgaucuacgacgagcccaccaccacgaccuccgugccccugugaggacuaguuauaagacugacuagcccgaugggccucccaacgggcccuccuccccuccuugcaccgagauuaauaaaaaaaaaaaaaaaaaaaaaaaaaaaaaaaaaaaaaaaaaaaaaaaaaaaaaaaaaaaaaaaaugcaucccccccccccccccccccccccccccccccaaaggcucuuuucagagccaccagaauu

SEQ ID NO: 22495 - RNA, 1045 nt, Artificial Sequence
  SARS-CoV-2__MT745660.1__ORF3a protein mRNA gc
aggagaaagcuuaccauggaccuguucaugcgcaucuucaccaucggcaccgugacgcucaagcagggggagaucaaggacgccacccccagcgacuucguccgggccaccgcgaccaucccgauccaggccucccugcccuucggcuggcugaucguggggguggcccuccuggccgucuuccagagcgccuccaagaucaucacgcugaagaagcgcuggcagcucgcgcuguucaagggcgugcacuucgugugcaaccugcuccugcuguucgucaccguguacagccaccuccugcugguggccgccgggcucgaggcccccuuccuguaccuguacgcgcucgucuacuuccugcaguccaucaacuucgugcggaucaucaugcgccuguggcucugcuggaagugccggagcaagaacccccugcuguacgacgccaacuacuuccucugcuggcacaccaacugcuacgacuacugcaucccguacaacuccgugaccagcuccaucgucaucacgagcggcgacggcaccaccucccccaucagcgagcacgacuaccagaucgggggcuacaccgagaagugggaguccggggugaaggacugcgugguccugcacagcuacuucacguccgacuacuaccagcuguacagcacccagcucuccaccgacaccggcguggagcacgugacguucuucaucuacaacaagaucgucgacgagcccgaggagcacgugcagauccacaccaucgacgggagcuccggcguggucaaccccgugauggagccgaucuacgacgagcccaccaccacgaccagcgugccccugugaggacuaguuauaagacugacuagcccgaugggccucccaacgggcccuccuccccuccuugcaccgagauuaauaaaaaaaaaaaaaaaaaaaaaaaaaaaaaaaaaaaaaaaaaaaaaaaaaaaaaaaaaaaaaaaaugcaucccccccccccccccccccccccccccccccaaaggcucuuuucagagccaccagaauu

SEQ ID NO: 22496 - RNA, 1045 nt, Artificial Sequence
  SARS-CoV-2__MT745661.1__ORF3a protein mRNA gc
aggagaaagcuuaccauggaccuguucaugcgcaucuucaccaucggcaccgugacgcucaagcagggggagaucaaggacgccacccccagcgacuucguccgggccaccgcgaccaucccgauccaggccucccugcccuucggcuggcugaucguggggguggcccuccuggccgucuuccacagcgccuccaagaucaucacgcugaagaagcgcuggcagcucgcgcugagcaagggcgugcacuucgugugcaaccugcuccugcuguucgucaccguguacucccaccuccugcugguggccgccgggcucgaggcccccuuccuguaccuguacgcgcucgucuacuuccugcagagcaucaacuucgugcggaucaucaugcgccuguggcucugcuggaagugccgguccaagaacccccugcuguacgacgccaacuacuuccucugcuggcacaccaacugcuacgacuacugcaucccguacaacagcgugaccuccagcaucgucaucacguccggcgacggcaccaccagccccaucuccgagcacgacuaccagaucgggggcuacaccgagaagugggagagcggggugaaggacugcgugguccugcacuccuacuucacgagcgacuacuaccagcuguacuccacccagcucagcaccgacaccggcguggagcacgugacguucuucaucuacaacaagaucgucgacgagcccgaggagcacgugcagauccacaccaucgacggguccagcggcguggucaaccccgugaucgagccgaucuacgacgagcccaccaccacgaccagcgugccccugugaggacuaguuauaagacugacuagcccgaugggccucccaacgggcccuccuccccuccuugcaccgagauuaauaaaaaaaaaaaaaaaaaaaaaaaaaaaaaaaaaaaaaaaaaaaaaaaaaaaaaaaaaaaaaaaaugcaucccccccccccccccccccccccccccccccaaaggcucuuuucagagccaccagaauu

SEQ ID NO: 22497 - RNA, 1045 nt, Artificial Sequence
  SARS-CoV-2__MT745698.1__ORF3a protein mRNA gc
aggagaaagcuuaccauggaccuguucaugcgcaucuucaccaucggcaccgugacgcucaagcagggggagaucaaggacgccacccccagcgacuucguccgggccaccgcgaccaucccgauccaggccucccugcccuucggcuggcugaucguggggguggcccuccuggccgucuuccagagcgccuccaagaucaucacgcugaagaagcgcuggcagcucgcgcugagcaagggcgugcacuucgugugcaaccugcuccugcuguucgucaccguguacucccaccuccugcugguggccgccgggcucgaggcccccuuccuguaccuguacgcgcucgucuacuuccugcagagcaucaacuucgugcggaucaucaugcgccuguggcucugcuggaagugccgguccaagaacccccugcuguacgacgccaacuacuuccucugcuggcacaccaacugcuacgacuacugcaucccguacaacagcgugaccuccagcaucgucaucacguccggcgacggcaccaccagcuccaucagcgagcacgacuaccagaucgggggcuacaccgagaagugggaguccggggugaaggacugcgugguccugcacagcuacuucacguccgacuacuaccagcuguacagcacccagcucuccaccgacaccggcguggagcacgugacguucuucaucuacaacaagaucgucgacgagcccgaggagcacgugcagauccacaccaucgacgggagcagcggcguggucaaccccgugauggagcccaucuacgacgagccgaccaccacgaccuccgugccccugugaggacuaguuauaagacugacuagcccgaugggccucccaacgggcccuccuccccuccuugcaccgagauuaauaaaaaaaaaaaaaaaaaaaaaaaaaaaaaaaaaaaaaaaaaaaaaaaaaaaaaaaaaaaaaaaaugcaucccccccccccccccccccccccccccccccaaaggcucuuuucagagccaccagaauu

SEQ ID NO: 22498 - RNA, 1045 nt, Artificial Sequence
  SARS-CoV-2__MT745711.1__ORF3a protein mRNA gc
aggagaaagcuuaccauggaccuguucaugcgcaucuucaccaucggcaccgugacgcucaagcagggggagaucaaggacgccacccccagcgacuucguccgggccaccgcgaccaucccgauccaggccucccugcccuucggcuggcugaucguggggguggcccuccuggccggcuuccacagcgccuccaagaucaucacgcugaagaagcgcuggcagcucgcgcugagcaaggggguccacuucgugugcaaccugcuccugcuguucgugaccgucuacucccaccuccugcugguggccgccggccucgaggcccccuuccuguaccuguacgcgcucguguacuuccugcagagcaucaacuucguccggaucaucaugcgccuguggcucugcuggaagugccgguccaagaacccccugcuguacgacgccaacuacuuccucugcuggcacaccaacugcuacgacuacugcaucccguacaacagcgugaccuccagcaucgugaucacguccggcgacgggaccaccagccccaucuccgagcacgacuaccagaucggcggguacaccgagaagugggagagcggcgucaaggacugcguggugcugcacuccuacuucacgagcgacuacuaccagcuguacuccacccagcucagcaccgacaccggggucgagcacgugacguucuucaucuacaacaagaucguggacgagcccgaggagcacguccagauccacaccaucgacggcuccagcggcguggugaaccccgucauggagccgaucuacgacgagcccaccaccacgaccagcgugccccugugaggacuaguuauaagacugacuagcccgaugggccucccaacgggcccuccuccccuccuugcaccgagauuaauaaaaaaaaaaaaaaaaaaaaaaaaaaaaaaaaaaaaaaaaaaaaaaaaaaaaaaaaaaaaaaaaugcaucccccccccccccccccccccccccccccccaaaggcucuuuucagagccaccagaauu

SEQ ID NO: 22499 - RNA, 1048 nt, Artificial Sequence
  SARS-CoV-2__MT748758.1__ORF3a protein mRNA gc
aggagaaagcuuaccauggaccuguucaugcgcaucuucaccaucggcaccgugacgcucaagcagggggagaucaaggacgccacccccagcgacuucguccgggccaccgcgaccaucccgauccaggccucccugcccuucggcuggcugaucguggggguggcccuccuggccgucuuccagagcgccuccaagaucaucacgcugaagaagcgcuggcagcucgcgcugagcaagggcgugcacuucgugugcaaccugcuccugcuguucgucaccguguacucccaccuccugcugguggccgccggggaccucgaggcccccuuccuguaccuguacgcgcucgucuacuuccugcagagcaucaacuucgugcggaucaucaugcgccuguggcucugcuggaagugccgguccaagaacccccugcuguacgacgccaacuacuuccucugcuggcacaccaacugcuacgacuacugcaucccguacaacagcgugaccuccagcaucgucaucacguccggcgacggcaccaccagccccaucuccgagcacgacuaccagaucgggggcuacaccgagaagugggagagcggggugaaggacugcgugguccugcacuccuacuucacgagcgacuacuaccagcuguacuccacccagcucagcaccgacaccggcguggagcacgugacguucuucaucuacaacaagaucgucgacgagcccgaggagcacgugcagauccacaccaucgacggguccagcggcguggucaaccccgugauggagccgaucuacgacgagcccaccaccacgaccagcgugccccugugaggacuaguuauaagacugacuagcccgaugggccucccaacgggcccuccuccccuccuugcaccgagauuaauaaaaaaaaaaaaaaaaaaaaaaaaaaaaaaaaaaaaaaaaaaaaaaaaaaaaaaaaaaaaaaaaugcaucccccccccccccccccccccccccccccccaaaggcucuuuucagagccaccagaauu

SEQ ID NO: 22500 - RNA, 1045 nt, Artificial Sequence
  SARS-CoV-2__MT750023.1__ORF3a protein mRNA gc
aggagaaagcuuaccauggaccuguucaugcgcaucuucaccaucggcaccgugacgcucaagcagggggagaucaaggacgccacgccccuggacuucguccgggccaccgcgaccaucccgauccaggccagccugcccuucggcuggcucaucguggggguggcccugcuggccgucuuccacuccgccagcaagaucaucacccucaagaagcgcuggcagcuggcgcuguccaagggcgugcacuucgugugcaaccuccugcugcuguucgucaccguguacagccaccuccugcucguggccgccgggcuggaggcccccuuccuguaccucuacgcgcuggucuacuuccugcaguccaucaacuucgugcggaucaucaugcgccucuggcugugcuggaagugccggagcaagaacccccugcucuacgacgccaacuacuuccugugcuggcacaccaacugcuacgacuacugcaucccguacaacuccgugaccagcuccaucgucaucacgagcggcgacggcaccaccucccccaucagcgagcacgacuaccagaucgggggcuacaccgagaagugggaguccggggugaaggacugcgugguccugcacagcuacuucacguccgacuacuaccagcucuacagcacccagcuguccaccgacaccggcguggagcacgugacguucuucaucuacaacaagaucgucgacgagcccgaggagcacgugcagauccacaccaucgacgggagcuccggcguggucaaccccgugauggagccgaucuacgacgagcccaccaccacgaccagcgugccccugugaggacuaguuauaagacugacuagcccgaugggccucccaacgggcccuccuccccuccuugcaccgagauuaauaaaaaaaaaaaaaaaaaaaaaaaaaaaaaaaaaaaaaaaaaaaaaaaaaaaaaaaaaaaaaaaaugcaucccccccccccccccccccccccccccccccaaaggcucuuuucagagccaccagaauu

SEQ ID NO: 22501 - RNA, 1045 nt, Artificial Sequence
  SARS-CoV-2__MT750069.1__ORF3a protein mRNA gc
aggagaaagcuuaccauggaccuguucaugcgcaucuucaccaucggcaccgugacgcucaagcagggggagaucaaggacgccacccccagcgacuucguccgggccaccgcgaccaucccgauccaggccucccugcccuucggcuggcugaucguggggguggcccuccuggccgucuuccagagcgccuccaagaucaucacgcugaagaagcgcuggcagcucgcgcugagcaagggcgugcacuucgugugcaaccugcuccugcuguucgucaccguguacucccaccuccugcugguggccgccgggcucgagagccccuuccuguaccuguacgcccucgucuacuuccugcaguccaucaacuucgugcggaucaucaugcgccuguggcucugccugaagugccggagcaagaacccccugcucuacgacgcgaacuacuuccugugcuggcacaccaacugcuacgacuacugcaucccguacaacuccgugaccagcuccaucgucaucacgagcggcgacggcaccaccucccccaucagcgagcacgacuaccagaucgggggcuacaccgagaagugggaguccggggugaaggacugcgugguccugcacagcuacuucacguccgacuacuaccagcucuacagcacccagcuguccaccgacaccggcguggagcacgugacguucuucaucuacaacaagaucgucgacgagcccgaggagcacgugcagauccacaccaucgacgggagcagcggcguggucaaccccgugauggagccgaucuacgacgagcccaccaccacgaccuccgugccccugugaggacuaguuauaagacugacuagcccgaugggccucccaacgggcccuccuccccuccuugcaccgagauuaauaaaaaaaaaaaaaaaaaaaaaaaaaaaaaaaaaaaaaaaaaaaaaaaaaaaaaaaaaaaaaaaaugcaucccccccccccccccccccccccccccccccaaaggcucuuuucagagccaccagaauu

SEQ ID NO: 22502 - RNA, 1045 nt, Artificial Sequence
  SARS-CoV-2__MT750475.1__ORF3a protein mRNA gc
aggagaaagcuuaccauggaccuguucaugcgcaucuucaccaucggcaccgugacgcucaagcagggggagaucaaggacgccacccccagcgacuucguccgggccaccgcgaccaucccgauccaggccucccugcccuucggcuggcugaucguggggguggcccuccuggccgucuuccagagcgccuccaagaucaucacgcugaagaagcgcuggcagcucgcgcugagcaagggcgugcacuucgugugcaaccugcuccugcuguucgucaccguguacucccaccuccugcugguggccgccgggcucgaggcccccuuccuguaccuguacgcgcucgucuacuuccugcagagcaucaacuucgugcggaucaucaugcgccuguggcucugcuggaagugccgguccaagaacccccugcuguacgacgccaacuacuuccucugcuggcacaccaacugcuacgacuacugcaucccguacaacagcgugaccuccagcaucgucaucacguccggcgacggcaccaccagccccaucuccgagcacgacuaccagaucgggggcuacaccgagaagugggagagcggggugaaggacugcgugguccugcacuccuacuucacgagcgacuacuaccagcuguacuccacccagcucagcaccgacaccggcguggagcacgugacguucuucaucuacaacaagaucgccgacgagcccgaggagcacguccagauccacaccaucgacggguccagcggcguggugaaccccgucauggagccgaucuacgacgagcccaccaccacgaccagcgugccccugugaggacuaguuauaagacugacuagcccgaugggccucccaacgggcccuccuccccuccuugcaccgagauuaauaaaaaaaaaaaaaaaaaaaaaaaaaaaaaaaaaaaaaaaaaaaaaaaaaaaaaaaaaaaaaaaaugcaucccccccccccccccccccccccccccccccaaaggcucuuuucagagccaccagaauu

SEQ ID NO: 22503 - RNA, 1045 nt, Artificial Sequence
  SARS-CoV-2__MT740384.1__ORF3a protein mRNA gc
aggagaaagcuuaccauggaccuguucaugcgcaucuucaccaucggcaccgugacgcucaagcagggggagaucaaggacgccacccccagcgacuucguccgggccaccgcgaccaucccgauccaggccucccugcccuucggcuggcugaucguggggguggcccuccuggccgucuuccagagcgccuccaagaucaucacgcugaagaagcgcuggcagcucgcgcugagcaagggcgugcacuucgugugcaaccugcuccugcuguucgucaccguguacucccaccuccugcugguggccgccgggcucgaggcccccuuccuguaccuguacgcgcucgucuacuuccugcagagcaucaacuucgugcggaucaucaugcgccuguggcucugcuggaagugccgguccaagaacccccugcuguacgacgccaacuacuuccucugcuggcacaccaacugcuacgacuacugcaucccguacaacagcgugaccuccagcaucgucaucacguccguggacggcaccaccagccccaucuccgagcacgacuaccagaucggcggguacaccgagaagugggagagcggcgugaaggacugcgucgugcugcacuccuacuucacgagcgacuacuaccagcuguacuccacccagcucagcaccgacaccgggguggagcacgucacguucuucaucuacaacaagaucguggacgagcccgaggagcacgugcagauccacaccaucgacggcuccagcggggucgugaaccccgugauggagccgaucuacgacgagcccaccaccacgaccagcgucccccugugaggacuaguuauaagacugacuagcccgaugggccucccaacgggcccuccuccccuccuugcaccgagauuaauaaaaaaaaaaaaaaaaaaaaaaaaaaaaaaaaaaaaaaaaaaaaaaaaaaaaaaaaaaaaaaaaugcaucccccccccccccccccccccccccccccccaaaggcucuuuucagagccaccagaauu

SEQ ID NO: 22504 - RNA, 1045 nt, Artificial Sequence
  SARS-CoV-2__MT740401.1__ORF3a protein mRNA gc
aggagaaagcuuaccauggaccuguucaugcgcaucuucaccaucggcaccgugacgcucaagcagggggagaucaaggacgccacccccagcgacuucguccgggccaccgcgaccaucccgauccaggccucccugcccuucggcuggcugaucguggggguggcccuccuggccgucuuccagagcgccuccaagaucaucacgcugaagaagcgcuggcagcucgcgcugagcaagggcgugcacuucgugugcaaccugcuccugcuguucgucaccguguacucccaccuccugcugguggccgccgggcucgaggcccccuuccuguaccuguacgcgcucgucuacuuccugcagagcaucaacuucgugcggaucaucaugcgccuguggcucugcuggaagugccgguccaagaacccccugcuguacgacgccaacuacuuccucugcuggcacaccaacugcuacgacuacugcaucccguacaacagcgugaccuccagcaucgucaucacguccggcgacggcaccaccagccccaucuccgagcacgacuaccagaucgggggcuacaccgagaagugggagagcggggugaaggacugcgugguccugcacuccuacuucacgagcgacuacuaccagcuguacuccacccagcucaacaccgacaccggcguggagcacgugacguucuucaucuacaacaagaucgucgacgagcccgaggagcacgugcagauccacaccaucgacgggagcuccggcguggucaaccccgugauggagccgaucuacgacgagcccaccaccacgaccagcgugccccugugaggacuaguuauaagacugacuagcccgaugggccucccaacgggcccuccuccccuccuugcaccgagauuaauaaaaaaaaaaaaaaaaaaaaaaaaaaaaaaaaaaaaaaaaaaaaaaaaaaaaaaaaaaaaaaaaugcaucccccccccccccccccccccccccccccccaaaggcucuuuucagagccaccagaauu

SEQ ID NO: 22505 - RNA, 1045 nt, Artificial Sequence
  SARS-CoV-2__MT740438.1__ORF3a protein mRNA gc
aggagaaagcuuaccauggaccuguucaugcgcaucuucaccaucggcaccgugacgcucaagcagggggagaucaaggacgccacccccagcgacuucguccgggccaccgcgaccaucccgauccaggccucccugcccuucggcuggcugaucguggggaucgcccuccuggccguguuccagagcgccuccaagaucaucacgcugaagaagcgcuggcagcucgcgcugagcaagggcguccacuucgugugcaaccugcuccugcuguucgugaccgucuacucccaccuccugcugguggccgccgggcucgaggugcccuuccuguaccuguacgcccucgucuacuuccugcagagcaucaacuucgugcggaucaucaugcgccuguggcucugcuggaagugccgguccaagaacccccugcuguacgacgcgaacuacuuccucugcuggcacaccaacugcuacgacuacugcaucccguacaacagcgugaccuccagcaucgucaucacguccggcgacggcaccaccagccccaucuccgagcacgacuaccagaucgggggcuacaccgagaagugggagagcggggugaaggacugcgugguccugcacuccuacuucacgagcgacuacuaccagcuguacuccacccagcucagcaccgacaccggcguggagcacgugacguucuucaucuacaacaagaucgucgacgagcccgaggagcacgugcagauccacaccaucgacggguccagcggcguggucaaccccgugauggagccgaucuacgacgagcccaccaccacgaccagcgugccccugugaggacuaguuauaagacugacuagcccgaugggccucccaacgggcccuccuccccuccuugcaccgagauuaauaaaaaaaaaaaaaaaaaaaaaaaaaaaaaaaaaaaaaaaaaaaaaaaaaaaaaaaaaaaaaaaaugcaucccccccccccccccccccccccccccccccaaaggcucuuuucagagccaccagaauu

SEQ ID NO: 22506 - RNA, 1045 nt, Artificial Sequence
  SARS-CoV-2__MT740478.1__ORF3a protein mRNA gc
aggagaaagcuuaccauggaccuguucaugcgcaucuucaccaucggcaccgugacgcucaagcagggggagaucaaggacgccacccccagcgacuucguccgggccaccgcgaccaucccgaucgaggccucccugcccuucggcuggcugaucguggggguggcccuccuggccgucuuccagagcgccuccaagaucaucacgcugaagaagcgcuggcagcucgcgcugagcaagggcguguacuucgugugcaaccugcuccugcuguucgucaccguguacucccaccuccugcugguggccgccgggcucgaggcccccuuccuguaccuguacgcgcucgucuacuuccugcagagcaucaacuucgugcggaucaucaugcgccuguggcucugcuggaagugccgguccaagaacccccugcuguacgacgccaacuacuuccucugcuggcacaccaacugcuacgacuacugcaucccguacaacagcgugaccuccagcaucgucaucacguccggcgacggcaccaccagccccaucuccgagcacgacuaccagaucgggggcuacaccgagaagugggagagcggggugaaggacugcgugguccugcacuccuacuucacgagcgacuacuaccagcuguacuccacccagcucagcaccgacaccggcguggagcacgugacguucuucaucuacaacaagaucgucgacgagcccgaggagcacgugcagauccacaccaucgacggguccagcggcguggucaaccccgugauggagccgaucuacgacgagcccaccaccacgaccagcgugccccugugaggacuaguuauaagacugacuagcccgaugggccucccaacgggcccuccuccccuccuugcaccgagauuaauaaaaaaaaaaaaaaaaaaaaaaaaaaaaaaaaaaaaaaaaaaaaaaaaaaaaaaaaaaaaaaaaugcaucccccccccccccccccccccccccccccccaaaggcucuuuucagagccaccagaauu

SEQ ID NO: 22507 - RNA, 1045 nt, Artificial Sequence
  SARS-CoV-2__MT740485.1__ORF3a protein mRNA gc
aggagaaagcuuaccauggaccuguucaugcgcaucuucaccaucggcaccgugacgcucaagcagggggagaucaaggacgccacccccagcgacuucguccgggccaccgcgaccaucccgauccaggccucccugcccuucggcuggcugaucguggggguggcccuccugagcgucuuccacuccgccagcaagaucaucacgcugaagaagcgcuggcagcucgcccuguccaagggcgugcacuucgugugcaaccugcuccugcuguucgucaccguguacagccaccuccugcugguggcggccgggcucgaggcccccuuccuguaccuguacgcccucgucuacuuccugcaguccaucaacuucgugcggaucaucaugcgccuguggcucugcuggaagugccggagcaagaacccccugcuguacgacgcgaacuacuuccucugcuggcacaccaacugcuacgacuacugcaucccguacaacuccgugaccagcuccaucgucaucacgagcggcgacggcaccaccucccccaucagcgagcacgacuaccagaucgggggcuacaccgagaagugggaguccggggugaaggacugcgugguccugcacagcuacuucacguccgacuacuaccagcuguacagcacccagcucuccaccgacaccggcguggagcacgugacguucuucaucuacaacaagaucgucgacgagcccgaggagcacgugcagauccacaccaucgacgggagcagcggcguggucaaccccgugauggagccgaucuacgacgagcccaccaccacgaccuccgugccccugugaggacuaguuauaagacugacuagcccgaugggccucccaacgggcccuccuccccuccuugcaccgagauuaauaaaaaaaaaaaaaaaaaaaaaaaaaaaaaaaaaaaaaaaaaaaaaaaaaaaaaaaaaaaaaaaaugcaucccccccccccccccccccccccccccccccaaaggcucuuuucagagccaccagaauu

SEQ ID NO: 22508 - RNA, 1045 nt, Artificial Sequence
  SARS-CoV-2__MT740717.1__ORF3a protein mRNA gc
aggagaaagcuuaccauggaccuguucaugcgcaucuucaccaucggcaccgugacgcucaagcagggggagaucaaggacgccacccccagcgacuucguccgggccaccgcgaccaucccgauccaggccucccugcccuucggcuggcugaucguggggguggcccuccuggccgucuuccacagcgccuccaagaucaucacgcugaagaagcgcuggcagcucgcgcugagcaagggcgugcacuucgugugcaaccugcuccugcuguucgucaccguguacucccaccuccugcugguggccgccgggcucgaggcccccuuccuguaccuguacgcgcucgucuacuuccugcagagcaucaacuucgugcggaucaucaugcgccuguggcucugcuggaagugccuguccaagaacccccugcucuacgacgccaacuacuuccugugcuggcacaccaacugcuacgacuacugcaucccguacaacagcgugaccuccagcaucgucaucacguccggcgacggcaccaccagccccaucuccgagcacgacuaccagaucgggggcuacaccgagaagugggagagcggggugaaggacugcgugguccugcacuccuacuucacgagcgacuacuaccagcucuacuccacccagcugagcaccgacaccggcguggagcacgugacguucuucaucuacaacaagaucgucgacgagcccgaggagcacgugcagauccacaccaucgacggguccagcggcguggucaaccccgugauggagccgaucuacgacgagcccaccaccacgaccagcgugccccugugaggacuaguuauaagacugacuagcccgaugggccucccaacgggcccuccuccccuccuugcaccgagauuaauaaaaaaaaaaaaaaaaaaaaaaaaaaaaaaaaaaaaaaaaaaaaaaaaaaaaaaaaaaaaaaaaugcaucccccccccccccccccccccccccccccccaaaggcucuuuucagagccaccagaauu

SEQ ID NO: 22509 - RNA, 1045 nt, Artificial Sequence
  SARS-CoV-2__MT740923.1__ORF3a protein mRNA gc
aggagaaagcuuaccauggaccuguucaugcgcaucuucaccaucggcaccgugacgcucaagcagggggagaucaaggacgccacccccagcgacuucguccgggccaccgcgaccaucccgauccaggccucccugcccuucggcuggcugaucguggggguggcccuccuggccgucuuccagagcgccuccaagaucaucacgcugaagaagcgcuggcagcucgcgcugagcaagggcgugcacuucgugugcaaccugcuccugcuguucgucaccguguacucccaccuccugcugguggccgccgggcucgaggcccccuuccuguaccuguacgcgcucgucuacuuccugcagagcaucaacuucgugcggaucaucaugcgccuguggcucugcuggaagugccgguccaagaacccccugcuguacgacgccaacuacuuccucugcuggcacaucaacugcuacgacuacugcaucccguacaacagcgugaccuccagcaucgucaucaccuccggcgacggcacgaccagccccaucuccgagcacgacuaccagaucgggggcuacaccgagaagugggagagcggggugaaggacugcgugguccugcacuccuacuucaccagcgacuacuaccagcuguacuccacgcagcucagcaccgacaccggcguggagcacgugaccuucuucaucuacaacaagaucgucgacgagcccgaggagcacgugcagauccacacgaucgacggguccagcggcguggucaaccccgugauggagccgaucuacgacgagcccaccaccaccacgagcgugccccugugaggacuaguuauaagacugacuagcccgaugggccucccaacgggcccuccuccccuccuugcaccgagauuaauaaaaaaaaaaaaaaaaaaaaaaaaaaaaaaaaaaaaaaaaaaaaaaaaaaaaaaaaaaaaaaaaugcaucccccccccccccccccccccccccccccccaaaggcucuuuucagagccaccagaauu

SEQ ID NO: 22510 - RNA, 1045 nt, Artificial Sequence
  SARS-CoV-2__MT734046.1__ORF3a protein mRNA gc
aggagaaagcuuaccauggaccuguucaugcgcaucuucaccaucggcaccgugacgcucaagcagggggagaucaaggacgccacccccagcgacuucguccgggccaccgcgaccaucccgauccaggccucccugcccuucggcuggcugaucguggggguggcccuccuggccgucuuccagagcgccuccaagaucaucacgcugaagaagcgcuggcagcucgcgcugagcaagggcgugcacuucgugugcaaccugcuccugcuguucgucaccguguacucccaccuccugcugguggccagcgggcucgaggcccccuuccuguaccuguacgcccucgucuacuuccugcaguccaucaacuucgugcggaucaucaugcgccuguggcucugcuggaagugccggagcaagaacccccugcuguacgacgcgaacuacuuccucugcuggcacaccaacugcuacgacuacugcaucccguacaacuccgugaccagcuccaucgucaucacgagcggcgacggcaccaccucccccaucagcgagcacgacuaccagaucgggggcuacaccgagaagugggaguccggggugaaggacugcgugguccugcacagcuacuucacguccgacuacuaccagcuguacagcacccagcucuccaccgacaccggcguggagcacgugacguucuucaucuacaacaagaucgucgacgagcccgaggagcacgugcagauccacaccaucgacgggagcagcggcguggucaaccccgugauggagccgaucuacgacgagcccaccaccacgaccuccgugccccugugaggacuaguuauaagacugacuagcccgaugggccucccaacgggcccuccuccccuccuugcaccgagauuaauaaaaaaaaaaaaaaaaaaaaaaaaaaaaaaaaaaaaaaaaaaaaaaaaaaaaaaaaaaaaaaaaugcaucccccccccccccccccccccccccccccccaaaggcucuuuucagagccaccagaauu

SEQ ID NO: 22511 - RNA, 1045 nt, Artificial Sequence
  SARS-CoV-2__MT706205.1__ORF3a protein mRNA gc
aggagaaagcuuaccauggaccuguucaugcgcaucuucaccaucggcaccgugacgcucaagcagggggagaucaaggacgccacccccagcgacuucguccgggccaccgcgaccaucccgauccaggccucccugcccuucggcuggcugaucguggggguggcccuccuggccgucuuccacagcgccuccaagaucaucacgcugaagaagcgcuggcagcucgcgcugagcaagggcgugcacuucgugugcaaccugcuccugcuguucgucaccguguacucccaccuccugcugguggccaccgggcucgaggcccccuuccuguaccuguacgcccucgucuacuuccugcagagcaucaacuucgugcggaucaucaugcgccuguggcucugcuggaagugccgguccaagaacccccugcuguacgacgcgaacuacuuccucugcuggcacaccaacugcuacgacuacugcaucccguacaacagcgugacguccagcaucgucaucaccuccggcgacggcaccaccagccccaucuccgagcacgacuaccagaucgggggcuacacggagaagugggagagcggggugaaggacugcgugguccugcacuccuacuucaccagcgacuacuaccagcuguacuccacccagcucagcaccgacacgggcguggagcacgugaccuucuucaucuacaacaagaucgucgacgagcccgaggagcacgugcagauccacaccaucgacggguccagcggcguggucaaccccgugauggagccgaucuacgacgagcccaccacgaccaccagcgugccccugugaggacuaguuauaagacugacuagcccgaugggccucccaacgggcccuccuccccuccuugcaccgagauuaauaaaaaaaaaaaaaaaaaaaaaaaaaaaaaaaaaaaaaaaaaaaaaaaaaaaaaaaaaaaaaaaaugcaucccccccccccccccccccccccccccccccaaaggcucuuuucagagccaccagaauu

SEQ ID NO: 22512 - RNA, 1045 nt, Artificial Sequence
  SARS-CoV-2__MT706248.1__ORF3a protein mRNA gc
aggagaaagcuuaccauggaccuguucaugcgcaucuucaccaucggcaccgugacgcucaagcagggggagaucaaggacgccacccccagcgacuucguccgggccaccgcgaccaucccgauccaggccucccugcccuucggcuggcugaucguggggguggcccuccuggccgucuuccagagcgccuccaagaucaucacgcugaagaagcgcuggcagcucgcgcugagcaagggcgugcacuucgugugcaaccugcuccugcuguucgucaccguguacucccaccuccugcugguggccgccgggcucgaggcccccuuccuguaccuguacgcgcucgucuacuuccugcagagcaucaacuucgugcggaucaucaugcgccuguggcucugcuggaagugccgguccaagaacccccugcuguacgacgccaacuacuuccucugcuggcacaccaacugcuacgacuacugcaucccguacaacagcgugaccuccagcaucgucaucacguccggcgacggcaccaccagccccaucuccgagcacgacuaccagaucgggggcuacaccgagaagugggagagcggggugaaggacugcgugguccugcacuccuacuucacgagcgacuacuaccagcuguacuccacccagcucagcaccgacaccggcguggagcacgugacguucuucaucuacaacaagaucgucgacgagcccgaggagcacgugcagauccacaccaucgacggguccagcggcguggucaaccccgugauggagccgaucuacgacgagcugaccaccacgaccagcgugccccugugaggacuaguuauaagacugacuagcccgaugggccucccaacgggcccuccuccccuccuugcaccgagauuaauaaaaaaaaaaaaaaaaaaaaaaaaaaaaaaaaaaaaaaaaaaaaaaaaaaaaaaaaaaaaaaaaugcaucccccccccccccccccccccccccccccccaaaggcucuuuucagagccaccagaauu

SEQ ID NO: 22513 - RNA, 1045 nt, Artificial Sequence
  SARS-CoV-2__MT706263.1__ORF3a protein mRNA gc
aggagaaagcuuaccauggaccuguucaugcgcaucuucaccaucggcaccgugacgcucaagcagggggagaucaaggacgccacccccagcgacuucguccgggccaccgcgaccaucccgauccaggccucccugcccuucggcuggcugaucguggggguggcccuccuggccgucuuccagagcgccuccaagaucaucacgcugaagaagcgcuggcagcucgcgcugagcaagggcgugcacuucgugugcaaccugcuccugcuguucgucaccguguacucccaccuccugcugguggccgccgggcucgaggcccccuuccuguaccuguacgcgcucgucuacuuccugcagagcaucaacuucgugcggaucaucaugcgccuguggcucugcuggaagugccgguccaagaacccccugcuguacgacgccaacuacuuccucugcuggcacaccaacugcuacgacuacugcaucccguacaacagcgugaccuccagcaucgucaucacguccggcgacggcaccaccagccccaucuccgagcacgacuaccagaucgggggcuacaccgagaagugggagagcgggaucaaggacugcguggugcugcacuccuacuucacgagcgacuacuaccagcuguacuccacccagcucagcaccgacaccggcgucgagcacgugacguucuucaucuacaacaagaucguggacgagcccgaggagcacguccagauccacaccaucgacggguccagcggcguggugaaccccgucauggagccgaucuacgacgagcccaccaccacgaccagcgugccccugugaggacuaguuauaagacugacuagcccgaugggccucccaacgggcccuccuccccuccuugcaccgagauuaauaaaaaaaaaaaaaaaaaaaaaaaaaaaaaaaaaaaaaaaaaaaaaaaaaaaaaaaaaaaaaaaaugcaucccccccccccccccccccccccccccccccaaaggcucuuuucagagccaccagaauu

SEQ ID NO: 22514 - RNA, 1045 nt, Artificial Sequence
  SARS-CoV-2__MT706326.1__ORF3a protein mRNA gc
aggagaaagcuuaccauggaccuguucaugcgcaucuucaccaucggcaccgugacgcucaagcagggggagaucaaggacgccacccccagcgacuucguccgggccaccgcgaccaucccgauccaggccucccugcccuucggcuggcugaucguggggguggcccuccuggccgucuuccagagcgccuccaagaucaucacgcugaagaagcgcuggcagcucgcgcugagcaagggcgugcacuucgugugcaaccugcuccugcuguucgucaccguguacucccaccuccugcugguggccgccgggcucgaggcccccuuccuguaccuguacgcgcucgucuacuuccugcagagcaucaacuucgugcggaucaucaugcgccuguggcucugcuggaagugccuguccaagaacccccugcucuacgacgccaacuacuuccugugcuggcacaccaacugcuacgacuacugcaucccguacaacagcgugaccuccagcaucgucaucacguccggcgacggcaccaccagccccaucuccgagcacgacuaccagaucgggggcuacaccgagaagugggagagcggggugaaggacugcgugguccugcacuccuacuucacgagcgacuacuaccagcucuacuccacccagcugagcaccgacaccggcguggagcacgugacguucuucaucuacaacaagaucgucgacgagcccgaggagcacgugcagauccacaccaucgacggguccagcggcguggucaaccccgugauggagccgaucuacgacgagcccaccaccacgaccagcgugccccugugaggacuaguuauaagacugacuagcccgaugggccucccaacgggcccuccuccccuccuugcaccgagauuaauaaaaaaaaaaaaaaaaaaaaaaaaaaaaaaaaaaaaaaaaaaaaaaaaaaaaaaaaaaaaaaaaugcaucccccccccccccccccccccccccccccccaaaggcucuuuucagagccaccagaauu

SEQ ID NO: 22515 - RNA, 1045 nt, Artificial Sequence
  SARS-CoV-2__MT706405.1__ORF3a protein mRNA gc
aggagaaagcuuaccauggaccuguucaugcgcaucuucaccaucggcaccgugacgcucaagcagggggagaucaaggacgccacccccagcgacuucguccgggccaccgcgaccaucccgauccagacgucccugcccuucggcuggcugaucguggggguggcccuccuggccgucuuccagagcgccuccaagaucaucacccugaagaagcgcuggcagcucgcccugagcaagggcgugcacuucgugugcaaccugcuccugcuguucgucaccguguacucccaccuccugcugguggcggccgggcucgaggcccccuuccuguaccuguacgcccucgucuacuuccugcagagcaucaacuucgugcggaucaucaugcgccuguggcucugcuggaagugccgguccaagaacccccugcuguacgacgcgaacuacuuccucugcuggcacaccaacugcuacgacuacugcaucccguacaacagcgugacguccagcaucgucaucaccuccggcgacggcaccaccagccccaucuccgagcacgacuaccagaucgggggcuacacggagaagugggagagcggggugaaggacugcgugguccugcacuccuacuucaccagcgacuacuaccagcuguacuccacccagcucagcaccgacacgggcguggagcacgugaccuucuucaucuacaacaagaucgucgacgagcccgaggagcacgugcagauccacaccaucgacggguccagcggcguggucaaccccgugauggagccgaucuacgacgagcccaccacgaccaccagcgugccccugugaggacuaguuauaagacugacuagcccgaugggccucccaacgggcccuccuccccuccuugcaccgagauuaauaaaaaaaaaaaaaaaaaaaaaaaaaaaaaaaaaaaaaaaaaaaaaaaaaaaaaaaaaaaaaaaaugcaucccccccccccccccccccccccccccccccaaaggcucuuuucagagccaccagaauu

SEQ ID NO: 22516 - RNA, 1045 nt, Artificial Sequence
  SARS-CoV-2__MT683408.1__ORF3a protein mRNA gc
aggagaaagcuuaccauggaccuguucaugcgcaucuucaccaucggcaccgugauccucaagcagggggagaucaaggacgccacgcccagcgacuucguccgggccaccgcgaccaucccgauccaggccucccugcccuucggcuggcugaucguggggguggcccuccuggccgucuuccagagcgccuccaagaucaucacccugaagaagcgcuggcagcucgcgcugagcaagggcgugcacuucgugugcaaccugcuccugcuguucgucacgguguacucccaccuccugcugguggccgccgggcucgaggcccccuuccuguaccuguacgcgcucgucuacuuccugcagagcaucaacuucgugcggaucaucaugcgccuguggcucugcuggaagugccgguccaagaacccccugcuguacgacgccaacuacuuccucugcuggcacaccaacugcuacgacuacugcaucccguacaacagcgugaccuccagcaucgucaucaccuccggcgacggcacgaccagccccaucuccgagcacgacuaccagaucgggggcuacaccgagaagugggagagcggggugaaggacugcgugguccugcacuccuacuucaccagcgacuacuaccagcuguacuccacgcagcucagcaccgacaccggcguggagcacgugaccuucuucaucuacaacaagaucgucgacgagcccgaggagcacgugcagauccacacgaucgacggguccagcggcguggucaaccccgugauggagccgaucuacgacgagcccaccaccaccacgagcgugccccugugaggacuaguuauaagacugacuagcccgaugggccucccaacgggcccuccuccccuccuugcaccgagauuaauaaaaaaaaaaaaaaaaaaaaaaaaaaaaaaaaaaaaaaaaaaaaaaaaaaaaaaaaaaaaaaaaugcaucccccccccccccccccccccccccccccccaaaggcucuuuucagagccaccagaauu

SEQ ID NO: 22517 - RNA, 1045 nt, Artificial Sequence
  SARS-CoV-2__MT679156.1__ORF3a protein mRNA gc
aggagaaagcuuaccauggaccuguucaugcgcaucuucaccaucggcaccgugacgcucaagcagggggagaucaaggacgccacccccagcgacuucguccgggccaccgcgaccaucccgauccaggccucccugcccuucggcuggcugaucguggggguggcccuccuggccgucuuccacagcgccuccaagaucaucacguucaagaagcgcuggcagcuggcgcucagcaagggcgugcacuucgugugcaaccugcugcuccuguucgucaccguguacucccaccuccugcugguggccgccgggcuggaggcccccuuccucuaccuguacgcgcuggucuacuuccuccagagcaucaacuucgugcggaucaucaugcgccuguggcugugcuggaagugccgguccaagaacccccuccuguacgacgccaacuacuuccugugcuggcacaccaacugcuacgacuacugcaucccguacaacagcgugaccuccagcaucgucaucacguccggcgacggcaccaccagccccaucuccgagcacgacuaccagaucgggggcuacaccgagaagugggagagcggggugaaggacugcgugguccuccacuccuacuucacgagcgacuacuaccagcuguacuccacccagcugagcaccgacaccggcguggagcacgugacguucuucaucuacaacaagaucgucgacgagcccgaggagcacgugcagauccacaccaucgacggguccagcggcguggucaaccccgugauggagccgaucuacgacgagcccaccaccacgaccagcgugccccucugaggacuaguuauaagacugacuagcccgaugggccucccaacgggcccuccuccccuccuugcaccgagauuaauaaaaaaaaaaaaaaaaaaaaaaaaaaaaaaaaaaaaaaaaaaaaaaaaaaaaaaaaaaaaaaaaugcaucccccccccccccccccccccccccccccccaaaggcucuuuucagagccaccagaauu

SEQ ID NO: 22518 - RNA, 1045 nt, Artificial Sequence
  SARS-CoV-2__MT611448.1__ORF3a protein mRNA gc
aggagaaagcuuaccauggaccuguucaugcgcaucuucaccaucggcaccgugacgcucaagcagggggagaucaaggacgccacccccagcgacuucguccgggccaccgcgaccaucccgauccaggccucccugcccuucggcuggcugaucguggggguggcccuccuggccgucuuccacagcgccuccaagaucaucacgcugaagaagcgcuggcagcucgcgcugagcaagggcgugcacuucgugugcaaccugcuccugcuguucgucaccguguacucccaccuccugcugguggccgccgggcucgaggcccccuuccuguaccuguacgcgcucgucuacuuccugcagagcaucaacuucgugcggaucaucaugcgccuguggcucugcuggaagugccgguccaagaacccccugcuguacgacgccaacuacuuccucugcuggcacaccaacugcuacgacuacugcaucccguacaacagcgugaccuccagcaucgucaucacguccggcgacggcaccaccagccccaucuccgaguacgacuaccagaucgggggcuacaccgagaagugggagagcggggugaaggacugcgugguccugcacuccuacuucacgagcgacuacuaccagcuguacuccacccagcucagcaccgacaccggcguggagcacgugacguucuucaucuacaacaagaucgucgacgagcccgaggagcacgugcagauccacaccaucgacggguccagcggcguggucaaccccgugauggagccgaucuacgacgagcccaccaccacgaccagcgugccccugugaggacuaguuauaagacugacuagcccgaugggccucccaacgggcccuccuccccuccuugcaccgagauuaauaaaaaaaaaaaaaaaaaaaaaaaaaaaaaaaaaaaaaaaaaaaaaaaaaaaaaaaaaaaaaaaaugcaucccccccccccccccccccccccccccccccaaaggcucuuuucagagccaccagaauu

SEQ ID NO: 22519 - RNA, 1045 nt, Artificial Sequence
  SARS-CoV-2__MT614601.1__ORF3a protein mRNA gc
aggagaaagcuuaccauggaccuguucaugcgcaucuucaccaucggcaccgugacgcucaagcagggggagaucaaggacgccacccccagcgacuucguccgggccaccgcgaccaucccgauccaggccucccugcccuucggcuggcugaucguggggguggcccuccuggccuucuuccagagcgccuccaagaucaucacgcugaagaagcgcuggcagcucgcgcugagcaagggcguccacuucgugugcaaccugcuccugcuguucgugaccgucuacucccaccuccugcugguggccgccgggcucgaggcccccuuccuguaccuguacgcgcucguguacuuccugcagagcaucaacuucguccggaucaucaugcgccuguggcucugcuggaagugccgguccaagaacccccugcuguacgacgccaacuacuuccucugcuggcacaccaacugcuacgacuacugcaucccguacaacagcgugaccuccagcaucgugaucacgcugggcgacggcaccaccucccccaucagcgagcacgacuaccagaucgggggcuacaccgagaagugggaguccggggucaaggacugcguggugcugcacagcuacuucacguccgacuacuaccagcucuacagcacccagcuguccaccgacaccggcgucgagcacgugacguucuucaucuacaacaagaucguggacgagcccgaggagcacguccagauccacaccaucgacgggagcuccggcguggugaaccccgucauggagccgaucuacgacgagcccaccaccacgaccagcgugccccugugaggacuaguuauaagacugacuagcccgaugggccucccaacgggcccuccuccccuccuugcaccgagauuaauaaaaaaaaaaaaaaaaaaaaaaaaaaaaaaaaaaaaaaaaaaaaaaaaaaaaaaaaaaaaaaaaugcaucccccccccccccccccccccccccccccccaaaggcucuuuucagagccaccagaauu

SEQ ID NO: 22520 - RNA, 1045 nt, Artificial Sequence
  SARS-CoV-2__MT675289.1__ORF3a protein mRNA gc
aggagaaagcuuaccauggaccuguucaugcgcaucuucaccaucggcaccgugacgcucaagcagggggagaucaaggacgccacccccagcgacuucguccgggccaccgcgaccaucccgauccaggccucccugcccuucggcuggcugaucguggggguggcccuccuggccgucuuccagagcgccuccaagaucaucacgcugaagaagcgcuggcagcucgcgcugagcaagggcgugcacuucgugugcaaccugcuccugcuguucgccaccgucuacucccaccuccugcugguggccgccgggcucgaggcgcccuuccuguaccuguacgcccucguguacuuccugcagagcaucaacuucguccggaucaucaugcgccuguggcucugcuggaagugccgguccaagaacccccugcuguacgacgccaacuacuuccucugcuggcacaccaacugcuacgacuacugcaucccguacaacagcgugaccuccagcaucgugaucacguccggcgacggcaccaccagccccaucuccgagcacgacuaccagaucgggggcuacaccgagaagugggagagcggggucaaggacugcguggugcugcacuccuacuucacgagcgacuacuaccagcuguacuccacccagcucagcaccgacaccggcgucgagcacgugacguucuucaucuacaacaagaucguggacgagcccgaggagcacguccagauccacaccaucgacguguccagcgggguggucaaccccgugauggagccgaucuacgacgagcccaccaccacgaccagcgugccccugugaggacuaguuauaagacugacuagcccgaugggccucccaacgggcccuccuccccuccuugcaccgagauuaauaaaaaaaaaaaaaaaaaaaaaaaaaaaaaaaaaaaaaaaaaaaaaaaaaaaaaaaaaaaaaaaaugcaucccccccccccccccccccccccccccccccaaaggcucuuuucagagccaccagaauu

SEQ ID NO: 22521 - RNA, 1045 nt, Artificial Sequence
  SARS-CoV-2__MT664169.1__ORF3a protein mRNA gc
aggagaaagcuuaccauggaccuguucaugcgcaucuucaccaucggcaccgugacgcucaagcagggggagaucaaggacgccacccccagcgacuucguccgggccaccgcgaccaucccgauccaggccucccugcccuucggcuggcugaucguggggguggcccuccuggccgucuuccagagcgccuccaagaucaucacgcugaacaagcgcuggcagcucgcgcugagcaagggcgugcacuucgugugcaaccugcuccugcuguucgucaccguguacucccaccuccugcugguggccgccgggcucgaggcccccuuccuguaccuguacgcgcucgucuacuuccugcagagcaucaacuucgugcggaucaucaugcgccuguggcucugcuggaagugccgguccaagaacccccugcuguacgacgccaacuacuuccucugcuggcacaccaacugcuacgacuacugcaucccguacaacagcgugaccuccagcaucgucaucacguccggcgacggcaccaccagccccaucuccgagcacgacuaccagaucgggggcuacaccgagaagugggagagcggggugaaggacugcgugguccugcacuccuacuucacgagcgacuacuaccagcuguacuccacccagcucagcaccgacaccggcguggagcacgugacguucuucaucuacaacaagaucgucgacgagcccgaggagcacgugcagauccacaccaucgacggguccagcggcguggucaaccccgugauggagccgaucuacgacgagcccaccaccacgaccagcgugccccugugaggacuaguuauaagacugacuagcccgaugggccucccaacgggcccuccuccccuccuugcaccgagauuaauaaaaaaaaaaaaaaaaaaaaaaaaaaaaaaaaaaaaaaaaaaaaaaaaaaaaaaaaaaaaaaaaugcaucccccccccccccccccccccccccccccccaaaggcucuuuucagagccaccagaauu

SEQ ID NO: 22522 - RNA, 1045 nt, Artificial Sequence
  SARS-CoV-2__MT653097.1__ORF3a protein mRNA gc
aggagaaagcuuaccauggaccuguucaugcgcaucuucaccaucggcaccgugacgcucaagcagggggagaucaaggacgccacccccagcgacuucguccgggccaccgcgaccaucccgauccaggccucccugcccuucggcuggcugaucguggggguggcccuccuggccgucuuccagagcgccuccaagaucaucacgcugaagaagcgcuggcagcucgcgcugagcaagggcgugcacuucgugugcaaccugcuccugcuguucgucaccguguacucccaccuccugcugguggccgccgggcucgaggcccccuuccuguaccuguacgcgcucgucuacuuccugcagagcaucaacuucgugcggaucaucaugcgccuguggcucugcuggaagugccgguccaagaacccccugcuguacgacgccaacuacuuccucugcuggcacaccaacugcuacgacuacugcaucccguacaacagcgugaccuccagcaucgucaucacguccggcgacggcaccaccagccccaucuccgagcacgacuaccagaucgggggcuacaccgagaagugggagagcggggugaaggacugcgugguccugcacuccuacuucacgagcgacuacuaccagcuguacuccacccagcucagcaccgacaccggcguggagcacgugaucuucuucaucuacaacaagaucgucgacgagcccgaggagcacgugcagauccacacgaucgacggguccagcggcguggucaaccccgugauggagccgaucuacgacgagcccaccaccaccacgagcgugccccugugaggacuaguuauaagacugacuagcccgaugggccucccaacgggcccuccuccccuccuugcaccgagauuaauaaaaaaaaaaaaaaaaaaaaaaaaaaaaaaaaaaaaaaaaaaaaaaaaaaaaaaaaaaaaaaaaugcaucccccccccccccccccccccccccccccccaaaggcucuuuucagagccaccagaauu

SEQ ID NO: 22523 - RNA, 1045 nt, Artificial Sequence
  SARS-CoV-2__MT655750.1__ORF3a protein mRNA gc
aggagaaagcuuaccauggaccuguucaugcgcaucuucaccaucggcaccgugacgcucaagcagggggagaucaaggacgccacccccagcgacuucguccgggccaccgcgaccaucccgauccaggccucccugcccuucggcuggcugaucguggggguggcccuccuggccgucuuccagagcgccuccaagaucaucacgcugaagaagcgccggcagcucgcgcugagcaagggcgugcacuucgugugcaaccugcuccugcuguucgucaccguguacucccaccuccugcugguggccgccgggcucgaggcccccuuccuguaccuguacgcgcucgucuacuuccugcagagcaucaacuucgugcgcaucaucaugcggcuguggcucugcuggaagugccgcuccaagaacccccugcuguacgacgccaacuacuuccucugcuggcacaccaacugcuacgacuacugcaucccguacaacagcgugaccuccagcaucgucaucacguccggcgacggcaccaccagccccaucuccgagcacgacuaccagaucgggggcuacaccgagaagugggagagcggggugaaggacugcgugguccugcacuccuacuucacgagcgacuacuaccagcuguacuccacccagcucagcaccgacaccggcguggagcacgugacguucuucaucuacaacaagaucgucgacgagcccgaggagcacgugcagauccacaccaucgacggguccagcggcguggucaaccccgugauggagccgaucuacgacgagcccaccaccacgaccagcgugccccugugaggacuaguuauaagacugacuagcccgaugggccucccaacgggcccuccuccccuccuugcaccgagauuaauaaaaaaaaaaaaaaaaaaaaaaaaaaaaaaaaaaaaaaaaaaaaaaaaaaaaaaaaaaaaaaaaugcaucccccccccccccccccccccccccccccccaaaggcucuuuucagagccaccagaauu

SEQ ID NO: 22524 - RNA, 1045 nt, Artificial Sequence
  SARS-CoV-2__MT646053.1__ORF3a protein mRNA gc
aggagaaagcuuaccauggaccuguucaugcgcaucuucaccaucggcaccgugacgcucaagcgcggggagaucaaggacgccacccccagcgacuucguccgggccaccgcgaccaucccgauccaggccucccugcccuucggcuggcugaucguggggguggcccuccuggccgucuuccagagcgccuccaagaucaucacgcugaagaagcgguggcagcucgcgcugagcaagggcgugcacuucgugugcaaccugcuccugcuguucgucaccguguacucccaccuccugcugguggccgccgggcucgaggcccccuuccuguaccuguacgcgcucgucuacuuccugcagagcaucaacuucgugcgcaucaucaugcggcuguggcucugcuggaagugccgcuccaagaacccccugcuguacgacgccaacuacuuccucugcuggcacaccaacugcuacgacuacugcaucccguacaacagcgugaccuccagcaucgucaucacguccggcgacggcaccaccagccccaucuccgagcacgacuaccagaucgggggcuacaccgagaagugggagagcggggugaaggacugcgugguccugcacuccuacuucacgagcgacuacuaccagcuguacuccacccagcucagcaccgacaccggcguggagcacgugacguucuucaucuacaacaagaucgucgacgagcccgaggagcacgugcagauccacaccaucgacggguccagcggcguggucaaccccgugauggagccgaucuacgacgagcccaccaccacgaccagcgugccccugugaggacuaguuauaagacugacuagcccgaugggccucccaacgggcccuccuccccuccuugcaccgagauuaauaaaaaaaaaaaaaaaaaaaaaaaaaaaaaaaaaaaaaaaaaaaaaaaaaaaaaaaaaaaaaaaaugcaucccccccccccccccccccccccccccccccaaaggcucuuuucagagccaccagaauu

SEQ ID NO: 22525 - RNA, 1045 nt, Artificial Sequence
  SARS-CoV-2__MT641689.1__ORF3a protein mRNA gc
aggagaaagcuuaccauggaccuguucaugcgcaucuucaccaucggcaccgugacgcucaagcagggggagaucaaggacgccacccccagcgacuucguccgggccaccgcgaccaucccgauccaggccucccugcccuucggcuggcugaucguggggguggcccuccuggccgucuuccacagcgccuccaagaucaucacgcugaagaagcgcuggcagcucgcgcugagcaagggcgugcacuucgugugcaaccugcuccugcuguucgucaccguguacucccaccuccugcugguggccgccgggcucgaggcccccuuccuguaccuguacgcgcucgucuacuuccugcagagcaucaacuucgugcggaucaucaugcgccuguggcucugcuggaagugccgguccaagaacccccugcuguacgacgccaacuacuuccucugcuggcacaccaacugcuacgacuacugcaucccguacaacagcgugaccuccagcaucgucaucacguccggcgacggcaccaccagccccaucuccgagcacgacuaccagaucgggggcuacaccgagaagugggagagcggggugaaggacugcgugguccugcacuccuacuucacgagcgacuacuaccagcuguacuccacccagcucagcaccgacaccggcguggagcacgugacguucuucaucuacaacaagaucgucgacgagcccgaggagcacgugcagauccacaccaucgacggguccagcggcguggucaaccccgugauggagagcaucuacgacgagccgaccaccacgaccuccgugccccugugaggacuaguuauaagacugacuagcccgaugggccucccaacgggcccuccuccccuccuugcaccgagauuaauaaaaaaaaaaaaaaaaaaaaaaaaaaaaaaaaaaaaaaaaaaaaaaaaaaaaaaaaaaaaaaaaugcaucccccccccccccccccccccccccccccccaaaggcucuuuucagagccaccagaauu

SEQ ID NO: 22526 - RNA, 1045 nt, Artificial Sequence
  SARS-CoV-2__MT641720.1__ORF3a protein mRNA gc
aggagaaagcuuaccauggaccuguucaugcgcaucuucaccaucggcaccgugacgcucaagcagggggagaucaaggacgccacccccagcgacuucguccgggccaccgcgaccaucccgauccaggccucccugcccuucggcuggcugaucguggggguggcccuccuggccgucuuccacagcgccuccaagaucaucacgcugaagaagcgcuggcagcucgcgcugagccggggcgugcacuucgugugcaaccugcuccugcuguucgucaccguguacucccaccuccugcugguggccgccgggcucgaggcccccuuccuguaccuguacgcgcucgucuacuuccugcagagcaucaacuucgugcgcaucaucaugcggcuguggcucugcuggaagugccgcuccaagaacccccugcuguacgacgccaacuacuuccucugcuggcacaccaacugcuacgacuacugcaucccguacaacagcgugaccuccagcaucgucaucacguccggcgacggcaccaccagccccaucuccgagcacgacuaccagaucgggggcuacaccgagaagugggagagcggggugaaggacugcgugguccugcacuccuacuucacgagcgacuacuaccagcuguacuccacccagcucagcaccgacaccggcguggagcacgugacguucuucaucuacaacaagaucgucgacgagcccgaggagcacgugcagauccacaccaucgacggguccagcggcguggucaaccccgugauggagccgaucuacgacgagcccaccaccacgaccagcgugccccugugaggacuaguuauaagacugacuagcccgaugggccucccaacgggcccuccuccccuccuugcaccgagauuaauaaaaaaaaaaaaaaaaaaaaaaaaaaaaaaaaaaaaaaaaaaaaaaaaaaaaaaaaaaaaaaaaugcaucccccccccccccccccccccccccccccccaaaggcucuuuucagagccaccagaauu

SEQ ID NO: 22527 - RNA, 1045 nt, Artificial Sequence
  SARS-CoV-2__MT641737.1__ORF3a protein mRNA gc
aggagaaagcuuaccauggaccuguucaugcgcaucuucaccaucggcaccgugacgcucaagcagggggagaucaaggacgccacccccagcgacuucguccgggccaccgcgaccaucccgauccaggccucccugcccuucggcuggcugaucguggggguggcccuccuggccgucuuccagagcgccuccaagaucaucacgcugaagaagcgccuccagcuggcgcugagcaagggcgugcacuucgugugcaaccuccugcugcuguucgucaccguguacucccaccuccugcucguggccgccgggcuggaggcccccuuccuguaccucuacgcgcuggucuacuuccugcagagcaucaacuucgugcggaucaucaugcgccucuggcugugcuggaagugccgguccaagaacccccugcucuacgacgccaacuacuuccugugcuggcacaccaacugcuacgacuacugcaucccguacaacagcgugaccuccagcaucgucaucacguccggcgacggcaccaccagccccaucuccgagcacgacuaccagaucgggggcuacaccgagaagugggagagcggggugaaggacugcgugguccugcacuccuacuucacgagcgacuacuaccagcucuacuccacccagcugagcaccgacaccggcguggagcacgugacguucuucaucuacaacaagaucgucgacgagcccgaggagcacgugcagauccacaccaucgacguguccagcggggucgugaaccccgugauggagccgaucuacgacgagcccaccaccacgaccagcgucccccugugaggacuaguuauaagacugacuagcccgaugggccucccaacgggcccuccuccccuccuugcaccgagauuaauaaaaaaaaaaaaaaaaaaaaaaaaaaaaaaaaaaaaaaaaaaaaaaaaaaaaaaaaaaaaaaaaugcaucccccccccccccccccccccccccccccccaaaggcucuuuucagagccaccagaauu

SEQ ID NO: 22528 - RNA, 1045 nt, Artificial Sequence
  SARS-CoV-2__MT641741.1__ORF3a protein mRNA gc
aggagaaagcuuaccauggaccuguucaugcgcaucuucaccaucggcaccgugacgcucaagcagggggagaucaaggacgccacccccagcgacuucguccgggccaccgcgaccaucccgauccaggccucccugcccuucggcuggcugaucguggggguggcccuccuggccgucuuccagagcgccuccaagaucaucacgcugaagaagcgcuggcagcucgcgcugcccaagggcgugcacuucgugugcaaccugcuccugcuguucgucaccguguacagccaccuccugcugguggccgccgggcucgaggcccccuuccuguaccuguacgcgcucgucuacuuccugcaguccaucaacuucgugcggaucaucaugcgccuguggcucugcuggaagugccggagcaagaacccgcugcuguacgacgccaacuacuuccucugcuggcacaccaacugcuacgacuacugcauccccuacaacuccgugaccagcuccaucgucaucacgagcggcgacggcaccaccucccccaucagcgagcacgacuaccagaucgggggcuacaccgagaagugggaguccggggugaaggacugcgugguccugcacagcuacuucacguccgacuacuaccagcuguacagcacccagcucuccaccgacaccggcguggagcacgugacguucuucaucuacaacaagaucgucgacgagcccgaggagcacgugcagauccacaccaucgacgggagcuccggcguggucaacccggugauggagcccaucuacgacgagcccaccaccacgaccagcgugccccugugaggacuaguuauaagacugacuagcccgaugggccucccaacgggcccuccuccccuccuugcaccgagauuaauaaaaaaaaaaaaaaaaaaaaaaaaaaaaaaaaaaaaaaaaaaaaaaaaaaaaaaaaaaaaaaaaugcaucccccccccccccccccccccccccccccccaaaggcucuuuucagagccaccagaauu

SEQ ID NO: 22529 - RNA, 1045 nt, Artificial Sequence
  SARS-CoV-2__MT642138.1__ORF3a protein mRNA gc
aggagaaagcuuaccauggaccuguucaugcgcaucuucaccaucggcaccgugacgcucaagcagggggagaucaaggacgccacccccagcgacuucguccgggccaccgcgaccaucccgauccaggccucccugcccuucggcuggcugaucguggggguggcccuccuggccgucuuccacagcgccuccaagaucaucacgcugaagaagcgcuggcagcucgcgcugagcaagggcgugcacuucgugugcaaccugcuccugcuguucgucaccguguacucccaccuccugcugguggccgccgggcucgaggcccccuuccuguaccuguacgcgcucgucuacuuccugcagagcaucaacuucgugcggaucaucaugcgccuguggcucugcuggaagugccgguccaagaacccccugcuguacgacgccaacuacuuccucugcuggcacaccaacugcuacgacuacugcaucccguacaacagcgugaccuccagcaucgucaucacguccggcgacggcaccaccagccccaucuccgagcacgacuaccagaucgggggcuacaccgagaagcgcgagagcggggugaaggacugcgugguccugcacuccuacuucacgagcgacuacuaccagcuguacuccacccagcucagcaccgacaccggcguggagcacgugacguucuucaucuacaacaagaucgucgacgagcccgaggagcacgugcagauccacaccaucgacggguccagcggcguggucaaccccgugauggagccgaucuacgacgagcccaccaccacgaccagcgugccccugugaggacuaguuauaagacugacuagcccgaugggccucccaacgggcccuccuccccuccuugcaccgagauuaauaaaaaaaaaaaaaaaaaaaaaaaaaaaaaaaaaaaaaaaaaaaaaaaaaaaaaaaaaaaaaaaaugcaucccccccccccccccccccccccccccccccaaaggcucuuuucagagccaccagaauu

SEQ ID NO: 22530 - RNA, 1045 nt, Artificial Sequence
  SARS-CoV-2__MT642186.1__ORF3a protein mRNA gc
aggagaaagcuuaccauggaccuguucaugcgcaucuucaccaucggcaccgugacgcucaagcagggggagaucaaggacgccacccugagcgacuucguccgggccaccgcgaccauccccauccaggccucccugccguucggcuggcucaucguggggguggcccugcuggccgucuuccacagcgccuccaagaucaucacgcucaagaagcgcuggcagcuggcgcugagcaagggcgugcacuucgugugcaaccuccugcugcuguucgucaccguguacucccaccuccugcucguggccgccgggcuggaggcccccuuccuguaccucuacgcgcuggucuacuuccugcagagcaucaacuucgugcggaucaucaugcgccucuggcugugcuggaagugccgguccaagaacccccugcucuacgacgccaacuacuuccugugcuggcacaccaacugcuacgacuacugcauccccuacaacagcgugaccuccagcaucgucaucacguccggcgacggcaccaccagcccgaucuccgagcacgacuaccagaucgggggcuacaccgagaagugggagagcggggugaaggacugcgugguccugcacuccuacuucacgagcgacuacuaccagcucuacuccacccagcugagcaccgacaccggcguggagcacgugacguucuucaucuacaacaagaucgucgacgagcccgaggagcacgugcagauccacaccaucgacggguccagcggcguggucaaccccgugauggagcccaucuacgacgagccgaccaccacgaccagcgugccccugugaggacuaguuauaagacugacuagcccgaugggccucccaacgggcccuccuccccuccuugcaccgagauuaauaaaaaaaaaaaaaaaaaaaaaaaaaaaaaaaaaaaaaaaaaaaaaaaaaaaaaaaaaaaaaaaaugcaucccccccccccccccccccccccccccccccaaaggcucuuuucagagccaccagaauu

SEQ ID NO: 22531 - RNA, 1045 nt, Artificial Sequence
  SARS-CoV-2__MT642305.1__ORF3a protein mRNA gc
aggagaaagcuuaccauggaccuguucaugcgcaucuucaccaucggcaccgugacgcucaagcagggggagaucaaggacgccacccccagcgacuucguccgggccaccgcgaccaucccgauccaggccucccugcccuucggcuggcugaucguggggguggcccuccuggccgucuuccagagcgccuccaagaucaucacgcugaagaagcgcuggcagcucgcgcugagcaagggcgugcacuucgugugcaaccugcuccugcuguucgccaccgucuacucccaccuccugcugguggccgccgggcucgaggcgcccuuccuguacuucuacgcccugguguacuuccuccagagcaucaacuucguccggaucaucaugcgccuguggcugugcuggaagugccgguccaagaacccccuccuguacgacgccaacuacuuccugugcuggcacaccaacugcuacgacuacugcaucccguacaacagcgugaccuccagcaucgugaucacgcucggcgacggcaccaccucccccaucagcgagcacgacuaccagaucgggggcuacaccgagaagugggaguccggggucaaggacugcguggugcugcacagcuacuucacguccgacuacuaccagcuguacagcacccagcucuccaccgacaccggcgucgagcacgugacguucuucaucuacaacaagaucguggacgagcccgaggagcacguccagauccacaccaucgacgugagcuccgggguggucaaccccgugauggagccgaucuacgacgagcccaccaccacgaccagcgugccccugugaggacuaguuauaagacugacuagcccgaugggccucccaacgggcccuccuccccuccuugcaccgagauuaauaaaaaaaaaaaaaaaaaaaaaaaaaaaaaaaaaaaaaaaaaaaaaaaaaaaaaaaaaaaaaaaaugcaucccccccccccccccccccccccccccccccaaaggcucuuuucagagccaccagaauu

SEQ ID NO: 22532 - RNA, 1045 nt, Artificial Sequence
  SARS-CoV-2__MT642307.1__ORF3a protein mRNA gc
aggagaaagcuuaccauggaccuguucaugcgcaucuucaccaucggcaccgugacgcucaagcagggggagaucaaggacgccacccccagcgacuucguccgggccaccgcgaccaucccgauccaggccuccauccccuucggcuggcugaucguggggguggcccugcucgccgucuuccagagcgccuccaagaucaucacgcugaagaagcgcuggcagcuggcgcucagcaagggcgugcacuucgugugcaaccugcugcuccuguucgucaccguguacucccaccuccugcugguggccgccgggcuggaggcccccuuccucuaccuguacgcgcuggucuacuuccuccagagcaucaacuucgugcggaucaucaugcgccuguggcugugcuggaagugccgguccaagaacccccuccuguacgacgccaacuacuuccugugcuggcacaccaacugcuacgacuacugcaucccguacaacagcgugaccuccagcaucgucaucacguccggcgacggcaccaccagccccaucuccgagcacgacuaccagaucgggggcuacaccgagaagugggagagcggggugaaggacugcgugguccuccacuccuacuucacgagcgacuacuaccagcuguacuccacccagcugagcaccgacaccggcguggagcacgugacguucuucaucuacaacaagaucgucgacgagcccgaggagcacgugcagauccacaccaucgacggguccagcggcguggucaaccccgugauggagccgaucuacgacgagcccaccaccacgaccagcgugccccucugaggacuaguuauaagacugacuagcccgaugggccucccaacgggcccuccuccccuccuugcaccgagauuaauaaaaaaaaaaaaaaaaaaaaaaaaaaaaaaaaaaaaaaaaaaaaaaaaaaaaaaaaaaaaaaaaugcaucccccccccccccccccccccccccccccccaaaggcucuuuucagagccaccagaauu

SEQ ID NO: 22533 - RNA, 1045 nt, Artificial Sequence
  SARS-CoV-2__MT642356.1__ORF3a protein mRNA gc
aggagaaagcuuaccauggaccuguucaugcgcaucuucaccaucggcaccgugacgcucaagcagggggagaucaaggacgccacccccagcgacuucguccgggccaccgcgaccaucccgauccaggccucccugcccuucggcuggcugaucguggggguggcccuccuggccgucuuccagagcgccuccaagaucaucacgcugaagaagcgcuggcagcucgcgcugagcaagggcgugcacuucgugugcaaccugcuccugcuguucgucaccguguacucccaccuccugcugguggccgccgggcucgaggcccccuuccuguaccuguacgcgcucgucuacuuccugcagagcaucaacuucgugcggaucaucaugcgccuguggcucugcuggaagugccgguccaagaacccccugcuguacgacgccaacuacuuccucugcuggcacaccaacugcuacgacuacugcaucccguacaacagcgugaccuccagcaucgucaucacguccggcgacggcaccaccagccccaucuccgagcacgacuaccagaucgggggcuacaccgagaagugggagagcggggugaaggacugcgugguccugcacuccuacuucacgagcgacuacuaccagcuguacuccacccgccucagcaccgacaccggcguggagcacgugacguucuucaucuacaacaagaucgucgacgagcccgaggagcacgugcagauccacaccaucgacggguccagcggcguggucaaccccgugauggagccgaucuacgacgagcccaccaccacgaccagcgugccccugugaggacuaguuauaagacugacuagcccgaugggccucccaacgggcccuccuccccuccuugcaccgagauuaauaaaaaaaaaaaaaaaaaaaaaaaaaaaaaaaaaaaaaaaaaaaaaaaaaaaaaaaaaaaaaaaaugcaucccccccccccccccccccccccccccccccaaaggcucuuuucagagccaccagaauu

SEQ ID NO: 22534 - RNA, 1045 nt, Artificial Sequence
  SARS-CoV-2__MT642412.1__ORF3a protein mRNA gc
aggagaaagcuuaccauggaccuguucaugcgcaucuucaccaucggcaccgugacgcucaagcagggggagaucaaggacgccacccccagcgacuucguccgggccaccgcgaccaucccgauccaggccucccugcccuucggcuggcugaucguggggguggcccuccuggccgucuuccagagcgccuccaagaucaucacgcugaagaagcgcuggcagcucgcgcugagcaagggcgugcacuucgugugcaaccugcuccugcuguucgccaccgucuacucccaccuccugcugguggccgccgggcucgaggcgcccuuccuguaccuguacgcccucguguacuuccugcagagcaucaacuucguccggaucaucaugcgccuguggcucugcuggaagugccgguccaagaacccccugcuguacgacgccaacuacuuccucugcuggcacaccaacugcuacgacuacugcaucccguacaacagcgugaccuccagcaucgugaucacgcugggcgacggcaccaccucccccaucagcgagcacgacuaccagaucgggggcuacaccgagaagugggaguccggggucaaggacugcguggugcugcacagcuacuucacguccgacuacuaccagcucuacagcacccagcuguccaccgacaccggcgucgagcacgugacguucuucaucuacaacaagaucguggacgagcccgaggagcacguccagauccacaccaucgacgugagcuccgggguggucaaccccgugauggagccgaucuacgacgagcccaccaccacgaccagcgugccccugugaggacuaguuauaagacugacuagcccgaugggccucccaacgggcccuccuccccuccuugcaccgagauuaauaaaaaaaaaaaaaaaaaaaaaaaaaaaaaaaaaaaaaaaaaaaaaaaaaaaaaaaaaaaaaaaaugcaucccccccccccccccccccccccccccccccaaaggcucuuuucagagccaccagaauu

SEQ ID NO: 22535 - RNA, 1045 nt, Artificial Sequence
  SARS-CoV-2__MT635653.1__ORF3a protein mRNA gc
aggagaaagcuuaccauggaccuguucaugcgcaucuucaccaucggcaccgugacgcucaagcagggggagaucaaggacgccacccccagcgacuucguccgggccaccgcgaccaucccgauccaggccucccugcccuucggcuggcugaucguggggguggcccuccuggccgucuuccacagcgccuccaagaucaucacgcugaagaagcgcuggcagcucgcgcugagcaagggcgugcacuucgugugcaaccugcuccugcuguucgucaccguguacucccaccuccugcugguggccgccgggcucgaggcccccuuccuguaccuguacgcgcucgucuacuuccugcagagcaucaacuucgugcggaucaucaugcgccuguggcucugcuggaagugccgguccaagaacccccugcuguacgacgccaacuacuuccucugcuggcacaccaacugcuacgacuacugcaucccguacaacagcgugaccuccagcaucgucaucacguccggcgacggcaccaccagccccaucuccgagcacgacuaccacaucgggggcuacaccgagaagugggagagcggggugaaggacugcgugguccugcacuccuacuucacgagcgacugcuaccagcuguacuccacccagcucagcaccgacaccggcguggagcacgugacguucuucaucuacaacaagaucgucgacgagcccgaggagcacgugcagauccacaccaucgacggguccagcggcguggucaaccccgugauggagccgaucuacgacgagcccaccaccacgaccagcgugccccugugaggacuaguuauaagacugacuagcccgaugggccucccaacgggcccuccuccccuccuugcaccgagauuaauaaaaaaaaaaaaaaaaaaaaaaaaaaaaaaaaaaaaaaaaaaaaaaaaaaaaaaaaaaaaaaaaugcaucccccccccccccccccccccccccccccccaaaggcucuuuucagagccaccagaauu

SEQ ID NO: 22536 - RNA, 1045 nt, Artificial Sequence
  SARS-CoV-2__MT627609.1__ORF3a protein mRNA gc
aggagaaagcuuaccauggaccuguucaugcgcaucuucaccaucggcaccgugacgcucaagcagggggagaucaaggacgccacccccagcgacuucguccgggccaccgcgaccaucccgauccaggccucccugcccuucggcuggcugaucguggggguggcccuccuggccgucuuccagagcgccuccaagaucaucacgcugaagaagcgcuggcagcucgcgcugagcaagggcgugcacuucgugugcaaccugcuccugcuguucgucaccguguacucccaccuccugcugguggccgccgggcucgaggcccccuuccuguaccuguacgcgcucgucuacuuccugcagagcaucaacuucgugcggaucaucaugcgccuguggcucugcuggaagugccgguccaagaacccccugcuguacgacgccaacuacuuccucugcuggcacaccaacugcuacgacuacugcaucccguacaacagcgugaccuccagcaucgucaucacguccggcgacggcaccaccagccccaucuccgagcacgacuaccagaucgggggcuacaccgagaagugggagagcggggugaaggacugcaucgugcugcacuccuacuucacgagcgacuacuaccagcuguacuccacccagcucagcaccgacaccggcgucgagcacgugacguucuucaucuacaacaagaucguggacgagcccgaggagcacguccagauccacaccaucgacggguccagcggcguggugaaccccgucauggagccgaucuacgacgagcccaccaccacgaccagcgugccccugugaggacuaguuauaagacugacuagcccgaugggccucccaacgggcccuccuccccuccuugcaccgagauuaauaaaaaaaaaaaaaaaaaaaaaaaaaaaaaaaaaaaaaaaaaaaaaaaaaaaaaaaaaaaaaaaaugcaucccccccccccccccccccccccccccccccaaaggcucuuuucagagccaccagaauu

SEQ ID NO: 22537 - RNA, 1045 nt, Artificial Sequence
  SARS-CoV-2__MT627747.1__ORF3a protein mRNA gc
aggagaaagcuuaccauggaccuguucaugcgcaucuucaccaucggcaccgugacgcucaagcagggggagaucaaggacgccacccccagcgacuucguccgggccaccgcgaccaucccgauccaggccucccugcccuucggcuggcugaucguggggguggcccuccuggccgucuuccacagcgccuccaagaucaucacgcugaagaagcgcuggcagcucgcgcugagcaagggcgugcacuucgugugcaaccugcuccugcuguucgucaccguguacucccaccuccugcugguggccgccgggcucgaggcccccuuccuguaccuguacgcgcucgucuacuuccugcagagcaucaacuucgugcggaucaucaugcgccuguggcucugcuggaagugccgguccaagaacccccugcuguacgacgccaacuacuuccucugcuggcacaccaacugcuacgacuacugcaucccguacaacagcgugaccuccagcaucgucaucacguccggcgacggcaccaccagccccaucuccgagcacgacuaccagaucgggggcuacaccgagaagugggagagcggggugaaggacugcgugguccugcacuccuacuucacgagcgacuacuaccagcuguacuccacccagcucagcaccgacaccggcguggagcacgugacguucuucaucuacaacaagaucgucgacgagcccgaggagcacgugcagauccacaccaucgacggguccagcggcguggucaaccccgugauggagccgaucuacgacgagcccaccaccacgaucagcgugccccugugaggacuaguuauaagacugacuagcccgaugggccucccaacgggcccuccuccccuccuugcaccgagauuaauaaaaaaaaaaaaaaaaaaaaaaaaaaaaaaaaaaaaaaaaaaaaaaaaaaaaaaaaaaaaaaaaugcaucccccccccccccccccccccccccccccccaaaggcucuuuucagagccaccagaauu

SEQ ID NO: 22538 - RNA, 1045 nt, Artificial Sequence
  SARS-CoV-2__MT628095.1__ORF3a protein mRNA gc
aggagaaagcuuaccauggaccuguucaugcgcaucuucaccaucggcaccgugacgcucaagcagggggagaucaaggacgccacccccagcgacuucguccgggccaccgcgaccaucccgauccaggccucccugcccuucggcuggcugaucguggggguggcccuccuggccgucuuccagagcgccuccaagaucaucacgcugaagaagcgcuggcagcucgcgcugagcaagggcgugcacuucgugugcaaccugcuccugcuguucgucaccguguacucccaccuccugcugguggccgccgggcucgaggcccccuuccuguaccuguacgcgcucgucuacuuccugcagagcaucaacuucgugcggaucaucaugcgccuguggcucugcuggaagugccgguccaagaacccccugcuguacgacgccaacuacuuccucugcuggcacaccaacugcuacgacuacugcaucccguacaacagcgugaccuccagcaucgucaucacguccggcgacggcaccaccagccccaucuccgagcacgacuaccagaucgggggcuacaccgagaagugggagagcggggugaaggacugcgugguccugcacuccuacuucacgagcgacuacuaccagcuguacuccacccagcucagcaccgacaccggcguggagcacgugacguucuucaucuacaacaagaucgucgacgagcccgaggagcacgugcagauccacaccaucgacggguccagcggcguggucaaccccgugaaggagccgaucuacgacgagcccaccaccacgaccagcgugccccugugaggacuaguuauaagacugacuagcccgaugggccucccaacgggcccuccuccccuccuugcaccgagauuaauaaaaaaaaaaaaaaaaaaaaaaaaaaaaaaaaaaaaaaaaaaaaaaaaaaaaaaaaaaaaaaaaugcaucccccccccccccccccccccccccccccccaaaggcucuuuucagagccaccagaauu

SEQ ID NO: 22539 - RNA, 1045 nt, Artificial Sequence
  SARS-CoV-2__MT628180.1__ORF3a protein mRNA gc
aggagaaagcuuaccauggaccuguucaugcgcaucuucaccaucggcaccgugacgcucaagcagggggagaucaaggacgccacccccagcgacuucguccgggccaccgcgaccaucccgauccaggccucccugcccuucggcuggcugaucguggggguggcccuccuggccgucuuccagagcgccuccaagaucaucacgcugaagaagcgcuggcagcucgcgcugagcaagggcgugcacuucgugugcaaccugcuccugcuguucgucaccguguacucccaccuccugcugguggccgccgggcucgaggcccccuuccuguacuucuacgcgcuggucuacuuccuccagagcaucaacuucgugcggaucaucaugcgccuguggcugugcuggaagugccgguccaagaacccccuccuguacgacgccaacuacuuccugugcuggcacaccaacugcuacgacuacugcaucccguacaacagcgugaccuccagcaucgucaucacguccggcgacggcaccaccagccccaucuccgagcacgacuaccagaucgggggcuacaccgagaagugggagagcggggugaaggacugcgugguccuccacuccuacuucacgagcgacuacuaccagcuguacuccacccagcugagcaccgacaccggcguggagcacgugacguucuucaucuacaacaagaucgucgacgagcccgaggagcacgugcagauccacaccaucgacggguccagcggcguggucaaccccgugauggagccgaucuacgacgagcccaccaccacgaccagcgugccccucugaggacuaguuauaagacugacuagcccgaugggccucccaacgggcccuccuccccuccuugcaccgagauuaauaaaaaaaaaaaaaaaaaaaaaaaaaaaaaaaaaaaaaaaaaaaaaaaaaaaaaaaaaaaaaaaaugcaucccccccccccccccccccccccccccccccaaaggcucuuuucagagccaccagaauu

SEQ ID NO: 22540 - RNA, 1045 nt, Artificial Sequence
  SARS-CoV-2__MT628245.1__ORF3a protein mRNA gc
aggagaaagcuuaccauggaccuguucaugcgcaucuucaccaucggcaccgugacgcucaagcagggggagaucaaggacgccacccccagcgacuucguccgggccaccgcgaccaucccgauccaggccucccugcccuacggcuggcugaucguggggguggcccuccuggccgucuuccacagcgccuccaagaucaucacgcugaagaagcgcuggcagcucgcgcugagcaagggcgugcacuucgugugcaaccugcuccugcuguucgucaccguguacucccaccuccugcugguggccgccgggcucgaggcccccuuccuguaccuguacgcgcucgucuacuuccugcagagcaucaacuucgugcggaucaucaugcgccuguggcucugcuggaagugccgguccaagaacccccugcuguacgacgccaacuacuuccucugcuggcacaccaacugcuacgacuacugcaucccguacaacagcgugaccuccagcaucgucaucacguccggcgacggcaccaccagccccaucuccgagcacgacuaccagaucgggggcuacaccgagaagugggagagcggggugaaggacugcgugguccugcacuccuacuucacgagcgacuacuaccagcuguacuccacccagcucagcaccgacaccggcguggagcacgugacguucuucaucuacaacaagaucgucgacgagcccgaggagcacgugcagauccacaccaucgacggguccagcggcguggucaaccccgugauggagccgaucuacgacgagcccaccaccacgaccagcgugccccugugaggacuaguuauaagacugacuagcccgaugggccucccaacgggcccuccuccccuccuugcaccgagauuaauaaaaaaaaaaaaaaaaaaaaaaaaaaaaaaaaaaaaaaaaaaaaaaaaaaaaaaaaaaaaaaaaugcaucccccccccccccccccccccccccccccccaaaggcucuuuucagagccaccagaauu

SEQ ID NO: 22541 - RNA, 1045 nt, Artificial Sequence
  SARS-CoV-2__MT630422.1__ORF3a protein mRNA gc
aggagaaagcuuaccauggaccuguucaugcgcaucuucaccaucggcaccgugacgcucaagcagggggagaucaaggacgccacccccagcgacuucguccgggccaccgcgaccaucccgauccaggccucccugcccuucggcuggcugaucguggggguggcccuccuggccgucuuccagagcgccuccaagaucaucacgcugaagaagcgcuggcagcucgcgcugagcaagggcgugcacuucgugugcaaccugcuccugcuguucgccaccgucuacucccaccuccugcugguggccgccgggcucgaggcgcccuuccuguaccuguacgcccucguguacuuccugcagagcaucaacuucguccggaucaucaugcgccuguggcucugcuggaagugccgguccaagaacccccugcuguacgacgccaacuacuuccucugcuggcacaccaacugcuacgacuacugcaucccguacaacagcgugaccuccagcaucgugaucacguccggcgacggcaccaccagccccaucuccgagcacgacuaccagaucgggggcuacaccgagaagugggagagcggggucaaggacugcguggugcugcacuccuacuucacgagcgacuacuaccagcuguacuccacccagcucagcaccgacaccggcgucgagcacgugacguucuucaucuacaacaagaucguggacgagcccgaggagcacguccagauccacaccaucgacggguccagcggcguggugaaccccgucauggagccgaucuacgacgagcccaccaccacgaccagcgugccccugugaggacuaguuauaagacugacuagcccgaugggccucccaacgggcccuccuccccuccuugcaccgagauuaauaaaaaaaaaaaaaaaaaaaaaaaaaaaaaaaaaaaaaaaaaaaaaaaaaaaaaaaaaaaaaaaaugcaucccccccccccccccccccccccccccccccaaaggcucuuuucagagccaccagaauu

SEQ ID NO: 22542 - RNA, 1045 nt, Artificial Sequence
  SARS-CoV-2__MT632576.1__ORF3a protein mRNA gc
aggagaaagcuuaccauggaccuguucaugcgcaucuucaccaucggcaccgugacgcucaagcagggggagaucaaggacgccacccccagcgacuucguccgggccaccgcgaccaucccgauccaggccucccugcccuucggcuggcugaucguggggguggcccuccuggccgucuuccagagcgccuccaagaucaucacgcugaagaagcgcuggcagcucgcgcugagcaagggcgugcacuucgugugcaaccugcuccugcuguucgucaccguguacucccaccuccugcugguggccgccgggcucgaggcccccuuccuguaccuguacgcgcucgucuacuuccugcagagcaucaacuucgugcggaucaucaugcgccuguggcucugcuggaagugccgguccaagaacccccuguucuacgacgccaacuacuuccugugcuggcacaccaacugcuacgacuacugcaucccguacaacagcgugaccuccagcaucgucaucacguccggcgacggcaccaccagccccaucuccgagcacgacuaccagaucgggggcuacaccgagaagugggagagcggggugaaggacugcgugguccuccacuccuacuucacgagcgacuacuaccagcuguacuccacccagcugagcaccgacaccggcguggagcacgugacguucuucaucuacaacaagaucgucgacgagcccgaggagcacgugcagauccacaccaucgacggguccagcggcguggucaaccccgugauggagccgaucuacgacgagcccaccaccacgaccagcgugccccucugaggacuaguuauaagacugacuagcccgaugggccucccaacgggcccuccuccccuccuugcaccgagauuaauaaaaaaaaaaaaaaaaaaaaaaaaaaaaaaaaaaaaaaaaaaaaaaaaaaaaaaaaaaaaaaaaugcaucccccccccccccccccccccccccccccccaaaggcucuuuucagagccaccagaauu

SEQ ID NO: 22543 - RNA, 1045 nt, Artificial Sequence
  SARS-CoV-2__MT632795.1__ORF3a protein mRNA gc
aggagaaagcuuaccauggaccuguucaugcgcaucuucaccaucggcaccgugacgcucaagcagggggagaucaaggacgccacccccagcgacuucguccgggccaccgcgaccaucccgauccaggccucccugcccuucggcuggcugaucguggggguggcccuccuggccgucuuccagagcgccuccaagaucaucacgcugaagaagcgcuggcagcucgcgcugagcaagggcgugcacuucgugugcaaccugcuccugcuguucgucaccguguacucccaccuccugcugguggccgccgggcucgaggcccccuuccuguaccuguacgcgcucgucuacuuccugcagagcaucaacuucgugcggaucaucaugcgccuguggcucugcuggaagugccgguccaagaacccccugcuguacgacgccaacuacuuccucugcuggcacaccaacugcuacgacuacugcaucccguacaacagcgugaccuccagcaucgucaucacguccggcgacggcaccaccagccccaucuccgagcacgacuaccagaucgggggcuacaccgagaagugggagagcggggugaaggacugcgugguccugcacuccuacuucacgagcgacuacuaccagcuguacuccacccagcucagcaccgacaccggcguggagcacgugacguucuucaucuacaacaagaucgucgaggagcccgaggagcacgugcagauccacaccaucgacggguccagcggcguggucaaccccgugauggagccgaucuacgacgagcccaccaccacgaccagcgugccccugugaggacuaguuauaagacugacuagcccgaugggccucccaacgggcccuccuccccuccuugcaccgagauuaauaaaaaaaaaaaaaaaaaaaaaaaaaaaaaaaaaaaaaaaaaaaaaaaaaaaaaaaaaaaaaaaaugcaucccccccccccccccccccccccccccccccaaaggcucuuuucagagccaccagaauu

SEQ ID NO: 22544 - RNA, 1045 nt, Artificial Sequence
  SARS-CoV-2__MT632887.1__ORF3a protein mRNA gc
aggagaaagcuuaccauggaccuguucaugcgcaucuucaccaucggcaccgugacgcucaagcagggggagaucaaggacgccacccccagcgacuucguccgggccaccgcgaccaucccgauccaggccucccugcccuucggcuggcugaucguggggguggcccuccuggccgucuuccagagcgccuccaagaucaucacgcugaagaagcgcuggcagcucgcgcugagcaagggcgugcacuucgugugcaaccugcuccugcuguucgucaccguguacucccaccuccugcugguggccgccgggcucgaggcccccuuccuguaccuguacgcgcucgucuacuuccugcagagcaucaacuucgugcggaucaucaugcgccuguggcucugcuggaagugccgguccaagaacccccugcuguacgacgccaacuacuuccucugcuggcacaccaacugcuacgacuacugcaucccguacaacagcgugaccuucuccaucgucaucacgagcggcgacggcaccaccucccccaucagcgagcacgacuaccagaucgggggcuacaccgagaagugggaguccggggugaaggacugcgugguccugcacagcuacuucacguccgacuacuaccagcuguacagcacccagcucuccaccgacaccggcguggagcacgugacguucuucaucuacaacaagaucgucgacgagcccgaggagcacgugcagauccacaccaucgacgggagcuccggcguggucaaccccgugauggagccgaucuacgacgagcccaccaccacgaccagcgugccccugugaggacuaguuauaagacugacuagcccgaugggccucccaacgggcccuccuccccuccuugcaccgagauuaauaaaaaaaaaaaaaaaaaaaaaaaaaaaaaaaaaaaaaaaaaaaaaaaaaaaaaaaaaaaaaaaaugcaucccccccccccccccccccccccccccccccaaaggcucuuuucagagccaccagaauu

SEQ ID NO: 22545 - RNA, 1045 nt, Artificial Sequence
  SARS-CoV-2__MT632892.1__ORF3a protein mRNA gc
aggagaaagcuuaccauggaccuguucaugcgcaccuucaccaucggcacggugacccucaagcagggggagaucaaggacgccacccccagcgacuucguccgggccaccgcgacgaucccgauccaggccucccugcccuucggcuggcugaucguggggguggcccuccuggccgucuuccagagcgccuccaagaucaucacccugaagaagcgcuggcagcucgcgcugagcaagggcgugcacuucgugugcaaccugcuccugcuguucgucaccguguacucccaccuccugcugguggccgccgggcucgaggcccccuuccuguaccuguacgcgcucgucuacuuccugcagagcaucaacuucgugcggaucaucaugcgccuguggcucugcuggaagugccgguccaagaacccccugcuguacgacgccaacuacuuccucugcuggcacaccaacugcuacgacuacugcaucccguacaacagcgugacguccagcaucgucaucaccuccggcgacggcaccaccagccccaucuccgagcacgacuaccagaucgggggcuacacggagaagugggagagcggggugaaggacugcgugguccugcacuccuacuucaccagcgacuacuaccagcuguacuccacccagcucagcaccgacacgggcguggagcacgugaccuucuucaucuacaacaagaucgucgacgagcccgaggagcacgugcagauccacaccaucgacggguccagcggcguggucaaccccgugauggagccgaucuacgacgagcccaccacgaccaccagcgugccccugugaggacuaguuauaagacugacuagcccgaugggccucccaacgggcccuccuccccuccuugcaccgagauuaauaaaaaaaaaaaaaaaaaaaaaaaaaaaaaaaaaaaaaaaaaaaaaaaaaaaaaaaaaaaaaaaaugcaucccccccccccccccccccccccccccccccaaaggcucuuuucagagccaccagaauu

SEQ ID NO: 22546 - RNA, 1045 nt, Artificial Sequence
  SARS-CoV-2__MT614460.1__ORF3a protein mRNA gc
aggagaaagcuuaccauggaccuguucaugcgcaucuucaccaucggcaccgugacgcucaagcagggggagaucaaggacgccacccccagcgacuucguccgggccaccgcgaccaucccgauccaggccucccugcccuucggcuggcugaucguggggguggcccucuucgccgucuuccacagcgccuccaagaucaucacgcugaagaagcgcuggcagcuggcgcucagcaagggcgugcacuucgugugcaaccugcugcuccuguucgucaccguguacucccaccuccugcugguggccgccgggcuggaggcccccuuccucuaccuguacgcgcuggucuacuuccuccagagcaucaacuucgugcggaucaucaugcgccuguggcugugcuggaagugccgguccaagaacccccuccuguacgacgccaacuacuuccugugcuggcacaccaacugcuacgacuacugcaucccguacaacagcgugaccuccagcaucgucaucacguccggcgacggcaccaccagccccaucuccgagcacgacuaccagaucgggggcuacaccgagaagugggagagcggggugaaggacugcgugguccuccacuccuacuucacgagcgacuacuaccagcuguacuccacccagcugagcaccgacaccggcguggagcacgugacguucuucaucuacaacaagaucgucgacgagcccgaggagcacgugcagauccacaccaucgacggguccagcggcguggucaaccccgugauggagccgaucuacgacgagcccaccaccacgaccagcgugccccucugaggacuaguuauaagacugacuagcccgaugggccucccaacgggcccuccuccccuccuugcaccgagauuaauaaaaaaaaaaaaaaaaaaaaaaaaaaaaaaaaaaaaaaaaaaaaaaaaaaaaaaaaaaaaaaaaugcaucccccccccccccccccccccccccccccccaaaggcucuuuucagagccaccagaauu

SEQ ID NO: 22547 - RNA, 1045 nt, Artificial Sequence
  SARS-CoV-2__MT614496.1__ORF3a protein mRNA gc
aggagaaagcuuaccauggaccuguucaugcgcaucuucaucaucggcaccgugacccucaagcagggggagaucaaggacgccacgcccagcgacuucguccgggccaccgcgaccaucccgauccaggccucccugcccuucggcuggcugaucguggggguggcccuccuggccgucuuccacagcgccuccaagaucaucacccugaagaagcgcuggcagcucgcgcugagcaagggcgugcacuucgugugcaaccugcuccugcuguucgucacgguguacucccaccuccugcugguggccgccgggcucgaggcccccuuccuguaccuguacgcgcucgucuacuuccugcagagcaucaacuucgugcggaucaucaugcgccuguggcucugcuggaagugccgguccaagaacccccugcuguacgacgccaacuacuuccucugcuggcacaccaacugcuacgacuacugcaucccguacaacagcgugaccuccagcaucgucaucaccuccggcgacggcacgaccagccccaucuccgagcacgacuaccagaucgggggcuacaccgagaagugggagagcggggugaaggacugcgugguccugcacuccuacuucaccagcgacuacuaccagcuguacuccacgcagcucagcaccgacaccggcguggagcacgugaccuucuucaucuacaacaagaucgucgacgagcccgaggagcacgugcagauccacacgaucgacggguccagcggcguggucaaccccgugauggagccgaucuacgacgagcccaccaccaccacgagcgugccccugugaggacuaguuauaagacugacuagcccgaugggccucccaacgggcccuccuccccuccuugcaccgagauuaauaaaaaaaaaaaaaaaaaaaaaaaaaaaaaaaaaaaaaaaaaaaaaaaaaaaaaaaaaaaaaaaaugcaucccccccccccccccccccccccccccccccaaaggcucuuuucagagccaccagaauu

SEQ ID NO: 22548 - RNA, 1045 nt, Artificial Sequence
  SARS-CoV-2__MT620771.1__ORF3a protein mRNA gc
aggagaaagcuuaccauggaccuguucaugcgcaucuucaccaucggcaccgugacgcucaagcagggggagaucaaggacgccacccccagcgacuucguccgggccaccgcgaccaucccgauccaggccucccugcccuucggcuggcugaucguggggguggcccuccuggccgucuuccagagcgccuccaagaucaucacgcugaagaagcgcuggcagcucgcgcugagcaagggcgugcacuucgugugcaaccugcuccugcuguucgucaccguguacucccaccuccugcugguggccgccgggcucgaggcccccuuccuguaccuguacgcgcucgucuacuuccugcagagcgugaacuucgugcggaucaucaugcgccuguggcucugcuggaagugccgguccaagaacccccugcuguacgacgccaacuacuuccucugcuggcacaccaacugcuacgacuacugcaucccguacaacagcgucaccuccagcaucgugaucacguccggcgacggcaccaccagccccaucuccgagcacgacuaccagaucgggggcuacaccgagaagugggagagcggggugaaggacugcgucgugcugcacuccuacuucacgagcgacuacuaccagcuguacuccacccagcucagcaccgacaccggcguggagcacgucacguucuucaucuacaacaagaucguggacgagcccgaggagcacgugcagauccacaccaucgacggguccagcggcgucgugaaccccgugauggagccgaucuacgacgagcccaccaccacgaccagcgucccccugugaggacuaguuauaagacugacuagcccgaugggccucccaacgggcccuccuccccuccuugcaccgagauuaauaaaaaaaaaaaaaaaaaaaaaaaaaaaaaaaaaaaaaaaaaaaaaaaaaaaaaaaaaaaaaaaaugcaucccccccccccccccccccccccccccccccaaaggcucuuuucagagccaccagaauu

SEQ ID NO: 22549 - RNA, 1045 nt, Artificial Sequence
  SARS-CoV-2__MT622319.1__ORF3a protein mRNA gc
aggagaaagcuuaccauggaccuguucaugcgcaucuucaccaucggcaccgugacgcucaagcagggggagaucaaggacgccacccccagcgacuucguccgggccaucgcgaccaucccgauccaggccucccugcccuucggcuggcugaucguggggguggcccuccuggccgucuuccagagcgccuccaagaucaucacccugaagaagcgcuggcagcucgcgcugagcaagggcgugcacuucgugugcaaccugcuccugcuguucgucacgguguacucccaccuccugcugguggccgccgggcucgaggcccccuuccuguaccuguacgcgcucgucuacuuccugcagagcaucaacuucgugcggaucaucaugcgccuguggcucugcuggaagugccgguccaagaacccccugcuguacgacgccaacuacuuccucugcuggcacaccaacugcuacgacuacugcaucccguacaacagcgugaccuccagcaucgucaucaccuccggcgacggcacgaccagccccaucuccgagcacgacuaccagaucgggggcuacaccgagaagugggagagcggggugaaggacugcgugguccugcacuccuacuucaccagcgacuacuaccagcuguacuccacgcagcucagcaccgacaccggcguggagcacgugaccuucuucaucuacaacaagaucgucgacgagcccgaggagcacgugcagauccacacgaucgacggguccagcggcguggucaaccccgugauggagccgaucuacgacgagcccaccaccaccacgagcgugccccugugaggacuaguuauaagacugacuagcccgaugggccucccaacgggcccuccuccccuccuugcaccgagauuaauaaaaaaaaaaaaaaaaaaaaaaaaaaaaaaaaaaaaaaaaaaaaaaaaaaaaaaaaaaaaaaaaugcaucccccccccccccccccccccccccccccccaaaggcucuuuucagagccaccagaauu

SEQ ID NO: 22550 - RNA, 1045 nt, Artificial Sequence
  SARS-CoV-2__MT601290.1__ORF3a protein mRNA gc
aggagaaagcuuaccauggaccuguucaugcgcaucuucaccaucggcaccgugacgcucaagcagggggagaucaaggacgccacccccagcgacuucguccgggccaccgcgaccaucccgauccaggccucccugcccuucggcuggcugaucguggggguggcccuccuggccgucuuccagagcgccuccaagaucaucacgcugaagaagcgccuccagcuggcgcugagcaagggcgugcacuucgugugcaaccuccugcugcuguucgucaccguguacucccaccuccugcucguggccgccgggcuggaggcccccuuccuguaccucuacgcgcuggucuacuuccugcagagcaucaacuucgugcggaucaucaugcgccucuggcugugcuggaagugccgguccaagaacccccugcucuacgacgccaacuacuuccugugcuggcacaccaacugcuacgacuacugcaucccguacaacagcgugaccuccagcaucgucaucacguccggcgacggcaccaccagccccaucuccgagcacgacuaccagaucgggggcuacaccgagaagugggagagcggggugaaggacugcgugguccugcacuccuacuucacgagcgacuacuaccagcucuacuccacccagcugagcaccgacaccggcguggagcacgugacguucuucaucuacaacaagaucgucgacgagcccgaggagcacgugcagauccacaccaucgacggguccagcggcguggucaaccccgugauggagccgaucuacgacgagcccaccaccacgaccagcgugccccugugaggacuaguuauaagacugacuagcccgaugggccucccaacgggcccuccuccccuccuugcaccgagauuaauaaaaaaaaaaaaaaaaaaaaaaaaaaaaaaaaaaaaaaaaaaaaaaaaaaaaaaaaaaaaaaaaugcaucccccccccccccccccccccccccccccccaaaggcucuuuucagagccaccagaauu

SEQ ID NO: 22551 - RNA, 1045 nt, Artificial Sequence
  SARS-CoV-2__MT584997.1__ORF3a protein mRNA gc
aggagaaagcuuaccauggaccuguucaugcgcaucuucaccaucggcaccgugacgcucaagcagggggagaucaaggacgccaccagcuccgacuucguccgggccaccgcgaccauccccauccaggccagccugccguucggcuggcugaucguggggguggcccuccuggccgucuuccaguccgccagcaagaucaucacgcugaagaagcgcuggcagcucgcgcuguccaagggcgugcacuucgugugcaaccugcuccugcuguucgucaccguguacagccaccuccugcugguggccgccgggcucgaggcccccuuccuguaccuguacgcgcucgucuacuuccugcaguccaucaacuucgugcggaucaucaugcgccuguggcucugcuggaagugccggagcaagaacccccugcuguacgacgccaacuacuuccucugcuggcacaccaacugcuacgacuacugcauccccuacaacuccgugaccagcuccaucgucaucacgagcggcgacggcaucaccuccccgaucagcgagcacgacuaccagaucgggggcuacaccgagaagugggaguccggggugaaggacugcgugguccugcacagcuacuucaccuccgacuacuaccagcuguacagcacgcagcucuccaccgacaccggcguggagcacgugaccuucuucaucuacaacaagaucgucgacgagcccgaggagcacgugcagauccacacgaucgacgggagcagcggcguggucaaccccgugauggagcccaucuacgacgagccgaccaccaccacguccgugccccugugaggacuaguuauaagacugacuagcccgaugggccucccaacgggcccuccuccccuccuugcaccgagauuaauaaaaaaaaaaaaaaaaaaaaaaaaaaaaaaaaaaaaaaaaaaaaaaaaaaaaaaaaaaaaaaaaugcaucccccccccccccccccccccccccccccccaaaggcucuuuucagagccaccagaauu

SEQ ID NO: 22552 - RNA, 1045 nt, Artificial Sequence
  SARS-CoV-2__MT585093.1__ORF3a protein mRNA gc
aggagaaagcuuaccauggaccuguucaugcgcaucuucaccaucggcaccgugacgcucaagcagggggagaucaaggacgccacccccagcgacuucguccgggccaccgcgaccaucccgauccaggccucccugcccuucggcuggcugaucguggggguggcccuccuggccgucuuccacagcgccuccaagaucaucacgcugaagaagcgcugccagcucgcgcugagcaagggcgugcacuucgugugcaaccugcuccugcuguucgucaccguguacucccaccuccugcugguggccgccgggcucgaggcccccuuccuguaccuguacgcgcucgucuacuuccugcagagcaucaacuucgugcggaucaucaugcgccuguggcucugcuggaagugccgguccaagaacccccugcuguacgacgccaacuacuuccucugcuggcacaccaacugcuacgacuacugcaucccguacaacagcgugaccuccagcaucgucaucacguccggcgacggcaccaccagccccaucuccgagcacgacuaccagaucgggggcuacaccgagaagugggagagcggggugaaggacugcgugguccugcacuccuacuucacgagcgacuacuaccagcuguacuccacccagcucagcaccgacaccggcguggagcacgugacguucuucaucuacaacaagaucgucgacgagcccgaggagcacgugcagauccacaccaucgacggguccagcggcguggucaaccccgugauggagccgaucuacgacgagcccaccaccacgaccagcgugccccugugaggacuaguuauaagacugacuagcccgaugggccucccaacgggcccuccuccccuccuugcaccgagauuaauaaaaaaaaaaaaaaaaaaaaaaaaaaaaaaaaaaaaaaaaaaaaaaaaaaaaaaaaaaaaaaaaugcaucccccccccccccccccccccccccccccccaaaggcucuuuucagagccaccagaauu

SEQ ID NO: 22553 - RNA, 1045 nt, Artificial Sequence
  SARS-CoV-2__MT585094.1__ORF3a protein mRNA gc
aggagaaagcuuaccauggaccuguucaugcgcaucuucaccaucggcaccgugacgcucaagcagggggagaucaaggacgccacccccagcgacuucguccgggccaccgcgaccaucccgauccaggccucccugcccuucggcuggcugaucguggggguggcccuccuggccgucuuccacagcguguccaagaucaucacgcugaagaagcgcuggcagcucgcccugagcaagggcgugcacuucgucugcaaccugcuccugcuguucgugaccguguacucccaccuccugcuggucgcggccgggcucgaggcccccuuccuguaccuguacgcccucguguacuuccugcagagcaucaacuucgugcggaucaucaugcgccuguggcucugcuggaagugccgguccaagaacccccugcuguacgacgcgaacuacuuccucugcuggcacaccaacugcuacgacuacugcaucccguacaacagcgucaccuccagcaucgugaucacguccggcgacggcaccaccagccccaucuccgagcacgacuaccagaucgggggcuacaccgagaagugggagagcggggugaaggacugcgucgugcugcacuccuacuucacgagcgacuacuaccagcuguacuccacccagcucagcaccgacaccggcguggagcacgucacguucuucaucuacaacaagaucguggacgagcccgaggagcacgugcagauccacaccaucgacggguccagcggcgucgugaaccccgugauggagccgaucuacgacgagcccaccaccacgaccagcgucccccugugaggacuaguuauaagacugacuagcccgaugggccucccaacgggcccuccuccccuccuugcaccgagauuaauaaaaaaaaaaaaaaaaaaaaaaaaaaaaaaaaaaaaaaaaaaaaaaaaaaaaaaaaaaaaaaaaugcaucccccccccccccccccccccccccccccccaaaggcucuuuucagagccaccagaauu

SEQ ID NO: 22554 - RNA, 1045 nt, Artificial Sequence
  SARS-CoV-2__MT578015.1__ORF3a protein mRNA gc
aggagaaagcuuaccauggaccuguucaugcgcaucuucaccaucggcaccgugacgcucaagcagggggagaucaaggacgccacccccagcgacuucguccgggccaccgcgaccaucccgauccaggccucccugcccuucggcuggcugaucguggggguggcccuccuggccgucuuccagagcgccuccaagaucaucacgcugaagaagcgcuggcagcucgcgcugagcaagggcgugcacuucgugugcaaccugcuccugcuguucgucaccguguacucccaccuccugcugguggccgccgggcucgaggcccccuuccuguaccuguacgcgcucgucuacuuccugcagagcaucaacuucgugcggaucaucaugcgccuguggcucugcuggaagugccgguccaagaacccccugcuguacgacgccaacuacuuccucugcuggcacaccaacugcuacgacuacugcaucccguacaacagcgugaccuccagcaucgucaucacguccggcgacggcaccaccagccccaucuccgagcacgacuaccagaucgggggcuacaccgagaagugggagagcgggcugaaggacugcguggugcugcacuccuacuucacgagcgacuacuaccagcucuacuccacccagcugagcaccgacaccggcgucgagcacgugacguucuucaucuacaacaagaucguggacgagcccgaggagcacguccagauccacaccaucgacggguccagcggcguggugaaccccgucauggagccgaucuacgacgagcccaccaccacgaccagcgugccccugugaggacuaguuauaagacugacuagcccgaugggccucccaacgggcccuccuccccuccuugcaccgagauuaauaaaaaaaaaaaaaaaaaaaaaaaaaaaaaaaaaaaaaaaaaaaaaaaaaaaaaaaaaaaaaaaaugcaucccccccccccccccccccccccccccccccaaaggcucuuuucagagccaccagaauu

SEQ ID NO: 22555 - RNA, 1045 nt, Artificial Sequence
  SARS-CoV-2__MT520329.1__ORF3a protein mRNA gc
aggagaaagcuuaccauggaccuguucaugcgcaucuucaccaucggcaccgugacgcucaagcagggggagaucaaggacgccacccccagcgacuucguccgggccaccgcgaccaucccgauccaggccucccugcccuucggcuggcugaucguggggguggcccuccuggccgucuuccacagcgccuccaagaucaucacgcugaagaagcgcuggcagcucgcgcugagcaagggcgugcacuucgugugcaaccugcuccugcuguucgucaccguguacucccaccuccugcugguggccgccgggcucgaggcccccuuccuguacuucuacgcgcuggucuacuuccuccagagcaucaacuucgugcggaucaucaugcgccuguggcugugcuggaagugccgguccaagaacccccuccuguacgacgccaacuacuuccugugcuggcacaccaacugcuacgacuacugcaucccguacaacagcgugaccuccagcaucgucaucacguccggcgacggcaccaccagccccaucuccgagcacgacuaccagaucgggggcuacaccgagaagugggagagcggggugaaggacugcgugguccuccacuccuacuucacgagcgacuacuaccagcuguacuccacccagcugagcaccgacaccggcguggagcacgugacguucuucaucuacaacaagaucgucgacgagcccgaggagcacgugcagauccacaccaucgacggguccagcggcguggucaaccccgugauggagccgaucuacgacgagcccaccaccacgaccagcgugccccucugaggacuaguuauaagacugacuagcccgaugggccucccaacgggcccuccuccccuccuugcaccgagauuaauaaaaaaaaaaaaaaaaaaaaaaaaaaaaaaaaaaaaaaaaaaaaaaaaaaaaaaaaaaaaaaaaugcaucccccccccccccccccccccccccccccccaaaggcucuuuucagagccaccagaauu

SEQ ID NO: 22556 - RNA, 1045 nt, Artificial Sequence
  SARS-CoV-2__MT520484.1__ORF3a protein mRNA gc
aggagaaagcuuaccauggaccuguucaugcgcaucuucaccaucggcaccgugacgcucaagcagggggagaucaaggacgccacccccagcgacuucguccgggccaccgcgaccaucccgauccaggccucccugcccuucggcuggcugaucguggggguggcccuccuggccgucuuccacagcgccuccaagaucaucacgcugaagaagcgcuggcagcucgcgcugagcaagggcgugcacuucgugugcaaccugcuccugcuguucgucaccguguacucccaccuccugcugguggccgccgggcucgaggcccccuuccuguaccuguacgcgcucgucuacuuccugcagagcaucaacuucgugcggaucaucaugcgccuguggcucugcuggaagugcugcuccaagaacccccugcuguacgacgccaacuacuuccucugcuggcacaccaacugcuacgacuacugcaucccguacaacagcgugaccuccagcaucgucaucacguccggcgacggcaccaccagccccaucuccgagcacgacuaccagaucgggggcuacaccgagaagugggagagcggggugaaggacugcgugguccugcacuccuacuucacgagcgacuacuaccagcuguacuccacccagcucagcaccgacaccggcguggagcacgugacguucuucaucuacaacaagaucgucgacgagcccgaggagcacgugcagauccacaccaucgacggguccagcggcguggucaaccccgugauggagccgaucuacgacgagcccaccaccacgaccagcgugccccugugaggacuaguuauaagacugacuagcccgaugggccucccaacgggcccuccuccccuccuugcaccgagauuaauaaaaaaaaaaaaaaaaaaaaaaaaaaaaaaaaaaaaaaaaaaaaaaaaaaaaaaaaaaaaaaaaugcaucccccccccccccccccccccccccccccccaaaggcucuuuucagagccaccagaauu

SEQ ID NO: 22557 - RNA, 1045 nt, Artificial Sequence
  SARS-CoV-2__MT520492.1__ORF3a protein mRNA gc
aggagaaagcuuaccauggaccuguucaugcgcaucuucaccaucggcaccgugacgcucaagcagggggagaucaaggacgccacccccagcgacuucguccgggccaccgcgaccaucccgauccaggccucccugcccuucggcuggcugaucguggggguggcccuccuggccgucuuccacagcgccuccaagaucaucacgcugaagaagcgcuggcagcucgcgcugagcaagggcgugcacuucgugugcaaccugcuccugcuguucgucaccguguacucccaccuccugcugguggccgccgggcucgaggcccccuuccuguaccuguacgcgcucgucuacuuccugcagagcaucaacuucgugcggaucaucaugcgccuguggcucugcuggaagugccgguccaagaacccccugcuguacgacgccaacuacuuccucugcuggcacaccaacugcuacgacuacugcaucccguacaacagcgugaccuccagcaucgucaucacguccggcgacggcaccaccagccccaucuccgagcacgacuaccagaucgggggcuacaccgagaagugggagagcggggugaaggacugcgugguccugcacuccuacuucacgagcgacuacuaccagcuguacuccacccagcucagcaccgacaccggcguggagcacgugacguucuucaucuacaacaagaucgucaacgagcccgaggagcacgugcagauccacaccaucgacggguccagcggcguggucaaccccgugauggagccgaucuacgacgagcccaccaccacgaccagcgugccccugugaggacuaguuauaagacugacuagcccgaugggccucccaacgggcccuccuccccuccuugcaccgagauuaauaaaaaaaaaaaaaaaaaaaaaaaaaaaaaaaaaaaaaaaaaaaaaaaaaaaaaaaaaaaaaaaaugcaucccccccccccccccccccccccccccccccaaaggcucuuuucagagccaccagaauu

SEQ ID NO: 22558 - RNA, 1045 nt, Artificial Sequence
  SARS-CoV-2__MT520523.1__ORF3a protein mRNA gc
aggagaaagcuuaccauggaccuguucaugcgcaucuucaccaucggcaccgugacgcucaagcagggggagaucaaggacgccacccccagcgacuucguccgggccaccgcgaccaucccgauccaggccucccugcccuucggcuggcugaucguggggguggcccuccuggccgucuuccagagcgccuccaagaucaucacgcugaagaagcgcuggcagcucgcgcugagcaagggcgugcacuucgugugcaaccugcuccugcuguucgucaccguguacucccaccuccugcugguggccgccgggcucgaggcccccuuccuguaccuguacgcgcucgucuacuuccugcagagcaucaacuucgugcggaucaucaugcgccuguggcucugcuggaagugccgguccaagaacccccugcuguacgacgccaacuacuuccucugcuggcacaccaacugcuacgacuacugcaucccguacaacagcgugaccuccagcaucgucaucacguccggcgacggcaccaccagccccaucuccgagcacgacuaccagaucgggggcuacaccgagaagugggagagccgcgugaaggacugcgugguccugcacuccuacuucacgagcgacuacuaccagcuguacuccacccagcucagcaccgacaccgggguggagcacgugacguucuucaucuacaacaagaucgucgacgagcccgaggagcacgugcagauccacaccaucgacggcuccagcgggguggucaaccccgugauggagccgaucuacgacgagcccaccaccacgaccagcgugccccugugaggacuaguuauaagacugacuagcccgaugggccucccaacgggcccuccuccccuccuugcaccgagauuaauaaaaaaaaaaaaaaaaaaaaaaaaaaaaaaaaaaaaaaaaaaaaaaaaaaaaaaaaaaaaaaaaugcaucccccccccccccccccccccccccccccccaaaggcucuuuucagagccaccagaauu

SEQ ID NO: 22559 - RNA, 1045 nt, Artificial Sequence
  SARS-CoV-2__MT520543.1__ORF3a protein mRNA gc
aggagaaagcuuaccauggaccuguucaugcgcaucuucaccaucggcaccgugacgcucaagcagggggagaucaaggacgccacccccagcgacuucguccgggccaccgcgaccaucccgauccaggccucccugcccuucggcuggcugaucguggggguggcccuccuggccgucuuccacagcgccuccaagaucaucacgcugaagaagcgcuggcagcucgcgcugagcaagggcgugcacuucgugugcaaccugcuccugcuguucgucaccguguacucccaccuccugcugguggccgccgggcucgaggcccccuuccuguaccuguacgcgcucgucuacuuccugcagagcaucaacuucgugcggaucaucaugcgccuguggcucugcuggaagugccgguccaagaacccccugcuguacgacgccaacuacuuccucugcuggcacaccaacugcuacgacuacugcaucccguacaacagcgugaccuccagcaucgucaucacguccggcgacggcaccaccagccccaucuccgagcacgacuaccagaucgggggcuacaccgagaagugggagagcggggugaaggacugcgugguccugcacuccuacuucacgagcgacuacuaccagcugcacuccacccagcucagcaccgacaccggcguggagcacgugacguucuucaucuacaacaagaucgucgacgagcccgaggagcacgugcagauccacaccaucgacggguccagcggcguggucaaccccgugauggagccgaucuacgacgagcccaccaccacgaccagcgugccccugugaggacuaguuauaagacugacuagcccgaugggccucccaacgggcccuccuccccuccuugcaccgagauuaauaaaaaaaaaaaaaaaaaaaaaaaaaaaaaaaaaaaaaaaaaaaaaaaaaaaaaaaaaaaaaaaaugcaucccccccccccccccccccccccccccccccaaaggcucuuuucagagccaccagaauu

SEQ ID NO: 22560 - RNA, 1045 nt, Artificial Sequence
  SARS-CoV-2__MT557568.1__ORF3a protein mRNA gc
aggagaaagcuuaccauggaccuguucaugcgcaucuucaccaucggcaccgugacgcucaagcagggggagaucaaggacgccacccccagcgacuucguccgggccaccgcgaccaucccgauccaggccucccugcccuucggcuggcugaucguggggguggcccuccuggccgucugccagagcgccuccaagaucaucacgcugaagaagcgcuggcagcucgcgcugagcaagggcgugcacuucgugugcaaccugcuccugcuguucgucaccguguacucccaccuccugcugguggccgccgggcucgaggcccccuuccuguaccuguacgcgcucgucuacuuccugcagagcaucaacuucgugcggaucaucaugcgccuguggcucugcuggaagugccgguccaagaacccccugcuguacgacgccaacuacuuccucugcuggcacaccaacugcuacgacuacugcaucccguacaacagcgugaccuccagcaucgucaucacguccggcgacggcaccaccagccccaucuccgagcacgacuaccagaucgggggcuacaccgagaagugggagagcggggugaaggacugcgugguccugcacuccuacuucacgagcgacuacuaccagcuguacuccacccagcucagcaccgacaccggcguggagcacgugacguucuucaucuacaacaagaucgucgacgagcccgaggagcacgugcagauccacaccaucgacggguccagcggcguggucaaccccgugauggagccgaucuacgacgagcccaccaccacgaccagcgugccccugugaggacuaguuauaagacugacuagcccgaugggccucccaacgggcccuccuccccuccuugcaccgagauuaauaaaaaaaaaaaaaaaaaaaaaaaaaaaaaaaaaaaaaaaaaaaaaaaaaaaaaaaaaaaaaaaaugcaucccccccccccccccccccccccccccccccaaaggcucuuuucagagccaccagaauu

SEQ ID NO: 22561 - RNA, 1045 nt, Artificial Sequence
  SARS-CoV-2__MT558689.1__ORF3a protein mRNA gc
aggagaaagcuuaccauggaccuguucaugcgcaucuucaccaucggcaccgugacgcucaagcagggggagaucaaggacgccacccccagccacuucguccgggccaccgcgaccaucccgauccaggccucccugcccuucggcuggcugaucguggggguggcccuccuggccgucuuccagagcgccuccaagaucaucacgcugaagaagcgcuggcagcucgcgcugagcaagggcgugcacuucgugugcaaccugcuccugcuguucgucaccguguacucccaccuccugcugguggccgccgggcucgaggcccccuuccuguaccuguacgcgcucgucuacuuccugcagagcaucaacuucgugcggaucaucaugcgccuguggcucugcuggaagugccgguccaagaacccccugcuguacgacgccaacuacuuccucugcuggcacaccaacugcuacgacuacugcaucccguacaacagcgugaccuccagcaucgucaucacguccggcgacggcaccaccagccccaucuccgagcacgacuaccagaucgggggcuacaccgagaagugggagagcggggugaaggacugcgugguccugcacuccuacuucacgagcgacuacuaccagcuguacuccacccagcucagcaccgacaccggcguggagcacgugacguucuucaucuacaacaagaucgucgacgagcccgaggagcacgugcagauccacaccaucgacggguccagcggcguggucaaccccgugauggagccgaucuacgacgagcccaccaccacgaccagcgugccccugugaggacuaguuauaagacugacuagcccgaugggccucccaacgggcccuccuccccuccuugcaccgagauuaauaaaaaaaaaaaaaaaaaaaaaaaaaaaaaaaaaaaaaaaaaaaaaaaaaaaaaaaaaaaaaaaaugcaucccccccccccccccccccccccccccccccaaaggcucuuuucagagccaccagaauu

SEQ ID NO: 22562 - RNA, 1045 nt, Artificial Sequence
  SARS-CoV-2__MT558698.1__ORF3a protein mRNA gc
aggagaaagcuuaccauggaccuguucaugcgcaucuucaccaucggcaccgugacgcucaagcagggggagaucaaggacgccacccccagcgacuucguccgggccaccgcgaccaucccgauccccgccucccugcccuucggcuggcugaucguggggguggcccuccuggccgucuuccagagcgccuccaagaucaucacgcugaagaagcgcuggcagcucgcgcugagcaagggcgugcacuucgugugcaaccugcuccugcuguucgucaccguguacucccaccuccugcugguggccgccgggcucgaggcccccuuccuguaccuguacgcgcucgucuacuuccugcagagcaucaacuucgugcggaucaucaugcgccuguggcucugcuccaagugccggagcaagaacccgcugcuguacgacgccaacuacuuccucugcuggcacaccaacugcuacgacuacugcauccccuacaacuccgugaccagcuccaucgucaucacgagcggcgacggcaccaccucccccaucagcgagcacgacuaccagaucgggggcuacaccgagaagugggaguccggggugaaggacugcgugguccugcacagcuacuucacguccgacuacuaccagcuguacagcacccagcucuccaccgacaccggcguggagcacgugacguucuucaucuacaacaagaucgucgacgagcccgaggagcacgugcagauccacaccaucgacgggagcagcggcguggucaacccggugauggagcccaucuacgacgagcccaccaccacgaccuccgugccccugugaggacuaguuauaagacugacuagcccgaugggccucccaacgggcccuccuccccuccuugcaccgagauuaauaaaaaaaaaaaaaaaaaaaaaaaaaaaaaaaaaaaaaaaaaaaaaaaaaaaaaaaaaaaaaaaaugcaucccccccccccccccccccccccccccccccaaaggcucuuuucagagccaccagaauu

SEQ ID NO: 22563 - RNA, 1045 nt, Artificial Sequence
  SARS-CoV-2__MT559801.1__ORF3a protein mRNA gc
aggagaaagcuuaccauggaccuguucaugcgcaucuucaccaucggcaccgugacgcucaagcagggggagaucaaggacgccacccccagcgacuucguccgggccaccgcgaccaucccgauccaggccucccugcccuucggcuggcugaucguggggguggcccuccuggccgucuuccacagcgccuccaagaucaucacgcugaagaagcgcuggcagcucgcgcugagcaagggcgugcacuucgugugcaaccugcuccugcuguucgucaccguguacucccaccuccugcugguggccgccgggcucgaggcccccuuccuguaccuguacgcgcucgucuacuuccugcagagcaucaacuucgugcggaucaucaugcgccuguggcucugcuggaagugccgguccaagaacccccugcuguacgacgccaacuacuuccucugcuggcacaccaacugcuacgacuacugcaucccguacaacagcgugaccuccagcaucgucaucacguccggcgacggcaccaccagccccaucuccgagcacgacuaccagaucgggggcuacaccgagaagugggagagcggggugaaggacugcgugguccugcacuccuacuucacgagcgacuacuaccagcuguacuccacccagcucagcaccgacaccggcguggagcacgugacguucuucaucuacaacaagaucgucgacgagcccgaggagcacgugcugauccacaccaucgacggguccagcggcguggucaaccccgugauggagccgaucuacgacgagcccaccaccacgaccagcgugccccugugaggacuaguuauaagacugacuagcccgaugggccucccaacgggcccuccuccccuccuugcaccgagauuaauaaaaaaaaaaaaaaaaaaaaaaaaaaaaaaaaaaaaaaaaaaaaaaaaaaaaaaaaaaaaaaaaugcaucccccccccccccccccccccccccccccccaaaggcucuuuucagagccaccagaauu

SEQ ID NO: 22564 - RNA, 1045 nt, Artificial Sequence
  SARS-CoV-2__MT528627.1__ORF3a protein mRNA gc
aggagaaagcuuaccauggaccuguucaugcgcaucuucaccaucggcaccgugacgcucaagcagggggagaucaaggacgccacccccagcgacuucguccgggccaccgcgaccaucccgauccaggccucccugcccuucggcuggcugaucguggggguggcccuccuggccgucuuccagagcgccuccaagaucaucacgcugaagaagcgcuggcagcucgcgcugagcaagggcgugcacuucgugugcaaccugcuccugcuguucgucaccguguacucccacccccuccuggccgccgccgggcuggaggcgcccuuccucuaccuguacgcccugguguacuuccuccagagcaucaaccugguccggaucaucaugcgccuguggcucugcuggaagugccgguccaagaacccgcugcuguacgacgccaacuacuuccucugcuggcacaccaacugcuacgacuacugcauccccuacaacagcgugaccuccagcaucgugaucacguccggcgacggcaccaccagccccaucuccgagcacgacuaccagaucgggggcuacaccgagaagugggagagcggggucaaggacugcguggugcugcacuccuacuucacgagcgacuacuaccagcuguacuccacccagcucagcaccgacaccggcgucgagcacgugacguucuucaucuacaacaagaucguggacgagcccgaggagcacguccagauccacaccaucgacggguccagcggcguggugaacccggucauggagcccaucuacgacgagcccaccaccacgaccagcgugccccugugaggacuaguuauaagacugacuagcccgaugggccucccaacgggcccuccuccccuccuugcaccgagauuaauaaaaaaaaaaaaaaaaaaaaaaaaaaaaaaaaaaaaaaaaaaaaaaaaaaaaaaaaaaaaaaaaugcaucccccccccccccccccccccccccccccccaaaggcucuuuucagagccaccagaauu

SEQ ID NO: 22565 - RNA, 1045 nt, Artificial Sequence
  SARS-CoV-2__MT533223.1__ORF3a protein mRNA gc
aggagaaagcuuaccauggaccuguucaugcgcaucuucaccaucggcaccgugacgcucaagcagggggagaucaaggacgccacccccagcgacuucguccgggccaccgcgaccaucccgauccaggccucccugcccuucggcuggcugaucguggggguggcccuccuggccgucuuccagagcgccuccaagaucaucacgcugaagaagcgcuggcagcucgcgcugagcaagggcgugcacuucgugugcaaccugcuccugcuguucgucaccguguacucccaccuccugcugguggccgccgggcucgaggcccccuuccuguaccuguacgcgcucgucuacuuccugcagagcaucaacuucgugcggaucaucaugcgccugcuccugugcuggaagugccgguccaagaacccccugcucuacgacgccaacuacuuccugugcuggcacaccaacugcuacgacuacugcaucccguacaacagcgugaccuccagcaucgucaucacguccggcgacggcaccaccagccccaucuccgagcacgacuaccagaucgggggcuacaccgagaagugggagagcggggugaaggacugcgugguccugcacuccuacuucacgagcgacuacuaccagcucuacuccacccagcugagcaccgacaccggcguggagcacgugacguucuucaucuacaacaagaucgucgacgagcccgaggagcacgugcagauccacaccaucgacggguccagcggcguggucaaccccgugauggagccgaucuacgacgagcccaccaccacgaccagcgugccccugugaggacuaguuauaagacugacuagcccgaugggccucccaacgggcccuccuccccuccuugcaccgagauuaauaaaaaaaaaaaaaaaaaaaaaaaaaaaaaaaaaaaaaaaaaaaaaaaaaaaaaaaaaaaaaaaaugcaucccccccccccccccccccccccccccccccaaaggcucuuuucagagccaccagaauu

SEQ ID NO: 22566 - RNA, 1045 nt, Artificial Sequence
  SARS-CoV-2__MT533225.1__ORF3a protein mRNA gc
aggagaaagcuuaccauggaccuguucaugcgcaucuucaccaucggcaccgugacgcucaagcagggggagaucaaggacgccacccccagcgacuucguccgggccaccgcgaccaucccgauccaggccucccugcccuucggcuggcugaucguggggguggccauccucgccgucuuccacagcgccuccaagaucaucacgcugaagaagcgcuggcagcuggcgcucagcaagggcgugcacuucgugugcaaccugcugcuccuguucgucaccguguacucccaccuccugcugguggccgccgggcuggaggcccccuuccucuaccuguacgcgcuggucuacuuccuccagagcaucaacuucgugcggaucaucaugcgccuguggcugugcuggaagugccgguccaagaacccccuccuguacgacgccaacuacuuccugugcuggcacaccaacugcuacgacuacugcaucccguacaacagcgugaccuccagcaucgucaucacguccggcgacggcaccaccagccccaucuccgagcacgacuaccagaucgggggcuacaccgagaagugggagagcggggugaaggacugcgugguccuccacuccuacuucacgagcgacuacuaccagcuguacuccacccagcugagcaccgacaccggcguggagcacgugacguucuucaucuacaacaagaucgucgacgagcccgaggagcacgugcagauccacaccaucgacggguccagcggcguggucaaccccgugauggagccgaucuacgacgagcccaccaccacgaccagcgugccccucugaggacuaguuauaagacugacuagcccgaugggccucccaacgggcccuccuccccuccuugcaccgagauuaauaaaaaaaaaaaaaaaaaaaaaaaaaaaaaaaaaaaaaaaaaaaaaaaaaaaaaaaaaaaaaaaaugcaucccccccccccccccccccccccccccccccaaaggcucuuuucagagccaccagaauu

SEQ ID NO: 22567 - RNA, 1045 nt, Artificial Sequence
  SARS-CoV-2__MT517425.1__ORF3a protein mRNA gc
aggagaaagcuuaccauggaccuguucaugcgcaucuucaccaucggcaccgugacgcucaagcagggggagaucaaggacgccacccccagcgacuucguccgggccaccgcgaccaucccgauccaggccucccugcccuucggcuggcugaucguggggguggcccuccuggccgucuuccagagcgccuccaagaucaucacgcugaagaagcgcuggcagcucgcgcugagcaagggcgugcacuucgugugcaaccugcuccugcuguucgucaccguguacucccaccuccugcugguggccgccgggcucgaggcccccuuccuguaccuguacgcgcucgucuacuuccugcagagcaucaacuucgugcggaucaucaugcgccuguggcucugcuggaagugccgguccaagaacccccugcuguacgacgccaacuacuuccucugcuggcacaccaacugcuacgacuacugcaucccguacaacagcgugaccuccagcaucgucaucacguccggcgacggcaccaccagccccaucuccgagcacgacuaccagaucgggggcuacaccgagaagugcgagagcggggugaaggacugcgugguccugcacuccuacuucacgagcgacuacuaccagcuguacuccacccagcucagcaccgacaccggcguggagcacgugacguucuucaucuacaacaagaucgucgacgagcccgaggagcacgugcagauccacaccaucgacggguccagcggcguggucaaccccgugauggagccgaucuacgacgagcccaccaccacgaccagcgugccccugugaggacuaguuauaagacugacuagcccgaugggccucccaacgggcccuccuccccuccuugcaccgagauuaauaaaaaaaaaaaaaaaaaaaaaaaaaaaaaaaaaaaaaaaaaaaaaaaaaaaaaaaaaaaaaaaaugcaucccccccccccccccccccccccccccccccaaaggcucuuuucagagccaccagaauu

SEQ ID NO: 22568 - RNA, 1045 nt, Artificial Sequence
  SARS-CoV-2__MT512443.1__ORF3a protein mRNA gc
aggagaaagcuuaccauggaccuguucaugcgcaucuucaccaucggcaccgugacgcucaagcagggggagaucaaggacgccacccccagcgacuucguccgggccaccgcgaccaucccgauccaggccucccugcccuucggcuggcugaucguggggguggcccuccuggccgucuuccagagcgccuccaagaucaucacgcugaagaagcgcuggcagcucgcgcugagcaagggcgugcacuucgugugcaaccugcuccugcuguucgucaccguguacucccaccuccugcugguggccgccgggcucgaggcccccuuccuguaccuguacgcgcucgucuacuuccugcagagcaucaacuucgugcggaucaucaugcgccuguggcucugcuggaagugccgguccaagaacccccugcuguacgacgccaacuacuuccucugcuggcacaccaacugcuacgacuacugcaucccguacaacagcgugaccuccagcaucgucaucacguccggcgacggcaccaccagccccaucuccgagcacgacuaccagaucgggggcuacaccgagaagugggagagcggggugaaggacugcgugguccugcacuccuacuucacgagcgacuacuaccagcuguacuccacccagcucagcaccgacaccggcguggagcacgugacguucuucaucuacaacaagaucgucgacgagcccgaggagcacgugcagauccacaccaucgacggguccagcggcguggucaaccccgugauggagccgaucuacgacgagcccaccaccacgaucagcgugccccugugaggacuaguuauaagacugacuagcccgaugggccucccaacgggcccuccuccccuccuugcaccgagauuaauaaaaaaaaaaaaaaaaaaaaaaaaaaaaaaaaaaaaaaaaaaaaaaaaaaaaaaaaaaaaaaaaugcaucccccccccccccccccccccccccccccccaaaggcucuuuucagagccaccagaauu

SEQ ID NO: 22569 - RNA, 1045 nt, Artificial Sequence
  SARS-CoV-2__MT509471.1__ORF3a protein mRNA gc
aggagaaagcuuaccauggaccuguucaugcgcaucuucaccaucggcaccgugacgcucaagcagggggagaucaaggacgccacccccagcgacuucguccgggccaccgcgaccaucccgauccaggccucccugcccuucggcuggcugaucguggggguggcccuccuggccgucuuccacagcgccuccaagaucaucacgcugaagaagcgcuggcagcucgcgcugagcaagggcgugcacuucgugugcaaccugcuccugcuguucgucaccguguacucccaccuccugcugguggccgccgggcucgaggcccccuuccuguaccuguacgcccucuucuacuuccugcagagcaucaacuucguccggaucaucaugcgccuguggcucugcuggaagugccgguccaagaacccccugcuguacgacgcgaacuacuuccucugcuggcacaccaacugcuacgacuacugcaucccguacaacagcgugaccuccagcaucgugaucacguccggcgacggcaccaccagccccaucuccgagcacgacuaccagaucgggggcuacaccgagaagugggagagcggggucaaggacugcguggugcugcacuccuacuucacgagcgacuacuaccagcuguacuccacccagcucagcaccgacaccggcgucgagcacgugacguucuucaucuacaacaagaucguggacgagcccgaggagcacguccagauccacaccaucgacggguccagcggcguggugaaccccgucauggagccgaucuacgacgagcccaccaccacgaccagcgugccccugugaggacuaguuauaagacugacuagcccgaugggccucccaacgggcccuccuccccuccuugcaccgagauuaauaaaaaaaaaaaaaaaaaaaaaaaaaaaaaaaaaaaaaaaaaaaaaaaaaaaaaaaaaaaaaaaaugcaucccccccccccccccccccccccccccccccaaaggcucuuuucagagccaccagaauu

SEQ ID NO: 22570 - RNA, 1045 nt, Artificial Sequence
  SARS-CoV-2__MT509503.1__ORF3a protein mRNA gc
aggagaaagcuuaccauggaccuguucaugcgcaucuucaccaucggcaccgugacgcucaagcagggggagaucaaggacgccacccccagcgacuucguccgggccaccgcgaccacgccgauccaggccucccugcccuucggcuggcugaucguggggguggcccucuucgccgucuuccagagcgccuccaagaucaucacccugaagaagcgcuggcagcuggcgcucagcaagggcgugcacuucgugugcaaccugcugcuccuguucgucaccguguacucccaccuccugcugguggccgccgggcuggaggcccccuuccucuaccuguacgcgcuggucuacuuccuccagagcaucaacuucgugcggaucaucaugcgccuguggcugugcuggaagugccgguccaagaacccccuccuguacgacgccaacuacuuccugugcuggcacaccaacugcuacgacuacugcaucccguacaacagcgugacguccagcaucgucaucaccuccggcgacggcaccaccagccccaucuccgagcacgacuaccagaucgggggcuacacggagaagugggagagcggggugaaggacugcgugguccuccacuccuacuucaccagcgacuacuaccagcuguacuccacccagcugagcaccgacacgggcguggagcacgugaccuucuucaucuacaacaagaucgucgacgagcccgaggagcacgugcagauccacaccaucgacggguccagcggcguggucaaccccgugauggagccgaucuacgacgagcccaccacgaccaccagcgugccccucugaggacuaguuauaagacugacuagcccgaugggccucccaacgggcccuccuccccuccuugcaccgagauuaauaaaaaaaaaaaaaaaaaaaaaaaaaaaaaaaaaaaaaaaaaaaaaaaaaaaaaaaaaaaaaaaaugcaucccccccccccccccccccccccccccccccaaaggcucuuuucagagccaccagaauu

SEQ ID NO: 22571 - RNA, 1045 nt, Artificial Sequence
  SARS-CoV-2__MT506535.1__ORF3a protein mRNA gc
aggagaaagcuuaccauggaccuguucaugcgcaucuucaccaucggcaccgugacgcucaagcagggggagaucaaggacgccacccccagcgacuucguccgggccaccgcgaccaucccgauccaggccucccugcccuucggcuggcugaucguggggguggcccuccuggccgucuuccacagcgccuccaagaucaucacgcugaagaagcgcuggcagcucgcgcugagcaagggcgugcacuucgugugcaaccugcuccugcuguucgucaccguguacucccaccuccugcugguggccgccgggcucgaggcccccuuccuguaccuguacgcgcucgucuacuuccugcagagcaucaacuucgugcggaucaucaugcgccuguggcucugcuggaagugccgguccaagaacccccugcuguacgacgccaacuacuuccucugcuggcacaccaacugcuacgacuacugcaucccguacaacagcgugaccuccagcaucgucaucacguccggcgacggcaccaccagccccaucuccgagcacgacuaccagaucgggggcuacaccgagaagugggaguacggggugaaggacugcgugguccugcacagcuacuucacguccgacuacuaccagcuguacagcacccagcucuccaccgacaccggcguggagcacgugacguucuucaucuacaacaagaucgucgacgagcccgaggagcacgugcagauccacaccaucgacgggagcuccggcguggucaaccccgugauggagccgaucuacgacgagcccaccaccacgaccagcgugccccugugaggacuaguuauaagacugacuagcccgaugggccucccaacgggcccuccuccccuccuugcaccgagauuaauaaaaaaaaaaaaaaaaaaaaaaaaaaaaaaaaaaaaaaaaaaaaaaaaaaaaaaaaaaaaaaaaugcaucccccccccccccccccccccccccccccccaaaggcucuuuucagagccaccagaauu

SEQ ID NO: 22572 - RNA, 1045 nt, Artificial Sequence
  SARS-CoV-2__MT506907.1__ORF3a protein mRNA gc
aggagaaagcuuaccauggaccuguucaugcgcaucuucaccaucggcaccgugacgcucaagcagggggagaucaaggacgccacccccagcgacuucguccgggccaccgcgaccaucccgauccaggccucccugcccuucggcuggcugaucguggggguggcccuccuggccgucuuccagagcgccuccaagaucaucacgcugaagaagcgcuggcagcucgcgcugagcaagggcgugcacuucgugugcaaccugcuccugcuguucgucaccguguacucccaccuccugcugguggccgccgggcucgaggcccccuuccuguaccuguacgcgcucgucuacuuccugcagagcaucaacuucgugcggaucaucaugcgccuguggcucugcuggaagugccgguccaagaacccccugcuguacgacgccaacuacuuccucugcuggcacaccaacugcuacgacuacugcaucccguacaacagcgugaccuccagcaucgucaucacguccggcgacggcaccaccagccccaucuccgagcacgacuaccagaucgggggcuacaccgagaagugggagagcggggugaaggacugcgugguccugcacuccuacuucacgagcgacuacuaccagcuguacuccacccagcucagcaccgacaccggcguggagcacgugacguucuucaucuacaacaagaucgucgacgagcccgaggagcacgugcagauccacaccaucgacggguccagcggcguggucaaccccgugauggagccgaucugcgacgagcccaccaccacgaccagcgugccccugugaggacuaguuauaagacugacuagcccgaugggccucccaacgggcccuccuccccuccuugcaccgagauuaauaaaaaaaaaaaaaaaaaaaaaaaaaaaaaaaaaaaaaaaaaaaaaaaaaaaaaaaaaaaaaaaaugcaucccccccccccccccccccccccccccccccaaaggcucuuuucagagccaccagaauu

SEQ ID NO: 22573 - RNA, 1045 nt, Artificial Sequence
  SARS-CoV-2__MT481905.1__ORF3a protein mRNA gc
aggagaaagcuuaccauggaccuguucaugcgcaucuucaccaucggcaccgugacgcucaagcagggggagaucaaggacgccacccccagcgacuucguccgggccaccgcgaccaucccgauccaggccucccugcccuucggcuggcugaucguggggguggcccuccuggccgucuuccacagcgccuccaagaucaucacgcugaagaagcgcuggcagcucgcgcugagcaagggcgugcacuucgugugcaaccugcuccugugguucgucaccguguacucccaccuccugcugguggccgccgggcuggaggcccccuuccucuaccuguacgcgcuggucuacuuccuccagagcaucaacuucgugcggaucaucaugcgccuguggcugugcuggaagugccgguccaagaacccccuccuguacgacgccaacuacuuccugugcuggcacaccaacugcuacgacuacugcaucccguacaacagcgugaccuccagcaucgucaucacguccggcgacggcaccaccagccccaucuccgagcacgacuaccagaucgggggcuacaccgagaagugggagagcggggugaaggacugcgugguccuccacuccuacuucacgagcgacuacuaccagcuguacuccacccagcugagcaccgacaccggcguggagcacgugacguucuucaucuacaacaagaucgucgacgagcccgaggagcacgugcagauccacaccaucgacggguccagcggcguggucaaccccgugauggagccgaucuacgacgagcccaccaccacgaccagcgugccccucugaggacuaguuauaagacugacuagcccgaugggccucccaacgggcccuccuccccuccuugcaccgagauuaauaaaaaaaaaaaaaaaaaaaaaaaaaaaaaaaaaaaaaaaaaaaaaaaaaaaaaaaaaaaaaaaaugcaucccccccccccccccccccccccccccccccaaaggcucuuuucagagccaccagaauu

SEQ ID NO: 22574 - RNA, 1045 nt, Artificial Sequence
  SARS-CoV-2__MT496972.1__ORF3a protein mRNA gc
aggagaaagcuuaccauggaccuguucaugcgcaucuucaccaucggcaccgugacgcucaagcagggggagaucaaggacgccacccccagcgacuucguccgggccaccgcgaccaucccgauccaggccucccugcccuucggcuggcugaucguggggguggcccuccuggccgucuuccacagcgccuccaagaucaucacgcugaagaagcgcuggcagcucgcgcugagcaagggcuuccacuucgugugcaaccugcuccugcuguucgugaccgucuacucccaccuccugcugguggccgccgggcucgaggcccccuuccuguaccuguacgcgcucguguacuuccugcagagcaucaacuucguccggaucaucaugcgccuguggcucugcuggaagugccgguccaagaacccccugcuguacgacgccaacuacuuccucugcuggcacaccaacugcuacgacuacugcaucccguacaacagcgugaccuccagcaucgugaucacguccggcgacggcaccaccagccccaucuccgagcacgacuaccagaucgggggcuacaccgagaagugggagagcggggucaaggacugcguggugcugcacuccuacuucacgagcgacuacuaccagcuguacuccacccagcucagcaccgacaccggcgucgagcacgugacguucuucaucuacaacaagaucguggacgagcccgaggagcacguccagauccacaccaucgacggguccagcggcguggugaaccccgucauggagccgaucuacgacgagcccaccaccacgaccagcgugccccugugaggacuaguuauaagacugacuagcccgaugggccucccaacgggcccuccuccccuccuugcaccgagauuaauaaaaaaaaaaaaaaaaaaaaaaaaaaaaaaaaaaaaaaaaaaaaaaaaaaaaaaaaaaaaaaaaugcaucccccccccccccccccccccccccccccccaaaggcucuuuucagagccaccagaauu

SEQ ID NO: 22575 - RNA, 1045 nt, Artificial Sequence
  SARS-CoV-2__MT496974.1__ORF3a protein mRNA gc
aggagaaagcuuaccauggaccuguucaugcgcaucuucaccaucggcaccgugacgcucaagcagggggagaucaaggacgccacccccagcgacuucguccgggccaccgcgaccaucccgauccaggccucccugcccuucggcuggcugaucguggggguggcccuccuggccgucuuccacagcgccuccaagaucaucacgcugaagaagcgcuggcagcucgcgcugagcaagggcgugcacuucgugugcaaccugcuccugcuguucgucaccguguacucccaccuccugcugguggccgccgggcucgaggcccccuuccuguaccuguacgcgcucgucuacuuccugcagagcaucaacuucgugcggaucaucaugcgccuguggcucugcuggaagugccgguccaagaacccccugcuguacgacagcaacuacuuccucugcuggcacaccaacugcuacgacuacugcaucccguacaacuccgugaccagcuccaucgucaucacgagcggcgacggcaccaccucccccaucagcgagcacgacuaccagaucgggggcuacaccgagaagugggaguccggggugaaggacugcgugguccugcacagcuacuucacguccgacuacuaccagcuguacagcacccagcucuccaccgacaccggcguggagcacgugacguucuucaucuacaacaagaucgucgacgagcccgaggagcacgugcagauccacaccaucgacgggagcagcggcguggucaaccccgugauggagccgaucuacgacgagcccaccaccacgaccuccgugccccugugaggacuaguuauaagacugacuagcccgaugggccucccaacgggcccuccuccccuccuugcaccgagauuaauaaaaaaaaaaaaaaaaaaaaaaaaaaaaaaaaaaaaaaaaaaaaaaaaaaaaaaaaaaaaaaaaugcaucccccccccccccccccccccccccccccccaaaggcucuuuucagagccaccagaauu

SEQ ID NO: 22576 - RNA, 1045 nt, Artificial Sequence
  SARS-CoV-2__MT270114.1__ORF3a protein mRNA gc
aggagaaagcuuaccauggaccuguucaugcgcaucuucaccaucggcaccgugacgcucaagcagggggagaucaaggacgccacccugagcgacuucguccgggccaccgcgaccauccccauccaggccucccugccguucggcuggcucaucguggggguggcccugcuggccgucuuccagagcgccuccaagaucaucacgcucaagaagcgcuggcagcuggcgcugagcaagggcgugcacuucgugugcaaccuccugcugcuguucgucaccguguacucccaccuccugcucguggccgccgggcuggaggcccccuuccuguaccucuacgcgcuggucuacuuccugcagagcaucaacuucgugcggaucaucaugcgccucuggcugugcuggaagugccgguccaagaacccccugcucuacgacgccaacuacuuccugugcuggcacaccaacugcuacgacuacugcauccccuacaacagcgugaccuccagcaucgucaucacguccggcgacggcaccaccagcccgaucuccgagcacgacuaccagaucgggggcuacaccgagaagugggagagcggggugaaggacugcgugguccugcacuccuacuucacgagcgacuacuaccagcucuacuccacccagcugagcaccgacaccggcguggagcacgugacguucuucaucuacaacaagaucgucgacgagcccgaggagcacgugcagauccacaccaucgacggguccagcggcguggucaaccccgugauggagcccaucuacgacgagccgaccaccacgaccagcgugccccugugaggacuaguuauaagacugacuagcccgaugggccucccaacgggcccuccuccccuccuugcaccgagauuaauaaaaaaaaaaaaaaaaaaaaaaaaaaaaaaaaaaaaaaaaaaaaaaaaaaaaaaaaaaaaaaaaugcaucccccccccccccccccccccccccccccccaaaggcucuuuucagagccaccagaauu

SEQ ID NO: 22577 - RNA, 1045 nt, Artificial Sequence
  SARS-CoV-2__MT477842.1__ORF3a protein mRNA gc
aggagaaagcuuaccauggaccuguucaugcgcaucuucaccaucggcaccgugacgcucaagcagggggagaucaaggacgccacccccagcgacuucguccgggccaccgcgaccaucccgauccaggccucccugcccuucggcuggcugaucguggggguggcccuccuggccgucuuccacagcgccuccaagaucaucacgcugaagaagcgcuggcagcucgcgcugagcaagggcgugcacuucgugugcaaccugcuccugcuguucgucaccguguacucccaccuccugcugguggccgccgggcucgaggcccccuuccuguaccuguacgcgcucgucuacuuccugcagagcaucaacuucgugcggaucaucaugcgccuguggcucugcuggaagugccgguccaagaacccccugcuguacgacgccaacuacuuccucugcuggcacaccaacugcuacgacuacugcaucccguacaacagcgugaccuccagcaucgucaucacguccggcgacggcaccaccagccccaucuccgagcacgacuaccagaucgggggcuacaccgagaagugggagagcggggugaaggacugcgugguccugcacuccuacuucacgagcgacuacuaccagcuguacuccacccagcucagcaccgacacgugcguggagcacgugaccuucuucaucuacaacaagaucgucgacgagcccgaggagcacgugcagauccacaccaucgacggcuccagcgggguggucaaccccgugauggagccgaucuacgacgagcccaccaccacgaccagcgugccccugugaggacuaguuauaagacugacuagcccgaugggccucccaacgggcccuccuccccuccuugcaccgagauuaauaaaaaaaaaaaaaaaaaaaaaaaaaaaaaaaaaaaaaaaaaaaaaaaaaaaaaaaaaaaaaaaaugcaucccccccccccccccccccccccccccccccaaaggcucuuuucagagccaccagaauu

SEQ ID NO: 22578 - RNA, 1045 nt, Artificial Sequence
  SARS-CoV-2__MT481929.1__ORF3a protein mRNA gc
aggagaaagcuuaccauggaccuguucaugcgcaucuucaccaucggcaccgugacgcucaagcagggggagaucaaggacgccacccccagcgacuucguccgggccaucgcgaccaucccgauccaggccucccugcccuucggcuggcugaucguggggguggcccuccuggccgucuuccacagcgccuccaagaucaucacccugaagaagcgcuggcagcucgcgcugagcaagggcgugcacuucgugugcaaccugcuccugcuguucgucacgguguacucccaccuccugcugguggccgccgggcucgaggcccccuuccuguaccuguacgcgcucgucuacuuccugcagagcaucaacuucgugcggaucaucaugcgccuguggcucugcuggaagugccgguccaagaacccccugcuguacgacgccaacuacuuccucugcuggcacaccaacugcuacgacuacugcaucccguacaacagcgugaccuccagcaucgucaucaccuccggcgacggcacgaccagccccaucuccgagcacgacuaccagaucgggggcuacaccgagaagugggagagcggggugaaggacugcgugguccugcacuccuacuucaccagcgacuacuaccagcuguacuccacgcagcucagcaccgacaccggcguggagcacgugaccuucuucaucuacaacaagaucgucgacgagcccgaggagcacgugcagauccacacgaucgacggguccagcggcguggucaaccccgugauggagccgaucuacgacgagcccaccaccaccacgagcgugccccugugaggacuaguuauaagacugacuagcccgaugggccucccaacgggcccuccuccccuccuugcaccgagauuaauaaaaaaaaaaaaaaaaaaaaaaaaaaaaaaaaaaaaaaaaaaaaaaaaaaaaaaaaaaaaaaaaugcaucccccccccccccccccccccccccccccccaaaggcucuuuucagagccaccagaauu

SEQ ID NO: 22579 - RNA, 1045 nt, Artificial Sequence
  SARS-CoV-2__MT482131.1__ORF3a protein mRNA gc
aggagaaagcuuaccauggaccuguucaugcgcaucuucaccaucggcaccgugacgcucaagcagggggagaucaaggacgccacccccagcgacuucguccgggccaccgcgaccaucccgauccaggccucccugcccuucggcuggcugaucguggggguggcccuccuggccgucuuccacagcgccuccaagaucaucacgcugaagaagcgcuggcagcucgcgcugagcaagggcgugcacuucgugugcaaccugcuccugcuguucgucaccguguacucccaccuccugcugguggccgacgggcucgaggcccccuuccuguaccuguacgcccucgucuacuuccugcagagcaucaacuucgugcggaucaucaugcgccuguggcucugcuggaagugccgguccaagaacccccugcuguacgacgcgaacuacuuccucugcuggcacaccaacugcuacgacuacugcaucccguacaacagcgugaccuccagcaucgucaucacguccggcgacggcaccaccagccccaucuccgagcacgacuaccagaucgggggcuacaccgagaagugggagagcggggugaaggacugcgugguccugcacuccuacuucacgagcgacuacuaccagcuguacuccacccagcucagcaccgacaccggcguggagcacgugacguucuucaucuacaacaagaucgucgacgagcccgaggagcacgugcagauccacaccaucgacggguccagcggcguggucaaccccgugauggagccgaucuacgacgagcccaccaccacgaccagcgugccccugugaggacuaguuauaagacugacuagcccgaugggccucccaacgggcccuccuccccuccuugcaccgagauuaauaaaaaaaaaaaaaaaaaaaaaaaaaaaaaaaaaaaaaaaaaaaaaaaaaaaaaaaaaaaaaaaaugcaucccccccccccccccccccccccccccccccaaaggcucuuuucagagccaccagaauu

SEQ ID NO: 22580 - RNA, 1045 nt, Artificial Sequence
  SARS-CoV-2__MT482149.1__ORF3a protein mRNA gc
aggagaaagcuuaccauggaccuguucaugcgcaucuucaccaucggcaccgugacgcucaagcagggggagaucaaggacgccacccccagcgacuucguccgggccaccgcgaccaucccgauccaggccucccugcccuucggcuggcugaucguggggguggcccuccuggccgucuuccacagcgccuccaagaucaucacguucaagaagcgcuggcagcuggcgcucagcaagggcgugcacuucgugugcaaccugcugcuccuguucgucaccguguacucccaccuccugcugguggccgccgggcuggaggcccccuuccucuaccuguacgcgcuggucuacuuccuccagagcaucaacuucgugcggaucaucaugcgccuguggcugugcuggaagugccgguccaagaacccccuccuguacgacgccaacuacuuccugugcuggcacaccaacugcuacgacuacugcaucccguacaacagcgugaccuccagcaucgucaucacguccggcgacggcaccaccagccccaucuccgagcacgacuaccagaucgggggcuacaccgagaagugggagagcggggugaaggacugcgugguccuccacuccuacuucacgagcgacuacuaccagcuguacuccacccagcugagcaccgacacgugcguggagcacgugaccuucuucaucuacaacaagaucgucgacgagcccgaggagcacgugcagauccacaccaucgacggcuccagcgggguggucaaccccgugauggagccgaucuacgacgagcccaccaccacgaccagcgugccccucugaggacuaguuauaagacugacuagcccgaugggccucccaacgggcccuccuccccuccuugcaccgagauuaauaaaaaaaaaaaaaaaaaaaaaaaaaaaaaaaaaaaaaaaaaaaaaaaaaaaaaaaaaaaaaaaaugcaucccccccccccccccccccccccccccccccaaaggcucuuuucagagccaccagaauu

SEQ ID NO: 22581 - RNA, 1045 nt, Artificial Sequence
  SARS-CoV-2__MT470120.1__ORF3a protein mRNA gc
aggagaaagcuuaccauggaccuguucaugcgcaucuucaccaucggcaccgugacgcucaagcagggggagaucaaggacgccacccccagcgacuucguccgggccaccgcgaccaucccgauccaggccucccugcccuucggcuggcugaucguggggguggcccuccuggccgucuuccacagcgccuccaagaucaucacgcugaagaagcgcuggcagcucgcgcugagcaagggcgugcacuucgugugcaaccugcuccugcuguucgucaccguguacucccaccuccugcugguggccgccgggcucgaggcccccuuccuguaccuguacgcgcucgucuacuuccugcagagcaucaacuucgugcggaucaucaugcgccuguggcucugcuggaagugccgguccaagaacccccugcuguacgacgccaacuacuuccucugcuggcacaccaacugcuacgacuacugcaucccguacaacagcgugaccuccagcaucgucaucacguccggcgacggcaccaccagccccaucuccgagcacgacuaccagaucgggggcuacaccgagaagugggagagcggggugaaggacugcgugguccugcacuccuacuucacgagcgacuacuaccagcuguacuccacccagcucagcaccgacaccggcguggagcacgugacguucuucaucuacaacaagaucuucgacgagcccgaggagcacguccagauccacaccaucgacggguccagcggcguggugaaccccgucauggagccgaucuacgacgagcccaccaccacgaccagcgugccccugugaggacuaguuauaagacugacuagcccgaugggccucccaacgggcccuccuccccuccuugcaccgagauuaauaaaaaaaaaaaaaaaaaaaaaaaaaaaaaaaaaaaaaaaaaaaaaaaaaaaaaaaaaaaaaaaaugcaucccccccccccccccccccccccccccccccaaaggcucuuuucagagccaccagaauu

SEQ ID NO: 22582 - RNA, 1045 nt, Artificial Sequence
  SARS-CoV-2__MT470125.1__ORF3a protein mRNA gc
aggagaaagcuuaccauggaccuguucaugcgcaucuucaccaucggcaccgugacgcucaagcagggggagaucaaggacgccacccccagcgacuucguccgggccaccgcgaccaucccgauccaggccucccugcccuucggcuggcugaucguggggguggcccuccuggccgucuuccagagcgccuccaagaucaucacgcugaagaagcgcuggcagcucgcguucagcaagggcgugcacuucgugugcaaccugcugcuccuguucgucaccguguacucccaccuccugcugguggccgccgggcuggaggcccccuuccucuaccuguacgcgcuggucuacuuccuccagagcaucaacuucgugcggaucaucaugcgccuguggcugugcuggaagugccgguccaagaacccccuccuguacgacgccaacuacuuccugugcuggcacaccaacugcuacgacuacugcaucccguacaacagcgugaccuccagcaucgucaucacguccggcgacggcaccaccagccccaucuccgagcacgacuaccagaucgggggcuacaccgagaagugggagagcggggugaaggacugcgugguccuccacuccuacuucacgagcgacuacuaccagcuguacuccacccagcugagcaccgacaccggcguggagcacgugacguucuucaucuacaacaagaucgucgacgagcccgaggagcacgugcagauccacaccaucgacggguccagcggcguggucaaccccgugauggagccgaucuacgacgagcccaccaccacgaccagcgugccccucugaggacuaguuauaagacugacuagcccgaugggccucccaacgggcccuccuccccuccuugcaccgagauuaauaaaaaaaaaaaaaaaaaaaaaaaaaaaaaaaaaaaaaaaaaaaaaaaaaaaaaaaaaaaaaaaaugcaucccccccccccccccccccccccccccccccaaaggcucuuuucagagccaccagaauu

SEQ ID NO: 22583 - RNA, 1045 nt, Artificial Sequence
  SARS-CoV-2__MT470132.1__ORF3a protein mRNA gc
aggagaaagcuuaccauggaccuguucaugcgcaucuucaccaucggcaccgugacgcucaagcagggggagaucaaggacgccacccccagcgacuucguccgggccaccgcgaccaucccgauccaggccucccugcccuucggcuggcugaucguggggguggcccuccuggccgucuuccacagcgccuccaagaucaucacgcugaagaagcgcuggcagcucgcgcugagcaagggcgugcacuucgugugcaaccugcuccugcuguucgucaccguguacucccaccuccugcugguggccgucgggcucgaggcccccuuccuguaccuguacgcccucguguacuuccugcagagcaucaacuucgugcggaucaucaugcgccuguggcucugcuggaagugccgguccaagaacccccugcuguacgacgcgaacuacuuccucugcuggcacaccaacugcuacgacuacugcaucccguacaacagcgucaccuccagcaucgugaucacguccggcgacggcaccaccagccccaucuccgagcacgacuaccagaucgggggcuacaccgagaagugggagagcggggugaaggacugcgucgugcugcacuccuacuucacgagcgacuacuaccagcuguacuccacccagcucagcaccgacaccggcguggagcacgucacguucuucaucuacaacaagaucguggacgagcccgaggagcacgugcagauccacaccaucgacggguccagcggcgucgugaaccccgugauggagccgaucuacgacgagcccaccaccacgaccagcgucccccugugaggacuaguuauaagacugacuagcccgaugggccucccaacgggcccuccuccccuccuugcaccgagauuaauaaaaaaaaaaaaaaaaaaaaaaaaaaaaaaaaaaaaaaaaaaaaaaaaaaaaaaaaaaaaaaaaugcaucccccccccccccccccccccccccccccccaaaggcucuuuucagagccaccagaauu

SEQ ID NO: 22584 - RNA, 1045 nt, Artificial Sequence
  SARS-CoV-2__MT470135.1__ORF3a protein mRNA gc
aggagaaagcuuaccauggaccuguucaugcgcaucuucaccaucggcaccgugacgcucaagcagggggagaucaaggacgccacccccagcgacuucguccgggccaccgcgaccaucccgauccaggccucccugcccuucggcuggcugaucguggggguggcccuccuggccgucuuccacagcgccuccaagaucaucacgcugaagaagcgcuggcagcucgcgcugagcaagggcgugcacuucgugugcaaccugcuccugcuguucgucaccguguacucccaccuccugcugguggccgccgggcucgaggcccccuuccuguaccuguacgcgcucgucuacuuccugcagagcaucaacuucgugcggaucaucaugcgccuguggcucugcuggaagugccgguccaagaacccccugcuguacgacgccaacuacuuccucugcuggcacaccaacugcugcgacuacugcaucccguacaacagcgugaccuccagcaucgucaucacguccggcgacggcaccaccagccccaucuccgagcacgacuaccagaucgggggcuacaccgagaagugggagagcggggugaaggacugcgugguccugcacuccuacuucacgagcgacuacuaccagcuguacuccacccagcucagcaccgacaccggcguggagcacgugacguucuucaucuacaacaagaucgucgacgagcccgaggagcacgugcagauccacaccaucgacggguccagcggcguggucaaccccgugauggagccgaucuacgacgagcccaccaccacgaccagcgugccccugugaggacuaguuauaagacugacuagcccgaugggccucccaacgggcccuccuccccuccuugcaccgagauuaauaaaaaaaaaaaaaaaaaaaaaaaaaaaaaaaaaaaaaaaaaaaaaaaaaaaaaaaaaaaaaaaaugcaucccccccccccccccccccccccccccccccaaaggcucuuuucagagccaccagaauu

SEQ ID NO: 22585 - RNA, 1045 nt, Artificial Sequence
  SARS-CoV-2__MT470172.1__ORF3a protein mRNA gc
aggagaaagcuuaccauggaccuguucaugcgcaucuucaccaucggcaccgugacgcucaagcagggggagaucaaggacgccacccccagcgacuucguccgggccaccuccaccaucccgauccaggcgagccugcccuucggcuggcugaucguggggguggcccuccuggccgucuuccacuccgccagcaagaucaucacgcugaagaagcgcuggcagcucgcccuguccaagggcgugcacuucgugugcaaccugcuccugcuguucgucaccguguacagccaccuccugcugguggcggccgggcucgaggcccccuuccuguaccuguacgcccucgucuacuuccugcaguccaucaacuucgugcggaucaucaugcgccuguggcucugcuggaagugccggagcaagaacccccugcuguacgacgcgaacuacuuccucugcuggcacaccaacugcuacgacuacugcaucccguacaacuccgugaccagcuccaucgucaucacgagcggcgacggcaccaccucccccaucagcgagcacgacuaccagaucgggggcuacaccgagaagugggaguccggggugaaggacugcgugguccugcacagcuacuucacguccgacuacuaccagcuguacagcacccagcucuccaccgacaccggcguggagcacgugacguucuucaucuacaacaagaucgucgacgagcccgaggagcacgugcagauccacaccaucgacgggagcagcggcguggucaaccccgugauggagccgaucuacgacgagcccaccaccacgaccuccgugccccugugaggacuaguuauaagacugacuagcccgaugggccucccaacgggcccuccuccccuccuugcaccgagauuaauaaaaaaaaaaaaaaaaaaaaaaaaaaaaaaaaaaaaaaaaaaaaaaaaaaaaaaaaaaaaaaaaugcaucccccccccccccccccccccccccccccccaaaggcucuuuucagagccaccagaauu

SEQ ID NO: 22586 - RNA, 1045 nt, Artificial Sequence
  SARS-CoV-2__MT459865.1__ORF3a protein mRNA gc
aggagaaagcuuaccauggaccuguucaugcgcaucuucaccaucggcaccgugacgcucaagcagggggagaucaaggacgccacccccagcgacuucguccgggccaccgcgaccaucccgauccaggccucccugcccuucggcuggcugaucguggggguggcccuccuggccgucuuccagagcgccuccaagaucaucacgcugaagaagcgcuggcagcucgcgcugagcaagggcgugcacuucgugugcaaccugcuccugcuguucgucaccguguacucccaccuccugcugguggccgccgggcucgaggcccccuuccuguaccuguacgcgcucgucuacuuccugcagagcaucaacuucgugcggaucaucaugcgccuguggcucugcuggaagugccgguccaagaacccccugcuguacgacgccaacuacuuccucugcuggcacaccaacugcuacgacuacugcaucccguacaacagcgugaccuccagcaucgucaucacguccggcgacggcaccaccagccccaucuccgagcacgacuaccagaucgggggcuacaccgagaagugggagagcggggugaaggacugcgugguccugcacuccuacuucacgagcgacuacuaccagcuguacuccacccagcucagcaccgacaccggcguggagcacgugacguucuucaucuacaacaagaucgucgacgagcccgaggagcacgugcagauccacaccaucgacguguccagcggggucgugaaccccgugaucgagccgaucuacgacgagcccaccaccacgaccagcgucccccugugaggacuaguuauaagacugacuagcccgaugggccucccaacgggcccuccuccccuccuugcaccgagauuaauaaaaaaaaaaaaaaaaaaaaaaaaaaaaaaaaaaaaaaaaaaaaaaaaaaaaaaaaaaaaaaaaugcaucccccccccccccccccccccccccccccccaaaggcucuuuucagagccaccagaauu

SEQ ID NO: 22587 - RNA, 1045 nt, Artificial Sequence
  SARS-CoV-2__MT459903.1__ORF3a protein mRNA gc
aggagaaagcuuaccauggaccuguucaugcgcaucuucaccaucggcaccgugacgcucaagcagggggagaucaaggacgccacccccagcgacuucguccgggccaccgcgaccaucccgauccaggccucccugcccuucggcuggcugaucguggggguggcccuccuggccgucuuccagagcgccuccaagaucaucacgcugaagaagcgcuggcagcucgcgcugagcaagggcgugcacuucgugugcaaccugcuccugcuguucgucaccguguacucccaccuccugcugguggccgccgggcucgaggcccccuuccuguaccuguacgcgcucgucuacuuccugcagagcaucaacuucgugcggaucaucaugcgccuguggcucugcuggaagugccgguccaagaacccccugcuguacgacgccaacuacuuccucugcuggcacaccaacugcuacgacuacugcaucccguacaacagcgugaccuccagcaucgucaucacguccggcgacggcaccaccagccccaucuccgagcacgacuaccagaucgggggcuacaccgagaagugggagagcggggugaaggacugcgugguccugcacuccuacuucacgagcgacuacuaccagcuguacuccacccagcucagcaccgacaccggcguggagcacgugacguucuucaucuacaacaagaucgucgacgagcccguggagcacgugcagauccacaccaucgacggguccagcggcgucgugaaccccgugauggagccgaucuacgacgagcccaccaccacgaccagcgucccccugugaggacuaguuauaagacugacuagcccgaugggccucccaacgggcccuccuccccuccuugcaccgagauuaauaaaaaaaaaaaaaaaaaaaaaaaaaaaaaaaaaaaaaaaaaaaaaaaaaaaaaaaaaaaaaaaaugcaucccccccccccccccccccccccccccccccaaaggcucuuuucagagccaccagaauu

SEQ ID NO: 22588 - RNA, 1045 nt, Artificial Sequence
  SARS-CoV-2__MT461646.1__ORF3a protein mRNA gc
aggagaaagcuuaccauggaccuguucaugcgcaucuucaccaucggcaccgugacgcucaagcagggggagaucaaggacgccacccccagcgacuucguccgggccaccgcgaccaucccgauccaggccucccugcccuucggcuggcugaucguggggguggcccuccuggccgucuuccacagcgccuccaagaucaucacgcugaagaagcgcuggcagcucgcgcugagcaagggcgugcacuucgugugcaaccugcuccugcuguucgucaccguguacucccaccuccugcugguggccgccgggcucgaggcccccuuccuguaccuguacgcgagcgucuacuuccuccaguccaucaacuucgugcggaucaucaugcgccuguggcugugcuggaagugccggagcaagaacccccuccuguacgacgccaacuacuuccugugcuggcacaccaacugcuacgacuacugcaucccguacaacuccgugaccagcuccaucgucaucacgagcggcgacggcaccaccucccccaucagcgagcacgacuaccagaucgggggcuacaccgagaagugggaguccggggugaaggacugcgugguccuccacagcuacuucacguccgacuacuaccagcuguacagcacccagcuguccaccgacaccggcguggagcacgugacguucuucaucuacaacaagaucgucgacgagcccgaggagcacgugcagauccacaccaucgacgggagcagcggcguggucaaccccgugauggagccgaucuacgacgagcccaccaccacgaccuccgugccccucugaggacuaguuauaagacugacuagcccgaugggccucccaacgggcccuccuccccuccuugcaccgagauuaauaaaaaaaaaaaaaaaaaaaaaaaaaaaaaaaaaaaaaaaaaaaaaaaaaaaaaaaaaaaaaaaaugcaucccccccccccccccccccccccccccccccaaaggcucuuuucagagccaccagaauu

SEQ ID NO: 22589 - RNA, 1045 nt, Artificial Sequence
  SARS-CoV-2__MT457392.1__ORF3a protein mRNA gc
aggagaaagcuuaccauggaccuguucaugcgcaucuucaccaucggcaccgugacgcucaagcagggggagaucaaggacgccacccccagcgacuucguccgggccaccgcgaccaucccgauccaggccucccugcccuucggcuggcugaucguggggguggcccuccuggccgucuuccagagcgccuccaagaucaucacgcugaagaagcgcuggcagcucgcgcugagcaagggcgugcacuucgugugcaaccugcuccugcuguucgucaccguguacucccaccuccugcugguggccgccgggcucgaggcccccuuccuguaccuguacgcgcucgucuacuuccugcagagcaucaacuucgugcggaucaucaugcgccuguggcucugcuggaagugccgguccaagaacccccugcuguacgacgccaacuacuuccucugcuggcacaccaacugcuacgacuacugcaucccguacaacagcgugaccuccagcaucgucaucacguccggcgacggcaccaccagccccaucuccgagcacgacuaccagaucgggggcuacaccgagaagugggagagcggggugaaggacugcgugguccugcacuccuacuucacgagcgacuacuaccagcuguacuccacccaggugagcaccgacaccggcguggagcacgucacguucuucaucuacaacaagaucguggacgagcccgaggagcacgugcagauccacaccaucgacggguccagcggcgucgugaaccccgugauggagccgaucuacgacgagcccaccaccacgaccagcgucccccucugaggacuaguuauaagacugacuagcccgaugggccucccaacgggcccuccuccccuccuugcaccgagauuaauaaaaaaaaaaaaaaaaaaaaaaaaaaaaaaaaaaaaaaaaaaaaaaaaaaaaaaaaaaaaaaaaugcaucccccccccccccccccccccccccccccccaaaggcucuuuucagagccaccagaauu

SEQ ID NO: 22590 - RNA, 1045 nt, Artificial Sequence
  SARS-CoV-2__MT457396.1__ORF3a protein mRNA gc
aggagaaagcuuaccauggaccuguucaugcgcaucuucaccaucggcaccgugacgcucaagcagggggagaucaaggacgccacccccagcgacuucguccgggccaccgcggccaucccgauccaggccucccugcccuucggcuggcugaucguggggguggcccuccuggccgucuuccagagcgcguccaagaucaucacccugaagaagcgcuggcagcucgcccugagcaagggcgugcacuucgugugcaaccugcuccugcuguucgucacgguguacucccaccuccugcugguggccgccgggcucgaggcgcccuuccuguaccuguacgcccucgucuacuuccugcagagcaucaacuucgugcggaucaucaugcgccuguggcucugcuggaagugccgguccaagaacccccugcuguacgacgccaacuacuuccucugcuggcacaccaacugcuacgacuacugcaucccguacaacagcgugaccuccagcaucgucaucaccuccggcgacggcacgaccagccccaucuccgagcacgacuaccagaucgggggcuacaccgagaagugggagagcggggugaaggacugcgugguccugcacuccuacuucaccagcgacuacuaccagcuguacuccacgcagcucagcaccgacaccggcguggagcacgugaccuucuucaucuacaacaagaucgucgacgagcccgaggagcacgugcagauccacacgaucgacggguccagcggcguggucaaccccgugauggagccgaucuacgacgagcccaccaccaccacgagcgugccccugugaggacuaguuauaagacugacuagcccgaugggccucccaacgggcccuccuccccuccuugcaccgagauuaauaaaaaaaaaaaaaaaaaaaaaaaaaaaaaaaaaaaaaaaaaaaaaaaaaaaaaaaaaaaaaaaaugcaucccccccccccccccccccccccccccccccaaaggcucuuuucagagccaccagaauu

SEQ ID NO: 22591 - RNA, 1048 nt, Artificial Sequence
  SARS-CoV-2__MT449656.1__ORF3a protein mRNA gc
aggagaaagcuuaccauggaccuguucaugcgcaucuucaccaucggcaccgugacgcucaagcagggggagaucaaggacgccacccccagcgacuucguccgggccaccgcgaccaucccgauccaggccucccugcccuucggcuggcugaucguggggguggcccuccuggccgucuuccagagcgccuccaagaucaucacgcugaagaagcgcuggcagcucgcgcugagcaagggcgugcacuucgugugcaaccugcuccugcuguucgucaccguguacucccaccuccugcugguggccgccgggcucgaggcccccuuccuguaccuguacgcgcucgucuacuuccugcagagcaucaacuucgugcggaucaucaugcgccuguggcucugcuggaagugccgguccaagaacccccugcuguacgacgccaacuacuuccucugcuggcacaccaacugcuacgacuacugcaucccguacaacagcgugaccuccagcaucgucaucacguccggcgacggcaccaccagccccaucuccgagcacgacuaccagaucgggggcuacaccgagaagugggagagcggggugaaggacugcgugguccugcacuccuacuucacgagcgacuacuaccagcuguacuccacccagcucagcaccgacaccggcguggagcacgugacguucuucuucaucuacaacaagaucgucgacgagcccgaggagcacgugcagauccacaccaucgacggguccagcggcguggucaaccccgugauggagccgaucuacgacgagcccaccaccacgaccagcgugccccugugaggacuaguuauaagacugacuagcccgaugggccucccaacgggcccuccuccccuccuugcaccgagauuaauaaaaaaaaaaaaaaaaaaaaaaaaaaaaaaaaaaaaaaaaaaaaaaaaaaaaaaaaaaaaaaaaugcaucccccccccccccccccccccccccccccccaaaggcucuuuucagagccaccagaauu

SEQ ID NO: 22592 - RNA, 1045 nt, Artificial Sequence
  SARS-CoV-2__MT451195.1__ORF3a protein mRNA gc
aggagaaagcuuaccauggaccuguucaugcgcaucuucaccaucggcacccucacgcugaagcagggggagaucaaggacgccacccccagcgacuucgugcgggccaccgcgaccaucccgauccaggccucccugcccuucggcuggcucaucgucgggguggcccugcuggccguguuccagagcgccuccaagaucaucacgcucaagaagcgcuggcagcuggcgcugagcaagggcguccacuucgugugcaaccuccugcugcuguucgugaccgucuacucccaccuccugcucguggccgccgggcuggaggcccccuuccuguaccucuacgcgcugguguacuuccugcagagcaucaacuucguccggaucaucaugcgccucuggcugugcuggaagugccgguccaagaacccccugcucuacgacgccaacuacuuccugugcuggcacaccaacugcuacgacuacugcaucccguacaacagcgugaccuccagcaucgugaucacguccggcgacggcaucaccagccccaucuccgagcacgacuaccagaucgggggcuacaccgagaagugggagagcggggucaaggacugcguggugcugcacuccuacuucaccagcgacuacuaccagcucuacuccacgcagcugagcaccgacaccggcgucgagcacgugaccuucuucaucuacaacaagaucguggacgagcccgaggagcacguccagauccacacgaucgacggguccagcggcguggugaaccccgucauggagccgaucuacgacgagcccaccaccaccacgagcgugccccugugaggacuaguuauaagacugacuagcccgaugggccucccaacgggcccuccuccccuccuugcaccgagauuaauaaaaaaaaaaaaaaaaaaaaaaaaaaaaaaaaaaaaaaaaaaaaaaaaaaaaaaaaaaaaaaaaugcaucccccccccccccccccccccccccccccccaaaggcucuuuucagagccaccagaauu

SEQ ID NO: 22593 - RNA, 1045 nt, Artificial Sequence
  SARS-CoV-2__MT451231.1__ORF3a protein mRNA gc
aggagaaagcuuaccauggaccuguucaugcgcaucuucaccaucggcacccucacgcugaagcagggggagaucaaggacgccacccccagcgacuucgugcgggccaccgcgaccaucccgauccaggccucccugcccuucggcuggcucaucgucgggguggcccugcuggccguguuccagagcgccuccaagaucaucacgcucaagaagcgcuggcagcuggcgcugagcaagggcgucuacuucgugugcaaccuccugcugcuguucgugaccgucuacucccaccuccugcucguggccgccgggcuggaggcccccuuccuguaccucuacgcgcugguguacuuccugcagagcaucaacuucguccggaucaucaugcgccucuggcugugcuggaagugccgguccaagaacccccugcucuacgacgccaacuacuuccugugcuggcacaccaacugcuacgacuacugcaucccguacaacagcgugaccuccagcaucgugaucacguccggcgacggcaccaccagccccaucuccgagcacgacuaccagaucgggggcuacaccgagaagugggagagcggggucaaggacugcguggugcugcacuccuacuucacgagcgacuacuaccagcucuacuccacccagcugagcaccgacaccggcgucgagcacgugacguucuucaucuacaacaagaucguggacgagcccgaggagcacguccagauccacaccaucgacggguccagcggcguggugaaccccgucauggagccgaucuacgacgagcccaccaccacgaccagcgugccccugugaggacuaguuauaagacugacuagcccgaugggccucccaacgggcccuccuccccuccuugcaccgagauuaauaaaaaaaaaaaaaaaaaaaaaaaaaaaaaaaaaaaaaaaaaaaaaaaaaaaaaaaaaaaaaaaaugcaucccccccccccccccccccccccccccccccaaaggcucuuuucagagccaccagaauu

SEQ ID NO: 22594 - RNA, 1045 nt, Artificial Sequence
  SARS-CoV-2__MT451255.1__ORF3a protein mRNA gc
aggagaaagcuuaccauggaccuguucaugcgcaucuucaccaucggcaccgugacgcucaagcagggggagaucaaggacgccacccccagcgacuucguccgggccaccgcgaccaucccgauccaggccucccugcccuucggcuggcugaucguggggguggccauccucgccgucuuccagagcgccuccaagaucaucacgcugaagaagcgcuggcagcuggcgcucagcaagggcgugcacuucgugugcaaccugcugcuccuguucgucaccguguacucccaccuccugcugguggccgccgggcuggaggcccccuuccucuaccuguacgcgcuggucuacuuccuccagagcaucaacuucgugcggaucaucaugcgccuguggcugugcuggaagugccgguccaagaacccccuccuguacgacgccaacuacuuccugugcuggcacaccaacugcuacgacuacugcaucccguacaacagcgugaccuccagcaucgucaucacguccggcgacggcaccaccagccccaucuccgagcacgacuaccagaucgggggcuacaccgagaagugggagagcggggugaaggacugcgugguccuccacuccuacuucacgagcgacuacuaccagcuguacuccacccagcugagcaccgacaccggcguggagcacgugacguucuucaucuacaacaagaucgucgacgagcccgaggagcacgugcagauccacaccaucgacggguccagcggcguggucaaccccgugauggagccgaucuacgacgagcccaccaccacgaccagcgugccccucugaggacuaguuauaagacugacuagcccgaugggccucccaacgggcccuccuccccuccuugcaccgagauuaauaaaaaaaaaaaaaaaaaaaaaaaaaaaaaaaaaaaaaaaaaaaaaaaaaaaaaaaaaaaaaaaaugcaucccccccccccccccccccccccccccccccaaaggcucuuuucagagccaccagaauu

SEQ ID NO: 22595 - RNA, 1045 nt, Artificial Sequence
  SARS-CoV-2__MT451755.1__ORF3a protein mRNA gc
aggagaaagcuuaccauggaccuguucaugcgcaucuucaccaucggcaccgugacgcucaagcagggggagaucaaggacgccacccccagcgacuucguccgggccaccgcgaccaucccgauccaggccucccugcccuucggcuggcugaucguggggguggcccuccuggccgucuuccacagcgccuccaagaucaucacgcugaagaagcgcuggcagcucgcgcugagcaagggcgugcacuucgugugcaaccugcuccugcuguucgucaccguguacucccaccuccugcugguggccgccgggcucgaggcccccuuccuguaccuguacgcgcucgucuacuuccugcagagcaucaacuucgugcggaucaucaugcgccuguggcucugcuggaagugccgguccaagaacccccuguucuacgacgccaacuacuuccugugcuggcacaccaacugcuacgacuacugcaucccguacaacagcgugaccuccagcaucgucaucacguccggcgacggcaccaccagccccaucuccgagcacgacuaccagaucgggggcuacaccgagaagugggagagcggggugaaggacugcgugguccuccacuccuacuucacgagcgacuacuaccagcuguacuccacccagcugagcaccgacaccggcguggagcacgugacguucuucaucuacaacaagaucgucgacgagcccgaggagcacgugcagauccacaccaucgacggguccagcggcguggucaaccccgugauggagccgaucuacgacgagcccaccaccacgaccagcgugccccucugaggacuaguuauaagacugacuagcccgaugggccucccaacgggcccuccuccccuccuugcaccgagauuaauaaaaaaaaaaaaaaaaaaaaaaaaaaaaaaaaaaaaaaaaaaaaaaaaaaaaaaaaaaaaaaaaugcaucccccccccccccccccccccccccccccccaaaggcucuuuucagagccaccagaauu

SEQ ID NO: 22596 - RNA, 1045 nt, Artificial Sequence
  SARS-CoV-2__MT446345.1__ORF3a protein mRNA gc
aggagaaagcuuaccauggaccuguucaugcgcaucuucaccaucggcaccgugacgcucaagcagggggagaucaaggacgccacccccagcgacuucguccgggccaccgcgaccaucccgauccaggccucccugcccuucggcuggcugaucguggggguggcccuccuggccgucuuccacagcgccuccaagaucaucacgcugaagaagcgcuggcagcucgcgcugagcaagggcgugcacuucgugugcaaccugcuccugcuguucgucaccguguacucccaccuccugcugguggccgccgggcucgaggcccccuucuucuaccuguacgcgcuggucuacuuccuccagagcaucaacuucgugcggaucaucaugcgccuguggcugugcuggaagugccgguccaagaacccccuccuguacgacgccaacuacuuccugugcuggcacaccaacugcuacgacuacugcaucccguacaacagcgugaccuccagcaucgucaucacguccggcgacggcaccaccagccccaucuccgagcacgacuaccagaucgggggcuacaccgagaagugggagagcggggugaaggacugcgugguccuccacuccuacuucacgagcgacuacuaccagcuguacuccacccagcugagcaccgacaccggcguggagcacgugacguucuucaucuacaacaagaucgucgacgagcccgaggagcacgugcagauccacaccaucgacggguccagcggcguggucaaccccgugauggagccgaucuacgacgagcccaccaccacgaccagcgugccccucugaggacuaguuauaagacugacuagcccgaugggccucccaacgggcccuccuccccuccuugcaccgagauuaauaaaaaaaaaaaaaaaaaaaaaaaaaaaaaaaaaaaaaaaaaaaaaaaaaaaaaaaaaaaaaaaaugcaucccccccccccccccccccccccccccccccaaaggcucuuuucagagccaccagaauu

SEQ ID NO: 22597 - RNA, 1045 nt, Artificial Sequence
  SARS-CoV-2__MT439244.1__ORF3a protein mRNA gc
aggagaaagcuuaccauggaccuguucaugcgcaucuucaccaucggcaccgugacgcucaagcagggggagaucaaggacgccacccccagcgacuucguccgggccaccgcgaccaucccgauccaggccucccugcccuucggcuggcugaucguggggguggcccuccuggccgucuuccacagcgccuccaagaucaucacgcugaagaagcgcuggcagcucgcgcugagcaagggcgugcacuucgugugcaaccugcuccugcuguucgucaccguguacucccaccuccugcugguggccgccgggcucgaggcccccuuccuguaccuguacgcgcucgucuacuuccugcagagcaucaacuucgugcggaucaucaugcgccuguggcucugcuggaagugccgguccaagaacccccugcuguacgacgccaacuacuuccucugcuggcacaccaacugcuacgacuacugcaucccguacaacagcgugaccuccagcaucgucaucacguccggcgacggcaccaccagccccaucuccgagcacgacuaccagaucgggggcuacaccgagaagugggagagcggggugaaggacugcgugguccugcacuccuacuucacgagcgacuacuaccagcuguacuccacccagcucagcaccgacaucggcguggagcacgugaccuucuucaucuacaacaagaucgucgacgagcccgaggagcacgugcagauccacacgaucgacggguccagcggcguggucaaccccgugauggagccgaucuacgacgagcccaccaccaccacgagcgugccccugugaggacuaguuauaagacugacuagcccgaugggccucccaacgggcccuccuccccuccuugcaccgagauuaauaaaaaaaaaaaaaaaaaaaaaaaaaaaaaaaaaaaaaaaaaaaaaaaaaaaaaaaaaaaaaaaaugcaucccccccccccccccccccccccccccccccaaaggcucuuuucagagccaccagaauu

SEQ ID NO: 22598 - RNA, 1045 nt, Artificial Sequence
  SARS-CoV-2__MT418882.1__ORF3a protein mRNA gc
aggagaaagcuuaccauggaccuguucaugcgcaucuucaccaucggcaccgugacgcucaagcagggggagaucaaggacgccacccccagcgacuucguccgggccaccgcgaccaucccgauccaggccucccugcccuucggcuggcugaucguggggguggcccuccuggccgucuuccacagcgccuccaagaucaucacgcugaagaagcgcuggcagcucgcgcugagcaagggcgugcacuucgugugcaaccugcuccugcuguucgucaccguguacucccaccuccugcugguggccgccgggcucgaggcccccuuccuguaccuguacgcgcucgucuacuuccugcagagcaucaacuucgugcggaucaucaugcgccuguggcucugcuggaagugccgguccaagaacccccugcuguacgacgccaacuacuuccucugcuggcacaccaacugcuacgacuacugcaucccguacaacagcgugaccuccagcaucgucaucacguccggcgacggcaccaucagccccaucuccgagcacgacuaccagaucgggggcuacaccgagaagugggagagcggggugaaggacugcgugguccugcacuccuacuucaccagcgacuacuaccagcuguacuccacgcagcucagcaccgacaccggcguggagcacgugaccuucuucaucuacaacaagaucgucgacgagcccgaggagcacgugcagauccacacgaucgacggguccagcggcguggucaaccccgugauggagccgaucuacgacgagcccaccaccaccacgagcgugccccugugaggacuaguuauaagacugacuagcccgaugggccucccaacgggcccuccuccccuccuugcaccgagauuaauaaaaaaaaaaaaaaaaaaaaaaaaaaaaaaaaaaaaaaaaaaaaaaaaaaaaaaaaaaaaaaaaugcaucccccccccccccccccccccccccccccccaaaggcucuuuucagagccaccagaauu
